United States Patent Application Publication US 2024/0327476 A1 - sequence listing, part 32

SEQ ID NO: 37458 - protein, 603 aa, Homo sapiens
MAIEQSLADKTRGPTTAEATASACTNRQPAHFYPWTRSTAPPESSPARAPMGLFQGVMQKYSSSLFKTSQLAPADPLIKAIKDGDEEALKTMIKEGKNLAEPNKEGWLPLHEAAYYGQVGCLKVLQRAYPGTIDQRTLQEETAVYLATCRGHLDCLLSLLQAGAEPDISNKSRETPLYKACERKNAEAVKILVQHNADTNHRCNRGWTALHESVSRNDLEVMQILVSGGAKVESKNAYGITPLFVAAQSGQLEALRFLAKYGADINTQASDNASALYEACKNEHEEVVEFLLSQGADANKTNKDGLLPLHIASKKGNYRIVQMLLPVTSRTRIRRSGVSPLHLAAERNHDEVLEALLSARFDVNTPLAPERARLYEDRRSSALYFAVVNNNVYATELLLQHGADPNRDVISPLLVAIRHGCLRTMQLLLDHGANIDAYIATHPTAFPATIMFAMKCLSLLKFLMDLGCDGEPCFSCLYGNGPHPPAPQPSSRFNDAPAADKEPSVVQFCEFVSAPEVSRWAGPIIDVLLDYVGNVQLCSRLKEHIDSFEDWAVIKEKAEPPRPLAHLCRLRVRKAIGKYRIKLLDTLPLPGRLIRYLKYENTQ

SEQ ID NO: 37459 - protein, 489 aa, Homo sapiens
MRPADPLIKAIKDGDEEALKTMIKEGKNLAEPNKEGWLPLHEAAYYGQVGCLKVLQRAYPGTIDQRTLQEETAVYLATCRGHLDCLLSLLQAGAEPDISNKSRETPLYKACERKNAEAVKILVQHNADTNHRCNRGWTALHESVSRNDLEVMQILVSGGAKVESKNAYGITPLFVAAQSGQLEALRFLAKYGADINTQASDNASALYEACKNEHEEVVEFLLSQGADANKTNKDGLLPLHIASKKGNYRIVQMLLPVTSRTRIRRSGVSPLHLAAERNHDEVLEALLSARFDVNTPLAPERARLYEDRRSSALYFAVVNNNVYATELLLQHGADPNRDVISPLLVAIRHGCLRTMQLLLDHGANIDAYIATHPTAFPATIMFAMKCLSLLKFLMDLGCDGEPCFSCLYGNGPHPPAPQPSSRFNDAPAADKEPSVVQFCEFVSAPEVSRWAGPIIDVLLDYVGNVQLCSRLKEHIDSFEDWVLEGFVKY

SEQ ID NO: 37460 - protein, 635 aa, Homo sapiens
MATQISTRGSQCTIGQEEYSLYSSLSEDELVQMAIEQSLADKTRGPTTAEATASACTNRQPAHFYPWTRSTAPPESSPARAPMGLFQGVMQKYSSSLFKTSQLAPADPLIKAIKDGDEEALKTMIKEGKNLAEPNKEGWLPLHEAAYYGQVGCLKVLQRAYPGTIDQRTLQEETAVYLATCRGHLDCLLSLLQAGAEPDISNKSRETPLYKACERKNAEAVKILVQHNADTNHRCNRGWTALHESVSRNDLEVMQILVSGGAKVESKNAYGITPLFVAAQSGQLEALRFLAKYGADINTQASDNASALYEACKNEHEEVVEFLLSQGADANKTNKDGLLPLHIASKKGNYRIVQMLLPVTSRTRIRRSGVSPLHLAAERNHDEVLEALLSARFDVNTPLAPERARLYEDRRSSALYFAVVNNNVYATELLLQHGADPNRDVISPLLVAIRHGCLRTMQLLLDHGANIDAYIATHPTAFPATIMFAMKCLSLLKFLMDLGCDGEPCFSCLYGNGPHPPAPQPSSRFNDAPAADKEPSVVQFCEFVSAPEVSRWAGPIIDVLLDYVGNVQLCSRLKEHIDSFEDWAVIKEKAEPPRPLAHLCRLRVRKAIGKYRIKLLDTLPLPGRLIRYLKYENTQ

SEQ ID NO: 37461 - protein, 518 aa, Homo sapiens
MDFTEAYADTCSTVGLAAREGNVKVLRKLLKKGRSVDVADNRGWMPIHEAAYHNSVECLQMLINADSSENYIKMKTFEGFCALHLAASQGHWKIVQILLEAGADPNATTLEETTPLFLAVENGQIDVLRLLLQHGANVNGSHSMCGWNSLHQASFQENAEIIKLLLRKGANKECQDDFGITPLFVAAQYGKLESLSILISSGANVNCQALDKATPLFIAAQEGHTKCVELLLSSGADPDLYCNEDSWQLPIHAAAQMGHTKILDLLIPLTNRACDTGLNKVSPVYSAVFGGHEDCLEILLRNGYSPDAQACLVFGFSSPVCMAFQKDCEFFGIVNILLKYGAQINELHLAYCLKYEKFSIFRYFLRKGCSLGPWNHIYEFVNHAIKAQAKYKEWLPHLLVAGFDPLILLCNSWIDSVSIDTLIFTLEFTNWKTLAPAVERMLSARASNAWILQQHIATVPSLTHLCRLEIRSSLKSERLRSDSYISQLPLPRSLHNYLLYEDVLRMYEVPELAAIQDG

SEQ ID NO: 37462 - protein, 556 aa, Homo sapiens
MAMMPLVLHHPERQAELGSGLRDGGGAALRPPGRLVKQMDFTEAYADTCSTVGLAAREGNVKVLRKLLKKGRSVDVADNRGWMPIHEAAYHNSVECLQMLINADSSENYIKMKTFEGFCALHLAASQGHWKIVQILLEAGADPNATTLEETTPLFLAVENGQIDVLRLLLQHGANVNGSHSMCGWNSLHQASFQENAEIIKLLLRKGANKECQDDFGITPLFVAAQYGKLESLSILISSGANVNCQALDKATPLFIAAQEGHTKCVELLLSSGADPDLYCNEDSWQLPIHAAAQMGHTKILDLLIPLTNRACDTGLNKVSPVYSAVFGGHEDCLEILLRNGYSPDAQACLVFGFSSPVCMAFQKDCEFFGIVNILLKYGAQINELHLAYCLKYEKFSIFRYFLRKGCSLGPWNHIYEFVNHAIKAQAKYKEWLPHLLVAGFDPLILLCNSWIDSVSIDTLIFTLEFTNWKTLAPAVERMLSARASNAWILQQHIATVPSLTHLCRLEIRSSLKSERLRSDSYISQLPLPRSLHNYLLYEDVLRMYEVPELAAIQDG

SEQ ID NO: 37463 - protein, 445 aa, Homo sapiens
MKTFEGFCALHLAASQGHWKIVQILLEAGADPNATTLEETTPLFLAVENGQIDVLRLLLQHGANVNGSHSMCGWNSLHQASFQENAEIIKLLLRKGANKECQDDFGITPLFVAAQYGKLESLSILISSGANVNCQALDKATPLFIAAQEGHTKCVELLLSSGADPDLYCNEDSWQLPIHAAAQMGHTKILDLLIPLTNRACDTGLNKVSPVYSAVFGGHEDCLEILLRNGYSPDAQACLVFGFSSPVCMAFQKDCEFFGIVNILLKYGAQINELHLAYCLKYEKFSIFRYFLRKGCSLGPWNHIYEFVNHAIKAQAKYKEWLPHLLVAGFDPLILLCNSWIDSVSIDTLIFTLEFTNWKTLAPAVERMLSARASNAWILQQHIATVPSLTHLCRLEIRSSLKSERLRSDSYISQLPLPRSLHNYLLYEDVLRMYEVPELAAIQDG

SEQ ID NO: 37464 - protein, 553 aa, Homo sapiens
MPLVLHHPERQAELGSGLRDGGGAALRPPGRLVKQMDFTEAYADTCSTVGLAAREGNVKVLRKLLKKGRSVDVADNRGWMPIHEAAYHNSVECLQMLINADSSENYIKMKTFEGFCALHLAASQGHWKIVQILLEAGADPNATTLEETTPLFLAVENGQIDVLRLLLQHGANVNGSHSMCGWNSLHQASFQENAEIIKLLLRKGANKECQDDFGITPLFVAAQYGKLESLSILISSGANVNCQALDKATPLFIAAQEGHTKCVELLLSSGADPDLYCNEDSWQLPIHAAAQMGHTKILDLLIPLTNRACDTGLNKVSPVYSAVFGGHEDCLEILLRNGYSPDAQACLVFGFSSPVCMAFQKDCEFFGIVNILLKYGAQINELHLAYCLKYEKFSIFRYFLRKGCSLGPWNHIYEFVNHAIKAQAKYKEWLPHLLVAGFDPLILLCNSWIDSVSIDTLIFTLEFTNWKTLAPAVERMLSARASNAWILQQHIATVPSLTHLCRLEIRSSLKSERLRSDSYISQLPLPRSLHNYLLYEDVLRMYEVPELAAIQDG

SEQ ID NO: 37465 - protein, 445 aa, Homo sapiens; identical to SEQ ID NO: 37463

SEQ ID NO: 37466 - protein, 437 aa, Homo sapiens [sequence omitted]

SEQ ID NO: 37467 - protein, 426 aa, Homo sapiens
MDGTTAPVTKSGAAKLVKRNFLEALKSNDFGKLKAILIQRQIDVDTVFEVEDENMVLASYKQGYWLPSYKLKSSWATGLHLSVLFGHVECLLVLLDHNATINCRPNGKTPLHVACEMANVDCVKILCDRGAKLNCYSLSGHTALHFCTTPSSILCAKQLVWRGANVNMKTNNQDEETPLHTAAHFGLSELVAFYVEHGAIVDSVNAHMETPLAIAAYWALRFKEQEYSTEHHLVCRMLLDYKAEVNARDDDFKSPLHKAAWNCDHVLMHMMLEAGAEANLMDINGCAAIQYVLKVTSVRPAAQPEICYQLLLNHGAARIYPPQFHKVIQACHSCPKAIEVVVNAYEHIRWNTKWRRAIPDDDLEKYWDFYHSLFTVCCNSPRTLMHLSRCAIRRTLHNRCHRAIPLLSLPLSLKKYLLLEPEGIIY

SEQ ID NO: 37468 - protein, 349 aa, Homo sapiens
MDGTTAPVTKSGAAKLVKRNFLEALKSNDFGKLKAILIQRQIDVDTVFEVEDENMVLASYKQGYWLPSYKLKSSWATGLHLSVLFGHVECLLVLLDHNATINCRPNGKTPLHVACEMANVDCVKILCDRGAKLNCYSLSGHTALHFCTTPSSILCAKQLVWRGANVNMKTNNQDEETPLHTAAHFGLSELVAFYVEHGAIVDSVNAHMETPLAIAAYWALRFKEQEYSTEHHLVCRMLLDYKAEVNARDDDFKSPLHKAAWNCDHVLMHMMLEAGAEANLMDINGCAAIQYVLKVTSVRPAAQPEICYQLLLNHGAARIYPPQFHKVRLCPVVSRLRKIQMAALSEISK

SEQ ID NO: 37469 - protein, 1248 aa, Homo sapiens
MGKDQELLEAARTGNVALVEKLLSGRKGGILGGGSGPLPLSNLLSIWRGPNVNCTDSSGYTALHHAALNGHKDIVLKLLQYEASTNVADNKGYFPIHLAAWKGDVEIVKILIHHGPSHSRVNEQNNENETALHCAAQYGHSEVVAVLLEELTDPTIRNSKLETPLDLAALYGRLRVVKMIISAHPNLMSCNTRKHTPLHLAARNGHKAVVQVLLEAGMDVSCQTEKGSALHEAALFGKVDVVRVLLETGIDANIKDSLGRTVLDILKEHPSQKSLQIATLLQEYLEGVGRSTVLEEPVQEDATQETHISSPVESPSQKTKSETVTGELSKLLDEIKLCQEKDYSFEDLCHTISDHYLDNLSKISEEELGKNGSQSVRTSSTINLSPGEVEEEDDDENTCGPSGLWEALTPCNGCRNLGFPMLAQESYPKKRNYTMEIVPSASLDTFPSENENFLCDLMDTAVTKKPCSLEIARAPSPRTDNASEVAVTTPGTSNHRNSSTGPTPDCSPPSPDTALKNIVKVIRPQPKQRTSIVSSLDFHRMNHNQEYFEINTSTGCTSFTASPPASPPTSSVGTTEVKNEGTNHTDDLSRQDDNDPPKEYDPGQFAGLLHGSSPACESPENPFHLYGKREQCEKGQDEVSLANSPLPFKQSPIENNSEPLVKKIKPKVVSRTIFHKKSNQLENHTIVGTRSTRSGSRNGDQWVMNAGGFVERACTLGRIRSLPKALIDMHLSKSVSKSDSDLIAYPSNEKTSRVNWSESSTAEHSSKGNSERTPSFTSEWEEIDKIMSSIDVGINNELKEMNGETTRPRCPVQTVGQWLESIGLPQYENHLMANGFDNVQFMGSNVMEDQDLLEIGILNSGHRQRILQAIQLLPKMRPIGHDGYHPTSVAEWLDSIELGDYTKAFLINGYTSMDLLKKIWEVELINVLKINLIGHRKRILASLGDRLHDDPPQKPPRSITLREPSGNHTPPQLSPSLSQSTYTTGGSLDVPHIIMQGDARRRRNENYFDDIPRSKLERQMAQTGDWGEPSITLRPPNEATASTPVQYWQHHPEKLIFQSCDYKAFYLGSMLIKELRGTESTQDACAKMRVMCVKSTEQMKKVPTIILSVSYKGVKFIDATNKNIIAEHEIRNISCAAQDPEDLSTFAYITKDLKSNHHYCHVFTAFDVNLAYEIILTLGQAFEVAYQLALQARKGGHSSTLPESFENKPSKPIPKPRVSIRKSVDLLHASHTGQEPSERHTEEALRKF

SEQ ID NO: 37470 - protein, 450 aa, Homo sapiens
MMWQCHLSAQDYRYYPVDGYSLLKRFPLHPLTGPRCPVQTVGQWLESIGLPQYENHLMANGFDNVQFMGSNVMEDQDLLEIGILNSGHRQRILQAIQLLPKMRPIGHDGYHPTSVAEWLDSIELGDYTKAFLINGYTSMDLLKKIWEVELINVLKINLIGHRKRILASLGDRLHDDPPQKPPRSITLRSSVCEIWTNQNAGFPFSAIHQVHNTGDWGEPSITLRPPNEATASTPVQYWQHHPEKLIFQSCDYKAFYLGSMLIKELRGTESTQDACAKMRANIQKSTEQMKKVPTIILSVSYKGVKFIDATNKNIIAEHEIRNISCAAQDPEDLSTFAYITKDLKSNHHYCHVFTAFDVNLAYEIILTLGQAFEVAYQLALQARKGGHSSTLPESFENKPSKPIPKPRVSIRKSVQIDPSEQKTLANLPWIVEPGQEAKRGINTKYETTIF

SEQ ID NO: 37471 - protein, 254 aa, Homo sapiens
MQGDARRRRNENYFDDIPRSKLERQMAQTGDWGEPSITLRPPNEATASTPVQYWQHHPEKLIFQSCDYKAFYLGSMLIKELRGTESTQDACAKMRANCQKSTEQMKKVPTIILSVSYKGVKFIDATNKNIIAEHEIRNISCAAQDPEDLSTFAYITKDLKSNHHYCHVFTAFDVNLAYEIILTLGQAFEVAYQLALQARKGGHSSTLPESFENKPSKPIPKPRVSIRKSVDLLHASHTGQEPSERHTEEALRKF

SEQ ID NO: 37472 - protein, 350 aa, Homo sapiens
VLFQGSNVMEDQDLLEIGILNSGHRQRILQAIQLLPKMRPIGHDGYHPTSVAEWLDSIELGDYTKAFLINGYTSMDLLKKIWEVELINQSSVCEIWTNQNAGFPFSAIHQVHNTGDWGEPSITLRPPNEATASTPVQYWQHHPEKLIFQSCDYKAFYLGSMLIKELRGTESTQDACAKMRANIQKSTEQMKKVPTIILSVSYKGVKFIDATNKNIIAEHEIRNISCAAQDPEDLSTFAYITKDLKSNHHYCHVFTAFDVNLAYEIILTLGQAFEVAYQLALQARKGGHSSTLPESFENKPSKPIPKPRVSIRKSVIDPSEQKTLANLPWIVEPGQEAKRGINTKYETTIF

SEQ ID NO: 37473 - protein, 763 aa, Homo sapiens
SFQESYPKKRNYTMEIVPSASLDTFPSENENFLCDLMDTAVTKKPCSLEIARAPSPRTDNASEVAVTTPGTSNHRNSSTGPTPDCSPPSPDTALKNIVKVIRPQPKQRTSIVSSLDFHRMNHNQEYFEINTSTGCTSFTASPPASPPTSSVGTTEVKNEGTNHTDDLSRQDDNDPPKEYDPGQFAGLLHGSSPACESPENPFHLYGKREQCEKGQDEVSLANSPLPFKQSPIENNSEPLVKKIKPKVVSRTIFHKKSNQLENHTIVGTRSTRSGSRNGDQWVMNAGGFVERACTLGRIRSLPKALIDMHLSKSVSKSDSDLIAYPSNEKTSRVNWSESSTAEHSSKGNSERTPSFTSEWEEIDKIMSSIDVGINNELKEMNGPRCPVQTVGQWLESIGLPQYENHLMANGFDNVQFMGSNVMEDQDLLEIGILNSGHRQRILQAIQLLPKMRPIGHDGYHPTSVAEWLDSIELGDYTKAFLINGYTSMDLLKKIWEVELINVLKINLIGHRKRILASLGDRLHDDPPQKPPRSITLRTGDWGEPSITLRPPNEATASTPVQYWQHHPEKLIFQSCDYKAFYLGSMLIKELRGTESTQDACAKMRVMCVKSTEQMKKVPTIILSVSYKGVKFIDATNKNIIAEHEIRNISCAAQDPEDLSTFAYITKDLKSNHHYCHVFTAFDVNLAYEIILTLGQAFEVAYQLALQARKGGHSSTLPESFENKPSKPIPKPRVSIRKSVDLLHASHTGQEPSERHTEEALRKF

SEQ ID NO: 37474 - protein, 426 aa, Homo sapiens
MMWQCHLSAQDYRYYPVDGYSLLKRFPLHPLTGPRCPVQTVGQWLESIGLPQYENHLMANGFDNVQFMGSNVMEDQDLLEIGILNSGHRQRILQAIQLLPKMRPIGHDGYHPTSVAEWLDSIELGDYTKAFLINGYTSMDLLKKIWEVELINVLKINLIGHRKRILASLGDRLHDDPPQKPPRSITLRTGDWGEPSITLRPPNEATASTPVQYWQHHPEKLIFQSCDYKAFYLGSMLIKELRGTESTQDACAKMRANCQKSTEQMKKVPTIILSVSYKGVKFIDATNKNIIAEHEIRNISCAAQDPEDLSTFAYITKDLKSNHHYCHVFTAFDVNLAYEIILTLGQAFEVAYQLALQARKGGHSSTLPESFENKPSKPIPKPRVSIRKSVQIDPSEQKTLANLPWIVEPGQEAKRGINTKYETTIF

SEQ ID NO: 37475 - protein, 460 aa, Homo sapiens
MMWQCHLSAQDYRYYPVDGYSLLKRFPLHPLTGPRCPVQTVGQWLESIGLPQYENHLMANGFDNVQFMGSNVMEDQDLLEIGILNSGHRQRILQAIQLLPKMRPIGHDGYHPTSVAEWLDSIELGDYTKAFLINGYTSMDLLKKIWEVELINVLKINLIGHRKRILASLGDRLHDDPPQKPPRSITLREPSGNHTPPQLSPSLSQSTYTTGGSLDVPHIIMQGDARRRRNENYFDDIPRSKLERQMAQTGDWGEPSITLRPPNEATASTPVQYWQHHPEKLIFQSCDYKAFYLGSMLIKELRGTESTQDACAKMRANCQKSTEQMKKVPTIILSVSYKGVKFIDATNKNIIAEHEIRNISCAAQDPEDLSTFAYITKDLKSNHHYCHVFTAFDVNLAYEIILTLGQAFEVAYQLALQARKGGHSSTLPESFENKPSKPIPKPRVSIRKSVPFCFKADRPI

SEQ ID NO: 37476 - protein, 764 aa, Homo sapiens
MLAQESYPKKRNYTMEIVPSASLDTFPSENENFLCDLMDTAVTKKPCSLEIARAPSPRTDNASEVAVTTPGTSNHRNSSTGPTPDCSPPSPDTALKNIVKVIRPQPKQRTSIVSSLDFHRMNHNQEYFEINTSTGCTSFTASPPASPPTSSVGTTEVKNEGTNHTDDLSRQDDNDPPKEYDPGQFAGLLHGSSPACESPENPFHLYGKREQCEKGQDEVSLANSPLPFKQSPIENNSEPLVKKIKPKVVSRTIFHKKSNQLENHTIVGTRSTRSGSRNGDQWVMNAGGFVERACTLGRIRSLPKALIDMHLSKSVSKSDSDLIAYPSNEKTSRVNWSESSTAEHSSKGNSERTPSFTSEWEEIDKIMSSIDVGINNELKEMNGPRCPVQTVGQWLESIGLPQYENHLMANGFDNVQFMGSNVMEDQDLLEIGILNSGHRQRILQAIQLLPKMRPIGHDGYHPTSVAEWLDSIELGDYTKAFLINGYTSMDLLKKIWEVELINVLKINLIGHRKRILASLGDRLHDDPPQKPPRSITLRTGDWGEPSITLRPPNEATASTPVQYWQHHPEKLIFQSCDYKAFYLGSMLIKELRGTESTQDACAKMRANCQKSTEQMKKVPTIILSVSYKGVKFIDATNKNIIAEHEIRNISCAAQDPEDLSTFAYITKDLKSNHHYCHVFTAFDVNLAYEIILTLGQAFEVAYQLALQARKGGHSSTLPESFENKPSKPIPKPRVSIRKSVDLLHASHTGQEPSERHTEEALRKF

SEQ ID NO: 37477 - protein, 1248 aa, Homo sapiens
MGKDQELLEAARTGNVALVEKLLSGRKGGILGGGSGPLPLSNLLSIWRGPNVNCTDSSGYTALHHAALNGHKDIVLKLLQYEASTNVADNKGYFPIHLAAWKGDVEIVKILIHHGPSHSRVNEQNNENETALHCAAQYGHSEVVAVLLEELTDPTIRNSKLETPLDLAALYGRLRVVKMIISAHPNLMSCNTRKHTPLHLAARNGHKAVVQVLLEAGMDVSCQTEKGSALHEAALFGKVDVVRVLLETGIDANIKDSLGRTVLDILKEHPSQKSLQIATLLQEYLEGVGRSTVLEEPVQEDATQETHISSPVESPSQKTKSETVTGELSKLLDEIKLCQEKDYSFEDLCHTISDHYLDNLSKISEEELGKNGSQSVRTSSTINLSPGEVEEEDDDENTCGPSGLWEALTPCNGCRNLGFPMLAQESYPKKRNYTMEIVPSASLDTFPSENENFLCDLMDTAVTKKPCSLEIARAPSPRTDNASEVAVTTPGTSNHRNSSTGPTPDCSPPSPDTALKNIVKVIRPQPKQRTSIVSSLDFHRMNHNQEYFEINTSTGCTSFTASPPASPPTSSVGTTEVKNEGTNHTDDLSRQDDNDPPKEYDPGQFAGLLHGSSPACESPENPFHLYGKREQCEKGQDEVSLANSPLPFKQSPIENNSEPLVKKIKPKVVSRTIFHKKSNQLENHTIVGTRSTRSGSRNGDQWVMNAGGFVERACTLGRIRSLPKALIDMHLSKSVSKSDSDLIAYPSNEKTSRVNWSESSTAEHSSKGNSERTPSFTSEWEEIDKIMSSIDVGINNELKEMNGETTRPRCPVQTVGQWLESIGLPQYENHLMANGFDNVQFMGSNVMEDQDLLEIGILNSGHRQRILQAIQLLPKMRPIGHDGYHPTSVAEWLDSIELGDYTKAFLINGYTSMDLLKKIWEVELINVLKINLIGHRKRILASLGDRLHDDPPQKPPRSITLREPSGNHTPPQLSPSLSQSTYTTGGSLDVPHIIMQGDARRRRNENYFDDIPRSKLERQMAQTGDWGEPSITLRPPNEATASTPVQYWQHHPEKLIFQSCDYKAFYLGSMLIKELRGTESTQDACAKMRANCQKSTEQMKKVPTIILSVSYKGVKFIDATNKNIIAEHEIRNISCAAQDPEDLSTFAYITKDLKSNHHYCHVFTAFDVNLAYEIILTLGQAFEVAYQLALQARKGGHSSTLPESFENKPSKPIPKPRVSIRKSVDLLHASHTGQEPSERHTEEALRKF

SEQ ID NO: 37478 - protein, 357 aa, Homo sapiens
MANGFDNVQFMGSNVMEDQDLLEIGILNSGHRQRILQAIQLLPKMRPIGHDGYHPTSVAEWLDSIELGDYTKAFLINGYTSMDLLKKIWEVELINQSSVCEIWTNQNAGFPFSAIHQVHNTGDWGEPSITLRPPNEATASTPVQYWQHHPEKLIFQSCDYKAFYLGSMLIKELRGTESTQDACAKMRANCQKSTEQMKKVPTIILSVSYKGVKFIDATNKNIIAEHEIRNISCAAQDPEDLSTFAYITKDLKSNHHYCHVFTAFDVNLAYEIILTLGQAFEVAYQLALQARKGGHSSTLPESFENKPSKPIPKPRVSIRKSVIDPSEQKTLANLPWIVEPGQEAKRGINTKYETTIF

SEQ ID NO: 37479 - protein, 510 aa, Homo sapiens
MMWQCHLSAQDYRYYPVDGYSLLKRFPLHPLTGPRCPVQTVGQWLESIGLPQYENHLMANGFDNVQFMGSNVMEDQDLLEIGILNSGHRQRILQAIQLLPKMRPIGHDGYHPTSVAEWLDSIELGDYTKAFLINGYTSMDLLKKIWEVELINVLKINLIGHRKRILASLGDRLHDDPPQKPPRSITLREPSGNHTPPQLSPSLSQSTYTTGGSLDVPHIIMQGDARRRRNENYFDDIPRSKLERQMAQSSVCEIWTNQNAGFPFSAIHQVHNTGDWGEPSITLRPPNEATASTPVQYWQHHPEKLIFQSCDYKAFYLGSMLIKELRGTESTQDACAKMRANCQKSTEQMKKVPTIILSVSYKGVKFIDATNKNIIAEHEIRNISCAAQDPEDLSTFAYITKDLKSNHHYCHVFTAFDVNLAYEIILTLGQAFEVAYQLALQARKGGHSSTLPESFENKPSKPIPKPRVSIRKSVQIDPSEQKTLANLPWIVEPGQEAKRGINTKYETTIF

SEQ ID NO: 37480 - protein, 414 aa, Homo sapiens
MMWQCHLSAQDYRYYPVDGYSLLKRFPLHPLTGPRCPVQTVGQWLESIGLPQYENHLMANGFDNVQFMGSNVMEDQDLLEIGILNSGHRQRILQAIQLLPKMRPIGHDGYHPTSVAEWLDSIELGDYTKAFLINGYTSMDLLKKIWEVELINVLKINLIGHRKRILASLGDRLHDDPPQKPPRSITLRTGDWGEPSITLRPPNEATASTPVQYWQHHPEKLIFQSCDYKAFYLGSMLIKELRGTESTQDACAKMRANCQKSTEQMKKVPTIILSVSYKGVKFIDATNKNIIAEHEIRNISCAAQDPEDLSTFAYITKDLKSNHHYCHVFTAFDVNLAYEIILTLGQAFEVAYQLALQARKGGHSSTLPESFENKPSKPIPKPRVSIRKSVDLLHASHTGQEPSERHTEEALRKF

SEQ ID NO: 37481 - protein, 450 aa, Homo sapiens
MMWQCHLSAQDYRYYPVDGYSLLKRFPLHPLTGPRCPVQTVGQWLESIGLPQYENHLMANGFDNVQFMGSNVMEDQDLLEIGILNSGHRQRILQAIQLLPKMRPIGHDGYHPTSVAEWLDSIELGDYTKAFLINGYTSMDLLKKIWEVELINVLKINLIGHRKRILASLGDRLHDDPPQKPPRSITLRSSVCEIWTNQNAGFPFSAIHQVHNTGDWGEPSITLRPPNEATASTPVQYWQHHPEKLIFQSCDYKAFYLGSMLIKELRGTESTQDACAKMRANCQKSTEQMKKVPTIILSVSYKGVKFIDATNKNIIAEHEIRNISCAAQDPEDLSTFAYITKDLKSNHHYCHVFTAFDVNLAYEIILTLGQAFEVAYQLALQARKGGHSSTLPESFENKPSKPIPKPRVSIRKSVQIDPSEQKTLANLPWIVEPGQEAKRGINTKYETTIF

SEQ ID NO: 37482 - protein, 394 aa, Homo sapiens
MGPRCPVQTVGQWLESIGLPQYENHLMANGFDNVQFMGSNVMEDQDLLEIGILNSGHRQRILQAIQLLPKMRPIGHDGYHPTSVAEWLDSIELGDYTKAFLINGYTSMDLLKKIWEVELINVLKINLIGHRKRILASLGDRLHDDPPQKPPRSITLRTGDWGEPSITLRPPNEATASTPVQYWQHHPEKLIFQSCDYKAFYLGSMLIKELRGTESTQDACAKMRANCQKSTEQMKKVPTIILSVSYKGVKFIDATNKNIIAEHEIRNISCAAQDPEDLSTFAYITKDLKSNHHYCHVFTAFDVNLAYEIILTLGQAFEVAYQLALQARKGGHSSTLPESFENKPSKPIPKPRVSIRKSVIDPSEQKTLANLPWIVEPGQEAKRGINTKYETTIF

SEQ ID NO: 37483 - protein, 417 aa, Homo sapiens
MSTRYHQAASDSYLELLKEATKRDLNLSDEDGMTPTLLAAYHGNLEALEIICSRGGDPDRCDIWGNTPLHFAASNGHAHCVSFLVNFGANIFALDNDLQTPLDAAASREQNECVALLDKAATAQNIMNPKKVTRLKEQAQKNARRQIKECERLQEKHQNKMAHTYSKEESGTLSSSKGTFSRSSPSNASAPGTFGSLSKGIKDTFKIKFKKNKDTAEQVGKEGRSGQRNVMEVFREEEEDSFSGDFKEKLQLSAEEDGSVHHESILNRPGLGSIVFRRNRISSPEDISDSKREFGFKLPSELLQRQGASEADEGAADEEGEENGLKDDLPWDDDEVEWEEDVVDATPLEVFLLSQHLEEFLPIFKREQIDLEALLLCSDEDLQSIQMQLGPRKKVLNAINRRKQVLQQPGQLVDTSL

SEQ ID NO: 37484 - protein, 2663 aa, Homo sapiens
MPKGGCPKAPQQEELPLSSDMVEKQTGKKDKDKVSLTKTPKLERGDGGKEVRERASKRKLPFTAGANGEQKDSDTEKQGPERKRIKKEPVTRKAGLLFGMGLSGIRAGYPLSERQQVALLMQMTAEESANSPVDTTPKHPSQSTVCQKGTPNSASKTKDKVNKRNERGETRLHRAAIRGDARRIKELISEGADVNVKDFAGWTALHEACNRGYYDVAKQLLAAGAEVNTKGLDDDTPLHDAANNGHYKVVKLLLRYGGNPQQSNRKGETPLKVANSPTMVNLLLGKGTYTSSEESSTESSEEEDAPSFAPSSSVDGNNTDSEFEKGLKHKAKNPEPQKATAPVKDEYEFDEDDEQDRVPPVDDKHLLKKDYRKETKSNSFISIPKMEVKSYTKNNTIAPKKASHRILSDTSDEEDASVTVGTGEKLRLSAHTILPGSKTREPSNAKQQKEKNKVKKKRKKETKGREVRFGKRSDKFCSSESESESSESGEDDRDSLGSSGCLKGSPLVLKDPSLFSSLSASSTSSHGSSAAQKQNPSHTDQHTKHWRTDNWKTISSPAWSEVSSLSDSTRTRLTSESDYSSEGSSVESLKPVRKRQEHRKRASLSEKKSPFLSSAEGAVPKLDKEGKVVKKHKTKHKHKNKEKGQCSISQELKLKSFTYEYEDSKQKSDKAILLENDLSTENKLKVLKHDRDHFKKEEKLSKMKLEEKEWLFKDEKSLKRIKDTNKDISRSFREEKDRSNKAEKERSLKEKSPKEEKLRLYKEERKKKSKDRPSKLEKKNDLKEDKISKEKEKIFKEDKEKLKKEKVYREDSAFDEYCNKNQFLENEDTKFSLSDDQRDRWFSDLSDSSFDFKGEDSWDSPVTDYRDMKSDSVAKLILETVKEDSKERRRDSRAREKRDYREPFFRKKDRDYLDKNSEKRKEQTEKHKSVPGYLSEKDKKRRESAEAGRDRKDALESCKERRDGRAKPEEAHREELKECGCESGFKDKSDGDFGKGLEPWERHHPAREKEKKDGPDKERKEKTKPERYKEKSSDKDKSEKSILEKCQKDKEFDKCFKEKKDTKEKHKDTHGKDKERKASLDQGKEKKEKAFPGIISEDFSEKKDDKKGKEKSWYIADIFTDESEDDRDSCMGSGFKMGEASDLPRTDGLQEKEEGREAYASDRHRKSSDKQHPERQKDKEPRDRRKDRGAADAGRDKKEKVFEKHKEKKDKESTEKYKDRKDRASVDSTQDKKNKQKLPEKAEKKHAAEDKAKSKHKEKSDKEHSKERKSSRSADAEKSLLEKLEEEALHEYREDSNDKISEVSSDSFTDRGQEPGLTAFLEVSFTEPPGDDKPRESACLPEKLKEKERHRHSSSSSKKSHDRERAKKEKAEKKEKGEDYKEGGSRKDSGQYEKDFLEADAYGVSYNMKADIEDELDKTIELFSTEKKDKNDSEREPSKKIEKELKPYGSSAINILKEKKKREKHREKWRDEKERHRDRHADGLLRHHRDELLRHHRDEQKPATRDKDSPPRVLKDKSRDEGPRLGDAKLKEKFKDGAEKEKGDPVKMSNGNDKVAPSKDPGKKDARPREKLLGDGDLMMTSFERMLSQKDLEIEERHKRHKERMKQMEKLRHRSGDPKLKEKAKPADDGRKKGLDIPAKKPPGLDPPFKDKKLKESTPIPPAAENKLHPASGADSKDWLAGPHMKEVLPASPRPDQSRPTGVPTPTSVLSCPSYEEVMHTPRTPSCSADDYADLVFDCADSQHSTPVPTAPTSACSPSFFDRFSVASSGLSENASQAPARPLSTNLYRSVSVDIRRTPEEEFSVGDKLFRQQSVPAASSYDSPMPPSMEDRAPLPPVPAEKFACLSPGYYSPDYGLPSPKVDALHCPPAAVVTVTPSPEGVFSSLQAKPSPSPRAELLVPSLEGALPPDLDTSEDQQATAAIIPPEPSYLEPLDEGPFSAVITEEPVEWAHPSEQALASSLIGGTSENPVSWPVGSDLLLKSPQRFPESPKRFCPADPLHSAAPGPFSASEAPYPAPPASPAPYALPVAEPGLEDVKDGVDAVPAAISTSEAAPYAPPSGLESFFSNCKSLPEAPLDVAPEPACVAAVAQVEALGPLENSFLDGSRGLSHLGQVEPVPWADAFAGPEDDLDLGPFSLPELPLQTKDAADGEAEPVEESLAPPEEMPPGAPGVINGGDVSTVVAEEPPALPPDQASTRLPAELEPEPSGEPKLDVALEAAVEAETVPEERARGDPDSSVEPAPVPPEQRPLGSGDQGAEAEGPPAASLCAPDGPAPNTVAQAQAADGAGPEDDTEASRAAAPAEGPPGGIQPEAAEPKPTAEAPKAPRVEEIPQRMTRNRAQMLANQSKQGPPPSEKECAPTPAPVTRAKARGSEDDDAQAQHPRKRRFQRSTQQLQQQLNTSTQQTREVIQQTLAAIVDAIKLDAIEPYHSDRANPYFEYLQIRKKIEEKRKILCCITPQAPQCYAEYVTYTGSYLLDGKPLSKLHIPVIAPPPSLAEPLKELFRQQEAVRGKLRLQHSIEREKLIVSCEQEILRVHCRAARTIANQAVPFSACTMLLDSEVYNMPLESQGDENKSVRDRFNARQFISWLQDVDDKYDRMKTCLLMRQQHEAAALNAVQRMEWQLKVQELDPAGHKSLCVNEVPSFYVPMVDVNDDFVLLPA

SEQ ID NO: 37485 - protein, 611 aa, Homo sapiens
SIPKMEVKSYTKNNTIAPKKASHRILSDTSDEEDASVTVGTGEKLRLSAHTILPGSKTREPSNAKQQKEKNKVKKKRKKETKGREVRFGKRSDKFCSSESESESSESGEDDRDSLGSSGCLKGSPLVLKDPSLFSSLSASSTSSHGSSAAQKQNPSHTDQHTKHWRTDNWKTISSPAWSEVSSLSDSTRTRLTSESDYSSEGSSVESLKPVRKRQEHRKRASLSEKKSPFLSSAEGAVPKLDKEGKVVKKHKTKHKHKNKEKGQCSISQELKLKSFTYEYEDSKQKSDKAILLENDLSTENKLKVLKHDRDHFKKEEKLSKMKLEEKEWLFKDEKSLKRIKDTNKDISRSFREEKDRSNKAEKERSLKEKSPKEEKLRLYKEERKKKSKDRPSKLEKKNDLKEDKISKEKEKIFKEDKEKLKKEKVYREDSAFDEYCNKNQFLENEDTKFSLSDDQRDRWFSDLSDSSFDFKGEDSWDSPVTDYRDMKSDSVAKLILETVKEDSKERRRDSRAREKRDYREPFFRKKDRDYLDKNSEKRKEQTEKHKSVPGYLSEKHERRRRRMAPIRKGRRRQNQKDTKRNPVTRTKVRNQSWKNVRRTKNLINVLKRKK

SEQ ID NO: 37486 - protein, 2663 aa, Homo sapiens; identical to SEQ ID NO: 37484

SEQ ID NO: 37487 - protein, 438 aa, Homo sapiens
SAGRVNEDRVRSRTMPKGGCPKAPQQEELPLSSDMVEKQTGKKDKDKVSLTKTPKLERGDGGKEVRERASKRKLPFTAGANGEQKDSDTEKQGPERKRIKKEPVTRKAGLLFGMGLSGIRAGYPLSERQQVALLMQMTAEESANSPVDTTPKHPSQSTVCQKGTPNSASKTKDKVNKRNERGETRLHRAAIRGDARRIKELISEGADVNVKDFAGWTALHEACNRGYYDVAKQLLAAGAEVNTKGLDDDTPLHDAANNGHYKVVKLLLRYGGNPQQSNRKGETPLKVANSPTMVNLLLGKGTYTSSEESSTESSEEEDAPSFAPSSSVDGNNTDSEFEKGLKHKAKNPEPQKATAPVKDEYEFDEDDEQDRVPPVDDKHLLKKDYRKETKSNSFISIPKMEKVTLKITRLHQRKRPIVSCQTRRTRRTRVSPWGQERS

SEQ ID NO: 37488 - protein, 2062 aa, Homo sapiens
MPKSGFTKPIQSENSDSDSNMVEKPYGRKSKDKIASYSKTPKIERSDVSKEMKEKSSMKRKLPFTISPSRNEERDSDTDSDPGHTSENWGERLISSYRTYSEKEGPEKKKTKKEAGNKKSTPVSILFGYPLSERKQMALLMQMTARDNSPDSTPNHPSQTTPAQKKTPSSSSRQKDKVNKRNERGETPLHMAAIRGDVKQVKELISLGANVNVKDFAGWTPLHEACNVGYYDVAKILIAAGADVNTQGLDDDTPLHDSASSGHRDIVKLLLRHGGNPFQANKHGERPVDVAETEELELLLKREVPLSDDDESYTDSEEAQSVNPSSVDENIDSETEKDSLICESKQILPSKTPLPSALDEYEFKDDDDEEINKMIDDRHILRKEQRKENEPEAEKTHLFAKQEKAFYPKSFKSKKQKPSRVLYSSTESSDEEALQNKKISTSCSVIPETSNSDMQTKKEYVVSGEHKQKGKVKRKLKNQNKNKENQELKQEKEGKENTRITNLTVNTGLDCSEKTREEGNFRKSFSPKDDTSLHLFHISTGKSPKHSCGLSEKQSTPLKQEHTKTCLSPGSSEMSLQPDLVRYDNTESEFLPESSSVKSCKHKEKSKHQKDFHLEFGEKSNAKIKDEDHSPTFENSDCTLKKMDKEGKTLKKHKLKHKEREKEKHKKEIEGEKEKYKTKDSAKELQRSVEFDREFWKENFFKSDETEDLFLNMEHESLTLEKKSKLEKNIKDDKSTKEKHVSKERNFKEERDKIKKESEKSFREEKIKDLKEERENIPTDKDSEFTSLGMSAIEESIGLHLVEKEIDIEKQEKHIKESKEKPEKRSQIKEKDIEKMERKTFEKEKKIKHEHKSEKDKLDLSECVDKIKEKDKLYSHHTEKCHKEGEKSKNTAAIKKTDDREKSREKMDRKHDKEKPEKERHLAESKEKHLMEKKNKQSDNSEYSKSEKGKNKEKDRELDKKEKSRDKESINITNSKHIQEEKKSSIVDGNKAQHEKPLSLKEKTKDEPLKTPDGKEKDKKDKDIDRYKERDKHKDKIQINSLLKLKSEADKPKPKSSPASKDTRPKEKRLVNDDLMQTSFERMLSLKDLEIEQWHKKHKEKIKQKEKERLRNRNCLELKIKDKEKTKHTPTESKNKELTRSKSSEVTDAYTKEKQPKDAVSNRSQSVDTKNVMTLGKSSFVSDNSLNRSPRSENEKPGLSSRSVSMISVASSEDSCHTTVTTPRPPVEYDSDFMLESSESQMSFSQSPFLSIAKSPALHERELDSLADLPERIKPPYANRLSTSHLRSSSVEDVKLIISEGRPTIEVRRCSMPSVICEHTKQFQTISEESNQGSLLTVPGDTSPSPKPEVFSNVPERDLSNVSNIHSSFATSPTGASNSKYVSADRNLIKNTAPVNTVMDSPVHLEPSSQVGVIQNKSWEMPVDRLETLSTRDFICPNSNIPDQESSLQSFCNSENKVLKENADFLSLRQTELPGNSCAQDPASFMPPQQPCSFPSQSLSDAESISKHMSLSYVANQEPGILQQKNAVQIISSALDTDNESTKDTENTFVLGDVQKTDAFVPVYSDSTIQEASPNFEKAYTLPVLPSEKDFNGSDASTQLNTHYAFSKLTYKSSSGHEVENSTTDTQVISHEKENKLESLVLTHLSRCDSDLCEMNAGMPKGNLNEQDPKHCPESEKCLLSIEDEESQQSILSSLENHSQQSTQPEMHKYGQLVKVELEENAEDDKTENQIPQRMTRNKANTMANQSKQILASCTLLSEKDSESSSPRGRIRLTEDDDPQIHHPRKRKVSRVPQPVQVSPSLLQAKEKTQQSLAAIVDSLKLDEIQPYSSERANPYFEYLHIRKKIEEKRKLLCSVIPQAPQYYDEYVTFNGSYLLDGNPLSKICIPTITPPPSLSDPLKELFRQQEVVRMKLRLQHSIEREKLIVSNEQEVLRVHYRAARTLANQTLPFSACTVLLDAEVYNVPLDSQSDDSKTSVRDRFNARQFMSWLQDVDDKFDKLKTCLLMRQQHEAAALNAVQRLEWQLKLQELDPATYKSISIYEIQEFYVPLVDVNDDFELTPI

SEQ ID NO: 37489 - protein, 438 aa, Homo sapiens
MVNVPELLLGQSPSRNDTKIINSEEAQSVNPSSVDENIDSETEKDSLICESKQILPSKTPLPSALDEYEFKDDDDEEINKMIDDRHILRKEQRKENEPEAEKTHLFAKQEKAFYPKSFKSKKQKPSRVLYSSTESSDEEALQNKKISTSCSVIPETSNSDMQTKKEYVVSGEHKQKGKVKRKLKNQNKNKENQELKQEKEGKENTRITNLTVNTGLDCSEKTREEGNFRKSFSPKDDTSLHLFHISTGKSPKHSCGLSEKQSTPLKQEHTKTCLSPGSSEMSLQPDLVRYDNTESEFLPESSSVKSCKHKEKSKHQKDFHLEFGEKSNAKIKDEDHSPTFENSDCTLKKMDKEGKTLKKHKLKHKEREKEKHKKEIEGEKEKYKTKDSAKELQRSVEFDREFWKENFFKSDETEDLFLNMEHESLTLEKIKIGKKHQR

SEQ ID NO: 37490 - protein, 2039 aa, Homo sapiens
MPKSGFTKPIQSENSDSDSNMVEKPYGRKSKDKIASYSKTPKIERSDVSKEMKEKSSMKRKLPFTISPSRNEERDSDTEKEGPEKKKTKKEAGNKKSTPVSILFGYPLSERKQMALLMQMTARDNSPDSTPNHPSQTTPAQKKTPSSSSRQKDKVNKRNERGETPLHMAAIRGDVKQVKELISLGANVNVKDFAGWTPLHEACNVGYYDVAKILIAAGADVNTQGLDDDTPLHDSASSGHRDIVKLLLRHGGNPFQANKHGERPVDVAETEELELLLKREVPLSDDDESYTDSEEAQSVNPSSVDENIDSETEKDSLICESKQILPSKTPLPSALDEYEFKDDDDEEINKMIDDRHILRKEQRKENEPEAEKTHLFAKQEKAFYPKSFKSKKQKPSRVLYSSTESSDEEALQNKKISTSCSVIPETSNSDMQTKKEYVVSGEHKQKGKVKRKLKNQNKNKENQELKQEKEGKENTRITNLTVNTGLDCSEKTREEGNFRKSFSPKDDTSLHLFHISTGKSPKHSCGLSEKQSTPLKQEHTKTCLSPGSSEMSLQPDLVRYDNTESEFLPESSSVKSCKHKEKSKHQKDFHLEFGEKSNAKIKDEDHSPTFENSDCTLKKMDKEGKTLKKHKLKHKEREKEKHKKEIEGEKEKYKTKDSAKELQRSVEFDREFWKENFFKSDETEDLFLNMEHESLTLEKKSKLEKNIKDDKSTKEKHVSKERNFKEERDKIKKESEKSFREEKIKDLKEERENIPTDKDSEFTSLGMSAIEESIGLHLVEKEIDIEKQEKHIKESKEKPEKRSQIKEKDIEKMERKTFEKEKKIKHEHKSEKDKLDLSECVDKIKEKDKLYSHHTEKCHKEGEKSKNTAAIKKTDDREKSREKMDRKHDKEKPEKERHLAESKEKHLMEKKNKQSDNSEYSKSEKGKNKEKDRELDKKEKSRDKESINITNSKHIQEEKKSSIVDGNKAQHEKPLSLKEKTKDEPLKTPDGKEKDKKDKDIDRYKERDKHKDKIQINSLLKLKSEADKPKPKSSPASKDTRPKEKRLVNDDLMQTSFERMLSLKDLEIEQWHKKHKEKIKQKEKERLRNRNCLELKIKDKEKTKHTPTESKNKELTRSKSSEVTDAYTKEKQPKDAVSNRSQSVDTKNVMTLGKSSFVSDNSLNRSPRSENEKPGLSSRSVSMISVASSEDSCHTTVTTPRPPVEYDSDFMLESSESQMSFSQSPFLSIAKSPALHERELDSLADLPERIKPPYANRLSTSHLRSSSVEDVKLIISEGRPTIEVRRCSMPSVICEHTKQFQTISEESNQGSLLTVPGDTSPSPKPEVFSNVPERDLSNVSNIHSSFATSPTGASNSKYVSADRNLIKNTAPVNTVMDSPVHLEPSSQVGVIQNKSWEMPVDRLETLSTRDFICPNSNIPDQESSLQSFCNSENKVLKENADFLSLRQTELPGNSCAQDPASFMPPQQPCSFPSQSLSDAESISKHMSLSYVANQEPGILQQKNAVQIISSALDTDNESTKDTENTFVLGDVQKTDAFVPVYSDSTIQEASPNFEKAYTLPVLPSEKDFNGSDASTQLNTHYAFSKLTYKSSSGHEVENSTTDTQVISHEKENKLESLVLTHLSRCDSDLCEMNAGMPKGNLNEQDPKHCPESEKCLLSIEDEESQQSILSSLENHSQQSTQPEMHKYGQLVKVELEENAEDDKTENQIPQRMTRNKANTMANQSKQILASCTLLSEKDSESSSPRGRIRLTEDDDPQIHHPRKRKVSRVPQPVQVSPSLLQAKEKTQQSLAAIVDSLKLDEIQPYSSERANPYFEYLHIRKKIEEKRKLLCSVIPQAPQYYDEYVTFNGSYLLDGNPLSKICIPTITPPPSLSDPLKELFRQQEVVRMKLRLQHSIEREKLIVSNEQEVLRVHYRAARTLANQTLPFSACTVLLDAEVYNVPLDSQSDDSKTSVRDRFNARQFMSWLQDVDDKFDKLKTCLLMRQQHEAAALNAVQRLEWQLKLQELDPATYKSISIYEIQEFYVPLVDVNDDFELTPI

SEQ ID NO: 37491 - protein, 123 aa, Homo sapiens
TEDLFLNMEHESLTLEKKSKLEKNIKDDKSTKEKHVSKERNFKEERDKIKKESEKSFREGMSAIEESIGLHLVEKEIDIEKQEKHIKESKEKPEKRSQIKEKDIEKMERKTFEKGTSYIRITQ

SEQ ID NO: 37492 - protein, 330 aa, Homo sapiens
MPKSGFTKPIQSENSDSDSNMVEKPYGRKSKDKIASYSKTPKIERSDVSKEMKEKSSMKRKLPFTISPSRNEERDSDTDSDPGHTSENWGERLISSYRTYSEKEGPEKKKTKKEAGNKKSTPVSILFGYPLSERKQMALLMQMTARDNSPDSTPNHPSQTTPAQKKTPSSSSRQKDKVNKRNERGETPLHMAAIRGDVKQVKELISLGANVNVKDFAGWTPLHEACNVGYYDVAKILIAAGADVNTQGLDDDTPLHDSASSGHRDIVKLLLRHGGNPFQANKHGERPVDVAETEELELLLKREVPLSDDDESYTGSSYQFAGNAKLSGAS

SEQ ID NO: 37493 - protein, 371 aa, Homo sapiens
MPKSGFTKPIQSENSDSDSNMVEKPYGRKSKDKIASYSKTPKIERSDVSKEMKEKSSMKRKLPFTISPSRNEERDSDTEKEGPEKKKTKKEAGNKKSTPVSILFGYPLSERKQMALLMQMTARDNSPDSTPNHPSQTTPAQKKTPSSSSRQKDKVNKRNERGETPLHMAAIRGDVKQVKELISLGANVNVKDFAGWTPLHEACNVGYYDVAKILIAAGADVNTQGLDDDTPLHDSASSGHRDIVKLLLRHGGNPFQANKHGERPVDVAETEELELLLKREVPLSDDDESYTDSEEAQSVNPSSVDENIDSETEKDSLICESKQILPSKTPLPSALDEYEFKDDDDEEINKMIDDRHILRKEQRKKKRKEKK

SEQ ID NO: 37494 - protein, 327 aa, Homo sapiens
MAKAPSWAGVGALAYKAPEALWPAEAVMDGTMEDSEAVQRATALIEQRLAQEEENEKLRGDARQKLPMDLLVLEDEKHHGAQSAALQKVKGQERVRKTSLDLRREIIDVGGIQNLIELRKKRKQKKRDALAASHEPPPEPEEITGPVDEETFLKAAVEGKMKVIEKFLADGGSADTCDQFRRTALHRASLEGHMEILEKLLDNGATVDFQDRLDCTAMHWACRGGHLEVVKLLQSHGADTNVRDKEGDTALHDAVRLNRYKIIKLLLLHGADMMTKNLAGKTPTDLVQLWQADTRHALEHPEPGAEHNGLEGPNDSGRETPQPVPAQ

SEQ ID NO: 37495 - protein, 360 aa, Homo sapiens
MAKAPSWAGVGALAYKAPEALWPAEAVMDGTMEDSEAVQRATALIEQRLAQEEENEKLRGDARQKLPMDLLVLEDEKHHGAQSAALQKVKGQERVRKTSLDLRREIIDVGGIQNLIELRKKRKQKKRDALAASHEPPPEPEEITGPVDEETFLKAAVEGKMKVIEKFLADGGSADTCDQFRRTALHRASLEGHMEILEKLLDNGATVDFQDRLDCTAMHWACRGGHLEVVKLLQSHGADTNVRDKLLSTPLHVAVRTGQVEIVEHFLSLGLEINARDREGDTALHDAVRLNRYKIIKLLLLHGADMMTKNLAGKTPTDLVQLWQADTRHALEHPEPGAEHNGLEGPNDSGRETPQPVPAQ

SEQ ID NO: 37496 - protein, 333 aa, Homo sapiens
MDGTMEDSEAVQRATALIEQRLAQEEENEKLRGDARQKLPMDLLVLEDEKHHGAQSAALQKVKGQERVRKTSLDLRREIIDVGGIQNLIELRKKRKQKKRDALAASHEPPPEPEEITGPVDEETFLKAAVEGKMKVIEKFLADGGSADTCDQFRRTALHRASLEGHMEILEKLLDNGATVDFQDRLDCTAMHWACRGGHLEVVKLLQSHGADTNVRDKLLSTPLHVAVRTGQVEIVEHFLSLGLEINARDREGDTALHDAVRLNRYKIIKLLLLHGADMMTKNLAGKTPTDLVQLWQADTRHALEHPEPGAEHNGLEGPNDSGRETPQPVPAQ

SEQ ID NO: 37497 - protein, 300 aa, Homo sapiens
MDGTMEDSEAVQRATALIEQRLAQEEENEKLRGDARQKLPMDLLVLEDEKHHGAQSAALQKVKGQERVRKTSLDLRREIIDVGGIQNLIELRKKRKQKKRDALAASHEPPPEPEEITGPVDEETFLKAAVEGKMKVIEKFLADGGSADTCDQFRRTALHRASLEGHMEILEKLLDNGATVDFQDRLDCTAMHWACRGGHLEVVKLLQSHGADTNVRDKEGDTALHDAVRLNRYKIIKLLLLHGADMMTKNLAGKTPTDLVQLWQADTRHALEHPEPGAEHNGLEGPNDSGRETPQPVPAQ

SEQ ID NO: 37498 - protein, 305 aa, Homo sapiens
MDFISIQQLVSGERVEGKVLGFGHGVPDPGAWPSDWRRGPQEAVAREKLKLEEEKKKKLERFNSTRFNLDNLADLENLVQRRKKRLRHRVPPRKPEPLVKPQSQAQVEPVGLEMFLKAAAENQEYLIDKYLTDGGDPNAHDKLHRTALHWACLKGHSQLVNKLLVAGATVDARDLLDRTPVFWACRGGHLVILKQLLNQGARVNARDKIGSTPLHVAVRTRHPDCLEHLIECGAHLNAQDKEGDTALHEAVRHGSYKAMKLLLLYGAELGVRNAASVTPVQLARDWQRGIREALQAHVAHPRTRC

SEQ ID NO: 37499 - protein, 263 aa, Homo sapiens
MDFISIQQLVSGERVEGKVLGFGHGVPDPGAWPSDWRRGPQEAVAREKLKLEEEKKKKLERFNSTRFNLDNLADLENLVQRRKKRLRHRVPPRKPEPLVKLHRTALHWACLKGHSQLVNKLLVAGATVDARDLLDRTPVFWACRGGHLVILKQLLNQGARVNARDKIGSTPLHVAVRTRHPDCLEHLIECGAHLNAQDKEGDTALHEAVRHGSYKAMKLLLLYGAELGVRNAASVTPVQLARDWQRGIREALQAHVAHPRTRC

SEQ ID NO: 37500 - protein, 305 aa, Homo sapiens; identical to SEQ ID NO: 37498

SEQ ID NO: 37501 - protein, 1267 aa, Homo sapiens
MNHMFHIKRHSISAGTDAYKKTKPIQNLFQKPLYDHCSANNYKSMEPELENVRSSPPRGDRTSKVSLKEELQQDMQRFKNEIGMLKVEFQALEKEKVQLQKEVEEERKKHRNNEMEVSANIHDGATDDAEDDDDDDGLIQKRKSGETDHQQFPRKENKEYASSGPALQMKEVKSTEKEKRTSKESVNSPVFGKASLLTGGLLQVDDDSSLSEIDEDEGRPTKKTSNEKNKVKNQIQSMDDVDDLTQSSETASEDCELPHSSYKNFMLLIEQLGMECKDSVSLLKIQDAALSCERLLELKKNHCELLTVKIKKMEDKVNVLQRELSETKEIKSQLEHQKVEWERELCSLRFSLNQEEEKRRNADTLYEKIREQLRRKEEQYRKEVEVKQQLELSLQTLEMELRTVKSNLNQVVQERNDAQRQLSREQNARMLQDGILTNHLSKQKEIEMAQKKMNSENSHSHEEEKDLSHKNSMLQEEIAMLRLEIDTIKNQNQEKEKKCFEDLKIVKEKNEDLQKTIKQNEETLTQTISQYNGRLSVLTAENAMLNSKLENEKQSKERLEAEVESYHSRLAAAIHDRDQSETSKRELELAFQRARDECSRLQDKMNFDVSNLKDNNEILSQQLFKTESKLNSLEIEFHHTRDALREKTLGLERVQKDLSQTQCQMKEMEQKYQNEQVKVNKYIGKQESVEERLSQLQSENMLLRQQLDDAHNKADNKEKTVINIQDQFHAIVQKLQAESEKQSLLLEERNKELISECNHLKERQYQYENEKAEREVVVRQLQQELADTLKKQSMSEASLEVTSRYRINLEDETQDLKKKLGQIRNQLQEAQDRHTEAVRCAEKMQDHKQKLEKDNAKLKVTVKKQMDKIEELQKNLLNANLSEDEKEQLKKLMELKQSLECNLDQEMKKNVELEREITGFKNLLKMTRKKLNEYENGEFSFHGDLKTSQFEMDIQINKLKHKIDDLTAELETAGSKCLHLDTKNQILQEELLSMKTVQKKCEKLQKNKKKLEQEVINLRSHIERNMVELGQVKQYKQEIEERARQEIAEKLKEVNLFLQAQAASQENLEQFRENNFASMKSQMELRIKDLESELSKIKTSQEDFNKTELEKYKQLYLEELKVRKSLSSKLTKTNERLAEVNTKLLVEKQQSRSLFTTLTTRPVMEPPCVGNLNNSLDLNRKLIPRENLVISTSNPRASNNSMENYLSKMQQELEKNITRELKEAAAELESGSIASPLGSTDESNLNQDLVWKASREYVQVLKKNYMI

SEQ ID NO: 37502 - protein, 1710 aa, Homo sapiens
MKKIFSKKGESPLGSFARRQRSSAGGGGEPGEGAYSQPGYHVRDRDLGKIHKAASAGNVAKVQQILLLRKNGLNDRDKMNRTALHLACANGHPEVVTLLVDRKCQLNVCDNENRTALMKAVQCQEEKCATILLEHGADPNLADVHGNTALHYAVYNEDISVATKLLLYDANIEAKNKDDLTPLLLAVSGKKQQMVEFLIKKKANVNAVDKLESSHQLISEYKEERIPKHSSQNSNSVDESSEDSLSRLSGKPGVDDSWPTSDDEDLNFDTKNVPKPSLAKLMTASQQSRKNLEATYGTVRTGNRTLFEDRDSDSQDEVVVESLPTTSIKVQCFSHPTYQSPDLLPKPSHKSLANPGLMKEEPTKPGIAKKENGIDIIESAPLEQTNNDNLTYVDEVHKNNRSDMMSALGLGQEEDIESPWDSESISENFPQKYVDPLAGAADGKEKNIGNEQAEDVFYIPSCMSGSRNFKMAKLEDTRNVGMPVAHMESPERYLHLKPTIEMKDSVPNKAGGMKDVQTSKAAEHDLEVASEEEQEREGSENNQPQVEEERKKHRNNEMEVSANIHDGATDDAEDDDDDDGLIQKRKSGETDHQQFPRKENKEYASSGPALQMKEVKSTEKEKRTSKESVNSPVFGKASLLTGGLLQVDDDSSLSEIDEDEGRPTKKTSNEKNKVKNQIQSMDDVDDLTQSSETASEDCELPHSSYKNFMLLIEQLGMECKDSVSLLKIQDAALSCERLLELKKNHCELLTVKIKKMEDKVNVLQRELSETKEIKSQLEHQKVEWERELCSLRFSLNQEEEKRRNADTLYEKIREQLRRKEEQYRKEVEVKQQLELSLQTLEMELRTVKSNLNQVVQERNDAQRQLSREQNARMLQDGILTNHLSKQKEIEMAQKKMNSENSHSHEEEKDLSHKNSMLQEEIAMLRLEIDTIKNQNQEKEKKCFEDLKIVKEKNEDLQKTIKQNEETLTQTISQYNGRLSVLTAENAMLNSKLENEKQSKERLEAEVESYHSRLAAAIHDRDQSETSKRELELAFQRARDECSRLQDKMNFDVSNLKDNNEILSQQLFKTESKLNSLEIEFHHTRDALREKTLGLERVQKDLSQTQCQMKEMEQKYQNEQVKVNKYIGKQESVEERLSQLQSENMLLRQQLDDAHNKADNKEKTVINIQDQFHAIVQKLQAESEKQSLLLEERNKELISECNHLKERQYQYENEKAEREVVVRQLQQELADTLKKQSMSEASLEVTSRYRINLEDETQDLKKKLGQIRNQLQEAQDRHTEAVRCAEKMQDHKQKLEKDNAKLKVTVKKQMDKIEELQKNLLNANLSEDEKEQLKKLMELKQSLECNLDQEMKKNVELEREITGFKNLLKMTRKKLNEYENGEFSFHGDLKTSQFEMDIQINKLKHKIDDLTAELETAGSKCLHLDTKNQILQEELLSMKTVQKKCEKLQKNKKKLEQEVINLRSHIERNMVELGQVKQYKQEIEERARQEIAEKLKEVNLFLQAQAASQENLEQFRENNFASMKSQMELRIKDLESELSKIKTSQEDFNKTELEKYKQLYLEELKVRKSLSSKLTKTNERLAEVNTKLLVEKQQSRSLFTTLTTRPVMEPPCVGNLNNSLDLNRKLIPRENLVISTSNPRASNNSMENYLSKMQQELEKNITRELKEAAAELESGSIASPLGSTDESNLNQDLVWKASREYVQVLKKNYMI

SEQ ID NO: 37503 - protein, 1726 aa, Homo sapiens
MKKIFSKKGESPLGSFARRQRSSAGGGGEPGEGAYSQPGYHVRDRDLGKIHKAASAGNVAKVQQILLLRKNGLNDRDKMNRTALHLACANGHPEVVTLLVDRKCQLNVCDNENRTALMKAVQCQEEKCATILLEHGADPNLADVHGNTALHYAVYNEDISVATKLLLYDANIEAKNKDDLTPLLLAVSGKKQQMVEFLIKKKANVNAVDKLESSHQLISEYKEERIPKHSSQNSNSVDESSEDSLSSLFYFIFFETKSCTVAQAGVLQHDLSSLQSLLPGFTQFFCLHLPSSWDHRLSGKPGVDDSWPTSDDEDLNFDTKNVPKPSLAKLMTASQQSRKNLEATYGTVRTGNRTLFEDRDSDSQDEVVVESLPTTSIKVQCFSHPTYQSPDLLPKPSHKSLANPGLMKEEPTKPGIAKKENGIDIIESAPLEQTNNDNLTYVDEVHKNNRSDMMSALGLGQEEDIESPWDSESISENFPQKYVDPLAGAADGKEKNIGNEQAEESPERYLHLKPTIEMKDSVPNKAGGMKDVQTSKAAEHDLEVASEEEQEREGSENNQPQVEEERKKHRNNEMEVSANIHDGATDDAEDDDDDDGLIQKRKSGETDHQQFPRKENKEYASSGPALQMKEVKSTEKEKRTSKESVNSPVFGKASLLTGGLLQVDDDSSLSEIDEDEGRPTKKTSNEKNKVKNQIQSMDDVDDLTQSSETASEDCELPHSSYKNFMLLIEQLGMECKDSVSLLKIQDAALSCERLLELKKNHCELLTVKIKKMEDKVNVLQRELSETKEIKSQLEHQKVEWERELCSLRFSLNQEEEKRRNADTLYEKIREQLRRKEEQYRKEVEVKQQLELSLQTLEMELRTVKSNLNQVVQERNDAQRQLSREQNARMLQDGILTNHLSKQKEIEMAQKKMNSENSHSHEEEKDLSHKNSMLQEEIAMLRLEIDTIKNQNQEKEKKCFEDLKIVKEKNEDLQKTIKQNEETLTQTISQYNGRLSVLTAENAMLNSKLENEKQSKERLEAEVESYHSRLAAAIHDRDQSETSKRELELAFQRARDECSRLQDKMNFDVSNLKDNNEILSQQLFKTESKLNSLEIEFHHTRDALREKTLGLERVQKDLSQTQCQMKEMEQKYQNEQVKVNKYIGKQESVEERLSQLQSENMLLRQQLDDAHNKADNKEKTVINIQDQFHAIVQKLQAESEKQSLLLEERNKELISECNHLKERQYQYENEKAEREVVVRQLQQELADTLKKQSMSEASLEVTSRYRINLEDETQDLKKKLGQIRNQLQEAQDRHTEAVRCAEKMQDHKQKLEKDNAKLKVTVKKQMDKIEELQKNLLNANLSEDEKEQLKKLMELKQSLECNLDQEMKKNVELEREITGFKNLLKMTRKKLNEYENGEFSFHGDLKTSQFEMDIQINKLKHKIDDLTAELETAGSKCLHLDTKNQILQEELLSMKTVQKKCEKLQKNKKKLEQEVINLRSHIERNMVELGQVKQYKQEIEERARQEIAEKLKEVNLFLQAQAASQENLEQFRENNFASMKSQMELRIKDLESELSKIKTSQEDFNKTELEKYKQLYLEELKVRKSLSSKLTKTNERLAEVNTKLLVEKQQSRSLFTTLTTRPVMEPPCVGNLNNSLDLNRKLIPRENLVISTSNPRASNNSMENYLSKMQQELEKNITRELKEAAAELESGSIASPLGSTDESNLNQDLVWKASREYVQVLKKNYMI

SEQ ID NO: 37504 - protein, 213 aa, Homo sapiens
  VARIANT 1: note = MOD_RES - Any amino acid
XFRENNFASMKSQMELRIKDLESELSKIKTSQEDFNKTELEKYKQLYLEELKVRKSLSSKLTKTNERLAEVNTKLLVEKQQSRSLFTTLTTRPVMEPPCVGNLNNSLDLNRKLIPRENLVISTSNPRASNNSMENYLSKMQQELEKNITRELKEAAAELESGSIASPLGSTDESNLNQDLVWKASREYGPSDETPHDYVLMTDQCLTSRTDLQ

SEQ ID NO: 37505 - protein, 1086 aa, Homo sapiens
MSRVCIVVLEEVEDESPAFISKLPQENKSLHSPPSGNVLVRYPSLVQAIFNGDPDEVRALIFKKEDVNFQDNEKRTPLHAAAYLGDAEIIELLILSGARVNAKDSKWLTPLHRAVASCSEEAVQVLLKHSADVNARDKNWQTPLHIAAANKAVKCAEALVPLLSNVNVSDRAGRTALHHAAFSGHGEMVKLLLSRGANINAFDKKDRRAIHWAAYMGHIEVVKLLVSHGAEVTCKDKKSYTPLHAAASSGMISVVKYLLDLGVDMNEPNAYGNTPLHVACYNGQDVVVNELIDCGAIVNQKNEKGFTPLHFAAASTHGALCLELLVGNGADVNMKSKDGKTPLHMTALHGRFSRSQTIIQSGAVIDCEDKNGNTPLHIAARYGHELLINTLITSGADTAKRGIHGMFPLHLAALSGFSDCCRKLLSSGFDIDTPDDFGRTCLHAAAAGGNLECLNLLLNTGADFNKKDKFGRSPLHYAAANCNYQCLFALVGSGASVNDLDERGCTPLHYAATSDTDGKCLEYLLRNDANPGIRDKQGYNAVHYSAAYGHRLCLQLIASETPLDVLMETSGTDMLSDSDNRATISPLHLAAYHGHHQALEVLVQSLLDLDVRNSSGRTPLDLAAFKGHVECVDVLINQGASILVKDYILKRTPIHAAATNGHSECLRLLIGNAEPQNAVDIQDGNGQTPLMLSVLNGHTDCVYSLLNKGANVDAKDKWGRTALHRGAVTGHEECVDALLQHGAKCLLRDSRGRTPIHLSAACGHIGVLGALLQSAASMDANPATADNHGYTALHWACYNGHETCVELLLEQEVFQKTEGNAFSPLHCAVINDNEGAAEMLIDTLGASIVNATDSKGRTPLHAAAFTDHVECLQLLLSHNAQVNSVDSTGKTPLMMAAENGQTNTVEMLVSSASAELTLQDNSKNTALHLACSKGHETSALLILEKITDRNLINATNAALQTPLHVAARNGLTMVVQELLGKGASVLAVDENGYTPALACAPNKDVADCLALILATMMPVSSSSPLSSLTFNAINRYTNTSKTVSFEALPIMRNEPSSYCSFNNIGGEQEYLYTDVDELNDSDSETY

SEQ ID NO: 37506 - protein, 1053 aa, Homo sapiens
MAFLKLRDQPSLVQAIFNGDPDEVRALIFKKEDVNFQDNEKRTPLHAAAYLGDAEIIELLILSGARVNAKDSKWLTPLHRAVASCSEEAVQVLLKHSADVNARDKNWQTPLHIAAANKAVKCAEALVPLLSNVNVSDRAGRTALHHAAFSGHGEMVKLLLSRGANINAFDKKDRRAIHWAAYMGHIEVVKLLVSHGAEVTCKDKKSYTPLHAAASSGMISVVKYLLDLGVDMNEPNAYGNTPLHVACYNGQDVVVNELIDCGAIVNQKNEKGFTPLHFAAASTHGALCLELLVGNGADVNMKSKDGKTPLHMTALHGRFSRSQTIIQSGAVIDCEDKNGNTPLHIAARYGHELLINTLITSGADTAKRGIHGMFPLHLAALSGFSDCCRKLLSSGFDIDTPDDFGRTCLHAAAAGGNLECLNLLLNTGADFNKKDKFGRSPLHYAAANCNYQCLFALVGSGASVNDLDERGCTPLHYAATSDTDGKCLEYLLRNDANPGIRDKQGYNAVHYSAAYGHRLCLQLIASETPLDVLMETSGTDMLSDSDNRATISPLHLAAYHGHHQALEVLVQSLLDLDVRNSSGRTPLDLAAFKGHVECVDVLINQGASILVKDYILKRTPIHAAATNGHSECLRLLIGNAEPQNAVDIQDGNGQTPLMLSVLNGHTDCVYSLLNKGANVDAKDKWGRTALHRGAVTGHEECVDALLQHGAKCLLRDSRGRTPIHLSAACGHIGVLGALLQSAASMDANPATADNHGYTALHWACYNGHETCVELLLEQEVFQKTEGNAFSPLHCAVINDNEGAAEMLIDTLGASIVNATDSKGRTPLHAAAFTDHVECLQLLLSHNAQVNSVDSTGKTPLMMAAENGQTNTVEMLVSSASAELTLQDNSKNTALHLACSKGHETSALLILEKITDRNLINATNAALQTPLHVAARNGLTMVVQELLGKGASVLAVDENGYTPALACAPNKDVADCLALILATMMPVSSSSPLSSLTFNAINRYTNTSKTVSFEALPIMRNEPSSYCSFNNIGGEQEYLYTDVDELNDSDSETY

SEQ ID NO: 37507 - protein, 1053 aa, Homo sapiens; identical to SEQ ID NO: 37506

SEQ ID NO: 37508 - protein, 1341 aa, Homo sapiens
MTKRKKTINLNIQDAQKRTALHWACVNGHEEVVTFLVDRKCQLDVLDGEHRTPLMKALQCHQEACANILIDSGADINLVDVYGNTALHYAVYSEILSVVAKLLSHGAVIEVHNKASLTPLLLSITKRSEQIVEFLLIKNANANAVNKYKCTALMLAVCHGSSEIVGMLLQQNVDVFAADICGVTAEHYAVTCGFHHIHEQIMEYIRKLSKNHQNTNPEGTSAGTPDEAAPLAERTPDTAESLVEKTPDEAAPLVERTPDTAESLVEKTPDEAASLVEGTSDKIQCLEKATSGKFEQSAEETPREITSPAKETSEKFTWPAKGRPRKIAWEKKEDTPREIMSPAKETSEKFTWAAKGRPRKIAWEKKETPVKTGCVARVTSNKTKVLEKGRSKMIACPTKESSTKASANDQRFPSESKQEEDEEYSCDSRSLFESSAKIQVCIPESIYQKVMEINREVEEPPKKPSAFKPAIEMQNSVPNKAFELKNEQTLRADPMFPPESKQKDYEENSWDSESLCETVSQKDVCLPKATHQKEIDKINGKLEESPNKDGLLKATCGMKVSIPTKALELKDMQTFKAEPPGKPSAFEPATEMQKSVPNKALELKNEQTLRADEILPSESKQKDYEENSWDTESLCETVSQKDVCLPKAAHQKEIDKINGKLEGSPVKDGLLKANCGMKVSIPTKALELMDMQTFKAEPPEKPSAFEPAIEMQKSVPNKALELKNEQTLRADEILPSESKQKDYEESSWDSESLCETVSQKDVCLPKATHQKEIDKINGKLEESPDNDGFLKAPCRMKVSIPTKALELMDMQTFKAEPPEKPSAFEPAIEMQKSVPNKALELKNEQTLRADQMFPSESKQKKVEENSWDSESLRETVSQKDVCVPKATHQKEMDKISGKLEDSTSLSKILDTVHSCERARELQKDHCEQRTGKMEQMKKKFCVLKKKLSEAKEIKSQLENQKVKWEQELCSVRLTLNQEEEKRRNADILNEKIREELGRIEEQHRKELEVKQQLEQALRIQDIELKSVESNLNQVSHTHENENYLLHENCMLKKEIAMLKLEIATLKHQYQEKENKYFEDIKILKEKNAELQMTLKLKEESLTKRASQYSGQLKVLIAENTMLTSKLKEKQDKEILEAEIESHHPRLASAVQDHDQIVTSRKSQEPAFHIAGDACLQRKMNVDVSSTIYNNEVLHQPLSEAQRKSKSLKINLNYAGDALRENTLVSEHAQRDQRETQCQMKEAEHMYQNEQDNVNKHTEQQESLDQKLFQLQSKNMWLQQQLVHAHKKADNKSKITIDIHFLERKMQHHLLKEKNEEIFNYNNHLKNRIYQYEKEKAETENS

SEQ ID NO: 37509 - protein, 119 aa, Homo sapiens
MGTRTLQFEISDSHEKEEDLLHKNHLMQDEIARLRLEIHTIKNQILEKKYLKDIEIIKRKHEDLQKALKQNGEKSTKTIAHYSGQLTALTDENTMLRSKLEKEKQSRQRLTKWNHTIVD

SEQ ID NO: 37510 - protein, 300 aa, Homo sapiens
MAAAAGDADDEPRSGHSSSEGECAVAPEPLTDAEGLFSFADFGSALGGGGAGLSGRASGGAQSPLRYLHVLWQQDAEPRDELRCKIPAGRLRRAARPHRRLGPTGKEVHALKRLRDSANANDVETVQQLLEDGADPCAADDKGRTALHFASCNGNDQIVQLLLDHGADPNQRDGLGNTPLHLAACTNHVPVITTLLRGGARVDALDRAGRTPLHLAKSKLNILQEGHAQCLEAVRLEVKQIIHMLREYLERLGQHEQRERLDDLCTRLQMTSTKEQVDEVTDLLASFTSLSLQMQSMEKR

SEQ ID NO: 37511 - protein, 208 aa, Homo sapiens
  VARIANT 1: note = MOD_RES - Any amino acid
XRDELRCKIPAGRLRRAARPHRRLGPTGKEVHALKRLRDSANANDVETVQQLLEDGADPCAADDKGRTALHFASCNGNDQIVQLLLDHGADPNQRDGLGNTPLHLECSPQLVPAGARVDALDRAGRTPLHLAKSKLNILQEGHAQCLEAVRLEVKQIIHMLREYLERLGQHEQRERLDDLCTRLQMTSTKEQVDEVTDLLASFTSLSL

SEQ ID NO: 37512 - protein, 727 aa, Homo sapiens
MSQQDAVAALSERLLVAAYKGQTENVVQLINKGARVAVTKHGRTPLHLAANKGHLPVVQILLKAGCDLDVQDDGDQTALHRATVVGNTEIIAALIHEGCALDRQDKDGNTALHEASWHGFSQSAKLLIKAGANVLAKNKAGNTALHLACQNSHSQSTRVLLLAGSRADLKNNAGDTCLHVAARYNHLSIIRLLLTAFCSVHEKNQAGDTALHVAAALNHKKVAKILLEAGADTTIVNNAGQTPLETARYHNNPEVALLLTKAPQVLRFSRGRSLRKKRERLKEERRAQSVPRDEVAQSKGSVSAGDTPSSEQAVARKEEAREEFLSASPEPRAKDDRRRKSRPKVSAFSDPTPPADQQPGHQKNLHAHNHPKKRNRHRCSSPPPPHEFRAYQLYTLYRGKDGKVMQAPINGCRCEPLINKLENQLEATVEEIKAELGSVQDKMNTKLGQMENKTQHQMRVLDKLMVERLSAERTECLNRLQQHSDTEKHEGEKRQISLVDELKTWCMLKIQNLEQKLSGDSRACRAKSTPSTCESSTGVDQLVVTAGPAAASDSSPPVVRPKEKALNSTATQRLQQELSSSDCTGSRLRNVKVQTALLPMNEAARSDQQAGPCVNRGTQTKKSGKSGPTRHRAQQPAASSTCGQPPPATGSEQTGPHIRDTSQALELTQYFFEAVSTQMEKWYERKIEEARSQANQKAQQDKATLKEHIKSLEEELAKLRTRVQKEN

SEQ ID NO: 37513 - protein, 692 aa, Homo sapiens
MSQQDAVAALSERLLVAAYKGQTENVVQLINKGARVAVTKHGRTPLHLAANKGHLPVVQILLKAGCDLDVQDDGDQTALHRATVVGNTEIIAALIHEGCALDRQDKDGNTALHEASWHGFSQSAKLLIKAGANVLAKNKAGNTALHLACQNSHSQSTRVLLLAGSRADLKNNAGDTCLHVAARYNHLSIIRLLLTAFCSVHEKNQAGDTALHVAAALNHKKVAKILLEAGADTTIVNNAGQTPLETARYHNNPEVALLLTKAPQGSVSAGDTPSSEQAVARKEEAREEFLSASPEPRAKDDRRRKSRPKVSAFSDPTPPADQQPGHQKNLHAHNHPKKRNRHRCSSPPPPHEFRAYQLYTLYRGKDGKVMQAPINGCRCEPLINKLENQLEATVEEIKAELGSVQDKMNTKLGQMENKTQHQMRVLDKLMVERLSAERTECLNRLQQHSDTEKHEGEKRQISLVDELKTWCMLKIQNLEQKLSGDSRACRAKSTPSTCESSTGVDQLVVTAGPAAASDSSPPVVRPKEKALNSTATQRLQQELSSSDCTGSRLRNVKVQTALLPMNEAARSDQQAGPCVNRGTQTKKSGKSGPTRHRAQQPAASSTCGQPPPATGSEQTGPHIRDTSQALELTQYFFEAVSTQMEKWYERKIEEARSQANQKAQQDKATLKEHIKSLEEELAKLRTRVQKEN

SEQ ID NO: 37514 - protein, 722 aa, Homo sapiens
MSQQDAVAALSERLLVAAYKGQTENVVQLINKGARVAVTKHGRTPLHLAANKGHLPVVQILLKAGCDLDVQDDGDQTALHRATVVGNTEIIAALIHEGCALDRQDKDGNTALHEASWHGFSQSAKLLIKAGANVLAKNKAGNTALHLACQNSHSQSTRVLLLAGSRADLKNNAGDTCLHVAARYNHLSIIRLLLTAFCSVHEKNQAGDTALHVAAALNHKKVAKILLEAGADTTIVNNAGQTPLETARYHNNPEVALLLTKAPQVLRFSRGRSLRKKRERLKEERRAQSVPRDEVAQSKGSVSAGDTPSSEQAVARKEEAREEFLSASPEPRAKDDRRRKSRPKVSAFSDPTPPADQQPGHQKNLHAHNHPKKRNRHRCSSPPPPHEFRAYQLYTLYRGKDGKVMQAPINGCRCEPLINKLENQLEATVEEIKAELGSVQDKMNTKLGQMENKTQHQMRVLDKLMVERLSAERTECLNRLQQHSDTEKHEGEKRQISLVDELKTWCMLKIQNLEQKLSGDSRACRAKSTPSTCVDQLVVTAGPAAASDSSPPVVRPKEKALNSTATQRLQQELSSSDCTGSRLRNVKVQTALLPMNEAARSDQQAGPCVNRGTQTKKSGKSGPTRHRAQQPAASSTCGQPPPATGSEQTGPHIRDTSQALELTQYFFEAVSTQMEKWYERKIEEARSQANQKAQQDKATLKEHIKSLEEELAKLRTRVQKEN

SEQ ID NO: 37515 - protein, 175 aa, Homo sapiens
MSQQDAVAALSERLLVAAYKGQTENVVQLINKGARVAVTKHGRTPLHLAANKGHLPVVQILLKAGCDLDVQDDGDQTALHRATVVGNTEIIAALIHEGCALDRQDKDGNTALHEASWHGFSQSAKLLIKAGANVLAKNKAGNTALHLACQNSHSQSTRVLLLAGSRADLKNNAGD

SEQ ID NO: 37516 - protein, 80 aa, Homo sapiens
MSQQDAVAALSERLLVAAYKGQTENVVQLINKGARVAVTKHGRTPLHLAANKGHLPVVQILLKAGCDLDVQDDGDQTALH

SEQ ID NO: 37517 - protein, 727 aa, Homo sapiens; identical to SEQ ID NO: 37512

SEQ ID NO: 37518 - protein, 118 aa, Homo sapiens
MSQQDAVAALSERLLVAAYKGQTENVVQLINKGARVAVTKHGRTPLHLAANKGHLPVVQILLKAGCDLDVQDDGDQTALHRATVVGNTEIIAALIHEGCALDRQDKDGNTALHEASWH

SEQ ID NO: 37519 - protein, 102 aa, Homo sapiens
MSQQDAVAALSERLLVAAYKGQTENVVQLINKGARVAVTKHGRTPLHLAANKGHLPVVQILLKAGCDLDVQDDGDQTALHRATVVGNTEIIAALIHEGCALD

SEQ ID NO: 37520 - protein, 663 aa, Homo sapiens
MSQQDAVAALSERLLVAAYKGQTENVVQLINKGARVAVTKHGRTPLHLAANKGHLPVVQILLKAGCDLDVQDDGDQTALHRATVVGNTEIIAALIHEGCALDRQDKAGNTALHLACQNSHSQSTRVLLLAGSRADLKNNAGDTCLHVAARYNHLSIIRLLLTAFCSVHEKNQAGDTALHVAAALNHKKVAKILLEAGADTTIVNNVLRFSRGRSLRKKRERLKEERRAQSVPRDEVAQSKGSVSAGDTPSSEQAVARKEEAREEFLSASPEPRAKDDRRRKSRPKVSAFSDPTPPADQQPGHQKNLHAHNHPKKRNRHRCSSPPPPHEFRAYQLYTLYRGKDGKVMQAPINGCRCEPLINKLENQLEATVEEIKAELGSVQDKMNTKLGQMENKTQHQMRVLDKLMVERLSAERTECLNRLQQHSDTEKHEGEKRQISLVDELKTWCMLKIQNLEQKLSGDSRACRAKSTPSTCVDQLVVTAGPAAASDSSPPVVRPKEKALNSTATQRLQQELSSSDCTGSRLRNVKVQTALLPMNEAARSDQQAGPCVNRGTQTKKSGKSGPTRHRAQQPAASSTCGQPPPATGSEQTGPHIRDTSQALELTQYFFEAVSTQMEKWYERKIEEARSQANQKAQQDKATLKEHIKSLEEELAKLRTRVQKEN

SEQ ID NO: 37521 - protein, 254 aa, Homo sapiens
MNKLFSFWKRKNETRSQGYNLREKDLKKLHRAASVGDLKKLKEYLQIKKYDVNMQDKKYRTPLHLACANGHTDVVLFLIEQQCKINVRDSENKSPLIKAVQCQNEDCATILLNFGADPDLRDIRYNTVLHYAVCGQSLSLVEKLLEYEADLEAKNKDGYTPLLVAVINNNPKMVKFLLEKGADVNASDNYQRTALILAVSGEPPCLVKLLLQQGVELCYEGIVDSQLRNMFISMVLLHRYPQFTASHGKKKHAK

SEQ ID NO: 37522 - protein, 274 aa, Homo sapiens
MNKLFSFWKRKNETRSQGYNLREKDLKKLHRAASVGDLKKLKEYLQIKKYDVNMQDKKYSVVQSSRWLLSYTTPLNDFIRTPLHLACANGHTDVVLFLIEQQCKINVRDSENKSPLIKAVQCQNEDCATILLNFGADPDLRDIRYNTVLHYAVCGQSLSLVEKLLEYEADLEAKNKDGYTPLLVAVINNNPKMVKFLLEKGADVNASDNYQRTALILAVSGEPPCLVKLLLQQGVELCYEGIVDSQLRNMFISMVLLHRYPQFTASHGKKKHAK

SEQ ID NO: 37523 - protein, 201 aa, Homo sapiens
MQDKKYRTPLHLACANGHTDVVLFLIEQQCKINVRDSENKSPLIKAVQCQNEDCATILLNFGADPDLRDIRYNTVLHYAVCGQSLSLVEKLLEYEADLEAKNKDGYTPLLVAVINNNPKMVKFLLEKGADVNASDNYQRTALILAVSGEPPCLVKLLLQQGVELCYEGIVDSQLRNMFISMVLLHRYPQFTASHGKKKHAK

SEQ ID NO: 37524 - protein, 313 aa, Homo sapiens
MDTSTNLDIGAQLIVEECPSTYSLTGMPDIKIEHPLDPNSEEGSAQGVAMGMKFILPNRFDMNVCSRFVKSLNEEDSKNIQDQVNSDLEVASVLFKAECNIHTSPSPGIQVRHVYTPSTTKHFSPIKQSTTLTNKHRGNEVSTTPLLANSLSVHQLAAQGEMLYLATRIEQENVINHTDEEGFTPLMWAAAHGQIAVVEFLLQNGADPQLLGKGRESALSLACSKGYTDIVKMLLDCGVDVNEYDWNGGTPLLYAVHGNHVKCVKMLLESGADPTIETDSGYNSMDLAVALGYRSVQQVIESHLLKLLQNIKE

SEQ ID NO: 37525 - protein, 475 aa, Homo sapiens
MAASALRGLPVAGGGESSESEDDGWEIGYLDRTSQKLKRLLPIEEKKEKFKKAMTIGDVSLVQELLDSGISVDSNFQYGWTPLMYAASVANAELVRVLLDRGANASFEKDKQSILITACSAHGSEEQILKCVELLLSRNADPNVACRRLMTPIMYAARDGHTQVVALLVAHGAEVNTQDENGYTALTWAARQGHKNIVLKLLELGANKMLQTKDGKMPSEIAKRNKHHEIFNLLSFTLNPLEGKLQQLTKEDTICKILTTDSDREKDHIFSSYTAFGDLEVFLHGLGLEHMTDLLKERDITLRHLLTMREDEFTKNGITSKDQQKILAALKELQVEEIQFGELSEETKLEISGDEFLNFLLKLNKQCGHLITAVQNVITELPVNSQKITLEWASPQNFTSVCEELVNNVEDLSEKVCKLKDLIQKLQNERENDPTHIQLREEVSTWNSRILKRTAITICGFGFLLFICKLTFQRK

SEQ ID NO: 37526 - protein, 346 aa, Homo sapiens
MAMVSEFLKQAWFIENEEQEYVQTVKSSKGGPGSAVSPYPTFNPSSDVAALHKAIMVKGVDEATIIDILTKRNNAQRQQIKAAYLQETGKPLDETLKKALTGHLEEVVLALLKTPAQFDADELRAAMKGLGTDEDTLIEILASRTNKEIRDINRVYREELKRDLAKDITSDTSGDFRNALLSLAKGDRSEDFGVNEDLADSDARALYEAGERRKGTDVNVFNTILTTRSYPQLRRVFQKYTKYSKHDMNKVLDLELKGDIEKCLTAIVKCATSKPAFFAEKLHQAMKGVGTRHKALIRIMVSRSEIDMNDIKAFYQKMYGISLCQAILDETKGDYEKILVALCGGN

SEQ ID NO: 37527 - protein, 346 aa, Homo sapiens; identical to SEQ ID NO: 37526

SEQ ID NO: 37528 - protein, 115 aa, Homo sapiens
MAMVSEFLKQAWFIENEEQEYVQTVKSSKGGPGSAVSPYPTFNPSSDVAALHKAIMVKGVDEATIIDILTKRNNAQRQQIKAAYLQETGKPLDETLKKALTGHLEEVVLALLKTP

SEQ ID NO: 37529 - protein, 204 aa, Homo sapiens
MNLILRYTFSKMAMVSEFLKQAWFIENEEQEYVQTVKSSKGGPGSAVSPYPTFNPSSDVAALHKAIMVKGVDEATIIDILTKRNNAQRQQIKAAYLQETGKPLDETLKKALTGHLEEVVLALLKTPAQFDADELRAAMKGLGTDEDTLIEILASRTNKEIRDINRVYREELKRDLAKDITSDTSGDFRNALLSLAKGDRSEDFG

SEQ ID NO: 37530 - protein, 324 aa, Homo sapiens
MFCGDYVQGTIFPAPNFNPIMDAQMLGGALQGFDCDKDMLINILTQRCNAQRMMIAEAYQSMYGRDLIGDMREQLSDHFKDVMAGLMYPPPLYDAHELWHAMKGVGTDENCLIEILASRTNGEIFQMREAYCLQYSNNLQEDIYSETSGHFRDTLMNLVQGTREEGYTDPAMAAQDAMVLWEACQQKTGEHKTMLQMILCNKSYQQLRLVFQEFQNISGQDMVDAINECYDGYFQELLVAIVLCVRDKPAYFAYRLYSAIHDFGFHNKTVIRILIARSEIDLLTIRKRYKERYGKSLFHDIRNFASGHYKKALLAICAGDAEDY

SEQ ID NO: 37531 - protein, 324 aa, Homo sapiens
MFCSNLVQGTIFPAPNFNPIMDAQMLGGALQGFDCDKDMLINILTQRCNAQRMMIAEAYQSMYGRDLIGDMREQLSDHFKDVMAGLMYPPPLYDAHELWHAMKGVGTDENCLIEILASRTNGEIFQMREAYCLQYSNNLQEDIYSETSGHFRDTLMNLVQGTREEGYTDPAMAAQDAMVLWEACQQKTGEHKTMLQMILCNKSYQQLRLVFQEFQNISGQDMVDAINECYDGYFQELLVAIVLCVRDKPAYFAYRLYSAIHDFGFHNKTVIRILIARSEIDLLTIRKRYKERYGKSLFHDIRNFASGHYKKALLAICAGDAEDY

SEQ ID NO: 37532 - protein, 505 aa, Homo sapiens
MSYPGYPPPPGGYPPAAPGGGPWGGAAYPPPPSMPPIGLDNVATYAGQFNQDYLSGMAANMSGTFGGANMPNLYPGAPGAGYPPVPPGGFGQPPSAQQPVPPYGMYPPPGGNPPSRMPSYPPYPGAPVPGQPMPPPGQQPPGAYPGQPPVTYPGQPPVPLPGQQQPVPSYPGYPGSGTVTPAVPPTQFGSRGTITDAPGFDPLRDAEVLRKAMKGFGTDEQAIIDCLGSRSNKQRQQILLSFKTAYGKDLIKDLKSELSGNFEKTILALMKTPVLFDIYEIKEAIKGVGTDEACLIEILASRSNEHIRELNRAYKAEFKKTLEEAIRSDTSGHFQRLLISLSQGNRDESTNVDMSLAQRDAQELYAAGENRLGTDESKFNAVLCSRSRAHLVAVFNEYQRMTGRDIEKSICREMSGDLEEGMLAVVKCLKNTPAFFAERLNKAMRGAGTKDRTLIRIMVSRSETDLLDIRSEYKRMYGKSLYHDISGDTSGDYRKILLKICGGND

SEQ ID NO: 37533 - protein, 505 aa, Homo sapiens; identical to SEQ ID NO: 37532

SEQ ID NO: 37534 - protein, 162 aa, Homo sapiens
MSLAQRDAQELYAAGENRLGTDESKFNAVLCSRSRAHLVAVFNEYQRMTGRDIEKSICREMSGDLEEGMLAVVKCLKNTPAFFAERLNKAMRGAGTKDRTLIRIMVSRSETDLLDIRSEYKRMYGKSLYHDISSISCMPASYGHLEEATCLALKLLRVEGND

SEQ ID NO: 37535 - protein, 505 aa, Homo sapiens; identical to SEQ ID NO: 37532

SEQ ID NO: 37536 - protein, 505 aa, Homo sapiens; identical to SEQ ID NO: 37532

SEQ ID NO: 37537 - protein, 505 aa, Homo sapiens; identical to SEQ ID NO: 37532

SEQ ID NO: 37538 - protein, 412 aa, Homo sapiens
MRGSSTRTISRECWRLWAAPLCPAACSSLWDVSTPRRKPTLQDALISAIPYPGQPPVTYPGQPPVPLPGQQQPVPSYPGYPGSGTVTPAVPPTQFGSRGTITDAPGFDPLRDAEVLRKAMKGFGTDEQAIIDCLGSRSNKQRQQILLSFKTAYGKDLIKDLKSELSGNFEKTILALMKTPVLFDIYEIKEAIKGVGTDEACLIEILASRSNEHIRELNRAYKAEFKKTLEEAIRSDTSGHFQRLLISLSQGNRDESTNVDMSLAQRDAQELYAAGENRLGTDESKFNAVLCSRSRAHLVAVFNEYQRMTGRDIEKSICREMSGDLEEGMLAVVKCLKNTPAFFAERLNKAMRGAGTKDRTLIRIMVSRSETDLLDIRSEYKRMYGKSLYHDISGDTSGDYRKILLKICGGND

SEQ ID NO: 37539 - protein, 150 aa, Homo sapiens
MSYPGYPPPPGGYPPAAPGGGPWGGAAYPPPPSMPPIGLDNVATYAGQFNQDYLSGMAANMSGTFGGANMPNLYPGAPGAGYPPVPPGGFGQPPSAQQPVPPYGMYPPPGGNPPSRMPSYPPYPGAPVPGQPMPPPGQQPPGAYPGQPPV

SEQ ID NO: 37540 - protein, 505 aa, Homo sapiens; identical to SEQ ID NO: 37532

SEQ ID NO: 37541 - protein, 204 aa, Homo sapiens
MSYPGYPPPPGGYPPAAPGGGPWGGAAYPPPPSMPPIGLDNVATYAGQFNQDYLSGMAANMSGTFGGANMPNLYPGAPGAGYPPVPPGGFGQPPSAQQPVPPYGMYPPPGGNPPSRMPSYPPYPGAPVPGQPMPPPGQQPPGAYPGQPPVTYPGQPPVPLPGQQQPVPSYPGYPGSGTVTPAVPPTQFGSRGTITDAPGFDPLR

SEQ ID NO: 37542 - protein, 148 aa, Homo sapiens
  VARIANT 1: note = MOD_RES - Any amino acid
XENRLGTDESKFNAVLCSRSRAHLVAVFNEYQRMTGRDIEKSICREMSGDLEEGMLAVVKCLKNTPAFFAERLNKAMRGAGTKDRTLIRIMVSRSETDLLDIRSEYKRMYGKSLYHDISSISCMPASYGHLEEATCLALKLLRVEGND

SEQ ID NO: 37543 - protein, 505 aa, Homo sapiens; identical to SEQ ID NO: 37532

SEQ ID NO: 37544 - protein, 472 aa, Homo sapiens
MPPIGLDNVATYAGQFNQDYLSGMAANMSGTFGGANMPNLYPGAPGAGYPPVPPGGFGQPPSAQQPVPPYGMYPPPGGNPPSRMPSYPPYPGAPVPGQPMPPPGQQPPGAYPGQPPVTYPGQPPVPLPGQQQPVPSYPGYPGSGTVTPAVPPTQFGSRGTITDAPGFDPLRDAEVLRKAMKGFGTDEQAIIDCLGSRSNKQRQQILLSFKTAYGKDLIKDLKSELSGNFEKTILALMKTPVLFDIYEIKEAIKGVGTDEACLIEILASRSNEHIRELNRAYKAEFKKTLEEAIRSDTSGHFQRLLISLSQGNRDESTNVDMSLAQRDAQELYAAGENRLGTDESKFNAVLCSRSRAHLVAVFNEYQRMTGRDIEKSICREMSGDLEEGMLAVVKCLKNTPAFFAERLNKAMRGAGTKDRTLIRIMVSRSETDLLDIRSEYKRMYGKSLYHDISGDTSGDYRKILLKICGGND

SEQ ID NO: 37545 - protein, 357 aa, Homo sapiens
MGRQLAGCGDAGKKASFKMSTVHEILCKLSLEGDHSTPPSAYGSVKAYTNFDAERDALNIETAIKTKGVDEVTIVNILTNRSNAQRQDIAFAYQRRTKKELASALKSALSGHLETVILGLLKTPAQYDASELKASMKGLGTDEDSLIEIICSRTNQELQEINRVYKEMYKTDLEKDIISDTSGDFRKLMVALAKGRRAEDGSVIDYELIDQDARDLYDAGVKRKGTDVPKWISIMTERSVPHLQKVFDRYKSYSPYDMLESIRKEVKGDLENAFLNLVQCIQNKPLYFADRLYDSMKGKGTRDKVLIRIMVSRSEVDMLKIRSEFKRKYGKSLYYYIQQDTKGDYQKALLYLCGGDD

SEQ ID NO: 37546 - protein, 339 aa, Homo sapiens
MSTVHEILCKLSLEGDHSTPPSAYGSVKAYTNFDAERDALNIETAIKTKGVDEVTIVNILTNRSNAQRQDIAFAYQRRTKKELASALKSALSGHLETVILGLLKTPAQYDASELKASMKGLGTDEDSLIEIICSRTNQELQEINRVYKEMYKTDLEKDIISDTSGDFRKLMVALAKGRRAEDGSVIDYELIDQDARDLYDAGVKRKGTDVPKWISIMTERSVPHLQKVFDRYKSYSPYDMLESIRKEVKGDLENAFLNLVQCIQNKPLYFADRLYDSMKGKGTRDKVLIRIMVSRSEVDMLKIRSEFKRKYGKSLYYYIQQDTKGDYQKALLYLCGGDD

SEQ ID NO: 37547 - protein, 339 aa, Homo sapiens; identical to SEQ ID NO: 37546

SEQ ID NO: 37548 - protein, 339 aa, Homo sapiens; identical to SEQ ID NO: 37546

SEQ ID NO: 37549 - protein, 81 aa, Homo sapiens
MSTVHEILCKLSLEGDHSTPPSAYGSVKAYTNFDAERDALNIETAIKTKGVDEVTIVNILTNRSNAQRQDIAFAYQRRTKK

SEQ ID NO: 37550 - protein, 176 aa, Homo sapiens
MSTVHEILCKLSLEGDHSTPPSAYGSVKAYTNFDAERDALNIETAIKTKGVDEVTIVNILTNRSNAQRQDIAFAYQRRTKKELASALKSALSGHLETVILGLLKTPAQYDASELKASMKGLGTDEDSLIEIICSRTNQELQEINRVYKEMYKTDLEKDIISDTSGDFRKLMVALAK

SEQ ID NO: 37551 - protein, 47 aa, Homo sapiens
MSTVHEILCKLSLEGDHSTPPSAYGSVKAYTNFDAERDALNIETAIK

SEQ ID NO: 37552 - protein, 134 aa, Homo sapiens
MSTVHEILCKLSLEGDHSTPPSAYGSVKAYTNFDAERDALNIETAIKTKGVDEVTIVNILTNRSNAQRQDIAFAYQRRTKKELASALKSALSGHLETVILGLLKTPAQYDASELKASMKGLGTDEDSLIEIICS

SEQ ID NO: 37553 - protein, 133 aa, Homo sapiens
MSTVHEILCKLSLEGDHSTPPSAYGSVKAYTNFDAERDALNIETAIKTKGVDEVTIVNILTNRSNAQRQDIAFAYQRRTKKELASALKSALSGHLETVILGLLKTPAQYDASELKASMKGLGTDEDSLIEIIC

SEQ ID NO: 37554 - protein, 149 aa, Homo sapiens
MSTVHEILCKLSLEGDHSTPPSAYGSVKAYTNFDAERDALNIETAIKTKGVDEVTIVNILTNRSNAQRQDIAFAYQRRTKKELASALKSALSGHLETVILGLLKTPAQYDASELKASMKGLGTDEDSLIEIICSRTNQELQEINRVYKE

SEQ ID NO: 37555 - protein, 65 aa, Homo sapiens
MSTVHEILCKLSLEGDHSTPPSAYGSVKAYTNFDAERDALNIETAIKTKGVDEVTIVNILTNRSN

SEQ ID NO: 37556 - protein, 119 aa, Homo sapiens
MSTVHEILCKLSLEGDHSTPPSAYGSVKAYTNFDAERDALNIETAIKTKGVDEVTIVNILTNRSNAQRQDIAFAYQRRTKKELASALKSALSGHLETVILGLLKTPAQYDASELKASMK

SEQ ID NO: 37557 - protein, 256 aa, Homo sapiens
MSTVHEILCKLSLEGDHSTPPSAYGSVKAYTNFDAERDALNIETAIKTKGVDEVTIVNILTNRSNAQRQDIAFAYQRRTKKELASALKSALSGHLETVILGLLKTPAQYDASELKASMKGLGTDEDSLIEIICSRTNQELQEINRVYKEMYKTDLEKDIISDTSGDFRKLMVALAKGRRAEDGSVIDYELIDQDARDLYDAGVKRKGTDVPKWISIMTERSVPHLQKVFDRYKSYSPYDMLESIRKEVKGDLENAF

SEQ ID NO: 37558 - protein, 119 aa, Homo sapiens; identical to SEQ ID NO: 37556

SEQ ID NO: 37559 - protein, 176 aa, Homo sapiens; identical to SEQ ID NO: 37550

SEQ ID NO: 37560 - protein, 227 aa, Homo sapiens
MSTVHEILCKLSLEGDHSTPPSAYGSVKAYTNFDAERDALNIETAIKTKGVDEVTIVNILTNRSNAQRQDIAFAYQRRTKKELASALKSALSGHLETVILGLLKTPAQYDASELKASMKGLGTDEDSLIEIICSRTNQELQEINRVYKEMYKTDLEKDIISDTSGDFRKLMVALAKGRRAEDGSVIDYELIDQDARDLYDAGVKRKGTDVPKWISIMTERSVPHLQK

SEQ ID NO: 37561 - protein, 176 aa, Homo sapiens; identical to SEQ ID NO: 37550

SEQ ID NO: 37562 - protein, 110 aa, Homo sapiens
MSTVHEILCKLSLEGDHSTPPSAYGSVKAYTNFDAERDALNIETAIKTKGVDEVTIVNILTNRSNAQRQDIAFAYQRRTKKELASALKSALSGHLETVILGLLKTPAQYD

SEQ ID NO: 37563 - protein, 323 aa, Homo sapiens
MASIWVGHRGTVRDYPDFSPSVDAEAIQKAIRGIGTDEKMLISILTERSNAQRQLIVKEYQAAYGKELKDDLKGDLSGHFEHLMVALVTPPAVFDAKQLKKSMKGAGTNEDALIEILTTRTSRQMKDISQAYYTVYKKSLGDDISSETSGDFRKALLTLADGRRDESLKVDEHLAKQDAQILYKAGENRWGTDEDKFTEILCLRSFPQLKLTFDEYRNISQKDIVDSIKGELSGHFEDLLLAIVNCVRNTPAFLAERLHRALKGIGTDEFTLNRIMVSRSEIDLLDIRTEFKKHYGYSLYSAIKSDTSGDYEITLLKICGGDD

SEQ ID NO: 37564 - protein, 134 aa, Homo sapiens
MASIWVGHRGTVRDYPDFSPSVDAEAIQKAIRGIGTDEKMLISILTERSNAQRQLIVKEYQAAYGKELKDDLKGDLSGHFEHLMVALVTPPAVFDAKQLKKSMKGAGTNEDALIEILTTRTSRQMKDISQAYYT

SEQ ID NO: 37565 - protein, 104 aa, Homo sapiens
MASIWVGHRGTVRDYPDFSPSVDAEAIQKAIRGIGTDEKMLISILTERSNAQRQLIVKEYQAAYGKELKDDLKGDLSGHFEHLMVALVTPPAVFDAKQLKKSMK

SEQ ID NO: 37566 - protein, 154 aa, Homo sapiens
MASIWVGHRGTVRDYPDFSPSVDAEAIQKAIRGIGTDEKMLISILTERSNAQRQLIVKEYQAAYGKELKDDLKGDLSGHFEHLMVALVTPPAVFDAKQLKKSMKGAGTNEDALIEILTTRTSRQMKDISQAYYTVYKKSLGDDISSETSGDFRK

SEQ ID NO: 37567 - protein, 321 aa, Homo sapiens
MAMATKGGTVKAASGFNAMEDAQTLRKAMKGLGTDEDAIISVLAYRNTAQRQEIRTAYKSTIGRDLIDDLKSELSGNFEQVIVGMMTPTVLYDVQELRRAMKGAGTDEGCLIEILASRTPEEIRRISQTYQQQYGRSLEDDIRSDTSFMFQRVLVSLSAGGRDEGNYLDDALVRQDAQDLYEAGEKKWGTDEVKFLTVLCSRNRNHLLHVFDEYKRISQKDIEQSIKSETSGSFEDALLAIVKCMRNKSAYFAEKLYKSMKGLGTDDNTLIRVMVSRAEIDMLDIRAHFKRLYGKSLYSFIKGDTSGDYRKVLLVLCGGDD

SEQ ID NO: 37568 - protein, 299 aa, Homo sapiens
MAMATKGGTVKAASGFNAMEDAQTLRKAMKGLGTDEDAIISVLAYRNTAQRQEIRTAYKSTIGRDLIDDLKSELSGNFEQGAGTDEGCLIEILASRTPEEIRRISQTYQQQYGRSLEDDIRSDTSFMFQRVLVSLSAGGRDEGNYLDDALVRQDAQDLYEAGEKKWGTDEVKFLTVLCSRNRNHLLHVFDEYKRISQKDIEQSIKSETSGSFEDALLAIVKCMRNKSAYFAEKLYKSMKGLGTDDNTLIRVMVSRAEIDMLDIRAHFKRLYGKSLYSFIKGDTSGDYRKVLLVLCGGDD

SEQ ID NO: 37569 - protein, 237 aa, Homo sapiens
MMTPTVLYDVQELRRAMKGAGTDEGCLIEILASRTPEEIRRISQTYQQQYGRSLEDDIRSDTSFMFQRVLVSLSAGGRDEGNYLDDALVRQDAQDLYEAGEKKWGTDEVKFLTVLCSRNRNHLLHVFDEYKRISQKDIEQSIKSETSGSFEDALLAIVKCMRNKSAYFAEKLYKSMKGLGTDDNTLIRVMVSRAEIDMLDIRAHFKRLYGKSLYSFIKGDTSGDYRKVLLVLCGGDD

SEQ ID NO: 37570 - protein, 320 aa, Homo sapiens
MAQVLRGTVTDFPGFDERADAETLRKAMKGLGTDEESILTLLTSRSNAQRQEISAAFKTLFGRDLLDDLKSELTGKFEKLIVALMKPSRLYDAYELKHALKGAGTNEKVLTEIIASRTPEELRAIKQVYEEEYGSSLEDDVVGDTSGYYQRMLVVLLQANRDPDAGIDEAQVEQDAQALFQAGELKWGTDEEKFITIFGTRSVSHLRKVFDKYMTISGFQIEETIDRETSGNLEQLLLAVVKSIRSIPAYLAETLYYAMKGAGTDDHTLIRVMVSRSEIDLFNIRKEFRKNFATSLYSMIKGDTSGDYKKALLLLCGEDD

SEQ ID NO: 37571 - protein, 673 aa, Homo sapiens
MAKPAQGAKYRGSIHDFPGFDPNQDAEALYTAMKGFGSDKEAILDIITSRSNRQRQEVCQSYKSLYGKDLIADLKYELTGKFERLIVGLMRPPAYCDAKEIKDAISGIGTDEKCLIEILASRTNEQMHQLVAAYKDAYERDLEADIIGDTSGHFQKMLVVLLQGTREEDDVVSEDLVQQDVQDLYEAGELKWGTDEAQFIYILGNRSKQHLRLVFDEYLKTTGKPIEASIRGELSGDFEKLMLAVVKCIRSTPEYFAERLFKAMKGLGTRDNTLIRIMVSRSELDMLDIREIFRTKYEKSLYSMIKNDTSGEYKKTLLKLSGGDDDAAGQFFPEAAQVAYQMWELSAVARVELKGTVRPANDFNPDADAKALRKAMKGLGTDEDTIIDIITHRSNVQRQQIRQTFKSHFGRDLMTDLKSEISGDLARLILGLMMPPAHYDAKQLKKAMEGAGTDEKALIEILATRTNAEIRAINEAYKEDYHKSLEDALSSDTSGHFRRILISLATGHREEGGENLDQAREDAQVAAEILEIADTPSGDKTSLETRFMTILCTRSYPHLRRVFQEFIKMTNYDVEHTIKKEMSGDVRDAFVAIVQSVKNKPLFFADKLYKSMKGAGTDEKTLTRIMVSRSEIDLLNIRREFIEKYDKSLHQAIEGDTSGDFLKALLALCGGED

SEQ ID NO: 37572 - protein, 667 aa, Homo sapiens
MAKPAQGAKYRGSIHDFPGFDPNQDAEALYTAMKGFGSDKEAILDIITSRSNRQRQEVCQSYKSLYGKDLIADLKYELTGKFERLIVGLMRPPAYCDAKEIKDAISGIGTDEKCLIEILASRTNEQMHQLVAAYKDAYERDLEADIIGDTSGHFQKMLVVLLQGTREEDDVVSEDLVQQDVQDLYEAGELKWGTDEAQFIYILGNRSKQHLRLVFDEYLKTTGKPIEASIRGELSGDFEKLMLAVVKCIRSTPEYFAERLFKAMKGLGTRDNTLIRIMVSRSELDMLDIREIFRTKYEKSLYSMIKNDTSGEYKKTLLKLSGGDDDAAGQFFPEAAQVAYQMWELSAVARVELKGTVRPANDFNPDADAKALRKAMKGLGTDEDTIIDIITHRSNVQRQQIRQTFKSHFGRDLMTDLKSEISGDLARLILGLMMPPAHYDAKQLKKAMEGAGTDEKALIEILATRTNAEIRAINEAYKEDYHKSLEDALSSDTSGHFRRILISLATGHREEGGENLDQAREDAQEIADTPSGDKTSLETRFMTILCTRSYPHLRRVFQEFIKMTNYDVEHTIKKEMSGDVRDAFVAIVQSVKNKPLFFADKLYKSMKGAGTDEKTLTRIMVSRSEIDLLNIRREFIEKYDKSLHQAIEGDTSGDFLKALLALCGGED

SEQ ID NO: 37573 - protein, 110 aa, Homo sapiens
MAKPAQGAKYRGSIHDFPGFDPNQDAEALYTAMKGFGSDKEAILDIITSRSNRQRQEVCQSYKSLYGKDLIADLKYELTGKFERLIVGLMRPPAYCDAKEIKDAISGIGT

SEQ ID NO: 37574 - protein, 641 aa, Homo sapiens
MKGFGSDKEAILDIITSRSNRQRQEVCQSYKSLYGKDLIADLKYELTGKFERLIVGLMRPPAYCDAKEIKDAISGIGTDEKCLIEILASRTNEQMHQLVAAYKDAYERDLEADIIGDTSGHFQKMLVVLLQGTREEDDVVSEDLVQQDVQDLYEAGELKWGTDEAQFIYILGNRSKQHLRLVFDEYLKTTGKPIEASIRGELSGDFEKLMLAVVKCIRSTPEYFAERLFKAMKGLGTRDNTLIRIMVSRSELDMLDIREIFRTKYEKSLYSMIKNDTSGEYKKTLLKLSGGDDDAAGQFFPEAAQVAYQMWELSAVARVELKGTVRPANDFNPDADAKALRKAMKGLGTDEDTIIDIITHRSNVQRQQIRQTFKSHFGRDLMTDLKSEISGDLARLILGLMMPPAHYDAKQLKKAMEGAGTDEKALIEILATRTNAEIRAINEAYKEDYHKSLEDALSSDTSGHFRRILISLATGHREEGGENLDQAREDAQVAAEILEIADTPSGDKTSLETRFMTILCTRSYPHLRRVFQEFIKMTNYDVEHTIKKEMSGDVRDAFVAIVQSVKNKPLFFADKLYKSMKGAGTDEKTLTRIMVSRSEIDLLNIRREFIEKYDKSLHQAIEGDTSGDFLKALLALCGGED

SEQ ID NO: 37575 - protein, 547 aa, Homo sapiens
MHQLVAAYKDAYERDLEADIIGDTSGHFQKMLVVLLQGTREEDDVVSEDLVQQDVQDLYEAGELKWGTDEAQFIYILGNRSKQHLRLVFDEYLKTTGKPIEASIRGELSGDFEKLMLAVVKCIRSTPEYFAERLFKAMKGLGTRDNTLIRIMVSRSELDMLDIREIFRTKYEKSLYSMIKNDTSGEYKKTLLKLSGGDDDAAGQFFPEAAQVAYQMWELSAVARVELKGTVRPANDFNPDADAKALRKAMKGLGTDEDTIIDIITHRSNVQRQQIRQTFKSHFGRDLMTDLKSEISGDLARLILGLMMPPAHYDAKQLKKAMEGAGTDEKALIEILATRTNAEIRAINEAYKEDYHKSLEDALSSDTSGHFRRILISLATGHREEGGENLDQAREDAQVAAEILEIADTPSGDKTSLETRFMTILCTRSYPHLRRVFQEFIKMTNYDVEHTIKKEMSGDVRDAFVAIVQSVKNKPLFFADKLYKSMKGAGTDEKTLTRIMVSRSEIDLLNIRREFIEKYDKSLHQAIEGDTSGDFLKALLALCGGED

SEQ ID NO: 37576 - protein, 488 aa, Homo sapiens
MSYPGYPPTGYPPFPGYPPAGQESSFPPSGQYPYPSGFPPMGGGAYPQVPSSGYPGAGGYPAPGGYPAPGGYPGAPQPGGAPSYPGVPPGQGFGVPPGGAGFSGYPQPPSQSYGGGPAQVPLPGGFPGGQMPSQYPGGQPTYPSQINTDSFSSYPVFSPVSLDYSSEPATVTQVTQGTIRPAANFDAIRDAEILRKAMKGFGTDEQAIVDVVANRSNDQRQKIKAAFKTSYGKDLIKDLKSELSGNMEELILALFMPPTYYDAWSLRKAMQGAGTQERVLIEILCTRTNQEIREIVRCYQSEFGRDLEKDIRSDTSGHFERLLVSMCQGNRDENQSINHQMAQEDAQRLYQAGEGRLGTDESCFNMILATRSFPQLRATMEAYSRMANRDLLSSVSREFSGYVESGLKTILQCALNRPAFFAERLYYAMKGAGTDDSTLVRIVVTRSEIDLVQIKQMFAQMYQKTLGTMIAGDTSGDYRRLLLAIVGQ

SEQ ID NO: 37577 - protein, 466 aa, Homo sapiens
MSYPGYPPTGYPPFPGYPPAGQESSFPPSGQYPYPSGFPPMGGGAYPQVPSSGYPGAGGYPAPGGYPAPGGYPGAPQPGGAPSYPGVPPGQGFGVPPGGAGFSGYPQPPSQSYGGGPAQVPLPGGFPGGQMPSQYPGGQPTYPSQPATVTQVTQGTIRPAANFDAIRDAEILRKAMKGFGTDEQAIVDVVANRSNDQRQKIKAAFKTSYGKDLIKDLKSELSGNMEELILALFMPPTYYDAWSLRKAMQGAGTQERVLIEILCTRTNQEIREIVRCYQSEFGRDLEKDIRSDTSGHFERLLVSMCQGNRDENQSINHQMAQEDAQRLYQAGEGRLGTDESCFNMILATRSFPQLRATMEAYSRMANRDLLSSVSREFSGYVESGLKTILQCALNRPAFFAERLYYAMKGAGTDDSTLVRIVVTRSEIDLVQIKQMFAQMYQKTLGTMIAGDTSGDYRRLLLAIVGQ

SEQ ID NO: 37578 - protein, 144 aa, Homo sapiens
MSYPGYPPTGYPPFPGYPPAGQESSFPPSGQYPYPSGFPPMGGGAYPQVPSSGYPGAGGYPAPGGYPAPGGYPGAPQPGGAPSYPGVPPGQGFGVPPGGAGFSGYPQPPSQSYGGGPAQVPLPGGFPGGQMPSQYPGGQPTYPS

SEQ ID NO: 37579 - protein, 336 aa, Homo sapiens
MPSQYPGGQPTYPSQPATVTQVTQGTIRPAANFDAIRDAEILRKAMKGFGTDEQAIVDVVANRSNDQRQKIKAAFKTSYGKDLIKDLKSELSGNMEELILALFMPPTYYDAWSLRKAMQGAGTQERVLIEILCTRTNQEIREIVRCYQSEFGRDLEKDIRSDTSGHFERLLVSMCQGNRDENQSINHQMAQEDAQRLYQAGEGRLGTDESCFNMILATRSFPQLRATMEAYSRMANRDLLSSVSREFSGYVESGLKTILQCALNRPAFFAERLYYAMKGAGTDDSTLVRIVVTRSEIDLVQIKQMFAQMYQKTLGTMIAGDTSGDYRRLLLAIVGQ

SEQ ID NO: 37580 - protein, 327 aa, Homo sapiens
MAWWKSWIEQEGVTVKSSSHFNPDPDAETLYKAMKGIGTNEQAIIDVLTKRSNTQRQQIAKSFKAQFGKDLTETLKSELSGKFERLIVALMYPPYRYEAKELHDAMKGLGTKEGVIIEILASRTKNQLREIMKAYEEDYGSSLEEDIQADTSGYLERILVCLLQGSRDDVSSFVDPGLALQDAQDLYAAGEKIRGTDEMKFITILCTRSATHLLRVFEEYEKIANKSIEDSIKSETHGSLEEAMLTVVKCTQNLHSYFAERLYYAMKGAGTRDGTLIRNIVSRSEIDLNLIKCHFKKMYGKTLSSMIMEDTSGDYKNALLSLVGSDP

SEQ ID NO: 37581 - protein, 276 aa, Homo sapiens
MAWWKSWIEQEGVTVKSSSHFNPDPDAETLYKAMKGIGVGSQLLSHQAAAFAFPSSALTSVSPWGQQGHLCCNPAGTNEQAIIDVLTKRSNTQRQQIAKSFKAQFGKDLTETLKSELSGKFERLIVALMYPPYRYEAKELHDAMKGSRDDVSSFVDPGLALQDAQDLYAAGEKIRGTDEMKFITILCTRSATHLLRVKCTQNLHSYFAERLYYAMKGAGTRDGTLIRNIVSRSEIDLNLIKCHFKKMYGKTLSSMIMEDTSGDYKNALLSLVGSDP

SEQ ID NO: 37582 - protein, 265 aa, Homo sapiens
MAWWKSWDLTETLKSELSGKFERLIVALMYPPYRYEAKELHDAMKGLGTKEGVIIEILASRTKNQLREIMKAYEEDYGSSLEEDIQADTSGYLERILVCLLQGSRDDVSSFVDPGLALQDAQDLYAAGEKIRGTDEMKFITILCTRSATHLLRVFEEYEKIANKSIEDSIKSETHGSLEEAMLTVVKCTQNLHSYFAERLYYAMKGAGTRDGTLIRNIVSRSEIDLNLIKCHFKKMYGKTLSSMIMEDTSGDYKNALLSLVGSDP

SEQ ID NO: 37583 - protein, 141 aa, Homo sapiens
MAWWKSWIEQEGVTVKSSSHFNPDPDAETLYKAMKGIGTNEQAIIDVLTKRSNTQRQQIAKSFKAQFGKDLTETLKSELSGKFERLIVALMYPPYRYEAKELHDAMKGLGTKEGVIIEILASRTKNQLREIMKAYEEGQQG

SEQ ID NO: 37584 - protein, 345 aa, Homo sapiens
MSVTGGKMAPSLTQEILSHLGLASKTAAWGTLGTLRTFLNFSVDKDAQRLLRAITGQGVDRSAIVDVLTNRSREQRQLISRNFQERTQQDLMKSLQAALSGNLERIVMALLQPTAQFDAQELRTALKASDSAVDVAIEILATRTPPQLQECLAVYKHNFQVEAVDDITSETSGILQDLLLALAKGGRDSYSGIIDYNLAEQDVQALQRAEGPSREETWVPVFTQRNPEHLIRVFDQYQRSTGQELEEAVQNRFHGDAQVALLGLASVIKNTPLYFADKLHQALQETEPNYQVLIRILISRCETDLLSIRAEFRKKFGKSLYSSLQDAVKGDCQSALLALCRAEDM

SEQ ID NO: 37585 - protein, 642 aa, Homo sapiens
MLTRPSQVLLNSLSVDPDAECKYGLYFRDGRRKVDYILVYHHKRPSGNRTLVRRVQHSDTPSGARSVKQDHPLPGKGASLDAGSGEPPMDYHEDDKRFRREEYEGNLLEAGLELERDEDTKIHGVGFVKIHAPWNVLCREAEFLKLKMPTKKMYHINETRGLLKKINSVLQKITDPIQPKVAEHRPQTMKRLSYPFSREKQHLFDLSDKDSFFDSKTRSTIVYEILKRTTCTKAKYSMGITSLLANGVYAAAYPLHDGDYNGENVEFNDRKLLYEEWARYGVFYKYQPIDLVRKYFGEKIGLYFAWLGVYTQMLIPASIVGIIVFLYGCATMDENIPSMEMCDQRHNITMCPLCDKTCSYWKMSSACATARASHLFDNPATVFFSVFMALWAATFMEHWKRKQMRLNYRWDLTGFEEEEDHPRAEYEARVLEKSLKKESRNKETDKVKLTWRDRFPAYLTNLVSIIFMIAVTFAIVLGVIIYRISMAAALAMNSSPSVRSNIRVTVTATAVIINLVVIILLDEVYGCIARWLTKIEVPKTEKSFEERLIFKAFLLKFVNSYTPIFYVAFFKGRFVGRPGDYVYIFRSFRMEEVTEILFISGSPFCLAYDLSTPCTWEKQLQHICSAKSSRFLSFLLETFLFP

SEQ ID NO: 37586 - protein, 986 aa, Homo sapiens
MRVNEKYSTLPAEDRSVHIINICAIEDIGYLPSEGTLLNSLSVDPDAECKYGLYFRDGRRKVDYILVYHHKRPSGNRTLVRRVQHSDTPSGARSVKQDHPLPGKGASLDAGSGEPPMDYHEDDKRFRREEYEGNLLEAGLELERDEDTKIHGVGFVKIHAPWNVLCREAEFLKLKMPTKKMYHINETRGLLKKINSVLQKITDPIQPKVAEHRPQTMKRLSYPFSREKQHLFDLSDKDSFFDSKTRSTIVYEILKRTTCTKAKYSMGITSLLANGVYAAAYPLHDGDYNGENVEFNDRKLLYEEWARYGVFYKYQPIDLVRKYFGEKIGLYFAWLGVYTQMLIPASIVGIIVFLYGCATMDENIPSMEMCDQRHNITMCPLCDKTCSYWKMSSACATARASHLFDNPATVFFSVFMALWAATFMEHWKRKQMRLNYRWDLTGFEEEEEAVKDHPRAEYEARVLEKSLKKESRNKEKRRHIPEESTNKWKQRVKTAMAGVKLTDKVKLTWRDRFPAYLTNLVSIIFMIAVTFAIVLGVIIYRISMAAALAMNSSPSVRSNIRVTVTATAVIINLVVIILLDEVYGCIARWLTKIEVPKTEKSFEERLIFKAFLLKFVNSYTPIFYVAFFKGRFVGRPGDYVYIFRSFRMEECAPGGCLMELCIQLSIIMLGKQLIQNNLFEIGIPKMKKLIRYLKLKQQSPPDHEECVKRKQRYEVDYNLEPFAGLTPEYMEMIIQFGFVTLFVASFPLAPLFALLNNIIEIRLDAKKFVTELRRPVAVRAKDIGIWYNILRGIGKLAVIINAFVISFTSDFIPRLVYLYMYSKNGTMHGFVNHTLSSFNVSDFQNGTAPNDPLDLGYEVQICRYKDYREPPWSENKYDISKDFWAVLAARLAFVIVFQNLVMFMSDFVDWVIPDIPKDISQQIHKEKVLMVELFMREEQDKQQLLETWMEKERQKDEPPCNHHNTKACPDSLGSPAPSHAYHGGVL

SEQ ID NO: 37587 - protein, 840 aa, Homo sapiens
MDYHEDDKRFRREEYEGNLLEAGLELERDEDTKIHGVGFVKIHAPWNVLCREAEFLKLKMPTKKMYHINETRGLLKKINSVLQKITDPIQPKVAEHRPQTMKRLSYPFSREKQHLFDLSDKDSFFDSKTRSTIVYEILKRTTCTKAKYSMGITSLLANGVYAAAYPLHDGDYNGENVEFNDRKLLYEEWARYGVFYKYQPIDLVRKYFGEKIGLYFAWLGVYTQMLIPASIVGIIVFLYGCATMDENIPSMEMCDQRHNITMCPLCDKTCSYWKMSSACATARASHLFDNPATVFFSVFMALWAATFMEHWKRKQMRLNYRWDLTGFEEEEDHPRAEYEARVLEKSLKKESRNKETDKVKLTWRDRFPAYLTNLVSIIFMIAVTFAIVLGVIIYRISMAAALAMNSSPSVRSNIRVTVTATAVIINLVVIILLDEVYGCIARWLTKIEVPKTEKSFEERLIFKAFLLKFVNSYTPIFYVAFFKGRFVGRPGDYVYIFRSFRMEECAPGGCLMELCIQLSIIMLGKQLIQNNLFEIGIPKMKKLIRYLKLKQQSPPDHEECVKRKQRYEVDYNLEPFAGLTPEYMEMIIQFGFVTLFVASFPLAPLFALLNNIIEIRLDAKKFVTELRRPVAVRAKDIGIWYNILRGIGKLAVIINAFVISFTSDFIPRLVYLYMYSKNGTMHGFVNHTLSSFNVSDFQNGTAPNDPLDLGYEVQICRYKDYREPPWSENKYDISKDFWAVLAARLAFVIVFQNLVMFMSDFVDWVIPDIPKDISQQIHKEKVLMVELFMREEQDKQQLLETWMEKERQKDEPPCNHHNTKACPDSLGSPAPSHAYHGGVL

SEQ ID NO: 37588 - protein, 840 aa, Homo sapiens; identical to SEQ ID NO: 37587

SEQ ID NO: 37589 - protein, 986 aa, Homo sapiens
MRVNEKYSTLPAEDRSVHIINICAIEDIGYLPSEGTLLNSLSVDPDAECKYGLYFRDGRRKVDYILVYHHKRPSGNRTLVRRVQHSDTPSGARSVKQDHPLPGKGASLDAGSGEPPMDYHEDDKRFRREEYEGNLLEAGLELERDEDTKIHGVGFVKIHAPWNVLCREAEFLKLKMPTKKMYHINETRGLLKKINSVLQKITDPIQPKVAEHRPQTMKRLSYPFSREKQHLFDLSDKDSFFDSKTRSTIVYEILKRTTCTKAKYSMGITSLLANGVYAAAYPLHDGDYNGENVEFNDRKLLYEEWARYGVFYKYQPIDLVRKYFGEKIGLYFAWLGVYTQMLIPASIVGIIVFLYGCATMDENIPSMEMCDQRHNITMCPLCDKTCSYWKMSSACATARASHLFDNPATVFFSVFMALWAATFMEHWKRKQMRLNYRWDLTGFEEEEKALLDHPRAEYEARVLEKSLKKESRNKEKRRHIPEESTNKWKQRVKTAMAGVKLTDKVKLTWRDRFPAYLTNLVSIIFMIAVTFAIVLGVIIYRISMAAALAMNSSPSVRSNIRVTVTATAVIINLVVIILLDEVYGCIARWLTKIEVPKTEKSFEERLIFKAFLLKFVNSYTPIFYVAFFKGRFVGRPGDYVYIFRSFRMEECAPGGCLMELCIQLSIIMLGKQLIQNNLFEIGIPKMKKLIRYLKLKQQSPPDHEECVKRKQRYEVDYNLEPFAGLTPEYMEMIIQFGFVTLFVASFPLAPLFALLNNIIEIRLDAKKFVTELRRPVAVRAKDIGIWYNILRGIGKLAVIINAFVISFTSDFIPRLVYLYMYSKNGTMHGFVNHTLSSFNVSDFQNGTAPNDPLDLGYEVQICRYKDYREPPWSENKYDISKDFWAVLAARLAFVIVFQNLVMFMSDFVDWVIPDIPKDISQQIHKEKVLMVELFMREEQDKQQLLETWMEKERQKDEPPCNHHNTKACPDSLGSPAPSHAYHGGVL

SEQ ID NO: 37590 - protein, 313 aa, Homo sapiens
MLDAASKAREAPEAAPGWDDPQGEGRRGRGEGLSWAVGPHPDPGVLMQGEVWSGRFSHAVIQFGFVTLFVASFPLAPLFALLNNIIEIRLDAKKFVTELRRPVAVRAKDIGIWYNILRGIGKLAVIINAFVISFTSDFIPRLVYLYMYSKNGTMHGFVNHTLSSFNVSDFQNGTAPNDPLDLGYEVQICRYKDYREPPWSENKYDISKDFWAVLAARLAFVIVFQNLVMFMSDFVDWVIPDIPKDISQQIHKEKVLMVELFMREEQDKQQLLETWMEKERQKDEPPCNHHNTKACPDSLGSPAPSHAYHGGVL

SEQ ID NO: 37591 - protein, 744 aa, Homo sapiens
MKRLSYPFSREKQHLFDLSDKDSFFDSKTRSTIVYEILKRTTCTKAKYSMGITSLLANGVYAAAYPLHDGDYNGENVEFNDRKLLYEEWARYGVFYKYQPIDLVRKYFGEKIGLYFAWLGVYTQMLIPASIVGIIVFLYGCATMDENIPSMEMCDQRHNITMCPLCDKTCSYWKMSSACATARASHLFDNPATVFFSVFMALWAATFMEHWKRKQMRLNYRWDLTGFEEEEKALLDHPRAEYEARVLEKSLKKESRNKETDKVKLTWRDRFPAYLTNLVSIIFMIAVTFAIVLGVIIYRISMAAALAMNSSPSVRSNIRVTVTATAVIINLVVIILLDEVYGCIARWLTKIEVPKTEKSFEERLIFKAFLLKFVNSYTPIFYVAFFKGRFVGRPGDYVYIFRSFRMEECAPGGCLMELCIQLSIIMLGKQLIQNNLFEIGIPKMKKLIRYLKLKQQSPPDHEECVKRKQRYEVDYNLEPFAGLTPEYMEMIIQFGFVTLFVASFPLAPLFALLNNIIEIRLDAKKFVTELRRPVAVRAKDIGIWYNILRGIGKLAVIINAFVISFTSDFIPRLVYLYMYSKNGTMHGFVNHTLSSFNVSDFQNGTAPNDPLDLGYEVQICRYKDYREPPWSENKYDISKDFWAVLAARLAFVIVFQNLVMFMSDFVDWVIPDIPKDISQQIHKEKVLMVELFMREEQDKQQLLETWMEKERQKDEPPCNHHNTKACPDSLGSPAPSHAYHGGVL

SEQ ID NO: 37592 - protein, 660 aa, Homo sapiens
MKVTLSALDTSESSFTPLVVIELAQDVKEETKEWLKNRIIAKKKDGGAQLLFRPLLNKYEQETLENQNLYLVGASKIRMLLGAEAVGLVKECNDNTMRAFTYRTRQNFKGFDDNNDDFLTMAECQFIIKHELENLRAKDEKMIPGYPQAKLYPGKSLLRRLLTSGIVIQVFPLHDSEALKKLEDTWYTRFALKYQPIDSIRGYFGETIALYFGFLEYFTFALIPMAVIGLPYYLFVWEDYDKYVIFASFNLIWSTVILELWKRGCANMTYRWGTLLMKRKFEEPRPGFHGVLGINSITGKEEPLYPSYKRQLRIYLVSLPFVCLCLYFSLYVMMIYFDMEVWALGLHENSGSEWTSVLLYVPSIIYAIVIEIMNRLYRYAAEFLTSWENHRLESAYQNHLILKVLVFNFLNCFASLFYIAFVLKDMKLLRQSLATLLITSQILNQIMESFLPYWLQRKHGVRVKRKVQALKADIDATLYEQVILEKEMGTYLGTFDDYLELFLQFGYVSLFSCVYPLAAAFAVLNNFTEVNSDALKMCRVFKRPFSEPSANIGVWQLAFETMSVISVVTNCALIGMSPQVNAVFPESKADLILIVVAVEHALLALKFILAFAIPDKPRHIQMKLARLEFESLEALKQQQMKLVTENLKEEPMESGKEKAT

SEQ ID NO: 37593 - protein, 470 aa, Homo sapiens
MKVTLSALDTSESSFTPLVVIELAQDVKEETKEWLKNRIIAKKKDGGAQLLFRPLLNKYEQETLENQNLYLVGASKIRMLLGAEAVGLVKECNDNTMRAFTYRTRQNFKGFDDNNDDFLTMAECQFIIKHELENLRAKDEKMIPGYPQAKLYPGKSLLRRLLTSGIVIQVFPLHDSEALKKLEDTWYTRFALKYQPIENHRLESAYQNHLILKVLVFNFLNCFASLFYIAFVLKDMKLLRQSLATLLITSQILNQIMESFLPYWLQRKHGVRVKRKVQALKADIDATLYEQVILEKEMGTYLGTFDDYLELFLQFGYVSLFSCVYPLAAAFAVLNNFTEVNSDALKMCRVFKRPFSEPSANIGVWQLAFETMSVISVVTNCALIGMSPQVNAVFPESKADLILIVVAVEHALLALKFILAFAIPDKPRHIQMKLARLEFESLEALKQQQMKLVTENLKEEPMESGKEKAT

SEQ ID NO: 37594 - protein, 140 aa, Homo sapiens
MKVTLSALDTSESSFTPLVVIELAQDVKEETKEWLKNRIIAKKKDGGAQLLFRPLLNKYEQETLENQNLYLVGASKIRMLLGAEAVGLVKECNDNTMRAFTYRTRQNFKGFDDNNDDFLTMAECQFIIKHELENLRAKDE

SEQ ID NO: 37595 - protein, 112 aa, Homo sapiens
MKVTLSALDTSESSFTPLVVIELAQDVKEETKEWLKNRIIAKKKDGGAQLLFRPLLNKYEQETLENQNLYLVGASKIRMLLGAEAVGLVKECNDNTMRAFTYRTRQNFKGFD

SEQ ID NO: 37596 - protein, 38 aa, Homo sapiens
MKVTLSALDTSESSFTPLVVIELAQDVKEETKEWLKNR

SEQ ID NO: 37597 - protein, 134 aa, Homo sapiens
MKVTLSALDTSESSFTPLVVIELAQDVKEETKEWLKNRIIAKKKDGGAQLLFRPLLNKYEQETLENQNLYLVGASKIRMLLGAEAVGLVKECNDNTMRAFTYRTRQNFKGFDDNNDDFLTMAECQFIIKHELEN

SEQ ID NO: 37598 - protein, 146 aa, Homo sapiens
MKVTLSALDTSESSFTPLVVIELAQDVKEETKEWLKNRIIAKKKDGGAQLLFRPLLNKYEQETLENQNLYLVGASKIRMLLGAEAVGLVKECNDNTMRAFTYRTRQNFKGFDDNNDDFLTMAECQFIIKHELENLRAKDEKMIPGY

SEQ ID NO: 37599 - protein, 141 aa, Homo sapiens
MKVTLSALDTSESSFTPLVVIELAQDVKEETKEWLKNRIIAKKKDGGAQLLFRPLLNKYEQETLENQNLYLVGASKIRMLLGAEAVGLVKECNDNTMRAFTYRTRQNFKGFDDNNDDFLTMAECQFIIKHELENLRAKDEK

SEQ ID NO: 37600 - protein, 594 aa, Homo sapiens
MKVTLSALDTSESSFTPLVVIELAQDVKEETKEWLKNRIIAKKKDGDNNDDFLTMAECQFIIKHELENLRAKDEKMIPGYPQAKLYPGKSLLRRLLTSGIVIQVFPLHDSEALKKLEDTWYTRFALKYQPIDSIRGYFGETIALYFGFLEYFTFALIPMAVIGLPYYLFVWEDYDKYVIFASFNLIWSTVILELWKRGCANMTYRWGTLLMKRKFEEPRPGFHGVLGINSITGKEEPLYPSYKRQLRIYLVSLPFVCLCLYFSLYVMMIYFDMEVWALGLHENSGSEWTSVLLYVPSIIYAIVIEIMNRLYRYAAEFLTSWENHRLESAYQNHLILKVLVFNFLNCFASLFYIAFVLKDMKLLRQSLATLLITSQILNQIMESFLPYWLQRKHGVRVKRKVQALKADIDATLYEQVILEKEMGTYLGTFDDYLELFLQFGYVSLFSCVYPLAAAFAVLNNFTEVNSDALKMCRVFKRPFSEPSANIGVWQLAFETMSVISVVTNCALIGMSPQVNAVFPESKADLILIVVAVEHALLALKFILAFAIPDKPRHIQMKLARLEFESLEALKQQQMKLVTENLKEEPMESGKEKAT

SEQ ID NO: 37601 - protein, 627 aa, Homo sapiens
MKVTLSALDTSESSFTPLVVIELAQDVKEETKEWLKNRIIAKKKDGGAQLLFRPLLNKYEQETLENQNLYLVGASKIRMLLGAEAVGLVKECNDNTMRAFTYRTRQNFKGFDDNNDDFLTMAECQFIIKHELENLRAKDEKMIPGYPQAKLYPGKSLLRRLLTSGIVIQVFPLHDSEALKKLEDTWYTRFALKYQPIDSIRGYFGETIALYFGFLEYFTFALIPMAVIGLPYYLFVWEDYDKYVIFASFNLIWSTVILELWKRGCANMTYRWGTLLMKRKFEEPRPGFHGVLGINSITGKEEPLYPSYKRQLRIYLVSLPFVCLCLYFSLYVMMIYFDMEVWALGLHENSGSEWTSVLLYVPSIIYAIVIEIMNRLYRYAAEFLTSWENHRLESAYQNHLILKVLVFNFLNCFASLFYIAFVLKDMKLLRQSLATLLITSQILNQIMESFLPYWLQRKHGVRVKRKVQALKADIDATLYEQVILEKEMGTYLGTFDDYLELFLQFGYVSLFSCVYPLAAAFAVLNNFTEVNSDALKMCRVFKRPFSEPSANIGVWQLAFETMSVISVVTNCALIGMSPQVNAVFPESKADLILIVVAVEAASCKLVSLPRYSWSTNSVPGTVIGPGV

SEQ ID NO: 37602 - protein, 549 aa, Homo sapiens
MKVTLSALDTSESSFTPLVVIELAQDVKEETKEWLKNRIIAKKKDGVRRLLTSGIVIQVFPLHDSEALKKLEDTWYTRFALKYQPIDSIRGYFGETIALYFGFLEYFTFALIPMAVIGLPYYLFVWEDYDKYVIFASFNLIWSTVILELWKRGCANMTYRWGTLLMKRKFEEPRPGFHGVLGINSITGKEEPLYPSYKRQLRIYLVSLPFVCLCLYFSLYVMMIYFDMEVWALGLHENSGSEWTSVLLYVPSIIYAIVIEIMNRLYRYAAEFLTSWENHRLESAYQNHLILKVLVFNFLNCFASLFYIAFVLKDMKLLRQSLATLLITSQILNQIMESFLPYWLQRKHGVRVKRKVQALKADIDATLYEQVILEKEMGTYLGTFDDYLELFLQFGYVSLFSCVYPLAAAFAVLNNFTEVNSDALKMCRVFKRPFSEPSANIGVWQLAFETMSVISVVTNCALIGMSPQVNAVFPESKADLILIVVAVEHALLALKFILAFAIPDKPRHIQMKLARLEFESLEALKQQQMKLVTENLKEEPMESGKEKAT

SEQ ID NO: 37603 - protein, 998 aa, Homo sapiens
MPEDIPLLPGSPRRLSPQAGSRGGQGPKHGQQCLKMPGPRAPGLQGGSNRDPGQPCGGESTRSSSVINNYLDANEPVSLEARLSRMHFHDSQRKVDYVLAYHYRKRGVHLAQGFPGHSLAIVSNGETGKEPHAGGPGDIELGPLDALEEERKEQREEFEHNLMEAGLELEKDLENKSQGSIFVRIHAPWQVLAREAEFLKIKVPTKKMYEIKAGGSIAKKFSAALQKLSSHLQPRVPEHSNNKMKNLSYPFSREKMYLYNIQEKDTFFDNATRSRIVHEILKRTACSRANNTMGINSLIANNIYEAAYPLHDGEYDSPEDDMNDRKLLYQEWARYGVFYKFQPIDLIRKYFGEKIGLYFAWLGLYTSFLIPSSVIGVIVFLYGCATIEEDIPSREMCDQQNAFTMCPLCDKSCDYWNLSSACGTAQASHLFDNPATVFFSIFMALWATMFLENWKRLQMRLGYFWDLTGIEEEEERAQEHSRPEYETKVREKMLKESNQSAVQKLETNTTECGDEDDEDKLTWKDRFPGYLMNFASILFMIALTFSIVFGVIVYRITTAAALSLNKATRSNVRVTVTATAVIINLVVILILDEIYGAVAKWLTKIEVPKTEQTFEERLILKAFLLKFVNAYSPIFYVAFFKGRFVGRPGSYVYVFDGYRMEECAPGGCLMELCIQLSIIMLGKQLIQNNIFEIGVPKLKKLFRKLKDETEAGETDSAHSKHPEQWDLDYSLEPYTGLTPEYMEMIIQFGFVTLFVASFPLAPVFALLNNVIEVRLDAKKFVTELRRPDAVRTKDIGIWFDILSGIGKFSVISNAFVIAITSDFIPRLVYQYSYSHNGTLHGFVNHTLSFFNVSQLKEGTQPENSQFDQEVQFCRFKDYREPPWAPNPYEFSKQYWFILSARLAFVIIFQNLVMFLSVLVDWMIPDIPTDISDQIKKEKSLLVDFFLKEEHEKLKLMDEPALRSPGGGDRSRSRAASSAPSGQSQLGSMMSSGSQHTNV

SEQ ID NO: 37604 - protein, 999 aa, Homo sapiens
MPEDIPLLPGSPRRLSPQAGSRGGQGPKHGQQCLKMPGPRAPGLQGGSNRDPGQPCGGESTRSSSVINNYLDANEPVSLEARLSRMHFHDSQRKVDYVLAYHYRKRGVHLAQGFPGHSLAIVSNGETGKEPHAGGPGDIELGPLDALEEERKEQREEFEHNLMEAGLELEKDLENKSQGSIFVRIHAPWQVLAREAEFLKIKVPTKKEMYEIKAGGSIAKKFSAALQKLSSHLQPRVPEHSNNKMKNLSYPFSREKMYLYNIQEKDTFFDNATRSRIVHEILKRTACSRANNTMGINSLIANNIYEAAYPLHDGEYDSPEDDMNDRKLLYQEWARYGVFYKFQPIDLIRKYFGEKIGLYFAWLGLYTSFLIPSSVIGVIVFLYGCATIEEDIPSREMCDQQNAFTMCPLCDKSCDYWNLSSACGTAQASHLFDNPATVFFSIFMALWATMFLENWKRLQMRLGYFWDLTGIEEEEERAQEHSRPEYETKVREKMLKESNQSAVQKLETNTTECGDEDDEDKLTWKDRFPGYLMNFASILFMIALTFSIVFGVIVYRITTAAALSLNKATRSNVRVTVTATAVIINLVVILILDEIYGAVAKWLTKIEVPKTEQTFEERLILKAFLLKFVNAYSPIFYVAFFKGRFVGRPGSYVYVFDGYRMEECAPGGCLMELCIQLSIIMLGKQLIQNNIFEIGVPKLKKLFRKLKDETEAGETDSAHSKHPEQWDLDYSLEPYTGLTPEYMEMIIQFGFVTLFVASFPLAPVFALLNNVIEVRLDAKKFVTELRRPDAVRTKDIGIWFDILSGIGKFSVISNAFVIAITSDFIPRLVYQYSYSHNGTLHGFVNHTLSFFNVSQLKEGTQPENSQFDQEVQFCRFKDYREPPWAPNPYEFSKQYWFILSARLAFVIIFQNLVMFLSVLVDWMIPDIPTDISDQIKKEKSLLVDFFLKEEHEKLKLMDEPALRSPGGGDRSRSRAASSAPSGQSQLGSMMSSGSQHTNV

SEQ ID NO: 37605 - protein, 1003 aa, Homo sapiens
MATPGPRDIPLLPGSPRRLSPQAGSRGGQGPKHGQQCLKMPGPRAPGLQGGSNRDPGQPCGGESTRSSSVINNYLDANEPVSLEARLSRMHFHDSQRKVDYVLAYHYRKRGVHLAQGFPGHSLAIVSNGETGKEPHAGGPGDIELGPLDALEEERKEQREEFEHNLMEAGLELEKDLENKSQGSIFVRIHAPWQVLAREAEFLKIKVPTKKEMYEIKAGGSIAKKFSAALQKLSSHLQPRVPEHSNNKMKNLSYPFSREKMYLYNIQEKDTFFDNATRSRIVHEILKRTACSRANNTMGINSLIANNIYEAAYPLHDGEYDSPEDDMNDRKLLYQEWARYGVFYKFQPIDLIRKYFGEKIGLYFAWLGLYTSFLIPSSVIGVIVFLYGCATIEEDIPSREMCDQQNAFTMCPLCDKSCDYWNLSSACGTAQASHLFDNPATVFFSIFMALWATMFLENWKRLQMRLGYFWDLTGIEEEEERAQEHSRPEYETKVREKMLKESNQSAVQKLETNTTECGDEDDEDKLTWKDRFPGYLMNFASILFMIALTFSIVFGVIVYRITTAAALSLNKATRSNVRVTVTATAVIINLVVILILDEIYGAVAKWLTKIEVPKTEQTFEERLILKAFLLKFVNAYSPIFYVAFFKGRFVGRPGSYVYVFDGYRMEECAPGGCLMELCIQLSIIMLGKQLIQNNIFEIGVPKLKKLFRKLKDETEAGETDSAHSKHPEQWDLDYSLEPYTGLTPEYMEMIIQFGFVTLFVASFPLAPVFALLNNVIEVRLDAKKFVTELRRPDAVRTKDIGIWFDILSGIGKFSVISNAFVIAITSDFIPRLVYQYSYSHNGTLHGFVNHTLSFFNVSQLKEGTQPENSQFDQEVQFCRFKDYREPPWAPNPYEFSKQYWFILSARLAFVIIFQNLVMFLSVLVDWMIPDIPTDISDQIKKEKSLLVDFFLKEEHEKLKLMDEPALRSPGGGDRSRSRAASSAPSGQSQLGSMMSSGSQHTNV

SEQ ID NO: 37606 - protein, 86 aa, Homo sapiens
MFLSVLVDWMIPDIPTDISDQIKKEKSLLVDFFLKEEHEKLKLMDEPALRSPGGGDRSRSRAASSAPSGQSQLGSMMSSGSQHTNV

SEQ ID NO: 37607 - protein, 999 aa, Homo sapiens
MPEDIPLLPGSPRRLSPQAGSRGGQGPKHGQQCLKMPGPRAPGLQGGSNRDPGQPCGGESTRSSSVINNYLDANEPVSLEARLSRMHFHDSQRKVDYVLAYHYRKRGVHLAQGFPGHSLAIVSNGETGKEPHAGGPGDIELGPLDALEEERKEQREEFEHNLMEAGLELEKDLENKSQGSIFVRIHAPWQVLAREAEFLKIKVPTKKEMYEIKAGGSIAKKFSAALQKLSSHLQPRVPEHSNNKMKNLSYPFSREKMYLYNIQEKDTFFDNATRSRIVHEILKRTACSRANNTMGINSLIANNIYEAAYPLHDGEYDSPEDDMNDRKLLYQEWARYGVFYKFQPIDLIRKYFGEKIGLYFAWLGLYTSFLIPSSVIGVIVFLYGCATIEEDIPSREMCDQQNAFTMCPLCDKSCDYWNLSSACGTAQASHLFDNPATVFFSIFMALWATMFLENWKRLQMRLGYFWDLTGIEEEEPRVQEHSRPEYETKVREKMLKESNQSAVQKLETNTTECGDEDDEDKLTWKDRFPGYLMNFASILFMIALTFSIVFGVIVYRITTAAALSLNKATRSNVRVTVTATAVIINLVVILILDEIYGAVAKWLTKIEVPKTEQTFEERLILKAFLLKFVNAYSPIFYVAFFKGRFVGRPGSYVYVFDGYRMEECAPGGCLMELCIQLSIIMLGKQLIQNNIFEIGVPKLKKLFRKLKDETEAGETDSAHSKHPEQWDLDYSLEPYTGLTPEYMEMIIQFGFVTLFVASFPLAPVFALLNNVIEVRLDAKKFVTELRRPDAVRTKDIGIWFDILSGIGKFSVISNAFVIAITSDFIPRLVYQYSYSHNGTLHGFVNHTLSFFNVSQLKEGTQPENSQFDQEVQFCRFKDYREPPWAPNPYEFSKQYWFILSARLAFVIIFQNLVMFLSVLVDWMIPDIPTDISDQIKKEKSLLVDFFLKEEHEKLKLMDEPALRSPGGGDRSRSRAASSAPSGQSQLGSMMSSGSQHTNV

SEQ ID NO: 37608 - protein, 913 aa, Homo sapiens
MGDPDLLEVLAEEGEKVNKHIDYSFQMSEQSLSSRETSFLINEETMPAKRFNLFLRRRLMFQKNQQSKDSIFFRDGIRQIDFVLSYVDDVKKDAELKAERRKEFETNLRKTGLELEIEDKRDSEDGRTYFVKIHAPWEVLVTYAEVLGIKMPIKESDIPRPKHTPISYVLGPVRLPLSVKYPHPEYFTAQFSRHRQELFLIEDQATFFPSSSRNRIVYYILSRCPFGIEDGKKRFGIERLLNSNTYSSAYPLHDGQYWKPSEPPNPTNERYTLHQNWARFSYFYKEQPLDLIKNYYGEKIGIYFVFLGFYTEMLFFAAVVGLACFIYGLLSMEHNTSSTEICDPEIGGQMIMCPLCDQVCDYWRLNSTCLASKFSHLFDNESTVFFAIFMGIWVTLFLEFWKQRQARLEYEWDLVDFEEEQQQLQLRPEFEAMCKHRKLNAVTKEMEPYMPLYTRIPWYFLSGATVTLWMSLVVTSMVAVIVYRLSVFATFASFMESDASLKQVKSFLTPQITTSLTGSCLNFIVILILNFFYEKISAWITKMEIPRTYQEYESSLTLKMFLFQFVNFYSSCFYVAFFKGKFVGYPGKYTYLFNEWRSEECDPGGCLIELTTQLTIIMTGKQIFGNIKEAIYPLALNWWRRRKARTNSEKLYSRWEQDHDLESFGPLGLFYEYLETVTQFGFVTLFVASFPLAPLLALINNIVEIRVDAWKLTTQYRRTVASKAHSIGVWQDILYGMAVLSVATNAFIVAFTSDIIPRLVYYYAYSTNATQPMTGYVNNSLSVFLIADFPNHTAPSEKRDFITCRYRDYRYPPDDENKYFHNMQFWHVLAAKMTFIIVMEHVVFLVKFLLAWMIPDVPKDVVERIKREKLMTIKILHDFELNKLKENLGINSNEFAKHVMIEENKAQLAKSTL

SEQ ID NO: 37609 - protein, 910 aa, Homo sapiens
MKKMSRNVLLQMEEEEDDDDGDIVLENLGQTIVPDLGSLESQHDFRTPEFEEFNGKPDSLFFNDGQRRIDFVLVYEDESRKETNKKGTNEKQRRKRQAYESNLICHGLQLEATRSVLDDKLVFVKVHAPWEVLCTYAEIMHIKLPLKPNDLKNRSSAFGTLNWFTKVLSVDESIIKPEQEFFTAPFEKNRMNDFYIVDRDAFFNPATRSRIVYFILSRVKYQVINNVSKFGINRLVNSGIYKAAFPLHDCKFRRQSEDPSCPNERYLLYREWAHPRSIYKKQPLDLIRKYYGEKIGIYFAWLGYYTQMLLLAAVVGVACFLYGYLNQDNCTWSKEVCHPDIGGKIIMCPQCDRLCPFWKLNITCESSKKLCIFDSFGTLVFAVFMGVWVTLFLEFWKRRQAELEYEWDTVELQQEEQARPEYEARCTHVVINEITQEEERIPFTAWGKCIRITLCASAVFFWILLIIASVIGIIVYRLSVFIVFSAKLPKNINGTDPIQKYLTPQTATSITASIISFIIIMILNTIYEKVAIMITNFELPRTQTDYENSLTMKMFLFQFVNYYSSCFYIAFFKGKFVGYPGDPVYWLGKYRNEECDPGGCLLELTTQLTIIMGGKAIWNNIQEVLLPWIMNLIGRFHRVSGSEKITPRWEQDYHLQPMGKLGLFYEYLEMIIQFGFVTLFVASFPLAPLLALVNNILEIRVDAWKLTTQFRRLVPEKAQDIGAWQPIMQGIAILAVVTNAMIIAFTSDMIPRLVYYWSFSVPPYGDHTSYTMEGYINNTLSIFKVADFKNKSKGNPYSDLGNHTTCRYRDFRYPPGHPQEYKHNIYYWHVIAAKLAFIIVMEHVIYSVKFFISYAIPDVSKRTKSKIQREKYLTQKLLHENHLKDMTKNMGVIAERMIEAVDNNLRPKSE

SEQ ID NO: 37610 - protein, 929 aa, Homo sapiens
MKKMSRNVLLQMEEEEDDDDGDIVLENLGQTIVPDLGSLESQHDFRTPEFEEFNGKPDSLFFNDGQRRIDFVLVYEDESRKETNKKGTNEKQRRKRQAYESNLICHGLQLEATRSVLDDKLVFVKVHAPWEVLCTYAEIMHIKLPLKPNDLKNRSSAFGTLNWFTKVLSVDESIIKPEQEFFTAPFEKNRMNDFYIVDRDAFFNPATRSRIVYFILSRVKYQVINNVSKFGINRLVNSGIYKAAFPLHDCKFRRQSEDPSCPNERYLLYREWAHPRSIYKKQPLDLIRKYYGEKIGIYFAWLGYYTQMLLLAAVVGVACFLYGYLNQDNCTWSKEVCHPDIGGKIIMCPQCDRLCPFWKLNITCESSKKLCIFDSFGTLVFAVFMGVWVTLFLEFWKRRQAELEYEWDTVELQQEEQARPEYEARCTHVVINEITQEEERIPFTAWGKCIRITLCASAVFFWILLIIASVIGIIVYRLSVFIVFSAKLPKNINGTDPIQKYLTPQTATSITASIISFIIIMILNTIYEKVAIMITNFELPRTQTDYENSLTMKMFLFQFVNYYSSCFYIAFFKGKFVGYPGDPVYWLGKYRNEECDPGGCLLELTTQLTIIMGGKAIWNNIQEVLLPWIMNLIGRFHRVSGSEKITPRWEQDYHLQPMGKLGLFYEYLEMIIQFGFVTLFVASFPLAPLLALVNNILEIRVDAWKLTTQFRRLVPEKAQDIGAWQPIMQGIAILAVVTNAMIIAFTSDMIPRLVYYWSFSVPPYGDHTSYTMEGYINNTLSIFKVADFKNKSKGNPYSDLGNHTTCRYRDFRYPPGHPQEYKHNIYYWHVIAAKLAFIIVMEYLALLPRLGHSGMILAHCNLRLPVDCCMCYRFVDEIRLLEQLTSDFIDSLYYIFSISIISIFFSVTFFFLLLSLGPTPCFSVSNFLS

SEQ ID NO: 37611 - protein, 929 aa, Homo sapiens; identical to SEQ ID NO: 37610

SEQ ID NO: 37612 - protein, 892 aa, Homo sapiens
MFCAAVLENLGQTIVPDLGSLESQHDFRTPEFEEFNGKPDSLFFNDGQRRIDFVLVYEDESRKETNKKGTNEKQRRKRQAYESNLICHGLQLEATRSVLDDKLVFVKVHAPWEVLCTYAEIMHIKLPLKPNDLKNRSSAFGTLNWFTKVLSVDESIIKPEQEFFTAPFEKNRMNDFYIVDRDAFFNPATRSRIVYFILSRVKYQVINNVSKFGINRLVNSGIYKAAFPLHDCKFRRQSEDPSCPNERYLLYREWAHPRSIYKKQPLDLIRKYYGEKIGIYFAWLGYYTQMLLLAAVVGVACFLYGYLNQDNCTWSKEVCHPDIGGKIIMCPQCDRLCPFWKLNITCESSKKLCIFDSFGTLVFAVFMGVWVTLFLEFWKRRQAELEYEWDTVELQQEEQARPEYEARCTHVVINEITQEEERIPFTAWGKCIRITLCASAVFFWILLIIASVIGIIVYRLSVFIVFSAKLPKNINGTDPIQKYLTPQTATSITASIISFIIIMILNTIYEKVAIMITNFELPRTQTDYENSLTMKMFLFQFVNYYSSCFYIAFFKGKFVGYPGDPVYWLGKYRNEECDPGGCLLELTTQLTIIMGGKAIWNNIQEVLLPWIMNLIGRFHRVSGSEKITPRWEQDYHLQPMGKLGLFYEYLEMIIQFGFVTLFVASFPLAPLLALVNNILEIRVDAWKLTTQFRRLVPEKAQDIGAWQPIMQGIAILAVVTNAMIIAFTSDMIPRLVYYWSFSVPPYGDHTSYTMEGYINNTLSIFKVADFKNKSKGNPYSDLGNHTTCRYRDFRYPPGHPQEYKHNIYYWHVIAAKLAFIIVMEHVIYSVKFFISYAIPDVSKRTKSKIQREKYLTQKLLHENHLKDMTKNMGVIAERMIEAVDNNLRPKSE

SEQ ID NO: 37613 - protein, 931 aa, Homo sapiens
MKKMSRNVLLQMEEEEDDDDGDIGDVPASRRPFLTPHTHLPSSLVLENLGQTIVPDLGSLESQHDFRTPEFEEFNGKPDSLFFNDGQRRIDFVLVYEDESRKETNKKGTNEKQRRKRQAYESNLICHGLQLEATRSVLDDKLVFVKVHAPWEVLCTYAEIMHIKLPLKPNDLKNRSSAFGTLNWFTKVLSVDESIIKPEQEFFTAPFEKNRMNDFYIVDRDAFFNPATRSRIVYFILSRVKYQVINNVSKFGINRLVNSGIYKAAFPLHDCKFRRQSEDPSCPNERYLLYREWAHPRSIYKKQPLDLIRKYYGEKIGIYFAWLGYYTQMLLLAAVVGVACFLYGYLNQDNCTWSKEVCHPDIGGKIIMCPQCDRLCPFWKLNITCESSKKLCIFDSFGTLVFAVFMGVWVTLFLEFWKRRQAELEYEWDTVELQQEEQARPEYEARCTHVVINEITQEEERIPFTAWGKCIRITLCASAVFFWILLIIASVIGIIVYRLSVFIVFSAKLPKNINGTDPIQKYLTPQTATSITASIISFIIIMILNTIYEKVAIMITNFELPRTQTDYENSLTMKMFLFQFVNYYSSCFYIAFFKGKFVGYPGDPVYWLGKYRNEECDPGGCLLELTTQLTIIMGGKAIWNNIQEVLLPWIMNLIGRFHRVSGSEKITPRWEQDYHLQPMGKLGLFYEYLEMIIQFGFVTLFVASFPLAPLLALVNNILEIRVDAWKLTTQFRRLVPEKAQDIGAWQPIMQGIAILAVVTNAMIIAFTSDMIPRLVYYWSFSVPPYGDHTSYTMEGYINNTLSIFKVADFKNKSKGNPYSDLGNHTTCRYRDFRYPPGHPQEYKHNIYYWHVIAAKLAFIIVMEHVIYSVKFFISYAIPDVSKRTKSKIQREKYLTQKLLHENHLKDMTKNMGVIAERMIEAVDNNLRPKSE

SEQ ID NO: 37614 - protein, 166 aa, Homo sapiens
MMLHSALGLCLLLVTVSSNLAIAIKKEKRPPQTLSRGWGDDITWVQTYEEGLFYAQKSKKPLMVIHHLEDCQYSQALKKVFAQNEEIQEMAQNKFIMLNLMHETTDKNLSPDGQYVPRIMFVDPSLTVRADIAGRYSNRLYTYEPRDLPLLIENMKKALRLIQSEL

SEQ ID NO: 37615 - protein, 150 aa, Homo sapiens
MGAAVFFGCTFVAFGPAFALFLITVAGDPLRVIILVAGKADEGLASLSEDGRSPISIRQMAYVSGLSFGIISGVFSVINILADALGPGVVGIHGDSPYYFLTSAFLTAAIILLHTFWGVVFFDACERRRYWALGLVVGSHLLTSGLTFLN

SEQ ID NO: 37616 - protein, 247 aa, Homo sapiens
MGAAVFFGCTFVAFGPAFALFLITVAGDPLRVIILVAGAFFWLVSLLLASVVWFILVHVTDRSDARLQYGLLIFGAAVSVLLQEVFRFAYYKLLKKADEGLASLSEDGRSPISIRQMAYVSGLSFGIISGVFSVINILADALGPGVVGIHGDSPYYFLTSAFLTAAIILLHTFWGVVFFDACERRRYWALGLVVGSHLLTSGLTFLNPWYEASLLPIYAVTVSMGLWAFITAGGSLRSIQRSLLCKD

SEQ ID NO: 37617 - protein, 265 aa, Homo sapiens
MGAAVFFGCTFVAFGPAFALFLITVAGDPLRVIILVAGAFFWLVSLLLASVVWFILVHVTDRSDARLQYGLLIFGAAVSVLLQEVFRFAYYKLLKKADEGLASLSEDGRSPISIRQMAYVSGLSFGIISGVFSVINILADALGPGVVGIHGDSPYYFLTSAFLTAAIILLHTFWGVVFFDACERRRYWALGLVVGSHLLTSGLTFLNPWYEASLLPIYAVTVSMGLWAFITAGGSLRSIQRSLLCRRQEDSRVMVYSALRIPPED

SEQ ID NO: 37618 - protein, 195 aa, Homo sapiens
MGAAVFFGCTFVAFGPAFALFLITVAGDPLRVIILVAGRCSALPTTSCLISGLSFGIISGVFSVINILADALGPGVVGIHGDSPYYFLTSAFLTAAIILLHTFWGVVFFDACERRRYWALGLVVGSHLLTSGLTFLNPWYEASLLPIYAVTVSMGLWAFITAGGSLRSIQRSLLCRRQEDSRVMVYSALRIPPED

SEQ ID NO: 37619 - protein, 257 aa, Homo sapiens
MTAAVFFGCAFIAFGPALALYVFTIATEPLRIIFLIAGAFFWLVSLLISSLVWFMARVIIDNKDGPTQKYLLIFGAFVSVYIQEMFRFAYYKLLKKASEGLKSINPGETAPSMRLLAYVSGLGFGIMSGVFSFVNTLSDSLGPGTVGIHGDSPQFFLYSAFMTLVIILLHVFWGIVFFDGCEKKKWGILLIVLLTHLLVSAQTFISSYYGINLASAFIILVLMGTWAFLAAGGSCRSLKLCLLCQDKNFLLYNQRSR

SEQ ID NO: 37620 - protein, 81 aa, Homo sapiens
MTAAVFFGCAFIAFGPALALYVFTIATEPLRIIFLIAGRRVETCKNTEAPDCASPSGSLSFLLVGVSTDFVPCLVHGKSHY

SEQ ID NO: 37621 - protein, 216 aa, Homo sapiens
MTAAVFFGCAFIAFGPALALYVFTIATEPLRIIFLIAGAFFWLVSLLISSLVWFMARVIIDNKDGPTQKYLLIFGAFVSVYIQEMFRFAYYKLLKKASEGLKSINPGETAPSMRLLAYAFMTLVIILLHVFWGIVFFDGCEKKKWGILLIVLLTHLLVSAQTFISSYYGINLASAFIILVLMGTWAFLAAGGSCRSLKLCLLCQDKNFLLYNQRSR

SEQ ID NO: 37622 - protein, 564 aa, Homo sapiens
MATAERRALGIGFQWLSLATLVLICAGQGGRREDGGPACYGGFDLYFILDKSGSVLHHWNEIYYFVEQLAHKFISPQLRMSFIVFSTRGTTLMKLTEDREQIRQGLEELQKVLPGGDTYMHEGFERASEQIYYENRQGYRTASVIIALTDGELHEDLFFYSEREANRSRDLGAIVYCVGVKDFNETQLARIADSKDHVFPVNDGFQALQGIIHSILKKSCIEILAAEPSTICAGESFQVVVRGNGFRHARNVDRVLCSFKINDSVTLNEKPFSVEDTYLLCPAPILKEVGMKAALQVSMNDGLSFISSSVIITTTHCSDGSILAIALLILFLLLALALLWWFWPLCCTVIIKEVPPPPAEESEEEDDDGLPKKKWPTVDASYYGGRGVGGIKRMEVRWGEKGSTEEGAKLEKAKNARVKMPEQEYEFPEPRNLNNNMRRPSSPRKWYSPIKGKLDALWVLLRKGYDRVSVMRPQPGDTGRCINFTRVKNNQPAKYPLNNAYHTSSPPPAPIYTPPPPAPHCPPPPPSAPTPPIPSPPSTLPPPPQAPPPNRAPPPSRPPPRPSV

SEQ ID NO: 37623 - protein, 368 aa, Homo sapiens
MATAERRALGIGFQWLSLATLVLICAGQGGRREDGGPACYGGFDLYFILDKSGSVLHHWNEIYYFVEQLAHKFISPQLRMSFIVFSTRGTTLMKLTEDREQIRQGLEELQKVLPGGDTYMHEGFERASEQIYYENRQGYRTASVIIALTDGELHEDLFFYSEREANRSRDLGAIVYCVGVKDFNETQLARIADSKDHVFPVNDGFQALQGIIHSILKKSCIEILAAEPSTICAGESFQVVVRGNGFRHARNVDRVLCSFKINDSVTLNEKPFSVEDTYLLCPAPILKEVGMKAALQVSMNDGLSFISSSVIITTTHCSDGSILAIALLILFLLLALALLWWFWPLCCTVIIKEVPPPPAEESEENKIK

SEQ ID NO: 37624 - protein, 333 aa, Homo sapiens
MATAERRALGIGFQWLSLATLVLICAGQGGRREDGGPACYGGFDLYFILDKSGSVLHHWNEIYYFVEQLAHKFISPQLRMSFIVFSTRGTTLMKLTEDREQIRQGLEELQKVLPGGDTYMHEGFERASEQIYYENRQGYRTASVIIALTDGELHEDLFFYSEREANRSRDLGAIVYCVGVKDFNETQLARIADSKDHVFPVNDGFQALQGIIHSILKKSCIEILAAEPSTICAGESFQVVVRGNGFRHARNVDRVLCSFKINDSVTLNEKPFSVEDTYLLCPAPILKEVGMKAALQVSMNDGLSFISSSVIITTTHCSLHKIASGPTTAACME

SEQ ID NO: 37625 - protein, 322 aa, Homo sapiens
MVAERSPARSPGSWLFPGLWLLVLSGPGGLLRAQEQPSCRRAFDLYFVLDKSGSVANNWIEIYNFVQQLAERFVSPEMRLSFIVFSSQATIILPLTGDRGKISKGLEDLKRVSPVGETYIHEGLKLANEQIQKAGGLKTSSIIIALTDGKLDGLVPSYAEKEAKISRSLGASVYCVGVLDFEQAQLERIADSKEQVFPVKGGFQALKGIINSILAQSCTEILELQPSSVCVGEEFQIVLSGRGFMLGSRNGSVLCTYTVNETYTTSVKPVSVQLNSMLCPAPILNKAGEWGLTVTQAGVKWHDLTHCTFGLSGSGDPPTSAS

SEQ ID NO: 37626 - protein, 489 aa, Homo sapiens
MVAERSPARSPGSWLFPGLWLLVLSGPGGLLRAQEQPSCRRAFDLYFVLDKSGSVANNWIEIYNFVQQLAERFVSPEMRLSFIVFSSQATIILPLTGDRGKISKGLEDLKRVSPVGETYIHEGLKLANEQIQKAGGLKTSSIIIALTDGKLDGLVPSYAEKEAKISRSLGASVYCVGVLDFEQAQLERIADSKEQVFPVKGGFQALKGIINSILAQSCTEILELQPSSVCVGEEFQIVLSGRGFMLGSRNGSVLCTYTVNETYTTSVKPVSVQLNSMLCPAPILNKAGETLDVSVSFNGGKSVISGSLIVTATECSNGIAAIIVILVLLLLLGIGLMWWFWPLCCKVVIKDPPPPPAPAPKEEEEEPLPTKKWPTVDASYYGGRGVGGIKRMEVRWGDKGSTEEGARLEKAKNAVVKIPEETEEPIRPRPPRPKPTHQPPQTKWYTPIKGRLDALWALLRRQYDRVSLMRPQEGDEVCIWECIEKELTA

SEQ ID NO: 37627 - protein, 386 aa, Homo sapiens
MVAERSPARSPGSWLFPGLWLLVLSGPGGLLRAQEQPSCRRAFDLYFVLDKSGSVANNWIEIYNFVQQLAERFVSPEMRLSFIVFSSQATIILPLTGDRGKISKGLEDLKRVSPVGETYIHEGLKLANEQIQKAGGLKTSSIIIALTDGKLDGLVPSYAEKEAKISRSLGASVYCVGVLDFEQAQLERIADSKEQVFPVKGGFQALKGIINSSNGIAAIIVILVLLLLLGIGLMWWFWPLCCKVVIKDPPPPPAPAPKEEEEEPLPTKKWPTVDASYYGGRGVGGIKRMEVRWGDKGSTEEGARLEKAKNAVVKIPEETEEPIRPRPPRPKPTHQPPQTKWYTPIKGRLDALWALLRRQYDRVSLMRPQEGDEVCIWECIEKELTA

SEQ ID NO: 37628 - protein, 488 aa, Homo sapiens
MVAERSPARSPGSWLFPGLWLLVLSGPGGLLRAQEQPSCRRAFDLYFVLDKSGSVANNWIEIYNFVQQLAERFVSPEMRLSFIVFSSQATIILPLTGDRGKISKGLEDLKRVSPVGETYIHEGLKLANEQIQKAGGLKTSSIIIALTDGKLDGLVPSYAEKEAKISRSLGASVYCVGVLDFEQAQLERIADSKEQVFPVKGGFQALKGIINSILAQSCTEILELQPSSVCVGEEFQIVLSGRGFMLGSRNGSVLCTYTVNETYTTSVKPVSVQLNSMLCPAPILNKAGETLDVSVSFNGGKSVISGSLIVTATECSNGIAAIIVILVLLLLLGIGLMWWFWPLCCKVVIKDPPPPPAPAPKEEEEEPLPTKKWPTVDASYYGGRGVGGIKRMEVRWGDKGSTEEGARLEKAKNAVVKIPEETEEPIRPRPPRPKPTHQPPQTKWYTPIKGRLDALWALLRRQYDRVSLMRPQEGDEGRCINFSRVPSQ

SEQ ID NO: 37629 - protein, 738 aa, Homo sapiens
MRGPSGALWLLLALRTVLGGMEVRWCATSDPEQHKCGNMSEAFREAGIQPSLLCVRGTSADHCVQLIAAQEADAITLDGGAIYEAGKEHGLKPVVGEVYDQEVGTSYYAVAVVRRSSHVTIDTLKGVKSCHTGINRTVGWNVPVGYLVESGRLSVMGCDVLKAVSDYFGGSCVPGAGETSYSESLCRLCRGDSSGEGVCDKSPLERYYDYSGAFRCLAEGAGDVAFVKHSTVLENTDGKTLPSWGQALLSQDFELLCRDGSRADVTEWRQCHLARVPAHAVVVRADTDGGLIFRLLNEGQRLFSHEGSSFQMFSSEAYGQKDLLFKDSTSELVPIATQTYEAWLGHEYLHAMKGLLCDPNRLPPYLRWCVLSTPEIQKCGDMAVAFRRQRLKPEIQCVSAKSPQHCMERIQAEQVDAVTLSGEDIYTAGKTYGLVPAAGEHYAPEDSSNSYYVVAVVRRDSSHAFTLDELRGKRSCHAGFGSPAGWDVPVGALIQRGFIRPKDCDVLTAVSEFFNASCVPVNNPKNYPSSLCALCVGDEQGRNKCVGNSQERYYGYRGAFRCLVENAGDVAFVRHTTVFDNTNGHNSEPWAAELRSEDYELLCPNGARAEVSQFAACNLAQIPPHAVMVRPDTNIFTVYGLLDKAQDLFGDDHNKNGFKMFDSSNYHGQDLLFKDATVRAVPVGEKTTYRGWLGLDYVAALEGMSSQQCSGAAAPAPGAPLLPLLLPALAARLLPPAL

SEQ ID NO: 37630 - protein, 302 aa, Homo sapiens
MRGPSGALWLLLALRTVLGGMEVRWCATSDPEQHKCGNMSEAFREAGIQPSLLCVRGTSADHCVQLIAAQEADAITLDGGAIYEAGKEHGLKPVVGEVYDQEVGTSYYAVAVVRRSSHVTIDTLKGVKSCHTGINRTVGWNVPVGYLVESGRLSVMGCDVLKAVSDYFGGSCVPGAGETSYSESLCRLCRGDSSGEGVCDKSPLERYYDYSGAFRCLAEGAGDVAFVKHSTVLENTDESPSRRQTWTRSEEEEGECPAHEEARRTMRSSAGQAWKWAPVHRPQDESDKGEFGKRAKSRDMLG

SEQ ID NO: 37631 - protein, 560 aa, Homo sapiens
MRDLPLTSLALVLSALGALLGTEALRAEEPAVGTSGLIFREDLDWPPGSPQEPLCLVALGGDSNGSSSPLRVVGALSAYEQAFLGAVQRARWGPRDLATFGVCNTGDRQAALPSLRRLGAWLRDPGGQRLVVLHLEEVTWEPTPSLRFQEPPPGGAGPPELALLVLYPGPGPEVTVTRAGLPGAQSLCPSRDTRYLVLAVDRPAGAWRGSGLALTLQPRGEDSRLSTARLQALLFGDDHRCFTRMTPALLLLPRSEPAPLPAHGQLDTVPFPPPRPSAELEESPPSADPFLETLTRLVRALRVPPARASAPRLALDPDALAGFPQGLVNLSDPAALERLLDGEEPLLLLLRPTAATTGDPAPLHDPTSAPWATALARRVAAELQAAAAELRSLPGLPPATAPLLARLLALCPGGPGGLGDPLRALLLLKALQGLRVEWRGRDPRGPGRAQRSAGATAADGPCALRELSVDLRAERSVLIPETYQANNCQGVCGWPQSDRNPRYGNHVVLLLKMQVRGAALARPPCCVPTAYAGKLLISLSEERISAHHVPNMVATECGCR

SEQ ID NO: 37632 - protein, 478 aa, Homo sapiens
MLGSLGLWALLPTAVEAPPNRRTCVFFEAPGVRGSTKTLGELLDTGTELPRAIRCLYSRCCFGIWNLTQDRAQVEMQGCRDSDEPGCESLHCDPSPRAHPSPGSTLFTCSCGTDFCNANYSHLPPPGSPGTPGSQGPQAAPGESIWMALVLLGLFLLLLLLLGSIILALLQRKNYRVRGEPVPEPRPDSGRDWSVELQELPELCFSQVIREGGHAVVWAGQLQGKLVAIKAFPPRSVAQFQAERALYELPGLQHDHIVRFITASRGGPGRLLSGPLLVLELHPKGSLCHYLTQYTSDWGSSLRMALSLAQGLAFLHEERWQNGQYKPGIAHRDLSSQNVLIREDGSCAIGDLGLALVLPGLTQPPAWTPTQPQGPAAIMEDPDGLRELLEDCWDADPEARLTAECVQQRLAALAHPQESHPFPESCPRGCPPLCPEDCTSIPAPTILPCRPQRSACHFSVQQGPCSRNPQPACTLSPV

SEQ ID NO: 37633 - protein, 478 aa, Homo sapiens
MLGSLGLWALLPTAVEAPPNRRTCVFFEAPGVRGSTKTLGELLDTGTELPRAIRCLYSRCCFGIWNLTQDRAQVEMQGCRDSDEPGCESLHCDPSPRAHPSPGSTLFTCSCGTDFCNANYSHLPPPGSPGTPGSQGPQAAPGESIWMALVLLGLFLLLLLLLGSIILALLQRKNYRVRGEPVPEPRPDSGRDWSVELQELPELCFSQVIREGGHAVVWAGQLQGKLVAIKAFPPRSVAQFQAERALYELPGLQHDHIVRFITASRGGPGRLLSGPLLVLELHPKGSLCHYLTQYTSDWGSSLRMALSLAQGLAFLHEERWQNGQYKPGIAHRDLSSQNVLIREDGSCAIGDLGLALVLPGLTQPPAWTPTQPQGPAAIMEAGTQRYMAPELLDKTLDLQDWGMALRRADIYSLALLLWEILSRCPDLRPAVHHPSNWPMRQNWAIPLPLMSYGPWQCRRGGVPTSHPPGAALPQTLMG

SEQ ID NO: 37634 - protein, 573 aa, Homo sapiens
MLGSLGLWALLPTAVEAPPNRRTCVFFEAPGVRGSTKTLGELLDTGTELPRAIRCLYSRCCFGIWNLTQDRAQVEMQGCRDSDEPGCESLHCDPSPRAHPSPGSTLFTCSCGTDFCNANYSHLPPPGSPGTPGSQGPQAAPGESIWMALVLLGLFLLLLLLLGSIILALLQRKNYRVRGEPVPEPRPDSGRDWSVELQELPELCFSQVIREGGHAVVWAGQLQGKLVAIKAFPPRSVAQFQAERALYELPGLQHDHIVRFITASRGGPGRLLSGPLLVLELHPKGSLCHYLTQYTSDWGSSLRMALSLAQGLAFLHEERWQNGQYKPGIAHRDLSSQNVLIREDGSCAIGDLGLALVLPGLTQPPAWTPTQPQGPAAIMEAGTQRYMAPELLDKTLDLQDWGMALRRADIYSLALLLWEILSRCPDLRPDSSPPPFQLAYEAELGNTPTSDELWALAVQERRRPYIPSTWRCFATDPDGLRELLEDCWDADPEARLTAECVQQRLAALAHPQESHPFPESCPRGCPPLCPEDCTSIPAPTILPCRPQRSACHFSVQQGPCSRNPQPACTLSPV

SEQ ID NO: 37635 - protein, 448 aa, Homo sapiens
MKGFIDDANYSVGLLDEGTNLGNVIDNYVYEHTLTGKNAFFVGDLGKIVKKHSQWQNVVAQIKPFYTVKCNSAPAVLEILAALGTGFACSSKNEMALVQELGVPPENIIYISPCKQVSQIKYAAKVGVNILTCDNEIELKKIARNHPNAKVLLHIATEDNIGGEEGNMKFGTTLKNCRHLLECAKELDVQIIGVKFHVSSACKESQVYVHALSDARCVFDMAGEIGFTMNMLDIGGGFTGTEFQLEEVNHVISPLLDIYFPEGSGVKIISEPGSYYVSSAFTLAVNIIAKKVVENDKFPSGVEKTGSDEPAFMYYMNDGVYGSFASKLSEDLNTIPEVHKKYKEDEPLFTSSLWGPSCDELDQIVESCLLPELNVGDWLIFDNMGADSFHEPSAFNDFQRPAIYYMMSFSDWYEMQDAGITSDSMMKNFFFVPSCIQLSQEDSFSAEA

SEQ ID NO: 37636 - protein, 448 aa, Homo sapiens; identical to SEQ ID NO: 37635

SEQ ID NO: 37637 - protein, 33 aa, Homo sapiens
MKGFIDDANYSVGLLDEGTNLGNVIDNYVYEHT

SEQ ID NO: 37638 - protein, 97 aa, Homo sapiens
MKGFIDDANYSVGLLDEGTNLGNVIDNYVYEHTLTGKNAFFVGDLGKIVKKHSQWQNVVAQIKPFYTVKCNSAPAVLEILAALGTGFACSSKNEMAL

SEQ ID NO: 37639 - protein, 259 aa, Homo sapiens
MRRAVAYMAIKIEVQGHQSFAIPSGTFWLWRSLLSQDKEHPRYLIPELCKQFYHLGWVTGTGGGISLKHGDEIYIAPSGVQKERIQPEDMFVCDINEKDISGPSPSKKLKKSQCTPLFMNAYTMRGAGAVIHTHSKAAVMATLLFPGREFKITHQEMIKGIKKCTSGGYYRYDDMLVVPIIENTPEEKDLKDRMAHAMNEYPDSCAVLVRRHGVYVWGETWEKAKTMCECYDYLFDIAVSMKKVGLDPSQLPVGENGIV

SEQ ID NO: 37640 - protein, 242 aa, Homo sapiens
MSGCDAREGDCCSRRCGAQDKEHPRYLIPELCKQFYHLGWVTGTGGGISLKHGDEIYIAPSGVQKERIQPEDMFVCDINEKDISGPSPSKKLKKSQCTPLFMNAYTMRGAGAVIHTHSKAAVMATLLFPGREFKITHQEMIKGIKKCTSGGYYRYDDMLVVPIIENTPEEKDLKDRMAHAMNEYPDSCAVLVRRHGVYVWGETWEKAKTMCECYDYLFDIAVSMKKVGLDPSQLPVGENGIV

SEQ ID NO: 37641 - protein, 77 aa, Homo sapiens
MNLRLCVQALLLLWLSLTAVCGGSLMPLPDGNGLEDGNVRHLVQPRGSRNGPGPWQGGRRKFRRQRPRLSHKGPMPF

SEQ ID NO: 37642 - protein, 122 aa, Homo sapiens
MSATWCSPEGQGMGQGPGREVGGNSAASGPASPIRDPCLSEAGLKGPPSAHPRRLCLLHRLVCFSGGLTSIQLSPRTCCSHQWAQLFSPACFPQWRAPGCSLDDSRSLTRIRPVHLPGPSLD

SEQ ID NO: 37643 - protein, 122 aa, Homo sapiens; identical to SEQ ID NO: 37642

SEQ ID NO: 37644 - protein, 100 aa, Homo sapiens
MKLLAATVLLLTICSLEGALVRRQAKEPCVESLVSQYFQTVTDYGKDLMEKVKSPELQAEAKSYFEKSKEQLTPLIKKAGTELVNFLSYFVELGTQPATQ

SEQ ID NO: 37645 - protein, 396 aa, Homo sapiens
MFLKAVVLTLALVAVAGARAEVSADQVATVMWDYFSQLSNNAKEAVEHLQKSELTQQLNALFQDKLGEVNTYAGDLQKKLVPFATELHERLAKDSEKLKEEIGKELEELRARLLPHANEVSQKIGDNLRELQQRLEPYADQLRTQVSTQAEQLRRQLTPYAQRMERVLRENADSLQASLRPHADELKAKIDQNVEELKGRLTPYADEFKVKIDQTVEELRRSLAPYAQDTQEKLNHQLEGLTFQMKKNAEELKARISASAEELRQRLAPLAEDVRGNLRGNTEGLQKSLAELGGHLDQQVEEFRRRVEPYGENFNKALVQQMEQLRQKLGPHAGDVEGHLSFLEKDLRDKVNSFFSTFKEKESQDKTLSLPELEQQQEQQQEQQQEQVQMLAPLES

SEQ ID NO: 37646 - protein, 366 aa, Homo sapiens
MASMAAVLTWALALLSAFSATQARKGFWDYFSQTSGDKGRVEQIHQQKMAREPATLKDSLEQDLNNMNKFLEKLRPLSGSEAPRLPQDPVGMRRQLQEELEEVKARLQPYMAEAHELVGWNLEGLRQQLKPYTMDLMEQVALRVQELQEQLRVVGEDTKAQLLGGVDEAWALLQGLQSRVVHHTGRFKELFHPYAESLVSGIGRHVQELHRSVAPHAPASPARLSRCVQVLSRKLTLKAKALHARIQQNLDQLREELSRAFAGTGTEEGAGPDPQMLSEEVRQRLQAFRQDTYLQIAAFTRAIDQETEEVQQQLAPPPPGHSAFAPEFQQTDSGKVLSKLQARLDDLWEDITHSLHDQGHSHLGDP

SEQ ID NO: 37647 - protein, 162 aa, Homo sapiens
MASMAAVLTWALALLSAFSATQARKGFWDYFSQTSGDKGRVEQIHQQKMAREPATLKDSLEQDLNNMNKFLEKLRPLSGSEAPRLPQDPVGMRRQLQEELEEVKARLQPYMAEAHELVGWNLEGLRQQLKPYTMDLMEQVALRVQELQEQLRVVGEDTKAQL

SEQ ID NO: 37648 - protein, 366 aa, Homo sapiens; identical to SEQ ID NO: 37646

SEQ ID NO: 37649 - protein, 357 aa, Homo sapiens
MNPQIRNPMERMYRDTFYDNFENEPILYGRSYTWLCYEVKIKRGRSNLLWDTGVFRGQVYFKPQYHAEMCFLSWFCGNQLPAYKCFQITWFVSWTPCPDCVAKLAEFLSEHPNVTLTISAARLYYYWERDYRRALCRLSQAGARVTIMDYEEFAYCWENFVYNEGQQFMPWYKFDENYAFLHRTLKEILRYLMDPDTFTFNFNNDPLVLRRRQTYLCYEVERLDNGTWVLMDQHMGFLCNELDPAQIYRVTWFISWSPCFSWGCAGEVRAFLQENTHVRLRIFAARIYDYDPLYKEALQMLRDAGAQVSIMTYDEFEYCWDTFVYRQGCPFQPWDGLEEHSQALSGRLRAILQNQGN

SEQ ID NO: 37650 - protein, 101 aa, Homo sapiens
MKPHFRNTVERMYRDTFSYNFYNRPILSRRNTVWLCYEVKTKGPSRPRLDAKIFRGQVPRSFIRAPFQVLSSPFGQCAPPHGTAQVQWPPQLTAGREQGRP

SEQ ID NO: 37651 - protein, 236 aa, Homo sapiens
MTSEKGPSTGDPTLRRRIEPWEFDVFYDPRELRKEACLLYEIKWGMSRKIWRSSGKNTTNHVEVNFIKKFTSERDFHPSMSCSITWFLSWSPCWECSQAIREFLSRHPGVTLVIYVARLFWHMDQQNRQGLRDLVNSGVTIQIMRASEYYHCWRNFVNYPPGDEAHWPQYPPLWMMLYALELHCIILSLPPCLKISRRWQNHLTFFRLHLQNCHYQTIPPHILLATGLIHPSVAWR

SEQ ID NO: 37652 - protein, 224 aa, Homo sapiens
MAQKEEAAVATEAASQNGEDLENLDDPEKLKELIELPPFEIVTGERLPANFFKFQFRNVEYSSGRNKTFLCYVVEAQGKGGQVQASRGYLEDEHAAAHAEEAFFNTILPAFDPALRYNVTWYVSSSPCAACADRIIKTLSKTKNLRLLILVGRLFMWEEPEIQAALKKLKEAGCKLRIMKPQDFEYVWQNFVEQEEGESKAFQPWEDIQENFLYYEEKLADILK

SEQ ID NO: 37653 - protein, 130 aa, Homo sapiens
MAQKEEAAVATEAASQNGEDLENLDDPEKLKELIELPPFEIVTGERLPANFFKFQFRNVEYSSGRKLSSTPSCQPSTQPCGTMSPGMCPPAPVQRVLTALSKPLARPRTCVCSFWWVDSSCGRSRRSRLL

SEQ ID NO: 37654 - protein, 199 aa, Homo sapiens
MEASPASGPRHLMDPHIFTSNFNNGIGRHKTYLCYEVERLDNGTSVKMDQHRGFLHNQAKNLLCGFYGRHAELRFLDLVPSLQLDPAQIYRVTWFISWSPCFSWGCAGEVRAFLQENTHVRLRIFAARIYDYDPLYKEALQMLRDAGAQVSIMTYDEFKHCWDTFVDHQGCPFQPWDGLDEHSQALSGRLRAILQNQGN

SEQ ID NO: 37655 - protein, 199 aa, Homo sapiens; identical to SEQ ID NO: 37654

SEQ ID NO: 37656 - protein, 382 aa, Homo sapiens
MNPQIRNPMERMYRDTFYDNFENEPILYGRSYTWLCYEVKIKRGRSNLLWDTGVFRGQVYFKPQYHAEMCFLSWFCGNQLPAYKCFQITWFVSWTPCPDCVAKLAEFLSEHPNVTLTISAARLYYYWERDYRRALCRLSQAGARVTIMDYEEFAYCWENFVYNEGQQFMPWYKFDENYAFLHRTLKEILRYLMDPDTFTFNFNNDPLVLRRRQTYLCYEVERLDNGTWVLMDQHMGFLCNEAKNLLCGFYGRHAELRFLDLVPSLQLDPAQIYRVTWFISWSPCFSWGCAGEVRAFLQENTHVRLRIFAARIYDYDPLYKEALQMLRDAGAQVSIMTYDEFEYCWDTFVYRQGCPFQPWDGLEEHSQALSGRLRAILQNQGN

SEQ ID NO: 37657 - protein, 190 aa, Homo sapiens
MNPQIRNPMKAMYPGTFYFQFKNLWEANDRNETWLCFTVEGIKRRSVVSWKTGVFRNQVDSETHCHAERCFLSWFCDDILSPNTKYQVTWYTSWSPCPDCAGEVAEFLARHSNVNLTIFTARLYYFQYPCYQEGLRSLSQEGVAVEIMDYEDFKYCWENFVYNDNEPFKPWKGLKTNFRLLKRRLRESLQ

SEQ ID NO: 37658 - protein, 373 aa, Homo sapiens
MKPHFRNTVERMYRDTFSYNFYNRPILSRRNTVWLCYEVKTKGPSRPRLDAKIFRGQVYSQPEHHAEMCFLSWFCGNQLPAYKCFQITWFVSWTPCPDCVAKLAEFLAEHPNVTLTISAARLYYYWERDYRRALCRLSQAGARVKIMDDEEFAYCWENFVYSEGQPFMPWYKFDDNYAFLHRTLKEILRNPMEAMYPHIFYFHFKNLRKAYGRNESWLCFTMEVVKHHSPVSWKRGVFRNQVDPETHCHAERCFLSWFCDDILSPNTNYEVTWYTSWSPCPECAGEVAEFLARHSNVNLTIFTARLYYFWDTDYQEGLRSLSQEGASVEIMGYKDFKYCWENFVYNDDEPFKPWKGLKYNFLFLDSKLQEILE

SEQ ID NO: 37659 - protein, 384 aa, Homo sapiens
MKPHFRNTVERMYRDTFSYNFYNRPILSRRNTVWLCYEVKTKGPSRPPLDAKIFRGQVYSELKYHPEMRFFHWFSKWRKLHRDQEYEVTWYISWSPCTKCTRDMATFLAEDPKVTLTIFVARLYYFWDPDYQEALRSLCQKRDGPRATMKIMNYDEFQHCWSKFVYSQRELFEPWNNLPKYYILLHIMLGEILRHSMDPPTFTFNFNNEPWVRGRHETYLCYEVERMHNDTWVLLNQRRGFLCNQAPHKHGFLEGRHAELCFLDVIPFWKLDLDQDYRVTCFTSWSPCFSCAQEMAKFISKNKHVSLCIFTARIYDDQGRCQEGLRTLAEAGAKISIMTYSEFKHCWDTFVDHQGCPFQPWDGLDEHSQDLSGRLRAILQNQEN

SEQ ID NO: 37660 - protein, 384 aa, Homo sapiens; identical to SEQ ID NO: 37659

SEQ ID NO: 37661 - protein, 182 aa, Homo sapiens
MALLTAETFRLQFNNKRRLRRPYYPRKALLCYQLTPQNGSTPTRGYFENKKKCHAEICFINEIKSMGLDETQCYQVTCYLTWSPCSSCAWELVDFIKAHDHLNLGIFASRLYYHWCKPQQKGLRLLCGSQVPVEVMGFPKFADCWENFVDHEKPLSFNPYKMLEELDKNSRAIKRRLERIKS

SEQ ID NO: 37662 - protein, 200 aa, Homo sapiens
MALLTAETFRLQFNNKRRLRRPYYPRKALLCYQLTPQNGSTPTRGYFENKKKCHAEICFINEIKSMGLDETQCYQVTCYLTWSPCSSCAWELVDFIKAHDHLNLGIFASRLYYHWCKPQQKGLRLLCGSQVPVEVMGFPKFADCWENFVDHEKPLSFNPYKMLEELDKNSRAIKRRLERIKIPGVRAQGRYMDILCDAEV

SEQ ID NO: 37663 - protein, 154 aa, Homo sapiens
MALLTAETFRLQFNNKRRLRRPYYPRKALLCYQLTPQNGSTPTRGYFENKKKCHAEICFINEIKSMGLDETQCYQVTCYLTWSPCSSCAWELVDFIKAHDHLNLGIFASRLYYHWCKPQQKGLRLLCGSQVPVEVMGFPNSRGTCAGSLHGYIV

SEQ ID NO: 37664 - protein, 183 aa, Homo sapiens
MALLTAETFRLQFNNKRRLRRPYYPRKALLCYQLTPQNGSTPTRGYFENKKKCHAEICFINEIKSMGLDETQCYQVTCYLTWSPCSSCAWELVDFIKAHDHLNLGIFASRLYYHWCKPQQKGLRLLCGSQVPVEVMGFPKFADCWENFVDHEKPLSFNPYKMLEELDKNSRAIKRRLERIKQS

SEQ ID NO: 37665 - protein, 367 aa, Homo sapiens
MEPIYEEYLANHGTIVKPYYWLSFSLDCSNCPYHIRTGEEARVSLTEFCQIFGFPYGTTFPQTKHLTFYELKTSSGSLVQKGHASSCTGNYIHPESMLFEMNGYLDSAIYNNDSIRHIILYSNNSPCNEANHCCISKMYNFLITYPGITLSIYFSQLYHTEMDFPASAWNREALRSLASLWPRVVLSPISGGIWHSVLHSFISGVSGSHVFQPILTGRALADRHNAYEINAITGVKPYFTDVLLQTKRNPNTKAQEALESYPLNNAFPGQFFQMPSGQLQPNLPPDLRAPVVFVLVPLRDLPPMHMGQNPNKPRNIVRHLNMPQMSFQETKDLGRLPTGRSVEIVEITEQFASSKEADEKKKKKGKK

SEQ ID NO: 37666 - protein, 83 aa, Homo sapiens
MRLFLSLPVLVVVLSIVLEGPAPAQGTPDVSSALDKLKEFGNTLEDKARELISRIKQSELSAKMREWFSETFQKVKEKLKIDS

SEQ ID NO: 37667 - protein, 101 aa, Homo sapiens
MGTRLLPALFLVLLVLGFEVQGTQQPQQDEMPSPTFLTQVKESLSSYWESAKTAAQNLYEKTYLPAVDEKLRDLYSKSTAAMSTYTGIFTDQVLSVLKGEE

SEQ ID NO: 37668 - protein, 127 aa, Homo sapiens
MSLLRNRLQALPALCLCVLVLACIGACQPEAQEGTLSPPPKLKMSRWSLVRGRMKELLETVVNRTRDGWQWFWSPSTFRGFMQTYYDDHLRDLGPLTKAWFLESKDSLLKKTHSLCPRLVCGDKDQG

SEQ ID NO: 37669 - protein, 99 aa, Homo sapiens
MQPRVLLVVALLALLASARASEAEDASLLSFMQGYMKHATKTAKDALSSVQESQVAQQARGWVTDGFSSLKDYWSTVKDKFSEFWDLDPEVRPTSAVAA

SEQ ID NO: 37670 - protein, 117 aa, Homo sapiens
MGTWGAPHRTLPCRNRGAMQPRVLLVVALLALLASARASEAEDASLLSFMQGYMKHATKTAKDALSSVQESQVAQQARGWVTDGFSSLKDYWSTVKDKFSEFWDLDPEVRPTSAVAA

SEQ ID NO: 37671 - protein, 55 aa, Homo sapiens
MQPRVLLVVALLALLASARASEAEDASLLSFMQGYMKHATKTAKDALSSVQESQV

SEQ ID NO: 37672 - protein, 127 aa, Homo sapiens; identical to SEQ ID NO: 37668

SEQ ID NO: 37673 - protein, 127 aa, Homo sapiens; identical to SEQ ID NO: 37668

SEQ ID NO: 37674 - protein, 189 aa, Homo sapiens
MVMLLLLLSALAGLFGAAEGQAFHLGKCPNPPVQENFDVNKYLGRWYEIEKIPTTFENGRCIQANYSLMENGKIKVLNQELRADGTVNQIEGEATPVNLTEPAKLEVKFSWFMPSAPYWILATDYENYALVYSCTCIIQLFHVDFAWILARNPNLPPETVDSLKNILTSNNIDVKKMTVTDQVNCPKLS

SEQ ID NO: 37675 - protein, 149 aa, Homo sapiens
MVMLLLLLSALAGLFGAAEGQAFHLGKCPNPPVQENFDVNKYLGRWYEIEKIPTTFENGRCIQANYSLMENGKIKVLNQELRADGTVNQIEGEATPVNLTEPAKLEVKFSWFMPSAPYWILATDYENYALVYSCTCIIQLFHVDFAWIL

SEQ ID NO: 37676 - protein, 317 aa, Homo sapiens [sequence omitted]

SEQ ID NO: 37677 - protein, 219 aa, Homo sapiens
MKVLWAALLVTFLAGCQAKVEQAVETEPEPELRQQTEWQSGQRWELALGRFWDYLRWVQTLSEQVQEELLSSQVTQELRALMDETMKELKAYKSELEEQLTPVAEETRARLSKELQAAQARLGADMEDVCGRLVQYRGEVQAMLGQSTEELRVRLASHLRKLRKRLLRDADDLQKRLAVYQAGAREGAERGLSAIRERLGPLVEQGRVRAATVGSLAGQ

SEQ ID NO: 37678 - protein, 288 aa, Homo sapiens
EVKDVLPQEPVRSAVGGTGMSSGASRKSWDPGNPWPPDWPITGRKMKVLWAALLVTFLAGCQAKVEQAVETEPEPELRQQTEWQSGQRWELALGRFWDYLRWVQTLSEQVQEELLSSQVTQELRALMDETMKELKAYKSELEEQLTPVAEETRARLSKELQAAQARLGADMEDVCGRLVQYRGEVQAMLGQSTEELRVRLASHLRKLRKRLLRDADDLQKRLAVYQAGAREGAERGLSAIRERLGPLVEQGRVRAATVGSLAGQPLQERAQAWGERLRARMEEMGSRT

SEQ ID NO: 37679 - protein, 216 aa, Homo sapiens
MKVLWAALLVTFLAGCQAKVEQAVETEPEPELRQQTEWQSGQRWELALGRFWDYLRWVQTLSEQVQEELLSSQVTQELRALMDETMKELKAYKSELEEQLTPVAEETRARLSKELQAAQARLGADMEDVCGRLVQYRGEVQAMLGQSTEELRVRLASHLRKLRKRLLRDADDLQKRLAVYQAGAREGAERGLSAIRERLGPLVEQGRVRAATVGSL

SEQ ID NO: 37680 - protein, 345 aa, Homo sapiens
MISPVLILFSSFLCHVAIAGRTCPKPDDLPFSTVVPLKTFYEPGEEITYSCKPGYVSRGGMRKFICPLTGLWPINTLKCTPRVCPFAGILENGAVRYTTFEYPNTISFSCNTGFYLNGADSAKCTEEGKWSPELPVCAPIICPPPSIPTFATLRVYKPSAGNNSLYRDTAVFECLPQHAMFGNDTITCTTHGNWTKLPECREVKCPFPSRPDNGFVNYPAKPTLYYKDKATFGCHDGYSLDGPEEIECTKLGNWSAMPSCKASCKVPVKKATVVYQGERVKIQEKFKNGMLHGDKVSFFCKNKEKKCSYTEDAQCIDGTIEVPKCFKEHSSLAFWKTDASDVKPC

SEQ ID NO: 37681 - protein, 279 aa, Homo sapiens
MFRAPCHRLRARGTRKARAGAWRGCTFPCLGKGMERPAAREPHGPDALRRFQGLLLDRRGRLHGQVLRLREVARRLERLRRRSLVANVAGSSLSATGALAAIVGLSLSPVTLGTSLLVSAVGLGVATAGGAVTITSDLSLIFCNSRELRRVQEIAATCQDQMREILSCLEFFCRWQGCGDRQLLQCGRNASIALYNSVYFIVFFGSRGFLIPRRAEGDTKVSQAVLKAKIQKLAESLESCTGALDELSEQLESRVQLCTKSSRGHDLKISADQRAGLFF

SEQ ID NO: 37682 - protein, 248 aa, Homo sapiens
MGMERPAAREPHGPDALRRFQGLLLDRRGRLHGQVLRLREVARRLERLRRRSLVANVAGSSLSATGALAAIVGLSLSPVTLGTSLLVSAVGLGVATAGGAVTITSDLSLIFCNSRELRRVQEIAATCQDQMREILSCLEFFCRWQGCGDRQLLQCGRNASIALYNSVYFIVFFGSRGFLIPRRAEGDTKVSQAVLKAKIQKLAESLESCTGALDELSEQLESRVQLCTKSSRGHDLKISADQRAGLFF

SEQ ID NO: 37683 - protein, 414 aa, Homo sapiens
MRFKSHTVELRRPCSDMEGAALLRVSVLCIWMSALFLGVGVRAEEAGARVQQNVPSGTDTGDPQSKPLGDWAAGTMDPESSIFIEDAIKYFKEKVSTQNLLLLLTDNEAWNGFVAAAELPRNEADELRKALDNLARQMIMKDKNWHDKGQQYRNWFLKEFPRLKSELEDNIRRLRALADGVQKVHKGTTIANVVSGSLSISSGILTLVGMGLAPFTEGGSLVLLEPGMELGITAALTGITSSTMDYGKKWWTQAQAHDLVIKSLDKLKEVREFLGENISNFLSLAGNTYQLTRGIGKDIRALRRARANLQSVPHASASRPRVTEPISAESGEQVERVNEPSILEMSRGVKLTDVAPVSFFLVLDVVYLVYESKHLHEGAKSETAEELKKVAQELEEKLNILNNNYKILQADQEL

SEQ ID NO: 37684 - protein, 277 aa, Homo sapiens
MIMKDKNWHDKGQQYRNWFLKEFPRLKSELEDNIRRLRALADGVQKVHKGTTIANVVSGSLSISSGILTLVGMGLAPFTEGGSLVLLEPGMELGITAALTGITSSTMDYGKKWWTQAQAHDLVIKSLDKLKEVREFLGENISNFLSLAGNTYQLTRGIGKDIRALRRARANLQSVPHASASRPRVTEPISAESGEQVERVNEPSILEMSRGVKLTDVAPVSFFLVLDVVYLVYESKHLHEGAKSETAEELKKVAQELEEKLNILNNNYKILQADQEL

SEQ ID NO: 37685 - protein, 398 aa, Homo sapiens
MEGAALLRVSVLCIWMSALFLGVGVRAEEAGARVQQNVPSGTDTGDPQSKPLGDWAAGTMDPESSIFIEDAIKYFKEKVSTQNLLLLLTDNEAWNGFVAAAELPRNEADELRKALDNLARQMIMKDKNWHDKGQQYRNWFLKEFPRLKSELEDNIRRLRALADGVQKVHKGTTIANVVSGSLSISSGILTLVGMGLAPFTEGGSLVLLEPGMELGITAALTGITSSTMDYGKKWWTQAQAHDLVIKSLDKLKEVREFLGENISNFLSLAGNTYQLTRGIGKDIRALRRARANLQSVPHASASRPRVTEPISAESGEQVERVNEPSILEMSRGVKLTDVAPVSFFLVLDVVYLVYESKHLHEGAKSETAEELKKVAQELEEKLNILNNNYKILQADQEL

SEQ ID NO: 37686 - protein, 398 aa, Homo sapiens; identical to SEQ ID NO: 37685

SEQ ID NO: 37687 - protein, 398 aa, Homo sapiens; identical to SEQ ID NO: 37685

SEQ ID NO: 37688 - protein, 398 aa, Homo sapiens; identical to SEQ ID NO: 37685

SEQ ID NO: 37689 - protein, 380 aa, Homo sapiens
MEGAALLRVSVLCIWVQQNVPSGTDTGDPQSKPLGDWAAGTMDPESSIFIEDAIKYFKEKVSTQNLLLLLTDNEAWNGFVAAAELPRNEADELRKALDNLARQMIMKDKNWHDKGQQYRNWFLKEFPRLKSELEDNIRRLRALADGVQKVHKGTTIANVVSGSLSISSGILTLVGMGLAPFTEGGSLVLLEPGMELGITAALTGITSSTMDYGKKWWTQAQAHDLVIKSLDKLKEVREFLGENISNFLSLAGNTYQLTRGIGKDIRALRRARANLQSVPHASASRPRVTEPISAESGEQVERVNEPSILEMSRGVKLTDVAPVSFFLVLDVVYLVYESKHLHEGAKSETAEELKKVAQELEEKLNILNNNYKILQADQEL

SEQ ID NO: 37690 - protein, 160 aa, Homo sapiens
MEGAALLRVSVLCIWMSALFLGVGVRAEEAGARVQQNVPSGTDTGDPQSKPLGDWAAGTMDPESSIFIEDAIKYFKEKVSTQNLLLLLTDNEAWNGFVAAAELPRNEADELRKALDNLARQMIMKDKNWHDKGQQYRNWFLKEFPRLKSELEDNIRRLRA

SEQ ID NO: 37691 - protein, 141 aa, Homo sapiens
MEGAALLRVSVLCIWMSALFLGVGVRAEEAGARVQQNVPSGTDTGDPQSKPLGDWAAGTMDPGPAGSRGDSGEPCTLRPACRGQRQHGGASRISAEGPAPMPRRRTPSTAHLRVPKTSRRNLLCMRAVSLLRMPLSISRKK

SEQ ID NO: 37692 - protein, 118 aa, Homo sapiens
MRFKSHTVELRSTLSQPLFSCSRRRPCSDMEGAALLRVSVLCIWMSALFLGVGVRAEEAGARVQQNVPSGTDTGDPQSKPLGDWAAGTMDPESSIFIEDAIKYFKEKVSTQNLLLLLT

SEQ ID NO: 37693 - protein, 141 aa, Homo sapiens; identical to SEQ ID NO: 37691

SEQ ID NO: 37694 - protein, 337 aa, Homo sapiens
MNPESSIFIEDYLKYFQDQVSRENLLQLLTDDEAWNGFVAAAELPRDEADELRKALNKLASHMVMKDKNRHDKDQQHRQWFLKEFPRLKRELEDHIRKLRALAEEVEQVHRGTTIANVVSNSVGTTSGILTLLGLGLAPFTEGISFVLLDTGMGLGAAAAVAGITCSVVELVNKLRARAQARNLDQSGTNVAKVMKEFVGGNTPNVLTLVDNWYQVTQGIGRNIRAIRRARANPQLGAYAPPPHIIGRISAEGGEQVERVVEGPAQAMSRGTMIVGAATGGILLLLDVVSLAYESKHLLEGAKSESAEELKKRAQELEGKLNFLTKIHEMLQPGQDQ

SEQ ID NO: 37695 - protein, 337 aa, Homo sapiens; identical to SEQ ID NO: 37694

SEQ ID NO: 37696 - protein, 449 aa, Homo sapiens
MHSWTWDPHSSEQLDLAQSLSEEDPLSSLRGSIQPQPPAEAPDKGGSQANNDPGGWDPGCSSSQVLGRTRGPCLGVRVREEEAGTRVKENLPVWTVTGELQGKPLGNPAAGTMNPESSIFIEDYLKYFQDQVSRENLLQLLTDDEAWNGFVAAAELPRDEADELRKALNKLASHMVMKDKNRHDKDQQHRQWFLKEFPRLKRELEDHIRKLRALAEEVEQVHRGTTIANVVSNSVGTTSGILTLLGLGLAPFTEGISFVLLDTGMGLGAAAAVAGITCSVVELVNKLRARAQARNLDQSGTNVAKVMKEFVGGNTPNVLTLVDNWYQVTQGIGRNIRAIRRARANPQLGAYAPPPHIIGRISAEGGEQVERVVEGPAQAMSRGTMIVGAATGGILLLLDVVSLAYESKHLLEGAKSESAEELKKRAQELEGKLNFLTKIHEMLQPGQDQ

SEQ ID NO: 37697 - protein, 74 aa, Homo sapiens
MNPESSIFIEDYLKYFQDQVSRENLLQLLTDDEAWNGFVAAAELPRDEADELRKALNKLASHMVMKDKNRHDKD

SEQ ID NO: 37698 - protein, 128 aa, Homo sapiens
MNPESSIFIEDYLKYFQDQVSRENLLQLLTDDEAWNGFVAAAELPRDEADELRKALNKLASHMVMKDKNRHDKDQQHRQWFLKEFPRLKRELEDHIRKLRALAEEVEQVHRGTTIANVVSNSVGTTSG

SEQ ID NO: 37699 - protein, 402 aa, Homo sapiens
MGLGQGWGWEASCFACLIRSCCQVVTFTFPFGFQGISQSLENVSGYYADARLEVGSTQLRTAGSCSHSFKRSFLEKKRFTEEATKYFRERVSPVHLQILLTNNEAWKRFVTAAELPRDEADALYEALKKLRTYAAIEDEYVQQKDEQFREWFLKEFPQVKRKIQESIEKLRALANGIEEVHRGCTISNVVSSSTGAASGIMSLAGLVLAPFTAGTSLALTAAGVGLGAASAVTGITTSIVEHSYTSSAEAEASRLTATSIDRLKVFKEVMRDITPNLLSLLNNYYEATQTIGSEIRAIRQARARARLPVTTWRISAGSGGQAERTIAGTTRAVSRGARILSATTSGIFLALDVVNLVYESKHLHEGAKSASAEELRRQAQELEENLMELTQIYQRLNPCHTH

SEQ ID NO: 37700 - protein, 202 aa, Homo sapiens
MSLAGLVLAPFTAGTSLALTAAGVGLGAASAVTGITTSIVEHSYTSSAEAEASRLTATSIDRLKVFKEVMRDITPNLLSLLNNYYEATQTIGSEIRAIRQARARARLPVTTWRISAGSGGQAERTIAGTTRAVSRGARILSATTSGIFLALDVVNLVYESKHLHEGAKSASAEELRRQAQELEENLMELTQIYQRLNPCHTH

SEQ ID NO: 37701 - protein, 202 aa, Homo sapiens; identical to SEQ ID NO: 37700

SEQ ID NO: 37702 - protein, 331 aa, Homo sapiens
MDSEKKRFTEEATKYFRERVSPVHLQILLTNNEAWKRFVTAAELPRDEADALYEALKKLRTYAAIEDEYVQQKDEQFREWFLKEFPQVKRKIQESIEKLRALANGIEEVHRGCTISNVVSSSTGAASGIMSLAGLVLAPFTAGTSLALTAAGVGLGAASAVTGITTSIVEHSYTSSAEAEASRLTATSIDRLKVFKEVMRDITPNLLSLLNNYYEATQTIGSEIRAIRQARARARLPVTTWRISAGSGGQAERTIAGTTRAVSRGARILSATTSGIFLALDVVNLVYESKHLHEGAKSASAEELRRQAQELEENLMELTQIYQRLNPCHTH

SEQ ID NO: 37703 - protein, 202 aa, Homo sapiens; identical to SEQ ID NO: 37700

SEQ ID NO: 37704 - protein, 107 aa, Homo sapiens
MGSWVQLITSVGTSGLFLGVRVREEGAGMRCSKTIQAGQWLDSSKGPLGPSPPPVPTAGYSSSFCVHYVNLLPGVLVLSVTSQYPHLSMALCQLAAHDWPRLSCVCV

SEQ ID NO: 37705 - protein, 347 aa, Homo sapiens
MGSWVQLITSVGVQQNHPGWTVAGQFQEKKRFTEEVIEYFQKKVSPVHLKILLTSDEAWKRFVRVAELPREEADALYEALKNLTPYVAIEDKDMQQKEQQFREWFLKFPQIRWKIQESIERLRVIANEIEKVHRGCVIANVVSGSTGILSVIGVMLAPFTAGLSLSITAAGVGLGIASATAGIASSIVENTYTRSAELTASRLTATSTDQLEALRDILRDITPNVLSFALDFDEATKMIANDVHTLRRSKATVGRPLIAWRYVPINVVETLRTRGAPTRIVRKVARNLGKATSGVLVVLDVVNLVQDSLDLHKGAKSESAESLRQWAQELEENLNELTHIHQSLKAG

SEQ ID NO: 37706 - protein, 350 aa, Homo sapiens
MEGAALLKIFVVCIWVQQNHPGWTVAGQFQEKKRFTEEVIEYFQKKVSPVHLKILLTSDEAWKRFVRVAELPREEADALYEALKNLTPYVAIEDKDMQQKEQQFREWFLKFPQIRWKIQESIERLRVIANEIEKVHRGCVIANVVSGSTGILSVIGVMLAPFTAGLSLSITAAGVGLGIASATAGIASSIVENTYTRSAELTASRLTATSTDQLEALRDILRDITPNVLSFALDFDEATKMIANDVHTLRRSKATVGRPLIAWRYVPINVVETLRTRGAPTRIVRKVARNLGKATSGVLVVLDVVNLVQDSLDLHKGAKSESAESLRQWAQELEENLNELTHIHQSLKAG

SEQ ID NO: 37707 - protein, 130 aa, Homo sapiens
MEGAALLKIFVVCIWVQQNHPGWTVAGQFQEKKRFTEEVIEYFQKKVSPVHLKILLTSDEAWKRFVRVAELPREEADALYEALKNLTPYVAIEDKDMQQKEQQFREWFLKVSSNQMEDSGVHRKASCHCK

SEQ ID NO: 37708 - protein, 127 aa, Homo sapiens [sequence omitted]

SEQ ID NO: 37709 - protein, 65 aa, Homo sapiens
MGSWVQLITSVGVQQNHPGWTVAGQFQEKKRFTEEVIEYFQKKVSPVHLKILLTSDEAWKRFVRV

SEQ ID NO: 37710 - protein, 127 aa, Homo sapiens [sequence omitted]

SEQ ID NO: 37711 - protein, 60 aa, Homo sapiens
MGSWVQLITSVGVQQNHPGWTVAGQFQEKKRFTEEVIEYFQKKVSPVHLKILLTSDEAWK

SEQ ID NO: 37712 - protein, 72 aa, Homo sapiens
MGSWVQLITSVGVQQNHPGWTVAGQFQEKKRFTEEVIEYFQKKVSPVHLKILLTSDEAWKRFVRVAELPREE

SEQ ID NO: 37713 - protein, 70 aa, Homo sapiens
MGSWVQLITSVGVQQNHPGWTVAGQFQEKKRFTEEVIEYFQKKVSPVHLKILLTSDEAWKRFVRVAELPR

SEQ ID NO: 37714 - protein, 433 aa, Homo sapiens
MPCGKQGNLQVPGSKVLPGLGEGCKEMWLRKVIYGGEVWGKSPEPEFPSLVNLCQSWKINNLMSTVHSDEAGMLSYFLFEELMRCDKDSMPDGNLSEEEKLFLSYFPLHKFELEQNIKELNTLADQVDTTHELLTKTSLVASSSGAVSGVMNILGLALAPVTAGGSLMLSATGTGLGAAAAITNIVTNVLENRSNSAARDKASRLGPLTTSHEAFGGINWSEIEAAGFCVNKCVKAIQGIKDLHAYQMAKSNSGFMAMVKNFVAKRHIPFWTARGVQRAFEGTTLAMTNGAWVMGAAGAGFLLMKDMSSFLQSWKHLEDGARTETAEELRALAKKLEQELDRLTQHHRHLPQKASQTCSSSRGRAVRGSRVVKPEGSRSPLPWPVVEHQPRLGPGVALRTPKRTVSAPRMLGHQPAPPAPARKGRQAPGRHRQ

SEQ ID NO: 37715 - protein, 343 aa, Homo sapiens
MDNQAERESEAGVGLQRDEDDAPLCEDVELQDGDLSPEEKIFLREFPRLKEDLKGNIDKLRALADDIDKTHKKFTKANMVATSTAVISGVMSLLGLALAPATGGGSLLLSTAGQGLATAAGVTSIVSGTLERSKNKEAQARAEDILPTYDQEDREDEEEKADYVTAAGKIIYNLRNTLKYAKKNVRAFWKLRANPRLANATKRLLTTGQVSSRSRVQVQKAFAGTTLAMTKNARVLGGVMSAFSLGYDLATLSKEWKHLKEGARTKFAEELRAKALELERKLTELTQLYKSLQQKVRSRARGVGKDLTGTCETEAYWKELREHVWMWLWLCVCLCVCVYVQFT

SEQ ID NO: 37716 - protein, 179 aa, Homo sapiens
MFKVIQRSVGPASLSLLTFKVYAAPKKDSPPKNSVKVDELSLYSVPEGQSKYVEEARSQLEESISQLRHYCEPYTTWCQTAMTISKMHLLFFPRLGVIGFAGLIGLLLARGSKIKKLVYPPGFMGLAASLYYPQQAIVFAQVSGERLYDWGLRGYIVIEDLWKENFQKPGNVKNSPGTK

SEQ ID NO: 37717 - protein, 198 aa, Homo sapiens
MFKVIQRSVGPASLSLLTFKVYAAPKKDSPPKNSVKVDELSLYSVPEGQSKYVEEARSQLEESISQLRHYCEPYTTWCQETYSQTKPKMQSLVQWGLDSYDYLQNAPPGFFPRLGVIGFAGLIGLLLARGSKIKKLVYPPGFMGLAASLYYPQQAIVFAQVSGERLYDWGLRGYIVIEDLWKENFQKPGNVKNSPGTK

SEQ ID NO: 37718 - protein, 178 aa, Homo sapiens
VYAAPKKDSPPKNSVKVDELSLYSVPEGQSKYVEEARSQLEESISQLRHYCEPYTTWCQETYSQTKPKMQSLVQWGLDSYDYLQNAPPGFFPRLGVIGFAGLIGLLLARGSKIKKLVYPPGFMGLAASLYYPQQAIVFAQVSGERLYDWGLRGYIVIEDLWKENFQKPGNVKNSPGTK

SEQ ID NO: 37719 - protein, 560 aa, Homo sapiens
MAGPQPLALQLEQLLNPRPSEADPEADPEEATAARVIDRFDEGEDGEGDFLVVGSIRKLASASLLDTDKRYCGKTTSRKAWNEDHWEQTLPGSSDEEISDEEGSGDEDSEGLGLEEYDEDDLGAAEEQECGDHRESKKSRSHSAKTPGFSVQSISDFEKFTKGMDDLGSSEEEEDEESGMEEGDDAEDSQGESEEDRAGDRNSEDDGVVMTFSSVKVSEEVEKGRAVKNQIALWDQLLEGRIKLQKALLTTNQLPQPDVFPLFKDKGGPEFSSALKNSHKALKALLRSLVGLQEELLFQYPDTRYLVDGTKPNAGSEEISSEDDELVEEKKQQRRRVPAKRKLEMEDYPSFMAKRFADFTVYRNRTLQKWHDKTKLASGKLGKGFGAFERSILTQIDHILMDKERLLRRTQTKRSVYRVLGKPEPAAQPVPESLPGEPEILPQAPANAHLKDLDEEIFDDDDFYHQLLRELIERKTSSLDPNDQVAMGRQWLAIQKLRSKIHKKVDRKASKGRKLRFHVLSKLLSFMAPIDHTTMNDDARTELYRSLFGQLHPPDEGHGD

SEQ ID NO: 37720 - protein, 325 aa, Homo sapiens
MVPREAPESAQCLCPSLTIPNAKDVLRKRHKRRSRQHQRFMARKALLQEQGLLSMPPEPGSSPLPTPFGAATATEAASSGKQCLRAGSGSAPCSRRPAPGKASGPLPSKCVAIDCEMVGTGPRGRVSELARCSIVSYHGNVLYDKYIRPEMPIADYRTRWSGITRQHMRKAVPFQVAQKEILKLLKGKVVVGHALHNDFQALKYVHPRSQTRDTTYVPNFLSEPGLHTRARVSLKDLALQLLHKKIQVGQHGHSSVEDATTAMELYRLVEVQWEQQEARSLWTCPEDREPDSSTDMEQYMEDQYWPDDLAHGSRGGAREAQDRRN

SEQ ID NO: 37721 - protein, 327 aa, Homo sapiens
MVPREAPESAQCLCPSLTIPNAKDVLRKRHKRRSRQHQRFMARKALLQEQGLLSMPPEPGSSPLPTPFGAATATEAASSGKQCLRAGSGSAPCSRRPAPGKASGPLPSKCVAIDCEMVGTGPRGRVSELARCSIVSYHGNVLYDKYIRPEMPIADYRTRWSGITRQHMRKAVPFQVAQKEILKLLKGKVVVGHALHNDFQALKYVHPRSQTRDTTYVPNFLSEPGLHTRARVSLKDLALQLLHKKIQVGQHGHSSVEDATTAMELYRLVEVQWEQQEARSLWTCPEDREPDSSTDMEQYMEDQSTQYWALKQKSEKQDSGLNSGAFV

SEQ ID NO: 37722 - protein, 504 aa, Homo sapiens
MPTVEELYRNYGILADATEQVGQHKDAYQVILDGVKGGTKEKRLAAQFIPKFFKHFPELADSAINAQLDLCEDEDVSIRRQAIKELPQFATGENLPRVADILTQLLQTDDSAEFNLVNNALLSIFKMDAKGTLGGLFSQILQGEDIVRERAIKFLSTKLKTLPDEVLTKEVEELILTESKKVLEDVTGEEFVLFMKILSGLKSLQTVSGRQQLVELVAEQADLEQTFNPSDPDCVDRLLQCTRQAVPLFSKNVHSTRFVTYFCEQVLPNLGTLTTPVEGLDIQLEVLKLLAEMSSFCGDMEKLETNLRKLFDKLLEYMPLPPEEAENGENAGNEEPKLQFSYVECLLYSFHQLGRKLPDFLTAKLNAEKLKDFKIRLQYFARGLQVYIRQLRLALQGKTGEALKTEENKIKVVALKITNNINVLIKDLFHIPPSYKSTVTLSWKPVQKVEIGQKRASEDTTSGSPPKKSSAGPKRDARQIYNPPSGKYSSNLGNFNYERSLQGK

SEQ ID NO: 37723 - protein, 450 aa, Homo sapiens
MPTVEELYRNYGILADATEQVGQIRRQAIKELPQFATGENLPRVADILTQLLQTDDSAEFNLVNNALLSIFKMDAKGTLGGLFSQILQGEDIVRERAIKFLSTKLKTLPDEVLTKEVEELILTESKKVLEDVTGEEFVLFMKILSGLKSLQTVSGRQQLVELVAEQADLEQTFNPSDPDCVDRLLQCTRQAVPLFSKNVHSTRFVTYFCEQVLPNLGTLTTPVEGLDIQLEVLKLLAEMSSFCGDMEKLETNLRKLFDKLLEYMPLPPEEAENGENAGNEEPKLQFSYVECLLYSFHQLGRKLPDFLTAKLNAEKLKDFKIRLQYFARGLQVYIRQLRLALQGKTGEALKTEENKIKVVALKITNNINVLIKDLFHIPPSYKSTVTLSWKPVQKVEIGQKRASEDTTSGSPPKKSSAGPKRDARQIYNPPSGKYSSNLGNFNYERSLQGK

SEQ ID NO: 37724 - protein, 524 aa, Homo sapiens
MPTVEELYRNYGILADATEQVGQHKDAYQVILDGVKGGTKEKRLAAQFIPKFFKHFPELADSAINAQLDLCEDEDVSIRRQAIKELPQFATGENLPRVADILTQLLQTDDSAEFNLVNNALLSIFKMDAKGTLGGLFSQILQGEDIVRERAIKFLSTKLKTLPDEVLTKEVEELILTESKKVLEDVTGEEFVLFMKILSGLKSLQTVSGRQQLVELVAEQADLEQTFNPSDPDCVDRLLQCTRQAVPLFSKNVHSTRFVTYFCEQVLPNLGTLTTPVEGLDIQLEVLKLLAEMSSFCGDMEKLETNLRKLFDKLLEYMPLPPEEAENGENAGNEEPKLQFSYVECLLYSFHQLGRKLPDFLTAKLNAEKLKDFKIRLQYFARGLQVYIRQLRLALQGKTGEALKTEENKIKVVALKITNNINVLIKDLFHIPPSYKSTVTLSWKPVQKVEIGQKRASEDTTSGSPPKKSSAGPKRDARQIYNPPSGKYSSNLGNFNYEQRGAFRGSRGGRGWGTRGNRSRGRLY

SEQ ID NO: 37725 - protein, 510 aa, Homo sapiens
MPTVEELYRNYGILADATEQVGQHKDAYQVILDGVKGGTKEKRLAAQFIPKFFKHFPELADSAINAQLDLCEDEDVSIRRQAIKELPQFATGENLPRVADILTQLLQTDDSAEFNLVNNALLSIFKMDAKGTLGGLFSQILQGEDIVRERAIKFLSTKLKTLPDEVLTKEVEELILTESKKVLEDVTGEEFVLFMKILSGLKSLQTVSGRQQLVELVAEQADLEQTFNPSDPDCVDRLLQCTRQAVPLFSKNVHSTRFVTYFCEQVLPNLGTLTTPVEGLDIQLEVLKLLAEMSSFCGDMEKLETNLRKLFDKLLEYMPLPPEEAENGENAGNEEPKLQFSYVECLLYSFHQLGRKLPDFLTAKLNAEKLKDFKIRLQYFARGLQVYIRQLRLALQGKTGEALKTEENKIKVVALKITNNINVLIKDLFHIPPSYKSTVTLSWKPVQKVEIGQKRASEDTTSGSPPKKSSAGPKRDARQIYNPPSGKYSSNLGNFNYGERFRLGTRNMRD

SEQ ID NO: 37726 - protein, 362 aa, Homo sapiens
MQAERGARGGRGRRPGRGRPGGDRHSERPGAAAAVARGGGGGGGGDGGGRRGRGRGRGFRGARGGRGGGGAPRGSRREPGGWGAGASAPVEDDSDAETYGEENDEQGNYSKRKIVSNWDRYQDIEKEVNNESGESQRGTDFSVLLSSAGDSFSQFRFAEEKEWDSEASCPKQNSAFYVDSELLVRALQELPLCLRLNVAAELVQGTVPLEVPQVKPKRTDDGKGLGMQLKGPLGPGGRGPIFELKSVAAGCPVLLGKDNPSPGPSRDSQKPTSPLQSAGDHLEEELDLLLNLDAPIKEGDNILPDQTSQDLKSKEDGEVVQEEEVCAKPSVTEEKNMEPEQPSTSKNVTEEELEDWLDSMIS

SEQ ID NO: 37727 - protein, 1374 aa, Homo sapiens
MSSSFFNPSFAFSSHFDPDGAPLSELSWPSSLAVVAVSFSGLFAVIVLMLACLCCKKGGIGFKEFENAEGDEYAADLAQGSPATAAQNGPDVYVLPLTEVSLPMAKQPGRSVQLLKSTDVGRHSLLYLKEIGRGWFGKVFLGEVNSGISSAQVVVKELQASASVQEQMQFLEEVQPYRALKHSNLLQCLAQCAEVTPYLLVMEFCPLGDLKGYLRSCRVAESMAPDPRTLQRMACEVACGVLHLHRNNFVHSDLALRNCLLTADLTVKIGDYGLAHCKYREDYFVTADQLWVPLRWIAPELVDEVHSNLLVVDQTKSGNVWSLGVTIWELFELGTQPYPQHSDQQVLAYTVREQQLKLPKPQLQLTLSDRWYEVMQFCWLQPEQRPTAEEVHLLLSYLCAKGATEAEEEFERRWRSLRPGGGGVGPGPGAAGPMLGGVVELAAASSFPLLEQFAGDGFHADGDDVLTVTETSRGLNFEYKWEAGRGAEAFPATLSPGRTARLQELCAPDGAPPGVVPVLSAHSPSLGSEYFIRLEEAAPAAGHDPDCAGCAPSPPATADQDDDSDGSTAASLAMEPLLGHGPPVDVPWGRGDHYPRRSLARDPLCPSRSPSPSAGPLSLAEGGAEDADWGVAAFCPAFFEDPLGTSPLGSSGAPPLPLTGEDELEEVGARRAAQRGHWRSNVSANNNSGSRCPESWDPVSAGGHAEGCPSPKQTPRASPEPGYPGEPLLGLQAASAQEPGCCPGLPHLCSAQGLAPAPCLVTPSWTETASSGGDHPQAEPKLATEAEGTTGPRLPLPSVPSPSQEGAPLPSEEASAPDAPDALPDSPTPATGGEVSAIKLASALNGSSSSPEVEAPSSEDEDTAEATSGIFTDTSSDGLQARRPDVVPAFRSLQKQVGTPDSLDSLDIPSSASDGGYEVFSPSATGPSGGQPRALDSGYDTENYESPEFVLKEAQEGCEPQAFAELASEGEGPGPETRLSTSLSGLNEKNPYRDSAYFSDLEAEAEATSGPEKKCGGDRAPGPELGLPSTGQPSEQVCLRPGVSGEAQGSGPGEVLPPLLQLEGSSPEPSTCPSGLVPEPPEPQGPAKVRPGPSPSCSQFFLLTPVPLRSEGNSSEFQGPPGLLSGPAPQKRMGGPGTPRAPLRLALPGLPAALEGRPEEEEEDSEDSDESDEELRCYSVQEPSEDSEEEAPAVPVVVAESQSARNLRSLLKMPSLLSETFCEDLERKKKAVSFFDDVTVYLFDQESPTRELGEPFPGAKESPPTFLRGSPGSPSAPNRPQQADGSPNGSTAEEGGGFAWDDDFPLMTAKAAFAMALDPAAPAPAAPTPTPAPFSRFTVSPAPTSRFSITHVSDSDAESKRGPEAGAGGESKEA

SEQ ID NO: 37728 - protein, 879 aa, Homo sapiens
MSSSFFNPSFAFSSHFDPDGAPLSELSWPSSLAVVAVSFSGLFAVIVLMLACLCCKKGGIGFKEFENAEGDEYAADLAQGSPATAAQNGPDVYVLPLTEVSLPMAKQPGRSVQLLKSTDVGRHSLLYLKEIGRGWFGKVFLGEVNSGISSAQVVVKELQASASVQEQMQFLEEVQPYRALKHSNLLQCLAQCAEVTPYLLVMEFCPLGDLKGYLRSCRVAESMAPDPRTLQRMACEVACGVLHLHRNNFVHSDLALRNCLLTADLTVKIGDYGLAHCKYREDYFVTADQLWVPLRWIAPELVDEVHSNLLVVDQTKSGNVWSLGVTIWELFELGTQPYPQHSDQQVLAYTVREQQLKLPKPQLQLTLSDRWYEVMQFCWLQPEQRPTAEEVHLLLSYLCAKGATEAEEEFERRWRSLRPGGGGVGPGPGAAGPMLGGVVELAAASSFPLLEQFAGDGFHADGDDVLTELCAPDGAPPGVVPVLSAHSPSLGSEYFIRLEEAAPAAGHDPDCAGCAPSPPATADQDDDSDGSTAASLAMEPLLGHGPPVDVPWGRGDHYPRRSLARDPLCPSRSPSPSAGPLSLAEGGAEDADWGVAAFCPAFFEDPLGTSPLGSSGAPPLPLTGEDELEEVGARRAAQRGHWRSNVSANNNSGSRCPESWDPVSAGGHAEGCPSPKQTPRASPEPGYPGEPLLGLQAASAQEPGCCPGLPHLCSAQGLAPAPCLVTPSWTETASSGGDHPQAEPKLATEAEGTTGPRLPLPSVPSPSQEGAPLPSEEASAPDAPDALPDSPTPATGGEVSAIKLASALNGSSSSPEVEAPSSEDEDTAEATSGIFTDTSSDGLQARRPDVVPAFRSLQKQWPQREESLPRLCLLLRPRG

SEQ ID NO: 37729 - protein, 1327 aa, Homo sapiens
  VARIANT 1: note = MOD_RES - Any amino acid
XHQVKVQGCWGRWRWQEFENAEGDEYAADLAQGSPATAAQNGPDVYVLPLTEVSLPMAKQPGRSVQLLKSTDVGRHSLLYLKEIGRGWFGKVFLGEVNSGISSAQVVVKELQASASVQEQMQFLEEVQPYRALKHSNLLQCLAQCAEVTPYLLVMEFCPLGDLKGYLRSCRVAESMAPDPRTLQRMACEVACGVLHLHRNNFVHSDLALRNCLLTADLTVKIGDYGLAHCKYREDYFVTADQLWVPLRWIAPELVDEVHSNLLVVDQTKSGNVWSLGVTIWELFELGTQPYPQHSDQQVLAYTVREQQLKLPKPQLQLTLSDRWYEVMQFCWLQPEQRPTAEEVHLLLSYLCAKGATEAEEEFERRWRSLRPGGGGVGPGPGAAGPMLGGVVELAAASSFPLLEQFAGDGFHADGDDVLTVTETSRGLNFEYKWEAGRGAEAFPATLSPGRTARLQELCAPDGAPPGVVPVLSAHSPSLGSEYFIRLEEAAPAAGHDPDCAGCAPSPPATADQDDDSDGSTAASLAMEPLLGHGPPVDVPWGRGDHYPRRSLARDPLCPSRSPSPSAGPLSLAEGGAEDADWGVAAFCPAFFEDPLGTSPLGSSGAPPLPLTGEDELEEVGARRAAQRGHWRSNVSANNNSGSRCPESWDPVSAGGHAEGCPSPKQTPRASPEPGYPGEPLLGLQAASAQEPGCCPGLPHLCSAQGLAPAPCLVTPSWTETASSGGDHPQAEPKLATEAEGTTGPRLPLPSVPSPSQEGAPLPSEEASAPDAPDALPDSPTPATGGEVSAIKLASALNGSSSSPEVEAPSSEDEDTAEATSGIFTDTSSDGLQARRPDVVPAFRSLQKQVGTPDSLDSLDIPSSASDGGYEVFSPSATGPSGGQPRALDSGYDTENYESPEFVLKEAQEGCEPQAFAELASEGEGPGPETRLSTSLSGLNEKNPYRDSAYFSDLEAEAEATSGPEKKCGGDRAPGPELGLPSTGQPSEQVCLRPGVSGEAQGSGPGEVLPPLLQLEGSSPEPSTCPSGLVPEPPEPQGPAKVRPGPSPSCSQFFLLTPVPLRSEGNSSEFQGPPGLLSGPAPQKRMGGPGTPRAPLRLALPGLPAALEGRPEEEEEDSEDSDESDEELRCYSVQEPSEDSEEEAPAVPVVVAESQSARNLRSLLKMPSLLSETFCEDLERKKKAVSFFDDVTVYLFDQESPTRELGEPFPGAKESPPTFLRGSPGSPSAPNRPQQADGSPNGSTAEEGGGFAWDDDFPLMTAKAAFAMALDPAAPAPAAPTPTPAPFSRFTVSPAPTSRFSITHVSDSDAESKRGPEAGAGGESKEA

SEQ ID NO: 37730 - protein, 138 aa, Homo sapiens
MEEEAETEEQQRFSYQQRLKAAVHYTVGCLCEEVALDKEMQFSKQTIAAISELTFRQCENFAKDLEMFARHAKRTTINTEDVKLLARRSNSLLKYITDKSEEIAQINLERKAQKKKKSEDGSKNSRQPAEAGVVESEN

SEQ ID NO: 37731 - protein, 164 aa, Homo sapiens
MEEEAETEEQQRFSYQQRLKAAVHYTVGCLCEEVALDKEMQFSKQTIAAISELTFRQCENFAKDLEMFARHAKRTTINTEDVKLLARRSNSLHMQEAAGIRKSSLLTFLAWWFEWTSQASAGPLIGEEAREVARRQEGAPPQQSARRDRMPCRNFFWKTFSSCK

SEQ ID NO: 37732 - protein, 77 aa, Homo sapiens
MEEEAETEEQQRFSYQQRLKAAVHYTVGCLCEEVALDKEMQFSKQTIAAISELTFRQCENFAKDLEMFASICRKRQE

SEQ ID NO: 37733 - protein, 306 aa, Homo sapiens
MSNVNLSVSDFWRVMMRVCWLVRQDSRHQRIRLPHLEAVVIGRGPETKITDKKCSRQQVQLKAECNKGYVKVKQVGVNPTSIDSVVIGKDQEVKLQPGQVLHMVNELYPYIVEFEEEAKNPGLETHRKRKRSGNSDSIERDAAQEAEAGTGLEPGSNSGQCSVPLKKGKDAPIKKESLGHWSQGLKISMQDPKMQVYKDEQVVVIKDKYPKARYHWLVLPWTSISSLKAVAREHLELLKHMHTVGEKVIVDFAGSSKLRFRLGYHAIPSMSHVHLHVISQDFDSPCLKNKKHWNSFNTEYFLESQE

SEQ ID NO: 37734 - protein, 337 aa, Homo sapiens
MSNVNLSVSDFWRVMMRVCWLVRQDSRHQRIRLPHLEAVVIGRGPETKITDKKCSRQQVQLKAECNKGYVKVKQVGVNPTSIDSVVIGKDQEVKLQPGQVLHMVNELYPYIVEFEEEAKNPGLETHRKRKRSGNSDSIERDAAQEAEAGTGLEPGSNSGQCSVPLKKGKDAPIKKKVYKDEQVVVIKDKYPKARYHWLVLPWTSISSLKAVAREHLELLKHMHTVGEKVIVDFAGSSKLRFRLGYHAIPSMSHVHLHVISQDFDSPCLKNKKHWNSFNTEYFLESQAVIEMVQEAGRVTVRDGMPELLKLPLRCHECQQLLPSIPQLKEHLRKHWTQ

SEQ ID NO: 37735 - protein, 342 aa, Homo sapiens
MMRVCWLVRQDSRHQRIRLPHLEAVVIGRGPETKITDKKCSRQQVQLKAECNKGYVKVKQVGVNPTSIDSVVIGKDQEVKLQPGQVLHMVNELYPYIVEFEEEAKNPGLETHRKRKRSGNSDSIERDAAQEAEAGTGLEPGSNSGQCSVPLKKGKDAPIKKESLGHWSQGLKISMQDPKMQVYKDEQVVVIKDKYPKARYHWLVLPWTSISSLKAVAREHLELLKHMHTVGEKVIVDFAGSSKLRFRLGYHAIPSMSHVHLHVISQDFDSPCLKNKKHWNSFNTEYFLESQAVIEMVQEAGRVTVRDGMPELLKLPLRCHECQQLLPSIPQLKEHLRKHWTQ

SEQ ID NO: 37736 - protein, 356 aa, Homo sapiens
MSNVNLSVSDFWRVMMRVCWLVRQDSRHQRIRLPHLEAVVIGRGPETKITDKKCSRQQVQLKAECNKGYVKVKQVGVNPTSIDSVVIGKDQEVKLQPGQVLHMVNELYPYIVEFEEEAKNPGLETHRKRKRSGNSDSIERDAAQEAEAGTGLEPGSNSGQCSVPLKKGKDAPIKKESLGHWSQGLKISMQDPKMQVYKDEQVVVIKDKYPKARYHWLVLPWTSISSLKAVAREHLELLKHMHTVGEKVIVDFAGSSKLRFRLGYHAIPSMSHVHLHVISQDFDSPCLKNKKHWNSFNTEYFLESQAVIEMVQEAGRVTVRDGMPELLKLPLRCHECQQLLPSIPQLKEHLRKHWTQ

SEQ ID NO: 37737 - protein, 306 aa, Homo sapiens; identical to SEQ ID NO: 37733

SEQ ID NO: 37738 - protein, 284 aa, Homo sapiens
MSNVNLSVSDFWRVMMRVCWLVRQDSRHQRIRLPHLEAVVIGRGPETKITDKKCSRQQVQLKAECNKGYVKVKQVGVNPTSIDSVVIGKDQEVKLQPGQVLHMESLGHWSQGLKISMQDPKMQVYKDEQVVVIKDKYPKARYHWLVLPWTSISSLKAVAREHLELLKHMHTVGEKVIVDFAGSSKLRFRLGYHAIPSMSHVHLHVISQDFDSPCLKNKKHWNSFNTEYFLESQAVIEMVQEAGRVTVRDGMPELLKLPLRCHECQQLLPSIPQLKEHLRKHWTQ

SEQ ID NO: 37739 - protein, 192 aa, Homo sapiens
MMRVCWLVRQDSRHQRIRLPHLEAVVIGRGPETKITDKKCSRQQVQLKAECNKGYVKVKQVGVNPTSIDSVVIGKDQEVKLQPGQVLHMVNELYPYIVEFEEEAKNPGLETHRKRKRSGNSDSIERDAAQEAEAGTGLEPGSNSGQCSVPLKKGKDAPIKKESLGHWSQGLKISMQDPKMQPCTSSCDQPGF

SEQ ID NO: 37740 - protein, 342 aa, Homo sapiens; identical to SEQ ID NO: 37735

SEQ ID NO: 37741 - protein, 302 aa, Homo sapiens
MSNVNLSVSDFWRVMMRVCWLVRQDSRHQRIRLPHLEAVVIGRGPETKITDKKCSRQQEFEEEAKNPGLETHRKRKRSGNSDSIERDAAQEAEAGTGLEPGSNSGQCSVPLKKGKDAPIKKESLGHWSQGLKISMQDPKMQVYKDEQVVVIKDKYPKARYHWLVLPWTSISSLKAVAREHLELLKHMHTVGEKVIVDFAGSSKLRFRLGYHAIPSMSHVHLHVISQDFDSPCLKNKKHWNSFNTEYFLESQAVIEMVQEAGRVTVRDGMPELLKLPLRCHECQQLLPSIPQLKEHLRKHWTQ

SEQ ID NO: 37742 - protein, 342 aa, Homo sapiens; identical to SEQ ID NO: 37735

SEQ ID NO: 37743 - protein, 228 aa, Homo sapiens
MYIIAQCVGAIVATAILSGITSSLTGNSLGRNDLADGVNSGQGLGIEIIGTLQLVLCVLATTDRRRRDLGGSAPLAIGLSVALGHLLAIDYTGCGINPARSFGSAVITHNFSNHWIFWVGPFIGGALAVLIYDFILAPRSSDLTDRVKVWTSGQVEEYDLDADDINSRSFLGTKIYQFTHSLEVVEEVKERDPPASRPSEHDGRCARKSPLAPKLLTDSPAQVPGILP

SEQ ID NO: 37744 - protein, 269 aa, Homo sapiens
MASEFKKKLFWRAVVAEFLATTLFVFISIGSALGFKYPVGNNQTAVQDNVKVSLAFGLSIATLAQSVGHISGAHLNPAVTLGLLLSCQISIFRALMYIIAQCVGAIVATAILSGITSSLTGNSLGRNDLADGVNSGQGLGIEIIGTLQLVLCVLATTDRRRRDLGGSAPLAIGLSVALGHLLAIDYTGCGINPARSFGSAVITHNFSNHWIFWVGPFIGGALAVLIYDFILAPRSSDLTDRVKVWTSGQVEEYDLDADDINSRVEMKPK

SEQ ID NO: 37745 - protein, 218 aa, Homo sapiens
MFWTFGYEAVSPAGPSHLFASLLLGVLLTITFMPGARPLPLVLVPQNTLAWMQLDAKAPAHPRPLQLLGRVGPGSRQLADGVNSGQGLGIEIIGTLQLVLCVLATTDRRRRDLGGSAPLAIGLSVALGHLLAIDYTGCGINPARSFGSAVITHNFSNHWIFWVGPFIGGALAVLIYDFILAPRSSDLTDRVKVWTSGQVEEYDLDADDINSRVEMKPK

SEQ ID NO: 37746 - protein, 154 aa, Homo sapiens
MQSGMGWNVLDFWLADGVNSGQGLGIEIIGTLQLVLCVLATTDRRRRDLGGSAPLAIGLSVALGHLLAIDYTGCGINPARSFGSAVITHNFSNHWIFWVGPFIGGALAVLIYDFILAPRSSDLTDRVKVWTSGQVEEYDLDADDINSRVEMKPK

SEQ ID NO: 37747 - protein, 254 aa, Homo sapiens
MASEFKKKLFWRAVVAEFLATTLFVFISIGSALGFKYPVGNNQTAVQDNVKVSLAFGLSIATLAQSVGHISGAHLNPAVTLGLLLSCQISIVATAILSGITSSLTGNSLGRNDLADGVNSGQGLGIEIIGTLQLVLCVLATTDRRRRDLGGSAPLAIGLSVALGHLLAIDYTGCGINPARSFGSAVITHNFSNHWIFWVGPFIGGALAVLIYDFILAPRSSDLTDRVKVWTSGQVEEYDLDADDINSRVEMKPK

SEQ ID NO: 37748 - protein, 329 aa, Homo sapiens
MCQVGCFLKTPRFPIWVVCSESHFSILFSLQPGLLRDWRTERLFDLYYYDGLANQQEQIRLTIDTTQTISEDTDNDLVPPLELCIRTNIGSALGFKYPVGNNQTAVQDNVKVSLAFGLSIATLAQSVGHISGAHLNPAVTLGLLLSCQISIFRALMYIIAQCVGAIVATAILSGITSSLTGNSLGRNDLADGVNSGQGLGIEIIGTLQLVLCVLATTDRRRRDLGGSAPLAIGLSVALGHLLAIDYTGCGINPARSFGSAVITHNFSNHWIFWVGPFIGGALAVLIYDFILAPRSSDLTDRVKVWTSGQVEEYDLDADDINSRVEMKPK

SEQ ID NO: 37749 - protein, 186 aa, Homo sapiens
MPGARPLPLVLVPQNTLAWMQLDAKAPAHPRPLQLLGRVGPGSRQLADGVNSGQGLGIEIIGTLQLVLCVLATTDRRRRDLGGSAPLAIGLSVALGHLLAIDYTGCGINPARSFGSAVITHNFSNHWIFWVGPFIGGALAVLIYDFILAPRSSDLTDRVKVWTSGQVEEYDLDADDINSRVEMKPK

SEQ ID NO: 37750 - protein, 271 aa, Homo sapiens
MSPLLGLRSELQDTCTSLGLMLSVVLLMGLARVVARQQLHRPVAHAFVLEFLATFQLCCCTHELQLLSEQHPAHPTWTLTLVYFFSLVHGLTLVGTSSNPCGVMMQMMLGGMSPETGAVRLLAQLVSALCSRYCTSALWSLGLTQYHVSERSFACKNPIRVDLLKAVITEAVCSFLFHSALLHFQEVRTKLRIHLLAALITFLVYAGGSLTGAVFNPALALSLHFMCFDEAFPQFFIVYWLAPSLGILLMILMFSFFLPWLHNNHTINKKE

SEQ ID NO: 37751 - protein, 295 aa, Homo sapiens
MAGLNVSLSFFFATFALCEAARRASKALLPVGAYEVFAREAMRTLVELGPWAGDFGPDLLLTLLFLLFLAHGVTLDGASANPTVSLQEFLMAEQSLPGTLLKLAAQGLGMQAACTLMRLCWAWELSDLHLLQSLMAQSCSSALRTSVPHGALVEAACAFCFHLTLLHLRHSPPAYSGPAVALLVTVTAYTAGPFTSAFFNPALAASVTFACSGHTLLEYVQVYWLGPLTGMVLAVLLHQGRLPHLFQRNLFYGQKNKYRAPRGKPAPASGDTQTPAKGSSVREPGRSGVEGPHSS

SEQ ID NO: 37752 - protein, 265 aa, Homo sapiens [sequence omitted]

SEQ ID NO: 37753 - protein, 307 aa, Homo sapiens
MAGLNVSLSFFFATFALCEAARRASKALLPVGAYEVFAREAVGAVQLGPCCLEMRTLVELGPWAGDFGPDLLLTLLFLLFLAHGVTLDGASANPTVSLQEFLMAEQSLPGTLLKLAAQGLGMQAACTLMRLCWAWELSDLHLLQSLMAQSCSSALRTSVPHGALVEAACAFCFHLTLLHLRHSPPAYSGPAVALLVTVTAYTAGPFTSAFFNPALAASVTFACSGHTLLEYVQVYWLGPLTGMVLAVLLHQGRLPHLFQRNLFYGQKNKYRAPRGKPAPASGDTQTPAKGSSVREPGRSGVEGPHSS

SEQ ID NO: 37754 - protein, 271 aa, Homo sapiens
MWELRSIAFSRAVFAEFLATLLFVFFGLGSALNWPQALPSVLQIAMAFGLGIGTLVQALGHISGAHINPAVTVACLVGCHVSVLRAAFYVAAQLLGAVAGAALLHEITPADIRGDLAVNALSNSTTAGQAVTVELFLTLQLVLCIFASTDERRGENPGTPALSIGFSVALGHLLGIHYTGCSMNPARSLAPAVVTGKFDDHWVFWIGPLVGAILGSLLYNYVLFPPAKSLSERLAVLKGLEPDTDWEEREVRRRQSVELHSPQSLPRGTKA

SEQ ID NO: 37755 - protein, 292 aa, Homo sapiens
MGRQKELVSRCGEMLHIRYRLLRQALAECLGTLILVMFGCGSVAQVVLSRGTHGGFLTINLAFGFAVTLGILIAGQVSGAHLNPAVTFAMCFLAREPWIKLPIYTLAQTLGAFLGAGIVFGLYYDAIWHFADNQLFVSGPNGTAGIFATYPSGHLDMINGFFDQFIGTASLIVCVLAIVDPYNNPVPRGLEAFTVGLVVLVIGTSMGFNSGYAVNPARDFGPRLFTALAGWGSAVFTTGQHWWWVPIVSPLLGSIAGVFVYQLMIGCHLEQPPPSNEEENVKLAHVKHKEQI

SEQ ID NO: 37756 - protein, 279 aa, Homo sapiens
MGRQKELVSRCGEMLHIRYRLLRQALAECLGTLILVMFGCGSVAQVVLSRGTHGGFLTINLAFGFAVTLGILIAGQVSGAHLNPAVTFAMCFLAREPWIKLPIYTLAQTLGAFLGAGIVFGLYYDAIWHFADNQLFVSGPNGTAGIFATYPSGHLDMINGFFDQDRPALVVGAHRVPTPGLHCGCLRVPADDRLPPGAAPTLQRGRECEAGPCEAQGADLSGQGSPLRCPGLEHPLTVQGPLPRSPLHDPPFQAKELPIYPHPTTAPSGFPLDLAQIAP

SEQ ID NO: 37757 - protein, 323 aa, Homo sapiens
MSDRPTARRWGKCGPLCTRENIMVAFKGVWTQAFWKAVTAEFLAMLIFVLLSLGSTINWGGTEKPLPVDMVLISLCFGLSIATMVQCFGHISGGHINPAVTVAMVCTRKISIAKSVFYIAAQCLGAIIGAGILYLVTPPSVVGGLGVTMVHGNLTAGHGLLVELIITFQLVFTIFASCDSKRTDVTGSIALAIGFSVAIGHLFAINYTGASMNPARSFGPAVIMGNWENHWIYWVGPIIGAVLAGGLYEYVFCPDVEFKRRFKEAFSKAAQQTKGSYMEVEDNRSQVETDDLILKPGVVHVIDVDRGEEKKGKDQSGEVLSSV

SEQ ID NO: 37758 - protein, 219 aa, Homo sapiens
CTLAGEGMSDRPTARRWGKCGPLCTRENIMVAFKGVWTQAFWKAVTAEFLAMLIFVLLSLGSTINWGGTEKPLPVDMVLISLCFGLSIATMVQCFGHISGGHINPAVTVAMVCTRKISIAKSVFYIAAQCVGPIIGAVLAGGLYEYVFCPDVEFKRRFKEAFSKAAQQTKGSYMEVEDNRSQVETDDLILKPGVVHVIDVDRGEEKKGKDQSGEVLSSV

SEQ ID NO: 37759 - protein, 303 aa, Homo sapiens
MSDRPTARRWGKCGPLCTRENIMVAFKGVWTQAFWKAVTAEFLAMLIFVLLSLGSTINWGGTEKPLPVDMVLISLCFGLSIATMVCTRKISIAKSVFYIAAQCLGAIIGAGILYLVTPPSVVGGLGVTMVHGNLTAGHGLLVELIITFQLVFTIFASCDSKRTDVTGSIALAIGFSVAIGHLFAINYTGASMNPARSFGPAVIMGNWENHWIYWVGPIIGAVLAGGLYEYVFCPDVEFKRRFKEAFSKAAQQTKGSYMEVEDNRSQVETDDLILKPGVVHVIDVDRGEEKKGKDQSGEVLSSV

SEQ ID NO: 37760 - protein, 282 aa, Homo sapiens
MDAVEPGGRGWASMLACRLWKAISRALFAEFLATGLYVFFGVGSVMRWPTALPSVLQIAITFNLVTAMAVQVTWKASGAHANPAVTLAFLVGSHISLPRAVAYVAAQLVGATVGAALLYGVMPGDIRETLGINVVRNSVSTGQAVAVELLLTLQLVLCVFASTDSRQTSGSPATMIGISVALGHLIGIHFTGCSMNPARSFGPAIIIGKFTVHWVFWVGPLMGALLASLIYNFVLFPDTKTLAQRLAILTGTVEVGTGAGAGAEPLKKESQPGSGAVEMESV

SEQ ID NO: 37761 - protein, 342 aa, Homo sapiens
MVQASGHRRSTRGSKMVSWSVIAKIQEILQRKMVREFLAEFMSTYVMMVFGLGSVAHMVLNKKYGSYLGVNLGFGFGVTMGVHVAGRISGAHMNAAVTFANCALGRVPWRKFPVYVLGQFLGSFLAAATIYSLFYTAILHFSGGQLMVTGPVATAGIFATYLPDHMTLWRGFLNEAWLTGMLQLCLFAITDQENNPALPGTEALVIGILVVIIGVSLGMNTGYAINPSRDLPPRIFTFIAGWGKQVFSNGENWWWVPVVAPLLGAYLGGIIYLVFIGSTIPREPLKLEDSVAYEDHGITVLPKMGSHEPTISPLTPVSVSPANRSSVHPAPPLHESMALEHF

SEQ ID NO: 37762 - protein, 216 aa, Homo sapiens
MVLNKKYGSYLGVNLGFGFGVTMGVHVAGRISGAHMNAAVTFANCALGRVPWRKFPVYVLGQFLGSFLAAATIYSLFYTAILHFSGGQLMVTGPVATAGIFATYLPDHMTLWRGFLNEAWLTGMLQLCLFAITDQENNPALPGTEALVIGILVVIIGVSLGMNTGYAINPSRDLPPRIFTFIAGWGKQVFRWHHLPGLHWLHHPTGAPEIGGFCGV

SEQ ID NO: 37763 - protein, 193 aa, Homo sapiens
MGWATFTDQGEEGLEPSGPWKTSHTRAHMNAAVTFANCALGRVPWRKFPVYVLGQFLGSFLAAATIYSLFYTAILHFSGGQLMVTGPVATAGIFATYLPDHMTLWRGFLNEAWLTGMLQLCLFAITDQENNPALPGTEALVIGILVVIIGVSLGMNTGYAINPSRDLPPRIFTFIAGWGKQVFRYCPCPGPFL

SEQ ID NO: 37764 - protein, 256 aa, Homo sapiens
MGSGHCLRSTRGSKMVSWSVIAKIQEILQRKMVREFLAEFMSTYVMMVFGLGSVAHMVLNKKYGSYLGVNLGFGFGVTMGVHVAGRISGAHMNAAVTFANCALGRVPWRKFPVYVLGQFLGSFLAAATIYSLFYTAILHFSGGQLMVTGPVATAGIFATYLPDHMTLWRGFLNEAWLTGMLQLCLFAITDQENNPALPGTEALVIGILVVIIGVSLGMNTGYAINPSRDLPPRIFTFIAGWGKQVFRYCPCPGPFL

SEQ ID NO: 37765 - protein, 341 aa, Homo sapiens
MGSGHCLRSTRGSKMVSWSVIAKIQEILQRKMVREFLAEFMSTYVMMVFGLGSVAHMVLNKKYGSYLGVNLGFGFGVTMGVHVAGRISGAHMNAAVTFANCALGRVPWRKFPVYVLGQFLGSFLAAATIYSLFYTAILHFSGGQLMVTGPVATAGIFATYLPDHMTLWRGFLNEAWLTGMLQLCLFAITDQENNPALPGTEALVIGILVVIIGVSLGMNTGYAINPSRDLPPRIFTFIAGWGKQVFSNGENWWWVPVVAPLLGAYLGGIIYLVFIGSTIPREPLKLEDSVAYEDHGITVLPKMGSHEPTISPLTPVSVSPANRSSVHPAPPLHESMALEHF

SEQ ID NO: 37766 - protein, 170 aa, Homo sapiens
MNAAVTFANCALGRVPWRKFPVYVLGQFLGSFLAAATIYSLFYTAILHFSGGQLMVTGPVATAGIFATYLPDHMTLWRGFLNEAWLTGMLQLCLFAITDQENNPALPGTEALVIGILVVIIGVSLGMNTGYAINPSRDLPPRIFTFIAGWGKQVFSNGENWWWVPVVAPL

SEQ ID NO: 37767 - protein, 141 aa, Homo sapiens
LFYTAILHFSGGQLMVTGPVATAGIFATYLPDHMTLWRGFLNEAWLTGMLQLCLFAITDQENNPALPGTEALVIGILVVIIGVSLGMNTGYAINPSRDLPPRIFTFIAGWGKQVFRWHHLPGLHWLHHPTGAPEIGGFCGV

SEQ ID NO: 37768 - protein, 165 aa, Homo sapiens
MNAAVTFANCALGRVPWRKFPVYVLGQFLGSFLAAATIYSLFYTAILHFSGGQLMVTGPVATAGIFATYLPDHMTLWRGFLNEAWLTGMLQLCLFAITDQENNPALPGTEALVIGILVVIIGVSLGMNTGYAINPSRDLPPRIFTFIAGWGKQVFRYCPCPGPFL

SEQ ID NO: 37769 - protein, 257 aa, Homo sapiens
MVQASGHRRSTRGSKMVSWSVIAKIQEILQRKMVREFLAEFMSTYVMMVFGLGSVAHMVLNKKYGSYLGVNLGFGFGVTMGVHVAGRISGAHMNAAVTFANCALGRVPWRKFPVYVLGQFLGSFLAAATIYSLFYTAILHFSGGQLMVTGPVATAGIFATYLPDHMTLWRGFLNEAWLTGMLQLCLFAITDQENNPALPGTEALVIGILVVIIGVSLGMNTGYAINPSRDLPPRIFTFIAGWGKQVFRYCPCPGPFL

SEQ ID NO: 37770 - protein, 141 aa, Homo sapiens
MNAAVTFANCALGRVPWRKFPVYVLGQFLGSFLAAATIYSLFYSVADRDAPAVSLRHHGPGEQPSTARNRGAGDRHPRGHHRGVPWHEHRICHQPVPGPAPPHLHLHCWLGQTGLQVLPLPRPIPLSFSVGPLCVEGWGVM

SEQ ID NO: 37771 - protein, 261 aa, Homo sapiens
MSGEIAMCEPEFGNDKAREPSVGGRWRVSWYERFVQPCLVELLGSALFIFIGCLSVIENGTDTGLLQPALAHGLALGLVIATLGNISGGHFNPAVSLAAMLIGGLNLVMLLPYWVSQLLGGMLGAALAKAVSPEERFWNASGAAFVTVQEQGQVAGALVAEIILTTLLALAVCMGAINEKTKGPLAPFSIGFAVTVDILAGGPVSGGCMNPARAFGPAVVANHWNFHWIYWLGPLLAGLLVGLLIRCFIGDGKTRLILKAR

SEQ ID NO: 37772 - protein, 295 aa, Homo sapiens
MQPEGAEKGKSFKQRLVLKSSLAKETLSEFLGTFILIVLGCGCVAQAILSRGRFGGVITINVGFSMAVAMAIYVAGGVSGGHINPAVSLAMCLFGRMKWFKLPFYVGAQFLGAFVGAATVFGIYYDGLMSFAGGKLLIVGENATAHIFATYPAPYLSLANAFADQVVATMILLIIVFAIFDSRNLGAPRGLEPIAIGLLIIVIASSLGLNSGCAMNPARDLSPRLFTALAGWGFEVFRAGNNFWWIPVVGPLVGAVIGGLIYVLVIEIHHPEPDSVFKTEQSEDKPEKYELSVIM

SEQ ID NO: 37773 - protein, 295 aa, Homo sapiens; identical to SEQ ID NO: 37772

SEQ ID NO: 37774 - protein, 663 aa, Homo sapiens
MGRYRIRVATGAWLFSGSYNRVQLWLVGTRGEAELELQLRPARGEEEEFDHDVAEDLGLLQFVRLRKHHWLVDDAWFCDRITVQGPGACAEVAFPCYRWVQGEDILSLPEGTARLPGDNALDMFQKHREKELKDRQQIYCWATWKEGLPLTIAADRKDDLPPNMRFHEEKRLDFEWTLKAGALEMALKRVYTLLSSWNCLEDFDQIFWGQKSALAEKVRQCWQDDELFSYQFLNGANPMLLRRSTSLPSRLVLPSGMEELQAQLEKELQNGSLFEADFILLDGIPANVIRGEKQYLAAPLVMLKMEPNGKLQPMVIQIQPPNPSSPTPTLFLPSDPPLAWLLAKSWVRNSDFQLHEIQYHLLNTHLVAEVIAVATMRCLPGLHPIFKFLIPHIRYTMEINTRARTQLISDGGIFDKAVSTGGGGHVQLLRRAAAQLTYCSLCPPDDLADRGLLGLPGALYAHDALRLWEIIARYVEGIVHLFYQRDDIVKGDPELQAWCREITEVGLCQAQDRGFPVSFQSQSQLCHFLTMCVFTCTAQHAAINQGQLDWYAWVPNAPCTMRMPPPTTKEDVTMATVMGSLPDVRQACLQMAISWHLSRRQPDMVPLGHHKEKYFSGPKPKAVLNQFRTDLEKLEKEITARNEQLDWPYEYLKPSCIENSVTI

SEQ ID NO: 37775 - protein, 701 aa, Homo sapiens
MATYKVRVATGTDLLSGTRDSISLTIVGTQGESHKQLLNHFGRDFATGAVGQYTVQCPQDLGELIIIRLHKERYAFFPKDPWYCNYVQICAPNGRIYHFPAYQWMDGYETLALREATGKTTADDSLPVLLEHRKEEIRAKQDFYHWRVFLPGLPSYVHIPSYRPPVRRHRNPNRPEWNGYIPGFPILINFKATKFLNLNLRYSFLKTASFFVRLGPMALAFKVRGLLDCKHSWKRLKDIRKIFPGKKSVVSEYVAEHWAEDTFFGYQYLNGVNPGLIRRCTRIPDKFPVTDDMVAPFLGEGTCLQAELEKGNIYLADYRIMEGIPTVELSGRKQHHCAPLCLLHFGPEGKMMPIAIQLSQTPGPDCPIFLPSDSEWDWLLAKTWVRYAEFYSHEAIAHLLETHLIAEAFCLALLRNLPMCHPLYKLLIPHTRYTVQINSIGRAVLLNEGGLSAKGMSLGVEGFAGVMVRALSELTYDSLYLPNDFVERGVQDLPGYYYRDDSLAVWNALEKYVTEIITYYYPSDAAVEGDPELQSWVQEIFKECLLGRESSGFPRCLRTVPELIRYVTIVIYTCSAKHAAVNTGQMEFTAWMPNFPASMRNPPIQTKGLTTLETFMDTLPDVKTTCITLLVLWTLSREPDDRRPLGHFPDIHFVEEAPRRSIEAFRQRLNQISHDIRQRNKCLPIPYYYLDPVLIENSISI

SEQ ID NO: 37776 - protein, 662 aa, Homo sapiens
MGLYRIRVSTGASLYAGSNNQVQLWLVGQHGEAALGKRLWPARGKETELKVEVPEYLGPLLFVKLRKRHLLKDDAWFCNWISVQGPGAGDEVRFPCYRWVEGNGVLSLPEGTGRTVGEDPQGLFQKHREEELEERRKLYRWGNWKDGLILNMAGAKLYDLPVDERFLEDKRVDFEVSLAKGLADLAIKDSLNVLTCWKDLDDFNRIFWCGQSKLAERVRDSWKEDALFGYQFLNGANPVVLRRSAHLPARLVFPPGMEELQAQLEKELEGGTLFEADFSLLDGIKANVILCSQQHLAAPLVMLKLQPDGKLLPMVIQLQLPRTGSPPPPLFLPTDPPMAWLLAKCWVRSSDFQLHELQSHLLRGHLMAEVIVVATMRCLPSIHPIFKLIIPHLRYTLEINVRARTGLVSDMGIFDQIMSTGGGGHVQLLKQAGAFLTYSSFCPPDDLADRGLLGVKSSFYAQDALRLWEIIYRYVEGIVSLHYKTDVAVKDDPELQTWCREITEIGLQGAQDRGFPVSLQARDQVCHFVTMCIFTCTGQHASVHLGQLDWYSWVPNAPCTMRLPPPTTKDATLETVMATLPNFHQASLQMSITWQLGRRQPVMVAVGQHEEEYFSGPEPKAVLKKFREELAALDKEIEIRNAKLDMPYEYLRPSVVENSVAI

SEQ ID NO: 37777 - protein, 684 aa, Homo sapiens [sequence omitted]

SEQ ID NO: 37778 - protein, 662 aa, Homo sapiens; identical to SEQ ID NO: 37776

SEQ ID NO: 37779 - protein, 161 aa, Homo sapiens
MDQETVGNVVLLAIVTLISVVQNGFFAHKVEHESRTQNGRSFQRTGTLAFERVYTANQNCVDAYPTFLAVLWSAGLLCSQVPAAFAGLMYLFVRQKYFVGYLGERTQSTPGYIFGKRIILFLFLMSVAGIFNYYLIFFFGSDFENYIKTISTTISPLLLIP

SEQ ID NO: 37780 - protein, 843 aa, Homo sapiens
MPRGAFRPCLPALYFAFLTCPTPEQRMSGTQAPDIHLGEPARGTGCVRGKQTSIRVQDCGRREEARAASRELRREKAQEHPRESWAHPQPYPAPQPLALRPETQPCPACRSSPPGRLLLRPALPGHPFLLPIMAVYRLCVTTGPYLRAGTLDNISVTLVGTCGESPKQRLDRMGRDFAPGSVQKYKVRCTAELGELLLLRVHKERYAFFRKDSWYCSRICVTEPDGSVSHFPCYQWIEGYCTVELRPGTARTICQDSLPLLLDHRTRELRARQECYRWKIYAPGFPCMVDVNSFQEMESDKKFALTKTTTCVDQGDSSGNRYLPGFPMKIDIPSLMYMEPNVRYSATKTISLLFNAIPASLGMKLRGLLDRKGSWKKLDDMQNIFWCHKTFTTKYVTEHWCEDHFFGYQYLNGVNPVMLHCISSLPSKLPVTNDMVAPLLGQDTCLQTELERGNIFLADYWILAEAPTHCLNGRQQYVAAPLCLLWLSPQGALVPLAIQLSQTPGPDSPIFLPTDSEWDWLLAKTWVRNSEFLVHENNTHFLCTHLLCEAFAMATLRQLPLCHPIYKLLLPHTRYTLQVNTIARATLLNPEGLVDQVTSIGRQGLIYLMSTGLAHFTYTNFCLPDSLRARGVLAIPNYHYRDDGLKIWAAIESFVSEIVGYYYPSDASVQQDSELQAWTGEIFAQAFLGRESSGFPSRLCTPGEMVKFLTAIIFNCSAQHAAVNSGQHDFGAWMPNAPSSMRQPPPQTKGTTTLKTYLDTLPEVNISCNNLLLFWLVSQEPKDQRPLGTYPDEHFTEEAPRRSIAAFQSRLAQISRDIQERNQGLALPYTYLDPPLIENSVSI

SEQ ID NO: 37781 - protein, 867 aa, Homo sapiens
MGRNRSWGTLGSGRTSTPGHQSGPLTRRRAVSQLYRRYLLFSISASDPSLRSGTQAPDIHLGEPARGTGCVRGKQTSIRVQDCGRREEARAASRELRREKAQEHPRESWAHPQPYPAPQPLALRPETQPCPACRSSPPGRLLLRPALPGHPFLLPIMAVYRLCVTTGPYLRAGTLDNISVTLVGTCGESPKQRLDRMGRDFAPGSVQKYKVRCTAELGELLLLRVHKERYAFFRKDSWYCSRICVTEPDGSVSHFPCYQWIEGYCTVELRPGTARTICQDSLPLLLDHRTRELRARQECYRWKIYAPGFPCMVDVNSFQEMESDKKFALTKTTTCVDQGDSSGNRYLPGFPMKIDIPSLMYMEPNVRYSATKTISLLFNAIPASLGMKLRGLLDRKGSWKKLDDMQNIFWCHKTFTTKYVTEHWCEDHFFGYQYLNGVNPVMLHCISSLPSKLPVTNDMVAPLLGQDTCLQTELERGNIFLADYWILAEAPTHCLNGRQQYVAAPLCLLWLSPQGALVPLAIQLSQTPGPDSPIFLPTDSEWDWLLAKTWVRNSEFLVHENNTHFLCTHLLCEAFAMATLRQLPLCHPIYKLLLPHTRYTLQVNTIARATLLNPEGLVDQVTSIGRQGLIYLMSTGLAHFTYTNFCLPDSLRARGVLAIPNYHYRDDGLKIWAAIESFVSEIVGYYYPSDASVQQDSELQAWTGEIFAQAFLGRESSGFPSRLCTPGEMVKFLTAIIFNCSAQHAAVNSGQHDFGAWMPNAPSSMRQPPPQTKGTTTLKTYLDTLPEVNISCNNLLLFWLVSQEPKDQRPLGTYPDEHFTEEAPRRSIAAFQSRLAQISRDIQERNQGLALPYTYLDPPLIENSVSI

SEQ ID NO: 37782 - protein, 711 aa, Homo sapiens
MAVYRLCVTTGPYLRAGTLDNISVTLVGTCGESPKQRLDRMGRDFAPGSVQKYKVRCTAELGELLLLRVHKERYAFFRKDSWYCSRICVTEPDGSVSHFPCYQWIEGYCTVELRPGTARTICQDSLPLLLDHRTRELRARQECYRWKIYAPGFPCMVDVNSFQEMESDKKFALTKTTTCVDQGDSSGNRYLPGFPMKIDIPSLMYMEPNVRYSATKTISLLFNAIPASLGMKLRGLLDRKGSWKKLDDMQNIFWCHKTFTTKYVTEHWCEDHFFGYQYLNGVNPVMLHCISSLPSKLPVTNDMVAPLLGQDTCLQTELERGNIFLADYWILAEAPTHCLNGRQQYVAAPLCLLWLSPQGALVPLAIQLSQTPGPDSPIFLPTDSEWDWLLAKTWVRNSEFLVHENNTHFLCTHLLCEAFAMATLRQLPLCHPIYKLLLPHTRYTLQVNTIARATLLNPEGLVDQVTSIGRQGLIYLMSTGLAHFTYTNFCLPDSLRARGVLAIPNYHYRDDGLKIWAAIESFVSEIVGYYYPSDASVQQDSELQAWTGEIFAQAFLGRESSGFPSRLCTPGEMVKFLTAIIFNCSAQHAAVNSGQHDFGAWMPNAPSSMRQPPPQTKGTTTLKTYLDTLPEVNISCNNLLLFWLVSQEPKDQRPLGTYPDEHFTEEAPRRSIAAFQSRLAQISRDIQERNQGLALPYTYLDPPLIENSVSI

SEQ ID NO: 37783 - protein, 252 aa, Homo sapiens
MEPQSMKGQKRPFGGPWRLKVLGGPPWLRRTLPKLGRPKEAPVARMSTQSTHPLKPEAPRLPPGIPESPSCQRRHTLPASEFRCLTPEDAVSAFEIEREAFISVLGVCPLYLDEIRHFLTLCPELSLGWFEEGCLVAFIIGSLWDKERLMQESLTLHRSGGHIAHLHVLAVHRAFRQQGRGPILLWRYLHHLGSQPAVRRAALMCEDALVPFYERFSFHAVGPCAITVGSLTFMELHCSLRGHPFLRRNSGC

SEQ ID NO: 37784 - protein, 207 aa, Homo sapiens
MSTQSTHPLKPEAPRLPPGIPESPSCQRRHTLPASEFRCLTPEDAVSAFEIEREAFISVLGVCPLYLDEIRHFLTLCPELSLGWFEEGCLVAFIIGSLWDKERLMQESLTLHRSGGHIAHLHVLAVHRAFRQQGRGPILLWRYLHHLGSQPAVRRAALMCEDALVPFYERFSFHAVGPCAITVGSLTFMELHCSLRGHPFLRRNSGC

SEQ ID NO: 37785 - protein, 511 aa, Homo sapiens
MVLLAAAVCTKAGKAIVSRQFVEMTRTRIEGLLAAFPKLMNTGKQHTFVETESVRYVYQPMEKLYMVLITTKNSNILEDLETLRLFSRVIPEYCRALEENEISEHCFDLIFAFDEIVALGYRENVNLAQIRTFTEMDSHEEKVFRAVRETQEREAKAEMRRKAKELQQARRDAERQGKKAPGFGGFGSSAVSGGSTAAMITETIIETDKPKVAPAPARPSGPSKALKLGAKGKEVDNFVDKLKSEGETIMSSSMGKRTSEATKMHAPPINMESVHMKIEEKITLTCGRDGGLQNMELHGMIMLRISDDKYGRIRLHVENEDKKGVQLQTHPNVDKKLFTAESLIGLKNPEKSFPVNSDVGVLKWRLQTTEESFIPLTINCWPSESGNGCDVNIEYELQEDNLELNDVVITIPLPSGVGAPVIGEIDGEYRHDSRRNTLEWCLPVIDAKNKSGSLEFSIAGQPNDFFPVQVSFVSKKNYCNIQVTKVTQVDGNSPVRFSTETTFLVDKYEIL

SEQ ID NO: 37786 - protein, 552 aa, Homo sapiens
MAECNLVAILISSIDNPLDKNLDNGGNSCLDFRPLNSFSQPQVLLAAAVCTKAGKAIVSRQFVEMTRTRIEGLLAAFPKLMNTGKQHTFVETESVRYVYQPMEKLYMVLITTKNSNILEDLETLRLFSRVIPEYCRALEENEISEHCFDLIFAFDEIVALGYRENVNLAQIRTFTEMDSHEEKVFRAVRETQEREAKAEMRRKAKELQQARRDAERQGKKAPGFGGFGSSAVSGGSTAAMITETIIETDKPKVAPAPARPSGPSKALKLGAKGKEVDNFVDKLKSEGETIMSSSMGKRTSEATKMHAPPINMESVHMKIEEKITLTCGRDGGLQNMELHGMIMLRISDDKYGRIRLHVENEDKKGVQLQTHPNVDKKLFTAESLIGLKNPEKSFPVNSDVGVLKWRLQTTEESFIPLTINCWPSESGNGCDVNIEYELQEDNLELNDVVITIPLPSGVGAPVIGEIDGEYRHDSRRNTLEWCLPVIDAKNKSGSLEFSIAGQPNDFFPVQVSFVSKKNYCNIQVTKVTQVDGNSPVRFSTETTFLVDKYEIL

SEQ ID NO: 37787 - protein, 423 aa, Homo sapiens
MIPEYCRALEENEISEHCFDLIFAFDEIVALGYRENVNLAQIRTFTEMDSHEEKVFRAVRETQEREAKAEMRRKAKELQQARRDAERQGKKAPGFGGFGSSAVSGGSTAAMITETIIETDKPKVAPAPARPSGPSKALKLGAKGKEVDNFVDKLKSEGETIMSSSMGKRTSEATKMHAPPINMESVHMKIEEKITLTCGRDGGLQNMELHGMIMLRISDDKYGRIRLHVENEDKKGVQLQTHPNVDKKLFTAESLIGLKNPEKSFPVNSDVGVLKWRLQTTEESFIPLTINCWPSESGNGCDVNIEYELQEDNLELNDVVITIPLPSGVGAPVIGEIDGEYRHDSRRNTLEWCLPVIDAKNKSGSLEFSIAGQPNDFFPVQVSFVSKKNYCNIQVTKVTQVDGNSPVRFSTETTFLVDKYEIL

SEQ ID NO: 37788 - protein, 189 aa, Homo sapiens
MVLLAAAVCTKAGKAIVSRQFVEMTRTRIEGLLAAFPKLMNTGKQHTFVETESVRYVYQPMEKLYMVLITTKNSNILEDLETLRLFSRVIPEYCRALEENEISEHCFDLIFAFDEIVALGYRENVNLAQIRTFTEMDSHEEKVFRAVRETQEREAKAEMRRKAKELQQAQSVGITGMSHHAQLLLYFNP

SEQ ID NO: 37789 - protein, 740 aa, Homo sapiens
MTVKLDFEECLKDSPRFRASIELVEAEVSELETRLEKLLKLGTGLLESGRHYLAASRAFVVGICDLARLGPPEPMMAECLEKFTVSLNHKLDSHAELLDATQHTLQQQIQTLVKEGLRGFREARRDFWRGAESLEAALTHNAEVPRRRAQEAEEAGAALRTARAGYRGRALDYALQINVIEDKRKFDIMEFVLRLVEAQATHFQQGHEELSRLSQYRKELGAQLHQLVLNSAREKRDMEQRHVLLKQKELGGEEPEPSLREGPGGLVMEGHLFKRASNAFKTWSRRWFTIQSNQLVYQKKYKDPVTVVVDDLRLCTVKLCPDSERRFCFEVVSTSKSCLLQADSERLLQLWVSAVQSSIASAFSQARLDDSPRGPGQGSGHLAIGSAATLGSGGMARGREPGGVGHVVAQVQSVDGNAQCCDCREPAPEWASINLGVTLCIQCSGIHRSLGVHFSKVRSLTLDSWEPELVKLMCELGNVIINQIYEARVEAMAVKKPGPSCSRQEKEAWIHAKYVEKKFLTKLPEIRGRRGGRGRPRGQPPVPPKPSIRPRPGSLRSKPEPPSEDLGSLHPGALLFRASGHPPSLPTMADALAHGADVNWVNGGQDNATPLIQATAANSLLACEFLLQNGANVNQADSAGRGPLHHATILGHTGLACLFLKRGADLGARDSEGRDPLTIAMETANADIVTLLRLAKMREAEAAQGQAGDETYLDIFRDFSLMASDDPEKLSRRSHDLHTL

SEQ ID NO: 37790 - protein, 778 aa, Homo sapiens
MKMTVDFEECLKDSPRFRAALEEVEGDVAELELKLDKLVKLCIAMIDTGKAFCVANKQFMNGIRDLAQYSSNDAVVETSLTKFSDSLQEMINFHTILFDQTQRSIKAQLQNFVKEDLRKFKDAKKQFEKVSEEKENALVKNAQVQRNKQHEVEEATNILTATRKCFRHIALDYVLQINVLQSKRRSEILKSMLSFMYAHLAFFHQGYDLFSELGPYMKDLGAQLDRLVVDAAKEKREMEQKHSTIQQKDFSSDDSKLEYNVDAANGIVMEGYLFKRASNAFKTWNRRWFSIQNNQLVYQKKFKDNPTVVVEDLRLCTVKHCEDIERRFCFEVVSPTKSCMLQADSEKLRQAWIKAVQTSIATAYREKGDESEKLDKKSSPSTGSLDSGNESKEKLLKGESALQRVQCIPGNASCCDCGLADPRWASINLGITLCIECSGIHRSLGVHFSKVRSLTLDTWEPELLKLMCELGNDVINRVYEANVEKMGIKKPQPGQRQEKEAYIRAKYVERKFVDKYSISLSPPEQQKKFVSKSSEEKRLSISKFGPGDQVRASAQSSVRSNDSGIQQSSDDGRESLPSTVSANSLYEPEGERQDSSMFLDSKHLNPGLQLYRASYEKNLPKMAEALAHGADVNWANSEENKATPLIQAVLGGSLVTCEFLLQNGANVNQRDVQGRGPLHHATVLGHTGQVCLFLKRGANQHATDEEGKDPLSIAVEAANADIVTLLRLARMNEEMRESEGLYGQPGDETYQDIFRDFSQMASNNPEKLNRFQQDSQKF

SEQ ID NO: 37791 - protein, 1205 aa, Homo sapiens
MTKKEEPPPSRVPRAVRVASLLSEGEELSGDDQGDEEEDDHAYEGVPNGGWHTSSLSLSLPSTIAAPHPMDGPPGGSTPVTPVIKAGWLDKNPPQGSYIYQKRWVRLDTDHLRYFDSNKDAYSKRFISVACISHVAAIGDQKFEVITNNRTFAFRAESDVERKEWMQALQQAMAEQRARARLSSAYLLGVPGSEQPDRAGSLELRGFKNKLYVAVVGDKVQLYKNLEEYHLGIGITFIDMSVGNVKEVDRRSFDLTTPYRIFSFSADSELEKEQWLEAMQGAIAEALSTSEVAERIWAAAPNRFCADCGAPQPDWASINLCVVICKRCAGEHRGLGAGVSKVRSLKMDRKVWTETLIELFLQLGNGAGNRFWAANVPPSEALQPSSSPSTRRCHLEAKYREGKYRRYHPLFGNQEELDKALCAAVTTTDLAETQALLGCGAGINCFSGDPEAPTPLALAEQAGQTLQMEFLRNNRTTEVPRLDSMKPLEKHYSVVLPTVSHSGFLYKTASAGKLLQDRRAREEFSRRWCVLGDGVLSYFENERAVTPNGEIRASEIVCLAVPPPDTHGFEHTFEVYTEGERLYLFGLESAEQAHEWVKCIAKAFVPPLAEDLLARDFERLGRLPYKAGLSLQRAQEGWFSLSGSELRAVFPEGPCEEPLQLRKLQELSIQGDSENQVLVLVERRRTLYIQGERRLDFMGWLGAIQKAAASMGDTLSEQQLGDSDIPVIVYRCVDYITQCGLTSEGIYRKCGQTSKTQRLLESLRQDARSVHLKEGEQHVDDVSSALKRFLRDLPDGLFTRAQRLTWLEASEIEDEEEKVSRYRELLVRLPPVNRATVKALISHLYCVQCFSDTNQMNVHNLAIVFGPTLFQTDGQDYKAGRVVEDLINHYVVVFSVDEEELRKQREEITAIVKMRVAGTASGTQHAGDFICTVYLEEKKAETEQHIKVPASMTAEELTLEILDRRNVGIREKDYWTCFEVNEREEAERPLHFAEKVLPILHGLGTDSHLVVKKHQAMEAMLLYLASRVGDTKHGMMKFREDRSLLGLGLPSGGFHDRYFILNSSCLRLYKEVRSQRPWSGAPETSHRPEKEWPIKSLKVYLGVKKKLRPPTCWGFTVVHETEKHEKQQWYLCCDTQMELREWFATFLFVQHDGLVWPSEPSRVSRAVPEVRLGSVSLIPLRGSENEMRRSVAAFTADPLSLLRNV

SEQ ID NO: 37792 - protein, 627 aa, Homo sapiens
KCWAVWVGAVWTEGAWQPRVGVICGLKGRMTLSGSRGQEEPPPSRVPRAVRVASLLSEGEELSGDDQGDEEEDDHAYEGVPNGGWHTSSLSLSLPSTIAAPHPMDGPPGGSTPVTPVIKAGWLDKNPPQGSYIYQKRWVRLDTDHLRYFDSNKDAYSKRFISVACISHVAAIGDQKFEVITNNRTFAFRAESDVERKEWMQALQQAMAEQRARARLSSAYLLGVPGSEQPDRAGSLELRGFKNKLYVAVVGDKVQLYKNLEEYHLGIGITFIDMSVGNVKEVDRRSFDLTTPYRIFSFSADSELEKEQWLEAMQGAIAEALSTSEVAERIWAAAPNRFCADCGAPQPDWASINLCVVICKRCAGEHRGLGAGVSKVRSLKMDRKVWTETLIELFLQLGNGAGNRFWAANVPPSEALQPSSSPSTRRCHLEAKYREGKYRRYHPLFGNQEELDKALCAAVTTTDLAETQALLGCGAGINCFSGDPEAPTPLALAEQAGQTLQMEFLRNNRTTEVPRLDSMKPLEKHYSVVLPTVSHSGFLYKTASAGKLLQDRRAREEFSRRWCVLGDGVLSYFENERAVTPNGEIRASEIVCLAVPPPDTHGFEHTFEVYTEGERLYLWAGECGAGS

SEQ ID NO: 37793 - protein, 1439 aa, Homo sapiens
MAEAGDAALSVAEWLRALHLEQYTGLFEQHGLVWATECQGLSDTRLMDMGMLLPGHRRRILAGLLRAHTSPAPAPRPTPRPVPMKRHIFRSPPVPATPPEPLPTTTEDEGLPAAPPIPPRRSCLPPTCFTTPSTAAPDPVLPPLPAKRHLAELSVPPVPPRTGPPRLLVSLPTKEEESLLPSLSSPPQPQSEEPLSTLPQGPPQPPSPPPCPPEIPPKPVRLFPEFDDSDYDEVPEEGPGAPARVMTKKEEPPPSRVPRAVRVASLLSEGEELSGDDQGDEEEDDHAYEGVPNGGWHTSSLSLSLPSTIAAPHPMDGPPGGSTPVTPVIKAGWLDKNPPQGSYIYQKRWVRLDTDHLRYFDSNKDAYSKRFISVACISHVAAIGDQKFEVITNNRTFAFRAESDVERKEWMQALQQAMAEQRARARLSSAYLLGVPGSEQPDRAGSLELRGFKNKLYVAVVGDKVQLYKNLEEYHLGIGITFIDMSVGNVKEVDRRSFDLTTPYRIFSFSADSELEKEQWLEAMQGAIAEALSTSEVAERIWAAAPNRFCADCGAPQPDWASINLCVVICKRCAGEHRGLGAGVSKVRSLKMDRKVWTETLIELFLQLGNGAGNRFWAANVPPSEALQPSSSPSTRRCHLEAKYREGKYRRYHPLFGNQEELDKALCAAVTTTDLAETQALLGCGAGINCFSGDPEAPTPLALAEQAGQTLQMEFLRNNRTTEVPRLDSMKPLEKHYSVVLPTVSHSGFLYKTASAGKLLQDRRAREEFSRRWCVLGDGVLSYFENERAVTPNGEIRASEIVCLAVPPPDTHGFEHTFEVYTEGERLYLFGLESAEQAHEWVKCIAKAFVPPLAEDLLARDFERLGRLPYKAGLSLQRAQEGWFSLSGSELRAVFPEGPCEEPLQLRKLQELSIQGDSENQVLVLVERRRTLYIQGERRLDFMGWLGAIQKAAASMGDTLSEQQLGDSDIPVIVYRCVDYITQCGLTSEGIYRKCGQTSKTQRLLESLRQDARSVHLKEGEQHVDDVSSALKRFLRDLPDGLFTRAQRLTWLEASEIEDEEEKVSRYRELLVRLPPVNRATVKALISHLYCVQCFSDTNQMNVHNLAIVFGPTLFQTDGQDYKAGRVVEDLINHYVVVFSVDEEELRKQREEITAIVKMRVAGTASGTQHAGDFICTVYLEEKKAETEQHIKVPASMTAEELTLEILDRRNVGIREKDYWTCFEVNEREEAERPLHFAEKVLPILHGLGTDSHLVVKKHQAMEAMLLYLASRVGDTKHGMMKFREDRSLLGLGLPSGGFHDRYFILNSSCLRLYKEVRSHRPEKEWPIKSLKVYLGVKKKLRPPTCWGFTVVHETEKHEKQQWYLCCDTQMELREWFATFLFVQHDGLVWPSEPSRVSRAVPEVRLGSVSLIPLRGSENEMRRSVAAFTADPLSLLRNV

SEQ ID NO: 37794 - protein, 1210 aa, Homo sapiens
MTLSGSRGQEEPPPSRVPRAVRVASLLSEGEELSGDDQGDEEEDDHAYEGVPNGGWHTSSLSLSLPSTIAAPHPMDGPPGGSTPVTPVIKAGWLDKNPPQGSYIYQKRWVRLDTDHLRYFDSNKDAYSKRFISVACISHVAAIGDQKFEVITNNRTFAFRAESDVERKEWMQALQQAMAEQRARARLSSAYLLGVPGSEQPDRAGSLELRGFKNKLYVAVVGDKVQLYKNLEEYHLGIGITFIDMSVGNVKEVDRRSFDLTTPYRIFSFSADSELEKEQWLEAMQGAIAEALSTSEVAERIWAAAPNRFCADCGAPQPDWASINLCVVICKRCAGEHRGLGAGVSKVRSLKMDRKVWTETLIELFLQLGNGAGNRFWAANVPPSEALQPSSSPSTRRCHLEAKYREGKYRRYHPLFGNQEELDKALCAAVTTTDLAETQALLGCGAGINCFSGDPEAPTPLALAEQAGQTLQMEFLRNNRTTEVPRLDSMKPLEKHYSVVLPTVSHSGFLYKTASAGKLLQDRRAREEFSRRWCVLGDGVLSYFENERAVTPNGEIRASEIVCLAVPPPDTHGFEHTFEVYTEGERLYLFGLESAEQAHEWVKCIAKAFVPPLAEDLLARDFERLGRLPYKAGLSLQRAQEGWFSLSGSELRAVFPEGPCEEPLQLRKLQELSIQGDSENQVLVLVERRRTLYIQGERRLDFMGWLGAIQKAAASMGDTLSEQQLGDSDIPVIVYRCVDYITQCGLTSEGIYRKCGQTSKTQRLLESLRQDARSVHLKEGEQHVDDVSSALKRFLRDLPDGLFTRAQRLTWLEASEIEDEEEKVSRYRELLVRLPPVNRATVKALISHLYCVQCFSDTNQMNVHNLAIVFGPTLFQTDGQDYKAGRVVEDLINHYVVVFSVDEEELRKQREEITAIVKMRVAGTASGTQHAGDFICTVYLEEKKAETEQHIKVPASMTAEELTLEILDRRNVGIREKDYWTCFEVNEREEAERPLHFAEKVLPILHGLGTDSHLVVKKHQAMEAMLLYLASRVGDTKHGMMKFREDRSLLGLGLPSGGFHDRYFILNSSCLRLYKEVRSQRPWSGAPETSHRPEKEWPIKSLKVYLGVKKKLRPPTCWGFTVVHETEKHEKQQWYLCCDTQMELREWFATFLFVQHDGLVWPSEPSRVSRAVPEVRLGSVSLIPLRGSENEMRRSVAAFTADPLSLLRNV

SEQ ID NO: 37795 - protein, 1450 aa, Homo sapiens
MAEAGDAALSVAEWLRALHLEQYTGLFEQHGLVWATECQGLSDTRLMDMGMLLPGHRRRILAGLLRAHTSPAPAPRPTPRPVPMKRHIFRSPPVPATPPEPLPTTTEDEGLPAAPPIPPRRSCLPPTCFTTPSTAAPDPVLPPLPAKRHLAELSVPPVPPRTGPPRLLVSLPTKEEESLLPSLSSPPQPQSEEPLSTLPQGPPQPPSPPPCPPEIPPKPVRLFPEFDDSDYDEVPEEGPGAPARVMTKKEEPPPSRVPRAVRVASLLSEGEELSGDDQGDEEEDDHAYEGVPNGGWHTSSLSLSLPSTIAAPHPMDGPPGGSTPVTPVIKAGWLDKNPPQGSYIYQKRWVRLDTDHLRYFDSNKDAYSKRFISVACISHVAAIGDQKFEVITNNRTFAFRAESDVERKEWMQALQQAMAEQRARARLSSAYLLGVPGSEQPDRAGSLELRGFKNKLYVAVVGDKVQLYKNLEEYHLGIGITFIDMSVGNVKEVDRRSFDLTTPYRIFSFSADSELEKEQWLEAMQGAIAEALSTSEVAERIWAAAPNRFCADCGAPQPDWASINLCVVICKRCAGEHRGLGAGVSKVRSLKMDRKVWTETLIELFLQLGNGAGNRFWAANVPPSEALQPSSSPSTRRCHLEAKYREGKYRRYHPLFGNQEELDKALCAAVTTTDLAETQALLGCGAGINCFSGDPEAPTPLALAEQAGQTLQMEFLRNNRTTEVPRLDSMKPLEKHYSVVLPTVSHSGFLYKTASAGKLLQDRRAREEFSRRWCVLGDGVLSYFENERAVTPNGEIRASEIVCLAVPPPDTHGFEHTFEVYTEGERLYLFGLESAEQAHEWVKCIAKAFVPPLAEDLLARDFERLGRLPYKAGLSLQRAQEGWFSLSGSELRAVFPEGPCEEPLQLRKLQELSIQGDSENQVLVLVERRRTLYIQGERRLDFMGWLGAIQKAAASMGDTLSEQQLGDSDIPVIVYRCVDYITQCGLTSEGIYRKCGQTSKTQRLLESLRQDARSVHLKEGEQHVDDVSSALKRFLRDLPDGLFTRAQRLTWLEASEIEDEEEKVSRYRELLVRLPPVNRATVKALISHLYCVQCFSDTNQMNVHNLAIVFGPTLFQTDGQDYKAGRVVEDLINHYVVVFSVDEEELRKQREEITAIVKMRVAGTASGTQHAGDFICTVYLEEKKAETEQHIKVPASMTAEELTLEILDRRNVGIREKDYWTCFEVNEREEAERPLHFAEKVLPILHGLGTDSHLVVKKHQAMEAMLLYLASRVGDTKHGMMKFREDRSLLGLGLPSGGFHDRYFILNSSCLRLYKEVRSQRPWSGAPETSHRPEKEWPIKSLKVYLGVKKKLRPPTCWGFTVVHETEKHEKQQWYLCCDTQMELREWFATFLFVQHDGLVWPSEPSRVSRAVPEVRLGSVSLIPLRGSENEMRRSVAAFTADPLSLLRNV

SEQ ID NO: 37796 - protein, 1133 aa, Homo sapiens
MTKKEEPPPSRVPRAVRVASLLSEGEELSGDDQGDEEEDDHAYEGVPNGGWHTSSLSLSLPSTIAAPHPMDGPPGGSTPVTPVIKAGWLDKNPPQGSYIYQKRWVRLDTDHLRYFDSNKDAYSKRFISVACISHVAAIGDQKFEVITNNRTFAFRAESDVERKEWMQALQQAMAEQRARARLSSAYLLGVPGSEQPDRAGSLELRGFKNKLYVAVVGDKVQLYKNLEEYHLGIGITFIDMSVGNVKEVDRRSFDLTTPYRIFSFSADSELEKEQWLEAMQGAIAEALSTSEVAERIWAAAPNRFCADCGAPQPDWASINLCVVICKRCAGEHRGLGAGVSKVRSLKMDRKVWTETLIEALCAAVTTTDLAETQALLGCGAGINCFSGDPEAPTPLALAEQAGQTLQMEFLRNNRTTEVPRLDSMKPLEKHYSVVLPTVSHSGFLYKTASAGKLLQDRRAREEFSRRWCVLGDGVLSYFENERAVTPNGEIRASEIVCLAVPPPDTHGFEHTFEVYTEGERLYLFGLESAEQAHEWVKCIAKAFVPPLAEDLLARDFERLGRLPYKAGLSLQRAQEGWFSLSGSELRAVFPEGPCEEPLQLRKLQELSIQGDSENQVLVLVERRRTLYIQGERRLDFMGWLGAIQKAAASMGDTLSEQQLGDSDIPVIVYRCVDYITQCGLTSEGIYRKCGQTSKTQRLLESLRQDARSVHLKEGEQHVDDVSSALKRFLRDLPDGLFTRAQRLTWLEASEIEDEEEKVSRYRELLVRLPPVNRATVKALISHLYCVQCFSDTNQMNVHNLAIVFGPTLFQTDGQDYKAGRVVEDLINHYVVVFSVDEEELRKQREEITAIVKMRVAGTASGTQHAGDFICTVYLEEKKAETEQHIKVPASMTAEELTLEILDRRNVGIREKDYWTCFEVNEREEAERPLHFAEKVLPILHGLGTDSHLVVKKHQAMEAMLLYLASRVGDTKHGMMKFREDRSLLGLGLPSGGFHDRYFILNSSCLRLYKEVRSHRPEKEWPIKSLKVYLGVKKKLRPPTCWGFTVVHETEKHEKQQWYLCCDTQMELREWFATFLFVQHDGLVWPSEPSRVSRAVPEVRLGSVSLIPLRGSENEMRRSVAAFTADPLSLLRNV

SEQ ID NO: 37797 - protein, 1439 aa, Homo sapiens; identical to SEQ ID NO: 37793

SEQ ID NO: 37798 - protein, 1704 aa, Homo sapiens
MSSVSEVNVDIKDFLMSINLEQYLLHFHESGFTTVKDCAAINDSLLQKIGISPTGHRRRILKQLQIILSKMQDIPIYANVHKTKKNDDPSKDYHVPSSDQNICIELSNSGSVQTSSPPQLETVRKNLEDSDASVERSQYPQSDDKLSPPKRDFPTAEEPHLNLGSLNDSLFGSDNIKIESLITKKTVDHTVEEQQTEKVKLITENLSKLPNADSECLSFVGCSTSGTNSGNGTNGLLEGSPPSPFFKFQGEMIVNDLYVPSSPILAPVRSRSKLVSRPSRSFLLRHRPVPEIPGSTKGVSGSYFRERRNVATSTEKSVAWQNSNEENSSSIFPYGETFLFQRLENSKKRSIKNEFLTQGEALKGEAATATNSFIIKSSIYDNRKEKISEDKVEDIWIPREDKNNFLIDTASESEYSTVEECFQSLRRKNSKASKSRTQKALILDSVNRHSYPLSSTSGNADSSAVSSQAISPYACFYGASAKKVKSGWLDKLSPQGKRMFQKRWVKFDGLSISYYNNEKEMYSKGIIPLSAISTVRVQGDNKFEVVTTQRTFVFRVEKEEERNDWISILLNALKSQSLTSQSQAVVTPEKCGYLELRGYKAKIFTVLSGNSVWLCKNEQDFKSGLGITIIPMNVANVKQVDRTVKQSFEIITPYRSFSFTAETEKEKQDWIEAVQQSIAETLSDYEVAEKIWFNESNRSCADCKAPDPDWASINLCVVICKKCAGQHRSLGPKDSKVRSLKMDASIWSNELIELFIVIGNKRANDFWAGNLQKDEELHMDSPVEKRKNFITQKYKEGKFRKTLLASLTKEELNKALCAAVVKPDVLETMALLFSGADVMCATGDPVHSTPYLLAKKAGQSLQMEFLYHNKFSDFPQHDIHSEGVLSQESSQSTFLCDFLYQAPSAASKLSSEKKLLEETNKKWCVLEGGFLSYYENDKSTTPNGTININEVICLAIHKEDFYLNTGPIFIFEIYLPSERVFLFGAETSQAQRKWTEAIAKHFVPLFAENLTEADYDLIGQLFYKDCHALDQWRKGWFAMDKSSLHFCLQMQEVQGDRMHLRRLQELTISTMVQNGEKLDVLLLVEKGRTLYIHGHTKLDFTVWHTAIEKAAGTDGNALQDQQLSKNDVPIIVNSCIAFVTQYGLGCKYIYQKNGDPLHISELLESFKKDARSFKLRAGKHQLEDVTAVLKSFLSDIDDALLTKELYPYWISALDTQDDKERIKKYGAFIRSLPGVNRATLAAIIEHLYRVQKCSEINHMNAHNLALVFSSCLFQTKGQTSEEVNVIEDLINNYVEIFEVKEDQVKQMDIENSFITKWKDTQVSQAGDLLIEVYVERKEPDCSIIIRISPVMEAEELTNDILAIKNIIPTKGDIWATFEVIENEELERPLHYKENVLEQVLRWSSLAEPGSAYLVVKRFLTADTIKHCSDRSTLGSIKEGILKIKEEPSKILSGNKFQDRYFVLRDGFLFLYKDVKSSKHDKMFSLSSMKFYRGVKKKMKPPTSWGLTAYSEKHHWHLCCDSSRTQTEWMTSIFIAQHEYDIWPPAGKERKRSITKNPKIGGLPLIPIQHEGNATLARKNIESARAELERLRLSEKCDKESVDSSLKERASMVAHCLEHKDDKLRNRPRKHRSFNCLEDTEPEAPLGQPKGHKGLKTLRKTEDRNSKATLDSDHKLPSRVIEELNVVLQRSRTLPKELQDEQILK

SEQ ID NO: 37799 - protein, 47 aa, Homo sapiens
MSSVSEVNVDIKDFLMSINLEQYLLHFHESGFTTVKDCAAINDSLLQ

SEQ ID NO: 37800 - protein, 1132 aa, Homo sapiens
MRSSASRLSSFSSRDSLWNRMPDQISVSEFIAETTEDYNSPTTSSFTTRLHNCRNTVTLLEEALDQDRTALQKVKKSVKAIYNSGQDHVQNEENYAQVLDKFGSNFLSRDNPDLGTAFVKFSTLTKELSTLLKNLLQGLSHNVIFTLDSLLKGDLKGVKGDLKKPFDKAWKDYETKFTKIEKEKREHAKQHGMIRTEITGAEIAEEMEKERRLFQLQMCEYLIKVNEIKTKKGVDLLQNLIKYYHAQCNFFQDGLKTADKLKQYIEKLAADLYNIKQTQDEEKKQLTALRDLIKSSLQLDQKEARQDSQSRQGGYSMHQLQGNKEYGSEKKGYLLKKSDGIRKVWQRRKCSVKNGILTISHATSNRQPAKLNLLTCQVKPNAEDKKSFDLISHNRTYHFQAEDEQDYVAWISVLTNSKEEALTMAFRGEQSAGENSLEDLTKAIIEDVQRLPGNDICCDCGSSEPTWLSTNLGILTCIECSGIHREMGVHISRIQSLELDKLGTSELLLAKNVGNNSFNDIMEANLPSPSPKPTPSSDMTVRKEYITAKYVDHRFSRKTCSTSSAKLNELLEAIKSRDLLALIQVYAEGVELMEPLLEPGQELGETALHLAVRTADQTSLHLVDFLVQNCGNLDKQTALGNTVLHYCSMYSKPECLKLLLRSKPTVDIVNQAGETALDIAKRLKATQCEDLLSQAKSGKFNPHVHVEYEWNLRQEEIDESDDDLDDKPSPIKKERSPRPQSFCHSSSISPQDKLALPGFSTPRDKQRLSYGAFTNQIFVSTSTDSPTSPTTEAPPLPPRNAGKGPTGPPSTLPLSTQTSSGSSTLSKKRPPPPPPGHKRTLSDPPSPLPHGPPNKGAVPWGNDGGPSSSSKTTNKFEGLSQQSSTSSAKTALGPRVLPKLPQKVALRKTDHLSLDKATIPPEIFQKSSQLAELPQKPPPGDLPPKPTELAPKPQIGDLPPKPGELPPKPQLGDLPPKPQLSDLPPKPQMKDLPPKPQLGDLLAKSQTGDVSPKAQQPSEVTLKSHPLDLSPNVQSRDAIQKQASEDSNDLTPTLPETPVPLPRKINTGKNKVRRVKTIYDCQADNDDELTFIEGEVIIVTGEEDQEWWIGHIEGQPERKGVFPVSFVHILSD

SEQ ID NO: 37801 - protein, 1129 aa, Homo sapiens
MRSSASRLSSFSSRDSLWNRMPDQISVSEFIAETTEDYNSPTTSSFTTRLHNCRNTVTLLEEALDQDRTALQKVKKSVKAIYNSGQDHVQNEENYAQVLDKFGSNFLSRDNPDLGTAFVKFSTLTKELSTLLKNLLQGLSHNVIFTLDSLLKGDLKGVKGDLKKPFDKAWKDYETKFTKIEKEKREHAKQHGMIRTEITGAEIAEEMEKERRLFQLQMCEYLIKVNEIKTKKGVDLLQNLIKYYHAQCNFFQDGLKTADKLKQYIEKLAADLYNIKQTQDEEKKQLTALRDLIKSSLQLDQKEDSQSRQGGYSMHQLQGNKEYGSEKKGYLLKKSDGIRKVWQRRKCSVKNGILTISHATSNRQPAKLNLLTCQVKPNAEDKKSFDLISHNRTYHFQAEDEQDYVAWISVLTNSKEEALTMAFRGEQSAGENSLEDLTKAIIEDVQRLPGNDICCDCGSSEPTWLSTNLGILTCIECSGIHREMGVHISRIQSLELDKLGTSELLLAKNVGNNSFNDIMEANLPSPSPKPTPSSDMTVRKEYITAKYVDHRFSRKTCSTSSAKLNELLEAIKSRDLLALIQVYAEGVELMEPLLEPGQELGETALHLAVRTADQTSLHLVDFLVQNCGNLDKQTALGNTVLHYCSMYSKPECLKLLLRSKPTVDIVNQAGETALDIAKRLKATQCEDLLSQAKSGKFNPHVHVEYEWNLRQEEIDESDDDLDDKPSPIKKERSPRPQSFCHSSSISPQDKLALPGFSTPRDKQRLSYGAFTNQIFVSTSTDSPTSPTTEAPPLPPRNAGKGPTGPPSTLPLSTQTSSGSSTLSKKRPPPPPPGHKRTLSDPPSPLPHGPPNKGAVPWGNDGGPSSSSKTTNKFEGLSQQSSTSSAKTALGPRVLPKLPQKVALRKTDHLSLDKATIPPEIFQKSSQLAELPQKPPPGDLPPKPTELAPKPQIGDLPPKPGELPPKPQLGDLPPKPQLSDLPPKPQMKDLPPKPQLGDLLAKSQTGDVSPKAQQPSEVTLKSHPLDLSPNVQSRDAIQKQASEDSNDLTPTLPETPVPLPRKINTGKNKVRRVKTIYDCQADNDDELTFIEGEVIIVTGEEDQEWWIGHIEGQPERKGVFPVSFVHILSD

SEQ ID NO: 37802 - protein, 1129 aa, Homo sapiens; identical to SEQ ID NO: 37801

SEQ ID NO: 37803 - protein, 354 aa, Homo sapiens
MSLRGSLSRLLQTRVHSILKKSVHSVAVIGAPFSQGQKRKGVEHGPAAIREAGLMKRLSSLGCHLKDFGDLSFTPVPKDDLYNNLIVNPRSVGLANQELAEVVSRAVSDGYSCVTLGGDHSLAIGTISGHARHCPDLCVVWVDAHADINTPLTTSSGNLHGQPVSFLLRELQDKVPQLPGFSWIKPCISSASIVYIGLRDVDPPEHFILKNYDIQYFSMRDIDRLGIQKVMERTFDLLIGKRQRPIHLSFDIDAFDPTLAPATGTPVVGGLTYREGMYIAEEIHNTGLLSALDLVEVNPQLATSEEEAKTTANLAVDVIASSFGQTREGGHIVYDQLPTPSSPDESENQARVRI

SEQ ID NO: 37804 - protein, 68 aa, Homo sapiens
MKLNEKFSEGWRKPNASWKSSCSKNSSDRDKLSLPHKKLERGSWRVWQPRSTLCRTLDKTEEERAKRE

SEQ ID NO: 37805 - protein, 142 aa, Homo sapiens
MKLNEKFSEGWRKPNASWKSSCSKNSSDRDKLSLPHKKLERGSWRVWQPRSTLCRTLDKTEEERAKREELERILEENNRKIAEAQAKLAEEQLRIVEEQRKIHEERMKLEQERQRQQKEEQKIILGKGKSRPKLSFSLKTQD

SEQ ID NO: 37806 - protein, 273 aa, Homo sapiens
MGRSRSRSSSRSKHTKSSKHNKKRSRSRSRSRDKERVRKRSKSRESKRNRRRESRSRSRSTNTAVSRRERDRERASSPPDRIDIFGRTVSKRSSLDEKQKREEEEKKAEFERQRKIRQQEIEEKLIEEETARRVEELVAKRVEEELEKRKDEIEREVLRRVEEAKRIMEKQLLEELERQRQAELAAQKAREEEERAKREELERILEENNRKIAEAQAKLAEEQLRIVEEQRKIHEERMKLEQERQRQQKEEQKIILGKGKSRPKLSFSLKTQD

SEQ ID NO: 37807 - protein, 223 aa, Homo sapiens
MGRSRSRSSSRSKHTKSSKHNKKRASSPPDRIDIFGRTVSKRSSLDEKQKREEEEKKAEFERQRKIRQQEIEEKLIEEETARRVEELVAKRVEEELEKRKDEIEREVLRRVEEAKRIMEKQLLEELERQRQAELAAQKAREVTLGRLESRDSPWQNFQCWVLPPAQFRKRWNTDYLIPFSSKLNIAAKVNFLAYSEVLTDNLKVGSFYKTYSRILFDLMELAI

SEQ ID NO: 37808 - protein, 164 aa, Homo sapiens
MPDTMLPACFLGLLAFSSACYFQNCPRGGKRAMSDLELRQCLPCGPGGKGRCFGPSICCADELGCFVGTAEALRCQEENYLPSPCQSGQKACGSGGRCAAFGVCCNDESCVTEPECREGFHRRARASDRSNATQLDGPAGALLLRLVQLAGAPEPFEPAQPDAY

SEQ ID NO: 37809 - protein, 418 aa, Homo sapiens
MRLSAGPDAGPSGNSSPWWPLATGAGNTSREAEALGEGNGPPRDVRNEELAKLEIAVLAVTFAVAVLGNSSVLLALHRTPRKTSRMHLFIRHLSLADLAVAFFQVLPQMCWDITYRFRGPDWLCRVVKHLQVFGMFASAYMLVVMTADRYIAVCHPLKTLQQPARRSRLMIAAAWVLSFVLSTPQYFVFSMIEVNNVTKARDCWATFIQPWGSRAYVTWMTGGIFVAPVVILGTCYGFICYNIWCNVRGKTASRQSKGAEQAGVAFQKGFLLAPCVSSVKSISRAKIRTVKMTFVIVTAYIVCWAPFFIIQMWSVWDPMSVWTESENPTITITALLGSLNSCCNPWIYMFFSGHLLQDCVQSFPCCQNMKEKFNKEDTDSMSRRQTFYSNNRSPTNSTGMWKDSPKSSKSIKFIPVST

SEQ ID NO: 37810 - protein, 424 aa, Homo sapiens
MDSGPLWDANPTPRGTLSAPNATTPWLGRDEELAKVEIGVLATVLVLATGGNLAVLLTLGQLGRKRSRMHLFVLHLALTDLAVALFQVLPQLLWDITYRFQGPDLLCRAVKYLQVLSMFASTYMLLAMTLDRYLAVCHPLRSLQQPGQSTYLLIAAPWLLAAIFSLPQVFIFSLREVIQGSGVLDCWADFGFPWGPRAYLTWTTLAIFVLPVTMLTACYSLICHEICKNLKVKTQAWRVGGGGWRTWDRPSPSTLAATTRGLPSRVSSINTISRAKIRTVKMTFVIVLAYIACWAPFFSVQMWSVWDKNAPDEDSTNVAFTISMLLGNLNSCCNPWIYMGFNSHLLPRPLRHLACCGGPQPRMRRRLSDGSLSSRHTTLLTRSSCPATLSLSLSLTLSGRPRPEESPRDLELADGEGTAETIIF

SEQ ID NO: 37811 - protein, 371 aa, Homo sapiens
MLMASTTSAVPGHPSLPSLPSNSSQERPLDTRDPLLARAELALLSIVFVAVALSNGLVLAALARRGRRGHWAPIHVFIGHLCLADLAVALFQVLPQLAWKATDRFRGPDALCRAVKYLQMVGMYASSYMILAMTLDRHRAICRPMLAYRHGSGAHWNRPVLVAWAFSLLLSLPQLFIFAQRNVEGGSGVTDCWACFAEPWGRRTYVTWIALMVFVAPTLGIAACQVLIFREIHASLVPGPSERPGGRRRGRRTGSPGEGAHVSAAVAKTVRMTLVIVVVYVLCWAPFFLVQLWAAWDPEAPLEGAPFVLLMLLASLNSCTNPWIYASFSSSVSSELRSLLCCARGRTPPSLGPQDESCTTASSSLAKDTSS

SEQ ID NO: 37812 - protein, 371 aa, Homo sapiens; identical to SEQ ID NO: 37811

SEQ ID NO: 37813 - protein, 309 aa, Homo sapiens
MLMASTTSAVPGHPSLPSLPSNSSQERPLDTRDPLLARAELALLSIVFVAVALSNGLVLAALARRGRRGHWAPIHVFIGHLCLADLAVALFQVLPQLAWKATDRFRGPDALCRAVKYLQMVGMYASSYMILAMTLDRHRAICRPMLAYRHGSGAHWNRPVLVAWAFSLLLSLPQLFIFAQRNVEGGSGVTDCWACFAEPWGRRTYVTWIALMVFVAPTLGIAACQVLIFREIHASLVPGPSERPGGRRRGRRTGSPGEGAHVSAAVAKTVRMTLVIVVVYVLCWAPFFLVQLWAAWDPEAPLEGGCSRG

SEQ ID NO: 37814 - protein, 334 aa, Homo sapiens
MGRRSSDTEEESRSKRKKKHRRRSSSSSSSDSRTYSRKKGGRKSRSKSRSWSRDLQPRSHSYDRRRRHRSSSSSSYGSRRKRSRSRSRGRGKSYRVQRSRSKSRTRRSRSRPRLRSHSRSSERSSHRRTRSRSRDRERRKGRDKEKREKEKDKGKDKELHNIKRGESGNIKAGLEHLPPAEQAKARLQLVLEAAAKADEALKAKERNEEEAKRRKEEDQATLVEQVKRVKEIEAIESDSFVQQTFRSSKEVKKSVEPSEVKQATSTSGPASAVADPPSTEKEIDPTSIPTAIKYQDDNSLAHPNLFIEKADAEEKWFKRLIALRQERLMGSPVA

SEQ ID NO: 37815 - protein, 276 aa, Homo sapiens
MGRRSSDTEEESRSKRKKKHRRRSSSSSSSDSRTYSRKKGGRKSRSKSRSWSRDLQPRSHSYDRRRRHRSSSSSSYGSRRKRSRSRSRGRGKSYRVQRSRSKSRTRRESGNIKAGLEHLPPAEQAKARLQLVLEAAAKADEALKAKERNEEEAKRRKEEDQATLVEQVKRVKEIEAIESDSFVQQTFRSSKEVKKSVEPSEVKQATSTSGPASAVADPPSTEKEIDPTSIPTAIKYQDDNSLAHPNLFIEKADAEEKWFKRLIALRQERLMGSPVA

SEQ ID NO: 37816 - protein, 276 aa, Homo sapiens; identical to SEQ ID NO: 37815

SEQ ID NO: 37817 - protein, 203 aa, Homo sapiens
MGRRSSDTEEESRSKRKKKHRRRSSSSSSSDSRTYSRKKGGRKSRSKSRSWSRDLQPRSHSYDRRRRHRSSSSSSYGSRRKRSRSRSRGRGKSYRVQRSRSKSRTRRSRSRPRLRSHSRSSERSSHRRTRSRSRDRERRKGRDKEKREKEKDKGKDKELHNIKRGESGNIKAGLEHLPPAEQAKARLQLVLEAAAKADEALKA

SEQ ID NO: 37818 - protein, 194 aa, Homo sapiens
MGRRSSDTEEESRSKRKKKHRRRSSSSSSSDSRTYSRKKGGRKSRSKSRSWSRDLQPRSHSYDRRRRHRSSSSSSYGSRRKRSRSRSRGRGKSYRVQRSRSKSRTRRSRSRPRLRSHSRSSERSSHRRTRSRSRDRERRKGRDKEKREKEKDKGKDKELHNIKRGESGNIKAGLEHLPPAEQAKARLQLVLEAA

SEQ ID NO: 37819 - protein, 334 aa, Homo sapiens; identical to SEQ ID NO: 37814

SEQ ID NO: 37820 - protein, 165 aa, Homo sapiens
MGRRSSDTEEESRSKRKKKHRRRSSSSSSSDSRTYSRKKGGRKSRSKSRSWSRDLQPRSHSYDRRRRHRSSSSSSYGSRRKRSRSRSRGRGKSYRVQRSRSKSRTRRSRSRPRLRSHSRSSERSSHRRTRSRSRDRERRKGRDKEKREKEKDKGKDKELHNIKRG

SEQ ID NO: 37821 - protein, 315 aa, Homo sapiens
MRNRMAPENPQPDPFINRNYSNMKVIPPQDPASPSFTLLSKLECSGTVSAYCSLNLPGSTDPPTSASRVAATTAIRRRHKERTSFTHQQYEELEALFSQTMFPDRNLQEKLALRLDLPESTVKVWFRNRRFKLKKQQQQQSAKQRNQILPSKKNVPTSPRTSPSPYAFSPVISDFYSSLPSQPLDPSNWAWNSTFTESSTSDFQMQDTQWERLVASVPALYSDAYDIFQIIELYNLPDENEISSSSFHCLYQYLSPTKYQVGGQGSSLSIFAGPAVGLSPAQTWPNMTSQAFEAYSLTDSLEFQKTSNMVDLGFL

SEQ ID NO: 37822 - protein, 1566 aa, Homo sapiens
MTADKDKDKDKEKDRDRDRDREREKRDKARESENSRPRRSCTLEGGAKNYAESDHSEDEDNDNNSATAEESTKKNKKKPPKKKSRYERTDTGEITSYITEDDVVYRPGDCVYIESRRPNTPYFICSIQDFKLVHNSQACCRSPTPALCDPPACSLPVASQPPQHLSEAGRGPVGSKRDHLLMNVKWYYRQSEVPDSVYQHLVQDRHNENDSGRELVITDPVIKNRELFISDYVDTYHAAALRGKCNISHFSDIFAAREFKARVDSFFYILGYNPETRRLNSTQGEIRVGPSHQAKLPDLQPFPSPDGDTVTQHEELVWMPGVNDCDLLMYLRAARSMAAFAGMCDGGSTEDGCVAASRDDTTLNALNTLHESGYDAGKALQRLVKKPVPKLIEKCWTEDEVKRFVKGLRQYGKNFFRIRKELLPNKETGELITFYYYWKKTPEAASSRAHRRHRRQAVFRRIKTRTASTPVNTPSRPPSSEFLDLSSASEDDFDSEDSEQELKGYACRHCFTTTSKDWHHGGRENILLCTDCRIHFKKYGELPPIEKPVDPPPFMFKPVKEEDDGLSGKHSMRTRRSRGSMSTLRSGRKKQPASPDGRTSPINEDIRSSGRNSPSAASTSSNDSKAETVKKSAKKVKEEASSPLKSNKRQREKVASDTEEADRTSSKKTKTQEISRPNSPSEGEGESSDSRSVNDEGSSDPKDIDQDNRSTSPSIPSPQDNESDSDSSAQQQMLQAQPPALQAPTGVTPAPSSAPPGTPQLPTPGPTPSATAVPPQGSPTASQAPNQPQAPTAPVPHTHIQQAPALHPQRPPSPHPPPHPSPHPPLQPLTGSAGQPSAPSHAQPPLHGQGPPGPHSLQAGPLLQHPGPPQPFGLPPQASQGQAPLGTSPAAAYPHTSLQLPASQSALQSQQPPREQPLPPAPLAMPHIKPPPTTPIPQLPAPQAHKHPPHLSGPSPFSMNANLPPPPALKPLSSLSTHHPPSAHPPPLQLMPQSQPLPSSPAQPPGLTQSQNLPPPPASHPPTGLHQVAPQPPFAQHPFVPGGPPPITPPTCPSTSTPPAGPGTSAQPPCSGAAASGGSIAGGSSCPLPTVQIKEEALDDAEEPESPPPPPRSPSPEPTVVDTPSHASQSARFYKHLDRGYNSCARTDLYFMPLAGSKLAKKREEAIEKAKREAEQKAREEREREKEKEKEREREREREREAERAAKASSSAHEGRLSDPQLSGPGHMRPSFEPPPTTIAAVPPYIGPDTPALRTLSEYARPHVMSPTNRNHPFYMPLNPTDPLLAYHMPGLYNVDPTIRERELREREIREREIRERELRERMKPGFEVKPPELDPLHPAANPMEHFARHSALTIPPTAGPHPFASFHPGLNPLERERLALAGPQLRPEMSYPDRLAAERIHAERMASLTSDPLARLQMFNVTPHHHQHSHIHSHLHLHQQDPLHQGSAGPVHPLVDPLTAGPHLARFPYPPGTLPNPLLGQPPHEHEMLRHPVFGTPYPRDLPGAIPPPMSAAHQLQAMHAQSAELQRLAMEQQWLHGHPHMHGGHLPSQEDYYSRLKKEGDKQL

SEQ ID NO: 37823 - protein, 1298 aa, Homo sapiens
MDDPFSPCRRLNSTQGEIRVGPSHQAKLPDLQPFPSPDGDTVTQHEELVWMPGVNDCDLLMYLRAARSMAAFAGMCDGGSTEDGCVAASRDDTTLNALNTLHESGYDAGKALQRLVKKPVPKLIEKCWTEDEVKRFVKGLRQYGKNFFRIRKELLPNKETGELITFYYYWKKTPEAASSRAHRRHRRQAVFRRIKTRTASTPVNTPSRPPSSEFLDLSSASEDDFDSEDSEQELKGYACRHCFTTTSKDWHHGGRENILLCTDCRIHFKKYGELPPIEKPVDPPPFMFKPVKEEDDGLSGKHSMRTRRSRGSMSTLRSGRKKQPASPDGRTSPINEDIRSSGRNSPSAASTSSNDSKAETVKKSAKKVKEEASSPLKSNKRQREKVASDTEEADRTSSKKTKTQEISRPNSPSEGEGESSDSRSVNDEGSSDPKDIDQDNRSTSPSIPSPQDNESDSDSSAQQQMLQAQPPALQAPTGVTPAPSSAPPGTPQLPTPGPTPSATAVPPQGSPTASQAPNQPQAPTAPVPHTHIQQAPALHPQRPPSPHPPPHPSPHPPLQPLTGSAGQPSAPSHAQPPLHGQGPPGPHSLQAGPLLQHPGPPQPFGLPPQASQGQAPLGTSPAAAYPHTSLQLPASQSALQSQQPPREQPLPPAPLAMPHIKPPPTTPIPQLPAPQAHKHPPHLSGPSPFSMNANLPPPPALKPLSSLSTHHPPSAHPPPLQLMPQSQPLPSSPAQPPGLTQSQNLPPPPASHPPTGLHQVAPQPPFAQHPFVPGGPPPITPPTCPSTSTPPAGPGTSAQPPCSGAAASGGSIAGGSSCPLPTVQIKEEALDDAEEPESPPPPPRSPSPEPTVVDTPSHASQSARFYKHLDRGYNSCARTDLYFMPLAGSKLAKKREEAIEKAKREAEQKAREEREREKEKEKEREREREREREAERAAKASSSAHEGRLSDPQLSGPGHMRPSFEPPPTTIAAVPPYIGPDTPALRTLSEYARPHVMSPTNRNHPFYMPLNPTDPLLAYHMPGLYNVDPTIRERELREREIREREIRERELRERMKPGFEVKPPELDPLHPAANPMEHFARHSALTIPPTAGPHPFASFHPGLNPLERERLALAGPQLRPEMSYPDRLAAERIHAERMASLTSDPLARLQMFNVTPHHHQHSHIHSHLHLHQQDPLHQGSAGPVHPLVDPLTAGPHLARFPYPPGTLPNPLLGQPPHEHEMLRHPVFGTPYPRDLPGAIPPPMSAAHQLQAMHAQSAELQRLAMEQQWLHGHPHMHGGHLPSQEDYYSRLKKEGDKQL

SEQ ID NO: 37824 - protein, 1566 aa, Homo sapiens; identical to SEQ ID NO: 37822

SEQ ID NO: 37825 - protein, 1012 aa, Homo sapiens
MFKPVKEEDDGLSGKHSMRTRRSRGSMSTLRSGRKKQPASPDGRTSPINEDIRSSGRNSPSAASTSSNDSKAETVKKSAKKVKEEASSPLKSNKRQREKVASDTEEADRTSSKKTKTQEISRPNSPSEGEGESSDSRSVNDEGSSDPKDIDQDNRSTSPSIPSPQDNESDSDSSAQQQMLQAQPPALQAPTGVTPAPSSAPPGTPQLPTPGPTPSATAVPPQGSPTASQAPNQPQAPTAPVPHTHIQQAPALHPQRPPSPHPPPHPSPHPPLQPLTGSAGQPSAPSHAQPPLHGQGPPGPHSLQAGPLLQHPGPPQPFGLPPQASQGQAPLGTSPAAAYPHTSLQLPASQSALQSQQPPREQPLPPAPLAMPHIKPPPTTPIPQLPAPQAHKHPPHLSGPSPFSMNANLPPPPALKPLSSLSTHHPPSAHPPPLQLMPQSQPLPSSPAQPPGLTQSQNLPPPPASHPPTGLHQVAPQPPFAQHPFVPGGPPPITPPTCPSTSTPPAGPGTSAQPPCSGAAASGGSIAGGSSCPLPTVQIKEEALDDAEEPESPPPPPRSPSPEPTVVDTPSHASQSARFYKHLDRGYNSCARTDLYFMPLAGSKLAKKREEAIEKAKREAEQKAREEREREKEKEKEREREREREREAERAAKASSSAHEGRLSDPQLSGPGHMRPSFEPPPTTIAAVPPYIGPDTPALRTLSEYARPHVMSPTNRNHPFYMPLNPTDPLLAYHMPGLYNVDPTIRERELREREIREREIRERELRERMKPGFEVKPPELDPLHPAANPMEHFARHSALTIPPTAGPHPFASFHPGLNPLERERLALAGPQLRPEMSYPDRLAAERIHAERMASLTSDPLARLQMFNVTPHHHQHSHIHSHLHLHQQDPLHQGSAGPVHPLVDPLTAGPHLARFPYPPGTLPNPLLGQPPHEHEMLRHPVFGTPYPRDLPGAIPPPMSAAHQLQAMHAQSAELQRLAMEQQWLHGHPHMHGGHLPSQEDYYSRLKKEGDKQL

SEQ ID NO: 37826 - protein, 650 aa, Homo sapiens
MASGEHSPGSGAARRPLHSAQAVDVASASNFRAFELLHLHLDLRAEFGPPGPGAGSRGLSGTAVLDLRCLEPEGAAELRLDSHPCLEVTAAALRRERPGSEEPPAEPVSFYTQPFSHYGQALCVSFPQPCRAAERLQVLLTYRVGEGPGVCWLAPEQTAGKKKPFVYTQGQAVLNRAFFPCFDTPAVKYKYSALIEVPDGFTAVMSASTWEKRGPNKFFFQMCQPIPSYLIALAIGDLVSAEVGPRSRVWAEPCLIDAAKEEYNGVIEEFLATGEKLFGPYVWGRYDLLFMPPSFPFGGMENPCLTFVTPCLLAGDRSLADVIIHEISHSWFGNLVTNANWGEFWLNEGFTMYAQRRISTILFGAAYTCLEAATGRALLRQHMDITGEENPLNKLRVKIEPGVDPDDTYNETPYEKGFCFVSYLAHLVGDQDQFDSFLKAYVHEFKFRSILADDFLDFYLEYFPELKKKRVDIIPGFEFDRWLNTPGWPPYLPDLSPGDSLMKPAEELAQLWAAEELDMKAIEAVAISPWKTYQLVYFLDKILQKSPLPPGNVKKLGDTYPSISNARNAELRLRWGQIVLKNDHQEDFWKVKEFLHNQGKQKYTLPLYHAMMGGSEVAQTLAKETFASTASQLHSNVVNYVQQIVAPKGS

SEQ ID NO: 37827 - protein, 611 aa, Homo sapiens
MASGEHSPGSGAARRPLHSAQAVDVASASNFRAFELLHLHLDLRAEFGPPGPGAGSRGLSGTAVLDLRCLEPEGAAELRLDSHPCLEVTAAALRRERPGSEEPPAEPVSFYTQPFSHYGQALCVSFPQPCRAAERLQVLLTYRVGEGPGVCWLAPEQTAGKKKPFVYTQGQAVLNRAFFPCFDTPAVKYKYSALIEVPDGFTAVMSASTWEKRGPNKFFFQMCQPIPSYLIALAIGDLVSAEVGPRYDLLFMPPSFPFGGMENPCLTFVTPCLLAGDRSLADVIIHEISHSWFGNLVTNANWGEFWLNEGFTMYAQRRISTILFGAAYTCLEAATGRALLRQHMDITGEENPLNKLRVKIEPGVDPDDTYNETPYEKGFCFVSYLAHLVGDQDQFDSFLKAYVHEFKFRSILADDFLDFYLEYFPELKKKRVDIIPGFEFDRWLNTPGWPPYLPDLSPGDSLMKPAEELAQLWAAEELDMKAIEAVAISPWKTYQLVYFLDKILQKSPLPPGNVKKLGDTYPSISNARNAELRLRWGQIVLKNDHQEDFWKVKEFLHNQGKQKYTLPLYHAMMGGSEVAQTLAKETFASTASQLHSNVVNYVQQIVAPKGS

SEQ ID NO: 37828 - protein, 344 aa, Homo sapiens
MTCCSCTSLSALLDFWAEVCWLAPEQTAGKKKPFVYTQGQAVLNRAFFPCFDTPAVKYKYSALIEVPDGFTAVMSASTWEKRGPNKFFFQMCQPIPSYLIALAIGDLVSAEVGPRSRVWAEPCLIDAAKEEYNGVIEEFLATGEKLFGPYVWGRYDLLFMPPSFPFGGMENPCLTFVTPCLLAGDRSLADVIIHEISHSWFGNLVTNANWGEFWLNEGFTMYAQRRISTILFGAAYTCLEAATGRALLRQHMDITGEENPLNKLRVKIEPGVDPDDTYNETPYEKGFCFVSYLAHLVGDQDQFDSFLKAYVHEFKFRSILADDFLDFYLEYFPELKKKRVDIIP

SEQ ID NO: 37829 - protein, 168 aa, Homo sapiens
LIDAAKEEYNGVIEEFLATGEKLFGPYVWGRYDLLFMPPSFPFGGMENPCLTFVTPCLLAGDRSLADVIIHEISHSWFGNLVTNANWGEFWLNEGFTMYAQRRISTILFGVDPDDTYNETPYEKGFCFVSYLAHLVGDQDQFDSFLKAYVHEFKFRSILADDFLDFYL

SEQ ID NO: 37830 - protein, 494 aa, Homo sapiens
MSATRSAYMEEEGVFHFHMEHPVPAYLVALVAGDLKPADIGPRSRVWAEPCLLPTATSKLSGAVEQWLSAAERLYGPYMWGRYDIVFLPPSFPIVAMENPCLTFIISSILESDEFLVIDVIHEVAHSWFGNAVTNATWEEMWLSEGLATYAQRRITTETYGAAFTCLETAFRLDALHRQMKLLGEDSPVSKLQVKLEPGVNPSHLMNLFTYEKGYCFVYYLSQLCGDPQRFDDFLRAYVEKYKFTSVVAQDLLDSFLSFFPELKEQSVDCRAGLEFERWLNATGPPLAEPDLSQGSSLTRPVEALFQLWTAEPLDQAAASASAIDISKWRTFQTALFLDRLLDGSPLPQEVVMSLSKCYSSLLDSMNAEIRIRWLQIVVRNDYYPDLHRVRRFLESQMSRMYTIPLYEDLCTGALKSFALEVFYQTQGRLHPNLRRAIQQILSQGLGSSTEPASEPSTELGKAEADTDSDAQALLLGDEAPSSAISLRDVNVSA

SEQ ID NO: 37831 - protein, 660 aa, Homo sapiens
MDVLVSECSARLLQQEEEIKSLTAEIDRLKNCGCLGASPNLEQLQEENLKLKYRLNILRKSLQAERNKPTKNMINIISRLQEVFGHAIKAAYPDLENPPLLVTPSQQAKFGDYQCNSAMGISQMLKTKEQKVNPREIAENITKHLPDNECIEKVEIAGPGFINVHLRKDFVSEQLTSLLVNGVQLPALGENKKVIVDFSSPNIAKEMHVGHLRSTIIGESISRLFEFAGYDVLRLNHVGDWGTQFGMLIAHLQDKFPDYLTVSPPIGDLQVFYKESKKRFDTEEEFKKRAYQCVVLLQGKNPDITKAWKLICDVSRQELNKIYDALDVSLIERGESFYQDRMNDIVKEFEDRGFVQVDDGRKIVFVPGCSIPLTIVKSDGGYTYDTSDLAAIKQRLFEEKADMIIYVVDNGQSVHFQTIFAAAQMIGWYDPKVTRVFHAGFGVVLGEDKKKFKTRSGETVRLMDLLGEGLKRSMDKLKEKERDKVLTAEELNAAQTSVAYGCIKYADLSHNRLNDYIFSFDKMLDDRGNTAAYLLYAFTRIRSIARLANIDEEMLQKAARETKILLDHEKEWKLGRCILRFPEILQKILDDLFLHTLCDYIYELATAFTEFYDSCYCVEKDRQTGKILKVNMWRMLLCEAVAAVMAKGFDILGIKPVQRM

SEQ ID NO: 37832 - protein, 454 aa, Homo sapiens [sequence omitted]

SEQ ID NO: 37833 - protein, 205 aa, Homo sapiens
FQSVESSTRKLDHINICSSNFPKRSFALVTQAGVQWHNLDSLQSPPPGFKRFPCLSLPSSWDCREVADFQLSVDSLLEKDNDHSRPDIQVQAKRLAEKLRCDTVVSEISTGQRTVNFKINRELLTKTVLQQVIEDGSKYGLKSELFSGLPQKKIVVEFSSPNVAKKFHVGHLRSTIIGNFIANLKEALGHQVIRINYLGDWGMQF

SEQ ID NO: 37834 - protein, 578 aa, Homo sapiens
MACGFRRAIACQLSRVLNLPPENLITSISAVPISQKEEVADFQLSVDSLLEKDNDHSRPDIQVQAKRLAEKLRCDTVVSEISTGQRTVNFKINRELLTKTVLQQVIEDGSKYGLKSELFSGLPQKKIVVEFSSPNVAKKFHVGHLRSTIIGNFIANLKEALGHQVIRINYLGDWGMQFGLLGTGFQLFGYEEKLQSNPLQHLFEVYVQVNKEAADDKSVAKAAQEFFQRLELGDVQALSLWQKFRDLSIEEYIRVYKRLGVYFDEYSGESFYREKSQEVLKLLESKGLLLKTIKGTAVVDLSGNGDPSSICTVMRSDGTSLYATRDLAAAIDRMDKYNFDTMIYVTDKGQKKHFQQVFQMLKIMGYDWAERCQHVPFGVVQGMKTRRGDVTFLEDVLNEIQLRMLQNMASIKTTKELKNPQETAERVGLAALIIQDFKGLLLSDYKFSWDRVFQSRGDTGVFLQYTHARLHSLEETFGCGYLNDFNTACLQEPQSVSILQHLLRFDEVLYKSSQDFQPRHIVSYLLTLSHLAAVAHKTLQIKDSPPEVAGARLHLFKAVRSVLANGMKLLGITPVCRM

SEQ ID NO: 37835 - protein, 206 aa, Homo sapiens
  VARIANT 1: note = MOD_RES - Any amino acid
XFQSVESSTRKLDHINICSSNFPKRSFALVTQAGVQWHNLDSLQSPPPGFKRFPCLSLPSSWDCREVADFQLSVDSLLEKDNDHSRPDIQVQAKRLAEKLRCDTVVSEISTGQRTVNFKINRELLTKTVLQQVIEDGSKYGLKSELFSGLPQKKIVVEFSSPNVAKKFHVGHLRSTIIGNFIANLKEALGHQVIRINYLGDWGMQF

SEQ ID NO: 37836 - protein, 493 aa, Homo sapiens
MSVDMNSQGSDSNEEDYDPNCEEEEEEEEDDPGDIEDYYVGVASDVEQQGADAFDPEEYQFTCLTYKESEGALNEHMTSLASVLKVSHSVAKLILVNFHWQVSEILDRYKSNSAQLLVEARVQPNPSKHVPTSHPPHHCAVCMQFVRKENLLSLACQHQFCRSCWEQHCSVLVKDGVGVGVSCMAQDCPLRTPEDFVFPLLPNEELREKYRRYLFRDYVESHYQLQLCPGADCPMVIRVQEPRARRVQCNRCNEVFCFKCRQMYHAPTDCATIRKWLTKCADDSETANYISAHTKDCPKCNICIEKNGGCNHMQCSKCKHDFCWMCLGDWKTHGSEYYECSRYKENPDIVNQSQQAQAREALKKYLFYFERWENHNKSLQLEAQTYQRIHEKIQERVMNNLGTWIDWQYLQNAAKLLAKCRYTLQYTYPYAYYMESGPRKKLFEYQQAQLEAEIENLSWKVERADSYDRGDLENQMHIAEQRRRTLLKDFHDT

SEQ ID NO: 37837 - protein, 317 aa, Homo sapiens
GITGVSCMAQDCPLRTPEDFVFPLLPNEELREKYRRYLFRDYVESHYQLQLCPGADCPMVIRVQEPRARRVQCNRCNEVFCFKCRQMYHAPTDCATIRKWLTKCADDSETANYISAHTKDCPKCNICIEKNGGCNHMQCSKCKHDFCWMCLGDWKTHGSEYYECSRYKENPDIVNQSQQAQAREALKKYLFYFERWENHNKSLQLEAQTYQRIHEKIQERVMNNLGTWIDWQYLQNAAKLLAKCRYTLQYTYPYAYYMESGPRKKLFEYQQAQLEAEIENLSWKVERADSYDRGDLENQMHIAEQRRRTLLKDFHDT

SEQ ID NO: 37838 - protein, 410 aa, Homo sapiens
SVDMNSQGSDSNEEDYDPNCEEEEEEEEDDPGDIEDYYVGVASDVEQQGADAFDPEEYQFTCLTYKESEGALNEHMTSLASVLKVSHSVAKLILVNFHWQVSEILDRYKSNSAQLLVEARVQPNPSKHVPTSHPPHHCAVCMQFVRKENLLSLACQHQFCRSCWEQHCSVLVKDGVGVGVSCMAQDCPLRTPEDFVFPLLPNEELREKYRRYLFRDYVESHYQLQLCPGADCPMVIRVQEPRARRVQCNRCNEVFCFKCRQMYHAPTDCATIRKWLTKCADDSETANYISAHTKDCPKCNICIEKNGGCNHMQCSKCKHDFCWMCLGDWKTHGSEYYECSRYKENPDIVNQSQQAQAREALKKYLFYFERLENLSWKVERADSYDRGDLENQMHIAEQRRRTLLKDFHDT

SEQ ID NO: 37839 - protein, 493 aa, Homo sapiens; identical to SEQ ID NO: 37836

SEQ ID NO: 37840 - protein, 527 aa, Homo sapiens
LRRAASGPLAPSLPPPRPPRRHQPSNANRRSWGGAAARGAGARPASGHQPEPEREPGPRRPRPLPASASVRRAPARRAMDSDEGYNYEFVNEVIQNPATITRILLSHFNWDKEKLMERYFDGNLEKLFAECHVINPSKKSRTRQMNTRSSAQDMPCQICYLNYPNSYFTGLECGHKFCMQCWSEYLTTKIMEEGMGQTISCPAHGCDILVDDNTVMRLITDSKVKLKYQHLITNSFVECNRLLKWCPAPDCHHVVKVQYPDAKPVRCKCGRQFCFNCGENWHDPVKCKWLKKWIKKCDDDSETSNWIAANTKECPKCHVTIEKDGGCNHMVCRNQNCKAEFCWVCLGPWEPHGSAWYNCNRYNEDDAKAARDAQERSRAALQRYLFYCNRYMNHMQSLRFEHKLYAQVKQKMEEMQQHNMSWIEVQFLKKAVDVLCQCRATLMYTYVFAFYLKKNNQSIIFENNQADLENATEVLSGYLERDISQDSLQDIKQKVQDKYRYCESRRRVLLQHVHEGYEKDLWEYIED

SEQ ID NO: 37841 - protein, 557 aa, Homo sapiens
MDSDEGYNYEFDEDEECSEEDSGAEEEEDEDDDEPDDDTLDLGEVELVEPGLGVGGERDGLLCGETGGGGGSALGPGGGGGGGGGGGGGGPGHEQEEDYRYEVLTAEQILQHMVECIREVNEVIQNPATITRILLSHFNWDKEKLMERYFDGNLEKLFAECHVINPSKKSRTRQMNTRSSAQDMPCQICYLNYPNSYFTGLECGHKFCMQCWSEYLTTKIMEEGMGQTISCPAHGCDILVDDNTVMRLITDSKVKLKYQHLITNSFVECNRLLKWCPAPDCHHVVKVQYPDAKPVRCKCGRQFCFNCGENWHDPVKCKWLKKWIKKCDDDSETSNWIAANTKECPKCHVTIEKDGGCNHMVCRNQNCKAEFCWVCLGPWEPHGSAWYNCNRYNEDDAKAARDAQERSRAALQRYLFYCNRYMNHMQSLRFEHKLYAQVKQKMEEMQQHNMSWIEVQFLKKAVDVLCQCRATLMYTYVFAFYLKKNNQSIIFENNQADLENATEVLSGYLERDISQDSLQDIKQKVQDKYRYCESRRRVLLQHVHEGYEKDLWEYIED

SEQ ID NO: 37842 - protein, 562 aa, Homo sapiens
MSNQYQEEGCSERPECKSKSPTLLSSYCIDSILGRRSPCKMRLLGAAQSLPAPLTSRADPEKAVQGSPKSSSAPFEAELHLPPKLRRLYGPGGGRLLQGAAAAAAAAAAAAAAAATATAGPRGEAPPPPPPTARPGERPDGAGAAAAAAAAAAAAWDTLKISQAPQVSISRSKSYRENGAPFVPPPPALDELGGPGGVTHPEERLGVAGGPGSAPAAGGGTGTEDDEEELLEDEEDEDEEEELLEDDEEELLEDDARALLKEPRRCPVAATGAVAAAAAAAVATEGGELSPKEELLLHPEDAEGKDGEDSVCLSAGSDSEEGLLKRKQRRYRTTFTSYQLEELERAFQKTHYPDVFTREELAMRLDLTEARVQVWFQNRRAKWRKREKAGAQTHPPGLPFPGPLSATHPLSPYLDASPFPPHHPALDSAWTAAAAAAAAAFPSLPPPPGSASLPPSGAPLGLSTFLGAAVFRHPAFISPAFGRLFSTMAPLTSASTAAALLRQPTPAVEGAVASGALADPATAAADRRASSIAALRLKAKEHAAQLTQLNILPGTSTGKEVC

SEQ ID NO: 37843 - protein, 343 aa, Homo sapiens
MGGPRGAGWVAAGLLLGAGACYCIYRLTRGRRRGDRELGIRSSKSAGALEEGTSEGQLCGRSARPQTGGTWESQWSKTSQPEDLTDGSYDDVLNAEQLQKLLYLLESTEDPVIIERALITLGNNAAFSVNQAIIRELGGIPIVANKINHSNQSIKEKALNALNNLSVNVENQIKIKIYISQVCEDVFSGPLNSAVQLAGLTLLTNMTVTNDHQHMLHSYITDLFQVLLTGNGNTKVQVLKLLLNLSENPAMTEGLLRAQVDSSFLSLYDSHVAKEILLRVLTLFQNIKNCLKIEGHLAVQPTFTEGSLFFLLHGEECAQKIRALVDHHDAEVKEKVVTIIPKI

SEQ ID NO: 37844 - protein, 284 aa, Homo sapiens
MGGPRGAGWVAAGLLLGAGACYCIYRLTRGRRRGDRELGIRSSKSAEDLTDGSYDDVLNAEQLQKLLYLLESTEDPVIIERALITLGNNAAFSVNQAIIRELGGIPIVANKINHSNQSIKEKALNALNNLSVNVENQIKIKIYISQVCEDVFSGPLNSAVQLAGLTLLTNMTVTNDHQHMLHSYITDLFQVLLTGNGNTKVDSSFLSLYDSHVAKEILLRVLTLFQNIKNCLKIEGHLAVQPTFTEGSLFFLLHGEECAQKIRALVDHHDAEVKEKVVTIIPKI

SEQ ID NO: 37845 - protein, 284 aa, Homo sapiens
MGGPRGAGWVAAGLLLGAGACYCIYRLTRGRRRGDRELGIRSSKSAGALEEGTSEGQLCGRSARPQTGGTWESQWSKTSQPEDLTDGSYDDVLNAEQLQKLLYLLESTEDPVIIERALITLGNNAAFSVNQAIIRELGGIPIVANKINHSNQSIKEKALNALNNLSVNVENQIKIKVQVLKLLLNLSENPAMTEGLLRAQVDSSFLSLYDSHVAKEILLRVLTLFQNIKNCLKIEGHLAVQPTFTEGSLFFLLHGEECAQKIRALVDHHDAEVKEKVVTIIPKI

SEQ ID NO: 37846 - protein, 308 aa, Homo sapiens
MGGPRGAGWVAAGLLLGAGACYCIYRLTRGRRRGDRELGIRSSKSAEDLTDGSYDDVLNAEQLQKLLYLLESTEDPVIIERALITLGNNAAFSVNQAIIRELGGIPIVANKINHSNQSIKEKALNALNNLSVNVENQIKIKIYISQVCEDVFSGPLNSAVQLAGLTLLTNMTVTNDHQHMLHSYITDLFQVLLTGNGNTKVQVLKLLLNLSENPAMTEGLLRAQVDSSFLSLYDSHVAKEILLRVLTLFQNIKNCLKIEGHLAVQPTFTEGSLFFLLHGEECAQKIRALVDHHDAEVKEKVVTIIPKI

SEQ ID NO: 37847 - protein, 249 aa, Homo sapiens
MGGPRGAGWVAAGLLLGAGACYCIYRLTRGRRRGDRELGIRSSKSAEDLTDGSYDDVLNAEQLQKLLYLLESTEDPVIIERALITLGNNAAFSVNQAIIRELGGIPIVANKINHSNQSIKEKALNALNNLSVNVENQIKIKVQVLKLLLNLSENPAMTEGLLRAQVDSSFLSLYDSHVAKEILLRVLTLFQNIKNCLKIEGHLAVQPTFTEGSLFFLLHGEECAQKIRALVDHHDAEVKEKVVTIIPKI

SEQ ID NO: 37848 - protein, 225 aa, Homo sapiens
MGGPRGAGWVAAGLLLGAGACYCIYRLTRGRRRGDRELGIRSSKSAEDLTDGSYDDVLNAEQLQKLLYLLESTEDPVIIERALITLGNNAAFSVNQAIIRELGGIPIVANKINHSNQSIKEKALNALNNLSVNVENQIKIKVDSSFLSLYDSHVAKEILLRVLTLFQNIKNCLKIEGHLAVQPTFTEGSLFFLLHGEECAQKIRALVDHHDAEVKEKVVTIIPKI

SEQ ID NO: 37849 - protein, 453 aa, Homo sapiens
MGRTREAGCVAAGVVIGAGACYCVYRLAWGRDENEKIWDEDEESTDTSEIGVETVKGAKTNAGAGSGAKLQGDSEVKPEVSLGLEDCPGVKEKAHSGSHSGGGLEAKAKALFNTLKEQASAKAGKGARVGTISGNRTLAPSLPCPGGRGGGCHPTRSGSRAGGRASGKSKGKARSKSTRAPATTWPVRRGKFNFPYKIDDILSAPDLQKVLNILERTNDPFIQEVALVTLGNNAAYSFNQNAIRELGGVPIIAKLIKTKDPIIREKTYNALNNLSVNAENQGKIKTYISQVCDDTMVCRLDSAVQMAGLRLLTNMTVTNHYQHLLSYSFPDFFALLFLGNHFTKIQIMKLIINFTENPAMTRELVSCKVPSELISLFNKEWDREILLNILTLFENINDNIKNEGLASSRKEFSRSSLFFLFKESGVCVKKIKALANHNDLVVKVKVLKVLTKL

SEQ ID NO: 37850 - protein, 158 aa, Homo sapiens
MVCRLDSAVQMAGLRLLTNMTVTNHYQHLLSYSFPDFFALLFLGNHFTKIQIMKLIINFTENPAMTRELVSCKVPSELISLFNKEWDREILLNILTLFENINDNIKNEGLASSRKEFSRSSLFFLFKESGVCVKKIKALANHNDLVVKVKVLKVLTKL

SEQ ID NO: 37851 - protein, 632 aa, Homo sapiens
MSRVRDAGCVAAGIVIGAGAWYCVYKYTRGRDQTKKRMAKPKNRAVAGTGARARAGLRAGFTIDLGSGFSPPTPVRAEAEDRAQDEASALDTVGAEAVAPAASSAEAQSGAGSQAQEADGAGVGPKAESVVGAAMASAIAPPPGVTEALGAAEAPAMAGAPKVAEAPREAETSRAAVPPGTVVPTEAAAPTEVTEGPGVAAPTKVAEAPGVASPTEAAEAPVPATPTGAAAPTGAAESPGTSGSPRTAVVPGTSAAKKATPGAHTGAIPKATSATGAVPKGGGKGVTRSRNGGKGKGKKSKVEVDELGMGFRPGDGAAAAAAASANGGQAFLAEVPDSEEGESGWTDTESDSDSEPETQRRGRGRRPVAMQKRPFPYEIDEILGVRDLRKVLALLQKSDDPFIQQVALLTLSNNANYSCNQETIRKLGGLPIIANMINKTDPHIKEKALMAMNNLSENYENQGRLQVYMNKVMDDIMASNLNSAVQVVGLKFLTNMTITNDYQHLLVNSIANFFRLLSQGGGKIKVEILKILSNFAENPDMLKKLLSTQVPASFSSLYNSYVESEILINALTLFEIIYDNLRAEVFNYREFNKGSLFYLCTTSGVCVKKIRALANHHDLLVKVKVIKLVNKF

SEQ ID NO: 37852 - protein, 632 aa, Homo sapiens; identical to SEQ ID NO: 37851

SEQ ID NO: 37853 - protein, 632 aa, Homo sapiens; identical to SEQ ID NO: 37851

SEQ ID NO: 37854 - protein, 167 aa, Homo sapiens
MSRVRDAGCVAAGIVIGAGAWYCVYKYTRGRDQTKKRMAKPKNRAVAGTGARARAGLRAGFTIDLGSGFSPPTPVRAEAEDRAQDEASALDTVGAEAVAPAASSAEAQSGAGSQAQEADGAGVGPKAESVVGAAMASAIAPPPGVTEALGAAEAPAMAGAPKVAEAP

SEQ ID NO: 37855 - protein, 62 aa, Homo sapiens
MSRVRDAGCVAAGIVIGAGAWYCVYKYTRGRDQTKKRMAKPKNRAVAGTGARARAGLRAGFT

SEQ ID NO: 37856 - protein, 165 aa, Homo sapiens
MSRVRDAGCVAAGIVIGAGAWYCVYKYTRGRDQTKKRMAKPKNRAVAGTGARARAGLRAGFTIDLGSGFSPPTPVRAEAEDRAQDEASALDTVGAEAVAPAASSAEAQSGAGSQAQEADGAGVGPKAESVVGAAMASAIAPPPGVTEALGAAEAPAMAGAPKVAE

SEQ ID NO: 37857 - protein, 105 aa, Homo sapiens
MSRVRDAGCVAAGIVIGAGAWYCVYKYTRGRDQTKKRMAKPKNRAVAGTGARARAGLRAGFTIDLGSGFSPPTPVRAEAEDRAQDEASALDTVGAEAVAPAASSA

SEQ ID NO: 37858 - protein, 93 aa, Homo sapiens
MSRVRDAGCVAAGIVIGAGAWYCVYKYTRGRDQTKKRMAKPKNRAVAGTGARARAGLRAGFTIDLGSGFSPPTPVRAEAEDRAQDEASALDTV

SEQ ID NO: 37859 - protein, 379 aa, Homo sapiens
MGYARKVGWVTAGLVIGAGACYCIYRLTRGRKQNKEKMAEGGSGDVDDAGDCSGARYNDWSDDDDDSNESKSIVWYPPWARIGTEAGTRARARARARATRARRAVQKRASPNSDDTVLSPQELQKVLCLVEMSEKPYILEAALIALGNNAAYAFNRDIIRDLGGLPIVAKILNTRDPIVKEKALIVLNNLSVNAENQRRLKVYMNQVCDDTITSRLNSSVQLAGLRLLTNMTVTNEYQHMLANSISDFFRLFSAGNEETKLQVLKLLLNLAENPAMTRELLRAQVPSSLGSLFNKKENKEVILKLLVIFENINDNFKWEENEPTQNQFGEGSLFFFLKEFQVCADKVLGIESHHDFLVKVKVGKFMAKLAEHMFPKSQE

SEQ ID NO: 37860 - protein, 379 aa, Homo sapiens; identical to SEQ ID NO: 37859

SEQ ID NO: 37861 - protein, 962 aa, Homo sapiens
MEDCNVHSAASILASVKEQEARFERLTRALEQERRHVALQLERAQQPGMVSGGMGSGQPLPMAWQQLVLQEQSPGSQASLATMPEAPDVLEETVTVEEDPGTPTSHVSIVTSEDGTTRRTETKVTKTVKTVTTRTVRQVPVGPDGLPLLDGGPPLGPFADGALDRHFLLRGGGPVATLSRAYLSSGGGFPEGPEPRDSPSYGSLSRGLGMRPPRAGPLGPGPGDGCFTLPGHREAFPVGPEPGPPGGRSLPERFQAEPYGLEDDTRSLAADDEGGPELEPDYGTATRRRPECGRGLHTRAYEDTADDGGELADERPAFPMVTAPLAQPERGSMGSLDRLVRRSPSVDSARKEPRWRDPELPEVLAMLRHPVDPVKANAAAYLQHLCFENEGVKRRVRQLRGLPLLVALLDHPRAEVRRRACGALRNLSYGRDTDNKAAIRDCGGVPALVRLLRAARDNEVRELVTGTLWNLSSYEPLKMVIIDHGLQTLTHEVIVPHSGWEREPNEDSKPRDAEWTTVFKNTSGCLRNVSSDGAEARRRLRECEGLVDALLHALQSAVGRKDTDNKSVENCVCIMRNLSYHVHKEVPGADRYQEAEPGPLGSAVGSQRRRRDDASCFGGKKAKEEWFHQGKKDGEMDRNFDTLDLPKRTEAAKGFELLYQPEVVRLYLSLLTESRNFNTLEAAAGALQNLSAGNWMWATYIRATVRKERGLPVLVELLQSETDKVVRAVAIALRNLSLDRRNKDLIGSYAMAELVRNVRNAQAPPRPGACLEEDTVVAVLNTIHEIVSDSLDNARSLLQARGVPALVALVASSQSVREAKAASHVLQTVWSYKELRGTLQKDGWTKARFQSAAATAKGPKGALSPGGFDDSTLPLVDKSLEGEKTGSRDVIPMDALGPDGYSTVDRRERRPRGASSAGEASEKEPLKLDPSRKAPPPGPSRPAVRLVDAVGDAKPQPVDSWV

SEQ ID NO: 37862 - protein, 899 aa, Homo sapiens
MPAELRQEQSPGSQASLATMPEAPDVLEETVTVEEDPGTPTSHVSIVTSEDGTTRRTETKVTKTVKTVTTRTVRQVPVGPDGLPLLDGGPPLGPFADGALDRHFLLRGGGPVATLSRAYLSSGGGFPEGPEPRDSPSYGSLSRGLGMRPPRAGPLGPGPGDGCFTLPGHREAFPVGPEPGPPGGRSLPERFQAEPYGLEDDTRSLAADDEGGPELEPDYGTATRRRPECGRGLHTRAYEDTADDGGELADERPAFPMVTAPLAQPERGSMGSLDRLVRRSPSVDSARKEPRWRDPELPEVLAMLRHPVDPVKANAAAYLQHLCFENEGVKRRVRQLRGLPLLVALLDHPRAEVRRRACGALRNLSYGRDTDNKAAIRDCGGVPALVRLLRAARDNEVRELVTGTLWNLSSYEPLKMVIIDHGLQTLTHEVIVPHSGWEREPNEDSKPRDAEWTTVFKNTSGCLRNVSSDGAEARRRLRECEGLVDALLHALQSAVGRKDTDNKSVENCVCIMRNLSYHVHKEVPGADRYQEAEPGPLGSAVGSQRRRRDDASCFGGKKAKEEWFHQGKKDGEMDRNFDTLDLPKRTEAAKGFELLYQPEVVRLYLSLLTESRNFNTLEAAAGALQNLSAGNWMWATYIRATVRKERGLPVLVELLQSETDKVVRAVAIALRNLSLDRRNKDLIGSYAMAELVRNVRNAQAPPRPGACLEEDTVVAVLNTIHEIVSDSLDNARSLLQARGVPALVALVASSQSVREAKAASHVLQTVWSYKELRGTLQKDGWTKARFQSAAATAKGPKGALSPGGFDDSTLPLVDKSLEGEKTGSRDVIPMDALGPDGYSTVDRRERRPRGASSAGEASEKEPLKLDPSRKAPPPGPSRPAVRLVDAVGDAKPQPVDSWV

SEQ ID NO: 37863 - protein, 899 aa, Homo sapiens; identical to SEQ ID NO: 37862

SEQ ID NO: 37864 - protein, 956 aa, Homo sapiens
MEDCNVHSAASILASVKEQEARFERLTRALEQERRHVALQLERAQQPGMVSGGMGSGQPLPMAWQQLVLQEQSPGSQASLATMPEAPDVLEETVTVEEDPGTPTSHVSIVTSEDGTTRRTETKVTKTVKTVTTRTVRQVPVGPDGLPLLDGGPPLGPFADGALDRHFLLRGGGPVATLSRAYLSSGGGFPEGPEPRDSPSYGSLSRGLGMRPPRAGPLGPGPGDGCFTLPGHREAFPVGPEPGPPGGRSLPERFQAEPYGLEDDTRSLAADDEGGPELEPDYGTATRRRPECGRGLHTRAYEDTADDGGELADERPAFPMVTAPLAQPERGSMGSLDRLVRRSPSVDSARKEPRWRDPELPEVLAMLRHPVDPVKANAAAYLQHLCFENEGVKRRVRQLRGLPLLVALLDHPRAEVRRRACGALRNLSYGRDTDNKAAIRDCGGVPALVRLLRAARDNEVRELVTGTLWNLSSYEPLKMVIIDHGLQTLTHEVIVPHSGWEREPNEDSKPRDAEWTTVFKNTSGCLRNVSSDGAEARRRLRECEGLVDALLHALQSAVGRKDTDNKSVENCVCIMRNLSYHVHKEVPGADRYQEAEPGPLGSAVGSQRRRRDDASCFGGKKAKGKKDGEMDRNFDTLDLPKRTEAAKGFELLYQPEVVRLYLSLLTESRNFNTLEAAAGALQNLSAGNWMWATYIRATVRKERGLPVLVELLQSETDKVVRAVAIALRNLSLDRRNKDLIGSYAMAELVRNVRNAQAPPRPGACLEEDTVVAVLNTIHEIVSDSLDNARSLLQARGVPALVALVASSQSVREAKAASHVLQTVWSYKELRGTLQKDGWTKARFQSAAATAKGPKGALSPGGFDDSTLPLVDKSLEGEKTGSRDVIPMDALGPDGYSTVDRRERRPRGASSAGEASEKEPLKLDPSRKAPPPGPSRPAVRLVDAVGDAKPQPVDSWV

SEQ ID NO: 37865 - protein, 893 aa, Homo sapiens
MPAELRQEQSPGSQASLATMPEAPDVLEETVTVEEDPGTPTSHVSIVTSEDGTTRRTETKVTKTVKTVTTRTVRQVPVGPDGLPLLDGGPPLGPFADGALDRHFLLRGGGPVATLSRAYLSSGGGFPEGPEPRDSPSYGSLSRGLGMRPPRAGPLGPGPGDGCFTLPGHREAFPVGPEPGPPGGRSLPERFQAEPYGLEDDTRSLAADDEGGPELEPDYGTATRRRPECGRGLHTRAYEDTADDGGELADERPAFPMVTAPLAQPERGSMGSLDRLVRRSPSVDSARKEPRWRDPELPEVLAMLRHPVDPVKANAAAYLQHLCFENEGVKRRVRQLRGLPLLVALLDHPRAEVRRRACGALRNLSYGRDTDNKAAIRDCGGVPALVRLLRAARDNEVRELVTGTLWNLSSYEPLKMVIIDHGLQTLTHEVIVPHSGWEREPNEDSKPRDAEWTTVFKNTSGCLRNVSSDGAEARRRLRECEGLVDALLHALQSAVGRKDTDNKSVENCVCIMRNLSYHVHKEVPGADRYQEAEPGPLGSAVGSQRRRRDDASCFGGKKAKGKKDGEMDRNFDTLDLPKRTEAAKGFELLYQPEVVRLYLSLLTESRNFNTLEAAAGALQNLSAGNWMWATYIRATVRKERGLPVLVELLQSETDKVVRAVAIALRNLSLDRRNKDLIGSYAMAELVRNVRNAQAPPRPGACLEEDTVVAVLNTIHEIVSDSLDNARSLLQARGVPALVALVASSQSVREAKAASHVLQTVWSYKELRGTLQKDGWTKARFQSAAATAKGPKGALSPGGFDDSTLPLVDKSLEGEKTGSRDVIPMDALGPDGYSTVDRRERRPRGASSAGEASEKEPLKLDPSRKAPPPGPSRPAVRLVDAVGDAKPQPVDSWV

SEQ ID NO: 37866 - protein, 376 aa, Homo sapiens
MESYDIIANQPVVIDNGSGVIKAGFAGDQIPKYCFPNYVGRPKHMRVMAGALEGDLFIGPKAEEHRGLLTIRYPMEHGVVRDWNDMERIWQYVYSKDQLQTFSEEHPVLLTEAPLNPSKNREKAAEVFFETFNVPALFISMQAVLSLYATGRTTGVVLDSGDGVTHAVPIYEGFAMPHSIMRVDIAGRDVSRYLRLLLRKEGVDFHTSAEFEVVRTIKERACYLSINPQKDEALETEKVQYTLPDGSTLDVGPARFRAPELLFQPDLVGDESEGLHEVVAFAIHKSDMDLRRTLFANIVLSGGSTLFKGFGDRLLSEVKKLAPKDIKIKISAPQERLYSTWIGGSILASLDTFKKMWVSKKEYEEDGSRAIHRKTF

SEQ ID NO: 37867 - protein, 388 aa, Homo sapiens
MSKVFKKTSSNGKLSIYLGKRDFVDHVDTVEPIDGVVLVDPEYLKCRKLFVMLTCAFRYGRDDLEVIGLTFRKDLYVQTLQVVPAESSSPQGPLTVLQERLLHKLGDNAYPFTLQMVTNLPCSVTLQPGPEDAGKPCGIDFEVKSFCAENPEETVSKRDYVRLVVRKVQFAPPEAGPGPSAQTIRRFLLSAQPLQLQAWMDREVHYHGEPISVNVSINNCTNKVIKKIKISVDQITDVVLYSLDKYTKTVFIQEFTETVAANSSFSQSFAVTPILAASCQKRGLALDGKLKHEDTNLASSTIIRPGMDKELLGILVSYKVRVNLMVSCGGILGDLTASDVGVELPLVLIHPKPSHEAASSEDIVIEEFTRKGEEESQKAVEAEGDEGS

SEQ ID NO: 37868 - protein, 388 aa, Homo sapiens [sequence omitted]

SEQ ID NO: 37869 - protein, 359 aa, Homo sapiens
MSKVFKKTSSNGKLSIYLGKRDFVDHVDTVEPIDGVVLVDPEYLKCRKLFVMLTCAFRYGRDDLEVIGLTFRKDLYVQTLQVVPAESSSPQGPLTVLQERLLHKLGDNAYPFTLQMVTNLPCSVTLQPGPEDAGKPCGIDFEVKSFCAENPEETVSKRDYVRLVVRKVQFAPPEAGPGPSAQTIRRFLLSAQPLQLQAWMDREVHYHGEPISVNVSINNCTNKVIKKIKISVDQITDVVLYSLDKYTKTVFIQEFTETVAANSSFSQSFAVTPILAASCQKRGLALDGKLKHEDTNLASSTIIRPGMDKELLGILVSYKVRVNLMVSCGGILGDLTASDVGVELPLVLIHPKPSHEAAR

SEQ ID NO: 37870 - protein, 330 aa, Homo sapiens
MGEKPGTRVFKKSSPNCKLTVYLGKRDFVDHLDKVDPVDGVVLVDPDYLKDRKVFVTLTCAFRYGREDLDVLGLSFRKDLFIATYQAFPPVPNPPRPPTRLQDRLLRKLGQHAHPFFFTIPQNLPCSVTLQPGPEDTGKACGVDFEIRAFCAKSLEEKSHKRNSVRLVIRKVQFAPEKPGPQPSAETTRHFLMSDRSLHLEASLDKELYYHGEPLNVNVHVTNNSTKTVKKIKVSVRQYADICLFSTAQYKCPVAQLEQDDQREGGCQQGGAGNPGVLQGQGEAGGVSRRGCLCGAAFCSYAPQAPRPHPPPQTPVSRSGDRCPCGHQPH

SEQ ID NO: 37871 - protein, 414 aa, Homo sapiens
MVLGKVKSLTISFDCLNDSNVPVYSSGDTVSGRVNLEVTGEIRVKSLKIHARGHAKVRWTESRNAGSNTAYTQNYTEEVEYFNHKDILIGHERDDDNSEEGFHTIHSGRHEYAFSFELPQTPLATSFEGRHGSVRYWVKAELHRPWLLPVKLKKEFTVFEHIDINTPSLLSPQAGTKEKTLCCWFCTSGPISLSAKIERKGYTPGESIQIFAEIENCSSRMVVPKAAIYQTQAFYAKGKMKEVKQLVANLRGESLSSGKTETWNGKLLKIPPVSPSILDCSIIRVEYSLMVYVDIPGAMDLFLNLPLVIGTIPLHPFGSRTSSVSSQCSMNMNWLSLSLPERPEAPPSYAEVVTEEQRRNNLAPVSACDDFERALQGPLFAYIQEFRFLPPPLYSEIDPNPDQSADDRPSCPSR

SEQ ID NO: 37872 - protein, 410 aa, Homo sapiens
MGDKGTRVFKKASPNGKLTVYLGKRDFVDHIDLVDPVDGVVLVDPEYLKERRVYVTLTCAFRYGREDLDVLGLTFRKDLFVANVQSFPPAPEDKKPLTRLQERLIKKLGEHAYPFTFEIPPNLPCSVTLQPGPEDTGKACGVDYEVKAFCAENLEEKIHKRNSVRLVIRKVQYAPERPGPQPTAETTRQFLMSDKPLHLEASLDKEIYYHGEPISVNVHVTNNTNKTVKKIKISVRQYADICLFNTAQYKCPVAMEEADDTVAPSSTFCKVYTLTPFLANNREKRGLALDGKLKHEDTNLASSTLLREGANREILGIIVSYKVKVKLVVSRGGDVAVELPFTLMHPKPKEEPPHREVPENETPVDTNLIELDTNDDDIVFEDFARQRLKGMKDDKEEEEDGTGSPQLNNR

SEQ ID NO: 37873 - protein, 418 aa, Homo sapiens
MGDKGTRVFKKASPNGKLTVYLGKRDFVDHIDLVDPVDGVVLVDPEYLKERRVYVTLTCAFRYGREDLDVLGLTFRKDLFVANVQSFPPAPEDKKPLTRLQERLIKKLGEHAYPFTFEIPPNLPCSVTLQPGPEDTGKACGVDYEVKAFCAENLEEKIHKRNSVRLVIRKVQYAPERPGPQPTAETTRQFLMSDKPLHLEASLDKEIYYHGEPISVNVHVTNNTNKTVKKIKISVRQYADICLFNTAQYKCPVAMEEADDTVAPSSTFCKVYTLTPFLANNREKRGLALDGKLKHEDTNLASSTLLREGANREILGIIVSYKVKVKLVVSRGGLLRGLCFSDVAVELPFTLMHPKPKEEPPHREVPENETPVDTNLIELDTNDDDIVFEDFARQRLKGMKDDKEEEEDGTGSPQLNNR

SEQ ID NO: 37874 - protein, 418 aa, Homo sapiens
MGDKGTRVFKKASPNGKLTVYLGKRDFVDHIDLVDPVDGVVLVDPEYLKERRVYVTLTCAFRYGREDLDVLGLTFRKDLFVANVQSFPPAPEDKKPLTRLQERLIKKLGEHAYPFTFEIPPNLPCSVTLQPGPEDTGKACGVDYEVKAFCAENLEEKIHKRNSVRLVIRKVQYAPERPGPQPTAETTRQFLMSDKPLHLEASLDKEIYYHGEPISVNVHVTNNTNKTVKKIKISVRQYADICLFNTAQYKCPVAMEEADDTVAPSSTFCKVYTLTPFLANNREKRGLALDGKLKHEDTNLASSTLLREGANREILGIIVSYKVKVKLVVSRGGLLGDLASSDVAVELPFTLMHPKPKEEPPHREVPENETPVDTNLIELDTNDDDIVFEDFARQRLKGMKDDKEEEEDGTGSPQLNNR

SEQ ID NO: 37875 - protein, 409 aa, Homo sapiens
MGEKPGTRVFKKSSPNCKLTVYLGKRDFVDHLDKVDPVDGVVLVDPDYLKDRKVFVTLTCAFRYGREDLDVLGLSFRKDLFIATYQAFPPVPNPPRPPTRLQDRLLRKLGQHAHPFFFTIPQNLPCSVTLQPGPEDTGKACGVDFEIRAFCAKSLEEKSHKRNSVRLVIRKVQFAPEKPGPQPSAETTRHFLMSDRSLHLEASLDKELYYHGEPLNVNVHVTNNSTKTVKKIKVSVRQYADICLFSTAQYKCPVAQLEQDDQVSPSSTFCKVYTITPLLSDNREKRGLALDGKLKHEDTNLASSTIVKEGANKEVLGILVSYRVKVKLVVSRGGDVSVELPFVLMHPKPHDHIPLPRPQSAAPETDVPVDTNLIEFDTNYATDDDIVFEDFARLRLKGMKDDDYDDQLC

SEQ ID NO: 37876 - protein, 394 aa, Homo sapiens
MGEKPGTRVFKKSSPNCKLTVYLGKRDFVDHLDKVDPVVFVTLTCAFRYGREDLDVLGLSFRKDLFIATYQAFPPVPNPPRPPTRLQDRLLRKLGQHAHPFFFTIPQNLPCSVTLQPGPEDTGKACGVDFEIRAFCAKSLEEKSHKRNSVRLVIRKVQFAPEKPGPQPSAETTRHFLMSDRSLHLEASLDKELYYHGEPLNVNVHVTNNSTKTVKKIKVSVRQYADICLFSTAQYKCPVAQLEQDDQVSPSSTFCKVYTITPLLSDNREKRGLALDGKLKHEDTNLASSTIVKEGANKEVLGILVSYRVKVKLVVSRGGDVSVELPFVLMHPKPHDHIPLPRPQSAAPETDVPVDTNLIEFDTNYATDDDIVFEDFARLRLKGMKDDDYDDQLC

SEQ ID NO: 37877 - protein, 421 aa, Homo sapiens
MGEKPGTRVFKKSSPNCKLTVYLGKRDFVDHLDKVDPVDGVVLVDPDYLKDRKVFVTLTCAFRYGREDLDVLGLSFRKDLFIATYQAFPPVPNPPRPPTRLQDRLLRKLGQHAHPFFFTIPQNLPCSVTLQPGPEDTGKACGVDFEIRAFCAKSLEEKSHKRNSVRLVIRKVQFAPEKPGPQPSAETTRHFLMSDRSLHLEASLDKELYYHGEPLNVNVHVTNNSTKTVKKIKVSVRQYADICLFSTAQYKCPVAQLEQDDQVSPSSTFCKVYTITPLLSDNREKRGLALDGKLKHEDTNLASSTIVKEGANKEVLGILVSYRVKVKLVVSRGGDVSVELPFVLMHPKPHDHIPLPRPQSAPTPTPPLPVPPAAPETDVPVDTNLIEFDTNYATDDDIVFEDFARLRLKGMKDDDYDDQLC

SEQ ID NO: 37878 - protein, 410 aa, Homo sapiens
AANRAGGGRAHHGGETRDQLTVYLGKRDFVDHLDKVDPVDGVVLVDPDYLKDRKVFVTLTCAFRYGREDLDVLGLSFRKDLFIATYQAFPPVPNPPRPPTRLQDRLLRKLGQHAHPFFFTIPQNLPCSVTLQPGPEDTGKACGVDFEIRAFCAKSLEEKSHKRNSVRLVIRKVQFAPEKPGPQPSAETTRHFLMSDRSLHLEASLDKELYYHGEPLNVNVHVTNNSTKTVKKIKVSVRQYADICLFSTAQYKCPVAQLEQDDQVSPSSTFCKVYTITPLLSDNREKRGLALDGKLKHEDTNLASSTIVKEGANKEVLGILVSYRVKVKLVVSRGGDVSVELPFVLMHPKPHDHIPLPRPQSAAPETDVPVDTNLIEFDTNYATDDDIVFEDFARLRLKGMKDDDYDDQLC

SEQ ID NO: 37879 - protein, 348 aa, Homo sapiens
MAAGVAGWGVEAEEFEDAPDVEPLEPTLSNIIEQRSLKWIFVGGKGGVGKTTCSCSLAVQLSKGRESVLIISTDPAHNISDAFDQKFSKVPTKVKGYDNLFAMEIDPSLGVAELPDEFFEEDNMLSMGKKMMQEAMSAFPGIDEAMSYAEVMRLVKGMNFSVVVFDTAPTGHTLRLLNFPTIVERGLGRLMQIKNQISPFISQMCNMLGLGDMNADQLASKLEETLPVIRSVSEQFKDPEQTTFICVCIAEFLSLYETERLIQELAKCKIDTHNIIVNQLVFPDPEKPCKMCEARHKIQAKYLDQMEDLYEDFHIVKLPLLPHEVRGADKVNTFSALLLEPYKPPSAQ

SEQ ID NO: 37880 - protein, 348 aa, Homo sapiens; identical to SEQ ID NO: 37879

SEQ ID NO: 37881 - protein, 375 aa, Homo sapiens
MAALRDAEIQKDVQTYYGQVLKRSADLQTNGCVTTARPVPKHIREALQNVHEEVALRYYGCGLVIPEHLENCWILDLGSGSGRDCYVLSQLVGEKGHVTGIDMTKGQVEVAEKYLDYHMEKYGFQASNVTFIHGYIEKLGEAGIKNESHDIVVSNCVINLVPDKQQVLQEAYRVLKHGGELYFSDVYTSLELPEEIRTHKVLWGECLGGALYWKELAVLAQKIGFCPPRLVTANLITIQNKELERVIGDCRFVSATFRLFKHSKTGPTKRCQVIYNGGITGHEKELMFDANFTFKEGEIVEVDEETAAILKNSRFAQDFLIRPIGEKLPTSGGCSALELKDIITDPFKLAEESDSMKSRCVPDAAGGCCGTKKSC

SEQ ID NO: 37882 - protein, 271 aa, Homo sapiens
MGNGGRSGLQQGKGNVDGVAATPTAASASCQYRCIECNQEAKELYRDYNHGVLKITICKSCQKPVDKYIEYDPVIILINAILCKAQAYRHILFNTQINIHGKLCIFCLLCEAYLRWWQLQDSNQNTAPDDLIRYAKEWDFYRMFAIAALEQTAYFIGIFTFLWVERPMTAKKKPNFILLLKALLLSSYGKLLLIPAVIWEHDYTSVCLKLIKVFVLTSNFQAIRVTLNINRKLSFLAVLSGLLLESIMVYFFQSMEWDVGSDYAIFKSQDF

SEQ ID NO: 37883 - protein, 268 aa, Homo sapiens
  VARIANT 1: note = MOD_RES - Any amino acid
XGRSGLQQGKGNVDGVAATPTAASASCQYRCIECNQEAKELYRDYNHGVLKITICKSCQKPVDKYIEYDPVIILINAILCKAQAYRHILFNTQINIHGKLCIFCLLCEAYLRWWQLQDSNQNTAPDDLIRYAKEWDFYRMFAIAALEQTAYFIGIFTFLWVERPMTAKKKPNFILLLKALLLSSYGKLLLIPAVIWEHDYTSVCLKLIKVFVLTSNFQAIRVTLNINRKLSFLAVLSGLLLESIMVYFFQSMEWDVGSDYAIFKSQDF

SEQ ID NO: 37884 - protein, 848 aa, Homo sapiens
MNSSSANITYASRKRRKPVQKTVKPIPAEGIKSNPSKRHRDRLNTELDRLASLLPFPQDVINKLDKLSVLRLSVSYLRAKSFFDVALKSSPTERNGGQDNCRAANFREGLNLQEGEFLLQALNGFVLVVTTDALVFYASSTIQDYLGFQQSDVIHQSVYELIHTEDRAEFQRQLHWALNPSQCTESGQGIEEATGLPQTVVCYNPDQIPPENSPLMERCFICRLRCLLDNSSGFLAMNFQGKLKYLHGQKKKGKDGSILPPQLALFAIATPLQPPSILEIRTKNFIFRTKHKLDFTPIGCDAKGRIVLGYTEAELCTRGSGYQFIHAADMLYCAESHIRMIKTGESGMIVFRLLTKNNRWTWVQSNARLLYKNGRPDYIIVTQRPLTDEEGTEHLRKRNTKLPFMFTTGEAVLYEATNPFPAIMDPLPLRTKNGTSGKDSATTSTLSKDSLNPSSLLAAMMQQDESIYLYPASSTSSTAPFENNFFNESMNECRNWQDNTAPMGNDTILKHEQIDQPQDVNSFAGGHPGLFQDSKNSDLYSIMKNLGIDFEDIRHMQNEKFFRNDFSGEVDFRDIDLTDEILTYVQDSLSKSPFIPSDYQQQQSLALNSSCMVQEHLHLEQQQQHHQKQVVVEPQQQLCQKMKHMQVNGMFENWNSNQFVPFNCPQQDPQQYNVFTDLHGISQEFPYKSEMDSMPYTQNFISCNQPVLPQHSKCTELDYPMGSFEPSPYPTTSSLEDFVTCLQLPENQKHGLNPQSAIITPQTCYAGAVSMYQCQPEPQHTHVGQMQYNPVLPGQQAFLNKFQNGVLNETYPAELNNINNTQTTTHLQPLHHPSEARPFPDLTSSGFL

SEQ ID NO: 37885 - protein, 848 aa, Homo sapiens; identical to SEQ ID NO: 37884

SEQ ID NO: 37886 - protein, 330 aa, Homo sapiens
MADIIARLREDGIQKRVIQEGRGELPDFQDGTKATFHYRTLHSDDEGTVLDDSRARGKPMELIIGKKFKLPVWETIVCTMREGEIAQFLCDIKHVVLYPLVAKSLRNIAVGKDPLEGQRHCCGVAQMREHSSLGHADLDALQQNPQPLIFHMEMLKVESPGTYQQDPWAMTDEEKAKAVPLIHQEGNRLYREGHVKEAAAKYYDAIACLKNLQMKEQPGSPEWIQLDQQITPLLLNYCQCKLVVEEYYEVLDHCSSILNKYDDNVKAYFKRGKAHAAVWNAQEAQADFAKVLELDPALAPVVSRELQALEARIRQKDEEDKARFRGIFSH

SEQ ID NO: 37887 - protein, 321 aa, Homo sapiens
MDAALLLNVEGVKKTILHGGTGELPNFITGSRVIFHFRTMKCDEERTVIDDSRQVGQPMHIIIGNMFKLEVWEILLTSMRVHEVAEFWCDTIVDAPSDYQRETWNLSNHEKMKAVPVLHGEGNRLFKLGRYEEASSKYQEAIICLRNLQTKEKPWEVQWLKLEKMINTLILNYCQCLLKKEEYYEVLEHTSDILRHHPGIVKAYYVRARAHAEVWNEAEAKADLQKVLELEPSMQKAVRRELRLLENRMAEKQEEERLRCRNMLSQGATQPPAEPPTEPPAQSSTEPPAEPPTAPSAELSAGPPAEPATEPPPSPGHSLQH

SEQ ID NO: 37888 - protein, 324 aa, Homo sapiens
MDAALLLNVEGVKKTILHGGTGELPNFITGSRHTGVYPILSRSLRQMAQGKDPTEWHVHTCGLANMFAYHTLGYEDLDELQKEPQPLVFVIELLQVDAPSDYQRETWNLSNHEKMKAVPVLHGEGNRLFKLGRYEEASSKYQEAIICLRNLQTKEKPWEVQWLKLEKMINTLILNYCQCLLKKEEYYEVLEHTSDILRHHPGIVKAYYVRARAHAEVWNEAEAKADLQKVLELEPSMQKAVRRELRLLENRMAEKQEEERLRCRNMLSQGATQPPAEPPTEPPAQSSTEPPAEPPTAPSAELSAGPPAEPATEPPPSPGHSLQH

SEQ ID NO: 37889 - protein, 384 aa, Homo sapiens
MDAALLLNVEGVKKTILHGGTGELPNFITGSRVIFHFRTMKCDEERTVIDDSRQVGQPMHIIIGNMFKLEVWEILLTSMRVHEVAEFWCDTIHTGVYPILSRSLRQMAQGKDPTEWHVHTCGLANMFAYHTLGYEDLDELQKEPQPLVFVIELLQVDAPSDYQRETWNLSNHEKMKAVPVLHGEGNRLFKLGRYEEASSKYQEAIICLRNLQTKEKPWEVQWLKLEKMINTLILNYCQCLLKKEEYYEVLEHTSDILRHHPGIVKAYYVRARAHAEVWNEAEAKADLQKVLELEPSMQKAVRRELRLLENRMAEKQEEERLRCRNMLSQGATQPPAEPPTEPPAQSSTEPPAEPPTAPSAELSAGPPAEPATEPPPSPGHSLQH

SEQ ID NO: 37890 - protein, 326 aa, Homo sapiens
MDAALLLNVEGVKKTILHGGTGELPNFITGSRVIFHFRTMKCDEERTVIDDSRQVGQPMHIIIGNMFKLEVWEILLTSMRVHEVAEFWCDTIHTGVYPILSRSLRQMAQGKDPTEWHVHTCGLANMFAYHTLGYEDLDELQKEPQPLVFVIELLQVDAPSDYQRETWNLSNHEKMKAVPVLHGEGNRLFKLGRYEEASSKYQEAIICLRNLQTKEKPWEVQWLKLEKMINTLILNYCQCLLKKEEYYEVLEHTSDILRHHPGIVKAYYVRARAHAEVWNEAEAKADLQKVLELEPSMQKAVRRELRLLENAWRRSRRRSGCAAGTC

SEQ ID NO: 37891 - protein, 324 aa, Homo sapiens; identical to SEQ ID NO: 37888

SEQ ID NO: 37892 - protein, 416 aa, Homo sapiens
MAATTANPEMTSDVPSLGPAIASGNSGPGIQGGGAIVQRAIKRRPGLDFDDDGEGNSKFLRCDDDQMSNDKERFARSDDEQSSADKERLARENHSEIERRRRNKMTAYITELSDMVPTCSALARKPDKLTILRMAVSHMKSLRGTGNTSTDGSYKPSFLTDQELKHLILEAADGFLFIVSCETGRVVYVSDSVTPVLNQPQSEWFGSTLYDQVHPDDVDKLREQLSTSENALTGRILDLKTGTVKKEGQQSSMRMCMGSRRSFICRMRCGSSSVDPVSVNRLSFVRNRCRNGLGSVKDGEPHFVVVHCTGYIKAWPPAGVSLPDDDPEAGQGSKFCLVAIGRLQVTSSPNCTDMSNVCQPTEFISRHNIEGIFTFVDHRCVATVGYQPQELLGKNIVEFCHPEDQQLLRDSFQQEL

SEQ ID NO: 37893 - protein, 740 aa, Homo sapiens
MYHHWVQPLPLETLDLEFKVEEPLSRGLLSGDQAGLKYLLLAFLRLDFDDDGEGNSKFLRCDDDQMSNDKERFARENHSEIERRRRNKMTAYITELSDMVPTCSALARKPDKLTILRMAVSHMKSLRGTGNTSTDGSYKPSFLTDQELKHLILEAADGFLFIVSCETGRVVYVSDSVTPVLNQPQSEWFGSTLYDQVHPDDVDKLREQLSTSENALTGRILDLKTGTVKKEGQQSSMRMCMGSRRSFICRMRCGSSSVDPVSVNRLSFVRNRCRNGLGSVKDGEPHFVVVHCTGYIKAWPPAGVSLPDDDPEAGQGSKFCLVAIGRLQVTSSPNCTDMSNVCQPTEFISRHNIEGIFTFVDHRCVATVGYQPQELLGKNIVEFCHPEDQQLLRDSFQQVVKLKGQVLSVMFRFRSKNQEWLWMRTSSFTFQNPYSDEIEYIICTNTNVKPLTYRQQQQQTELDMVPGRDGLASYNHSQVVQPVTTTGPEHSKPLEKSDGLFAQDRDPRFSEIYHNINADQSKGISSSTVPATQQLFSQGNTFPPTPRPAENFRNSGLAPPVTIVQPSASAGQMLAQISRHSNPTQGATPTWTPTTRSGFSAQVATQATAKTRTSQFGVGSFQTPSSFSSMSLPGAPTASPGAAAYPSLTNRGSNFAPETGQTAGQFQTRTAEGVGVWPQWQGQQPHHRSSSSEQHVQQPPAQQPGQPEVFQEMLSMLGDQSNSYNNEEFPDLTMFPPFSE

SEQ ID NO: 37894 - protein, 416 aa, Homo sapiens; identical to SEQ ID NO: 37892

SEQ ID NO: 37895 - protein, 774 aa, Homo sapiens
MAATTANPEMTSDVPSLGPAIASGNSGPGIQGGGAIVQRAIKRRPGLDFDDDGEGNSKFLRCDDDQMSNDKERFARENHSEIERRRRNKMTAYITELSDMVPTCSALARKPDKLTILRMAVSHMKSLRGTGNTSTDGSYKPSFLTDQELKHLILEAADGFLFIVSCETGRVVYVSDSVTPVLNQPQSEWFGSTLYDQVHPDDVDKLREQLSTSENALTGRILDLKTGTVKKEGQQSSMRMCMGSRRSFICRMRCGSSSVDPVSVNRLSFVRNRCRNGLGSVKDGEPHFVVVHCTGYIKAWPPAGVSLPDDDPEAGQGSKFCLVAIGRLQVTSSPNCTDMSNVCQPTEFISRHNIEGIFTFVDHRCVATVGYQPQELLGKNIVEFCHPEDQQLLRDSFQQVVKLKGQVLSVMFRFRSKNQEWLWMRTSSFTFQNPYSDEIEYIICTNTNVKNSSQEPRPTLSNTIQRPQLGPTANLPLEMGSGQLAPRQQQQQTELDMVPGRDGLASYNHSQVVQPVTTTGPEHSKPLEKSDGLFAQDRDPRFSEIYHNINADQSKGISSSTVPATQQLFSQGNTFPPTPRPAENFRNSGLAPPVTIVQPSASAGQMLAQISRHSNPTQGATPTWTPTTRSGFSAQQVATQATAKTRTSQFGVGSFQTPSSFSSMSLPGAPTASPGAAAYPSLTNRGSNFAPETGQTAGQFQTRTAEGVGVWPQWQGQQPHHRSSSSEQHVQQPPAQQPGQPEVFQEMLSMLGDQSNSYNNEEFPDLTMFPPFSE

SEQ ID NO: 37896 - protein, 775 aa, Homo sapiens
MTSDVPSLGPAIASGNSGPGIQGGGAIVQRAIKRRPGLDFDDDGEGNSKFLRCDDDQMSNDKERFARSDDEQSSADKERLARENHSEIERRRRNKMTAYITELSDMVPTCSALARKPDKLTILRMAVSHMKSLRGTGNTSTDGSYKPSFLTDQELKHLILEAADGFLFIVSCETGRVVYVSDSVTPVLNQPQSEWFGSTLYDQVHPDDVDKLREQLSTSENALTGRILDLKTGTVKKEGQQSSMRMCMGSRRSFICRMRCGSSSVDPVSVNRLSFVRNRCRNGLGSVKDGEPHFVVVHCTGYIKAWPPADDDPEAGQGSKFCLVAIGRLQVTSSPNCTDMSNVCQPTEFISRHNIEGIFTFVDHRCVATVGYQPQELLGKNIVEFCHPEDQQLLRDSFQQVVKLKGQVLSVMFRFRSKNQEWLWMRTSSFTFQNPYSDEIEYIICTNTNVKNSSQEPRPTLSNTIQRPQLGPTANLPLEMGSGQLAPRQQQQQTELDMVPGRDGLASYNHSQVVQPVTTTGPEHSKPLEKSDGLFAQDRDPRFSEIYHNINADQSKGISSSTVPATQQLFSQGNTFPPTPRPAENFRNSGLAPPVTIVQPSASAGQMLAQISRHSNPTQGATPTWTPTTRSGFSAQQVATQATAKTRTSQFGVGSFQTPSSFSSMSLPGAPTASPGAAAYPSLTNRGSNFAPETGQTAGQFQTRTAEGVGVWPQWQGQQPHHRSSSSEQHVQQPPAQQPGQPEVFQEMLSMLGDQSNSYNNEEFPDLTMFPPFSE

SEQ ID NO: 37897 - protein, 399 aa, Homo sapiens
MGRKSLYLLIVGILIAYYIYTPLPDNVEEPWRMMWINAHLKTIQNLATFVELLGLHHFMDSFKVVGSFDEVPPTSDENVTVTETKFNNILVRVYVPKRKSEALRRGLFYIHGGGWCVGSAALSGYDLLSRWTADRLDAVVVSTNYRLAPKYHFPIQFEDVYNALRWFLRKKVLAKYGVNPERIGISGDSAGGNLAAAVTQQLLDDPDVKIKLKIQSLIYPALQPLDVDLPSYQENSNFLFLSKSLMVRFWSEYFTTDRSLEKAMLSRQHVPVESSHLFKFVNWSSLLPERFIKGHVYNNPNYGSSELAKKYPGFLDVRAAPLLADDNKLRGLPLTYVITCQYDLLRDDGLMYVTRLRNTGVQVTHNHVEDGFHGAFSFLGLKISHRLINQYIEWLKENL

SEQ ID NO: 37898 - protein, 717 aa, Homo sapiens
MATPAAVNPPEMASDIPGSVTLPVAPMAATGQVRMAGAMPARGGKRRSGMDFDDEDGEGPSKFSRENHSEIERRRRNKMTQYITELSDMVPTCSALARKPDKLTILRMAVSHMKSMRGTGNKSTDGAYKPSFLTEQELKHLILEAADGFLFVVAAETGRVIYVSDSVTPVLNQPQSEWFGSTLYEQVHPDDVEKLREQLCTSENSMTGRILDLKTGTVKKEGQQSSMRMCMGSRRSFICRMRCGNAPLDHLPLNRITTMRKRFRNGLGPVKEGEAQYAVVHCTGYIKAWPPAGMTIPEEDADVGQGSKYCLVAIGRLQVTSSPVCMDMNGMSVPTEFLSRHNSDGIITFVDPRCISVIGYQPQDLLGKDILEFCHPEDQSHLRESFQQVVKLKGQVLSVMYRFRTKNREWMLIRTSSFTFQNPYSDEIEYIICTNTNVKQLQQQQAELEVHQRDGLSSYDLSQVPVPNLPAGVHEAGKSVEKADAIFSQERDPRFAEMFAGISASEKKMMSSASAAGTQQIYSQGSPFPSGHSGKAFSSSVVHVPGVNDIQSSSSTGQNMSQISRQLNQSQVAWTGSRPPFPGQQIPSQSSKTQSSPFGIGTSHTYPADPSSYSPLSSPATSSPSGNAYSSLANRTPGFAESGQSSGQFQGRPSEVWSQWQSQHHGQQSGEQHSHQQPGQTEVFQDMLPMPGDPTQGTGNYNIEDFADLGMFPPFSE

SEQ ID NO: 37899 - protein, 705 aa, Homo sapiens
MASDIPGSVTLPVAPMAATGQVRMAGAMPARGGKRRSGMDFDDEDGEGPSKFSRENHSEIERRRRNKMTQYITELSDMVPTCSALARKPDKLTILRMAVSHMKSMRGTGNKSTDGAYKPSFLTEQELKHLILEAADGFLFVVAAETGRVIYVSDSVTPVLNQPQSEWFGSTLYEQVHPDDVEKLREQLCTSENSMTGRILDLKTGTVKKEGQQSSMRMCMGSRRSFICRMRCGNAPLDHLPLNRITTMRKRFRNGLGPVKEGEAQYAVVHCTGYIKAWPPAGMTIPEEDADVGQGSKYCLVAIGRLQVTSSPVCMDMNGMSVPTEFLSRHNSDGIITFVDPRCISVIGYQPQDLLGKDILEFCHPEDQSHLRESFQQVVKLKGQVLSVMYRFRTKNREWMLIRTSSFTFQNPYSDEIEYIICTNTNVKQLQQQQAELEVHQRDGLSSYDLSQVPVPNLPAGVHEAGKSVEKADAIFSQERDPRFAEMFAGISASEKKMMSSASAAGTQQIYSQGSPFPSGHSGKAFSSSVVHVPGVNDIQSSSSTGQNMSQISRQLNQSQVAWTGSRPPFPGQQIPSQSSKTQSSPFGIGTSHTYPADPSSYSPLSSPATSSPSGNAYSSLANRTPGFAESGQSSGQFQGRPSEVWSQWQSQHHGQQSGEQHSHQQPGQTEVFQDMLPMPGDPRNEWWSPHSRQHFRQPISYARM

SEQ ID NO: 37900 - protein, 706 aa, Homo sapiens
MASDIPGSVTLPVAPMAATGQVRMAGAMPARGGKRRSGMDFDDEDGEGPSKFSRENHSEIERRRRNKMTQYITELSDMVPTCSALARKPDKLTILRMAVSHMKSMRGTGNKSTDGAYKPSFLTEQELKHLILEAADGFLFVVAAETGRVIYVSDSVTPVLNQPQSEWFGSTLYEQVHPDDVEKLREQLCTSENSMTGRILDLKTGTVKKEGQQSSMRMCMGSRRSFICRMRCGNAPLDHLPLNRITTMRKRFRNGLGPVKEGEAQYAVVHCTGYIKAWPPAGMTIPEEDADVGQGSKYCLVAIGRLQVTSSPVCMDMNGMSVPTEFLSRHNSDGIITFVDPRCISVIGYQPQDLLGKDILEFCHPEDQSHLRESFQQVVKLKGQVLSVMYRFRTKNREWMLIRTSSFTFQNPYSDEIEYIICTNTNVKQLQQQQAELEVHQRDGLSSYDLSQVPVPNLPAGVHEAGKSVEKADAIFSQERDPRFAEMFAGISASEKKMMSSASAAGTQQIYSQGSPFPSGHSGKAFSSSVVHVPGVNDIQSSSSTGQNMSQISRQLNQSQVAWTGSRPPFPGQQIPSQSSKTQSSPFGIGTSHTYPADPSSYSPLSSPATSSPSGNAYSSLANRTPGFAESGQSSGQFQGRPSEVWSQWQSQHHGQQSGEQHSHQQPGQTEVFQDMLPMPGDPTQGTGNYNIEDFADLGMFPPFSE

SEQ ID NO: 37901 - protein, 706 aa, Homo sapiens; identical to SEQ ID NO: 37900

SEQ ID NO: 37902 - protein, 566 aa, Homo sapiens
MATPAAVNPPEMASDIPGSVTLPVAPMAATGQVRMAGAMPARGGKRRSGMDFDDEDGEGPSKFSRENHSEIERRRRNKMTQYITELSDMVPTCSALARKPDKLTILRMAVSHMKSMRGTGNKSTDGAYKPSFLTEQELKHLILEAADGFLFVVAAETGRVIYVSDSVTPVLNQPQSEWFGSTLYEQVHPDDVEKLREQLCTSENSMTGRILDLKTGTVKKEGQQSSMRMCMGSRRSFICRMRCGNAPLDHLPLNRITTMRKRFRNGLGPVKEGEAQYAVVHCTGYIKAWPPAGMTIPEEDADVGQGSKYCLVAIGRLQVTSSPVCMDMNGMSVPTEFLSRHNSDGIITFVDPRCISVIGYQPQDLLGKDILEFCHPEDQSHLRESFQQVVKLKGQVLSVMYRFRTKNREWMLIRTSSFTFQNPYSDEIEYIICTNTNVKQLQQQQAELEVHQRDGLSSYDLSQVPVPNLPAGVHEAGKSVEKADAIFSQERDPRFAEMFAGISASEKKMMSSASAAGTQQIYSQGSPFPSGHSGKAFSSSVVHVPGVNDIQSSSSTGQNMSQISGS

SEQ ID NO: 37903 - protein, 719 aa, Homo sapiens
MPRTMIPPGECTYAGRKRRRPLQKQRPAVGAEKSNPSKRHRDRLNAELDHLASLLPFPPDIISKLDKLSVLRLSVSYLRVKSFFQVVQEQSSRQPAAGAPSPGDSCPLAGSAVLEGRLLLESLNGFALVVSAEGTIFYASATIVDYLGFHQTDVMHQNIYDYIHVDDRQDFCRQLHWAMDPPQVVFGQPPPLETGDDAILGRLLRAQEWGTGTPTEYSAFLTRCFICRVRCLLDSTSGFLARGSQAWQLRLCCPEPLMTMQFQGKLKFLFGQKKKAPSGAMLPPRLSLFCIAAPVLLPSAAEMKMRSALLRAKPRADTAATADAKVKATTSLCESELHGKPNYSAGRSSRESGVLVLREQTDAGRWAQVPARAPCLCLRGGPDLVLDPKGGSGDREEEQHRMLSRASGVTGRRETPGPTKPLPWTAGKHSEDGARPRLQPSKNDPPSLRPMPRGSCLPCPCVQGTFRNSPISHPPSPSPSAYSSRTSRPMRDVGEDQVHPPLCHFPQRSLQHQLPQPGAQRFATRGYPMEDMKLQGVPMPPGDLCGPTLLLDVSIKMEKDSGCEGAADGCVPSQVWLGASDRSHPATFPTRMHLKTEPDSRQQVYISHLGHGVRGAQPHGRATAGRSRELTPFHPAHCACLEPTDGLPQSEPPHQLCARGRGEQSCTCRAAEAAPVVKREPLDSPQWATHSQGMVPGMLPKSALATLVPPQASGCTFLP

SEQ ID NO: 37904 - protein, 701 aa, Homo sapiens
MPRTMIPPGECTYAGRKRRRPLQKQRPAVGAEKSNPSKRHRDRLNAELDHLASLLPFPPDIISKLDKLSVLRLSVSYLRVKSFFQVVQEQSSRQPAAGAPSPGDSCPLAGSAVLEGRLLLESLNGFALVVSAEGTIFYASATIVDYLGFHQTDVMHQNIYDYIHVDDRQDFCRQLHWAMDPPQVVFGQPPPLETGDDAILGRLLRAQEWGTGTPTEYSAFLTRCFICRVRCLLDSTSGFLTMQFQGKLKFLFGQKKKAPSGAMLPPRLSLFCIAAPVLLPSAAEMKMRSALLRAKPRADTAATADAKVKATTSLCESELHGKPNYSAGRSSRESGVLVLREQTDAGRWAQVPARAPCLCLRGGPDLVLDPKGGSGDREEEQHRMLSRASGVTGRRETPGPTKPLPWTAGKHSEDGARPRLQPSKNDPPSLRPMPRGSCLPCPCVQGTFRNSPISHPPSPSPSAYSSRTSRPMRDVGEDQVHPPLCHFPQRSLQHQLPQPGAQRFATRGYPMEDMKLQGVPMPPGDLCGPTLLLDVSIKMEKDSGCEGAADGCVPSQVWLGASDRSHPATFPTRMHLKTEPDSRQQVYISHLGHGVRGAQPHGRATAGRSRELTPFHPAHCACLEPTDGLPQSEPPHQLCARGRGEQSCTCRAAEAAPVVKREPLDSPQWATHSQGMVPGMLPKSALATLVPPQASGCTFLP

SEQ ID NO: 37905 - protein, 509 aa, Homo sapiens
MSMGAPRSLLLALAAGLAVARPPNIVLIFADDLGYGDLGCYGHPSSTTPNLDQLAAGGLRFTDFYVPVSLCTPSRAALLTGRLPVRMGMYPGVLVPSSRGGLPLEEVTVAEVLAARGYLTGMAGKWHLGVGPEGAFLPPHQGFHRFLGIPYSHDQGPCQNLTCFPPATPCDGGCDQGLVPIPLLANLSVEAQPPWLPGLEARYMAFAHDLMADAQRQDRPFFLYYASHHTHYPQFSGQSFAERSGRGPFGDSLMELDAAVGTLMTAIGDLGLLEETLVIFTADNGPETMRMSRGGCSGLLRCGKGTTYEGGVREPALAFWPGHIAPGVTHELASSLDLLPTLAALAGAPLPNVTLDGFDLSPLLLGTGKSPRQSLFFYPSYPDEVRGVFAVRTGKYKAHFFTQGSAHSDTTADPACHASSSLTAHEPPLLYDLSKDPGENYNLLGGVAGATPEVLQALKQLQLLKAQLDAAVTFGPSQVARGEDPALQICCHPGCTPRPACCHCPDPHA

SEQ ID NO: 37906 - protein, 509 aa, Homo sapiens; identical to SEQ ID NO: 37905

SEQ ID NO: 37907 - protein, 509 aa, Homo sapiens; identical to SEQ ID NO: 37905

SEQ ID NO: 37908 - protein, 509 aa, Homo sapiens; identical to SEQ ID NO: 37905

SEQ ID NO: 37909 - protein, 423 aa, Homo sapiens
MGMYPGVLVPSSRGGLPLEEVTVAEVLAARGYLTGMAGKWHLGVGPEGAFLPPHQGFHRFLGIPYSHDQGPCQNLTCFPPATPCDGGCDQGLVPIPLLANLSVEAQPPWLPGLEARYMAFAHDLMADAQRQDRPFFLYYASHHTHYPQFSGQSFAERSGRGPFGDSLMELDAAVGTLMTAIGDLGLLEETLVIFTADNGPETMRMSRGGCSGLLRCGKGTTYEGGVREPALAFWPGHIAPGVTHELASSLDLLPTLAALAGAPLPNVTLDGFDLSPLLLGTGKSPRQSLFFYPSYPDEVRGVFAVRTGKYKAHFFTQGSAHSDTTADPACHASSSLTAHEPPLLYDLSKDPGENYNLLGGVAGATPEVLQALKQLQLLKAQLDAAVTFGPSQVARGEDPALQICCHPGCTPRPACCHCPDPHA

SEQ ID NO: 37910 - protein, 507 aa, Homo sapiens
MGAPRSLLLALAAGLAVARPPNIVLIFADDLGYGDLGCYGHPSSTTPNLDQLAAGGLRFTDFYVPVSLCTPSRAALLTGRLPVRMGMYPGVLVPSSRGGLPLEEVTVAEVLAARGYLTGMAGKWHLGVGPEGAFLPPHQGFHRFLGIPYSHDQGPCQNLTCFPPATPCDGGCDQGLVPIPLLANLSVEAQPPWLPGLEARYMAFAHDLMADAQRQDRPFFLYYASHHTHYPQFSGQSFAERSGRGPFGDSLMELDAAVGTLMTAIGDLGLLEETLVIFTADNGPETMRMSRGGCSGLLRCGKGTTYEGGVREPALAFWPGHIAPGVTHELASSLDLLPTLAALAGAPLPNVTLDGFDLSPLLLGTGKSPRQSLFFYPSYPDEVRGVFAVRTGKYKAHFFTQGSAHSDTTADPACHASSSLTAHEPPLLYDLSKDPGENYNLLGGVAGATPEVLQALKQLQLLKAQLDAAVTFGPSQVARGEDPALQICCHPGCTPRPACCHCPDPHA

SEQ ID NO: 37911 - protein, 507 aa, Homo sapiens; identical to SEQ ID NO: 37910

SEQ ID NO: 37912 - protein, 593 aa, Homo sapiens
MRSAARRGRAAPAARDSLPVLLFLCLLLKTCEPKTANAFKPNILLIMADDLGTGDLGCYGNNTLRTPNIDQLAEEGVRLTQHLAAAPLCTPSRAAFLTGRHSFRSGMDASNGYRALQWNAGSGGLPENETTFARILQQHGYATGLIGKWHQGVNCASRGDHCHHPLNHGFDYFYGMPFTLTNDCDPGRPPEVDAALRAQLWGYTQFLALGILTLAAGQTCGFFSVSARAVTGMAGVGCLFFISWYSSFGFVRRWNCILMRNHDVTEQPMVLEKTASLMLKEAVSYIERHKHGPFLLFLSLLHVHIPLVTTSAFLGKSQHGLYGDNVEEMDWLIGKVLNAIEDNGLKNSTFTYFTSDHGGHLEARDGHSQLGGWNGIYKGGKGMGGWEGGIRVPGIFHWPGVLPAGRVIGEPTSLMDVFPTVVQLVGGEVPQDRVIDGHSLVPLLQGAEARSAHEFLFHYCGQHLHAARWHQKDSGSVWKVHYTTPQFHPEGAGACYGRGVCPCSGEGVTHHRPPLLFDLSRDPSEARPLTPDSEPLYHAVIARVGAAVSEHRQTLSPVPQQFSMSNILWKPWLQPCCGHFPFCSCHEDGDGTP

SEQ ID NO: 37913 - protein, 589 aa, Homo sapiens
MLHLHHSCLCFRSWLPAMLAVLLSLAPSASSDISASRPNILLLMADDLGIGDIGCYGNNTMRTPNIDRLAEDGVKLTQHISAASLCTPSRAAFLTGRYPVRSGMVSSIGYRVLQWTGASGGLPTNETTFAKILKEKGYATGLIGKWHLGLNCESASDHCHHPLHHGFDHFYGMPFSLMGDCARWELSEKRVNLEQKLNFLFQVLALVALTLVAGKLTHLIPVSWMPVIWSALSAVLLLASSYFVGALIVHADCFLMRNHTITEQPMCFQRTTPLILQEVASFLKRNKHGPFLLFVSFLHVHIPLITMENFLGKSLHGLYGDNVEEMDWMVGRILDTLDVEGLSNSTLIYFTSDHGGSLENQLGNTQYGGWNGIYKGGKGMGGWEGGIRVPGIFRWPGVLPAGRVIGEPTSLMDVFPTVVRLAGGEVPQDRVIDGQDLLPLLLGTAQHSDHEFLMHYCERFLHAARWHQRDRGTMWKVHFVTPVFQPEGAGACYGRKVCPCFGEKVVHHDPPLLFDLSRDPSETHILTPASEPVFYQVMERVQQAVWEHQRTLSPVPLQLDRLGNIWRPWLQPCCGPFPLCWCLREDDPQ

SEQ ID NO: 37914 - protein, 178 aa, Homo sapiens
MLHLHHSCLCFRSWLPAMLAVLLSLAPSASSDISASRPNILLLMADDLGIGDIGCYGNNTMRTPNIDRLAEDGVKLTQHISAASLCTPSRAAFLTGRYPVRSGMVSSIGYRVLQWTGASGGLPTNETTFAKILKEKGYATGLIGKWHLGLNCESASDHCHHPLHHGFDHFYGMPFSLM

SEQ ID NO: 37915 - protein, 544 aa, Homo sapiens
MSGSRERDNMLHLHHSWTPNIDRLAEDGVKLTQHISAASLCTPSRAAFLTGRYPVRSGMVSSIGYRVLQWTGASGGLPTNETTFAKILKEKGYATGLIGKWHLGLNCESASDHCHHPLHHGFDHFYGMPFSLMGDCARWELSEKRVNLEQKLNFLFQVLALVALTLVAGKLTHLIPVSWMPVIWSALSAVLLLASSYFVGALIVHADCFLMRNHTITEQPMCFQRTTPLILQEVASFLKRNKHGPFLLFVSFLHVHIPLITMENFLGKSLHGLYGDNVEEMDWMVGRILDTLDVEGLSNSTLIYFTSDHGGSLENQLGNTQYGGWNGIYKGGKGMGGWEGGIRVPGIFRWPGVLPAGRVIGEPTSLMDVFPTVVRLAGGEVPQDRVIDGQDLLPLLLGTAQHSDHEFLMHYCERFLHAARWHQRDRGTMWKVHFVTPVFQPEGAGACYGRKVCPCFGEKVVHHDPPLLFDLSRDPSETHILTPASEPVFYQVMERVQQAVWEHQRTLSPVPLQLDRLGNIWRPWLQPCCGPFPLCWCLREDDPQ

SEQ ID NO: 37916 - protein, 614 aa, Homo sapiens
MRPVINRCAPGSLDLMLPQAASEGIVFHSLQISLCFRSWLPAMLAVLLSLAPSASSDISASRPNILLLMADDLGIGDIGCYGNNTMRTPNIDRLAEDGVKLTQHISAASLCTPSRAAFLTGRYPVRSGMVSSIGYRVLQWTGASGGLPTNETTFAKILKEKGYATGLIGKWHLGLNCESASDHCHHPLHHGFDHFYGMPFSLMGDCARWELSEKRVNLEQKLNFLFQVLALVALTLVAGKLTHLIPVSWMPVIWSALSAVLLLASSYFVGALIVHADCFLMRNHTITEQPMCFQRTTPLILQEVASFLKRNKHGPFLLFVSFLHVHIPLITMENFLGKSLHGLYGDNVEEMDWMVGRILDTLDVEGLSNSTLIYFTSDHGGSLENQLGNTQYGGWNGIYKGGKGMGGWEGGIRVPGIFRWPGVLPAGRVIGEPTSLMDVFPTVVRLAGGEVPQDRVIDGQDLLPLLLGTAQHSDHEFLMHYCERFLHAARWHQRDRGTMWKVHFVTPVFQPEGAGACYGRKVCPCFGEKVVHHDPPLLFDLSRDPSETHILTPASEPVFYQVMERVQQAVWEHQRTLSPVPLQLDRLGNIWRPWLQPCCGPFPLCWCLREDDPQ

SEQ ID NO: 37917 - protein, 590 aa, Homo sapiens
MRPRRPLVFMSLVCALLNTCQAHRVHDDKPNIVLIMVDDLGIGDLGCYGNDTMRTPHIDRLAREGVRLTQHISAASLCSPSRSAFLTGRYPIRSGMVSSGNRRVIQNLAVPAGLPLNETTLAALLKKQGYSTGLIGKWHQGLNCDSRSDQCHHPYNYGFDYYYGMPFTLVDSCWPDPSRNTELAFESQLWLCVQLVAIAILTLTFGKLSGWVSVPWLLIFSMILFIFLLGYAWFSSHTSPLYWDCLLMRGHEITEQPMKAERAGSIMVKEAISFLERHSKETFLLFFSFLHVHTPLPTTDDFTGTSKHGLYGDNVEEMDSMVGKILDAIDDFGLRNNTLVYFTSDHGGHLEARRGHAQLGGWNGIYKGGKGMGGWEGGIRVPGIVRWPGKVPAGRLIKEPTSLMDILPTVASVSGGSLPQDRVIDGRDLMPLLQGNVRHSEHEFLFHYCGSYLHAVRWIPKDDSGSVWKAHYVTPVFQPPASGGCYVTSLCRCFGEQVTYHNPPLLFDLSRDPSESTPLTPATEPLHDFVIKKVANALKEHQETIVPVTYQLSELNQGRTWLKPCCGVFPFCLCDKEEEVSQPRGPNEKR

SEQ ID NO: 37918 - protein, 590 aa, Homo sapiens; identical to SEQ ID NO: 37917

SEQ ID NO: 37919 - protein, 590 aa, Homo sapiens; identical to SEQ ID NO: 37917

SEQ ID NO: 37920 - protein, 562 aa, Homo sapiens
MTRNARPNIVLLMADDLGVGDLCCYGNNSVSTPNIDRLASEGVRLTQHLAAASMCTPSRAAFLTGRYPIRSGMVSAYNLNRAFTWLGGSGGLPTNETTFAKLLQHRGYRTGLIGKWHLGLSCASRNDHCYHPLNHGFHYFYGVPFGLLSDCQASKTPELHRWLRIKLWISTVALALVPFLLLIPKFARWFSVPWKVIFVFALLAFLFFTSWYSSYGFTRRWNCILMRNHEIIQQPMKEEKVASLMLKEALAFIERYKREPFLLFFSFLHVHTPLISKKKFVGRSKYGRYGDNVEEMDWMVGKILDALDQERLANHTLVYFTSDNGGHLEPLDGAVQLGGWNGIYKGGKGMGGWEGGIRVPGIFRWPSVLEAGRVINEPTSLMDIYPTLSYIGGGILSQDRVIDGQNLMPLLEGRASHSDHEFLFHYCGVYLHTVRWHQKDCATVWKAHYVTPKFYPEGTGACYGSGICSCSGDVTYHDPPLLFDISRDPSEALPLNPDNEPLFDSVIKKMEAAIREHRRTLTPVPQQFSVFNTIWKPWLQPCCGTFPFCGCDKEDDILPMAP

SEQ ID NO: 37921 - protein, 569 aa, Homo sapiens
MHTLTGFSLVSLLSFGYLSWDWAKPSFVADGPGEAGEQPSAAPPQPPHIIFILTDDQGYHDVGYHGSDIETPTLDRLAAKGVKLENYYIQPICTPSRSQLLTGRYQIHTGLQHSIIRPQQPNCLPLDQVTLPQKLQEAGYSTHMVGKWHLGFYRKECLPTRRGFDTFLGSLTGNVDYYTYDNCDGPGVCGFDLHEGENVAWGLSGQYSTMLYAQRASHILASHSPQRPLFLYVAFQAVHTPLQSPREYLYRYRTMGNVARRKYAAMVTCMDEAVRNITWALKRYGFYNNSVIIFSSDNGGQTFSGGSNWPLRGRKGTYWEGGVRGLGFVHSPLLKRKQRTSRALMHITDWYPTLVGLAGGTTSAADGLDGYDVWPAISEGRASPRTEILHNIDPLYNHAQHGSLEGGFGIWNTAVQAAIRVGEWKLLTGDPGYGDWIPPQTLATFPGSWWNLERMASVRQAVWLFNISADPYEREDLAGQRPDVVRTLLARLAEYNRTAIPVRYPAENPRAHPDFNGGAWGPWASDEEEEEEEGRARSFSRGRRKKKCKICKLRSFFRKLNTRLMSQRI

SEQ ID NO: 37922 - protein, 86 aa, Homo sapiens
MVGKWHLGFYRKECLPTRRGFDTFLGSLTGNVDYYTYDNCDGPGVCGFDLHEGENVAWGLSGQYSTMLYAQRASHILASHSPQRPL

SEQ ID NO: 37923 - protein, 426 aa, Homo sapiens
MVGKWHLGFYRKECLPTRRGFDTFLGSLTGNVDYYTYDNCDGPGVCGFDLHEGENVAWGLSGQYSTMLYAQRASHILASHSPQRPLFLYVAFQAVHTPLQSPREYLYRYRTMGNVARRKYAAMVTCMDEAVRNITWALKRYGFYNNSVIIFSSDNGGQTFSGGSNWPLRGRKGTYWEGGVRGLGFVHSPLLKRKQRTSRALMHITDWYPTLVGLAGGTTSAADGLDGYDVWPAISEGRASPRTEILHNIDPLYNHAQHGSLEGGFGIWNTAVQAAIRVGEWKLLTGDPGYGDWIPPQTLATFPGSWWNLERMASVRQAVWLFNISADPYEREDLAGQRPDVVRTLLARLAEYNRTAIPVRYPAENPRAHPDFNGGAWGPWASDEEEEEEEGRARSFSRGRRKKKCKICKLRSFFRKLNTRLMSQRI

SEQ ID NO: 37924 - protein, 599 aa, Homo sapiens
MAPRGCAGHPPPPSPQACVCPGKMLAMGALAGFWILCLLTYGYLSWGQALEEEEEGALLAQAGEKLEPSTTSTSQPHLIFILADDQGFRDVGYHGSEIKTPTLDKLAAEGVKLENYYVQPICTPSRSQFITGKYQIHTGLQHSIIRPTQPNCLPLDNATLPQKLKEVGYSTHMVGKWHLGFYRKECMPTRRGFDTFFGSLLGSGDYYTHYKCDSPGMCGYDLYENDNAAWDYDNGIYSTQMYTQRVQQILASHNPTKPIFLYIAYQAVHSPLQAPGRYFEHYRSIININRRRYAAMLSCLDEAINNVTLALKTYGFYNNSIIIYSSDNGGQPTAGGSNWPLRGSKGTYWEGGIRAVGFVHSPLLKNKGTVCKELVHITDWYPTLISLAEGQIDEDIQLDGYDIWETISEGLRSPRVDILHNIDPIYTKAKNGSWAAGYGIWNTAIQSAIRVQHWKLLTGNPGYSDWVPPQSFSNLGPNRWHNERITLSTGKSVWLFNITADPYERVDLSNRYPGIVKKLLRRLSQFNKTAVPVRYPPKDPRSNPRLNGGVWGPWYKEETKKKKPSKNQAEKKQKKSKKKKKKQQKAVSGSTCHSGVTCG

SEQ ID NO: 37925 - protein, 596 aa, Homo sapiens
MAPRGCAGHPPPPSPQACVCPGKMLAMGALAGFWILCLLTYGYLSWGQALEEEEEGALLAQAGEKLEPSTTSTSQPHLIFILADDQGFRDVGYHGSEIKTPTLDKLAAEGVKLENYYVQPICTPSRSQFITGKYQIHTGLQHSIIRPTQPNCLPLDNATLPQKLKEVGYSTHMVGKWHLGFYRKECMPTRRGFDTFFGSLLGSGDYYTHYKCDSPGMCGYDLYENDNAAWDYDNGIYSTQMYTQRVQQILASHNPTKPIFLYIAYQAVHSPLQAPGRYFEHYRSIININRRRYAAMLSCLDEAINNVTLALKTYGFYNNSIIIYSSDNGGQPTAGGSNWPLRGSKGTYWEGGIRAVGFVHSPLLKNKGTVCKELVHITDWYPTLISLAEGQIDEDIQLDGYDIWETISEGLRSPRVDILHNIDPIYTKAKNGSWAAGYGIWNTAIQSAIRVQHWKLLTGNPGYSDWVPPQSFSNLGPNRWHNERITLSTGKSVWLFNITADPYERVDLSNRYPGIVKKLLRRLSQFNKTAVPVRYPPKDPRSNPRLNGGVWGPWYKEETKKKKPSKNQAEKKQKKSKKKKKKQQKAVSGKPANLAR

SEQ ID NO: 37926 - protein, 168 aa, Homo sapiens
MAPGQQAMGSGTLQSSQPSECSTGLLTGNPGYSDWVPPQSFSNLGPNRWHNERITLSTGKSVWLFNITADPYERVDLSNRYPGIVKKLLRRLSQFNKTAVPVRYPPKDPRSNPRLNGGVWGPWYKEETKKKKPSKNQAEKKQKKSKKKKKKQQKAVSGSTCHSGVTCG

SEQ ID NO: 37927 - protein, 536 aa, Homo sapiens
MLLLWVSVVAALALAVLAPGAGEQRRRAAKAPNVVLVVSDSFDGRLTFHPGSQVVKLPFINFMKTRGTSFLNAYTNSPICCPSRAAMWSGLFTHLTESWNNFKGLDPNYTTWMDVMERHGYRTQKFGKLDYTSGHHSISNRVEAWTRDVAFLLRQEGRPMVNLIRNRTKVRVMERDWQNTDKAVNWLRKEAINYTEPFVIYLGLNLPHPYPSPSSGENFGSSTFHTSLYWLEKVSHDAIKIPKWSPLSEMHPVDYYSSYTKNCTGRFTKKEIKNIRAFYYAMCAETDAMLGEIILALHQLDLLQKTIVIYSSDHGELAMEHRQFYKMSMYEASAHVPLLMMGPGIKAGLQVSNVVSLVDIYPTMLDIAGIPLPQNLSGYSLLPLSSETFKNEHKVKNLHPPWILSEFHGCNVNASTYMLRTNHWKYIAYSDGASILPQLFDLSSDPDELTNVAVKFPEITYSLDQKLHSIINYPKVSASVHQYNKEQFIKWKQSIGQNYSNVIANLRWHQDWQKEPRKYENAIDQWLKTHMNPRAV

SEQ ID NO: 37928 - protein, 186 aa, Homo sapiens [sequence omitted]

SEQ ID NO: 37929 - protein, 424 aa, Homo sapiens
MWGCCVCGALFEGQRLRLLRAPGDGLSSPFTVVSRKWHLGHHGSYHPNFRGFDYYFGIPYSHDMGCTDTPGYNHPPCPACPQGDGPSRNLQRDCYTDVALPLYENLNIVEQPVNLSSLAQKYAEKATQFIQRASTSGRPFLLYVALAHMHVPLPVTQLPAAPRGRSLYGAGLWEMDSLVGQIKDKVDHTVKENTFLWFTGDNGPWAQKCELAGSVGPFTGFWQTRQGGSPAKQTTWEGGHRVPALAYWPGRVPVNVTSTALLSVLDIFPTVVALAQASLPQGRRFDGVDVSEVLFGRSQPGHRVLFHPNSGAAGEFGALQTVRLERYKAFYITGGARACDGSTGPELQHKFPLIFNLEDDTAEAVPLERGGAEYQAVLPEVRKVLADVLQDIANDNISSADYTQDPSVTPCCNPYQIACRCQAA

SEQ ID NO: 37930 - protein, 525 aa, Homo sapiens
MGWLFLKVLLAGVSFSGFLYPLVDFCISGKTRGQKPNFVIILADDMGWGDLGANWAETKDTANLDKMASEGMRFVDFHAAASTCSPSRASLLTGRLGLRNGVTRNFAVTSVGGLPLNETTLAEVLQQAGYVTGIIGKWHLGHHGSYHPNFRGFDYYFGIPYSHDMGCTDTPGYNHPPCPACPQGDGPSRNLQRDCYTDVALPLYENLNIVEQPVNLSSLAQKYAEKATQFIQRASTSGRPFLLYVALAHMHVPLPVTQLPAAPRGRSLYGAGLWEMDSLVGQIKDKVDHTVKENTFLWFTGDNGPWAQKCELAGSVGPFTGFWQTRQGGSPAKQTTWEGGHRVPALAYWPGRVPVNVTSTALLSVLDIFPTVVALAQASLPQGRRFDGVDVSEVLFGRSQPGHRVLFHPNSGAAGEFGALQTVRLERYKAFYITGGARACDGSTGPELQHKFPLIFNLEDDTAEAVPLERGGAEYQAVLPEVRKVLADVLQDIANDNISSADYTQDPSVTPCCNPYQIACRCQAA

SEQ ID NO: 37931 - protein, 204 aa, Homo sapiens
MAKVQVNNVVVLDNPSPFYNPFQFEITFECIEDLSEDLEWKIIYVGSAESEEYDQVLDSVLVGPVPAGRHMFVFQADAPNPGLIPDADAVGVTVVLITCTYRGQEFIRVGYYVNNEYTETELRENPPVKPDFSKLQRNILASNPRVTRFHINWEDNTEKLEDAESSNPNLQSLLSTDALPSASKGWSTSENSLNVMLESHMDCM

SEQ ID NO: 37932 - protein, 202 aa, Homo sapiens
MAKVSVLNVAVLENPSPFHSPFRFEISFECSEALADDLEWKIIYVGSAESEEFDQILDSVLVGPVPAGRHMFVFQADAPNPSLIPETDAVGVTVVLITCTYHGQEFIRVGYYVNNEYLNPELRENPPMKPDFSQLQRNILASNPRVTRFHINWDNNMDRLEAIETQDPSLGCGLPLNCTPIKGLGLPGCIPGLLPENSMDCI

SEQ ID NO: 37933 - protein, 501 aa, Homo sapiens
MDTQAGSVDEENGRQLGEVELQCGICTKWFTADTFGIDTSSCLPFMTNYSFHCNVCHHSGNTYFLRKQANLKEMCLSALANLTWQSRTQDEHPKTMFSKDKDIIPFIDKYWECMTTRQRPGKMTWPNNIVKTMSKERDVFLVKEHPDPGSKDPEEDYPKFGLLDQDLSNIGPAYDNQKQSSAVSTSGNLNGGIAAGSSGKGRGAKRKQQDGGTTGTTKKARSDPLFSAQRLPPHGYPLEHPFNKDGYRYILAEPDPHAPDPEKLELDCWAGKPIPGDLYRACLYERVLLALHDRAPQLKISDDRLTVVGEKGYSMVRASHGVRKGAWYFEITVDEMPPDTAARLGWSQPLGNLQAPLGYDKFSYSWRSKKGTKFHQSIGKHYSSGYGQGDVLGFYINLPEDTETAKSLPDTYKDKALIKFKSYLYFEEKDFVDKAEKSLKQTPHSEVSINFGPCFKYPPKDLTYRPMSDMGWGAVVEHTLADVLYHVETEVDGRRSPPWEP

SEQ ID NO: 37934 - protein, 628 aa, Homo sapiens
MAAAGAGPGQEAGAGPGPGAVANATGAEEGEMKPVAAGAAAPPGEGISAAPTVEPSSGEAEGGEANLVDVSGGLETESSNGKDTLEGAGDTSEVMDTQAGSVDEENGRQLGEVELQCGICTKWFTADTFGIDTSSCLPFMTNYSFHCNVCHHSGNTYFLRKQANLKEMCLSALANLTWQSRTQDEHPKTMFSKDKDIIPFIDKYWECMTTRQRPGKMTWPNNIVKTMSKERDVFLVKEHPDPGSKDPEEDYPKFGLLDQDLSNIGPAYDNQKQSSAVSTSGNLNGGIAAGSSGKGRGAKRKQQDGGTTGTTKKARSDPLFSAQRLPPHGYPLEHPFNKDGYRYILAEPDPHAPDPEKLELDCWAGKPIPGDLYRACLYERVLLALHDRAPQLKISDDRLTVVGEKGYSMVRASHGVRKGAWYFEITVDEMPPDTAARLGWSQPLGNLQAPLGYDKFSYSWRSKKGTKFHQSIGKHYSSGYGQGDVLGFYINLPEDTETAKSLPDTYKDKALIKFKSYLYFEEKDFVDKAEKSLKQTPHSEIIFYKNGVNQGVAYKDIFEGVYFPAISLYKSCTVSINFGPCFKYPPKDLTYRPMSDMGWGAVVEHTLADVLYHVETEVDGRRSPPWEP

SEQ ID NO: 37935 - protein, 534 aa, Homo sapiens
MDTQAGSVDEENGRQLGEVELQCGICTKWFTADTFGIDTSSCLPFMTNYSFHCNVCHHSGNTYFLRKQANLKEMCLSALANLTWQSRTQDEHPKTMFSKDKDIIPFIDKYWECMTTRQRPGKMTWPNNIVKTMSKERDVFLVKEHPDPGSKDPEEDYPKFGLLDQDLSNIGPAYDNQKQSSAVSTSGNLNGGIAAGSSGKGRGAKRKQQDGGTTGTTKKARSDPLFSAQRLPPHGYPLEHPFNKDGYRYILAEPDPHAPDPEKLELDCWAGKPIPGDLYRACLYERVLLALHDRAPQLKISDDRLTVVGEKGYSMVRASHGVRKGAWYFEITVDEMPPDTAARLGWSQPLGNLQAPLGYDKFSYSWRSKKGTKFHQSIGKHYSSGYGQGDVLGFYINLPEDTETAKSLPDTYKDKALIKFKSYLYFEEKDFVDKAEKSLKQTPHSEIIFYKNGVNQGVAYKDIFEGVYFPAISLYKSCTVSINFGPCFKYPPKDLTYRPMSDMGWGAVVEHTLADVLYHVETEVDGRRSPPWEP

SEQ ID NO: 37936 - protein, 501 aa, Homo sapiens; identical to SEQ ID NO: 37933

SEQ ID NO: 37937 - protein, 489 aa, Homo sapiens
MTNYSFHCNVCHHSGNTYFLRKQANLKEMCLSALANLTWQSRTQDEHPKTMFSKDKDIIPFIDKYWECMTTRQRPGKMTWPNNIVKTMSKERDVFLVKEHPDPGSKDPEEDYPKFGLLDQDLSNIGPAYDNQKQSSAVSTSGNLNGGIAAGSSGKGRGAKRKQQDGGTTGTTKKARSDPLFSAQRLPPHGYPLEHPFNKDGYRYILAEPDPHAPDPEKLELDCWAGKPIPGDLYRACLYERVLLALHDRAPQLKISDDRLTVVGEKGYSMVRASHGVRKGAWYFEITVDEMPPDTAARLGWSQPLGNLQAPLGYDKFSYSWRSKKGTKFHQSIGKHYSSGYGQGDVLGFYINLPEDTETAKSLPDTYKDKALIKFKSYLYFEEKDFVDKAEKSLKQTPHSEIIFYKNGVNQGVAYKDIFEGVYFPAISLYKSCTVSINFGPCFKYPPKDLTYRPMSDMGWGAVVEHTLADVLYHVETEVDGRRSPPWEP

SEQ ID NO: 37938 - protein, 291 aa, Homo sapiens
MTKEYQDLQHLDNEESDHHQLRKGPPPPQPLLQRLCSGPRLLLLSLGLSLLLLVVVCVIGSQNSQLQEELRGLRETFSNFTASTEAQVKGLSTQGGNVGRKMKSLESQLEKQQKDLSEDHSSLLLHVKQFVSDLRSLSCQMAALQGNGSERTCCPVNWVEHERSCYWFSRSGKAWADADNYCRLEDAHLVVVTSWEEQKFVQHHIGPVNTWMGLHDQNGPWKWVDGTDYETGFKNWRPEQPDDWYGHGLGGGEDCAHFTDDGRWNDDVCQRPYRWVCETELDKASQEPPLL

SEQ ID NO: 37939 - protein, 252 aa, Homo sapiens
MTKEYQDLQHLDNEESDHHQLRKDSQLQEELRGLRETFSNFTASTEAQVKGLSTQGGNVGRKMKSLESQLEKQQKDLSEDHSSLLLHVKQFVSDLRSLSCQMAALQGNGSERTCCPVNWVEHERSCYWFSRSGKAWADADNYCRLEDAHLVVVTSWEEQKFVQHHIGPVNTWMGLHDQNGPWKWVDGTDYETGFKNWRPEQPDDWYGHGLGGGEDCAHFTDDGRWNDDVCQRPYRWVCETELDKASQEPPLL

SEQ ID NO: 37940 - protein, 252 aa, Homo sapiens; identical to SEQ ID NO: 37939

SEQ ID NO: 37941 - protein, 1892 aa, Homo sapiens
MANRRVGRGCWEVSPTERRPPAGLRGPAAEEEASSPPVLSLSHFCRSPFLCFGDVLLGASRTLSLALDNPNEEVAEVKISHFPAADLGFSVSQRCFVLQPKEKIVISVNWTPLKEGRVREIMTFLVNDVLKHQAILLGNAEEQKKKKRSLWDTIKKKKISASTSHNRRVSNIQNVNKTFSVSQKVDRVRSPLQACENLAMNEGGPPTENNSLILEENKIPISPISPAFNECHGATCLPLSVRRSTTYSSLHASENRELLNVHSANVSKVSFNEKAVTETSFNSVNVNGQRGENSKLSLTPNCSSTLNITQSQIHFLSPDSFVNNSHGANNELELVTCLSSDMFMKDNSQPVHLESTIAHEIYQKILSPDSFIKDNYGLNQDLESESVNPILSPNQFLKDNMAYMCTSQQTCKVPLSNENSQVPQSPEDWRKSEVSPRIPECQGSKSPKAIFEELVEMKSNYYSFIKQNNPKFSAVQDISSHSHNKQPKRRPILSATVTKRKATCTRENQTEINKPKAKRCLNSAVGEHEKVINNQKEKEDFHSYLPIIDPILSKSKSYKNEVTPSSTTASVARKRKSDGSMEDANVRVAITEHTEVREIKRIHFSPSEPKTSAVKKTKNVTTPISKRISNREKLNLKKKTDLSIFRTPISKTNKRTKPIIAVAQSSLTFIKPLKTDIPRHPMPFAAKNMFYDERWKEKQEQGFTWWLNFILTPDDFTVKTNISEVNAATLLLGIENQHKISVPRAPTKEEMSLRAYTARCRLNRLRRAACRLFTSEKMVKAIKKLEIEIEARRLIVRKDRHLWKDVGERQKVLNWLLSYNPLWLRIGLETTYGELISLEDNSDVTGLAMFILNRLLWNPDIAAEYRHPTVPHLYRDGHEEALSKFTLKKLLLLVCFLDYAKISRLIDHDPCLFCKDAEFKASKEILLAFSRDFLSGEGDLSRHLGLLGLPVNHVQTPFDEFDFAVTNLAVDLQCGVRLVRTMELLTQNWDLSKKLRIPAISRLQKMHNVDIVLQVLKSRGIELSDEHGNTILSKDIVDRHREKTLRLLWKIAFAFQVDISLNLDQLKEEIAFLKHTKSIKKTISLLSCHSDDLINKKKGKRDSGSFEQYSENIKLLMDWVNAVCAFYNKKVENFTVSFSDGRVLCYLIHHYHPCYVPFDAICQRTTQTVECTQTGSVVLNSSSESDDSSLDMSLKAFDHENTSELYKELLENEKKNFHLVRSAVRDLGGIPAMINHSDMSNTIPDEKVVITYLSFLCARLLDLRKEIRAARLIQTTWRKYKLKTDLKRHQEREKAARIIQLAVINFLAKQRLRKRVNAALVIQKYWRRVLAQRKLLMLKKEKLEKVQNKAASLIQAMWRRYRAKKYLCKVKAACKIQAWYRCWRAHKEYLAILKAVKIIQGCFYTKLERTRFLNVRASAIIIQRKWRAILPAKIAHEHFLMIKRHRAACLIQAHYRGYKGRQVFLRQKSAALIIQKYIRAREAGKHERIKYIEFKKSTVILQALVRGWLVRKRFLEQRAKIRLLHFTAAAYYHLNAVRIQRAYKLYLAVKNANKQVNSVICIQRWFRARLQEKRFIQKYHSIKKIEHEGQECLSQRNRAASVIQKAVRHFLLRKKQEKFTSGIIKIQALWRGYSWRKKNDCTKIKAIRLSLQVVNREIREENKLYKRTALALHYLLTYKHLSAILEALKHLEVVTRLSPLCCENMAQSGAISKIFVLIRSCNRSIPCMEVIRYAVQVLLNVSKYEKTTSAVYDVENCIDILLELLQIYREKPGNKVADKGGSIFTKTCCLLAILLKTTNRASDVRSRSKVVDRIYSLYKLTAHKHKMNTERILYKQKKNSSISIPFIPETPVRTRIVSRLKPDWVLRRDNMEEITNPLQAIQMVMDTLGIPY

SEQ ID NO: 37942 - protein, 1389 aa, Homo sapiens
MANRRVGRGCWEVSPTERRPPAGLRGPAAEEEASSPPVLSLSHFCRSPFLCFGDVLLGASRTLSLALDNPNEEVAEVKISHFPAADLGFSVSQRCFVLQPKEKIVISVNWTPLKEGRVREIMTFLVNDVLKHQAILLGNAEEQKKKKRSLWDTIKKKKISASTSHNRRVSNIQNVNKTFSVSQKVDRRYRQQTYFNKLKKITKTVQQRYWAMKERNIQFQRYNKLRHSVIYIQAIFRGKKARRHLKMMHIAATLIQRRFRTLMMRRRFLSLKKTAILIQRKYRAHLCTKHHLQFLQVQNAVIKIQSSYRRWMIRKRMREMHRAATFIQSTFRMHRLHMRYQALKQASVVIQQQYQANRAAKLQRQHYLRQRHSAVILQAAFRGMKTRRHLKSMHSSATLIQSRFRSLLVRRRFISLKKATIFVQRKYRATICAKHKLYQFLHLRKAAITIQSSYRRLMVKKKLQEMQRAAVLIQATFRMYRTYITFQTWKHASILIQQHYRTYRAAKLQRENYIRQWHSAVVIQAAYKGMKARQLLREKHKASIVIQSTYRMYRQYCFYQKLQWATKIIQEKYRANKKKQKVFQHNELKKETCVQAGFQDMNIKKQIQEQHQAAIIIQKHCKAFKIRKHYLHLRATVVSIQRRYRKLTAVRTQAVICIQSYYRGFKVRKDIQNMHRAATLIQSFYRMHRAKVDYETKKTAIVVIQNYYRLYVRVKTERKNFLAVQKSVRTIQAAFRGMKVRQKLKNVSEEKMAAIVNQSALCCYRSKTQYEAVQSEGVMIQEWYKASGLACSQEAEYHSQSRAAVTIQKAFCRMVTRKLETQKCAALRIQFFLQMAVYRRRFVQQKRAAITLQHYFRTWQTRKQFLLYRKAAVVLQNHYRAFLSAKHQRQVYLQIRSSVIIIQARSKGFIQKRKFQEIKNSTIKIQAMWRRYRAKKYLCKVKAACKIQAWYRCWRAHKEYLAILKAVKIIQGCFYTKLERTRFLNVRASAIIIQRKWRAILPAKIAHEHFLMIKRHRAACLIQAHYRGYKGRQVFLRQKSAALIIQKYIRAREAGKHERIKYIEFKKSTVILQALVRGWLVRKRFLEQRAKIRLLHFTAAAYYHLNAVRIQRAYKLYLAVKNANKQVNSVICIQRWFRARLQEKRFIQKYHSIKKIEHEGQECLSQRNRAASVIQKAVRHFLLRKKQEKFTSGIIKIQALWRGYSWRKKNDCTKIKAIRLSLQVVNREIREENKLYKRTALALHYLLTYKHLSAILEALKHLEVVTRLSPLCCENMAQSGAISKIFVLIRSCNRSIPCMEVIRYAVQVLLNVSKYEKTTSAVYDVENCIDILLELLQIYREKPGNKVADKGGSIFTKTCCLLAILLKTTNRASVSISQLPFFKIIFLWS

SEQ ID NO: 37943 - protein, 1142 aa, Homo sapiens
MSLRAYTARCRLNRLRRAACRLFTSEKMVKAIKKLEIEIEARRLIVRKDRHLWKDVGERQKVLNWLLSYNPLWLRIGLETTYGELISLEDNSDVTGLAMFILNRLLWNPDIAAEYRHPTVPHLYRDGHEEALSKFTLKKLLLLVCFLDYAKISRLIDHDPCLFCKDAEFKASKEILLAFSRDFLSGEGDLSRHLGLLGLPVNHVQTPFDEFDFAVTNLAVDLQCGVRLVRTMELLTQNWDLSKKLRIPAISRLQKMHNVDIVLQVLKSRGIELSDEHGNTILSKDIVDRHREKTLRLLWKIAFAFQVDISLNLDQLKEEIAFLKHTKSIKKTISLLSCHSDDLINKKKGKRDSGSFEQYSENIKLLMDWVNAVCAFYNKKVENFTVSFSDGRVLCYLIHHYHPCYVPFDAICQRTTQTVECTQTGSVVLNSSSESDDSSLDMSLKAFDHENTSELYKELLENEKKNFHLVRSAVRDLGGIPAMINHSDMSNTIPDEKVVITYLSFLCARLLDLRKEIRAARLIQTTWRKYKLKTDLKRHQEREKAARIIQLAVINFLAKQRLRKRVNAALVIQKYWRRVLAQRKLLMLKKEKLEKVQNKAASLIQAMWRRYRAKKYLCKVKAACKIQAWYRCWRAHKEYLAILKAVKIIQGCFYTKLERTRFLNVRASAIIIQRKWRAILPAKIAHEHFLMIKRHRAACLIQAHYRGYKGRQVFLRQKSAALIIQKYIRAREAGKHERIKYIEFKKSTVILQALVRGWLVRKRFLEQRAKIRLLHFTAAAYYHLNAVRIQRAYKLYLAVKNANKQVNSVICIQRWFRARLQEKRFIQKYHSIKKIEHEGQECLSQRNRAASVIQKAVRHFLLRKKQEKFTSGIIKIQALWRGYSWRKKNDCTKIKAIRLSLQVVNREIREENKLYKRTALALHYLLTYKHLSAILEALKHLEVVTRLSPLCCENMAQSGAISKIFVLIRSCNRSIPCMEVIRYAVQVLLNVSKYEKTTSAVYDVENCIDILLELLQIYREKPGNKVADKGGSIFTKTCCLLAILLKTTNRASDVRSRSKVVDRIYSLYKLTAHKHKMNTERILYKQKKNSSISIPFIPETPVRTRIVSRLKPDWVLRRDNMEEITNPLQAIQMVMDTLGIPY

SEQ ID NO: 37944 - protein, 3477 aa, Homo sapiens
MANRRVGRGCWEVSPTERRPPAGLRGPAAEEEASSPPVLSLSHFCRSPFLCFGDVLLGASRTLSLALDNPNEEVAEVKISHFPAADLGFSVSQRCFVLQPKEKIVISVNWTPLKEGRVREIMTFLVNDVLKHQAILLGNAEEQKKKKRSLWDTIKKKKISASTSHNRRVSNIQNVNKTFSVSQKVDRVRSPLQACENLAMNEGGPPTENNSLILEENKIPISPISPAFNECHGATCLPLSVRRSTTYSSLHASENRELLNVHSANVSKVSFNEKAVTETSFNSVNVNGQRGENSKLSLTPNCSSTLNITQSQIHFLSPDSFVNNSHGANNELELVTCLSSDMFMKDNSQPVHLESTIAHEIYQKILSPDSFIKDNYGLNQDLESESVNPILSPNQFLKDNMAYMCTSQQTCKVPLSNENSQVPQSPEDWRKSEVSPRIPECQGSKSPKAIFEELVEMKSNYYSFIKQNNPKFSAVQDISSHSHNKQPKRRPILSATVTKRKATCTRENQTEINKPKAKRCLNSAVGEHEKVINNQKEKEDFHSYLPIIDPILSKSKSYKNEVTPSSTTASVARKRKSDGSMEDANVRVAITEHTEVREIKRIHFSPSEPKTSAVKKTKNVTTPISKRISNREKLNLKKKTDLSIFRTPISKTNKRTKPIIAVAQSSLTFIKPLKTDIPRHPMPFAAKNMFYDERWKEKQEQGFTWWLNFILTPDDFTVKTNISEVNAATLLLGIENQHKISVPRAPTKEEMSLRAYTARCRLNRLRRAACRLFTSEKMVKAIKKLEIEIEARRLIVRKDRHLWKDVGERQKVLNWLLSYNPLWLRIGLETTYGELISLEDNSDVTGLAMFILNRLLWNPDIAAEYRHPTVPHLYRDGHEEALSKFTLKKLLLLVCFLDYAKISRLIDHDPCLFCKDAEFKASKEILLAFSRDFLSGEGDLSRHLGLLGLPVNHVQTPFDEFDFAVTNLAVDLQCGVRLVRTMELLTQNWDLSKKLRIPAISRLQKMHNVDIVLQVLKSRGIELSDEHGNTILSKDIVDRHREKTLRLLWKIAFAFQVDISLNLDQLKEEIAFLKHTKSIKKTISLLSCHSDDLINKKKGKRDSGSFEQYSENIKLLMDWVNAVCAFYNKKVENFTVSFSDGRVLCYLIHHYHPCYVPFDAICQRTTQTVECTQTGSVVLNSSSESDDSSLDMSLKAFDHENTSELYKELLENEKKNFHLVRSAVRDLGGIPAMINHSDMSNTIPDEKVVITYLSFLCARLLDLRKEIRAARLIQTTWRKYKLKTDLKRHQEREKAARIIQLAVINFLAKQRLRKRVNAALVIQKYWRRVLAQRKLLMLKKEKLEKVQNKAASLIQGYWRRYSTRQRFLKLKYYSIILQSRIRMIIAVTSYKRYLWATVTIQRHWRAYLRRKQDQQRYEMLKSSTLIIQSMFRKWKQRKMQSQVKATVILQRAFREWHLRKQAKEENSAIIIQSWYRMHKELRKYIYIRSCVVIIQKRFRCFQAQKLYKRRKESILTIQKYYKAYLKGKIERTNYLQKRAAAIQLQAAFRRLKAHNLCRQIRAACVIQSYWRMRQDRVRFLNLKKTIIKFQAHVRKHQQRQKYKKMKKAAVIIQTHFRAYIFAMKVLASYQKTRSAVIVLQSAYRGMQARKMYIHILTSVIKIQSYYRAYVSKKEFLSLKNATIKLQSTVKMKQTRKQYLHLRAAALFIQQCYRSKKIAAQKREEYMQMRESCIKLQAFVRGYLVRKQMRLQRKAVISLQSYFRMRKARQYYLKMYKAIIVIQNYYHAYKAQVNQRKNFLQVKKAATCLQAAYRGYKVRQLIKQQSIAALKIQSAFRGYNKRVKYQSVLQSIIKIQRWYRAYKTLHDTRTHFLKTKAAVISLQSAYRGWKVRKQIRREHQAALKIQSAFRMAKAQKQFRLFKTAALVIQQNFRAWTAGRKQCMEYIELRHAVLVLQSMWKGKTLRRQLQRQHKCAIIIQSYYRMHVQQKKWKIMKKAALLIQKYYRAYSIGREQNHLYLKTKAAVVTLQSAYRGMKVRKRIKDCNKAAVTIQSKYRAYKTKKKYATYRASAIIIQRWYRGIKITNHQHKEYLNLKKTAIKIQSVYRGIRVRRHIQHMHRAATFIKAMFKMHQSRISYHTMRKAAIVIQVRCRAYYQGKMQREKYLTILKAVKVLQASFRGVRVRRTLRKMQTAATLIQSNYRRYRQQTYFNKLKKITKTVQQRYWAMKERNIQFQRYNKLRHSVIYIQAIFRGKKARRHLKMMHIAATLIQRRFRTLMMRRRFLSLKKTAILIQRKYRAHLCTKHHLQFLQVQNAVIKIQSSYRRWMIRKRMREMHRAATFIQSTFRMHRLHMRYQALKQASVVIQQQYQANRAAKLQRQHYLRQRHSAVILQAAFRGMKTRRHLKSMHSSATLIQSRFRSLLVRRRFISLKKATIFVQRKYRATICAKHKLYQFLHLRKAAITIQSSYRRLMVKKKLQEMQRAAVLIQATFRMYRTYITFQTWKHASILIQQHYRTYRAAKLQRENYIRQWHSAVVIQAAYKGMKARQLLREKHKASIVIQSTYRMYRQYCFYQKLQWATKIIQEKYRANKKKQKVFQHNELKKETCVQAGFQDMNIKKQIQEQHQAAIIIQKHCKAFKIRKHYLHLRATVVSIQRRYRKLTAVRTQAVICIQSYYRGFKVRKDIQNMHRAATLIQSFYRMHRAKVDYETKKTAIVVIQNYYRLYVRVKTERKNFLAVQKSVRTIQAAFRGMKVRQKLKNVSEEKMAAIVNQSALCCYRSKTQYEAVQSEGVMIQEWYKASGLACSQEAEYHSQSRAAVTIQKAFCRMVTRKLETQKCAALRIQFFLQMAVYRRRFVQQKRAAITLQHYFRTWQTRKQFLLYRKAAVVLQNHYRAFLSAKHQRQVYLQIRSSVIIIQARSKGFIQKRKFQEIKNSTIKIQAMWRRYRAKKYLCKVKAACKIQAWYRCWRAHKEYLAILKAVKIIQGCFYTKLERTRFLNVRASAIIIQRKWRAILPAKIAHEHFLMIKRHRAACLIQAHYRGYKGRQVFLRQKSAALIIQKYIRAREAGKHERIKYIEFKKSTVILQALVRGWLVRKRFLEQRAKIRLLHFTAAAYYHLNAVRIQRAYKLYLAVKNANKQVNSVICIQRWFRARLQEKRFIQKYHSIKKIEHEGQECLSQRNRAASVIQKAVRHFLLRKKQEKFTSGIIKIQALWRGYSWRKKNDCTKIKAIRLSLQVVNREIREENKLYKRTALALHYLLTYKHLSAILEALKHLEVVTRLSPLCCENMAQSGAISKIFVLIRSCNRSIPCMEVIRYAVQVLLNVSKYEKTTSAVYDVENCIDILLELLQIYREKPGNKVADKGGSIFTKTCCLLAILLKTTNRASDVRSRSKVVDRIYSLYKLTAHKHKMNTERILYKQKKNSSISIPFIPETPVRTRIVSRLKPDWVLRRDNMEEITNPLQAIQMVMDTLGIPY

SEQ ID NO: 37945 - protein, 561 aa, Homo sapiens
MCGIWALFGSDDCLSVQCLSAMKIAHRGPDAFRFENVNGYTNCCFGFHRLAVVDPLFGMQPIRVKKYPYLWLCYNGEIYNHKKMQQHFEFEYQTKVDGEIILHLYDKGGIEQTICMLDGVFAFVLLDTANKKVFLGRDTYGVRPLFKAMTEDGFLAVCSEAKGLVTLKHSATPFLKVEPFLPGHYEVLDLKPNGKVASVEMVKYHHCRDVPLHALYDNVEKLFPGFEIETVKNNLRILFNNAVKKRLMTDRRIGCLLSGGLDSSLVAATLLKQLKEAQVQYPLQTFAIGMEDSPDLLAARKVADHIGSEHYEVLFNSEEGIQALDEVIFSLETYDITTVRASVGMYLISKYIRKNTDSVVIFSGEGSDELTQGYIYFHKAPSPEKAEEESERLLRELYLFDVLRADRTTAAHGLELRVPFLDHRFSSYYLSLPPEMRIPKNGIEKHLLRETFEDSNLIPKEILWRPKEAFSDGITSVKNSWFKILQEYVEHQVDDAMMANAAQKFPFNTPKTKEGYYYRQVFERHYPGRADWLSHYWMPKWINATDPSARTLTHYKSAVKA

SEQ ID NO: 37946 - protein, 561 aa, Homo sapiens; identical to SEQ ID NO: 37945

SEQ ID NO: 37947 - protein, 561 aa, Homo sapiens; identical to SEQ ID NO: 37945

SEQ ID NO: 37948 - protein, 28 aa, Homo sapiens
MCGIWALFGSDDCLSVQCLSAMKIAHRG

SEQ ID NO: 37949 - protein, 162 aa, Homo sapiens
MCGIWALFGSDDCLSVQCLSAMKIAHRGPDAFRFENVNGYTNCCFGFHRLAVVDPLFGMQPIRVKKYPYLWLCYNGEIYNHKKMQQHFEFEYQTKVDGEIILHLYDKGGIEQTICMLDGVFAFVLLDTANKKVFLGRDTYGVRPLFKAMTEDGFLAVCSEAK

SEQ ID NO: 37950 - protein, 215 aa, Homo sapiens
MCGIWALFGSDDCLSVQCLSAMKIAHRGPDAFRFENVNGYTNCCFGFHRLAVVDPLFGMQPIRVKKYPYLWLCYNGEIYNHKKMQQHFEFEYQTKVDGEIILHLYDKGGIEQTICMLDGVFAFVLLDTANKKVFLGRDTYGVRPLFKAMTEDGFLAVCSEAKGLVTLKHSATPFLKVEPFLPGHYEVLDLKPNGKVASVEMVKYHHCRDVPLHAL

SEQ ID NO: 37951 - protein, 119 aa, Homo sapiens
MCGIWALFGSDDCLSVQCLSAMKIAHRGPDAFRFENVNGYTNCCFGFHRLAVVDPLFGMQPIRVKKYPYLWLCYNGEIYNHKKMQQHFEFEYQTKVDGEIILHLYDKGGIEQTICMLDG

SEQ ID NO: 37952 - protein, 33 aa, Homo sapiens
MCGIWALFGSDDCLSVQCLSAMKIAHRGPDAFR

SEQ ID NO: 37953 - protein, 63 aa, Homo sapiens
MKIAHRGPDAFRFENVNGYTNCCFGFHRLAVVDPLFGMQPIRVKKYPYLWLCYNGEIYNHKKV

SEQ ID NO: 37954 - protein, 478 aa, Homo sapiens
MQQHFEFEYQTKVDGEIILHLYDKGGIEQTICMLDGVFAFVLLDTANKKVFLGRDTYGVRPLFKAMTEDGFLAVCSEAKGLVTLKHSATPFLKVEPFLPGHYEVLDLKPNGKVASVEMVKYHHCRDVPLHALYDNVEKLFPGFEIETVKNNLRILFNNAVKKRLMTDRRIGCLLSGGLDSSLVAATLLKQLKEAQVQYPLQTFAIGMEDSPDLLAARKVADHIGSEHYEVLFNSEEGIQALDEVIFSLETYDITTVRASVGMYLISKYIRKNTDSVVIFSGEGSDELTQGYIYFHKAPSPEKAEEESERLLRELYLFDVLRADRTTAAHGLELRVPFLDHRFSSYYLSLPPEMRIPKNGIEKHLLRETFEDSNLIPKEILWRPKEAFSDGITSVKNSWFKILQEYVEHQVDDAMMANAAQKFPFNTPKTKEGYYYRQVFERHYPGRADWLSHYWMPKWINATDPSARTLTHYKSAVKA

SEQ ID NO: 37955 - protein, 540 aa, Homo sapiens
MKIAHRGPDAFRFENVNGYTNCCFGFHRLAVVDPLFGMQPIRVKKYPYLWLCYNGEIYNHKKMQQHFEFEYQTKVDGEIILHLYDKGGIEQTICMLDGVFAFVLLDTANKKVFLGRDTYGVRPLFKAMTEDGFLAVCSEAKGLVTLKHSATPFLKVEPFLPGHYEVLDLKPNGKVASVEMVKYHHCRDVPLHALYDNVEKLFPGFEIETVKNNLRILFNNAVKKRLMTDRRIGCLLSGGLDSSLVAATLLKQLKEAQVQYPLQTFAIGMEDSPDLLAARKVADHIGSEHYEVLFNSEEGIQALDEVIFSLETYDITTVRASVGMYLISKYIRKNTDSVVIFSGEGSDELTQGYIYFHKAPSPEKAEEESERLLRELYLFDVLRADRTTAAHGLELRVPFLDHRFSSYYLSLPPEMRIPKNGIEKHLLRETFEDSNLIPKEILWRPKEAFSDGITSVKNSWFKILQEYVEHQVDDAMMANAAQKFPFNTPKTKEGYYYRQVFERHYPGRADWLSHYWMPKWINATDPSARTLTHYKSAVKA

SEQ ID NO: 37956 - protein, 478 aa, Homo sapiens; identical to SEQ ID NO: 37954

SEQ ID NO: 37957 - protein, 464 aa, Homo sapiens
MAASCLVLLALCLLLPLLLLGGWKRWRRGRAARHVVAVVLGDVGRSPRMQYHALSLAMHGFSVTLLGFCNSKPHDELLQNNRIQIVGLTELQSLAVGPRVFQYGVKVVLQAMYLLWKLMWREPGAYIFLQNPPGLPSIAVCWFVGCLCGSKLVIDWHNYGYSIMGLVHGPNHPLVLLAKWYEKFFGRLSHLNLCVTNAMREDLADNWHIRAVTVYDKPASFFKETPLDLQHRLFMKLGSMHSPFRARSEPEDPVTERSAFTERDAGSGLVTRLRERPALLVSSTSWTEDEDFSILLAALEKFEQLTLDGHNLPSLVCVITGKGPLREYYSRLIHQKHFQHIQVCTPWLEAEDYPLLLGSADLGVCLHTSSSGLDLPMKVVDMFGCCLPVCAVNFKCLHELVKHEENGLVFEDSEELAAQLQMLFSNFPDPAGKLNQFRKNLRESQQLRWDESWVQTVLPLVMDT

SEQ ID NO: 37958 - protein, 353 aa, Homo sapiens
MYLLWKLMWREPGAYIFLQNPPGLPSIAVCWFVGCLCGSKLVIDWHNYGYSIMGLVHGPNHPLVLLAKWYEKFFGRLSHLNLCVTNAMREDLADNWHIRAVTVYDKPASFFKETPLDLQHRLFMKLGSMHSPFRARSEPEDPVTERSAFTERDAGSGLVTRLRERPALLVSSTSWTEDEDFSILLAALEKFEQLTLDGHNLPSLVCVITGKGPLREYYSRLIHQKHFQHIQVCTPWLEAEDYPLLLGSADLGVCLHTSSSGLDLPMKVVDMFGCCLPVCAVNFKCLHELVKHEENGLVFEDSEELAAQLQMLFSNFPDPAGKLNQFRKNLRESQQLRWDESWVQTVLPLVMDT

SEQ ID NO: 37959 - protein, 473 aa, Homo sapiens
MAQLEGYYFSAALSCTFLVSCLLFSAFSRALREPYMDEIFHLPQAQRYCEGHFSLSQWDPMITTLPGLYLVSIGVIKPAIWIFGWSEHVVCSIGMLRFVNLLFSVGNFYLLYLLFCKVQPRNKAASSIQRVLSTLTLAVFPTLYFFNFLYYTEAGSMFFTLFAYLMCLYGNHKTSAFLGFCGFMFRQTNIIWAVFCAGNVIAQKLTEAWKTELQKKEDRLPPIKGPFAEFRKILQFLLAYSMSFKNLSMLLLLTWPYILLGFLFCAFVVVNGGIVIGDRSSHEACLHFPQLFYFFSFTLFFSFPHLLSPSKIKTFLSLVWKRRILFFVVTLVSVFLVWKFTYAHKYLLADNRHYTFYVWKRVFQRYETVKYLLVPAYIFAGWSIADSLKSKSIFWNLMFFICLFTVIVPQKLLEFRYFILPYVIYRLNIPLPPTSRLICELSCYAVVNFITFFIFLNKTFQWPNSQDIQRFMW

SEQ ID NO: 37960 - protein, 492 aa, Homo sapiens
MAAGERSWCLCKLLRFFYSLFFPGLIVCGTLCVCLVIVLWGIRLLLQRKKKLVSTSKNGKNQMVIAFFHPYCNAGGGGERVLWCALRALQKKYPEAVYVVYTGDVNVNGQQILEGAFRRFNIRLIHPVQFVFLRKRYLVEDSLYPHFTLLGQSLGSIFLGWEALMQCVPDVYIDSMGYAFTLPLFKYIGGCQVGSYVHYPTISTDMLSVVKNQNIGFNNAAFITRNPFLSKVKLIYYYLFAFIYGLVGSCSDVVMVNSSWTLNHILSLWKVGNCTNIVYPPCDVQTFLDIPLHEKKMTPGHLLVSVGQFRPEKNHPLQIRAFAKLLNKKMVESPPSLKLVLIGGCRNKDDELRVNQLRRLSEDLGVQEYVEFKINIPFDELKNYLSEATIGLHTMWNEHFGIGVVECMAAGTIILAHNSGGPKLDIVVPHEGDITGFLAESEEDYAETIAHILSMSAEKRLQIRKSARASVSRFSDQEFEVTFLSSVEKLFK

SEQ ID NO: 37961 - protein, 36 aa, Homo sapiens
MAAGERSWCLCKLLRSCGVYGSWHNYPCTQFGGPKA

SEQ ID NO: 37962 - protein, 488 aa, Homo sapiens
MAGKGSSGRRPLLLGLLVAVATVHLVICPYTKVEESFNLQATHDLLYHWQDLEQYDHLEFPGVVPRTFLGPVVIAVFSSPAVYVLSLLEMSKFYSQLIVRGVLGLGVIFGLWTLQKEVRRHFGAMVATMFCWVTAMQFHLMFYCTRTLPNVLALPVVLLALAAWLRHEWARFIWLSAFAIIVFRVELCLFLGLLLLLALGNRKVSVVRALRHAVPAGILCLGLTVAVDSYFWRQLTWPEGKVLWYNTVLNKSSNWGTSPLLWYFYSALPRGLGCSLLFIPLGLVDRRTHAPTVLALGFMALYSLLPHKELRFIIYAFPMLNITAARGCSYLLNNYKKSWLYKAGSLLVIGHLVVNAAYSATALYVSHFNYPGGVAMQRLHQLVPPQTDVLLHIDVAAAQTGVSRFLQVNSAWRYDKREDVQPGTGMLAYTHILMEAAPGLLALYRDTHRVLASVVGTTGVSLNLTQLPPFNVHLQTKLVLLERLPRPS

SEQ ID NO: 37963 - protein, 328 aa, Homo sapiens
MPPTQPRPCMCPISTTQVASQCRGCTSWCPPRQTSFCTLTWQPPRQVCLGFSKSTAPGGTTRGRMCSRGQACWHTHTSSWRRPWAPGPLQGHTPGPGQRRGDHRCESEPDPTAPLQRPPADKAGASGEAPPAVLRGTRQPSAATGLPGAVITTSFWHNSSTIMTIQRSKSKDWAPASDRHQTRSRASSTASAGALSTKERGAQVLLAPREPLPRVMVASSGLPAGDCRPDQVPFMTNQEQRAHPGTCLPGGHVCPAHPGGAVFWQHPTLAARGPLGAPKTAPPLRGDHGGPGRTPPPWCHHCNFCIHRHPISITDKILGDKHIQKGMR

SEQ ID NO: 37964 - protein, 954 aa, Homo sapiens
MNNHQLELAKQLHKEGHLFYCTCRVLTCPGQAKSIASAPGKCQDSAALTSTAFSGLDFGLLSGYLHKQALVTATHPTCTLLFPSCHAFFPLPLTPTLYKMHKGWKNYCSQKSLNEASMDEYLGSLGLFRKLTAKDASCLFRAISEQLFCSQVHHLEIRKACVSYMRENQQTFESYVEGSFEKYLERLGDPKESAGQLEIRALSLIYNRDFILYRFPGKPPTYVTDNGYEDKILLCYSSSGHYDSVYSKQFQSSAAVCQAVLYEILYKDVFVVDEEELKTAIKLFRSGSKKNRNNAVTGSEDAHTDYKSSNQNRMEEWGACYNAENIPEGYNKGTEETKSPENPSKMPFPYKVLKALDPEIYRNVEFDVWLDSRKELQKSDYMEYAGRQYYLGDKCQVCLESEGRYYNAHIQEVGNENNSVTVFIEELAEKHVVPLANLKPVTQVMSVPAWNAMPSRKGRGYQKMPGGYVPEIVISEMDIKQQKKMFKKIRGKEVYMTMAYGKGDPLLPPRLQHSMHYGHDPPMHYSQTAGNVMSNEHFHPQHPSPRQGRGYGMPRNSSRFINRHNMPGPKVDFYPGPGKRCCQSYDNFSYRSRSFRRSHRQMSCVNKESQYGFTPGNGQMPRGLEETITFYEVEEGDETAYPTLPNHGGPSTMVPATSGYCVGRRGHSSGKQTLNLEEGNGQSENGRYHEEYLYRAEPDYETSGVYSTTASTANLSLQDRKSCSMSPQDTVTSYNYPQKMMGNIAAVAASCANNVPAPVLSNGAAANQAISTTSVSSQNAIQPLFVSPPTHGRPDTKVLQYYFNLGLQCYYHSYWHSMVYVPQMQQQLHVENYPVYTEPPLVDQTVPQCYSEVRREDGIQAEASANDTFPNADSSSVPHGAVYYPVMSDPYGQPPLPGFDSCLPVVPDYSCVPPWHPVGTAYGGSSQIHGAINPGPIGCIAPSPPASHYVPQGM

SEQ ID NO: 37965 - protein, 165 aa, Homo sapiens
MKCVFVTVGTTSFDDLIACVSAPDSLQKIESLGYNRLILQIGRGTVVPEPFSTESFTLDVYRYKDSLKEDIQKADLVISHAGAGSCLETLEKGKPLVVVINEKLMNNHQLELAKQLHKEGHLFYCTCSTLPGLLQSMDLSTLKCYPPGQPEKFSAFLDKVVGLQK

SEQ ID NO: 37966 - protein, 1137 aa, Homo sapiens
MKCVFVTVGTTSFDDLIACVSAPDSLQKIESLGYNRLILQIGRGTVVPEPFSTESFTLDVYRYKDSLKEDIQKADLVISHAGAGSCLETLEKGKPLVVVINEKLMNNHQLELAKQLHKEGHLFYCTCRVLTCPGQAKSIASAPGKCQDSAALTSTAFSGLDFGLLSGYLHKQALVTATHPTCTLLFPSCHAFFPLPLTPTLYKMHKGWKNYCSQKSLNEASMDEYLGSLGLFRKLTAKDASCLFRAISEQLFCSQVHHLEIRKACVSYMRENQQTFESYVEGSFEKYLERLGDPKESAGQLEIRALSLIYNRDFILYRFPGKPPTYVTDNGYEDKILLCYSSSGHYDSVYSKQFQSSAAVCQAVLYEILYKDVFVVDEEELKTAIKLFRSGSKKNRNNAVTGSEDAHTDYKSSNQNRMEEWGACYNAENIPEGYNKGTEETKSPENPSKMPFPYKVLKALDPEIYRNVEFDVWLDSRKELQKSDYMEYAGRQYYLGDKCQVCLESEGRYYNAHIQEVGNENNSVTVFIEELAEKHVVPLANLKPVTQVMSVPAWNAMPSRKGRGYQKMPGGYVPEIVISEMDIKQQKKMFKKIRGKEVYMTMAYGKGDPLLPPRLQHSMHYGHDPPMHYSQTAGNVMSNEHFHPQHPSPRQGRGYGMPRNSSRFINRHNMPGPKVDFYPGPGKRCCQSYDNFSYRSRSFRRSHRQMSCVNKESQYGFTPGNGQMPRGLEETITFYEVEEGDETAYPTLPNHGGPSTMVPATSGYCVGRRGHSSGKQTLNLEEGNGQSENGRYHEEYLYRAEPDYETSGVYSTTASTANLSLQDRKSCSMSPQDTVTSYNYPQKMMGNIAAVAASCANNVPAPVLSNGAAANQAISTTSVSSQNAIQPLFVSPPTHGRPVIASPSYPCHSAIPHAGASLPPPPPPPPPPPPPPPPPPPPPPPPPPPALDVGETSNLQPPPPLPPPPYSCDPSGSDLPQDTKVLQYYFNLGLQCYYHSYWHSMVYVPQMQQQLHVENYPVYTEPPLVDQTVPQCYSEVRREDGIQAEASANDTFPNADSSSVPHGAVYYPVMSDPYGQPPLPGFDSCLPVVPDYSCVPPWHPVGTAYGGSSQIHGAINPGPIGCIAPSPPASHYVPQGM

SEQ ID NO: 37967 - protein, 216 aa, Homo sapiens
MVCVLVLAAAAGAVAVFLILRIWVVLRSMDVTPRESLSILVVAGSGGHTTEILRLLGSLSNAYSPRHYVIADTDEMSANKINSFELDRADRDPSNMYTKYYIHRIPRSREVQQSWPSTVFTTLHSMWLSFPLIHRVKPDLVLCNGPGTCVPICVSALLLGILGIKKVIIVYVESICRVETLSMSGKILFHLSDYFIVQWPALKEKYPKSVYLGRIV

SEQ ID NO: 37968 - protein, 323 aa, Homo sapiens
MPLLKLVHGSPLVFGEKFKLFTLVSACIPVFRLARRRKKILFYCHFPDLLLTKRDSFLKRLYRAPIDWIEEYTTGMADCILVNSQFTAAVFKETFKSLSHIDPDVLYPSLNVTSFDSVVPEKLDDLVPKGKKFLLLSINRYERKKNLTLALEALVQLRGRLTSQDWERVHLIVAGGYDERVLENVEHYQELKKMVQQSDLGQYVTFLRSFSDKQKISLLHSCTCVLYTPSNEHFGIVPLEAMYMQCPVIAVNSGGPLESIDHSVTGFLCEPDPVHFSEAIEKFIREPSLKATMGLAGRARVKEKFSPEAFTEQLYRYVTKLLV

SEQ ID NO: 37969 - protein, 416 aa, Homo sapiens
MAEEQGRERDSVPKPSVLFLHPDLGVGGAERLVLDAALALQARGCSVKIWTAHYDPGHCFAESRELPVRCAGDWLPRGLGWGGRGAAVCAYVRMVFLALYVLFLADEEFDVVVCDQVSACIPVFRLARRRKKILFYCHFPDLLLTKRDSFLKRLYRAPIDWIEEYTTGMADCILVNSQFTAAVFKETFKSLSHIDPDVLYPSLNVTSFDSVVPEKLDDLVPKGKKFLLLSINRYERKKNLTLALEALVQLRGRLTSQDWERVHLIVAGGYDERVLENVEHYQELKKMVQQSDLGQYVTFLRSFSDKQKISLLHSCTCVLYTPSNEHFGIVPLEAMYMQCPVIAVNSGGPLESIDHSVTGFLCEPDPVHFSEAIEKFIREPSLKATMGLAGRARVKEKFSPEAFTEQLYRYVTKLLV

SEQ ID NO: 37970 - protein, 438 aa, Homo sapiens
MAAGLRKRGRSGSAAQAEGLCKQWLQRAWQERRLLLREPRYTLLVAACLCLAEVGITFWVIHRVAYTEIDWKAYMAEVEGVINGTYDYTQLQGDTGPLVYPAGFVYIFMGLYYATSRGTDIRMAQNIFAVLYLATLLLVFLIYHQTCKVPPFVFFFMCCASYRVHSIFVLRLFNDPVAMVLLFLSINLLLAQRWGWGCCFFSLAVSVKMNVLLFAPGLLFLLLTQFGFRGALPKLGICAGLQVVLGLPFLLENPSGYLSRSFDLGRQFLFHWTVNWRFLPEALFLHRAFHLALLTAHLTLLLLFALCRWHRTGESILSLLRDPSKRKVPPQPLTPNQIVSTLFTSNFIGICFSRSLHYQFYVWYFHTLPYLLWAMPARWLTHLLRLLVLGLIELSWNTYPSTSCSSAALHICHAVILLQLWLGPQPFPKSTQHSKKAH

SEQ ID NO: 37971 - protein, 382 aa, Homo sapiens
MAAARLARAAPAAAGAALHAAGGRLPLPGGGGHHLLGHSQGGMYPAGFVYIFMGLYYATSRGTDIRMAQNIFAVLYLATLLLVFLIYHQTCKVPPFVFFFMCCASYRVHSIFVLRLFNDPVAMVLLFLSINLLLAQRWGWGCCFFSLAVSVKMNVLLFAPGLLFLLLTQFGFRGALPKLGICAGLQVVLGLPFLLENPSGYLSRSFDLGRQFLFHWTVNWRFLPEALFLHRAFHLALLTAHLTLLLLFALCRWHRTGESILSLLRDPSKRKVPPQPLTPNQIVSTLFTSNFIGICFSRSLHYQFYVWYFHTLPYLLWAMPARWLTHLLRLLVLGLIELSWNTYPSTSCSSAALHICHAVILLQLWLGPQPFPKSTQHSKKAH

SEQ ID NO: 37972 - protein, 509 aa, Homo sapiens
MEKWYLMTVVVLIGLTVRWTVSLNSYSGAGKPPMFGDYEAQRHWQEITFNLPVKQWYFNSSDNNLQYWGLDYPPLTAYHSLLCAYVAKFINPDWIALHTSRGYESQAHKLFMRTTVLIADLLIYIPAVVLYCCCLKEISTKKKIANALCILLYPGLILIDYGHFQNIYNSVSLGFALWGVLGISCDCDLLGSLAFCLAINYKQMELYHALPFFCFLLGKCFKKGLKGKGFVLLVKLACIVVASFVLCWLPFFTEREQTLQVLRRLFPVDRGLFEDKVANIWCSFNVFLKIKDILPRHIQLIMSFCSTFLSLLPACIKLILQPSSKGFKFTLVSCALSFFLFSFQVHEKSILLVSLPVCLVLSEIPFMSTWFLLVSTFSMLPLLLKDELLMPSVVTTMAFFIACVTSFSIFEKTSEEELQLKSFSISVRKYLPCFTFLSRIIQYLFLISVITMVLLTLMTVTLDPPQKLPDLFSVLVCFVSCLNFLFFLVYFNIIIMWDSKSGRNQKKIS

SEQ ID NO: 37973 - protein, 507 aa, Homo sapiens
MEKWYLMTVVVLIGLTVRWTVSLNSYSGAGKPPMFGDYEAQRHWQEITFNLPVKQWYFNSSDNNLQYWGLDYPPLTAYHSLLCAYVAKFINPDWIALHTSRGYESQAHKLFMRTTVLIADLLIYIPAVVLYCCCLKEISTKKKIANALCILLYPGLILIDYGHFQYNSVSLGFALWGVLGISCDCDLLGSLAFCLAINYKQMELYHALPFFCFLLGKCFKKGLKGKGFVLLVKLACIVVASFVLCWLPFFTEREQTLQVLRRLFPVDRGLFEDKVANIWCSFNVFLKIKDILPRHIQLIMSFCSTFLSLLPACIKLILQPSSKGFKFTLVSCALSFFLFSFQVHEKSILLVSLPVCLVLSEIPFMSTWFLLVSTFSMLPLLLKDELLMPSVVTTMAFFIACVTSFSIFEKTSEEELQLKSFSISVRKYLPCFTFLSRIIQYLFLISVITMVLLTLMTVTLDPPQKLPDLFSVLVCFVSCLNFLFFLVYFNIIIMWDSKSGRNQKKIS

SEQ ID NO: 37974 - protein, 254 aa, Homo sapiens [sequence omitted]

SEQ ID NO: 37975 - protein, 526 aa, Homo sapiens
MAALTIATGTGNWFSALALGVTLLKCLLIPTYHSTDFEVHRNWLAITHSLPISQWYYEATSEWTLDYPPFFAWFEYILSHVAKYFDQEMLNVHNLNYSSSRTLLFQRFSVIFMDVLFVYAVRECCKCIDGKKVGKELTEKPKFILSVLLLWNFGLLIVDHIHFQYNGFLFGLMLLSIARLFQKRHMEGAFLFAVLLHFKHIYLYVAPAYGVYLLRSYCFTANKPDGSIRWKSFSFVRVISLGLVVFLVSALSLGPFLALNQLPQVFSRLFPFKRGLCHAYWAPNFWALYNALDKVLSVIGLKLKFLDPNNIPKASMTSGLVQQFQHTVLPSVTPLATLICTLIAILPSIFCLWFKPQGPRGFLRCLTLCALSSFMFGWHVHEKAILLAILPMSLLSVGKAGDASIFLILTTTGHYSLFPLLFTAPELPIKILLMLLFTIYSISSLKTLFRKEKPLFNWMETFYLLGLGPLEVCCEFVFPFTSWKVKYPFIPLLLTSVYCAVGITYAWFKLYVSVLIDSAIGKTKKQ

SEQ ID NO: 37976 - protein, 467 aa, Homo sapiens
MAALTIATGTGNWFSALALGVTLLKCLLIPTYHSTDFEVHRNWLAITHSLPISQWYYEATSEWTLDYPPFFAWFEYILSHVAKYFDQEMLNVHNLNYSSSRTLLFQRFSVIFMDVLFVYAVRECCKCIDGKKVGKELTEKPKFILSVLLLWNFGLLIVDHIHFQYNGFLFGLMLLSIARLFQKRHMEGAFLFAVLLHFKHIYLYVAPAYGVYLLRSYCFTANKPDGSIRWKSFSFVRVISLGLVVFLVSALSLGPFLALNQLPQVFSRLFPFKRGLCHAYWAPNFWALYNALDKVLSVIGLKLKFLDPNNIPKASMTSGLVQQFQHTVLPSVTPLATLICTLIAILPSIFCLWFKPQGPRGFLRCLTLCALSSFMFGWHVHEKAILLAILPMSLLSVGKAGDASIFLILTTTGHYSLFPLLFTAPELPIKILLMLLFTIYSISSLKTLFRRSFTLVAQAGVQWHDLS

SEQ ID NO: 37977 - protein, 440 aa, Homo sapiens
MMLAFLVLSTGMFCSSSAFLPSSFCMYTTLIAMTGWYMDKTSIAVLGVAAGAILGWPFSAALGLPIAFDLLVMKHRWKSFFHWSLMALILFLVPVVVIDSYYYGKLVIAPLNIVLYNVFTPHGPDLYGTEPWYFYLINGFLNFNVAFALALLVLPLTSLMEYLLQRFHVQNLGHPYWLTLAPMYIWFIIFFIQPHKEERFLFPVYPLICLCGAVALSALQKCYHFVFQRYRLEHYTVTSNWLALGTVFLFGLLSFSRSVALFRGYHGPLDLYPEFYRIATDPTIHTVPEGRPVNVCVGKEWYRFPSSFLLPDNWQLQFIPSEFRGQLPKPFAEGPLATRIVPTDMNDQNLEEPSRYIDISKCHYLVDLDTMRETPREPKYSSNKEEWISLAYRPFLDASRSSKLLRAFYVPFLSDQYTVYVNYTILKPRKAKQIRKKSGG

SEQ ID NO: 37978 - protein, 844 aa, Homo sapiens
MAPRRLLLVGEGNFSFAAALSETLDQSTQLTATCLQRPAELARDPLAWENLQCLRERGIDVRFGVDCTQLADVFELHEREFDQIYFIFPHCGRKAGVAKNRELLAKFFQSCADVLAEEGEVHVALCRGQGGTPADKPQREWHNSWQVVAMAALGGLILSDVYPFSCKAVAGYKCTGYRSQDKSFHVEGALNHIFTRSLPFEGSQPRIFRIKLGNQWFSFPEPEALVGKLNRLAMASRGARQRLKGSGASSGDTAPAADKLRELLGSREAGGAEHRTELSGNKAGQVWAPEGSTAFKCLLSARLCAALLSNISDCDETFNYWEPTHYLIYGEGFQTWEYSPAYAIRSYAYLLLHAWPAAFHARILQTNKILVFYFLRCLLAFVSCICELYFYKAVCKKFGLHVSRMMLAFLVLSTGMFCSSSAFLPSSFCMYTTLIAMTGWYMDKTSIAVLGVAAGAILGWPFSAALGLPIAFDLLVMKHRWKSFFHWSLMALILFLVPVVVIDSYYYGKLVIAPLNIVLYNVFTPHGPDLYGTEPWYFYLINGFLNFNVAFALALLVLPLTSLMEYLLQRFHVQNLGHPYWLTLAPMYIWFIIFFIQPHKEERFLFPVYPLICLCGAVALSALQKCYHFVFQRYRLEHYTVTSNWLALGTVFLFGLLSFSRSVALFRGYHGPLDLYPEFYRIATDPTIHTVPEGRPVNVCVGKEWYRFPSSFLLPDNWQLQFIPSEFRGQLPKPFAEGPLATRIVPTDMNDQNLEEPSRYIDISKCHYLVDLDTMRETPREPKYSSNKEEWISLAYRPFLDASRSSKLLRAFYVPFLSDQYTVYVNYTILKPRKAKQIRKKSGG

SEQ ID NO: 37979 - protein, 447 aa, Homo sapiens
MMLAFLVLSTGMFCSSSAFLPSSFCMYTTLIAMTGWYMDKTSIAVLGVAAGAILGWPFSAALGLPIAFDLLVMKHRWKSFFHWSLMALILFLVPVVVIDSYYYGKLVIAPLNIVLYNVFTPHGPDLYGTEPWYFYLINGFLNFNVAFALALLVLPLTSLMEYLLQRFHVQNLGHPYWLTLAPMYIWFIIFFIQPHKEERFLFPVYPLICLCGAVALSALQHSFLYFQKCYHFVFQRYRLEHYTVTSNWLALGTVFLFGLLSFSRSVALFRGYHGPLDLYPEFYRIATDPTIHTVPEGRPVNVCVGKEWYRFPSSFLLPDNWQLQFIPSEFRGQLPKPFAEGPLATRIVPTDMNDQNLEEPSRYIDISKCHYLVDLDTMRETPREPKYSSNKEEWISLAYRPFLDASRSSKLLRAFYVPFLSDQYTVYVNYTILKPRKAKQIRKKSGG

SEQ ID NO: 37980 - protein, 548 aa, Homo sapiens
MVLAELYVSDREGSDATGDGTKEKPFKTGLKALMTVGKEPFPTIYVDSQKENERWNVISKSQLKNIKKMWHREQMKSESREKKEAEDSLRREKNLEEAKKITIKNDPSLPEPKCVKIGALEGYRGQRVKVFGWVHRLRRQGKNLMFLVLRDGTGYLQCVLADELCQCYNGVLLSTESSVAVYGMLNLTPKGKQAPGGHELSCDFWELIGLAPAGGADNLINEESDVDVQLNNRHMMIRGENMSKILKARSMVTRCFRDHFFDRGYYEVTPPTLVQTQVEGGATLFKLDYFGEEAFLTQSSQLYLETCLPALGDVFCIAQSYRAEQSRTRRHLAEYTHVEAECPFLTFDDLLNRLEDLVCDVVDRILKSPAGSIVHELNPNFQPPKRPFKRMNYSDAIVWLKEHDVKKEDGTFYEFGEDIPEAPERLMTDTINEPILLCRFPVEIKSFYMQRCPEDSRLTESVDVLMPNVGEIVGGSMRIFDSEEILAGYKREGIDPTPYYWYTDQRKYGTCPHGGYGLGLERFLTWILNRYHIRDVCLYPRFVQRCTP

SEQ ID NO: 37981 - protein, 254 aa, Homo sapiens
MTVGKEPFPTIYVDSQKENERWNVISKSQLKNIKKMWHREQMKSESREKKEAEDSLRREKNLEEAKKITIKNDPSLPEPKCVKIGALEGYRGQRVKVFGWVHRLRRQGKNLMFLVLRDGTGYLQCVLADELCQCYNGVLLSTESSVAVYGMLNLTPKGKQAPGGHELSCDFWELIGLAPAGGADNLINEESDVDVQLNNRHMMIRGENMSKILKARSMVTRCFRDHFFDRGYYEVSMHSSAFAKNMFFAVLKLE

SEQ ID NO: 37982 - protein, 299 aa, Homo sapiens
MCEDWCFRDHFFDRGYYEVTPPTLVQTQVEGGATLFKLDYFGEEAFLTQSSQLYLETCLPALGDVFCIAQSYRAEQSRTRRHLAEYTHVEAECPFLTFDDLLNRLEDLVCDVVDRILKSPAGSIVHELNPNFQPPKRPFKRMNYSDAIVWLKEHDVKKEDGTFYEFGEDIPEAPERLMTDTINEPILLCRFPVEIKSFYMQRCPEDSRLTESVDVLMPNVGEIVGGSMRIFDSEEILAGYKREGIDPTPYYWYTDQRKYGTCPHGGYGLGLERFLTWILNRYHIRDVCLYPRFVQRCTP

SEQ ID NO: 37983 - protein, 174 aa, Homo sapiens
MVLAELYVSDREGSDATGDGTKEKPFKTGLKALMTVGKEPFPTIYVDSQKENERWNVISKSQLKNIKKMWHREQMKSESREKKEAEDSLRREKNLEEAKKITIKNDPSLPEPKCVKIGALEGYRGQRVKVFGWVHRLRRQVSVLQWSSLVHGEQCCSVWNAKSYPKGQAGSRWP

SEQ ID NO: 37984 - protein, 477 aa, Homo sapiens
MLGVRCLLRSVRFCSSAPFPKHKPSAKLSVRDALGAQNASGERIKIQGWIRSVRSQKEVLFLHVNDGSSLESLQVVADSGLDSRELNFGSSVEVQGQLIKSPSKRQNVELKAEKIKVIGNCDAKDFPIKYKERHPLEYLRQYPHFRCRTNVLGSILRIRSEATAAIHSFFKDSGFVHIHTPIITSNDSEGAGELFQLEPSGKLKVPEENFFNVPAFLTVSGQLHLEVMSGAFTQVFTFGPTFRAENSQSRRHLAEFYMIEAEISFVDSLQDLMQVIEELFKATTMMVLSKCPEDVELCHKFIAPGQKDRLEHMLKNNFLIISYTEAVEILKQASQNFTFTPEWGADLRTEHEKYLVKHCGNIPVFVINYPLTLKPFYMRDNEDGPQHTVAAVDLLVPGVGELFGGGLREERYHFLEERLARSGLTEVYQWYLDLRRFGSVPHGGFGMGFERYLQCILGVDNIKDVIPFPRFPHSCLL

SEQ ID NO: 37985 - protein, 313 aa, Homo sapiens
MAQRKNAKSSGNSSSSGSGSGSTSAGSSSPGARRETKHGGHKNGRKGGLSGTSFFTWFMVIALLGVWTSVAVVWFDLVDYEEVLGKLGIYDADGDGDFDVDDAKVLLGLKERSTSEPAVPPEEAEPHTEPEEQVPVEAEPQNIEDEAKEQIQSLLHEMVHAEHVEGEDLQQEDGPTGEPQQEDDEFLMATDVDDRFETLEPEVSHEETEHSYHVEETVSQDCNQDMEEMMSEQENPDSSEPVVEDERLHHDTDDVTYQVYEEQAVYEPLENEGIEITEVTAPPEDNPVEDSQVIVEEVSIFPVEEQQEVPPDT

SEQ ID NO: 37986 - protein, 203 aa, Homo sapiens
MAQRKNAKSSGNSSSSGSGSGSTSAGSSSPGARRETKHGGHKNGRKGGLSGTSFFTWFMVIALLGVWTSVAVVWFDLVDYEEVLAKAKDFRYNLSEVLQGKLGIYDADGDGDFDVDDAKVLLGLTKDGSNENIDSLEEVLNILAEESSDWFYGFLSFLYDIMTPFEMLEEEEEESETADGVDGTSQNEGVQGKTCVILDLHNQ

SEQ ID NO: 37987 - protein, 758 aa, Homo sapiens
MAQRKNAKSSGNSSSSGSGSGSTSAGSSSPGARRETKHGGHKNGRKGGLSGTSFFTWFMVIALLGVWTSVAVVWFDLVDYEEVLGKLGIYDADGDGDFDVDDAKVLLGLKERSTSEPAVPPEEAEPHTEPEEQVPVEAEPQNIEDEAKEQIQSLLHEMVHAEHVEGEDLQQEDGPTGEPQQEDDEFLMATDVDDRFETLEPEVSHEETEHSYHVEETVSQDCNQDMEEMMSEQENPDSSEPVVEDERLHHDTDDVTYQVYEEQAVYEPLENEGIEITEVTAPPEDNPVEDSQVIVEEVSIFPVEEQQEVPPETNRKTDDPEQKAKVKKKKPKLLNKFDKTIKAELDAAEKLRKRGKIEEAVNAFKELVRKYPQSPRARYGKAQCEDDLAEKRRSNEVLRGAIETYQEVASLPDVPADLLKLSLKRRSDRQQFLGHMRGSLLTLQRLVQLFPNDTSLKNDLGVGYLLIGDNDNAKKVYEEVLSVTPNDGFAKVHYGFILKAQNKIAESIPYLKEGIESGDPGTDDGRFYFHLGDAMQRVGNKEAYKWYELGHKRGHFASVWQRSLYNVNGLKAQPWWTPKETGYTELVKSLERNWKLIRDEGLAVMDKAKGLFLPEDENLREKGDWSQFTLWQQGRRNENACKGAPKTCTLLEKFPETTGCRRGQIKYSIMHPGTHVWPHTGPTNCRLRMHLGLVIPKEGCKIRCANETKTWEEGKVLIFDDSFEHEVWQDASSFRLIFIVDVWHPELTPQQRRSLPAI

SEQ ID NO: 37988 - protein, 225 aa, Homo sapiens
MAEDKETKHGGHKNGRKGGLSGTSFFTWFMVIALLGVWTSVAVVWFDLVDYEEVLAKAKDFRYNLSEVLQGKLGIYDADGDGDFDVDDAKVLLEGPSGVAKRKTKAKVKELTKEELKKEKEKPESRKESKNEERKKGKKEDVRKDKKIADADLSRKESPKGKKDREKEKVDLEKSAKTKENRKKSTNMKDVSSKMASRDKDDRKESRSSTRYAHLTKGNTQKRNG

SEQ ID NO: 37989 - protein, 429 aa, Homo sapiens
MAQRKNAKSSGNSSSSGSGSGSTSAGSSSPGARRETKHGGHKNGRKGGLSGTSFFTWFMVIALLGVWTSVAVVWFDLVDYEEVLGKLGIYDADGDGDFDVDDAKVLLGLKERSTSEPAVPPEEAEPHTEPEEQVPVEAEPQNIEDEAKEQIQSLLHEMVHAEHVEGEDLQQEDGPTGEPQQEDDEFLMATDVDDRFETLEPEVSHEETEHSYHVEETDSSEPVVEDERLHHDTDDVTYQVYEEQAVYEPLENEGIEITEVTAPPEDNPVEDSQVIVEEVSIFPVEEQQEVPPETNRKTDDPEQKAKVKKKKPKLLNKFDKTIKAELDAAEKLRKRGKIEEAVNAFKELVRKYPQSPRARYGKAQCEDDLAEKRRSNEVLRGAIETYQEVASLPDVPADLLKLSLKRRSDRQQFLGHMRGSLLTLQRLVQ

SEQ ID NO: 37990 - protein, 299 aa, Homo sapiens
MAEDKETKHGGHKNGRKGGLSGTSFFTWFMVIALLGVWTSVAVVWFDLVDYEEVLAKAKDFRYNLSEVLQGKLGIYDADGDGDFDVDDAKVLLGLKERSTSEPAVPPEEAEPHTEPEEQVPVEAEPQNIEDEAKEQIQSLLHEMVHAEHVEGEDLQQEDGPTGEPQQEDDEFLMATDVDDRFETLEPEVSHEETEHSYHVEETVSQDCNQDMEEMMSEQENPDSSEPVVEDERLHHDTDDVTYQVYEEQAVYEPLENEGIEITEVTAPPEDNPVEDSQVIVEEVSIFPVEEQQEVPPDT

SEQ ID NO: 37991 - protein, 299 aa, Homo sapiens; identical to SEQ ID NO: 37990

SEQ ID NO: 37992 - protein, 298 aa, Homo sapiens
MAEDKETKHGGHKNGRKGGLSGTSFFTWFMVIALLGVWTSVAVVWFDLVDYEEVLAKAKDFRYNLSEVLQGKLGIYDADGDGDFDVDDAKVLLGLKERSTSEPAVPPEEAEPHTEPEEQVPVEAEPQNIEDEAKEQIQSLLHEMVHAEHVEGEDLQQEDGPTGEPQQEDDEFLMATDVDDRFETLEPEVSHEETEHSYHVEETVSQDCNQDMEEMMSEQENPDSSEPVVEDERLHHDTDDVTYQVYEEQVYEPLENEGIEITEVTAPPEDNPVEDSQVIVEEVSIFPVEEQQEVPPDT

SEQ ID NO: 37993 - protein, 270 aa, Homo sapiens
MAQRKNAKSSGNSSSSGSGSGSTSAGSSSPGARRETKHGGHKNGRKGGLSGTSFFTWFMVIALLGVWTSVAVVWFDLVDYEEVLGKLGIYDADGDGDFDVDDAKVLLGLKERSTSEPAVPPEEAEPHTEPEEQVPVEAEPQNIEDEAKEQIQSLLHEMVHAEHETEHSYHVEETVSQDCNQDMEEMMSEQENPDSSEPVVEDERLHHDTDDVTYQVYEEQAVYEPLENEGIEITEVTAPPEDNPVEDSQVIVEEVSIFPVEEQQEVPPDT

SEQ ID NO: 37994 - protein, 210 aa, Homo sapiens
MAEDKETKHGGHKNGRKGGLSGTSFFTWFMVIALLGVWTSVAVVWFDLVDYEEVLGKLGIYDADGDGDFDVDDAKVLLEGPSGVAKRKTKAKVKELTKEELKKEKEKPESRKESKNEERKKGKKEDVRKDKKIADADLSRKESPKGKKDREKEKVDLEKSAKTKENRKKSTNMKDVSSKMASRDKDDRKESRSSTRYAHLTKGNTQKRNG

SEQ ID NO: 37995 - protein, 256 aa, Homo sapiens
MAEDKETKHGGHKNGRKGGLSGTSFFTWFMVIALLGVWTSVAVVWFDLVDYEEVLAKAKDFRYNLSEVLQGKLGIYDADGDGDFDVDDAKVLLGLKERSTSEPAVPPEEAEPHTEPEEQVPVEAEPQNIEDEAKEQIQSLLHEMVHAEHETEHSYHVEETVSQDCNQDMEEMMSEQENPDSSEPVVEDERLHHDTDDVTYQVYEEQAVYEPLENEGIEITEVTAPPEDNPVEDSQVIVEEVSIFPVEEQQEVPPDT

SEQ ID NO: 37996 - protein, 729 aa, Homo sapiens
MAEDKETKHGGHKNGRKGGLSGTSFFTWFMVIALLGVWTSVAVVWFDLVDYEEVLGKLGIYDADGDGDFDVDDAKVLLGLKERSTSEPAVPPEEAEPHTEPEEQVPVEAEPQNIEDEAKEQIQSLLHEMVHAEHVEGEDLQQEDGPTGEPQQEDDEFLMATDVDDRFETLEPEVSHEETEHSYHVEETVSQDCNQDMEEMMSEQENPDSSEPVVEDERLHHDTDDVTYQVYEEQAVYEPLENEGIEITEVTAPPEDNPVEDSQVIVEEVSIFPVEEQQEVPPETNRKTDDPEQKAKVKKKKPKLLNKFDKTIKAELDAAEKLRKRGKIEEAVNAFKELVRKYPQSPRARYGKAQCEDDLAEKRRSNEVLRGAIETYQEVASLPDVPADLLKLSLKRRSDRQQFLGHMRGSLLTLQRLVQLFPNDTSLKNDLGVGYLLIGDNDNAKKVYEEVLSVTPNDGFAKVHYGFILKAQNKIAESIPYLKEGIESGDPGTDDGRFYFHLGDAMQRVGNKEAYKWYELGHKRGHFASVWQRSLYNVNGLKAQPWWTPKETGYTELVKSLERNWKLIRDEGLAVMDKAKGLFLPEDENLREKGDWSQFTLWQQGRRNENACKGAPKTCTLLEKFPETTGCRRGQIKYSIMHPGTHVWPHTGPTNCRLRMHLGLVIPKEGCKIRCANETKTWEEGKVLIFDDSFEHEVWQDASSFRLIFIVDVWHPELTPQQRRSLPAI

SEQ ID NO: 37997 - protein, 343 aa, Homo sapiens
MGSPGASLGIKKALQSEQATALPASAPAVSQPTAPAPSCLPKAGQVIPTLLREAPFSSVIAPTLLCGFLFLAWVAAEVPEESSRMAGSGARSEEGRRQHAFVPEPFDGANVVPNLWLHSFEVINDLNHWDHITKLRFLKESLRGEALGVYNRLSPQDQGDYGTVKEALLKAFGVPGAAPSHLPKEIVFANSMGKGYYLKGKIGKVPVRFLVDSGAQVSVVHPNLWEEVTDGDLDTLQPFENVVKVANGAEMKILGVWDTAVSLGKLKLKAQFLVANASAEEAIIGTDVLQDHNAILDFEHRTCTLKGKKFRLLPVGGSLEDEFDLELIEEDPSSEEGRQELSH

SEQ ID NO: 37998 - protein, 319 aa, Homo sapiens
MCSLPVPREPLRRVAVTGGTHGNEMSGVYLARHWLHAPAELQRASFSAVPVLANPAATSGCRRYVDHDLNRTFTSSFLNSRPTPDDPYEVTRARELNQLLGPKASGQAFDFVLDLHNTTANMGTCLIAKSSHEVFAMHLCRHLQLQYPELSCQVFLYQRSGEESYNLDSVAKNGLGLELGPQPQGVLRADIFSRMRTLVATVLDFIELFNQGTAFPAFEMEAYRPVGVVDFPRTEAGHLAGTVHPQLQDRDFQPLQPGAPIFQMFSGEDLLYEGESTVYPVFINEAAYYEKGVAFVQTEKFTFTVPAMPALTPAPSPAS

SEQ ID NO: 37999 - protein, 346 aa, Homo sapiens
MARKSNLPVLLVPFLLCQALVRCSSPLPLVVNTWPFKNATEAAWRALASGGSALDAVESGCAMCEREQCDGSVGFGGSPDELGETTLDAMIMDGTTMDVGAVGDLRRIKNAIGVARKVLEHTTHTLLVGESATTFAQSMGFINEDLSTTASQALHSDWLARNCQPNYWRNVIPDPSKYCGPYKPPGILKQDIPIHKETEDDRGHDTIGMVVIHKTGHIAAGTSTNGIKFKIHGRVGDSPIPGAGAYADDTAGAAAATGNGDILMRFLPSYQAVEYMRRGEDPTIACQKVISRIQKHFPEFFGAVICANVTGSYGAACNKLSTFTQFSFMVYNSEKNQPTEEKVDCI

SEQ ID NO: 38000 - protein, 190 aa, Homo sapiens
MESQRLELIRLMETQEEDVVLLTAGEHNKACSLLGKLRLECADLLETRGVVLRDPTLFSFLWVVDFPLFLPKEENPRELESAHHPFTAPHPSDIHLLYTEPKKEDVKMLSHLLQALDYGAPPHGGIALGLDRLICLVTGSPSIRDVIAFPKSFRGHDLMSNTPDSVPPEELKPYHIRVSKPTDSKAERAH

SEQ ID NO: 38001 - protein, 645 aa, Homo sapiens
MYFPSWLSQLYRGLSRPIRRTTQPIWGSLYRSLLQSSQRRIPEFSSFVVRTNTCGELRSSHLGQEVTLCGWIQYRRQNTFLVLRDFDGLVQVIIPQDESAASVKKILCEAPVESVVQVSGTVISRPAGQENPKMPTGEIEIKVKTAELLNACKKLPFEIKNFVKKTEALRLQYRYLDLRSFQMQYNLRLRSQMVMKMREYLCNLHGFVDIETPTLFKRTPGGAKEFLVPSREPGKFYSLPQSPQQFKQLLMVGGLDRYFQVARCYRDEGSRPDRQPEFTQIDIEMSFVDQTGIQSLIEGLLQYSWPNDKDPVVVPFPTMTFAEVLATYGTDKPDTRFGMKIIDISDVFRNTEIGFLQDALSKPHGTVKAICIPEGAKYLKRKDIESIRNFAADHFNQEILPVFLNANRNWNSPVANFIMESQRLELIRLMETQEEDVVLLTAGEHNKACSLLGKLRLECADLLETRGVVLRDPTLFSFLWVVDFPLFLPKEENPRELESAHHPFTAPHPSDIHLLYTEPKKARSQHYDLVLNGNEIGGGSIRIHNAELQRYILATLLKEDVKMLSHLLQALDYGAPPHGGIALGLDRLICLVTGSPSIRDVIAFPKSFRGHDLMSNTPDSVPPEELKPYHIRVSKPTDSKAERAH

SEQ ID NO: 38002 - protein, 380 aa, Homo sapiens
MKEYVLLLFLALCSAKPFFSPSHIALKNMMLKDMEDTDDDDDDDDDDDDDDEDNSLFPTREPRSHFFPFDLFPMCPFGCQCYSRVVHCSDLGLTSVPTNIPFDTRMLDLQNNKIKEIKENDFKGLTSLYGLILNNNKLTKIHPKAFLTTKKLRRLYLSHNQLSEIPLNLPKSLAELRIHENKVKKIQKDTFKGMNALHVLEMSANPLDNNGIEPGAFEGVTVFHIRIAEAKLTSVPKGLPPTLLELHLDYNKISTVELEDFKRYKELQRLGLGNNKITDIENGSLANIPRVREIHLENNKLKKIPSGLPELKYLQIIFLHSNSIARVGVNDFCPTVPKMKKSLYSAISLFNNPVKYWEMQPATFRCVLSRMSVQLGNFGM

SEQ ID NO: 38003 - protein, 243 aa, Homo sapiens
MKEYVLLLFLALCSAKPFFSPSHIALKNMMLKDMEDTDDDDDDDDDDDDDDEDNSLFPTREPRSHFFPFDLFPMCPFGCQCYSRVVHCSDLGLTSVPTNIPFDTRMLDLQNNKIKEIKENDFKGLTSLYGLILNNNKLTKIHPKAFLTTKKLRRLYLSHNQLSEIPLNLPKSLAELRIHENKVKKIQKDTFKGMNALHVLEMSANPLDNNGIEPGAFEGVTVFHIRIAEAKLTSVPKVNLPQF

SEQ ID NO: 38004 - protein, 80 aa, Homo sapiens
MMLKDMEDTDDDDDDDDDDDDDDEDNSLFPTREPRSHFFPFDLFPMCPFGCQCYSRVVHCSDLGLTSVPTNIPLILECLI

SEQ ID NO: 38005 - protein, 243 aa, Homo sapiens
MKEYVLLLFLALCSAKPFFSPSHIALKNMMLKDMEDTDDDDDDDDDDDDDDEDNSLFPTREPRSHFFPFDLFPMCPFGCQCYSRVVHCSDLGLTSVPTNIPFDTRMLDLQNNKIKEIKENDFKGLTSLYGLILNNNKLTKIHPKAFLTTKKLRRLYLSHNQLSEIPLNLPKSLAELRIHENKVKKIQKDTFKGMNALHVLEMSANPLDNNGIEPGAFEGVTVFHIRIAEAKLTSVPKDNLPSF

SEQ ID NO: 38006 - protein, 1294 aa, Homo sapiens
MALAGLCALLACCWGPAAVLATAAGDVDPSKELECKLKSITVSALPFLRENDLSIMHSPSASEPKLLFSVRNDFPGEMVVVDDLENTELPYFVLEISGNTEDIPLVRWRQQWLENGTLLFHIHHQDGAPSLPGQDPTEEPQHESAEEELRILHISVMGGMIALLLSILCLVMILYTRRRWCKRRRVPQPQKSASAEAANEIHYIPSVLIGGHGRESLRNARVQGHNSSGTLSIRETPILDGYEYDITDLRHHLQRECMNGGEDFASQVTRTLDSLQGCNEKSGMDLTPGSDNAKLSLMNKYKDNIIATSPVDSNHQQATLLSHTSSSQRKRINNKARAGSAFLNPEGDSGTEAENDPQLTFYTDPSRSRRRSRVGSPRSPVNKTTLTLISITSCVIGLVCSSHVNCPLVVKITLHVPEHLIADGSRFILLEGSQLDASDWLNPAQVVLFSQQNSSGPWAMDLCARRLLDPCEHQCDPETGECLCYEGYMKDPVHKHLCIRNEWGTNQGPWPYTIFQRGFDLVLGEQPSDKIFRFTYTLGEGMWLPLSKSFVIPPAELAINPSAKCKTDMTVMEDAVEVREELMTSSSFDSLEVLLDSFGPVRDCSKDNGGCSKNFRCISDRKLDSTGCVCPSGLSPMKDSSGCYDRHIGVDCSDGFNGGCEQLCLQQMAPFPDDPTLYNILMFCGCIEDYKLGVDGRSCQLITETCPEGSDCGESRELPMNQTLFGEMFFGYNNHSKEVAAGQVLKGTFRQNNFARGLDQQLPDGLVVATVPLENQCLEEISEPTPDPDFLTGMVNFSEVSGYPVLQHWKVRSVMYHIKLNQVAISQALSNALHSLDGATSRADFVALLDQFGNHYIQEAIYGFEESCSIWYPNKQVQRRLWLEYEDISKGNSPSDESEERERDPKVLTFPEYITSLSDSGTKHMAAGVRMECHSKGRCPSSCPLCHVTSSPDTPAEPVLLEVTKAAPIYELVTNNQTQRLLQEATMSSLWCSGTGDVIEDWCRCDSTAFGADGLPTCAPLPQPVLRLSTVHEPSSTLVVLEWEHSEPPIGVQIVDYLLRQEKVTDRMDHSKVETETVLSFVDDIISGAKSPCAMPSQVPDKQLTTISLIIRCLEPDTIYMFTLWGVDNTGRRSRPSDVIVKTPCPVVDDVKAQEIADKIYNLFNGYTSGKEQQTAYNTLLDLGSPTLHRVLYHYNQHYESFGEFTWRCEDELGPRKAGLILSQLGDLSSWCNGLLQEPKISLRRSSLKYLGCRYSEIKPYGLDWAELSRDLRKTCEEQTLSIPYNDYGDSKEI

SEQ ID NO: 38007 - protein, 1302 aa, Homo sapiens
MALAGLCALLACCWGPAAVLATAAGDVDPSKELECKLKSITVSALPFLRENDLSIMHSPSASEPKLLFSVRNDFPGEMVVVDDLENTELPYFVLEISGNTEDIPLVRWRQQWLENGTLLFHIHHQDGAPSLPGQDPTEEPQHESAEEELRILHISVMGGMIALLLSILCLVMILYTRRRWCKRRRVPQPQKSASAEAANEIHYIPSVLIGGHGRESLRNARVQGHNSSGTLSIRETPILDGYEYDITDLRHHLQRECMNGGEDFASQVTRTLDSLQGCNEKSGMDLTPGSDNAKLSLMNKYKDNIIATSPVDSNHQQATLLSHTSSSQRKRINNKARAGSAFLNPEGDSGTEAENDPQLTFYTDPSRSRRRSRVGSPRSPVNKTTLTLISITSCVIGLVCSSHVNCPLVVKITLHVPEHLIADGSRFILLEGSQLDASDWLNPAQVVLFSQQNSSGPWAMDLCARRLLDPCEHQCDPETGRREHRAAGECLCYEGYMKDPVHKHLCIRNEWGTNQGPWPYTIFQRGFDLVLGEQPSDKIFRFTYTLGEGMWLPLSKSFVIPPAELAINPSAKCKTDMTVMEDAVEVREELMTSSSFDSLEVLLDSFGPVRDCSKDNGGCSKNFRCISDRKLDSTGCVCPSGLSPMKDSSGCYDRHIGVDCSDGFNGGCEQLCLQQMAPFPDDPTLYNILMFCGCIEDYKLGVDGRSCQLITETCPEGSDCGESRELPMNQTLFGEMFFGYNNHSKEVAAGQVLKGTFRQNNFARGLDQQLPDGLVVATVPLENQCLEEISEPTPDPDFLTGMVNFSEVSGYPVLQHWKVRSVMYHIKLNQVAISQALSNALHSLDGATSRADFVALLDQFGNHYIQEAIYGFEESCSIWYPNKQVQRRLWLEYEDISKGNSPSDESEERERDPKVLTFPEYITSLSDSGTKHMAAGVRMECHSKGRCPSSCPLCHVTSSPDTPAEPVLLEVTKAAPIYELVTNNQTQRLLQEATMSSLWCSGTGDVIEDWCRCDSTAFGADGLPTCAPLPQPVLRLSTVHEPSSTLVVLEWEHSEPPIGVQIVDYLLRQEKVTDRMDHSKVETETVLSFVDDIISGAKSPCAMPSQVPDKQLTTISLIIRCLEPDTIYMFTLWGVDNTGRRSRPSDVIVKTPCPVVDDVKAQEIADKIYNLFNGYTSGKEQQTAYNTLLDLGSPTLHRVLYHYNQHYESFGEFTWRCEDELGPRKAGLILSQLGDLSSWCNGLLQEPKISLRRSSLKYLGCRYSEIKPYGLDWAELSRDLRKTCEEQTLSIPYNDYGDSKEI

SEQ ID NO: 38008 - protein, 1216 aa, Homo sapiens
MALAGLCALLACCWGPAAVLATAAGDVDPSKELECKLKSITVSALPFLRENDLSIMHSPSASEPKLLFSVRNDFPGEMVVVDDLENTELPYFVLEISGNTEDIPLVRWRQQWLENGTLLFHIHHQDGAPSLPGQDPTEEPQHESAEEELRILHISVMGGMIALLLSILCLVMILYTRRRWCKRRRVPQPQKSASAEAANEIHYIPSVLIGGHGRESLRNARVQGHNSSGTLSIRETPILDGYEYDITDLRHHLQRECMNGGEDFASQVTRTLDSLQGCNEKSGMDLTPGSDNAKLSLMNKYKDNIIATSPVDSNHQQATLLSHTSSSQRKRINNKARAGSAFLNPEGDSGTEAENDPQLTFYTDPSRSRRRSRVGSPRSPVNKTTLTLISITSCVIGLVCSSHVNCPLVVKITLHVPEHLIADGSRFILLEGSQLDASDWLNPAQVVLFSQQNSSGPWAMDLCARRLLDPCEHQCDPETGECLCYEGYMKDPVHKHLCIRNEWGTNQGPWPYTIFQRGFDLVLGEQPSDKIFRFTYTLGEGMWLPLSKSFVIPPAELAINPSAKCKTDMTVMEDAVEVREELMTSSSFDSLEVLLDSFGPVRDCSKDNGGCSKNFRCISDRKLDSTGCVCPSGLSPMKDSSGCYDRHIGVDCSDGFNGGCEQLCLQQMAPFPDDPTLYNILMFCGCIEDYKLGVDGRSCQLITETCPEGSDCGESRELPMNQTLFGEMFFGYNNHSKEVAAGQVLKGTFRQNNFARGLDQQLPDGLVVATVPLENQCLEEISEPTPDPDFLTGMVNFSEVSGYPVLQHWKVRSVMYHIKLNQVAISQALSNALHSLDGATSRADFVALLDQFGNHYIQEAIYGFEESCSIWYPNKQVQRRLWLEYEDISKGNSPSDESEERERDPKVLTFPEYITSLSDSGTKHMAAGVRMECHSKGRCPSSCPLCHVTSSPDTPAEPVLLEVTKAAPIYELVTNNQTQRLLQEATMSSLWCSGTGDVIEDWCRCDSTAFGADGLPTCAPLPQPVLRLSTVHEPSSTLVVLEWEHSEPPIGVQIVDYLLRQEKVTDRMDHSKVETETVLSFVDDIISGAKSPCAMPSQVPDKQLTTISLIIRCLEPDTIYMFTLWGVDNTGRRSRPSDVIVKTPCPVVDDVKAQEIADKIYNLFNGYTSGKEQQTAYNTLLDLGSPTLHRVLYHYNQHYESFGEFTWRCEDELGPR

SEQ ID NO: 38009 - protein, 1218 aa, Homo sapiens
MALAGLCALLACCWGPAAVLATAAGDVDPSKELECKLKSITVSALPFLRENDLSIMHSPSASEPKLLFSVRNDFPGEMVVVDDLENTELPYFVLEISGNTEDIPLVRWRQQWLENGTLLFHIHHQDGAPSLPGQDPTEEPQHESAEEELRILHISVMGGMIALLLSILCLVMILYTRRRWCKRRRVPQPQKSASAEAANEIHYIPSVLIGGHGRESLRNARVQGHNSSGTLSIRETPILDGYEYDITDLRHHLQRECMNGGEDFASQVTRTLDSLQGCNEKSGMDLTPGSDNAKLSLMNKYKDNIIATSPVDSNHQQATLLSHTSSSQRKRINNKARAGSAFLNPEGDSGTEAENDPQLTFYTDPSRSRRRSRVGSPRSPVNKTTLTLISITSCVIGLVCSSHVNCPLVVKITLHVPEHLIADGSRFILLEGSQLDASDWLNPAQVVLFSQQNSSGPWAMDLCARRLLDPCEHQCDPETGECLCYEGYMKDPVHKHLCIRNEWGTNQGPWPYTIFQRGFDLVLGEQPSDKIFRFTYTLGEGMWLPLSKSFVIPPAELAINPSAKCKTDMTVMEDAVEVREELMTSSSFDSLEVLLDSFGPVRDCSKDNGGCSKNFRCISDRKLDSTGCVCPSGLSPMKDSSGCYDRHIGVDCSDGFNGGCEQLCLQQMAPFPDDPTLYNILMFCGCIEDYKLGVDGRSCQLITETCPEGSDCGESRELPMNQTLFGEMFFGYNNHSKEVAAGQVLKGTFRQNNFARGLDQQLPDGLVVATVPLENQCLEEISEPTPDPDFLTGMVNFSEVSGYPVLQHWKVRSVMYHIKLNQVAISQALSNALHSLDGATSRADFVALLDQFGNHYIQEAIYGFEESCSIWYPNKQVQRRLWLEYEDISKGNSPSDESEERERDPKVLTFPEYITSLSDSGTKHMAAGVRMECHSKGRCPSSCPLCHVTSSPDTPAEPVLLEVTKAAPIYELVTNNQTQRLLQEATMSSLWCSGTGDVIEDWCRCDSTAFGADGLPTCAPLPQPVLRLSTVHEPSSTLVVLEWEHSEPPIGVQIVDYLLRQEKVTDRMDHSKVETETVLSFVDDIISGAKSPCAMPSQVPDKQLTTISLIIRCLEPDTIYMFTLWGVDNTGRRSRPSDVIVKTPCPVVDDVKAQEIADKIYNLFNGYTSGKEQQTAYNTLLDLGSPTLHRVLYHYNQHYESFGEFTWRCEDELGPRNQ

SEQ ID NO: 38010 - protein, 440 aa, Homo sapiens
MNTLLCKGMFCLLSWEADSRGRLGEYTLQPLSLQTEETTELGSKKELKSMPFITYLSGLLTAQMLSDDQLISGVEIRCEEKGRCPSTCHLCRRPGKEQLSPTPVLLEINRVVPLYTLIQDNGTKEAFKSALMSSYWCSGKGDVIDDWCRCDLSAFDANGLPNCSPLLQPVLRLSPTVEPSSTVVSLEWVDVQPAIGTKVSDYILQHKKVDEYTDTDLYTGEFLSFADDLLSGLGTSCVAAGRSHGEVPEVSIYSVIFKCLEPDGLYKFTLYAVDTRGRHSELSTVTLRTACPLVDDNKAEEIADKIYNLYNGYTSGKEQQMAYNTLMEVSASMLFRVQHHYNSHYEKFGDFVWRSEDELGPRKAHLILRRLERVSSHCSSLLRSAYIQSRVETVPYLFCRSEEVRPAGMVWYSILKDTKITCEEKMVSMARNTYGESKGR

SEQ ID NO: 38011 - protein, 1339 aa, Homo sapiens
MAAAGARLSPGPGSGLRGRPRLCFHPGPPPLLPLLLLFLLLLPPPPLLAGATAAASREPDSPCRLKTVTVSTLPALRESDIGWSGARAGAGAGTGAGAAAAAASPGSPGSAGTAAESRLLLFVRNELPGRIAVQDDLDNTELPFFTLEMSGTAADISLVHWRQQWLENGTLYFHVSMSSSGQLAQATAPTLQEPSEIVEEQMHILHISVMGGLIALLLLLLVFTVALYAQRRWQKRRRIPQKSASTEATHEIHYIPSVLLGPQARESFRSSRLQTHNSVIGVPIRETPILDDYDCEEDEEPPRRANHVSREDEFGSQVTHTLDSLGHPGEEKVDFEKKAAAEATQETVESLMQKFKESFRANTPIEIGQLQPPLRSTSAGKRKRRSKSRGGISFGRAKGTSGSEADDETQLTFYTEQYRSRRRSKGLLKSPVNKTALTLIAVSSCILAMVCGSQMSCPLTVKVTLHVPEHFIADGSSFVVSEGSYLDISDWLNPAKLSLYYQINATSPWVRDLCGQRTTDACEQLCDPETGECSCHEGYAPDPVHRHLCVRSDWGQSEGPWPYTTLERGYDLVTGEQAPEKILRSTFSLGQGLWLPVSKSFVVPPVELSINPLASCKTDVLVTEDPADVREEAMLSTYFETINDLLSSFGPVRDCSRNNGGCTRNFKCVSDRQVDSSGCVCPEELKPMKDGSGCYDHSKGIDCSDGFNGGCEQLCLQQTLPLPYDATSSTIFMFCGCVEEYKLAPDGKSCLMLSDVCEGPKCLKPDSKFNDTLFGEMLHGYNNRTQHVNQGQVFQMTFRENNFIKDFPQLADGLLVIPLPVEEQCRGVLSEPLPDLQLLTGDIRYDEAMGYPMVQQWRVRSNLYRVKLSTITLAAGFTNVLKILTKESSREELLSFIQHYGSHYIAEALYGSELTCIIHFPSKKVQQQLWLQYQKETTELGSKKELKSMPFITYLSGLLTAQMLSDDQLISGVEIRCEEKGRCPSTCHLCRRPGKEQLSPTPVLLEINRVVPLYTLIQDNGTKEAFKSALMSSYWCSGKGDVIDDWCRCDLSAFDANGLPNCSPLLQPVLRLSPTVEPSSTVVSLEWVDVQPAIGTKVSDYILQHKKVDEYTDTDLYTGEFLSFADDLLSGLGTSCVAAGRSHGEVPEVSIYSVIFKCLEPDGLYKFTLYAVDTRGRHSELSTVTLRTACPLVDDNKAEEIADKIYNLYNGYTSGKEQQMAYNTLMEVSASMLFRVQHHYNSHYEKFGDFVWRSEDELGPRKAHLILRRLERVSSHCSSLLRSAYIQSRVETVPYLFCRSEEVRPAGMVWYSILKDTKITCEEKMVSMARNTYGESKGR

SEQ ID NO: 38012 - protein, 395 aa, Homo sapiens
MPFITYLSGLLTAQMLSDDQLISGVEIRCEEKGRCPSTCHLCRRPGKEQLSPTPVLLEINRVVPLYTLIQDNGTKEAFKSALMSSYWCSGKGDVIDDWCRCDLSAFDANGLPNCSPLLQPVLRLSPTVEPSSTVVSLEWVDVQPAIGTKVSDYILQHKKVDEYTDTDLYTGEFLSFADDLLSGLGTSCVAAGRSHGEVPEVSIYSVIFKCLEPDGLYKFTLYAVDTRGRHSELSTVTLRTACPLVDDNKAEEIADKIYNLYNGYTSGKEQQMAYNTLMEVSASMLFRVQHHYNSHYEKFGDFVWRSEDELGPRKAHLILRRLERVSSHCSSLLRSAYIQSRVETVPYLFCRSEEVRPAGMVWYSILKDTKITCEEKMVSMARNTYYLTLSKVSPF

SEQ ID NO: 38013 - protein, 194 aa, Homo sapiens
MPFITYLSGLLTAQMLSDDQLISGVEIRCEEKGRCPSTCHLCRRPGKEQLSPTPVLLEINRVVPLYTLIQDNGTKEAFKSALMSSYWCSGKGDVIDDWCRCDLSAFDANGLPNCSPLLQPVLRLSPTVEPSSTVVSLEWVDVQPAIGTKVSDYILQHKKVDEYTDTDLYTVYCWITFIDLRILNQPCIPGMKPT

SEQ ID NO: 38014 - protein, 1288 aa, Homo sapiens
MAAAGARLSPGPGSGLRGRPRLCFHPGPPPLLPLLLLFLLLLPPPPLLAGATAAASREPDSPCRLKTVTVSTLPALRESDIGWSGARAGAGAGTGAGAAAAAASPGSPGSAGTAAESRLLLFVRNELPGRIAVQDDLDNTELPFFTLEMSGTAADISLVHWRQQWLENGTLYFHVSMSSSGQLAQATAPTLQEPSEIVEEQMHILHISVMGGLIALLLLLLVFTVALYAQRRWQKRRRIPQKSASTEATHEIHYIPSVLLGPQARESFRSSRLQTHNSVIGVPIRETPILDDYDCEEDEEPPRRANHVSREDEFGSQVTHTLDSLGHPGEEKVDFEKKGGISFGRAKGTSGSEADDETQLTFYTEQYRSRRRSKGLLKSPVNKTALTLIAVSSCILAMVCGSQMSCPLTVKVTLHVPEHFIADGSSFVVSEGSYLDISDWLNPAKLSLYYQINATSPWVRDLCGQRTTDACEQLCDPETGECSCHEGYAPDPVHRHLCVRSDWGQSEGPWPYTTLERGYDLVTGEQAPEKILRSTFSLGQGLWLPVSKSFVVPPVELSINPLASCKTDVLVTEDPADVREEAMLSTYFETINDLLSSFGPVRDCSRNNGGCTRNFKCVSDRQVDSSGCVCPEELKPMKDGSGCYDHSKGIDCSDGFNGGCEQLCLQQTLPLPYDATSSTIFMFCGCVEEYKLAPDGKSCLMLSDVCEGPKCLKPDSKFNDTLFGEMLHGYNNRTQHVNQGQVFQMTFRENNFIKDFPQLADGLLVIPLPVEEQCRGVLSEPLPDLQLLTGDIRYDEAMGYPMVQQWRVRSNLYRVKLSTITLAAGFTNVLKILTKESSREELLSFIQHYGSHYIAEALYGSELTCIIHFPSKKVQQQLWLQYQKETTELGSKKELKSMPFITYLSGLLTAQMLSDDQLISGVEIRCEEKGRCPSTCHLCRRPGKEQLSPTPVLLEINRVVPLYTLIQDNGTKEAFKSALMSSYWCSGKGDVIDDWCRCDLSAFDANGLPNCSPLLQPVLRLSPTVEPSSTVVSLEWVDVQPAIGTKVSDYILQHKKVDEYTDTDLYTGEFLSFADDLLSGLGTSCVAAGRSHGEVPEVSIYSVIFKCLEPDGLYKFTLYAVDTRGRHSELSTVTLRTACPLVDDNKAEEIADKIYNLYNGYTSGKEQQMAYNTLMEVSASMLFRVQHHYNSHYEKFGDFVWRSEDELGPRKAHLILRRLERVSSHCSSLLRSAYIQSRVETVPYLFCRSEEVRPAGMVWYSILKDTKITCEEKMVSMARNTYGESKGR

SEQ ID NO: 38015 - protein, 395 aa, Homo sapiens; identical to SEQ ID NO: 38012

SEQ ID NO: 38016 - protein, 1335 aa, Homo sapiens
MAAAGARLSPGPGSGLRGRPRLCFHPGPPPLLPLLLLFLLLLPPPPLLAGATAAASREPDSPCRLKTVTVSTLPALRESDIGWSGARAGAGAGTGAGAAAAAASPGSPGSAGTAAESRLLLFVRNELPGRIAVQDDLDNTELPFFTLEMSGTAADISLVHWRQQWLENGTLYFHVSMSSSGQLAQATAPTLQEPSEIVEEQMHILHISVMGGLIALLLLLLVFTVALYAQRRWQKRRRIPQKSASTEATHEIHYIPSVLLGPQARESFRSSRLQTHNSVIGVPIRETPILDDYDCEEDEEPPRRANHVSREDEFGSQVTHTLDSLGHPGEEKVDFEKKAAAEATQETVESLMQKFKESFRANTPIEIGQLQPPLRSTSAGKRKRRSKSRGGISFGRAKGTSGSEADDETQLTFYTEQYRSRRRSKGLLKSPVNKTALTLIAVSSCILAMVCGSQMSCPLTVKVTLHVPEHFIADGSSFVVSEGSYLDISDWLNPAKLSLYYQINATSPWVRDLCGQRTTDACEQLCDPETGECSCHEGYAPDPVHRHLCVRSDWGQSEGPWPYTTLERGYDLVTGEQAPEKILSLGQGLWLPVSKSFVVPPVELSINPLASCKTDVLVTEDPADVREEAMLSTYFETINDLLSSFGPVRDCSRNNGGCTRNFKCVSDRQVDSSGCVCPEELKPMKDGSGCYDHSKGIDCSDGFNGGCEQLCLQQTLPLPYDATSSTIFMFCGCVEEYKLAPDGKSCLMLSDVCEGPKCLKPDSKFNDTLFGEMLHGYNNRTQHVNQGQVFQMTFRENNFIKDFPQLADGLLVIPLPVEEQCRGVLSEPLPDLQLLTGDIRYDEAMGYPMVQQWRVRSNLYRVKLSTITLAAGFTNVLKILTKESSREELLSFIQHYGSHYIAEALYGSELTCIIHFPSKKVQQQLWLQYQKETTELGSKKELKSMPFITYLSGLLTAQMLSDDQLISGVEIRCEEKGRCPSTCHLCRRPGKEQLSPTPVLLEINRVVPLYTLIQDNGTKEAFKSALMSSYWCSGKGDVIDDWCRCDLSAFDANGLPNCSPLLQPVLRLSPTVEPSSTVVSLEWVDVQPAIGTKVSDYILQHKKVDEYTDTDLYTGEFLSFADDLLSGLGTSCVAAGRSHGEVPEVSIYSVIFKCLEPDGLYKFTLYAVDTRGRHSELSTVTLRTACPLVDDNKAEEIADKIYNLYNGYTSGKEQQMAYNTLMEVSASMLFRVQHHYNSHYEKFGDFVWRSEDELGPRKAHLILRRLERVSSHCSSLLRSAYIQSRVETVPYLFCRSEEVRPAGMVWYSILKDTKITCEEKMVSMARNTYGESKGR

SEQ ID NO: 38017 - protein, 98 aa, Homo sapiens
  VARIANT 1: note = MOD_RES - Any amino acid
XMAYNTLMEVSASMLFRVQHHYNSHYEKFGDFVWRSEDELGPSLLESFMSLQDINLLERRPGRPQRPGNPLSNVSWRISEIAPTSHTDMSAGIKETAS

SEQ ID NO: 38018 - protein, 2275 aa, Homo sapiens
MAAERRCGSMRDLRAQVTSGLLPFPEVTLQALGEDEITLESVLRGKFAAGKNGLACLACGPQLEVVNSITGERLSAYRFSGVNEQPPVVLAVKEFSWQKRTGLLIGLEETEGSVLCLYDLGISKVVKAVVLPGRVTAIEPIINHGGASASTQHLHPSLRWLFGVAAVVTDVGQILLVDLCLDDLSCNQNEVEASDLEVLTGIPAEVPHIRESVMRQGRHLCFQLVSPTGTAVSTLSYISRTNQLAVGFSDGYLALWNMKSMKREYYIQLESGQVPVYAVTFQEPENDPRNCCYLWAVQSTQDSEGDVLSLHLLQLAFGNRKCLASGQILYEGLEYCEERYTLDLTGGMFPLRGQTSNTKLLGCQSIEKFRSHGDREEGVNEALSPDTSVSVFTWQVNIYGQGKPSVYLGLFDINRWYHAQMPDSLRSGEYLHNCSYFALWSLESVVSRTSPHGILDILVHERSLNRGVPPSYPPPEQFFNPSTYNFDATCLLNSGVVHLTCTGFQKETLTFLKKSGPSLNELIPDGYNRCLVAGLLSPRFVDVQPSSLSQEEQLEAILSAAIQTSSLGLLTGYIRRWITEEQPNSATNLRFVLEWTWNKVVLTKEEFDRLCVPLFDGSCHFMDPQTIQSIQQCYLLLSNLNIVLSCFASEAREITERGLIDLSNKFVVSHLICQYAQVVLWFSHSGLLPEGIDDSVQLSRLCYNYPVIQNYYTSRRQKFERLSRGKWNPDCLMIDGLVSQLGERIEKLWKRDEGGTGKYPPASLHAVLDMYLLDGVTEAAKHSITIYLLLDIMYSFPNKTDTPIESFPTVFAISWGQVKLIQGFWLIDHNDYESGLDLLFHPATAKPLSWQHSKIIQAFMSQGEHRQALRYIQTMKPTVSSGNDVILHLTVLLFNRCMVEAWNFLRQHCNRLNIEELLKHMYEVCQEMGLMEDLLKLPFTDTEQECLVKFLQSSASVQNHEFLLVHHLQRANYVPALKLNQTLKINVMNDRDPRLRERSLARNSILDQYGKILPRVHRKLAIERAKPYHLSTSSVFRLVSRPKPLSAVPKQVVTGTVLTRSVFINNVLSKIGEVWASKEPINSTTPFNSSKIEEPSPIVYSLPAPELPEAFFGTPISKASQKISRLLDLVVQPVPRPSQCSEFIQQSSMKSPLYLVSRSLPSSSQLKGSPQAISRASELHLLETPLVVKKAKSLAMSVTTSGFSEFTPQSILRSTLRSTPLASPSPSPGRSPQRLKETRISFVEEDVHPKWIPGAADDSKLEVFTTPKKCAVPVETEWLKSKDRTTSFFLNSPEKEHQEMDEGSQSLEKLDVSKGNSSVSITSDETTLEYQDAPSPEDLEETVFTASKPKSSSTALTTNVTEQTEKDGDKDVFASEVTPSDLQKQMGNLEDAETKDLLVAAEAFSELNHLSPVQGTEASLCAPSVYEGKIFTQKSKVPVLDEGLTSVETYTPAIRANDNKSMADVLGDGGNSSLTISEGPIVSERRLNQEVALNLKEDHEVEVGVLKESVDLPEEKLPISDSPPDTQEIHVIEQEKLEAQDSGEEARNLSFNELYPSGTLKLQYNFDTIDQQFCDLADNKDTAECDIAEVDGELFVAQSNFTLILEGEEGEVEPGDFASSDVLPKAANTATEEKLVCSGENDNHGQIANLPSAVTSDQKSQKVDTLPYVPEPIKVAIAENLLDVIKDTRSKEITSDTMEQSIHETIPLVSQNIMCPTKLVKSAFKTAQETSTMTMNVSQVDDVVSSKTRTRGQRIQNVNVKSAQQEASADVATPKMPGQSVRKKTRKAKEISEASENIYSDVRGLSQNQQIPQNSVTPRRGRRKKEVNQDILENTSSVEQELQITTGRESKRLKSSQLLEPAVEETTKKEVKVSSVTKRTPRRIKRSVENQESVEIINDLKVSTVTSPSRMIRKLRSTNLDASENTGNKQDDKSSDKQLRIKHVRRVRGREVSPSDVREDSNLESSQLTVQAEFDMSAIPRKRGRPRKINPSEDVGSKAVKEERSPKKKEAPSIRRRSTRNTPAKSENVDVGKPALGKSILVPNEELSMVMSSKKKLTKKTESQSQKRSLHSVSEERTDEMTHKETNEQEERLLATASFTKSSRSSRTRSSKAILLPDLSEPNNEPLFSPASEVPRKAKAKKIEVPAQLKELVSDLSSQFVISPPALRSRQKNTSNKNKLEDELKDDAQSVETLGKPKAKRIRTSKTKQASKNTEKESAWSPPPIEIRLISPLASPADGVKSKPRKTTEVTGTGLGRNRKKLSSYPKQILRRKML

SEQ ID NO: 38019 - protein, 2301 aa, Homo sapiens
MDSLAGLSPREAAGVLSLSCVGVCSTCAWAWPHGSMRDLRAQVTSGLLPFPEVTLQALGEDEITLESVLRGKFAAGKNGLACLACGPQLEVVNSITGERLSAYRFSGVNEQPPVVLAVKEFSWQKRTGLLIGLEETEGSVLCLYDLGISKVVKAVVLPGRVTAIEPIINHGGASASTQHLHPSLRWLFGVAAVVTDVGQILLVDLCLDDLSCNQNEVEASDLEVLTGIPAEVPHIRESVMRQGRHLCFQLVSPTGTAVSTLSYISRTNQLAVGFSDGYLALWNMKSMKREYYIQLESGQVPVYAVTFQEPENDPRNCCYLWAVQSTQDSEGDVLSLHLLQLAFGNRKCLASGQILYEGLEYCEERYTLDLTGGMFPLRGQTSNTKLLGCQSIEKFRSHGDREEGVNEALSPDTSVSVFTWQVNIYGQGKPSVYLGLFDINRWYHAQMPDSLRSGEYLHNCSYFALWSLESVVSRTSPHGILDILVHERSLNRGVPPSYPPPEQFFNPSTYNFDATCLLNSGVVHLTCTGFQKETLTFLKKSGPSLNELIPDGYNRCLVAGLLSPRFVDVQPSSLSQEEQLEAILSAAIQTSSLGLLTGYIRRWITEEQPNSATNLRFVLEWTWNKVVLTKEEFDRLCVPLFDGSCHFMDPQTIQSIQQCYLLLSNLNIVLSCFASEAREITERGLIDLSNKFVVSHLICQYAQVVLWFSHSGLLPEGIDDSVQLSRLCYNYPVIQNYYTSRRQKFERLSRGKWNPDCLMIDGLVSQLGERIEKLWKRDEGGTGKYPPASLHAVLDMYLLDGVTEAAKHSITIYLLLDIMYSFPNKTDTPIESFPTVFAISWGQVKLIQGFWLIDHNDYESGLDLLFHPATAKPLSWQHSKIIQAFMSQGEHRQALRYIQTMKPTVSSGNDVILHLTVLLFNRCMVEAWNFLRQHCNRLNIEELLKHMYEVCQEMGLMEDLLKLPFTDTEQECLVKFLQSSASVQNHEFLLVHHLQRANYVPALKLNQTLKINVMNDRDPRLRERSLARNSILDQYGKILPRVHRKLAIERAKPYHLSTSSVFRLVSRPKPLSAVPKQVVTGTVLTRSVFINNVLSKIGEVWASKEPINSTTPFNSSKIEEPSPIVYSLPAPELPEAFFGTPISKASQKISRLLDLVVQPVPRPSQCSEFIQQSSMKSPLYLVSRSLPSSSQLKGSPQAISRASELHLLETPLVVKKAKSLAMSVTTSGFSEFTPQSILRSTLRSTPLASPSPSPGRSPQRLKETRISFVEEDVHPKWIPGAADDSKLEVFTTPKKCAVPVETEWLKSKDRTTSFFLNSPEKEHQEMDEGSQSLEKLDVSKGNSSVSITSDETTLEYQDAPSPEDLEETVFTASKPKSSSTALTTNVTEQTEKDGDKDVFASEVTPSDLQKQMGNLEDAETKDLLVAAEAFSELNHLSPVQGTEASLCAPSVYEGKIFTQKSKVPVLDEGLTSVETYTPAIRANDNKSMADVLGDGGNSSLTISEGPIVSERRLNQEVALNLKEDHEVEVGVLKESVDLPEEKLPISDSPPDTQEIHVIEQEKLEAQDSGEEARNLSFNELYPSGTLKLQYNFDTIDQQFCDLADNKDTAECDIAEVDGELFVAQSNFTLILEGEEGEVEPGDFASSDVLPKAANTATEEKLVCSGENDNHGQIANLPSAVTSDQKSQKVDTLPYVPEPIKVAIAENLLDVIKDTRSKEITSDTMEQSIHETIPLVSQNIMCPTKLVKSAFKTAQETSTMTMNVSQVDDVVSSKTRTRGQRIQNVNVKSAQQEASADVATPKMPGQSVRKKTRKAKEISEASENIYSDVRGLSQNQQIPQNSVTPRRGRRKKEVNQDILENTSSVEQELQITTGRESKRLKSSQLLEPAVEETTKKEVKVSSVTKRTPRRIKRSVENQESVEIINDLKVSTVTSPSRMIRKLRSTNLDASENTGNKQDDKSSDKQLRIKHVRRVRGREVSPSDVREDSNLESSQLTVQAEFDMSAIPRKRGRPRKINPSEDVGSKAVKEERSPKKKEAPSIRRRSTRNTPAKSENVDVGKPALGKSILVPNEELSMVMSSKKKLTKKTESQSQKRSLHSVSEERTDEMTHKETNEQEERLLATASFTKSSRSSRTRSSKAILLPDLSEPNNEPLFSPASEVPRKAKAKKIEVPAQLKELVSDLSSQFVISPPALRSRQKNTSNKNKLEDELKDDAQSVETLGKPKAKRIRTSKTKQASKNTEKESAWSPPPIEIRLISPLASPADGVKSKPRKTTEVTGTGLGRNRKKLSSYPKQILRRKML

SEQ ID NO: 38020 - protein, 2266 aa, Homo sapiens
MRDLRAQVTSGLLPFPEVTLQALGEDEITLESVLRGKFAAGKNGLACLACGPQLEVVNSITGERLSAYRFSGVNEQPPVVLAVKEFSWQKRTGLLIGLEETEGSVLCLYDLGISKVVKAVVLPGRVTAIEPIINHGGASASTQHLHPSLRWLFGVAAVVTDVGQILLVDLCLDDLSCNQNEVEASDLEVLTGIPAEVPHIRESVMRQGRHLCFQLVSPTGTAVSTLSYISRTNQLAVGFSDGYLALWNMKSMKREYYIQLESGQVPVYAVTFQEPENDPRNCCYLWAVQSTQDSEGDVLSLHLLQLAFGNRKCLASGQILYEGLEYCEERYTLDLTGGMFPLRGQTSNTKLLGCQSIEKFRSHGDREEGVNEALSPDTSVSVFTWQVNIYGQGKPSVYLGLFDINRWYHAQMPDSLRSGEYLHNCSYFALWSLESVVSRTSPHGILDILVHERSLNRGVPPSYPPPEQFFNPSTYNFDATCLLNSGVVHLTCTGFQKETLTFLKKSGPSLNELIPDGYNRCLVAGLLSPRFVDVQPSSLSQEEQLEAILSAAIQTSSLGLLTGYIRRWITEEQPNSATNLRFVLEWTWNKVVLTKEEFDRLCVPLFDGSCHFMDPQTIQSIQQCYLLLSNLNIVLSCFASEAREITERGLIDLSNKFVVSHLICQYAQVVLWFSHSGLLPEGIDDSVQLSRLCYNYPVIQNYYTSRRQKFERLSRGKWNPDCLMIDGLVSQLGERIEKLWKRDEGGTGKYPPASLHAVLDMYLLDGVTEAAKHSITIYLLLDIMYSFPNKTDTPIESFPTVFAISWGQVKLIQGFWLIDHNDYESGLDLLFHPATAKPLSWQHSKIIQAFMSQGEHRQALRYIQTMKPTVSSGNDVILHLTVLLFNRCMVEAWNFLRQHCNRLNIEELLKHMYEVCQEMGLMEDLLKLPFTDTEQECLVKFLQSSASVQNHEFLLVHHLQRANYVPALKLNQTLKINVMNDRDPRLRERSLARNSILDQYGKILPRVHRKLAIERAKPYHLSTSSVFRLVSRPKPLSAVPKQVVTGTVLTRSVFINNVLSKIGEVWASKEPINSTTPFNSSKIEEPSPIVYSLPAPELPEAFFGTPISKASQKISRLLDLVVQPVPRPSQCSEFIQQSSMKSPLYLVSRSLPSSSQLKGSPQAISRASELHLLETPLVVKKAKSLAMSVTTSGFSEFTPQSILRSTLRSTPLASPSPSPGRSPQRLKETRISFVEEDVHPKWIPGAADDSKLEVFTTPKKCAVPVETEWLKSKDRTTSFFLNSPEKEHQEMDEGSQSLEKLDVSKGNSSVSITSDETTLEYQDAPSPEDLEETVFTASKPKSSSTALTTNVTEQTEKDGDKDVFASEVTPSDLQKQMGNLEDAETKDLLVAAEAFSELNHLSPVQGTEASLCAPSVYEGKIFTQKSKVPVLDEGLTSVETYTPAIRANDNKSMADVLGDGGNSSLTISEGPIVSERRLNQEVALNLKEDHEVEVGVLKESVDLPEEKLPISDSPPDTQEIHVIEQEKLEAQDSGEEARNLSFNELYPSGTLKLQYNFDTIDQQFCDLADNKDTAECDIAEVDGELFVAQSNFTLILEGEEGEVEPGDFASSDVLPKAANTATEEKLVCSGENDNHGQIANLPSAVTSDQKSQKVDTLPYVPEPIKVAIAENLLDVIKDTRSKEITSDTMEQSIHETIPLVSQNIMCPTKLVKSAFKTAQETSTMTMNVSQVDDVVSSKTRTRGQRIQNVNVKSAQQEASADVATPKMPGQSVRKKTRKAKEISEASENIYSDVRGLSQNQQIPQNSVTPRRGRRKKEVNQDILENTSSVEQELQITTGRESKRLKSSQLLEPAVEETTKKEVKVSSVTKRTPRRIKRSVENQESVEIINDLKVSTVTSPSRMIRKLRSTNLDASENTGNKQDDKSSDKQLRIKHVRRVRGREVSPSDVREDSNLESSQLTVQAEFDMSAIPRKRGRPRKINPSEDVGSKAVKEERSPKKKEAPSIRRRSTRNTPAKSENVDVGKPALGKSILVPNEELSMVMSSKKKLTKKTESQSQKRSLHSVSEERTDEMTHKETNEQEERLLATASFTKSSRSSRTRSSKAILLPDLSEPNNEPLFSPASEVPRKAKAKKIEVPAQLKELVSDLSSQFVISPPALRSRQKNTSNKNKLEDELKDDAQSVETLGKPKAKRIRTSKTKQASKNTEKESAWSPPPIEIRLISPLASPADGVKSKPRKTTEVTGTGLGRNRKKLSSYPKQILRRKML

SEQ ID NO: 38021 - protein, 1188 aa, Homo sapiens
MKAADEPAYLTVGTDVSAKYRGAFCEAKIKTVKRLVKVKVLLKQDNTTQLVQDDQVKGPLRVGAIVETRTSDGSFQEAIISKLTDASWYTVVFDDGDERTLRRTSLCLKGERHFAESETLDQLPLTNPEHFGTPVIAKKTNRGRRSSLPVTEDEKEEESSEEEDEDKRRLNDELLGKVVSVVSATERTEWYPALVISPSCNDDITVKKDQCLVRSFIDSKFYSIARKDIKEVDILNLPESELSTKPGLQKASIFLKTRVVPDNWKMDISEILESSSSDDEDGPAEENDEEKEKEAKKTEEEVPEEELDPEERDNFLQQLYKFMEDRGTPINKPPVLGYKDLNLFKLFRLVYHQGGCDNIDSGAVWKQIYMDLGIPILNSAASYNVKTAYRKYLYGFEEYCRSANIQFRTVHHHEPKVKEEKKDLEESMEEALKLDQEMPLTEVKSEPEENIDSNSESEREEIELKSPRGRRRIARDVNSIKKEIEEEKTEDKLKDNDTENKDVDDDYETAEKKENELLLGRKNTPKQKEKKIKKQEDSDKDSDEEEEKSQEREETESKCDSEGEEDEEDMEPCLTGTKVKVKYGRGKTQKIYEASIKSTEIDDGEVLYLVHYYGWNVRYDEWVKADRIIWPLDKGGPKKKQKKKAKNKEDSEKDEKRDEERQKSKRGRPPLKSTLSSNMPYGLSKTANSEGKSDSCSSDSETEDALEKNLINEELSLKDELEKNENLNDDKLDEENPKISAHILKENDRTQMQPLETLKLEVGENEQIVQIFGNKMEKTEEVKKEAEKSPKGKGRRSKTKDLSLEIIKISSFGQNEAGSEPHIEAHSLELSSLDNKNFSSATEDEIDQCVKEKKLKRKILGQSSPEKKIRIENGMEMTNTVSQERTSDCIGSEGMKNLNFEQHFERENEGMPSLIAESNQCIQQLTSERFDSPAEETVNIPLKEDEDAMPLIGPETLVCHEVDLDDLDEKDKTSIEDVAVESSESNSLVSIPPALPPVVQHNFSVASPLTLSQDESRSVKSESDITIEVDSIAEESQEGLCERESANGFETNVASGTCSIIVQERESREKGQKRPSDGNSGLMAKKQKRTPKRTSAAAKNEKNGTDELDNMNSTERISFLQEKLQEIRKYYMSLKSEVATIDRRRKRLKKKDREVSHAGASMSSASSDTGMSPSSSSPPQNVLAVECR

SEQ ID NO: 38022 - protein, 1257 aa, Homo sapiens
MKAADEPAYLTVGTDVSAKYRGAFCEAKIKTVKRLVKVKVLLKQDNTTQLVQDDQVKGPLRVGAIVETRTSDGSFQEAIISKLTDASWYTVVFDDGDERTLRRTSLCLKGERHFAESETLDQLPLTNPEHFGTPVIAKKTNRGRRSSLPVTEDEKEEESSEEEDEDKRRLNDELLGKVVSVVSATERTEWYPALVISPSCNDDITVKKDQCLVRSFIDSKFYSIARKDIKEVDILNLPESELSTKPGLQKASIFLKTRVVPDNWKMDISEILESSSSDDEDGPAEENDEEKEKEAKKTEEEVPEEELDPEERDNFLQQLYKFMEDRGTPINKPPVLGYKDLNLFKLFRLVYHQGGCDNIDSGAVWKQIYMDLGIPILNSAASYNVKTAYRKYLYGFEEYCRSANIQFRTVHHHEPKVKEEKKDLEESMEEALKLDQEMPLTEVKSEPEENIDSNSESEREEIELKSPRGRRRIARDVNSIKKEIEEEKTEDKLKDNDTENKDVDDDYETAEKKENELLLGRKNTPKQKEKKIKKQEDSDKDSDEEEEKSQEREETESKCDSEGEEDEEDMEPCLTGTKVKVKYGRGKTQKIYEASIKSTEIDDGEVLYLVHYYGWNVRYDEWVKADRIIWPLDKGGPKKKQKKKAKNKEDSEKDEKRDEERQKSKRGRPPLKSTLSSNMPYGLSKTANSEGKSDSCSSDSETEDALEKNLINEELSLKDELEKNENLNDDKLDEENPKISAHILKENDRTQMQPLETLKLEVGENEQIVQIFGNKMEKTEEVKKEAEKSPKGKGRRSKTKDLSLEIIKISSFGQNEAGSEPHIEAHSLELSSLDNKNFSSATEDEIDQCVKEKKLKRKILGQSSPEKKIRIENGMEMTNTVSQERTSDCIGSEGMKNLNFEQHFERENEGMPSLIAESNQCIQQLTSERFDSPAEETVNIPLKEDEDAMPLIGPETLVCHEVDLDDLDEKDKTSIEDVAVESSESNSLVSIPPALPPVVQHNFSVASPLTLSQDESRSVKSESDITIEVDSIAEESQEGLCERESANGFETNVASGTCSIIVQERESREKGQKRPSDGNSGLMAKKQKRTPKRTSAAAKNEKNGTGQSSDSEDLPVLDNSSKCTPVKHLNVSKPQKLARSPARISPHIKDGEKDKHREKHPNSSPRTYKWSFQLNELDNMNSTERISFLQEKLQEIRKYYMSLKSEVATIDRRRKRLKKKDREVSHAGASMSSASSDTGMSPSSSSPPQNVLAVECR

SEQ ID NO: 38023 - protein, 1203 aa, Homo sapiens
MKAADEPAYLTVGTDVSAKYRGAFCEAKIKTVKRLVKVKVLLKQDNTTQLVQDDQVKGPLRVGAIVETRTSDGSFQEAIISKLTDASWYTVVFDDGDERTLRRTSLCLKGERHFAESETLDQLPLTNPEHFGTPVIAKKTNRGRRSSLPVTEDEKEEESSEEEDEDKRRLNDELLGKVVSVVSATERTEWYPALVISPSCNDDITVKKDQCLVRSFIDSKFYSIARKDIKEVDILNLPESELSTKPGLQKASIFLKTRVVPDNWKMDISEILESSSSDDEDGPAEENDEEKEKEAKKTEEEVPEEELDPEERDNFLQQLYKFMEDRGTPINKPPVLGYKDLNLFKLFRLVYHQGGCDNIDSGAVWKQIYMDLGIPILNSAASYNVKTAYRKYLYGFEEYCRSANIQFRTVHHHEPKVKEEKKDLEESMEEALKLDQEMPLTEVKSEPEENIDSNSESEREEIELKSPRGRRRIARDVNSIKKEIEEEKTEDKLKDNDTENKDVDDDYETAEKKENELLLGRKNTPKQKEKKIKKQEDSDKDSDEEEEKSQEREETESKCDSEGEEDEEDMEPCLTGTKVKVKYGRGKTQKIYEASIKSTEIDDGEVLYLVHYYGWNVRYDEWVKADRIIWPLDKGGPKKKQKKKAKNKEDSEKDEKRDEERQKSKRGRPPLKSTLSSNMPYGLSKTANSEGKSDSCSSDSETEDALEKNLINEELSLKDELEKNENLNDDKLDEENPKISAHILKENDRTQMQPLETLKLEVGENEQIVQIFGNKMEKTEEVKKEAEKSPKGKGRRSKTKDLSLEIIKISSFGQNEAGSEPHIEAHSLELSSLDNKNFSSATEDEIDQCVKEKKLKRKILGQSSPEKKIRIENGMEMTNTVSQERTSDCIGSEGMKNLNFEQHFERENEGMPSLIAESNQCIQQLTSERFDSPAEETVNIPLKEDEDAMPLIGPETLVCHEVDLDDLDEKDKTSIEDVAVESSESNSLVSIPPALPPVVQHNFSVASPLTLSQDESRSVKSESDITIEVDSIAEESQEGLCERESANGFETNVASGTCSIIVQERESREKGQKRPSDGNSGLMAKKQKRTPKRTSAAAKNEKNGTGQSSDSEDLPVLDNSNELDNMNSTERISFLQEKLQEIRKYYMSLKSEVATIDRRRKRLKKKDREVSHAGASMSSASSDTGMSPSSSSPPQNVLAVECR

SEQ ID NO: 38024 - protein, 54 aa, Homo sapiens
MKAADEPAYLTVGTDVSAKYRGAFCEAKIKTVKRLVKVKVLLKQDNTTQLVQDD

SEQ ID NO: 38025 - protein, 1188 aa, Homo sapiens; identical to SEQ ID NO: 38021

SEQ ID NO: 38026 - protein, 1312 aa, Homo sapiens
MKALDEPPYLTVGTDVSAKYRGAFCEAKIKTAKRLVKVKVTFRHDSSTVEVQDDHIKGPLKVGAIVEVKNLDGAYQEAVINKLTDASWYTVVFDDGDEKTLRRSSLCLKGERHFAESETLDQLPLTNPEHFGTPVIGKKTNRGRRSNHIPEEESSSSSSDEDEDDRKQIDELLGKVVCVDYISLDKKKALWFPALVVCPDCSDEIAVKKDNILVRSFKDGKFTSVPRKDVHEITSDTAPKPDAVLKQAFEQALEFHKSRTIPANWKTELKEDSSSSEAEEEEEEEDDEKEKEDNSSEEEEEIEPFPEERENFLQQLYKFMEDRGTPINKRPVLGYRNLNLFKLFRLVHKLGGFDNIESGAVWKQVYQDLGIPVLNSAAGYNVKCAYKKYLYGFEEYCRSANIEFQMALPEKVVNKQCKECENVKEIKVKEENETEIKEIKMEEERNIIPREEKPIEDEIERKENIKPSLGSKKNLLESIPTHSDQEKEVNIKKPEDNENLDDKDDDTTRVDESLNIKVEAEEEKAKSGDETNKEEDEDDEEAEEEEEEEEEEEDEDDDDNNEEEEFECYPPGMKVQVRYGRGKNQKMYEASIKDSDVEGGEVLYLVHYCGWNVRYDEWIKADKIVRPADKNVPKIKHRKKIKNKLDKEKDKDEKYSPKNCKLRRLSKPPFQTNPSPEMVSKLDLTDAKNSDTAHIKSIEITSILNGLQASESSAEDSEQEDERGAQDMDNNGKEESKIDHLTNNRNDLISKEEQNSSSLLEENKVHADLVISKPVSKSPERLRKDIEVLSEDTDYEEDEVTKKRKDVKKDTTDKSSKPQIKRGKRRYCNTEECLKTGSPGKKEEKAKNKESLCMENSSNSSSDEDEEETKAKMTPTKKYNGLEEKRKSLRTTGFYSGFSEVAEKRIKLLNNSDERLQNSRAKDRKDVWSSIQGQWPKKTLKELFSDSDTEAAASPPHPAPEEGVAEESLQTVAEEESCSPSVELEKPPPVNVDSKPIEEKTVEVNDRKAEFPSSGSNSVLNTPPTTPESPSSVTVTEGSRQQSSVTVSEPLAPNQEEVRSIKSETDSTIEVDSVAGELQDLQSEGNSSPAGFDASVSSSSSNQPEPEHPEKACTGQKRVKDAQGGGSSSKKQKRSHKATVVNNKKKGKGTNSSDSEELSAGESITKSQPVKSVSTGMKSHSTKSPARTQSPGKCGKNGDKDPDLKEPSNRLPKVYKWSFQMSDLENMTSAERITILQEKLQEIRKHYLSLKSEVASIDRRRKRLKKKERESAATSSSSSSPSSSSITAAVMLTLAEPSMSSASQNGMSVECR

SEQ ID NO: 38027 - protein, 1226 aa, Homo sapiens
MKALDEPPYLTVGTDVSAKYRGAFCEAKIKTAKRLVKVKVTFRHDSSTVEVQDDHIKGPLKVGAIVEVKNLDGAYQEAVINKLTDASWYTVVFDDGDEKTLRRSSLCLKGERHFAESETLDQLPLTNPEHFGTPVIGKKTNRGRRSNHIPEEESSSSSSDEDEDDRKQIDELLGKVVCVDYISLDKKKALWFPALVVCPDCSDEIAVKKDNILVRSFKDGKFTSVPRKDVHEITSDTAPKPDAVLKQAFEQALEFHKSRTIPANWKTELKEDSSSSEAEEEEEEEDDEKEKEDNSSEEEEEIEPFPEERENFLQQLYKFMEDRGTPINKRPVLGYRNLNLFKLFRLVHKLGGFDNIESGAVWKQVYQDLGIPVLNSAAGYNVKCAYKKYLYGFEEYCRSANIEFQMALPEKVVNKQCKECENVKEIKVKEENETEIKEIKMEEERNIIPREEKPIEDEIERKENIKPSLGSKKNLLESIPTHSDQEKEVNIKKPEDNENLDDKDDDTTRVDESLNIKVEAEEEKAKSGYDEWIKADKIVRPADKNVPKIKHRKKIKNKLDKEKDKDEKYSPKNCKLRRLSKPPFQTNPSPEMVSKLDLTDAKNSDTAHIKSIEITSILNGLQASESSAEDSEQEDERGAQDMDNNGKEESKIDHLTNNRNDLISKEEQNSSSLLEENKVHADLVISKPVSKSPERLRKDIEVLSEDTDYEEDEVTKKRKDVKKDTTDKSSKPQIKRGKRRYCNTEECLKTGSPGKKEEKAKNKESLCMENSSNSSSDEDEEETKAKMTPTKKYNGLEEKRKSLRTTGFYSGFSEVAEKRIKLLNNSDERLQNSRAKDRKDVWSSIQGQWPKKTLKELFSDSDTEAAASPPHPAPEEGVAEESLQTVAEEESCSPSVELEKPPPVNVDSKPIEEKTVEVNDRKAEFPSSGSNSVLNTPPTTPESPSSVTVTEGSRQQSSVTVSEPLAPNQEEVRSIKSETDSTIEVDSVAGELQDLQSEGNSSPAGFDASVSSSSSNQPEPEHPEKACTGQKRVKDAQGGGSSSKKQKRSHKATVVNNKKKGKGTNSSDSEELSAGESITKSQPVKSVSTGMKSHSTKSPARTQSPGKCGKNGDKDPDLKEPSNRLPKVYKWSFQMSDLENMTSAERITILQEKLQEIRKHYLSLKSEVASIDRRRKRLKKKERESAATSSSSSSPSSSSITAAVMLTLAEPSMSSASQNGMSVECR

SEQ ID NO: 38028 - protein, 1312 aa, Homo sapiens; identical to SEQ ID NO: 38026

SEQ ID NO: 38029 - protein, 1153 aa, Homo sapiens
MKALDEPPYLTVGTDVSAKYRGAFCEAKIKTAKRLVKVKVTFRHDSSTVEVQDDHIKGPLKVGAIVEVKNLDGAYQEAVINKLTDASWYTVVFDDGDEKTLRRSSLCLKGERHFAESETLDQLPLTNPEHFGTPVIGKKTNRGRRSNHIPEEESSSSSSDEDEDDRKQIDELLGKVVCVDYISLDKKKALWFPALVVCPDCSDEIAVKKDNILVRSFKDGKFTSVPRKDVHEITSDTAPKPDAVLKQAFEQALEFHKSRTIPANWKTELKEDSSSSEAEEEEEEEDDEKEKEDNSSEEEEEIEPFPEERENFLQQLYKFMEDRGTPINKRPVLGYRNLNLFKLFRLVHKLGGFDNIESGAVWKQVYQDLGIPVLNSAAGYNVKCAYKKYLYGFEEYCRSANIEFQMALPEKVVNKQCKECENVKEIKVKEENETEIKEIKMEEERNIIPREEKPIEDEIERKENIKPSLGSKKNLLESIPTHSDQEKEVNIKKPEDNENLDDKDDDTTRVDESLNIKVEAEEEKAKSGDETNKEEDEDDEEAEEEEEEEEEEEDEDDDDNNEEEEFECYPPGMKVQVRYGRGKNQKMYEASIKDSDVEGGEVLYLVHYCGWNVRYDEWIKADKIVRPADKNVPKIKHRKKIKNKLDKEKDKDEKYSPKNCKLRRLSKPPFQTNPSPEMVSKLDLTDAKNSDTAHIKSIEITSILNGLQASESSAEDSEQEDERGAQDMDNNGKEESKIDHLTNNRNDLISKEEQNSSSLLEENKVHADLVISKPVSKSPERLRKDIEVLSEDTDYEEDEVTKKRKDVKKDTTDKSSKPQIKRGKRRYCNTEECLKTGSPGKKEEKAKNKESLCMENSSNSSSDEDEEETKAKMTPTKKYNGLEEKRKSLRTTGFYSGFSEVAEKRIKLLNNSDERLQNSRAKDRKDVWSSIQGQWPKKTLKELFSDSDTEAAASPPHPAPEEGVAEESLQTVAEEESCSPSVELEKPPPVNVDSKPIEEKTVEVNDRKAEFPSSGSNSVLNTPPTTPESPSSVTVTEGSRQQSSVTVSEPLAPNQEEVRSIKSETDSTIEVDSVAGELQDLQSEGNSSPAGFDASVSSSSSNQPEPEHPEKACTGQKRVKDAQGGGSSSKKQKRSHKATVVNNKKKGKGILPH

SEQ ID NO: 38030 - protein, 483 aa, Homo sapiens
MKALDEPPYLTVGTDVSAKYRGAFCEAKIKTAKRLVKVKVTFRHDSSTVEVQDDHIKGPLKVGAIVEVKNLDGAYQEAVINKLTDASWYTVVFDDGDEKTLRRSSLCLKGERHFAESETLDQLPLTNPEHFGTPVIGKKTNRGRRSNHIPEEESSSSSSDEDEDDRKQIDELLGKVVCVDYISLDKKKALWFPALVVCPDCSDEIAVKKDNILVRSFKDGKFTSVPRKDVHEITSDTAPKPDAVLKQAFEQALEFHKSRTIPANWKTELKEDSSSSEAEEEEEEEDDEKEKEDNSSEEEEEIEPFPEERENFLQQLYKFMEDRGTPINKRPVLGYRNLNLFKLFRLVHKLGGFDNIESGAVWKQVYQDLGIPVLNSAAGYNVKCAYKKYLYGFEEYCRSANIEFQMALPEKVVNKQCKECENVKEIKVKEENETEIKEIKMEEERNIIPREEKPIEDEIERKENIKPSLGSKKNLLESIPTHS

SEQ ID NO: 38031 - protein, 655 aa, Homo sapiens
MKALDEPPYLTVGTDVSAKYRGAFCEAKIKTAKRLVKVKVTFRHDSSTVEVQDDHIKGPLKVGAIVEVKNLDGAYQEAVINKLTDASWYTVVFDDGDEKTLRRSSLCLKGERHFAESETLDQLPLTNPEHFGTPVIGKKTNRGRRSNHIPEEESSSSSSDEDEDDRKQIDELLGKVVCVDYISLDKKKALWFPALVVCPDCSDEIAVKKDNILVRSFKDGKFTSVPRKDVHEITSDTAPKPDAVLKQAFEQALEFHKSRTIPANWKTELKEDSSSSEAEEEEEEEDDEKEKEDNSSEEEEEIEPFPEERENFLQQLYKFMEDRGTPINKRPVLGYRNLNLFKLFRLVHKLGGFDNIESGAVWKQVYQDLGIPVLNSAAGYNVKCAYKKYLYGFEEYCRSANIEFQMALPEKVVNKQCKECENVKEIKVKEENETEIKEIKMEEERNIIPREEKPIEDEIERKENIKPSLGSKKNLLESIPTHSDQEKEVNIKKPEDNENLDDKDDDTTRVDESLNIKVEAEEEKAKSGDETNKEEDEDDEEAEEEEEEEEEEEDEDDDDNNEEEEFECYPPGMKVQVRYGRGKNQKMYEASIKDSDVEGGEVLYLVHYCGWNVRYDEWIKADKIVRPADKNVPKIKHRKKIKNSVYKKKKKKKNK

SEQ ID NO: 38032 - protein, 594 aa, Homo sapiens
MAAPVKGNRKQSTEGDALDPPASPKPAGKQNGIQNPISLEDSPEAGGEREEEQEREEEQAFLVSLYKFMKERHTPIERVPHLGFKQINLWKIYKAVEKLGAYELVTGRRLWKNVYDELGGSPGSTSAATCTRRHYERLVLPYVRHLKGEDDKPLPTSKPRKQYKMAKENRGDDGATERPKKAKEERRMDQMMPGKTKADAADPAPLPSQEPPRNSTEQQGLASGSSVSFVGASGCPEAYKRLLSSFYCKGTHGIMSPLAKKKLLAQVSKVEALQCQEEGCRHGAEPQASPAVHLPESPQSPKGLTENSRHRLTPQEGLQAPGGSLREEAQAGPCPAAPIFKGCFYTHPTEVLKPVSQHPRDFFSRLKDGVLLGPPGKEGLSVKEPQLVWGGDANRPSAFHKGGSRKGILYPKPKACWVSPMAKVPAESPTLPPTFPSSPGLGSKRSLEEEGAAHSGKRLRAVSPFLKEADAKKCGAKPAGSGLVSCLLGPALGPVPPEAYRGTMLHCPLNFTGTPGPLKGQAALPFSPLVIPAFPAHFLATAGPSPMAAGLMHFPPTSFDSALRHRLCPASSAWHAPPVTTYAAPHFFHLNTKL

SEQ ID NO: 38033 - protein, 638 aa, Homo sapiens
MAAPVKGNRKQSTEGDALDPPASPKPAGKQNGIQNPISLEDSPEAGGEREEEQEREEEQAFLVSLYKFMKERHTPIERVPHLGFKQINLWKIYKAVEKLGAYELVTGRRLWKNVYDELGGSPGSTSAATCTRRHYERLVLPYVRHLKGEDDKPLPTSKPRKQYKMAKENRGDDGATERPKKAKEERRMDQMMPGKTKADAADPAPLPSQEPPRNSTEQQGLASGSSVSFVGASGCPEAYKRLLSSFYCKGTHGIMSPLAKKKLLAQVSKVEALQCQEEGCRHGAEPQASPAVHLPESPQSPKGLTENSRHRLTPQEGLQAPGGSLREEAQAGPCPAAPIFKGCFYTHPTEVLKPVSQHPRDFFSRLKDGVLLGPPGKEGLSVKEPQLVWGGDANRPSAFHKGGSRKGILYPKPKACWVSPMAKVPAESPTLPPTFPSSPGLGSKRSLEEEGAAHSGKRLRAVSPFLKEADAKKCGAKPAGSGLVSCLLGPALGPVPPEAYRGTMLHCPLNFTGTHHQSQPMQRPTSSTSTPSCRPAHGVVYTVESTGAYNRQVLLPGGSELVPATQDTRAMPLAGQPGTSEEEGSGKTGFISRQQPEPRSRGPSCYKALGEDGQLPLPQSGARSTQVAHGKSNKKTPV

SEQ ID NO: 38034 - protein, 526 aa, Homo sapiens
MKERHTPIERVPHLGFKQINLWKIYKAVEKLGAYELVTGRRLWKNVYDELGGSPGSTSAATCTRRHYERLVLPYVRHLKGEDDKPLPTSKPRKQYKMAKENRGDDGATERPKKAKEERRMDQMMPGKTKADAADPAPLPSQEPPRNSTEQQGLASGSSVSFVGASGCPEAYKRLLSSFYCKGTHGIMSPLAKKKLLAQVSKVEALQCQEEGCRHGAEPQASPAVHLPESPQSPKGLTENSRHRLTPQEGLQAPGGSLREEAQAGPCPAAPIFKGCFYTHPTEVLKPVSQHPRDFFSRLKDGVLLGPPGKEGLSVKEPQLVWGGDANRPSAFHKGGSRKGILYPKPKACWVSPMAKVPAESPTLPPTFPSSPGLGSKRSLEEEGAAHSGKRLRAVSPFLKEADAKKCGAKPAGSGLVSCLLGPALGPVPPEAYRGTMLHCPLNFTGTPGPLKGQAALPFSPLVIPAFPAHFLATAGPSPMAAGLMHFPPTSFDSALRHRLCPASSAWHAPPVTTYAAPHFFHLNTKL

SEQ ID NO: 38035 - protein, 1188 aa, Homo sapiens
MEPNSLQWVGSPCGLHGPYIFYKAFQFHLEGKPRILSLGDFFFVRCTPKDPICIAELQLLWEERTSRQLLSSSKLYFLPEDTPQGRNSDHGEDEVIAVSEKVIVKLEDLVKWVHSDFSKWRCGFHAGPVKTEALGRNGQKEALLKYRQSTLNSGLNFKDVLKEKADLGEDEEETNVIVLSYPQYCRYRSMLKRIQDKPSSILTDQFALALGGIAVVSRNPQILYCRDTFDHPTLIENESICDEFAPNLKGRPRKKKPCPQRRDSFSGVKDSNNNSDGKAVAKVKCEARSALTKPKNNHNCKKVSNEEKPKVAIGEECRADEQAFLVALYKYMKERKTPIERIPYLGFKQINLWTMFQAAQKLGGYETITARRQWKHIYDELGGNPGSTSAATCTRRHYERLILPYERFIKGEEDKPLPPIKPRKQENSSQENENKTKVSGTKRIKHEIPKSKKEKENAPKPQDAAEVSSEQEKEQETLISQKSIPEPLPAADMKKKIEGYQEFSAKPLASRVDPEKDNETDQGSNSEKVAEEAGEKGPTPPLPSAPLAPEKDSALVPGASKQPLTSPSALVDSKQESKLCCFTESPESEPQEASFPSFPTTQPPLANQNETEDDKLPAMADYIANCTVKVDQLGSDDIHNALKQTPKVLVVQSFDMFKDKDLTGPMNENHGLNYTPLLYSRGNPGIMSPLAKKKLLSQVSGASLSSSYPYGSPPPLISKKKLIARDDLCSSLSQTHHGQSTDHMAVSRPSVIQHVQSFRSKPSEERKTINDIFKHEKLSRSDPHRCSFSKHHLNPLADSYVLKQEIQEGKDKLLEKRALPHSHMPSFLADFYSSPHLHSLYRHTEHHLHNEQTSKYPSRDMYRESENSSFPSHRHQEKLHVNYLTSLHLQDKKSAAAEAPTDDQPTDLSLPKNPHKPTGKVLGLAHSTTGPQESKGISQFQVLGSQSRDCHPKACRVSPMTMSGPKKYPESLSRSGKPHHVRLENFRKMEGMVHPILHRKMSPQNIGAARPIKRSLEDLDLVIAGKKARAVSPLDPSKEVSGKEKASEQESEGSKAAHGGHSGGGSEGHKLPLSSPIFPGLYSGSLCNSGLNSRLPAGYSHSLQYLKNQTVLSPLMQPLAFHSLVMQRGIFTSPTNSQQLYRHLAAATPVGSSYGDLLHNSIYPLAAINPQAAFPSSQLSSVHPSTKL

SEQ ID NO: 38036 - protein, 945 aa, Homo sapiens
MAPNLKGRPRKKKPCPQRRDSFSGVKDSNNNSDGKAVAKVKCEARSALTKPKNNHNCKKVSNEEKPKVAIGEECRADEQAFLVALYKYMKERKTPIERIPYLGFKQINLWTMFQAAQKLGGYETITARRQWKHIYDELGGNPGSTSAATCTRRHYERLILPYERFIKGEEDKPLPPIKPRKQENSSQENENKTKVSGTKRIKHEIPKSKKEKENAPKPQDAAEVSSEQEKEQETLISQKSIPEPLPAADMKKKIEGYQEFSAKPLASRVDPEKDNETDQGSNSEKVAEEAGEKGPTPPLPSAPLAPEKDSALVPGASKQPLTSPSALVDSKQESKLCCFTESPESEPQEASFPSFPTTQPPLANQNETEDDKLPAMADYIANCTVKVDQLGSDDIHNALKQTPKVLVVQSFDMFKDKDLTGPMNENHGLNYTPLLYSRGNPGIMSPLAKKKLLSQVSGASLSSSYPYGSPPPLISKKKLIARDDLCSSLSQTHHGQSTDHMAVSRPSVIQHVQSFRSKPSEERKTINDIFKHEKLSRSDPHRCSFSKHHLNPLADSYVLKQEIQEGKDKLLEKRALPHSHMPSFLADFYSSPHLHSLYRHTEHHLHNEQTSKYPSRDMYRESENSSFPSHRHQEKLHVNYLTSLHLQDKKSAAAEAPTDDQPTDLSLPKNPHKPTGKVLGLAHSTTGPQESKGISQFQVLGSQSRDCHPKACRVSPMTMSGPKKYPESLSRSGKPHHVRLENFRKMEGMVHPILHRKMSPQNIGAARPIKRSLEDLDLVIAGKKARAVSPLDPSKEVSGKEKASEQESEGSKAAHGGHSGGGSEGHKLPLSSPIFPGLYSGSLCNSGLNSRLPAGYSHSLQYLKNQTVLSPLMQPLAFHSLVMQRGIFTSPTNSQQLYRHLAAATPVGSSYGDLLHNSIYPLAAINPQAAFPSSQLSSVHPSTKL

SEQ ID NO: 38037 - protein, 377 aa, Homo sapiens
MGTTEATLRMENVDVKEEWQDEDLPRPLPEETGVELLGSPVEDTSSPPNTLNFNGAHRKRKTLVAPEINISLDQSEGSLLSDDFLDTPDDLDINVDDIETPDETDSLEFLGNGNELEWEDDTPVATAKNMPGDSADLFGDGTTEDGSAANGRLWRTVIIGEQEHRIDLHMIRPYMKVVTHGGYYGEGLNAIIVFAACFLPDSSLPDYHYIMENLFLYVISSLELLVAEDYMIVYLNGATPRRRMPGIGWLKKCYQMIDRRLRKNLKSLIIVHPSWFIRTVLAISRPFISVKFINKIQYVHSLEDLEQLIPMEHVQIPDCVLQYEEERLKARRESARPQPEFVLPRSEEKPEVAPVENRSALVSEDQETSLQPLHRSS

SEQ ID NO: 38038 - protein, 371 aa, Homo sapiens
MGTTEATLRMENVDVKEEWQDEDLPRPLPEETGVELLGSPVEDTSSPPNTLNFNGAHRKRKTLVAPEINISLDQSEGSLLSDDFLDTPDDLDINVDDIETPDETDSLEFLGNGNELEWEDDTPVATAKNMPGDSADLFGDGTTEDGSAANGRLWRTVIIGEQEHRIDLHMIRPYMKVVTHGGYYGEGLNAIIVFAACFLPDSSLPDYHYIMENLFLYVISSLELLVAEDYMIVYLNGATPRRRMPGIGWLKKCYQMIDRRLRKNLKSLIIVHPSWFIRTVLAISRPFISVKFINKIQYVHSLEDLEQLIPMEHVQIPDCVLQYEEERLKARRESARPQPEFVLPRSEEKPEVAPVENRSALVSEDQETRMS

SEQ ID NO: 38039 - protein, 377 aa, Homo sapiens
MAGRRSSQPGIALHNPGNHQVQNPQGRLETVRPLPEETGVELLGSPVEDTSSPPNTLNFNGAHRKRKTLVAPEINISLDQSEGSLLSDDFLDTPDDLDINVDDIETPDETDSLEFLGNGNELEWEDDTPVATAKNMPGDSADLFGDGTTEDGSAANGRLWRTVIIGEQEHRIDLHMIRPYMKVVTHGGYYGEGLNAIIVFAACFLPDSSLPDYHYIMENLFLYVISSLELLVAEDYMIVYLNGATPRRRMPGIGWLKKCYQMIDRRLRKNLKSLIIVHPSWFIRTVLAISRPFISVKFINKIQYVHSLEDLEQLIPMEHVQIPDCVLQYEEERLKARRESARPQPEFVLPRSEEKPEVAPVENRSALVSEDQETSMS

SEQ ID NO: 38040 - protein, 371 aa, Homo sapiens
MGTTEATLRMENVDVKEEWQDEDLPRPLPEETGVELLGSPVEDTSSPPNTLNFNGAHRKRKTLVAPEINISLDQSEGSLLSDDFLDTPDDLDINVDDIETPDETDSLEFLGNGNELEWEDDTPVATAKNMPGDSADLFGDGTTEDGSAANGRLWRTVIIGEQEHRIDLHMIRPYMKVVTHGGYYGEGLNAIIVFAACFLPDSSLPDYHYIMENLFLYVISSLELLVAEDYMIVYLNGATPRRRMPGIGWLKKCYQMIDRRLRKNLKSLIIVHPSWFIRTVLAISRPFISVKFINKIQYVHSLEDLEQLIPMEHVQIPDCVLQYEEERLKARRESARPQPEFVLPRSEEKPEVAPVENRSALVSEDQETSMS

SEQ ID NO: 38041 - protein, 349 aa, Homo sapiens
MGTTEATLRMENVDVKEEWQDEDPPPNTLNFNGAHRKRKTLVAPEINISLDQSEGSLLSDDFLDTPDDLDINVDDIETPDETDSLEFLGNGNELEWEDDTPVATAKNMPGDSADLFGDGTTEDGSAANGRLWRTVIIGEQEHRIDLHMIRPYMKVVTHGGYYGEGLNAIIVFAACFLPDSSLPDYHYIMENLFLYVISSLELLVAEDYMIVYLNGATPRRRMPGIGWLKKCYQMIDRRLRKNLKSLIIVHPSWFIRTVLAISRPFISVKFINKIQYVHSLEDLEQLIPMEHVQIPDCVLQYEEERLKARRESARPQPEFVLPRSEEKPEVAPVENRSALVSEDQETRMS

SEQ ID NO: 38042 - protein, 815 aa, Homo sapiens
MKSNQERSNECLPPKKREIPATSRSSEEKAPTLPSDNHRVEGTAWLPGNPGGRGHGGGRHGPAGTSVELGLQQGIGLHKALSTGLDYSPPSAPRSVPVATTLPAAYATPQPGTPVSPVQYAHLPHTFQFIGSSQYSGTYASFIPSQLIPPTANPVTSAVASAAGATTPSQRSQLEAYSTLLANMGSLSQTPGHKAEQQQQQQQQQQQQHQHQQQQQQQQQQQQQQHLSRAPGLITPGSPPPAQQNQYVHISSSPQNTGRTASPPAIPVHLHPHQTMIPHTLTLGPPSQVVMQYADSGSHFVPREATKKAESSRLQQAIQAKEVLNGEMEKSRRYGAPSSADLGLGKAGGKSVPHPYESRHVVVHPSPSDYSSRDPSGVRASVMVLPNSNTPAADLEVQQATHREASPSTLNDKSGLHLGKPGHRSYALSPHTVIQTTHSASEPLPVGLPATAFYAGTQPPVIGYLSGQQQAITYAGSLPQHLVIPGTQPLLIPVGSTDMEASGAAPAIVTSSPQFAAVPHTFVTTALPKSENFNPEALVTQAAYPAMVQAQIHLPVVQSVASPAAAPPTLPPYFMKGSIIQLANGELKKVEDLKTEDFIQSAEISNDLKIDSSTVERIEDSHSPGVAVIQFAVGEHRAQVSVEVLVEYPFFVFGQGWSSCCPERTSQLFDLPCSKLSVGDVCISLTLKNLKNGSVKKGQPVDPASVLLKHSKADGLAGSRHRYAEQENGINQGSAQMLSENGELKFPEKMGLPAAPFLTKIEPSKPAATRKRRWSAPESRKLEKSEDEPPLTLPKPSLIPQEVKICIEGRSNVGK

SEQ ID NO: 38043 - protein, 815 aa, Homo sapiens; identical to SEQ ID NO: 38042

SEQ ID NO: 38044 - protein, 815 aa, Homo sapiens; identical to SEQ ID NO: 38042

SEQ ID NO: 38045 - protein, 475 aa, Homo sapiens
MAAPRPPPARLSGVMVPAPIQDLEALRALTALFKEQRNRETAPRTIFQRVLDILKKSSHAVELACRDPSQVENLASSLQLITECFRCLRNACIECSVNQNSIRNLDTIGVAVDLILLFRELRVEQESLLTAFRCGLQFLGNIASRNEDSQSIVWVHAFPELFLSCLNHPDKKIVAYSSMILFTSLNHERMKELEENLNIAIDVIDAYQKHPESEWPFLIITDLFLKSPELVQAMFPKLNNQERVTLLDLMIAKITSDEPLTKDDIPVFLRHAELIASTFVDQCKTVLKLASEEPPDDEEALATIRLLDVLCEMTVNTELLGYLQVFPGLLERVIDLLRVIHVAGKETTNIFSNCGCVRAEGDISNVANGFKSHLIRLIGNLCYKNKDNQDKVNELDGIPLILDNCNISDSNPFLTQWVIYAIRNLTEDNSQNQDLIAKMEEQGLADASLLKKVGFEVEKKGEKLILKSTRDTPKP

SEQ ID NO: 38046 - protein, 411 aa, Homo sapiens
MAAPRPPPARLSGVMVPAPIQDLEALRALTALFKEQRNRNLDTIGVAVDLILLFRELRVEQESLLTAFRCGLQFLGNIASRNEDSQSIVWVHAFPELFLSCLNHPDKKIVAYSSMILFTSLNHERMKELEENLNIAIDVIDAYQKHPESEWPFLIITDLFLKSPELVQAMFPKLNNQERVTLLDLMIAKITSDEPLTKDDIPVFLRHAELIASTFVDQCKTVLKLASEEPPDDEEALATIRLLDVLCEMTVNTELLGYLQVFPGLLERVIDLLRVIHVAGKETTNIFSNCGCVRAEGDISNVANGFKSHLIRLIGNLCYKNKDNQDKVNELDGIPLILDNCNISDSNPFLTQWVIYAIRNLTEDNSQNQDLIAKMEEQGLADASLLKKVGFEVEKKGEKLILKSTRDTPKP

SEQ ID NO: 38047 - protein, 453 aa, Homo sapiens
MAAPRPPPARLSGVMVPAPIQDLEALRALTALFKEQRNRETAPRTIFQRVLDILKKSSHAVELACRDPSQVENLASSLQLITECFRCLRNACIECSVNQNSIRNLDTIGVAVDLILLFRELRVEQESLLTAFRCGLQFLGNIASRNEDSQSIVWVHAFPELFLSCLNHPDKKIVAYSSMILFTSLNHERMKELEENLNIAIDVIDAYQKHPESEWPFLIITDLFLKSPELVQAMFPKLNNQERVTLLDLMIAKITSDEPLTKDDIPVFLRHAELIASTFVDQCKTVLKLASEEPPVMYPYMRIVGKFRLLDVLCEMTVNTELLGYLQVFPGLLERVIDLLRVIHVAGKETTNIFSNCGCVRAEGDISNVANGFKSHLIRLIGNLCYKNKDNQDKVNELDGIPLILDNCNISDSNPCSDPVGDICHPKPYRRQQPKPRFDCKDGGTGAGRCIPT

SEQ ID NO: 38048 - protein, 689 aa, Homo sapiens
MKPVHERSQECLPPKKRDLPVTSEDMGRTTSCSTNHTPSSDASEWSRGVVVAGQSQAGARVSLGGDGAEAITGLTVDQYGMLYKVAVPPATFSPTGLPSVVNMSPLPPTFNVASSLIQHPGIHYPPLHYAQLPSTSLQFIGSPYSLPYAVPPNFLPSPLLSPSANLATSHLPHFVPYASLLAEGATPPPQAPSPAHSFNKAPSATSPSGQLPHHSSTQPLDLAPGRMPIYYQMSRLPAGYTLHETPPAGASPVLTPQESQSALEAAAANGGQRPRERNLVRRESEALDSPNSKGEGQGLVPVVECVVDGQLFSGSQTPRVEVAAPAHRGTPDTDLEVQRVVGALASQDYRVVAAQRKEEPSPLNLSHHTPDHQGEGRGSARNPAELAEKSQARGFYPQSHQEPVKHRPLPKAMVVANGNLVPTGTDSGLLPVGSEILVASSLDVQARATFPDKEPTPPPITSSHLPSHFMKGAIIQLATGELKRVEDLQTQDFVRSAEVSGGLKIDSSTVVDIQESQWPGFVMLHFVVGEQQSKVSIEVPPEHPFFVYGQGWSSCSPGRTTQLFSLPCHRLQVGDVCISISLQSLNSNSVSQASCAPPSQLGPPRERPERTVLGSRELCDSEGKSQPAGEGSRVVEPSQPESGAQACWPAPSFQRYSMQGEEARAALLRPSFIPQEVKLSIEGRSNAGK

SEQ ID NO: 38049 - protein, 1313 aa, Homo sapiens
MRSAAAAPRSPAVATESRRFAAARWPGWRSLQRPARRSGRGGGGAAPGPYPSAAPPPPGPGPPPSRQSSPPSASDCFGSNGNGGGAFRPGSRRLLGLGGPPRPFVVLLLPLASPGAPPAAPTRASPLGARASPPRSGVSLARPAPGCPRPACEPVYGPLTMSLKPQQQQQQQQQQQQQQQQQQQQQQQPPPAAANVRKPGGSGLLASPAAAPSPSSSSVSSSSATAPSSVVAATSGGGRPGLGRGRNSNKGLPQSTISFDGIYANMRMVHILTSVVGSKCEVQVKNGGIYEGVFKTYSPKCDLVLDAAHEKSTESSSGPKREEIMESILFKCSDFVVVQFKDMDSSYAKRDAFTDSAISAKVNGEHKEKDLEPWDAGELTANEELEALENDVSNGWDPNDMFRYNEENYGVVSTYDSSLSSYTVPLERDNSEEFLKREARANQLAEEIESSAQYKARVALENDDRSEEEKYTAVQRNSSEREGHSINTRENKYIPPGQRNREVISWGSGRQNSPRMGQPGSGSMPSRSTSHTSDFNPNSGSDQRVVNGGVPWPSPCPSPSSRPPSRYQSGPNSLPPRAATPTRPPSRPPSRPSRPPSHPSAHGSPAPVSTMPKRMSSEGPPRMSPKAQRHPRNHRVSAGRGSISSGLEFVSHNPPSEAATPPVARTSPSGGTWSSVVSGVPRLSPKTHRPRSPRQNSIGNTPSGPVLASPQAGIIPTEAVAMPIPAASPTPASPASNRAVTPSSEAKDSRLQDQRQNSPAGNKENIKPNETSPSFSKAENKGISPVVSEHRKQIDDLKKFKNDFRLQPSSTSESMDQLLNKNREGEKSRDLIKDKIEPSAKDSFIENSSSNCTSGSSKPNSPSISPSILSNTEHKRGPEVTSQGVQTSSPACKQEKDDKEEKKDAAEQVRKSTLNPNAKEFNPRSFSQPKPSTTPTSPRPQAQPSPSMVGHQQPTPVYTQPVCFAPNMMYPVPVSPGVQPLYPIPMTPMPVNQAKTYRAVPNMPQQRQDQHHQSAMMHPASAAGPPIAATPPAYSTQYVAYSPQQFPNQPLVQHVPHYQSQHPHVYSPVIQGNARMMAPPTHAQPGLVSSSATQYGAHEQTHAMYACPKLPYNKETSPSFYFAISTGSLAQQYAHPNATLHPHTPHPQPSATPTGQQQSQHGGSHPAPSPVQHHQHQAAQALHLASPQQQSAIYHAGLAPTPPSMTPASNTQSPQNSFPAAQQTVFTIHPSHVQPAYTNPPHMAHVPQAHVQSGMVPSHPTAHAPMMLMTTQPPGGPQAALAQSALQPIPVSTTAHFPYMTHPSVQAHHQQQL

SEQ ID NO: 38050 - protein, 995 aa, Homo sapiens
MRSAAAAPRSPAVATESRRFAAARWPGWRSLQRPARRSGRGGGGAAPGPYPSAAPPPPGPGPPPSRQSSPPSASDCFGSNGNGGGAFRPGSRRLLGLGGPPRPFVVLLLPLASPGAPPAAPTRASPLGARASPPRSGVSLARPAPGCPRPACEPVYGPLTMSLKPQQQQQQQQQQQQQQQQQQQQQQQPPPAAANVRKPGGSGLLASPAAAPSPSSSSVSSSSATAPSSVVAATSGGGRPGLGRGRNSNKGLPQSTISFDGIYANMRMVHILTSVVGSKCEVQVKNGGIYEGVFKTYSPKCDLVLDAAHEKSTESSSGPKREEIMESILFKCSDFVVVQFKDMDSSYAKRDAFTDSAISAKVNGEHKEKDLEPWDAGELTANEELEALENDVSNGWDPNDMFRYNEENYGVVSTYDSSLSSYTVPLERDNSEEFLKREARANQLAEEIESSAQYKARVALENDDRSEEEKYTAVQRNSSEREGHSINTRENKYIPPGQRNREVISWGSGRQNSPRMGQPGSGSMPSRSTSHTSDFNPNSGSDQRVVNGGVPWPSPCPSPSSRPPSRYQSGPNSLPPRAATPTRPPSRPPSRPSRPPSHPSAHGSPAPVSTMPKRMSSEGPPRMSPKAQRHPRNHRVSAGRGSISSGLEFVSHNPPSEAATPPVARTSPSGGTWSSVVSGVPRLSPKTHRPRSPRQNSIGNTPSGPVLASPQAGIIPTEAVAMPIPAASPTPASPASNRAVTPSSEAKDSRLQDQRQNSPAGNKENIKPNETSPSFSKAENKGISPVVSEHRKQIDDLKKFKNDFRLQPSSTSESMDQLLNKNREGEKSRDLIKDKIEPSAKDSFIENSSSNCTSGSSKPNSPSISPSILSNTEHKRGPEVTSQGVQTSSPACKQEKDDKEEKKDAAEQVRKSTLNPNAKEFNPRSFSQPKPSTTPTSPRPQAQPSPSMVGHQQPTPVYTQPVCFAPNMMYPVPVSPGVQYQICPNSGKTSIIRVP

SEQ ID NO: 38051 - protein, 1062 aa, Homo sapiens
MLKPQPLQQPSQPQQPPPTQQAVARRPPGGTSPPNGGLPGPLATSAAPPGPPAAASPCLGPVAAAGSGLRRGAEGILAPQPPPPQQHQERPGAAAIGSARGQSTGKGPPQSPVFEGVYNNSRMLHFLTAVVGSTCDVKVKNGTTYEGIFKTLSSKFELAVDAVHRKASEPAGGPRREDIVDTMVFKPSDVMLVHFRNVDFNYATKDKFTDSAIAMNSKVNGEHKEKVLQRWEGGDSNSDDYDLESDMSNGWDPNEMFKFNEENYGVKTTYDSSLSSYTVPLEKDNSEEFRQRELRAAQLAREIESSPQYRLRIAMENDDGRTEEEKHSAVQRQGSGRESPSLASREGKYIPLPQRVREGPRGGVRCSSSRGGRPGLSSLPPRGPHHLDNSSPGPGSEARGINGGPSRMSPKAQRPLRGAKTLSSPSNRPSGETSVPPPPAVGRMYPPRSPKSAAPAPISASCPEPPIGSAVPTSSASIPVTSSVSDPGVGSISPASPKISLAPTDVKELSTKEPGRTLEPQELARIAGKVPGLQNEQKRFQLEELRKFGAQFKLQPSSSPENSLDPFPPRILKEEPKGKEKEVDGLLTSEPMGSPVSSKTESVSDKEDKPPLAPSGGTEGPEQPPPPCPSQTGSPPVGLIKGEDKDEGPVAEQVKKSTLNPNAKEFNPTKPLLSVNKSTSTPTSPGPRTHSTPSIPVLTAGQSGLYSPQYISYIPQIHMGPAVQAPQMYPYPVSNSVPGQQGKYRGAKGSLPPQRSDQHQPASAPPMMQAAAAAGPPLVAATPYSSYIPYNPQQFPGQPAMMQPMAHYPSQPVFAPMLQSNPRMLTSGSHPQAIVSSSTPQYPSAEQPTPQALYATVHQSYPHHATQLHAHQPQPATTPTGSQPQSQHAAPSPVQHQAGQAPHLGSGQPQQNLYHPGALTGTPPSLPPGPSAQSPQSSFPQPAAVYAIHHQQLPHGFTNMAHVTQAHVQTGITAAPPPHPGAPHPPQVMLLHPPQSHGGPPQGAVPQSGVPALSASTPSPYPYIGHPQGEQPGQAPGFPGGADDRIPPLPPPGELKIVLAAT

SEQ ID NO: 38052 - protein, 1075 aa, Homo sapiens
MLKPQPLQQPSQPQQPPPTQQAVARRPPGGTSPPNGGLPGPLATSAAPPGPPAAASPCLGPVAAAGSGLRRGAEGILAPQPPPPQQHQERPGAAAIGSARGQSTGKGPPQSPVFEGVYNNSRMLHFLTAVVGSTCDVKVKNGTTYEGIFKTLSSKFELAVDAVHRKASEPAGGPRREDIVDTMVFKPSDVMLVHFRNVDFNYATKDKFTDSAIAMNSKVNGEHKEKVLQRWEGGDSNSDDYDLESDMSNGWDPNEMFKFNEENYGVKTTYDSSLSSYTVPLEKDNSEEFRQRELRAAQLAREIESSPQYRLRIAMENDDGRTEEEKHSAVQRQGSGRESPSLASREGKYIPLPQRVREGPRGGVRCSSSRGGRPGLSSLPPRGPHHLDNSSPGPGSEARGINGGPSRMSPKAQRPLRGAKTLSSPSNRPSGETSVPPPPAVGRMYPPRSPKSAAPAPISASCPEPPIGSAVPTSSASIPVTSSVSDPGVGSISPASPKISLAPTDVKELSTKEPGRTLEPQELARIAGKVPGLQNEQKRFQLEELRKFGAQFKLQPSSSPENSLDPFPPRILKEEPKGKEKEVDGLLTSEPMGSPVSSKTESVSDKEDKPPLAPSGGTEGPEQPPPPCPSQTGSPPVGLIKGEDKDEGPVAEQVKKSTLNPNAKEFNPTKPLLSVNKSTSTPTSPGPRTHSTPSIPVLTAGQSGLYSPQYISYIPQIHMGPAVQAPQMYPYPVSNSVPGQQGKYRGAKGSLPPQRSDQHQPASAPPMMQAAAAAGPPLVAATPYSSYIPYNPQQFPGQPAMMQPMAHYPSQPVFAPMLQSNPRMLTSGSHPQAIVSSSTPQYPSAEQPTPQALYATVHQSYPHHATQLHAHQPQPATTPTGSQPQSQHAAPSPVQHQAGQAPHLGSGQPQQNLYHPGALTGTPPSLPPGPSAQSPQSSFPQPAAVYAIHHQQLPHGFTNMAHVTQAHVQTGITAAPPPHPGAPHPPQVMLLHPPQSHGGPPQGAVPQSGVPALSASTPSPYPYIGHPQGEQPGQAPGFPGGADDRIREFSLAGGIWHGRAEGLQVGQDARVLGGE

SEQ ID NO: 38053 - protein, 1044 aa, Homo sapiens
MLKPQPLQQPSQPQQPPPTQQAVARRPPGGTSPPNGGLPGPLATSAAPPGPPAAASPCLGPVAAAGSGLRRGAEGILAPQPPPPQQHQERPGAAAIGSARGQSTGKGPPQSPVFEGVYNNSRMLHFLTAVVGSTCDVKVKNGTTYEGIFKTLSSKFELAVDAVHRKASEPAGGPRREDIVDTMVFKPSDVMLVHFRNVDFNYATKDKFTDSAIAMNSKVNGEHKEKVLQRWEGGDSNSDDYDLESDMSNGWDPNEMFKFNEENYGVKTTYDSSLSSYTVPLEKDNSEEFRQRELRAAQLAREIESSPQYRLRIAMENDDGRTEEEKHSAVQRQGSGRESPSLASREGKYIPLPQRVREGPRGGVRCSSSRGGRPGLSSLPPRGPHHLDNSSPGPGSEARGINGGPSRMSPKAQRPLRGAKTLSSPSNRPSGETSVPPPPAVGRMYPPRSPKSAAPAPISASCPEPPIGSAVPTSSASIPVTSSVSDPGVGSISPASPKISLAPTDVKELSTKEPGRTLEPQELARIAGKVPGLQNEQKRFQLEELRKFGAQFKLQPSSSPENSLDPFPPRILKEEPKGKEKEVDGLLTSEPMGSPVSSKTESVSDKEDKPPLAPSGGTEGPEQPPPPCPSQTGSPPVGLIKGEDKDEGPVAEQVKKSTLNPNAKEFNPTKPLLSVNKSTSTPTSPGPRTHSTPSIPVLTAGQSGLYSPQYISYIPQIHMGPAVQAPQMYPYPVSNSVPGQQGKYRGAKGSLPPQRSDQHQPASAPPMMQAAAAAGPPLVAATPYSSYIPYNPQQFPGQPAMMQPMAHYPSQPVFAPMLQSNPRMLTSGSHPQAIVSSSTPQYPSAEQPTPQALYATVHQSYPHHATQLHAHQPQPATTPTGSQPQSQHAAPSPVQHQAGQAPHLGSGQPQQNLYHPGALTGTPPSLPPGPSAQSPQSSFPQPAAVYAIHHQQLPHGFTNMAHVTQAHVQTGITAAPPPHPGAPHPPQVMLLHPPQSHGGPPQGAVPQSGVPALSASTPSPYPYIGHPQVQSHPSQQLPFHPPGN

SEQ ID NO: 38054 - protein, 400 aa, Homo sapiens
MLKPQPLQQPSQPQQPPPTQQAVARRPPGGTSPPNGGLPGPLATSAAPPGPPAAASPCLGPVAAAGSGLRRGAEGILAPQPPPPQQHQERPGAAAIGSARGQSTGKGPPQSPVFEGVYNNSRMLHFLTAVVGSTCDVKVKNGTTYEGIFKTLSSKFELAVDAVHRKASEPAGGPRREDIVDTMVFKPSDVMLVHFRNVDFNYATKDKFTDSAIAMNSKVNGEHKEKVLQRWEGGDSNSDDYDLESDMSNGWDPNEMFKFNEENYGVKTTYDSSLSSYTVPLEKDNSEEFRQRELRAAQLAREIESSPQYRLRIAMENDDGRTEEEKHSAVQRQGSGRESPSLASREGKYIPLPPHRGQGQGPAGVGGSCSAPARPHPVLPSHPLIYSPAGDGRSFIFYYL

SEQ ID NO: 38055 - protein, 1044 aa, Homo sapiens
MLKPQPLQQPSQPQQPPPTQQAVARRPPGGTSPPNGGLPGPLATSAAPPGPPAAASPCLGPVAAAGSGLRRGAEGILAPQPPPPQQHQERPGAAAIGSARGQSTGKGPPQSPVFEGVYNNSRMLHFLTAVVGSTCDVKVKNGTTYEGIFKTLSSKFELAVDAVHRKASEPAGGPRREDIVDTMVFKPSDVMLVHFRNVDFNYATKDKFTDSAIAMNSKVNGEHKEKVLQRWEGGDSNSDDYDLESDMSNGWDPNEMFKFNEENYGVKTTYDSSLSSYTVPLEKDNSEEFRQRELRAAQLAREIESSPQYRLRIAMENDDGRTEEEKHSAVQRQGSGRESPSLASREGKYIPLPQRVREGPRGGVRCSSSRGGRPGLSSLPPRGPHHLDNSSPGPGSEARGINGGPSRMSPKAQRPLRGAKTLSSPSNRPSGETSVPPPPAVGRMYPPRSPKSAAPAPISASCPEPPIGSAVPTSSASIPVTSSVSDPGVGSISPASPKISLAPTDVKELSTKEPGRTLEPQELARIAGKVPGLQNEQKRFQLEELRKFGAQFKLQPSSSPENSLDPFPPRILKEEPKGKEKEVDGLLTSEPMGSPVSSKTESVSDKEDKPPLAPSGGTEGPEQPPPPCPSQTGSPPVGLIKGEDKDEGPVAEQVKKSTLNPNAKEFNPTKPLLSVNKSTSTPTSPGPRTHSTPSIPVLTAGQSGLYSPQYISYIPQIHMGPAVQAPQMYPYPVSNSVPGQQGKYRGAKGSLPPQRSDQHQPASAPPMMQAAAAAGPPLVAATPYSSYIPYNPQQFPGQPAMMQPMAHYPSQPVFAPMLQSNPRMLTSGSHPQAIVSSSTPQYPSAEQPTPQALYATVHQSYPHHATQLHAHQPQPATTPTGSQPQSQHAAPSPVQHQAGQAPHLGSGQPQQNLYHPGALTGTPPSLPPGPSAQSPQSSFPQPAAVYAIHHQQLPHGFTNMAHVTQAHVQTGITAAPPPHPGAPHPPQVMLLHPPQSHGGPPQGAVPQSGVPALSASTPSPYPYIGHPQAPLPPPGELKIVLAAT

SEQ ID NO: 38056 - protein, 1097 aa, Homo sapiens
MLKPQPLQQPSQPQQPPPTQQAVARRPPGGTSPPNGGLPGPLATSAAPPGPPAAASPCLGPVAAAGSGLRRGAEGILAPQPPPPQQHQERPGAAAIGSARGQSTGKGPPQSPVFEGVYNNSRMLHFLTAVVGSTCDVKVKNGTTYEGIFKTLSSKFELAVDAVHRKASEPAGGPRREDIVDTMVFKPSDVMLVHFRNVDFNYATKDKFTDSAIAMNSKVNGEHKEKVLQRWEGGDSNSDDYDLESDMSNGWDPNEMFKFNEENYGVKTTYDSSLSSYTVPLEKDNSEEFRQRELRAAQLAREIESSPQYRLRIAMENDDGRTEEEKHSAVQRQGSGRESPSLASREGKYIPLPQRVREGPRGGVRCSSSRGGRPGLSSLPPRGPHHLDNSSPGPGSEARGINGGPSRMSPKAQRPLRGAKTLSSPSNRPSGETSVPPPPAVGRMYPPRSPKSAAPAPISASCPEPPIGSAVPTSSASIPVTSSVSDPGVGSISPASPKISLAPTDVKELSTKEPGRTLEPQELARIAGKVPGLQNEQKRFQLEELRKFGAQFKLQPSSSPENSLDPFPPRILKEEPKGKEKEVDGLLTSEPMGSPVSSKTESVSDKEDKPPLAPSGGTEGPEQPPPPCPSQTGSPPVGLIKGEDKDEGPVAEQVKKSTLNPNAKEFNPTKPLLSVNKSTSTPTSPGPRTHSTPSIPVLTAGQSGLYSPQYISYIPQIHMGPAVQAPQMYPYPVSNSVPGQQGKYRGAKGSLPPQRSDQHQPASAPPMMQAAAAAGPPLVAATPYSSYIPYNPQQFPGQPAMMQPMAHYPSQPVFAPMLQSNPRMLTSGSHPQAIVSSSTPQYPSAEQPTPQALYATVHQSYPHHATQLHAHQPQPATTPTGSQPQSQHAAPSPVQHQAGQAPHLGSGQPQQNLYHPGALTGTPPSLPPGPSAQSPQSSFPQPAAVYAIHHQQLPHGFTNMAHVTQAHVQTGITAAPPPHPGAPHPPQVMLLHPPQSHGGPPQGAVPQSGVPALSASTPSPYPYIGHPQGEQPGQAPGFPGGADDRILCRVGRSHSRRRQGLAPGSVLCFPPSSLSCDPAAPLPTASPALSDPDCLLT

SEQ ID NO: 38057 - protein, 892 aa, Homo sapiens
MSERAADDVRGEPRRAAAAAGGAAAAAARQQQQQQQQQQPPPPQPQRQQHPPPPPRRTRPEDGGPGAASTSAAAMATVGERRPLPSPEVMLGQSWNLWVEASKLPGKDGTELDESFKEFGKNREVMGLCREDMPIFGFCPAHDDFYLVVCNDCNQVVKPQAFQSHYERRHSSSSKPPLAVPPTSVFSFFPSLSKSKGGSASGSNRSSSGGVLSASSSSSKLLKSPKEKLQLRGNTRPMHPIQQSRVPHGRIMTPSVKVEKIHPKMDGTLLKSAVGPTCPATVSSLVKPGLNCPSIPKPTLPSPGQILNGKGLPAPPTLEKKPEDNSNNRKFLNKRLSEREFDPDIHCGVIDLDTKKPCTRSLTCKTHSLTQRRAVQGRRKRFDVLLAEHKNKTREKELIRHPDSQQPPQPLRDPHPAPPRTSQEPHQNPHGVIPSESKPFVASKPKPHTPSLPRPPGCPAQQGGSAPIDPPPVHESPHPPLPATEPASRLSSEEGEGDDKEESVEKLDCHYSGHHPQPASFCTFGSRQIGRGYYVFDSRWNRLRCALNLMVEKHLNAQLWKKIPPVPSTTSPISTRIPHRTNSVPTSQCGVSYLAAATVSTSPVLLSSTCISPNSKSVPAHGTTLNAQPAASGAMDPVCSMQSRQVSSSSSSPSTPSGLSSVPSSPMSRKPQKLKSSKSLRPKESSGNSTNCQNASSSTSGGSGKKRKNSSPLLVHSSSSSSSSSSSSHSMESFRKNCVAHSGPPYPSTVTSSHSIGLNCVTNKANAVNVRHDQSGRGPPTGSPAESIKRMSVMVNSSDSTLSLGPFIHQSNELPVNSHGSFSHSHTPLDKLIGKKRKCSPSSSSINNSSSKPTKVAKVPAVNNVHMKHTGTIPGAQGLMNSSLLHQPKARP

SEQ ID NO: 38058 - protein, 945 aa, Homo sapiens
MSERAADDVRGEPRRAAAAAGGAAAAAARQQQQQQQQQQPPPPQPQRQQHPPPPPRRTRPEDGGPGAASTSAAAMATVGERRPLPSPEVMLGQSWNLWVEASKLPGKDGTELDESFKEFGKNREVMGLCREDMPIFGFCPAHDDFYLVVCNDCNQVVKPQAFQSHYERRHSSSSKPPLAVPPTSVFSFFPSLSKSKGGSASGSNRSSSGGVLSASSSSSKLLKSPKEKLQLRGNTRPMHPIQQSRVPHGRIMTPSVKVEKIHPKMDGTLLKSAVGPTCPATVSSLVKPGLNCPSIPKPTLPSPGQILNGKGLPAPPTLEKKPEDNSNNRKFLNKRLSEREFDPDIHCGVIDLDTKKPCTRSLTCKTHSLTQRRAVQGRRKRFDVLLAEHKNKTREKELIRHPDSQQPPQPLRDPHPAPPRTSQEPHQNPHGVIPSESKPFVASKPKPHTPSLPRPPGCPAQQGGSAPIDPPPVHESPHPPLPATEPASRLSSEEGEGDDKEESVEKLDCHYSGHHPQPASFCTFGSRQIGRGYYVFDSRWNRLRCALNLMVEKHLNAQLWKKIPPVPSTTSPISTRIPHRTNSVPTSQCGVSYLAAATVSTSPVLLSSTCISPNSKSVPAHGTTLNAQPAASGAMDPVCSMQSRQVSSSSSSPSTPSGLSSVPSSPMSRKPQKLKSSKSLRPKESSGNSTNCQNASSSTSGGSGKKRKNSSPLLVHSSSSSSSSSSSSHSMESFRKNCVAHSGPPYPSTVTSSHSIGLNCVTNKANAVNVRHDQSGRGPPTGSPAESIKRMSVMVNSSDSTLSLGPFIHQSNELPVNSHGSFSHSHTPLDKLIGKKRKCSPSSSSINNSSSKPTKVAKVPAVNNVHMKHTGTIPGAQGLMNSSLLHQDISSPCLRTGISATSPQSPDLKSKGTSLTAENSTGRNNADTFEDKLHLHSALWTPRCL

SEQ ID NO: 38059 - protein, 26 aa, Homo sapiens
MSERAADDVRGEPRRAAAAAGGAAAA

SEQ ID NO: 38060 - protein, 892 aa, Homo sapiens; identical to SEQ ID NO: 38057

SEQ ID NO: 38061 - protein, 945 aa, Homo sapiens; identical to SEQ ID NO: 38058

SEQ ID NO: 38062 - protein, 130 aa, Homo sapiens
MSERAADDVRGEPRRAAAAAGGAAAAAARQQQQQQQQQQPPPPQPQRQQHPPPPPRRTRPEDGGPGAASTSAAAMATVGERRPLPSPEVMLGQSWNLWVEASKLPGKDGDRIGRKFQGVWNREVMGLCRE

SEQ ID NO: 38063 - protein, 747 aa, Homo sapiens
MEGSKTPLQSSPSAQELKAPLERRHSSSSKPPLAVPPTSVFSFFPSLSKSKGGSASGSNRSSSGGVLSASSSSSKLLKSPKEKLQLRGNTRPMHPIQQSRVPHGRIMTPSVKVEKIHPKMDGTLLKSAVGPTCPATVSSLVKPGLNCPSIPKPTLPSPGQILNGKGLPAPPTLEKKPEDNSNNRKFLNKRLSEREFDPDIHCGVIDLDTKKPCTRSLTCKTHSLTQRRAVQGRRKRFDVLLAEHKNKTREKELIRHPDSQQPPQPLRDPHPAPPRTSQEPHQNPHGVIPSESKPFVASKPKPHTPSLPRPPGCPAQQGGSAPIDPPPVHESPHPPLPATEPASRLSSEEGEGDDKEESVEKLDCHYSGHHPQPASFCTFGSRQIGRGYYVFDSRWNRLRCALNLMVEKHLNAQLWKKIPPVPSTTSPISTRIPHRTNSVPTSQCGVSYLAAATVSTSPVLLSSTCISPNSKSVPAHGTTLNAQPAASGAMDPVCSMQSRQVSSSSSSPSTPSGLSSVPSSPMSRKPQKLKSSKSLRPKESSGNSTNCQNASSSTSGGSGKKRKNSSPLLVHSSSSSSSSSSSSHSMESFRKNCVAHSGPPYPSTVTSSHSIGLNCVTNKANAVNVRHDQSGRGPPTGSPAESIKRMSVMVNSSDSTLSLGPFIHQSNELPVNSHGSFSHSHTPLDKLIGKKRKCSPSSSSINNSSSKPTKVAKVPAVNNVHMKHTGTIPGAQGLMNSSLLHQPKARP

SEQ ID NO: 38064 - protein, 220 aa, Homo sapiens
MEEDEFIGEKTFQRYCAEFIKHSQQIGDSWEWRPSKDCSDGYMCKIHFQIKNGSVMSHLGASTHGQTCLPMEEAFELPLDDCEVIETAAASEVIKYEYHVLYSCSYQVPVLYFRASFLDGRPLTLKDIWEGVHECYKMRLLQGPWDTITQQEHPILGQPFFVLHPCKTNEFMTPVLKNSQKINKNVNYITSWLSIVGPVVGLNLPLSYAKATSQDERNVP

SEQ ID NO: 38065 - protein, 125 aa, Homo sapiens
MEEDEFIGEKTFQRYCAEFIKHSQQIGDSWEWRPSKDCSDGYMCKIHFQIKNGSVMSHLGASTHGQTCLPMEVKSCSVTQAGVQLRDLSSLQPPPSGFKQFSCLSLPSNWDYRGSPLHLANFLYF

SEQ ID NO: 38066 - protein, 220 aa, Homo sapiens; identical to SEQ ID NO: 38064

SEQ ID NO: 38067 - protein, 293 aa, Homo sapiens
MDRRVKLWEVFGEKCEFKGSLSGSNAGITSIEFDSAGSYLLAASNDFASRIWTVDDYRLRHTLTGHSGKVLSAKFLLDNARIVSGSHDRTLKLWDLRSKVCIKTVFAGSSCNDIVCTEQCVMSGHFDKKIRFWDIRSESIVREMELLGKITALDLNPERTELLSCSRDDLLKVIDLRTNAIKQTFSAPGFKCGSDWTRVVFSPDGSYVAAGSAEGSLYIWSVLTGKVEKVLSSSTAHPSMRWRGRPLARTLSVWTKDAKLCCGHSTDGALRAGRTPVPSSEEAHGLLQPCPGR

SEQ ID NO: 38068 - protein, 444 aa, Homo sapiens
MSSGLRAADFPRWKRHISEQLRRRDRLQRQAFEEIILQYNKLLEKSDLHSVLAQKLQAEKHDVPNRHEIRRRQARLQKELAEAAKEPLPVEQDDDIEVIVDETSDHTEETSPVRAISRAATRRSVSSFPVPQDNVDTHPGSGKEVRVPATALCVFDAHDGEVNAVQFSPGSRLLATGGMDRRVKLWEVFGEKCEFKGSLSGSNAGITSIEFDSAGSYLLAASNDFASRIWTVDDYRLRHTLTGHSGKVLSAKFLLDNARIVSGSHDRTLKLWDLRSKVCIKTVFAGSSCNDIVCTEQCVMSGHFDKKIRFWDIRSESIVREMELLGKITALDLNPERTELLSCSRDDLLKVIDLRTNAIKQTFSAPGFKCGSDWTRVVFSPDGSYVAAGSAEGSLYIWSVLTGKVEKVLSKQHSSSINAVAWSPSGSHVVSVDKGCKAVLWAQY

SEQ ID NO: 38069 - protein, 428 aa, Homo sapiens
MSSGLRAADFPRWKRHISEQLRRRDRLQRQAFEEIILQYNKLLEKSDLHSVLAQKLQAEKHDVPNRHEIRRRQARLQKELAEAAKEPLPVEQDDDIEVIVDETSDHTEETSPVRAISRAATKRLSQPAGGLLDSITNIFGRRSVSSFPVPQDNVDTHPGSGKEVRVPATALCVFDAHDGEVNAVQFSPGITSIEFDSAGSYLLAASNDFASRIWTVDDYRLRHTLTGHSGKVLSAKFLLDNARIVSGSHDRTLKLWDLRSKVCIKTVFAGSSCNDIVCTEQCVMSGHFDKKIRFWDIRSESIVREMELLGKITALDLNPERTELLSCSRDDLLKVIDLRTNAIKQTFSAPGFKCGSDWTRVVFSPDGSYVAAGSAEGSLYIWSVLTGKVEKVLSKQHSSSINAVAWSPSGSHVVSVDKGCKAVLWAQY

SEQ ID NO: 38070 - protein, 607 aa, Homo sapiens
MSSGLRAADFPRWKRHISEQLRRRDRLQRQAFEEIILQYNKLLEKSDLHSVLAQKLQAEKHDVPNRHEISPGHDGTWNDNQLQEMAQLRIKHQEELTELHKKRGELAQLVIDLNNQMQRKDREMQMNEAKIAECLQTISDLETECLDLRTKLCDLERANQTLKDEYDALQITFTALEGKLRKTTEENQELVTRWMAEKAQEANRLNAENEKDSRRRQARLQKELAEAAKEPLPVEQDDDIEVIVDETSDHTEETSPVRAISRAATKRLSQPAGGLLDSITNIFGRRSVSSFPVPQDNVDTHPGSGKEVRVPATALCVFDAHDGEVNAVQFSPGSRLLATGGMDRRVKLWEVFGEKCEFKGSLSGSNAGITSIEFDSAGSYLLAASNDFASRIWTVDDYRLRHTLTGHSGKVLSAKFLLDNARIVSGSHDRTLKLWDLRSKVCIKTVFAGSSCNDIVCTEQCVMSGHFDKKIRFWDIRSESIVREMELLGKITALDLNPERTELLSCSRDDLLKVIDLRTNAIKQTFSAPGFKCGSDWTRVVFSPDGSYVAAGSAEGSLYIWSVLTGKVEKVLSKQHSSSINAVAWSPSGSHVVSVDKGCKAVLWAQY

SEQ ID NO: 38071 - protein, 624 aa, Homo sapiens
MSSGLRAADFPRWKRHISEQLRRRDRLQRQAFEEIILQYNKLLEKSDLHSVLAQKLQAEKHDVPNRHEISPGHDGTWNDNQLQEMAQLRIKHQEELTELHKKRGELAQLVIDLNNQMQRKDREMQMNEAKIAECLQTISDLETECLDLRTKLCDLERANQTLKDEYDALQITFTALEGKLRKTTEENQELVTRWMAEKAQEANRLNAENEKDSRRRQARLQKELAEAAKEPLPVEQDDDIEVIVDETSDHTEETSPVRAISRAATKRLSQPAGGLLDSITNIFGLSESPLLGHHSSSDAARRRSVSSFPVPQDNVDTHPGSGKEVRVPATALCVFDAHDGEVNAVQFSPGSRLLATGGMDRRVKLWEVFGEKCEFKGSLSGSNAGITSIEFDSAGSYLLAASNDFASRIWTVDDYRLRHTLTGHSGKVLSAKFLLDNARIVSGSHDRTLKLWDLRSKVCIKTVFAGSSCNDIVCTEQCVMSGHFDKKIRFWDIRSESIVREMELLGKITALDLNPERTELLSCSRDDLLKVIDLRTNAIKQTFSAPGFKCGSDWTRVVFSPDGSYVAAGSAEGSLYIWSVLTGKVEKVLSKQHSSSINAVAWSPSGSHVVSVDKGCKAVLWAQY

SEQ ID NO: 38072 - protein, 588 aa, Homo sapiens
MSSGLRAADFPRWKRHISEQLRRRDRLQRQAFEEIILQYNKLLEKSDLHSVLAQKLQAEKHDVPNRHEISPGHDGTWNDNQLQEMAQLRIKHQEELTELHKKRGELAQLVIDLNNQMQRKDREMQMNEAKIAECLQTISDLETECLDLRTKLCDLERANQTLKDEYDALQITFTALEGKLRKTTEENQELVTRWMAEKAQEANRLNAENEKDSRRRQARLQKELAEAAKEPLPVEQDDDIEVIVDETSDHTEETSPVRAISRAATRRSVSSFPVPQDNVDTHPGSGKEVRVPATALCVFDAHDGEVNAVQFSPGSRLLATGGMDRRVKLWEVFGEKCEFKGSLSGSNAGITSIEFDSAGSYLLAASNDFASRIWTVDDYRLRHTLTGHSGKVLSAKFLLDNARIVSGSHDRTLKLWDLRSKVCIKTVFAGSSCNDIVCTEQCVMSGHFDKKIRFWDIRSESIVREMELLGKITALDLNPERTELLSCSRDDLLKVIDLRTNAIKQTFSAPGFKCGSDWTRVVFSPDGSYVAAGSAEGSLYIWSVLTGKVEKVLSKQHSSSINAVAWSPSGSHVVSVDKGCKAVLWAQY

SEQ ID NO: 38073 - protein, 839 aa, Homo sapiens
MAQFDTEYQRLEASYSDSPPGEEDLLVHVAEGSKSPWHHIENLDLFFSRVYNLHQKNGFTCMLIGEIFELMQFLFVVAFTTFLVSCVDYDILFANKMVNHSLHPTEPVKVTLPDAFLPAQVCSARIQENGSLITILVIAGVFWIHRLIKFIYNICCYWEIHSFYLHALRIPMSALPYCTWQEVQARIVQTQKEHQICIHKRELTELDIYHRILRFQNYMVALVNKSLLPLRFRLPGLGEAVFFTRGLKYNFELILFWGPGSLFLNEWSLKAEYKRGGQRLELAQRLSNRILWIGIANFLLCPLILIWQILYAFFSYAEVLKREPGALGARCWSLYGRCYLRHFNELEHELQSRLNRGYKPASKYMNCFLSPLLTLLAKNGAFFAGSILAVLIALTIYDEDVLAVEHVLTTVTLLGVTVTVCRSFIPDQHMVFCPEQLLRVILAHIHYMPDHWQGNAHRSQTRDEFAQLFQYKAVFILEELLSPIVTPLILIFCLRPRALEIIDFFRNFTVEVVGVGDTCSFAQMDVRQHGHPQWLSAGQTEASVYQQAEDGKTELSLMHFAITNPGWQPPRESTAFLGFLKEQVQRDGAAASLAQGGLLPENALFTSIQSLQSESEPLSLIANVVAGSSCRGPPLPRDLQGSRHRAEVASALRSFSPLQPGQAPTGRAHSTMTGSGVDARTASSGSSVWEGQLQSLVLSEYASTEMSLHALYMHQLHKQQAQAEPERHVWHRRESDESGESAPDEGGEGARAPQSIPRSASYPCAAPRPGAPETTALHGGFQRRYGGITDPGTVPRVPSHFSRLPLGGWAEDGQSASRHPEPVPEEGSEDELPPQVHKV

SEQ ID NO: 38074 - protein, 839 aa, Homo sapiens; identical to SEQ ID NO: 38073

SEQ ID NO: 38075 - protein, 778 aa, Homo sapiens
MLIGEIFELMQFLFVVAFTTFLVSCVDYDILFANKMVNHSLHPTEPVKVTLPDAFLPAQVCSARIQENGSLITILVIAGVFWIHRLIKFIYNICCYWEIHSFYLHALRIPMSALPYCTWQEVQARIVQTQKEHQICIHKRELTELDIYHRILRFQNYMVALVNKSLLPLRFRLPGLGEAVFFTRGLKYNFELILFWGPGSLFLNEWSLKAEYKRGGQRLELAQRLSNRILWIGIANFLLCPLILIWQILYAFFSYAEVLKREPGALGARCWSLYGRCYLRHFNELEHELQSRLNRGYKPASKYMNCFLSPLLTLLAKNGAFFAGSILAVLIALTIYDEDVLAVEHVLTTVTLLGVTVTVCRSFIPDQHMVFCPEQLLRVILAHIHYMPDHWQGNAHRSQTRDEFAQLFQYKAVFILEELLSPIVTPLILIFCLRPRALEIIDFFRNFTVEVVGVGDTCSFAQMDVRQHGHPQWLSAGQTEASVYQQAEDGKTELSLMHFAITNPGWQPPRESTAFLGFLKEQVQRDGAAASLAQGGLLPENALFTSIQSLQSESEPLSLIANVVAGSSCRGPPLPRDLQGSRHRAEVASALRSFSPLQPGQAPTGRAHSTMTGSGVDARTASSGSSVWEGQLQSLVLSEYASTEMSLHALYMHQLHKQQAQAEPERHVWHRRESDESGESAPDEGGEGARAPQSIPRSASYPCAAPRPGAPETTALHGGFQRRYGGITDPGTVPRVPSHFSRLPLGGWAEDGQSASRHPEPVPEEGSEDELPPQVHKV

SEQ ID NO: 38076 - protein, 839 aa, Homo sapiens; identical to SEQ ID NO: 38073

SEQ ID NO: 38077 - protein, 169 aa, Homo sapiens
MAQFDTEYQRLEASYSDSPPGEEDLLVHVAEGSKSPWHHIENLDLFFSRVYNLHQKNGFTCMLIGEIFELMQFLFVVAFTTFLVSCVDYDILFANKMVNHSLHPTEPVKVTLPDAFLPAQVCSARIQENGSLITILVIAGVFWIHRLIKFIYNICCYWEIHSFYLHALR

SEQ ID NO: 38078 - protein, 144 aa, Homo sapiens
MAQFDTEYQRLEASYSDSPPGEEDLLVHVAEGSKSPWHHIENLDLFFSRVYNLHQKNGFTCMLIGEIFELMQFLFVVAFTTFLVSCVDYDILFANKMVNHSLHPTEPVKVTLPDAFLPAQVCSARIQENGSLITILVIAGVFWI

SEQ ID NO: 38079 - protein, 93 aa, Homo sapiens
MAQFDTEYQRLEASYSDSPPGEEDLLVHVAEGSKSPWHHIENLDLFFSRVYNLHQKNGFTCMLIGEIFELMQFLFVVAFTTFLVSCVDYDILF

SEQ ID NO: 38080 - protein, 188 aa, Homo sapiens
MAQFDTEYQRLEASYSDSPPGEEDLLVHVAEGSKSPWHHIENLDLFFSRVYNLHQKNGFTCMLIGEIFELMQFLFVVAFTTFLVSCVDYDILFANKMVNHSLHPTEPVKVTLPDAFLPAQVCSARIQENGSLITILVIAGVFWIHRLIKFIYNICCYWEIHSFYLHALRIPMSALPYCTWQEVQARIV

SEQ ID NO: 38081 - protein, 131 aa, Homo sapiens
MAQFDTEYQRLEASYSDSPPGEEDLLVHVAEGSKSPWHHIENLDLFFSRVYNLHQKNGFTCMLIGEIFELMQFLFVVAFTTFLVSCVDYDILFANKMVNHSLHPTEPVKVTLPDAFLPAQVCSARIQENGS

SEQ ID NO: 38082 - protein, 97 aa, Homo sapiens
MAQFDTEYQRLEASYSDSPPGEEDLLVHVAEGSKSPWHHIENLDLFFSRVYNLHQKNGFTCMLIGEIFELMQFLFVVAFTTFLVSCVDYDILFANKM

SEQ ID NO: 38083 - protein, 172 aa, Homo sapiens
MAQFDTEYQRLEASYSDSPPGEEDLLVHVAEGSKSPWHHIENLDLFFSRVYNLHQKNGFTCMLIGEIFELMQFLFVVAFTTFLVSCVDYDILFANKMVNHSLHPTEPVKVTLPDAFLPAQVCSARIQENGSLITILVIAGVFWIHRLIKFIYNICCYWEIHSFYLHALRIPM

SEQ ID NO: 38084 - protein, 553 aa, Homo sapiens
MAKNRRDRNSWGGFSEKTYEWSSEEEEPVKKAGPVQVLIVKDDHSFELDETALNRILLSEAVRDKEVVAVSVAGAFRKGKSFLMDFMLRYMYNQESVDWVGDYNEPLTGFSWRGGSERETTGIQIWSEIFLINKPDGKKVAVLLMDTQGTFDSQSTLRDSATVFALSTMISSIQVYNLSQNVQEDDLQHLQLFTEYGRLAMEETFLKPFQSLIFLVRDWSFPYEFSYGADGGAKFLEKRLKVSGNQHEELQNVRKHIHSCFTNISCFLLPHPGLKVATNPNFDGKLKEIDDEFIKNLKILIPWLLSPESLDIKEINGNKITCRGLVEYFKAYIKIYQGEELPHPKSMLQATAEANNLAAVATAKDTYNKKMEEICGGDKPFLAPNDLQTKHLQLKEESVKLFRGVKKMGGEEFSRRYLQQLESEIDELYIQYIKHNDSKNIFHAARTPATLFVVIFITYVIAGVTGFIGLDIIASLCNMIMGLTLITLCTWAYIRYSGEYRELGAVIDQVAAALWDQALYKLYSAAATHRHLYHQAFPTPKSESTEQSEKKKM

SEQ ID NO: 38085 - protein, 558 aa, Homo sapiens
MAKNRRDRNSWGGFSEKTYEWSSEEEEPVKKAGPVQVLIVKDDHSFELDETALNRILLSEAVRDKEVVAVSVAGAFRKGKSFLMDFMLRYMYNQESVDWVGDYNEPLTGFSWRGGSERETTGIQIWSEIFLINKPDGKKVAVLLMDTQGTFDSQSTLRDSATVFALSTMISSIQVYNLSQNVQEDDLQHLQLFTEYGRLAMEETFLKPFQSLIFLVRDWSFPYEFSYGADGGAKFLEKRLKVSGNQHEELQNVRKHIHSCFTNISCFLLPHPGLKVATNPNFDGKLKEIDDEFIKNLKILIPWLLSPESLDIKEINGNKITCRGLVEYFKAYIKIYQGEELPHPKSMLQATAEANNLAAVATAKDTYNKKMEEICGGDKPFLAPNDLQTKHLQLKEESVKLFRGVKKMGGEEFSRRYLQQLESEIDELYIQYIKHNDSKNIFHAARTPATLFVVIFITYVIAGVTGFIGLDIIASLCNMIMGLTLITLCTWAYIRYSGEYRELGAVIDQVAAALWDQGPSHQALYKLYSAAATHRHLYHQAFPTPKSESTEQSEKKKM

SEQ ID NO: 38086 - protein, 558 aa, Homo sapiens
MAKNRRDRNSWGGFSEKTYEWSSEEEEPVKKAGPVQVLIVKDDHSFELDETALNRILLSEAVRDKEVVAVSVAGAFRKGKSFLMDFMLRYMYNQESVDWVGDYNEPLTGFSWRGGSERETTGIQIWSEIFLINKPDGKKVAVLLMDTQGTFDSQSTLRDSATVFALSTMISSIQVYNLSQNVQEDDLQHLQLFTEYGRLAMEETFLKPFQSLIFLVRDWSFPYEFSYGADGGAKFLEKRLKVSGNQHEELQNVRKHIHSCFTNISCFLLPHPGLKVATNPNFDGKLKEIDDEFIKNLKILIPWLLSPESLDIKEINGNKITCRGLVEYFKAYIKIYQGEELPHPKSMLQATAEANNLAAVATAKDTYNKKMEEICGGDKPFLAPNDLQTKHLQLKEESVKLFRGVKKMGGEEFSRRYLQQLESEIDELYIQYIKHNDSKNIFHAARTPATLFVVIFITYVIAGVTGFIGLDIIASLCNMIMGLTLITLCTWAYIRYSGEYRELGAVIDQVAAALWDQGSTNEALYKLYSAAATHRHLYHQAFPTPKSESTEQSEKKKM

SEQ ID NO: 38087 - protein, 553 aa, Homo sapiens; identical to SEQ ID NO: 38084

SEQ ID NO: 38088 - protein, 29 aa, Homo sapiens
MAKNRRDRNSWGGFSEKTYEWSSEEEEPV

SEQ ID NO: 38089 - protein, 100 aa, Homo sapiens
MAKNRRDRNSWGGFSEKTYEWSSEEEEPVKKAGPVQVLIVKDDHSFELDETALNRILLSEAVRDKEVVAVSVAGAFRKGKSFLMDFMLRYMYNQESVDWV

SEQ ID NO: 38090 - protein, 566 aa, Homo sapiens
MVLKKGIKFFQRLINSKSLRFGENYEDDDLVNSDEVMKKPCPVQIVLAHEDDHNFELDEEALEQILLQEHIRDLNIVVVSVAGAFRKGKSFLLDFMLRYMYNKDSQSWIGGNNEPLTGFTWRGGCERETTGIQVWNEVFVIDRPNGTKVAVLLMDTQGAFDSQSTIKDCATVFALSTMTSSVQVYNLSQNIQEDDLQHLQLFTEYGRLAMEEIYQKPFQTLMFLIRDWSYPYEHSYGLEGGKQFLEKRLQVKQNQHEELQNVRKHIHNCFSNLGCFLLPHPGLKVATNPSFDGRLKDIDEDFKRELRNLVPLLLAPENLVEKEISGSKVTCRDLVEYFKAYIKIYQGEELPHPKSMLQATAEANNLAAVAGARDTYCKSMEQVCGGDKPYIAPSDLERKHLDLKEVAIKQFRSVKKMGGDEFCRRYQDQLEAEIEETYANFIKHNDGKNIFYAARTPATLFAVMFAMYIISGLTGFIGLNSIAVLCNLVMGLALIFLCTWAYVKYSGEFREIGTVIDQIAETLWEQRSPRKVFSKLFEVTRRRMVHRALSSAQRQRLSSNNNKKKN

SEQ ID NO: 38091 - protein, 583 aa, Homo sapiens
MAEGDEAARGQQPHQGLWRRRRTSDPSAAVNHVSSTTSLGENYEDDDLVNSDEVMKKPCPVQIVLAHEDDHNFELDEEALEQILLQEHIRDLNIVVVSVAGAFRKGKSFLLDFMLRYMYNKDSQSWIGGNNEPLTGFTWRGGCERETTGIQVWNEVFVIDRPNGTKVAVLLMDTQGAFDSQSTIKDCATVFALSTMTSSVQVYNLSQNIQEDDLQHLQLFTEYGRLAMEEIYQKPFQTLMFLIRDWSYPYEHSYGLEGGKQFLEKRLQVKQNQHEELQNVRKHIHNCFSNLGCFLLPHPGLKVATNPSFDGRLKDIDEDFKRELRNLVPLLLAPENLVEKEISGSKVTCRDLVEYFKAYIKIYQGEELPHPKSMLQATAEANNLAAVAGARDTYCKSMEQVCGGDKPYIAPSDLERKHLDLKEVAIKQFRSVKKMGGDEFCRRYQDQLEAEIEETYANFIKHNDGKNIFYAARTPATLFAVMFAMYIISGLTGFIGLNSIAVLCNLVMGLALIFLCTWAYVKYSGEFREIGTVIDQIAETLWEQVLKPLGDNLMEENIRQSVTNSIKAGLTDQVSHHARLKTD

SEQ ID NO: 38092 - protein, 412 aa, Homo sapiens
MDTQGAFDSQSTIKDCATVFALSTMTSSVQVYNLSQNIQEDDLQHLQLFTEYGRLAMEEIYQKPFQTLMFLIRDWSYPYEHSYGLEGGKQFLEKRLQVKQNQHEELQNVRKHIHNCFSNLGCFLLPHPGLKVATNPSFDGRLKDIDEDFKRELRNLVPLLLAPENLVEKEISGSKVTCRDLVEYFKAYIKIYQGEELPHPKSMLQATAEANNLAAVAGARDTYCKSMEQVCGGDKPYIAPSDLERKHLDLKEVAIKQFRSVKKMGGDEFCRRYQDQLEAEIEETYANFIKHNDGKNIFYAARTPATLFAVMFAMYIISGLTGFIGLNSIAVLCNLVMGLALIFLCTWAYVKYSGEFREIGTVIDQIAETLWEQVLKPLGDNLMEENIRQSVTNSIKAGLTDQVSHHARLKTD

SEQ ID NO: 38093 - protein, 579 aa, Homo sapiens
MAEGDEAARGQQPHQGLWRRRRTSDPSAAVNHVSSTTSLGENYEDDDLVNSDEVMKKPCPVQIVLAHEDDHNFELDEEALEQILLQEHIRDLNIVVVSVAGAFRKGKSFLLDFMLRYMYNKDSQSWIGGNNEPLTGFTWRGGCERETTGIQVWNEVFVIDRPNGTKVAVLLMDTQGAFDSQSTIKDCATVFALSTMTSSVQVYNLSQNIQEDDLQHLQLFTEYGRLAMEEIYQKPFQTLMFLIRDWSYPYEHSYGLEGGKQFLEKRLQVKQNQHEELQNVRKHIHNCFSNLGCFLLPHPGLKVATNPSFDGRLKDIDEDFKRELRNLVPLLLAPENLVEKEISGSKVTCRDLVEYFKAYIKIYQGEELPHPKSMLQATAEANNLAAVAGARDTYCKSMEQVCGGDKPYIAPSDLERKHLDLKEVAIKQFRSVKKMGGDEFCRRYQDQLEAEIEETYANFIKHNDGKNIFYAARTPATLFAVMFAMYIISGLTGFIGLNSIAVLCNLVMGLALIFLCTWAYVKYSGEFREIGTVIDQIAETLWEQVFSKLFEVTRRRMVHRALSSAQRQRLSSNNNKKKN

SEQ ID NO: 38094 - protein, 412 aa, Homo sapiens; identical to SEQ ID NO: 38092

SEQ ID NO: 38095 - protein, 413 aa, Homo sapiens
MDTQGAFDSQSTIKDCATVFALSTMTSSVQVYNLSQNIQEDDLQHLQLFTEYGRLAMEEIYQKPFQTLMFLIRDWSYPYEHSYGLEGGKQFLEKRLQVKQNQHEELQNVRKHIHNCFSNLGCFLLPHPGLKVATNPSFDGRLKDIDEDFKRELRNLVPLLLAPENLVEKEISGSKVTCRDLVEYFKAYIKIYQGEELPHPKSMLQATAEANNLAAVAGARDTYCKSMEQVCGGDKPYIAPSDLERKHLDLKEVAIKQFRSVKKMGGDEFCRRYQDQLEAEIEETYANFIKHNDGKNIFYAARTPATLFAVMFAMYIISGLTGFIGLNSIAVLCNLVMGLALIFLCTWAYVKYSGEFREIGTVIDQIAETLWEQRSPRKVFSKLFEVTRRRMVHRALSSAQRQRLSSNNNKKKN

SEQ ID NO: 38096 - protein, 568 aa, Homo sapiens
MRTAGRDPVSAGLQFPKDGSTQRPANRARFVPARTRPSPLHPCCFCFEGGGSMLSPQRVAAAASRGADDAMESSNILLQDHIRDLDVVVVSVAGAFRKGKSFILDFMLRYLYSQKESGHSNWLGDPEEPLTGFSWRGGSDPETTGIQIWSEVFTVEKPGGKKVAVVLMDTQGAFDSQSTVKDCATIFALSTMTSSVQIYNLSQNIQEDDLQQLQLFTEYGRLAMDEIFQKPFQTLMFLVRDWSFPYEYSYGLQGGMAFLDKRLQVKEHQHEEIQNVRNHIHSCFSDVTCFLLPHPGLQVATSPDFDGKLKDIAGEFKEQLQALIPYVLNPSKLMEKEINGSKVTCRGLLEYFKAYIKIYQGEDLPHPKSMLQATAEANNLAAAASAKDIYYNNMEEVCGGEKPYLSPDILEEKHCEFKQLALDHFKKTKKMGGKDFSFRYQQELEEEIKELYENFCKHNGSKNVFSTFRTPAVLFTGIVALYIASGLTGFIGLEVVAQLFNCMVGLLLIALLTWGYIRYSGQYRELGGAIDFGAAYVLEQASSHIGNSTQATVRDAVVGRPSMDKKAQ

SEQ ID NO: 38097 - protein, 541 aa, Homo sapiens
MLSPQRVAAAASRGADDAMESSKPGPVQVVLVQKDQHSFELDEKALASILLQDHIRDLDVVVVSVAGAFRKGKSFILDFMLRYLYSQKESGHSNWLGDPEEPLTGFSWRGGSDPETTGIQIWSEVFTVEKPGGKKVAVVLMDTQGAFDSQSTVKDCATIFALSTMTSSVQIYNLSQNIQEDDLQQLQLFTEYGRLAMDEIFQKPFQTLMFLVRDWSFPYEYSYGLQGGMAFLDKRLQVKEHQHEEIQNVRNHIHSCFSDVTCFLLPHPGLQVATSPDFDGKLKDIAGEFKEQLQALIPYVLNPSKLMEKEINGSKVTCRGLLEYFKAYIKIYQGEDLPHPKSMLQATAEANNLAAAASAKDIYYNNMEEVCGGEKPYLSPDILEEKHCEFKQLALDHFKKTKKMGGKDFSFRYQQELEEEIKELYENFCKHNGSKNVFSTFRTPAVLFTGIVALYIASGLTGFIGLEVVAQLFNCMVGLLLIALLTWGYIRYSGQYRELGGAIDFGAAYVLEQASSHIGNSTQATVRDAVVGRPSMDKKAQ

SEQ ID NO: 38098 - protein, 354 aa, Homo sapiens
MSRLLHAEEWAEVKELGDHHRQPQPHHLPQPPPPPQPPATLQAREHPVYPPELSLLDSTDPRAWLAPTLQGICTARAAQYLLHSPELGASEAAAPRDEVDGRGELVRRSSGGASSSKSPGPVKVREQLCKLKGGVVVDELGCSRQRAPSSKQVNGVQKQRRLAANARERRRMHGLNHAFDQLRNVIPSFNNDKKLSKYETLQMAQIYINALSELLQTPSGGEQPPPPPASCKSDHHHLRTAASYEGGAGNATAAGAQQASGGSQRPTPPGSCRTRFSAPASAGGYSVQLDALHFSTFEDSALTAMMAQKNLSPSLPGSILQPVQEENSKTSPRSHRSDGEFSPHSHYSDSDEAS

SEQ ID NO: 38099 - protein, 152 aa, Homo sapiens
MKSCKPSGPPAGARVAPPCAGGTECAGTCAGAGRLESAARRRLAANARERRRMQGLNTAFDRLRRVVPQWGQDKKLSKYETLQMALSYIMALTRILAEAERFGSERDWVGLHCEHFGRDHYLPFPGAKLPGESELYSQRLFGFQPEPFQMAT

SEQ ID NO: 38100 - protein, 208 aa, Homo sapiens
MWRSCLRLRDGGRRLLNRPAGGPSASMSPGPTIPSPARAYAPPTERKRFYQNVSITQGEGGFEINLDHRKLKTPQAKLFTVPSEALAIAVATEWDSQQDTIKYYTMHLTTLCNTSLDNPTQRNKDQLIRAAVKFLDTDTICYRVEEPETLVELQRNEWDPIIEWAEKRYGVEISSSTSIMGPSIPAKTREVLVSHLASYNTWALQGMD

SEQ ID NO: 38101 - protein, 205 aa, Homo sapiens
MWRSCLRLRDGGRRLLNRPAGGPSASMSPGPTIPSPARAYAPPTERKRFYQNVSITQGEGGFEINLDHRKLKTPQAKLFTVPSEALAIAVATEWDSQQDTIKYYTMHLTTLCNTSLDNPTQRNKDQLIRAAVKFLDTDTICYRVEEPETLVELQRNEWDPIIEWAEKRYGVEISSSTSIMGPSIPAKTREVLVSHLASYNTWALQ

SEQ ID NO: 38102 - protein, 289 aa, Homo sapiens
MWRSCLRLRDGGRRLLNRPAGGPSASMSPGPTIPSPARAYAPPTERKRFYQNVSITQGEGGFEINLDHRKLKTPQAKLFTVPSEALAIAVATEWDSQQDTIKYYTMHLTTLCNTSLDNPTQRNKDQLIRAAVKFLDTDTICYRVEEPETLVELQRNEWDPIIEWAEKRYGVEISSSTSIMGPSIPAKTREVLVSHLASYNTWALQGIEFVAAQLKSMVLTLGLIDLRLTVEQAVLLSRLEEEYQIQKWGNIEWAHDYELQELRARTAAGTLFIHLCSESTTVKHKLLKE

SEQ ID NO: 38103 - protein, 529 aa, Homo sapiens
MLGFVGRVAAAPASGALRRLTPSASLPPAQLLLRAAPTAVHPVRDYAAQTSPSPKAGAATGRIVAVIGAVVDVQFDEGLPPILNALEVQGRETRLVLEVAQHLGESTVRTIAMDGTEGLVRGQKVLDSGAPIKIPVGPETLGRIMNVIGEPIDERGPIKTKQFAPIHAEAPEFMEMSVEQEILVTGIKVVDLLAPYAKGGKIGLFGGAGVGKTVLIMELINNVAKAHGGYSVFAGVGERTREGNDLYHEMIESGVINLKDATSKVALVYGQMNEPPGARARVALTGLTVAEYFRDQEGQDVLLFIDNIFRFTQAGSEVSALLGRIPSAVGYQPTLATDMGTMQERITTTKKGSITSVQAIYVPADDLTDPAPATTFAHLDATTVLSRAIAELGIYPAVDPLDSTSRIMDPNIVGSEHYDVARGVQKILQDYKSLQDIIAILGMDELSEEDKLTVSRARKIQRFLSQPFQVAEVFTGHMGKLVPLKETIKGFQQILAGEYDHLPEQAFYMVGPIEEAVAKADKLAEEHSS

SEQ ID NO: 38104 - protein, 51 aa, Homo sapiens
MVAYWRQAGLSYIRYSQICAKAVRDALKTEFKANAEKTSGSNVKIVKVKKE

SEQ ID NO: 38105 - protein, 51 aa, Homo sapiens; identical to SEQ ID NO: 38104

SEQ ID NO: 38106 - protein, 51 aa, Homo sapiens; identical to SEQ ID NO: 38104

SEQ ID NO: 38107 - protein, 297 aa, Homo sapiens
MFSRAGVAGLSAWTLQPQWIQVRNMATLKDITRRLKSIKNIQKITKSMKMVAAAKYARAERELKPARIYGLGSLALYEKADIKGPEDKKKHLLIGVSSDRGLCGAIHSSIAKQMKSEVATLTAAGKEVMLVGIGDKIRGILYRTHSDQFLVAFKEVGRKPPTFGDASVIALELLNSGYEFDEGSIIFNKFRSVISYKTEEKPIFSLNTVASADSMSIYDDIDADVLQNYQEYNLANIIYYSLKESTTSEQSARMTAMDNASKNASEMIDKLTLTFNRTRQAVITKELIEIISGAAAL

SEQ ID NO: 38108 - protein, 298 aa, Homo sapiens
MFSRAGVAGLSAWTLQPQWIQVRNMATLKDITRRLKSIKNIQKITKSMKMVAAAKYARAERELKPARIYGLGSLALYEKADIKGPEDKKKHLLIGVSSDRGLCGAIHSSIAKQMKSEVATLTAAGKEVMLVGIGDKIRGILYRTHSDQFLVAFKEVGRKPPTFGDASVIALELLNSGYEFDEGSIIFNKFRSVISYKTEEKPIFSLNTVASADSMSIYDDIDADVLQNYQEYNLANIIYYSLKESTTSEQSARMTAMDNASKNASEMIDKLTLTFNRTRQAVITKELIEIISGAAALD

SEQ ID NO: 38109 - protein, 250 aa, Homo sapiens
MKMVAAAKYARAERELKPARIYGLGSLALYEKADIKGPEDKKKHLLIGVSSDRGLCGAIHSSIAKQMKSEVATLTAAGKEVMLVGIGDKIRGILYRTHSDQFLVAFKEVGRKPPTFGDASVIALELLNSGYEFDEGSIIFNKFRSVISYKTEEKPIFSLNTVASADSMSIYDDIDADVLQNYQEYNLANIIYYSLKESTTSEQSARMTAMDNASKNASEMIDKLTLTFNRTRQAVITKELIEIISGAAAL

SEQ ID NO: 38110 - protein, 213 aa, Homo sapiens
MAAPAVSGLSRQVRCFSTSVVRPFAKLVRPPVQVYGIEGRYATALYSAASKQNKLEQVEKELLRVAQILKEPKVAASVLNPYVKRSIKVKSLNDITAKERFSPLTTNLINLLAENGRLSNTQGVVSAFSTMMSVHRGEVPCTVTSASPLEEATLSELKTVLKSFLSQGQVLKLEAKTDPSILGGMIVRIGEKYVDMSVKTKIQKLGRAMREIV

SEQ ID NO: 38111 - protein, 136 aa, Homo sapiens
MQTAGALFISPALIRCCTRGLIRPVSASFLNSPVNSSKQPSYSNFPLQVARREFQTSVVSRDIDTAAKFIGAGAATVGVAGSGAGIGTVFGSLIIGYARNPSLKQQLFSYAILGFALSEAMGLFCLMVAFLILFAM

SEQ ID NO: 38112 - protein, 136 aa, Homo sapiens; identical to SEQ ID NO: 38111

SEQ ID NO: 38113 - protein, 157 aa, Homo sapiens
MPELILSPATAPHPLKMFACSKFVSTPSLVKSTSQLLSRPLSAVVLKRPEILTDESLSSLAVSCPLTSLVSSRSFQTSAISRDIDTAAKFIGAGAATVGVAGSGAGIGTVFGSLIIGYARNPSLKQQLFSYAILGFALSEAMGLFCLMVAFLILFAM

SEQ ID NO: 38114 - protein, 198 aa, Homo sapiens
MPELILYVAITLSVAERLVGPGHACAEPSFRSSRCSAPLCLLCSGSSSPATAPHPLKMFACSKFVSTPSLVKSTSQLLSRPLSAVVLKRPEILTDESLSSLAVSCPLTSLVSSRSFQTSAISRDIDTAAKFIGAGAATVGVAGSGAGIGTVFGSLIIGYARNPSLKQQLFSYAILGFALSEAMGLFCLMVAFLILFAM

SEQ ID NO: 38115 - protein, 141 aa, Homo sapiens
MFACSKFVSTPSLVKSTSQLLSRPLSAVVLKRPEILTDESLSSLAVSCPLTSLVSSRSFQTSAISRDIDTAAKFIGAGAATVGVAGSGAGIGTVFGSLIIGYARNPSLKQQLFSYAILGFALSEAMGLFCLMVAFLILFAM

SEQ ID NO: 38116 - protein, 142 aa, Homo sapiens
MFACAKLACTPSLIRAGSRVAYRPISASVLSRPEASRTGEGSTVFNGAQNGVSQLIQREFQTSAISRDIDTAAKFIGAGAATVGVAGSGAGIGTVFGSLIIGYARNPSLKQQLFSYAILGFALSEAMGLFCLMVAFLILFAM

SEQ ID NO: 38117 - protein, 142 aa, Homo sapiens; identical to SEQ ID NO: 38116

SEQ ID NO: 38118 - protein, 142 aa, Homo sapiens; identical to SEQ ID NO: 38116

SEQ ID NO: 38119 - protein, 69 aa, Homo sapiens
MVPPVQVSPLIKLGRYSALFLGVAYGATRYNYLKPRAEEERRIAAEEKKKQDELKRIARELAEDDSILK

SEQ ID NO: 38120 - protein, 108 aa, Homo sapiens
MILQRLFRFSSVIRSAVSVHLRRNIGVTAVAFNKELDPIQKLFVDKIREYKSKRQTSGGPVDASSEYQQELERELFKLKQMFGNADMNTFPTFKFEDPKFEVIEKPQA

SEQ ID NO: 38121 - protein, 108 aa, Homo sapiens; identical to SEQ ID NO: 38120

SEQ ID NO: 38122 - protein, 108 aa, Homo sapiens; identical to SEQ ID NO: 38120

SEQ ID NO: 38123 - protein, 108 aa, Homo sapiens; identical to SEQ ID NO: 38120

SEQ ID NO: 38124 - protein, 108 aa, Homo sapiens; identical to SEQ ID NO: 38120

SEQ ID NO: 38125 - protein, 116 aa, Homo sapiens
MHCDGGISMILQRLFRFSSVIRSAVSVHLRRNIGVTAVAFNKELDPIQKLFVDKIREYKSKRQTSGGPVDASSEYQQELERELFKLKQMFGNADMNTFPTFKFEDPKFEVIEKPQA

SEQ ID NO: 38126 - protein, 188 aa, Homo sapiens [sequence omitted]

SEQ ID NO: 38127 - protein, 1226 aa, Homo sapiens
MSKLKVIPEKSLTNNSRIVGLLAQLEKINAEPSESDTARYVTSKILHLAQSQEKTRREMTAKGSTGMEILLSTLENTKDLQTTLNILSILVELVSAGGGRRVSFLVTKGGSQILLQLLMNASKESPPHEDLMVQIHSILAKIGPKDKKFGVKARINGALNITLNLVKQNLQNHRLVLPCLQLLRVYSANSVNSVSLGKNGVVELMFKIIGPFSKKNSSLIKVALDTLAALLKSKTNARRAVDRGYVQVLLTIYVDWHRHDNRHRNMLIRKGILQSLKSVTNIKLGRKAFIDANGMKILYNTSQECLAVRTLDPLVNTSSLIMRKCFPKNRLPLPTIKSSFHFQLPVIPVTGPVAQLYSLPPEVDDVVDESDDNDDIDVEAENETENEDDLDQNFKNDDIETDINKLKPQQEPGRTIEDLKMYEHLFPELVDDFQDYDLISKEPKPFVFEGKVRGPIVVPTAGEETSGNSGNLRKVVMKENISSKGDEGEKKSTFMDLAKEDIKDNDRTLQQQPGDQNRTISSVHGLNNDIVKALDRITLQNIPSQTAPGFTAEMKKDCSLPLTVLTCAKACPHMATCGNVLFEGRTVQLGKLCCTGVETEDDEDTESNSSVEQASVEVPDGPTLHDPDLYIEIVKNTKSVPEYSEVAYPDYFGHIPPPFKEPILERPYGVQRTKIAQDIERLIHQSDIIDRVVYDLDNPNYTIPEEGDILKFNSKFESGNLRKVIQIRKNEYDLILNSDINSNHYHQWFYFEVSGMRPGVAYRFNIINCEKSNSQFNYGMQPLMYSVQEALNARPWWIRMGTDICYYKNHFSRSSVAAGGQKGKSYYTITFTVNFPHKDDVCYFAYHYPYTYSTLQMHLQKLESAHNPQQIYFRKDVLCETLSGNSCPLVTITAMPESNYYEHICHFRNRPYVFLSARVHPGETNASWVMKGTLEYLMSNNPTAQSLRESYIFKIVPMLNPDGVINGNHRCSLSGEDLNRQWQSPSPDLHPTIYHAKGLLQYLAAVKRLPLVYCDYHGHSRKKNVFMYGCSIKETVWHTNDNATSCDVVEDTGYRTLPKILSHIAPAFCMSSCSFVVEKSKESTARVVVWREIGVQRSYTMESTLCGCDQGKYKGLQIGTRELEEMGAKFCVGLLRLKRLTSPLEYNLPSSLLDFENDLIESSCKVTSPTTYVLDEDEPRFLEEVDYSAESNDELDIELAENVGDYEPSAQEEVLSDSELSRTYLP

SEQ ID NO: 38128 - protein, 188 aa, Homo sapiens [sequence omitted]

SEQ ID NO: 38129 - protein, 237 aa, Homo sapiens
MSKLKVIPEKSLTNNSRIVGLLAQLEKINAEPSESDTARYVTSKILHLAQSQEKTRREMTAKGSTGMEILLSTLENTKDLQTTLNILSILVELVSAGGGRRVSFLVTKGGSQILLQLLMNASKESPPHEDLMVQIHSILAKIGPKDKKFGVKARINGALNITLNLVKQNLQNHRLVLPCLQLLRVYSANSVNSVSLGKNGVVELMFKIIGPFSKKNSSLIKNVWQSGLWILLSIPPV

SEQ ID NO: 38130 - protein, 1186 aa, Homo sapiens
MSKLKVIPEKSLTNNSRIVGLLAQLEKINAEPSESDTARYVTSKILHLAQSQEKTRREMTAKGSTGMEILLSTLENTKDLQTTLNILSILVELVSAGGGRRVSFLVTKGGSQILLQLLMNASKESPPHEDLMVQIHSILAKIGPKDKKFGVKARINGALNITLNLVKQNLQNHRLVLPCLQLLRVYSANSVNSVSLGKNGVVELMFKIIGPFSKKNSSLIKVALDTLAALLKSKTNARRAVDRGYVQVLLTIYVDWHRHDNRHRNMLIRKGILQSLKSVTNIKLGRKAFIDANGMKILYNTSQLPVIPVTGPVAQLYSLPPEVDDVVDESDDNDDIDVEAENETENEDDLDQNFKNDDIETDINKLKPQQEPGRTIEDLKMYEHLFPELVDDFQDYDLISKEPKPFVFEGKVRGPIVVPTAGEETSGNSGNLRKVVMKENISSKGDEGEKKSTFMDLAKEDIKDNDRTLQQQPGDQNRTISSVHGLNNDIVKALDRITLQNIPSQTAPGFTAEMKKDCSLPLTVLTCAKACPHMATCGNVLFEGRTVQLGKLCCTGVETEDDEDTESNSSVEQASVEVPDGPTLHDPDLYIEIVKNTKSVPEYSEVAYPDYFGHIPPPFKEPILERPYGVQRTKIAQDIERLIHQSDIIDRVVYDLDNPNYTIPEEGDILKFNSKFESGNLRKVIQIRKNEYDLILNSDINSNHYHQWFYFEVSGMRPGVAYRFNIINCEKSNSQFNYGMQPLMYSVQEALNARPWWIRMGTDICYYKNHFSRSSVAAGGQKGKSYYTITFTVNFPHKDDVCYFAYHYPYTYSTLQMHLQKLESAHNPQQIYFRKDVLCETLSGNSCPLVTITAMPESNYYEHICHFRNRPYVFLSARVHPGETNASWVMKGTLEYLMSNNPTAQSLRESYIFKIVPMLNPDGVINGNHRCSLSGEDLNRQWQSPSPDLHPTIYHAKGLLQYLAAVKRLPLVYCDYHGHSRKKNVFMYGCSIKETVWHTNDNATSCDVVEDTGYRTLPKILSHIAPAFCMSSCSFVVEKSKESTARVVVWREIGVQRSYTMESTLCGCDQGKYKGLQIGTRELEEMGAKFCVGLLRLKRLTSPLEYNLPSSLLDFENDLIESSCKVTSPTTYVLDEDEPRFLEEVDYSAESNDELDIELAENVGDYEPSAQEEVLSDSELSRTYLP

SEQ ID NO: 38131 - protein, 1238 aa, Homo sapiens
MRTGSAASSAAAAAAAAAASASPATGVCMKTPGGGRRGIRRDPGAEPGAAALRGPRQRPILSRLTNNSRIVGLLAQLEKINAEPSESDTARYVTSKILHLAQSQEKTRREMTAKGSTGMEILLSTLENTKDLQTTLNILSILVELVSAGGGRRVSFLVTKGGSQILLQLLMNASKESPPHEDLMVQIHSILAKIGPKDKKFGVKARINGALNITLNLVKQNLQNHRLVLPCLQLLRVYSANSVNSVSLGKNGVVELMFKIIGPFSKKNSSLIKVALDTLAALLKSKTNARRAVDRGYVQVLLTIYVDWHRHDNRHRNMLIRKGILQSLKSVTNIKLGRKAFIDANGMKILYNTSQLPVIPVTGPVAQLYSLPPEVDDVVDESDDNDDIDVEAENETENEDDLDQNFKNDDIETDINKLKPQQEPGRTIEDLKMYEHLFPELVDDFQDYDLISKEPKPFVFEGKVRGPIVVPTAGEETSGNSGNLRKVVMKENISSKGDEGEKKSTFMDLAKEDIKDNDRTLQQQPGDQNRTISSVHGLNNDIVKALDRITLQNIPSQTAPGFTAEMKKDCSLPLTVLTCAKACPHMATCGNVLFEGRTVQLGKLCCTGVETEDDEDTESNSSVEQASVEVPDGPTLHDPDLYIEIVKNTKSVPEYSEVAYPDYFGHIPPPFKEPILERPYGVQRTKIAQDIERLIHQSDIIDRVVYDLDNPNYTIPEEGDILKFNSKFESGNLRKVIQIRKNEYDLILNSDINSNHYHQWFYFEVSGMRPGVAYRFNIINCEKSNSQFNYGMQPLMYSVQEALNARPWWIRMGTDICYYKNHFSRSSVAAGGQKGKSYYTITFTVNFPHKDDVCYFAYHYPYTYSTLQMHLQKLESAHNPQQIYFRKDVLCETLSGNSCPLVTITAMPESNYYEHICHFRNRPYVFLSARVHPGETNASWVMKGTLEYLMSNNPTAQSLRESYIFKIVPMLNPDGVINGNHRCSLSGEDLNRQWQSPSPDLHPTIYHAKGLLQYLAAVKRLPLVYCDYHGHSRKKNVFMYGCSIKETVWHTNDNATSCDVVEDTGYRTLPKILSHIAPAFCMSSCSFVVEKSKESTARVVVWREIGVQRSYTMESTLCGCDQGKYKGLQIGTRELEEMGAKFCVGLLRLKRLTSPLEYNLPSSLLDFENDLIESSCKVTSPTTYVLDEDEPRFLEEVDYSAESNDELDIELAENVGDYEPSAQEEVLSDSELSRTYLP

SEQ ID NO: 38132 - protein, 643 aa, Homo sapiens
MNASKESPPHEDLMVQIHSILAKIGPKAVNSVSLGKNGVVELMFKIIGPFSKKNSSLIKVALDTLAALLKSKTNARRAVDRGYVQVLLTIYVDWHRHDNRHRNMLIRKGILQSLKSVTNIKLGRKAFIDANGMKILYNTSQECLAVRTLDPLVNTSSLIMRKCFPKNRLPLPTIKSSFHFQLPVIPVTGPVAQLYSLPPEVDDVVDESDDNDDIDVEAENETENEDDLDQNFKNDDIETDINKLKPQQEPGRTIEDLKMYEHLFPELVDDFQDYDLISKEPKPFVFEGKVRGPIVVPTAGEETSGNSGNLRKVVMKENISSKGDEGEKKSTFMDLAKEDIKDNDRTLQQQPGDQNRTISSVHGLNNDIVKALDRITLQNIPSQTAPGFTAEMKKDCSLPLTVLTCAKACPHMATCGNVLFEGRTVQLGKLCCTGVETEDDEDTESNSSVEQASVEVPDGPTLHDPDLYIEIVKNTKSVPEYSEVAYPDYFGHIPPPFKEPILERPYGVQRTKIAQDIERLIHQSDIIDRVVYDLDNPNYTIPEEGDILKFNSKFESGNLRKVIQIRKNEYDLILNSDINSNHYHQWFYFEVSGMRPGVAYRFNIINCEKSNSQFNYALPLMSWMKMNLDSLKKLITVQKVMMS

SEQ ID NO: 38133 - protein, 361 aa, Homo sapiens
MVHAEAFSRPLSRNEVVGLIFRLTIFGAVTYFTIKWMVDAIDPTRKQKVEAQKQAEKLMKQIGVKNVKLSEYEMSIAAHLVDPLNMHVTWSDIAGLDDVITDLKDTVILPIKKKHLFENSRLLQPPKGVLLYGPPGCGKTLIAKATAKEAGCRFINLQPSTLTDKWYGESQKLAAAVFSLAIKLQPSIIFIDEIDSFLRNRSSSDHEATAMMKAQFMSLWDGLDTDHSCQVIVMGATNRPQDLDSAIMRRMPTRFHINQPALKQREAILKLILKNENVDRHVDLLEVAQETDGFSGSDLKEMCRDAALLCVREYVNSTSEESHDEDEIRPVQQQDLHRAIEKMKKSKDAAFQNVLTHVCLD

SEQ ID NO: 38134 - protein, 361 aa, Homo sapiens; identical to SEQ ID NO: 38133

SEQ ID NO: 38135 - protein, 273 aa, Homo sapiens
MKQIGVKNVKLSEYEMSIAAHLVDPLNMHVTWSDIAGLDDVITDLKDTVILPIKKKHLFENSRLLQPPKGVLLYGPPGCGKTLIAKATAKEAGCRFINLQPSTLTDKWYGESQKLAAAVFSLAIKLQPSIIFIDEIDSFLRNRSSSDHEATAMMKAQFMSLWDGLDTDHSCQALKQREAILKLILKNENVDRHVDLLEVAQETDGFSGSDLKEMCRDAALLCVREYVNSTSEESHDEDEIRPVQQQDLHRAIEKMKKSKDAAFQNVLTHVCLD

SEQ ID NO: 38136 - protein, 287 aa, Homo sapiens
MVHAEAFSRPLSRNEVVGLIFRLTIFGAVTYFTIKWMVDAIDPTRKQKVEAQKQAEKLMKQIGVKNVKLSEYEMSIAAHLVDPLNMHVTWSDIAGLDDVITDLKDTVILPIKKKHLFENSRLLQPPKGVLLYGPPGCGKTLIAKATAKEAGCRFINLQPSTLTDKWYGESQKLAAAVFSLAIKLQPSIIFIDEIDSFLRNRSSSDHEATAMMKAQFMSLWDGLDTDHSCQVIVMGATNRPQDLDSAIMRRMPTRFHINQPALKQREAILKLILKNENLRKLKPREVL

SEQ ID NO: 38137 - protein, 1390 aa, Homo sapiens
MVVLRSSLELHNHSAASATGSLDLSSDFLSLEHIGRRRLRSAGAAQKKPAATTAKAGDGSSVKEVETYHRTRALRSLRKDAQNSSDSSFEKNVEITEQLANGRHFTRQLARQQADKKKEEHREDKVIPVTRSLRARNIVQSTEHLHEDNGDVEVRRSCRIRSRYSGVNQSMLFDKLITNTAEAVLQKMDDMKKMRRQRMRELEDLGVFNETEESNLNMYTRGKQKDIQRTDEETTDNQEGSVESSEEGEDQEHEDDGEDEDDEDDDDDDDDDDDDDDEDDEDEEDGEEENQKRYYLRQRKATVYYQAPLEKPRHQRKPNIFYSGPASPARPRYRLSSAGPRSPYCKRMNRRRHAIHSSDSTSSSSSEDEQHFERRRKRSRNRAINRCLPLNFRKDELKGIYKDRMKIGASLADVDPMQLDSSVRFDSVGGLSNHIAALKEMVVFPLLYPEVFEKFKIQPPRGCLFYGPPGTGKTLVARALANECSQGDKRVAFFMRKGADCLSKWVGESERQLRLLFDQAYQMRPSIIFFDEIDGLAPVRSSRQDQIHSSIVSTLLALMDGLDSRGEIVVIGATNRLDSIDPALRRPGRFDREFLFSLPDKEARKEILKIHTRDWNPKPLDTFLEELAENCVGYCGADIKSICAEAALCALRRRYPQIYTTSEKLQLDLSSINISAKDFEVAMQKMIPASQRAVTSPGQALSTVVKPLLQNTVDKILEALQRVFPHAEFRTNKTLDSDISCPLLESDLAYSDDDVPSVYENGLSQKSSHKAKDNFNFLHLNRNACYQPMSFRPRILIVGEPGFGQGSHLAPAVIHALEKFTVYTLDIPVLFGVSTTSPEETCAQVIREAKRTAPSIVYVPHIHVWWEIVGPTLKATFTTLLQNIPSFAPVLLLATSDKPHSALPEEVQELFIRDYGEIFNVQLPDKEERTKFFEDLILKQAAKPPISKKKAVLQALEVLPVAPPPEPRSLTAEEVKRLEEQEEDTFRELRIFLRNVTHRLAIDKRFRVFTKPVDPDEVPDYVTVIKQPMDLSSVISKIDLHKYLTVKDYLRDIDLICSNALEYNPDRDPGDRLIRHRACALRDTAYAIIKEELDEDFEQLCEEIQESRKKRGCSSSKYAPSYYHVMPKQNSTLVGDKRSDPEQNEKLKTPSTPVACSTPAQLKRKIRKKSNWYLGTIKKRRKISQAKDDSQNAIDHKIESDTEETQDTSVDHNETGNTGESSVEENEKQQNASESKLELRNNSNTCNIENELEDSRKTTACTELRDKIACNGDASSSQIIHISDENEGKEMCVLRMTRARRSQVEQQQLITVEKALAILSQPTPSLVVDHERLKNLLKTVVKKSQNYNIFQLENLYAVISQCIYRHRKDHDKTSLIQKMEQEVENFSCSR

SEQ ID NO: 38138 - protein, 572 aa, Homo sapiens
  VARIANT 1: note = MOD_RES - Any amino acid
XGALALAAPRRCRQPLPGRDCAPGAPPAGAVSRAGRIGLFPSPVCTSAAVRSGSGYAKDALNLAQMQEQTLQLEQQSKLKEYEAAVEQLKSEQIRAQAEERRKTLSEETRQHQARAQYQDKLARQRYEDQLKQQQLLNEENLRKQEESVQKQEAMRRATVEREMELRHKNEMLRVEAEARARAKAERENADIIREQIRLKAAEHRQTVLESIRTAGTLFGEGFRAFVTDWDKVTATVAGLTLLAVGVYSAKNATLVAGRFIEARLGKPSLVRETSRITVLEALRHPIQVSRRLLSRPQDALEGVVLSPSLEARVRDIAIATRNTKKNRSLYRNILMYGPPGTGKTLFAKKLALHSGMDYAIMTGGDVAPMGREGVTAMHKLFDWANTSRRGLLLFVDEADAFLRKRATEKISEDLRATLNAFLYRTGQHSNKFMLVLASNQPEQFDWAINDRINEMVHFDLPGQEERERLVRMYFDKYVLKPATEGKQRLKLAQFDYGRKCSEVARLTEGMSGREIAQLAVSWQATAYASEDGVLTEAMMDTRVQDAVQQHQQKMCWLKAEGPGRGDEPSPS

SEQ ID NO: 38139 - protein, 634 aa, Homo sapiens
MSWLFGINKGPKGEGAGPPPPLPPAQPGAEGGGDRGLGDRPAPKDKWSNFDPTGLERAAKAARELEHSRYAKDALNLAQMQEQTLQLEQQSKLKMRLEALSLLHTLVWAWSLCRAGAVQTQERLSGSASPEQVPAGECCALQEYEAAVEQLKSEQIRAQAEERRKTLSEETRQHQARAQYQDKLARQRYEDQLKQQQLLNEENLRKQEESVQKQEAMRRATVEREMELRHKNEMLRVEAEARARAKAERENADIIREQIRLKAAEHRQTVLESIRTAGTLFGEGFRAFVTDWDKVTATVAGLTLLAVGVYSAKNATLVAGRFIEARLGKPSLVRETSRITVLEALRHPIQVSRRLLSRPQDALEGVVLSPSLEARVRDIAIATRNTKKNRSLYRNILMYGPPGTGKTLFAKKLALHSGMDYAIMTGGDVAPMGREGVTAMHKLFDWANTSRRGLLLFVDEADAFLRKRATEKISEDLRATLNAFLYRTGQHSNKFMLVLASNQPEQFDWAINDRINEMVHFDLPGQEERERLVRMYFDKYVLKPATEGKQRLKLAQFDYGRKCSEVARLTEGMSGREIAQLAVSWQATAYASEDGVLTEAMMDTRVQDAVQQHQQKMCWLKAEGPGRGDEPSPS

SEQ ID NO: 38140 - protein, 586 aa, Homo sapiens
MSWLFGINKGPKGEGAGPPPPLPPAQPGAEGGGDRGLGDRPAPKDKWSNFDPTGLERAAKAARELEHSRYAKDALNLAQMQEQTLQLEQQSKLKEYEAAVEQLKSEQIRAQAEERRKTLSEETRQHQARAQYQDKLARQRYEDQLKQQQLLNEENLRKQEESVQKQEAMRRATVEREMELRHKNEMLRVEAEARARAKAERENADIIREQIRLKAAEHRQTVLESIRTAGTLFGEGFRAFVTDWDKVTATVAGLTLLAVGVYSAKNATLVAGRFIEARLGKPSLVRETSRITVLEALRHPIQVSRRLLSRPQDALEGVVLSPSLEARVRDIAIATRNTKKNRSLYRNILMYGPPGTGKTLFAKKLALHSGMDYAIMTGGDVAPMGREGVTAMHKLFDWANTSRRGLLLFVDEADAFLRKRATEKISEDLRATLNAFLYRTGQHSNKFMLVLASNQPEQFDWAINDRINEMVHFDLPGQEERERLVRMYFDKYVLKPATEGKQRLKLAQFDYGRKCSEVARLTEGMSGREIAQLAVSWQATAYASEDGVLTEAMMDTRVQDAVQQHQQKMCWLKAEGPGRGDEPSPS

SEQ ID NO: 38141 - protein, 263 aa, Homo sapiens
MYGPPGTGKTLFAKKLALHSGMDYAIMTGGDVAPMGREGVTAMHKLFDWANTSRRGLLLFVDEADAFLRKRATEKISEDLRATLNAFLYRTGQHSNNPSHVSHGGSSPAGRPWLTPQARWAPRFMLVLASNQPEQFDWAINDRINEMVHFDLPGQEERERLVRMYFDKYVLKPATEGKQRLKLAQFDYGRKCSEVARLTEGMSGREIAQLAVSWQATAYASEDGVLTEAMMDTRVQDAVQQHQQKMCWLKAEGPGRGDEPSPS

SEQ ID NO: 38142 - protein, 201 aa, Homo sapiens
KLALHSGMDYAIMTGGDVAPMGREGVTAMHKLFDWANTSRRGLLLFVDEADAFLRKRATEKISEDLRATLNAFLYRTGQHSNNPSHVSHGGSSPAGRPWLTPQARWAPRFMLVLASNQPEQFDWAINDRINEMVHFDLPGQEERERLVRMYFDKYVLKPATEGKQRLKLAQFDYGRKCSEVARLTEGMSGREIAQLAVSWQ

SEQ ID NO: 38143 - protein, 144 aa, Homo sapiens
MCLCRPLLPQRAQYQDKLARQRYEDQLKQQQLLNEENLRKQEESVQKQEAMRRATVEREMELRHKNEMLRVEAEARARAKAERENADIIREQIRLKAAEHRQTVLESIRTAGTLFGEGFRAFVTDWDKVTATVAGLTLLAVGVY

SEQ ID NO: 38144 - protein, 102 aa, Homo sapiens
MRLEALSLLHTLVWAWSLCRAGAVQTQERLSGSASPEQVPAGECCALQEYEAAVEQLKSEQIRAQAEERRKTLSEETRQHQARAQYQDKLARQRYEDQLKQQ

SEQ ID NO: 38145 - protein, 507 aa, Homo sapiens
MQEQTLQLEQQSKLKEYEAAVEQLKSEQIRAQAEERRKTLSEETRQHQARAQYQDKLARQRYEDQLKQQQLLNEENLRKQEESVQKQEAMRRATVEREMELRHKNEMLRVEAEARARAKAERENADIIREQIRLKAAEHRQTVLESIRTAGTLFGEGFRAFVTDWDKVTATVAGLTLLAVGVYSAKNATLVAGRFIEARLGKPSLVRETSRITVLEALRHPIQVSRRLLSRPQDALEGVVLSPSLEARVRDIAIATRNTKKNRSLYRNILMYGPPGTGKTLFAKKLALHSGMDYAIMTGGDVAPMGREGVTAMHKLFDWANTSRRGLLLFVDEADAFLRKRATEKISEDLRATLNAFLYRTGQHSNKFMLVLASNQPEQFDWAINDRINEMVHFDLPGQEERERLVRMYFDKYVLKPATEGKQRLKLAQFDYGRKCSEVARLTEGMSGREIAQLAVSWQATAYASEDGVLTEAMMDTRVQDAVQQHQQKMCWLKAEGPGRGDEPSPS

SEQ ID NO: 38146 - protein, 648 aa, Homo sapiens
MSWLFGVNKGPKGEGAGPPPPLPPAQPGAEGGGDRGLGDRPAPKDKWSNFDPTGLERAAKAARELEHSRYAKEALNLAQMQEQTLQLEQQSKLKEYEAAVEQLKSEQIRAQAEERRKTLSEETRQHQARAQYQDKLARQRYEDQLKQQQLLNEENLRKQEESVQKQEAMRRATVEREMELRHKNEMLRVETEARARAKAERENADIIREQIRLKASEHRQTVLESIRTAGTLFGEGFRAFVTDRDKVTATVAGLTLLAVGVYSAKNATAVTGRFIEARLGKPSLVRETSRITVLEALRHPIQVSRRLLSRPQDVLEGVVLSPSLEARVRDIAIATRNTKKNRGLYRHILLYGPPGTGKTLFAKKLALHSGMDYAIMTGGDVAPMGREGVTAMHKLFDWANTSRRGLLLFMDEADAFLRKRATEEISKDLRATLNAFLYHMGQHSNKFMLVLASNLPEQFDCAINSRIDVMVHFDLPQQEERERLVRLHFDNCVLKPATEGKRRLKLAQFDYGRKCSEVARLTEGMSGREIAQLAVSWQATAYASKDGVLTEAMMDACVQDAVQQYRQKMRWLKAEGPGRGVEHPLSGVQGETLTSWSLATDPSYPCLAGPCTFRICSWMGTGLCPGPLSPRMSCGGGRPFCPPGHPLL

SEQ ID NO: 38147 - protein, 299 aa, Homo sapiens
MSWLFGVNKGPKGEGAGPPPPLPPAQPGAEGGGDRGLGDRPAPKDKWSNFDPTGLERAAKAARELEHSRYAKEALNLAQMQEQTLQLEQQSKLKQLLNEENLRKQEESVQKHRQTVLESIRTAGTLFGEGFRAFVTDRDKVTATVAGLTLLAVGVYSAKNATAVTGRFIEARLGKPSLVRETSRITVLEALRHPIQQVSRRLLSRPQDVLEGVVLSPSLEARVRDIAIATRNTKKNRGLYRHILLYGPPGTGKTLFAKKLALHSGMDYAIMTGGDVAPMGREGVTAMHKLFDWANTSRR

SEQ ID NO: 38148 - protein, 116 aa, Homo sapiens
MRRATVEREMELRHKNEMLRVETEARARAKAERENADIIREQIRLKASEHRQTVLESIRTAGTLFGEGFRAFVTDRDKVTATVNIFIKQGWQVAERQHFRRRRWADHEVRRSRSSW

SEQ ID NO: 38149 - protein, 482 aa, Homo sapiens
MLRVETEARARAKAERENADIIREQIRLKASEHRQTVLESIRTAGTLFGEGFRAFVTDRDKVTATVAGLTLLAVGVYSAKNATAVTGRFIEARLGKPSLVRETSRITVLEALRHPIQVSRRLLSRPQDVLEGVVLSVSPSLEARVRDIAIATRNTKKNRGLYRHILLYGPPGTGKTLFAKKLALHSGMDYAIMTGGDVAPMGREGVTAMHKLFDWANTSRRGLQEEISKDLRATLNAFLYHMGQHSNNRFMLVLASNLPEQFDCAINSRIDVMVHFDLPQQEERERLVRLHFDNCVLKPATEGKRMGVGQLPVFRPPPHGVGSAALAASLGNSFPRRLKLAQFDYGRKCSEVARLTEGMSGREIAQLAVSWQATAYASKDGVLTEAMMDACVQDAVQQYRQKMRWLKAEGPGRGVEHPLSGVQGETLTSWSLATDPSYPCLAGPCTFRICSWMGTGLCPGPLSPRMSCGGGRPFCPPGHPLL

SEQ ID NO: 38150 - protein, 117 aa, Homo sapiens
MRRATVEREMELRHKNEMLRVETEARARAKAERENADIIREQIRLKASEHRQTVLESIRTAGTLFGEGFRAFVTDRDKVTATVNIFIKQGWQVAERQHHFRRRRWADHEVRRSRSSW

SEQ ID NO: 38151 - protein, 1844 aa, Homo sapiens
MVGVLAMAAAAAPPPVKDCEIEPCKKRKKDDDTSTCKTITKYLSPLGKTRDRVFAPPKPSNILDYFRKTSPTNEKTQLGKECKIKSPESVPVDSNKDCTTPLEMFSNVEFKKKRKRVNLSHQLNNIKTENEAPIEISSDDSKEDYSLNNDFVESSTSVLRYKKQVEVLAENIQDTKSQPNTMTSLQNSKKVNPKQGTTKNDFKKLRKRKCRDVVDLSESLPLAEELNLLKKDGKDTKQMENTTSHANSRDNVTEAAQLNDSIITVSYEEFLKSHKENKVEEIPDSTMSICVPSETVDEIVKSGYISESENSEISQQVRFKTVTVLAQVHPIPPKKTGKIPRIFLKQKQFEMENSLSDPENEQTVQKRKSNVVIQEEELELAVLEAGSSEAVKPKCTLEERQQFMKAFRQPASDALKNGVKKSSDKQKDLNEKCLYEVGRDDNSKKIMENSGIQMVSKNGNLQLHTDKGSFLKEKNKKLKKKNKKTLDTGAIPGKNREGNTQKKETTFFLKEKQYQNRMSLRQRKTEFFKSSTLFNNESLVYEDIANDDLLKVSSLCNNNKLSRKTSIPVKDIKLTQSKAESEASLLNVSTPKSTRRSGRISSTPTTETIRGIDSDDVQDNSQLKASTQKAANLSEKHSLYTAELITVPFDSESPIRMKFTRISTPKKSKKKSNKRSEKSEATDGGFTSQIRKASNTSKNISKAKQLIEKAKALHISRSKVTEEIAIPLRRSSRHQTLPERKKLSETEDSVIIIDSSPTALKHPEKNQKKLQCLNDVLGKKLNTSTKNVPGKMKVAPLFLVRKAQKAADPVPSFDESSQDTSEKSQDCDVQCKAKRDFLMSGLPDLLKRQIAKKAAALDVYNAVSTSFQRVVHVQQKDDGCCLWHLKPPSCPLLTKFKELNTKVIDLSKCGIALGEFSTLNSKLKSGNSAAVFMRTRKEFTEEVRNLLLEEIRWSNPEFSLKKYFPLLLKKQIEHQVLSSECHSKQELEADVSHKETKRKLVEAENSKSKRKKPNEYSKNLEKTNRKSEELSKRNNSSGIKLDSSKDSGTEDMLWTEKYQPQTASELIGNELAIKKLHSWLKDWKRRAELEERQNLKGKRDEKHEDFSGGIDFKGSSDDEEESRLCNTVLITGPTGVGKTAAVYACAQELGFKIFEVNASSQRSGRQILSQLKEATQSHQVDKQGVNSQKPCFFNSYYIGKSPKKISSPKKVVTSPRKVPPPSPKSSGPKRALPPKTLANYFKVSPKPKNNEEIGMLLENNKGIKNSFEQKQITQTKSTNATNSNVKDVGAEEPSRKNATSLILFEEVDVIFDEDAGFLNAIKTFMATTKRPVILTTSDPTFSLMFDGCFEEIKFSTPSLLNVASYLQMICLTENFRTDVKDFVTLLTANTCDIRKSILYLQFWIRSGGGVLEERPLTLYRGNSRNVQLVCSEHGLDNKIYPKNTKKKRVDLPKCDSGCAETLFGLKNIFSPSEDLFSFLKHKITMKEEWHKFIQLLTEFQMRNVDFLYSNLEFILPLPVDTIPETKNFCGPSVTVDASAATKSMNCLARKHSEREQPLKKSQKKKQKKTLVILDDSDLFDTDLDFPDQSISLSSVSSSSNAEESKTGDEESKARDKGNNPETKKSIPCPPKTTAGKKCSALVSHCLNSLSEFMDNMSFLDALLTDVREQNKYGRNDFSWTNGKVTSGLCDEFSLESNDGWTSQSSGELKAAAEALSFTKCSSAISKALETLNSCKKLGRDPTNDLTFYVSQKRNNVYFSQSAANLDNAWKRISVIKSVFSSRSLLYVGNRQASIIEYLPTLRNICKTEKLKEQGKSKRRFLHYFEGIHLDIPKETVNTLAADFP

SEQ ID NO: 38152 - protein, 1180 aa, Homo sapiens
MSADSSPLVGSTPTGYGTLTIGTSIDPLSSSVSSVRLSGYCGSPWRVIGYHVVVWMMAGIPLLLFRWKPLWGVRLRLRPCNLAHAETLVIEIRDKEDSSWQLFTVQVQTEAIGEGSLEPSPQSQAEDGRSQAAVGAVPEGAWKDTAQLHKSEEAVSVGQKRVLRYYLFQGQRYIWIETQQAFYQVSLLDHGRSCDDVHRSRHGLSLQDQMVRKAIYGPNVISIPVKSYPQLLVDEALNPYYGFQAFSIALWLADHYYWYALCIFLISSISICLSLYKTRKQSQTLRDMVKLSMRVCVCRPGGEEEWVDSSELVPGDCLVLPQEGGLMPCDAALVAGECMVNESSLTGESIPVLKTALPEGLGPYCAETHRRHTLFCGTLILQARAYVGPHVLAVVTRTGFCTAKGGLVSSILHPRPINFKFYKHSMKFVAALSVLALLGTIYSIFILYRNRVPLNEIVIRALDLVTVVVPPALPAAMTVCTLYAQSRLRRQGIFCIHPLRINLGGKLQLVCFDKTGTLTEDGLDVMGVVPLKGQAFLPLVPEPRRLPVGPLLRALATCHALSRLQDTPVGDPMDLKMVESTGWVLEEEPAADSAFGTQVLAVMRPPLWEPQLQAMEEPPVPVSVLHRFPFSSALQRMSVVVAWPGATQPEAYVKGSPELVAGLCNPETVPTDFAQMLQSYTAAGYRVVALASKPLPTVPSLEAAQQLTRDTVEGDLSLLGLLVMRNLLKPQTTPVIQALRRTRIRAVMVTGDNLQTAVTVARGCGMVAPQEHLIIVHATHPERGQPASLEFLPMESPTAVNGVKDPDQAASYTVEPDPRSRHLALSGPTFGIIVKHFPKLLPKVLVQGTVFARMAPEQKTELVCELQKLQYCVGMCGDGANDCGALKAADVGISLSQAEASVVSPFTSSMASIECVPMVIREGRCSLDTSFSVFKYMALYSLTQFISVLILYTINTNLGDLQFLAIDLVITTTVAVLMSRTGPALVLGRVRPPGALLSVPVLSSLLLQMVLVTGVQLGGYFLTLAQPWFVPLNRTVAAPDNLPNYENTVVFSLSSFQYLILAAAVSKGAPFRRPLYTNVPFLVALALLSSVLVGLVLVPGLLQGPLALRNITDTGFKLLLLGLVTLNFVGAFMLESVLDQCLPACLRRLRPKRASKKRFKQLERELAEQPWPPLPAGPLR

SEQ ID NO: 38153 - protein, 1158 aa, Homo sapiens
MSADSSPLVGSTPTGYGTLTIGTSIDPLSSSVSSVRLSGYCGSPWRVIGYHVVVWMMAGIPLLLFRWKPLWGVRLRLRPCNLAHAETLVIEIRDKEDSSWQLFTVQVQTEAIGEGSLEPSPQSQAEDGRSQAAVGAVPEGAWKDTAQLHKSEEAKRVLRYYLFQGQRYIWIETQQAFYQVSLLDHGRSCDDVHRSRHGLSLQDQMVRKAIYGPNVISIPVKSYPQLLVDEALNPYYGFQAFSIALWLADHYYWYALCIFLISSISICLSLYKTRKQSQTLRDMVKLSMRVCVCRPGGEEEWVDSSELVPGDCLVLPQEGGLMPCDAALVAGECMVNESSLTGESIPVLKTALPEGLGPYCAETHRRHTLFCGTLILQARAYVGPHVLAVVTRTGFCTAKGGLVSSILHPRPINFKFYKHSMKFVAALSVLALLGTIYSIFILYRNRVPLNEIVIRALDLVTVVVPPALPAAMTVCTLYAQSRLRRQGIFCIHPLRINLGGKLQLVCFDKTGTLTEDGLDVMGVVPLKGQAFLPLVPEPRRLPVGPLLRALATCHALSRLQDTPVGDPMDLKMVESTGWVLEEEPAADSAFGTQVLAVMRPPLWEPQLQAMEEPPVPVSVLHRFPFSSALQRMSVVVAWPGATQPEAYVKGSPELVAGLCNPETVPTDFAQMLQSYTAAGYRVVALASKPLPTVPSLEAAQQLTRDTVEGDLSLLGLLVMRNLLKPQTTPVIQALRRTRIRAVMVTGDNLQTAVTVARGCGMVAPQEHLIIVHATHPERGQPASLEFLPMESPTAVNGVKVLVQGTVFARMAPEQKTELVCELQKLQYCVGMCGDGANDCGALKAADVGISLSQAEASVVSPFTSSMASIECVPMVIREGRCSLDTSFSVFKYMALYSLTQFISVLILYTINTNLGDLQFLAIDLVITTTVAVLMSRTGPALVLGRVRPPGALLSVPVLSSLLLQMVLVTGVQLGGYFLTLAQPWFVPLNRTVAAPDNLPNYENTVVFSLSSFQYLILAAAVSKGAPFRRPLYTNERARPVPPRLPAPPPAQAGLQEALQAAGTRAGRAALAAAARRPPEVVQAHGHPRHWNSLPLSHQLDPSPATPPPPPPTSLRLATVYTPPPRPPPPWGSVDYCPLPWTIPRRGGSPQLPSVLLSV

SEQ ID NO: 38154 - protein, 1175 aa, Homo sapiens
MSADSSPLVGSTPTGYGTLTIGTSIDPLSSSVSSVRLSGYCGSPWRVIGYHVVVWMMAGIPLLLFRWKPLWGVRLRLRPCNLAHAETLVIEIRDKEDSSWQLFTVQVQTEAIGEGSLEPSPQSQAEDGRSQAAVGAVPEGAWKDTAQLHKSEEAKRVLRYYLFQGQRYIWIETQQAFYQVSLLDHGRSCDDVHRSRHGLSLQDQMVRKAIYGPNVISIPVKSYPQLLVDEALNPYYGFQAFSIALWLADHYYWYALCIFLISSISICLSLYKTRKQSQTLRDMVKLSMRVCVCRPGGEEEWVDSSELVPGDCLVLPQEGGLMPCDAALVAGECMVNESSLTGESIPVLKTALPEGLGPYCAETHRRHTLFCGTLILQARAYVGPHVLAVVTRTGFCTAKGGLVSSILHPRPINFKFYKHSMKFVAALSVLALLGTIYSIFILYRNRVPLNEIVIRALDLVTVVVPPALPAAMTVCTLYAQSRLRRQGIFCIHPLRINLGGKLQLVCFDKTGTLTEDGLDVMGVVPLKGQAFLPLVPEPRRLPVGPLLRALATCHALSRLQDTPVGDPMDLKMVESTGWVLEEEPAADSAFGTQVLAVMRPPLWEPQLQAMEEPPVPVSVLHRFPFSSALQRMSVVVAWPGATQPEAYVKGSPELVAGLCNPETVPTDFAQMLQSYTAAGYRVVALASKPLPTVPSLEAAQQLTRDTVEGDLSLLGLLVMRNLLKPQTTPVIQALRRTRIRAVMVTGDNLQTAVTVARGCGMVAPQEHLIIVHATHPERGQPASLEFLPMESPTAVNGVKDPDQAASYTVEPDPRSRHLALSGPTFGIIVKHFPKLLPKVLVQGTVFARMAPEQKTELVCELQKLQYCVGMCGDGANDCGALKAADVGISLSQAEASVVSPFTSSMASIECVPMVIREGRCSLDTSFSVFKYMALYSLTQFISVLILYTINTNLGDLQFLAIDLVITTTVAVLMSRTGPALVLGRVRPPGALLSVPVLSSLLLQMVLVTGVQLGGYFLTLAQPWFVPLNRTVAAPDNLPNYENTVVFSLSSFQYLILAAAVSKGAPFRRPLYTNVPFLVALALLSSVLVGLVLVPGLLQGPLALRNITDTGFKLLLLGLVTLNFVGAFMLESVLDQCLPACLRRLRPKRASKKRFKQLERELAEQPWPPLPAGPLR

SEQ ID NO: 38155 - protein, 1123 aa, Homo sapiens
MSRATSVGDQLEAPARTIYLNQPHLNKFRDNQISTAKYSVLTFLPRFLYEQIRRAANAFFLFIALLQQIPDVSPTGRYTTLVPLIIILTIAGIKEIVEDFKRHKADNAVNKKKTIVLRNGMWHTIMWKEVAVGDIVKVVNGQYLPADVVLLSSSEPQAMCYVETANLDGETNLKIRQGLSHTADMQTREVLMKLSGTIECEGPNRHLYDFTGNLNLDGKSLVALGPDQILLRGTQLRNTQWVFGIVVYTGHDTKLMQNSTKAPLKRSNVEKVTNVQILVLFGILLVMALVSSAGALYWNRSHGEKNWYIKKMDTTSDNFGYNLLTFIILYNNLIPISLLVTLEVVKYTQALFINWDTDMYYIGNDTPAMARTSNLNEELGQVKYLFSDKTGTLTCNIMNFKKCSIAGVTYGHFPELAREPSSDDFCRMPPPCSDSCDFDDPRLLKNIEDRHPTAPCIQEFLTLLAVCHTVVPEKDGDNIIYQASSPDEAALVKGAKKLGFVFTARTPFSVIIEAMGQEQTFGILNVLEFSSDRKRMSVIVRTPSGRLRLYCKGADNVIFERLSKDSKYMEETLCHLEYFATEGLRTLCVAYADLSENEYEEWLKVYQEASTILKDRAQRLEECYEIIEKNLLLLGATAIEDRLQAGVPETIATLLKAEIKIWVLTGDKQETAINIGYSCRLVSQNMALILLKEDSLDATRAAITQHCTDLGNLLGKENDVALIIDGHTLKYALSFEVRRSFLDLALSCKAVICCRVSPLQKSEIVDVVKKRVKAITLAIGDGANDVGMIQTAHVGVGISGNEGMQATNNSDYAIAQFSYLEKLLLVHGAWSYNRVTKCILYCFYKNVVLYIIEIFTALPPFTLGIFERSCTQESMLRFPQLYKITQNGEGFNTKVFWGHCINALVHSLILFWFPMKALEHDTVLTSGHATDYLFVGNIVYTYVVVTVCLKAGLETTAWTKFSHLAVWGSMLTWLVFFGIYSTIWPTIPIAPDMRGQATMVLSSAHFWLGLFLVPTACLIEDVAWRAAKHTCKKTLLEEVQELETKSRVLGKAVLRDSNGKRLNERDRLIKRLGRKTPPTLFRGSSLQQGVPHGYAFSQEEHGAVSQEEVIRAYDTTKKKSRKK

SEQ ID NO: 38156 - protein, 141 aa, Homo sapiens
MSRATSVGDQLEAPARTIYLNQPHLNKFRDNQISTAKYSVLTFLPRFLYEQIRRAANAFFLFIALLQQIPDVSPTGRYTTLVPLIIILTIAGIKEIVEDFKRHKADNAVNKKKTIVLRNGMWHTIMWKEENSPPFKEISPL

SEQ ID NO: 38157 - protein, 1188 aa, Homo sapiens
MLNGAGLDKALKMSLPRRSRIRSSVGPVRSSLGYKKAEDEMSRATSVGDQLEAPARTIYLNQPHLNKFRDNQISTAKYSVLTFLPRFLYEQIRRAANAFFLFIALLQQIPDVSPTGRYTTLVPLIIILTIAGIKEIVEDFKRHKADNAVNKKKTIVLRNGMWHTIMWKEVAVGDIVKVVNGQYLPADVVLLSSSEPQAMCYVETANLDGETNLKIRQGLSHTADMQTREVLMKLSGTIECEGPNRHLYDFTGNLNLDGKSLVALGPDQILLRGTQLRNTQWVFGIVVYTGHDTKLMQNSTKAPLKRSNVEKVTNVQILVLFGILLVMALVSSAGALYWNRSHGEKNWYIKKMDTTSDNFGYNLLTFIILYNNLIPISLLVTLEVVKYTQALFINWDTDMYYIGNDTPAMARTSNLNEELGQVKYLFSDKTGTLTCNIMNFKKCSIAGVTYGHFPELAREPSSDDFCRMPPPCSDSCDFDDPRLLKNIEDRHPTAPCIQEFLTLLAVCHTVVPEKDGDNIIYQASSPDEAALVKGAKKLGFVFTARTPFSVIIEAMGQEQTFGILNVLEFSSDRKRMSVIVRTPSGRLRLYCKGADNVIFERLSKDSKYMEETLCHLEYFATEGLRTLCVAYADLSENEYEEWLKVYQEASTILKDRAQRLEECYEIIEKNLLLLGATAIEDRLQAGVPETIATLLKAEIKIWVLTGDKQETAINIGYSCRLVSQNMALILLKEDSLDATRAAITQHCTDLGNLLGKENDVALIIDGHTLKYALSFEVRRSFLDLALSCKAVICCRVSPLQKSEIVDVVKKRVKAITLAIGDGANDVGMIQTAHVGVGISGNEGMQATNNSDYAIAQFSYLEKLLLVHGAWSYNRVTKCILYCFYKNVVLYIIELWFAFVNGFSGQILFERWCIGLYNVIFTALPPFTLGIFERSCTQESMLRFPQLYKITQNGEGFNTKVFWGHCINALVHSLILFWFPMKALEHDTVLTSGHATDYLFVGNIVYTYVVVTVCLKAGLETTAWTKFSHLAVWGSMLTWLVFFGIYSTIWPTIPIAPDMRGQATMVLSSAHFWLGLFLVPTACLIEDVAWRAAKHTCKKTLLEEVQELETKSRVLGKAVLRDSNGKRLNERDRLIKRLGRKTPPTLFRGSSLQQGVPHGYAFSQEEHGAVSQEEVIRAYDTTKKKSRKK

SEQ ID NO: 38158 - protein, 968 aa, Homo sapiens
MRCPGPRLLETSWRHPPAPFTSTNRHLYDFTGNLNLDGKSLVALGPDQILLRGTQLRNTQWVFGIVVYTGHDTKLMQNSTKAPLKRSNVEKVTNVQILVLFGILLVMALVSSAGALYWNRSHGEKNWYIKKMDTTSDNFGYNLLTFIILYNNLIPISLLVTLEVVKYTQALFINWDTDMYYIGNDTPAMARTSNLNEELGQVKYLFSDKTGTLTCNIMNFKKCSIAGVTYGHFPELAREPSSDDFCRMPPPCSDSCDFDDPRLLKNIEDRHPTAPCIQEFLTLLAVCHTVVPEKDGDNIIYQASSPDEAALVKGAKKLGFVFTARTPFSVIIEAMGQEQTFGILNVLEFSSDRKRMSVIVRTPSGRLRLYCKGADNVIFERLSKDSKYMEETLCHLEYFATEGLRTLCVAYADLSENEYEEWLKVYQEASTILKDRAQRLEECYEIIEKNLLLLGATAIEDRLQAGVPETIATLLKAEIKIWVLTGDKQETAINIGYSCRLVSQNMALILLKEDSLDATRAAITQHCTDLGNLLGKENDVALIIDGHTLKYALSFEVRRSFLDLALSCKAVICCRVSPLQKSEIVDVVKKRVKAITLAIGDGANDVGMIQTAHVGVGISGNEGMQATNNSDYAIAQFSYLEKLLLVHGAWSYNRVTKCILYCFYKNVVLYIIELWFAFVNGFSGQILFERWCIGLYNVIFTALPPFTLGIFERSCTQESMLRFPQLYKITQNGEGFNTKVFWGHCINALVHSLILFWFPMKALEHDTVLTSGHATDYLFVGNIVYTYVVVTVCLKAGLETTAWTKFSHLAVWGSMLTWLVFFGIYSTIWPTIPIAPDMRGQATMVLSSAHFWLGLFLVPTACLIEDVAWRAAKHTCKKTLLEEVQELETKSRVLGKAVLRDSNGKRLNERDRLIKRLGRKTPPTLFRGSSLQQGVPHGYAFSQEEHGAVSQEEVIRAYDTTKKKSRKK

SEQ ID NO: 38159 - protein, 1300 aa, Homo sapiens
MGTGPAQTPRSTRAGPEPSPAPPGPGDTGDSDVTQEGSGPAGIRGGETVIRAGMGDSPGRGAPERRHKAQPGRARKYEWRPEGPTSMGSLGQREDLQDEDRNSAFTWKVQANNRAYNGQFKEKVILCWQRKKYKTNVIRTAKYNFYSFLPLNLYEQFHRVSNLFFLIIIILQSIPDISTLPWFSLSTPMVCLLFIRATRDLVDDMGRHKSDRAINNRPCQILMGKSFKQKKWQDLCVGDVVCLRKDNIVPADMLLLASTEPSSLCYVETVDIDGETNLKFRQALMVTHKELATIKKMASFQGTVTCEAPNSRMHHFVGCLEWNDKKYSLDIGNLLLRGCRIRNTDTCYGLVIYAGFDTKIMKNCGKIHLKRTKLDLLMNKLVVVIFISVVLVCLVLAFGFGFSVKEFKDHHYYLSGVHGSSVAAESFFVFWSFLILLSVTIPMSMFILSEFIYLGNSVFIDWDVQMYYKPQDVPAKARSTSLNDHLGQVEYIFSDKTGTLTQNILTFNKCCISGRVYGPDSEATTRPKENPYLWNKFADGKLLFHNAALLHLVRTNGDEAVREFWRLLAICHTVMVRESPRERPDQLLYQAASPDEGALVTAARNFGYVFLSRTQDTVTIMELGEERVYQVLAIMDFNSTRKRMSVLVRKPEGAICLYTKGADTVIFERLHRRGAMEFATEEALAAFAQETLRTLCLAYREVAEDIYEDWQQRHQEASLLLQNRAQALQQLLGATAIEDRLQDGVPETIKCLKKSNIKIWVLTGDKQETAVNIGFACELLSENMLILEEKEISRILETYWENSNNLLTRESLSQVKLALVINGDFLDKLLVSLRKEPRALAQNVNMDEAWQELGQSRRDFLYARRLSLLCRRFGLPLAAPPAQDSRARRSSEVLQERAFVDLASKCQAVICCRVTPKQKALIVALVKKYHQVVTLAIGDGANDINMIKTADVGVGLAGQEGMQAVQNSDFVLGQFCFLQRLLLVHGRWSYVRICKFLRYFFYKSMASMMVQVWFACYNGFTGQPLYEGWFLALFNLLYSTLPVLYIGLFEQDVSAEQSLEKPELYVVGQKDELFNYWVFVQAIAHGVTTSLVNFFMTLWISRDTAGPASFSDHQSFAVVVALSCLLSITMEVILIIKYWTALCVATILLSLGFYAIMTTTTQSFWLFRVSPTTFPFLYADLSVMSSPSILLVVLLSVSINTFPVLALRVIFPALKELRAKEEKVEEGPSEEIFTMEPLPHVHRESRARRSSYAFSHREGYANLITQGTILRRGPGVSSDIASESLDPSDEEAASSPKESQ

SEQ ID NO: 38160 - protein, 578 aa, Homo sapiens
MGDSPGRGAPERRHKAQPGRARKYEWRPEGPTSMGSLGQREDLQDEDRNSAFTWKVQANNRAYNGQFKEKVILCWQRKKYKTNVIRTAKYNFYSFLPLNLYEQFHRVSNLFFLIIIILQSIPDISTLPWFSLSTPMVCLLFIRATRDLVDDMGRHKSDRAINNRPCQILMGKSFKQKKWQDLCVGDVVCLRKDNIVPADMLLLASTEPSSLCYVETVDIDGETNLKFRQALMVTHKELATIKKMASFQGTVTCEAPNSRMHHFVGCLEWNDKKYSLDIGNLLLRGCRIRNTDTCYGLVIYAGFDTKIMKNCGKIHLKRTKLDLLMNKLVVVIFISVVLVCLVLAFGFGFSVKEFKDHHYYLSGVHGSSVAAESFFVFWSFLILLSVTIPMSMFILSEFIYLGNSVFIDWDVQMYYKPQDVPAKARSTSLNDHLGQVEYIFSDKTGTLTQNILTFNKCCISGRVYGAAPTPELPAGSSIFKGLRVPENQSHVWPHAQHLRPNLNQGTVARWPGFLWRGPGKFFFFLRQSLTLSTQAGMQWCNLGSLQSPPPRFKRFSWLSLPSSWDYRHLPPHLIFLYF

SEQ ID NO: 38161 - protein, 1263 aa, Homo sapiens
MGDSPGRGAPERRHKAQPGRARKYEWRPEGPTSMGSLGQREDLQDEDRNSAFTWKVQANNRAYNGQFKEKVILCWQRKKYKTNVIRTAKYNFYSFLPLNLYEQFHRVSNLFFLIIIILQSIPDISTLPWFSLSTPMVCLLFIRATRDLVDDMGRHKSDRAINNRPCQILMGKSFKQKKWQDLCVGDVVCLRKDNIVPADMLLLASTEPSSLCYVETVDIDGETNLKFRQALMVTHKELATIKKMASFQGTVTCEAPNSRMHHFVGCLEWNDKKYSLDIGNLLLRGCRIRNTDTCYGLVIYADGYMFVGFDTKIMKNCGKIHLKRTKLDLLMNKLVVVIFISVVLVCLVLAFGFGFSVKEFKDHHYYLSGVHGSSVAAESFFVFWSFLILLSVTIPMSMFILSEFIYLGNSVFIDWDVQMYYKPQDVPAKARSTSLNDHLGQVEYIFSDKTGTLTQNILTFNKCCISGRVYGPDSEATTRPKENPYLWNKFADGKLLFHNAALLHLVRTNGDEAVREFWRLLAICHTVMVRESPRERPDQLLYQAASPDEGALVTAARNFGYVFLSRTQDTVTIMELGEERVYQVLAIMDFNSTRKRMSVLVRKPEGAICLYTKGADTVIFERLHRRGAMEFATEEALAAFAQETLRTLCLAYREVAEDIYEDWQQRHQEASLLLQNRAQALQQVYNEMEQDLRLLGATAIEDRLQDGVPETIKCLKKSNIKIWVLTGDKQETAVNIGFACELLSENMLILEEKEISRILETYWENSNNLLTRESLSQVKLALVINGDFLDKLLVSLRKEPRALAQNVNMDEAWQELGQSRRDFLYARRLSLLCRRFGLPLAAPPAQDSRARRSSEVLQERAFVDLASKCQAVICCRVTPKQKALIVALVKKYHQVVTLAIGDGANDINMIKTADVGVGLAGQEGMQAVQNSDFVLGQFCFLQRLLLVHGRWSYVRICKFLRYFFYKSMASMMVQVWFACYNGFTGQPLYEGWFLALFNLLYSTLPVLYIGLFEQDVSAEQSLEKPELYVVGQKDELFNYWVFVQAIAHGVTTSLVNFFMTLWISRDTAGPASFSDHQSFAVVVALSCLLSITMEVILIIKYWTALCVATILLSLGFYAIMTTTTQSFWLFRVSPTTFPFLYADLSVMSSPSILLVVLLSVSINTFPVLALRVIFPALKELRAKEEKVEEGPSEEIFTMEPLPHVHRESRARRSSYAFSHREGYANLITQGTILRRGPGVSSDIASESLDPSDEEAASSPKESQ

SEQ ID NO: 38162 - protein, 1310 aa, Homo sapiens
MGTGPAQTPRSTRAGPEPSPAPPGPGDTGDSDVTQEGSGPAGIRGGETVIRAGMGDSPGRGAPERRHKAQPGRARKYEWRPEGPTSMGSLGQREDLQDEDRNSAFTWKVQANNRAYNGQFKEKVILCWQRKKYKTNVIRTAKYNFYSFLPLNLYEQFHRVSNLFFLIIIILQSIPDISTLPWFSLSTPMVCLLFIRATRDLVDDMGRHKSDRAINNRPCQILMGKSFKQKKWQDLCVGDVVCLRKDNIVPADMLLLASTEPSSLCYVETVDIDGETNLKFRQALMVTHKELATIKKMASFQGTVTCEAPNSRMHHFVGCLEWNDKKYSLDIGNLLLRGCRIRNTDTCYGLVIYAGFDTKIMKNCGKIHLKRTKLDLLMNKLVVVIFISVVLVCLVLAFGFGFSVKEFKDHHYYLSGVHGSSVAAESFFVFWSFLILLSVTIPMSMFILSEFIYLGNSVFIDWDVQMYYKPQDVPAKARSTSLNDHLGQVEYIFSDKTGTLTQNILTFNKCCISGRVYGPDSEATTRPKENPYLWNKFADGKLLFHNAALLHLVRTNGDEAVREFWRLLAICHTVMVRESPRERPDQLLYQAASPDEGALVTAARNFGYVFLSRTQDTVTIMELGEERVYQVLAIMDFNSTRKRMSVLVRKPEGAICLYTKGADTVIFERLHRRGAMEFATEEALAAFAQETLRTLCLAYREVAEDIYEDWQQRHQEASLLLQNRAQALQQVYNEMEQDLRLLGATAIEDRLQDGVPETIKCLKKSNIKIWVLTGDKQETAVNIGFACELLSENMLILEEKEISRILETYWENSNNLLTRESLSQVKLALVINGDFLDKLLVSLRKEPRALAQNVNMDEAWQELGQSRRDFLYARRLSLLCRRFGLPLAAPPAQDSRARRSSEVLQERAFVDLASKCQAVICCRVTPKQKALIVALVKKYHQVVTLAIGDGANDINMIKTADVGVGLAGQEGMQAVQNSDFVLGQFCFLQRLLLVHGRWSYVRICKFLRYFFYKSMASMMVQVWFACYNGFTGQPLYEGWFLALFNLLYSTLPVLYIGLFEQDVSAEQSLEKPELYVVGQKDELFNYWVFVQAIAHGVTTSLVNFFMTLWISRDTAGPASFSDHQSFAVVVALSCLLSITMEVILIIKYWTALCVATILLSLGFYAIMTTTTQSFWLFRVSPTTFPFLYADLSVMSSPSILLVVLLSVSINTFPVLALRVIFPALKELRAKEEKVEEGPSEEIFTMEPLPHVHRESRARRSSYAFSHREGYANLITQGTILRRGPGVSSDIASESLDPSDEEAASSPKESQ

SEQ ID NO: 38163 - protein, 1001 aa, Homo sapiens
MEAAHAKTTEECLAYFGVSETTGLTPDQVKRNLEKYGLNELPAEEGKTLWELVIEQFEDLLVRILLLAACISFVLAWFEEGEETITAFVEPFVILLILIANAIVGVWQERNAENAIEALKEYEPEMGKVYRADRKSVQRIKARDIVPGDIVEVAVGDKVPADIRILAIKSTTLRVDQSILTGESVSVIKHTEPVPDPRAVNQDKKNMLFSGTNIAAGKALGIVATTGVGTEIGKIRDQMAATEQDKTPLQQKLDEFGEQLSKVISLICVAVWLINIGHFNDPVHGGSWFRGAIYYFKIAVALAVAAIPEGLPAVITTCLALGTRRMAKKNAIVRSLPSVETLGCTSVICSDKTGTLTTNQMSVCKMFIIDKVDGDICLLNEFSITGSTYAPEGEVLKNDKPVRPGQYDGLVELATICALCNDSSLDFNEAKGVYEKVGEATETALTTLVEKMNVFNTDVRSLSKVERANACNSVIRQLMKKEFTLEFSRDRKSMSVYCSPAKSSRAAVGNKMFVKGAPEGVIDRCNYVRVGTTRVPLTGPVKEKIMAVIKEWGTGRDTLRCLALATRDTPPKREEMVLDDSARFLEYETDLTFVGVVGMLDPPRKEVTGSIQLCRDAGIRVIMITGDNKGTAIAICRRIGIFGENEEVADRAYTGREFDDLPLAEQREACRRACCFARVEPSHKSKIVEYLQSYDEITAMTGDGVNDAPALKKAEIGIAMGSGTAVAKTASEMVLADDNFSTIVAAVEEGRAIYNNMKQFIRYLISSNVGEVVCIFLTAALGLPEALIPVQLLWVNLVTDGLPATALGFNPPDLDIMDRPPRSPKEPLISGWLFFRYMAIGGYVGAATVGAAAWWFLYAEDGPHVNYSQLTHFMQCTEDNTHFEGIDCEVFEAPEPMTMALSVLVTIEMCNALNSLSENQSLLRMPPWVNIWLLGSICLSMSLHFLILYVDPLPMIFKLRALDLTQWLMVLKISLPVIGLDEILKFVARNYLEDPEDERRK

SEQ ID NO: 38164 - protein, 844 aa, Homo sapiens
KRRNPGRQAVGHTEEDPPRVGTPWKEHTGPGPQEGSTMEAAHAKTTEECLAYFGVSETTGLTPDQVKRNLEKYGLNELPAEEGKTLWELVIEQFEDLLVRILLLAACISFVLAWFEEGEETITAFVEPFVILLILIANAIVGVWQERNAENAIEALKEYEPEMGKVYRADRKSVQRIKARDIVPGDIVEVAVGDKVPADIRILAIKSTTLRVDQSILTGESVSVIKHTEPVPDPRAVNQDKKNMLFSGTNIAAGKALGIVATTGVGTEIGKIRDQMAATEQDKTPLQQKLDEFGEQLSKVISLICVAVWLINIGHFNDPVHGGSWFRGAIYYFKIAVALAVAAIPEGLPAVITTCLALGTRRMAKKNAIVRSLPSVETLGCTSVICSDKTGTLTTNQMSVCKMFIIDKVDGDICLLNEFSITGSTYAPEGEVLKNDKPVRPGQYDGLVELATICALCNDSSLDFNEAKGVYEKVGEATETALTTLVEKMNVFNTDVRSLSKVERANACNSVIRQLMKKEFTLEFSRDRKSMSVYCSPAKSSRAAVGNKMFVKGAPEGVIDRCNYVRVGTTRVPLTGPVKEKIMAVIKEWGTGRDTLRCLALATRDTPPKREEMVLDDSARFLEYETDLTFVGVVGMLDPPRKEVTGSIQLCRDAGIRVIMITGDNKGTAIAICRRIGIFGENEEVADRAYTGREFDDLPLAEQREACRRACCFARVEPSHKSKIVEYLQSYDEITAMTGDGVNDAPALKKAEIGIAMGSGTAVAKTASEMVLADDNFSTIVAAVEEGRAIYNNMKQFIRYLISSNVGEVVCIFLTAALGLPEALIPVQLLWVNLVTDCAELLIY

SEQ ID NO: 38165 - protein, 994 aa, Homo sapiens
MEAAHAKTTEECLAYFGVSETTGLTPDQVKRNLEKYGLNELPAEEGKTLWELVIEQFEDLLVRILLLAACISFVLAWFEEGEETITAFVEPFVILLILIANAIVGVWQERNAENAIEALKEYEPEMGKVYRADRKSVQRIKARDIVPGDIVEVAVGDKVPADIRILAIKSTTLRVDQSILTGESVSVIKHTEPVPDPRAVNQDKKNMLFSGTNIAAGKALGIVATTGVGTEIGKIRDQMAATEQDKTPLQQKLDEFGEQLSKVISLICVAVWLINIGHFNDPVHGGSWFRGAIYYFKIAVALAVAAIPEGLPAVITTCLALGTRRMAKKNAIVRSLPSVETLGCTSVICSDKTGTLTTNQMSVCKMFIIDKVDGDICLLNEFSITGSTYAPEGEVLKNDKPVRPGQYDGLVELATICALCNDSSLDFNEAKGVYEKVGEATETALTTLVEKMNVFNTDVRSLSKVERANACNSVIRQLMKKEFTLEFSRDRKSMSVYCSPAKSSRAAVGNKMFVKGAPEGVIDRCNYVRVGTTRVPLTGPVKEKIMAVIKEWGTGRDTLRCLALATRDTPPKREEMVLDDSARFLEYETDLTFVGVVGMLDPPRKEVTGSIQLCRDAGIRVIMITGDNKGTAIAICRRIGIFGENEEVADRAYTGREFDDLPLAEQREACRRACCFARVEPSHKSKIVEYLQSYDEITAMTGDGVNDAPALKKAEIGIAMGSGTAVAKTASEMVLADDNFSTIVAAVEEGRAIYNNMKQFIRYLISSNVGEVVCIFLTAALGLPEALIPVQLLWVNLVTDGLPATALGFNPPDLDIMDRPPRSPKEPLISGWLFFRYMAIGGYVGAATVGAAAWWFLYAEDGPHVNYSQLTHFMQCTEDNTHFEGIDCEVFEAPEPMTMALSVLVTIEMCNALNSLSENQSLLRMPPWVNIWLLGSICLSMSLHFLILYVDPLPMIFKLRALDLTQWLMVLKISLPVIGLDEILKFVARNYLEG

SEQ ID NO: 38166 - protein, 869 aa, Homo sapiens
MGKVYRADRKSVQRIKARDIVPGDIVEVAVGDKVPADIRILAIKSTTLRVDQSILTGESVSVIKHTEPVPDPRAVNQDKKNMLFSGTNIAAGKALGIVATTGVGTEIGKIRDQMAATEQDKTPLQQKLDEFGEQLSKVISLICVAVWLINIGHFNDPVHGGSWFRGAIYYFKIAVALAVAAIPEGLPAVITTCLALGTRRMAKKNAIVRSLPSVETLGCTSVICSDKTGTLTTNQMSVCKMFIIDKVDGDICLLNEFSITGSTYAPEGEVLKNDKPVRPGQYDGLVELATICALCNDSSLDFNEAKGVYEKVGEATETALTTLVEKMNVFNTDVRSLSKVERANACNSVIRQLMKKEFTLEFSRDRKSMSVYCSPAKSSRAAVGNKMFVKGAPEGVIDRCNYVRVGTTRVPLTGPVKEKIMAVIKEWGTGRDTLRCLALATRDTPPKREEMVLDDSARFLEYETDLTFVGVVGMLDPPRKEVTGSIQLCRDAGIRVIMITGDNKGTAIAICRRIGIFGENEEVADRAYTGREFDDLPLAEQREACRRACCFARVEPSHKSKIVEYLQSYDEITAMTGDGVNDAPALKKAEIGIAMGSGTAVAKTASEMVLADDNFSTIVAAVEEGRAIYNNMKQFIRYLISSNVGEVVCIFLTAALGLPEALIPVQLLWVNLVTDGLPATALGFNPPDLDIMDRPPRSPKEPLISGWLFFRYMAIGGYVGAATVGAAAWWFLYAEDGPHVNYSQLTHFMQCTEDNTHFEGIDCEVFEAPEPMTMALSVLVTIEMCNALNSLSENQSLLRMPPWVNIWLLGSICLSMSLHFLILYVDPLPMIFKLRALDLTQWLMVLKISLPVIGLDEILKFVARNYLEG

SEQ ID NO: 38167 - protein, 997 aa, Homo sapiens
MENAHTKTVEEVLGHFGVNESTGLSLEQVKKLKERWGSNELPAEEGKTLLELVIEQFEDLLVRILLLAACISFVLAWFEEGEETITAFVEPFVILLILVANAIVGVWQERNAENAIEALKEYEPEMGKVYRQDRKSVQRIKAKDIVPGDIVEIAVGDKVPADIRLTSIKSTTLRVDQSILTGESVSVIKHTDPVPDPRAVNQDKKNMLFSGTNIAAGKAMGVVVATGVNTEIGKIRDEMVATEQERTPLQQKLDEFGEQLSKVISLICIAVWIINIGHFNDPVHGGSWIRGAIYYFKIAVALAVAAIPEGLPAVITTCLALGTRRMAKKNAIVRSLPSVETLGCTSVICSDKTGTLTTNQMSVCRMFILDRVEGDTCSLNEFTITGSTYAPIGEVHKDDKPVNCHQYDGLVELATICALCNDSALDYNEAKGVYEKVGEATETALTCLVEKMNVFDTELKGLSKIERANACNSVIKQLMKKEFTLEFSRDRKSMSVYCTPNKPSRTSMSKMFVKGAPEGVIDRCTHIRVGSTKVPMTSGVKQKIMSVIREWGSGSDTLRCLALATHDNPLRREEMHLEDSANFIKYETNLTFVGCVGMLDPPRIEVASSVKLCRQAGIRVIMITGDNKGTAVAICRRIGIFGQDEDVTSKAFTGREFDELNPSAQRDACLNARCFARVEPSHKSKIVEFLQSFDEITAMTGDGVNDAPALKKAEIGIAMGSGTAVAKTASEMVLADDNFSTIVAAVEEGRAIYNNMKQFIRYLISSNVGEVVCIFLTAALGFPEALIPVQLLWVNLVTDGLPATALGFNPPDLDIMNKPPRNPKEPLISGWLFFRYLAIGCYVGAATVGAAAWWFIAADGGPRVSFYQLSHFLQCKEDNPDFEGVDCAIFESPYPMTMALSVLVTIEMCNALNSLSENQSLLRMPPWENIWLVGSICLSMSLHFLILYVEPLPLIFQITPLNVTQWLMVLKISLPVILMDETLKFVARNYLEPAILE

SEQ ID NO: 38168 - protein, 1015 aa, Homo sapiens
MENAHTKTVEEVLGHFGVNESTGLSLEQVKKLKERWGSNELPAEEGKTLLELVIEQFEDLLVRILLLAACISFVLAWFEEGEETITAFVEPFVILLILVANAIVGVWQERNAENAIEALKEYEPEMGKVYRQDRKSVQRIKAKDIVPGDIVEIAGESVSVIKHTDPVPDPRAVNQDKKNMLFSGTNIAAGKAMGVVVATGVNTEIGKIRDEMVATEQERTPLQQKLDEFGEQLSKVISLICIAVWIINIGHFNDPVHGGSWIRGAIYYFKIAVALAVAAIPEGLPAVITTCLALGTRRMAKKNAIVRSLPSVETLGCTSVICSDKTGTLTTNQMSVCRMFILDRVEGDTCSLNEFTITGSTYAPIGEVHKDDKPVNCHQYDGLVELATICALCNDSALDYNEAKGVYEKVGEATETALTCLVEKMNVFDTELKGLSKIERANACNSVIKQLMKKEFTLEFSRDRKSMSVYCTPNKPSRTSMSKMFVKGAPEGVIDRCTHIRVGSTKVPMTSGVKQKIMSVIREWGSGSDTLRCLALATHDNPLRREEMHLEDSANFIKYETNLTFVGCVGMLDPPRIEVASSVKLCRQAGIRVIMITGDNKGTAVAICRRIGIFGQDEDVTSKAFTGREFDELNPSAQRDACLNARCFARVEPSHKSKIVEFLQSFDEITAMTGDGVNDAPALKKAEIGIAMGSGTAVAKTASEMVLADDNFSTIVAAVEEGRAIYNNMKQFIRYLISSNVGEVVCIFLTAALGFPEALIPVQLLWVNLVTDGLPATALGFNPPDLDIMNKPPRNPKEPLISGWLFFRYLAIGCYVGAATVGAAAWWFIAADGGPRVSFYQLSHFLQCKEDNPDFEGVDCAIFESPYPMTMALSVLVTIEMCNALNSLSENQSLLRMPPWENIWLVGSICLSMSLHFLILYVEPLPLIFQITPLNVTQWLMVLKISLPVILMDETLKFVARNYLEPGKECVQPATKSCSFSACTDGISWPFVLLIMPLVIWVYSTDTNFSDMFWS

SEQ ID NO: 38169 - protein, 1042 aa, Homo sapiens
MENAHTKTVEEVLGHFGVNESTGLSLEQVKKLKERWGSNELPAEEGKTLLELVIEQFEDLLVRILLLAACISFVLAWFEEGEETITAFVEPFVILLILVANAIVGVWQERNAENAIEALKEYEPEMGKVYRQDRKSVQRIKAKDIVPGDIVEIAVGDKVPADIRLTSIKSTTLRVDQSILTGESVSVIKHTDPVPDPRAVNQDKKNMLFSGTNIAAGKAMGVVVATGVNTEIGKIRDEMVATEQERTPLQQKLDEFGEQLSKVISLICIAVWIINIGHFNDPVHGGSWIRGAIYYFKIAVALAVAAIPEGLPAVITTCLALGTRRMAKKNAIVRSLPSVETLGCTSVICSDKTGTLTTNQMSVCRMFILDRVEGDTCSLNEFTITGSTYAPIGEVHKDDKPVNCHQYDGLVELATICALCNDSALDYNEAKGVYEKVGEATETALTCLVEKMNVFDTELKGLSKIERANACNSVIKQLMKKEFTLEFSRDRKSMSVYCTPNKPSRTSMSKMFVKGAPEGVIDRCTHIRVGSTKVPMTSGVKQKIMSVIREWGSGSDTLRCLALATHDNPLRREEMHLEDSANFIKYETNLTFVGCVGMLDPPRIEVASSVKLCRQAGIRVIMITGDNKGTAVAICRRIGIFGQDEDVTSKAFTGREFDELNPSAQRDACLNARCFARVEPSHKSKIVEFLQSFDEITAMTGDGVNDAPALKKAEIGIAMGSGTAVAKTASEMVLADDNFSTIVAAVEEGRAIYNNMKQFIRYLISSNVGEVVCIFLTAALGFPEALIPVQLLWVNLVTDGLPATALGFNPPDLDIMNKPPRNPKEPLISGWLFFRYLAIGCYVGAATVGAAAWWFIAADGGPRVSFYQLSHFLQCKEDNPDFEGVDCAIFESPYPMTMALSVLVTIEMCNALNSLSENQSLLRMPPWENIWLVGSICLSMSLHFLILYVEPLPLIFQITPLNVTQWLMVLKISLPVILMDETLKFVARNYLEPGKECVQPATKSCSFSACTDGISWPFVLLIMPLVIWVYSTDTNFSDMFWS

SEQ ID NO: 38170 - protein, 933 aa, Homo sapiens
  VARIANT 1: note = MOD_RES - Any amino acid
XTITAFVEPFVILLILVANAIVGVWQERNAENAIEALKEYEPEMGKVYRQDRKSVQRIKAKDIVPGDIVEIAGESVSVIKHTDPVPDPRAVNQDKKNMLFSGTNIAAGKAMGVVVATGVNTEIGKIRDEMVATEQERTPLQQKLDEFGEQLSKVISLICIAVWIINIGHFNDPVHGGSWIRGAIYYFKIAVALAVAAIPEGLPAVITTCLALGTRRMAKKNAIVRSLPSVETLGCTSVICSDKTGTLTTNQMSVCRMFILDRVEGDTCSLNEFTITGSTYAPIGEVHKDDKPVNCHQYDGLVELATICALCNDSALDYNEAKGVYEKVGEATETALTCLVEKMNVFDTELKGLSKIERANACNSVIKQLMKKEFTLEFSRDRKSMSVYCTPNKPSRTSMSKMFVKGAPEGVIDRCTHIRVGSTKVPMTSGVKQKIMSVIREWGSGSDTLRCLALATHDNPLRREEMHLEDSANFIKYETNLTFVGCVGMLDPPRIEVASSVKLCRQAGIRVIMITGDNKGTAVAICRRIGIFGQDEDVTSKAFTGREFDELNPSAQRDACLNARCFARVEPSHKSKIVEFLQSFDEITAMTGDGVNDAPALKKAEIGIAMGSGTAVAKTASEMVLADDNFSTIVAAVEEGRAIYNNMKQFIRYLISSNVGEVVCIFLTAALGFPEALIPVQLLWVNLVTDGLPATALGFNPPDLDIMNKPPRNPKEPLISGWLFFRYLAIGCYVGAATVGAAAWWFIAADGGPRVSFYQLSHFLQCKEDNPDFEGVDCAIFESPYPMTMALSVLVTIEMCNALNSLSENQSLLRMPPWENIWLVGSICLSMSLHFLILYVEPLPLIFQITPLNVTQWLMVLKISLPVILMDETLKFVARNYLEPGKECVQPATKSCSFSACTDGISWPFVLLIMPLVIWVYSTDTNFSDMFWS

SEQ ID NO: 38171 - protein, 1220 aa, Homo sapiens
MGDMANNSVAYSGVKNSLKEANHDGDFGITLAELRALMELRSTDALRKIQESYGDVYGICTKLKTSPNEGLSGNPADLERREAVFGKNFIPPKKPKTFLQLVWEALQDVTLIILEIAAIVSLGLSFYQPPEGDNALCGEVSVGEEEGEGETGWIEGAAILLSVVCVVLVTAFNDWSKEKQFRGLQSRIEQEQKFTVIRGGQVIQIPVADITVGDIAQVKYGDLLPADGILIQGNDLKIDESSLTGESDHVKKSLDKDPLLLSGTHVMEGSGRMVVTAVGVNSQTGIIFTLLGAGGEEEEKKDEKKKEKKNKKQDGAIENRNKAKAQDGAAMEMQPLKSEEGGDGDEKDKKKANLPKKEKSVLQGKLTKLAVQIGKAGLLMSAITVIILVLYFVIDTFWVQKRPWLAECTPIYIQYFVKFFIIGVTVLVVAVPEGLPLAVTISLAYSVKKMMKDNNLVRHLDACETMGNATAICSDKTGTLTMNRMTVVQAYINEKHYKKVPEPEAIPPNILSYLVTGISVNCAYTSKILPPEKEGGLPRHVGNKTECALLGLLLDLKRDYQDVRNEIPEEALYKVYTFNSVRKSMSTVLKNSDGSYRIFSKGASEIILKKCFKILSANGEAKVFRPRDRDDIVKTVIEPMASEGLRTICLAFRDFPAGEPEPEWDNENDIVTGLTCIAVVGIEDPVRPEVPDAIKKCQRAGITVRMVTGDNINTARAIATKCGILHPGEDFLCLEGKDFNRRIRNEKGEIEQERIDKIWPKLRVLARSSPTDKHTLVKGIIDSTVSDQRQVVAVTGDGTNDGPALKKADVGFAMGIAGTDVAKEASDIILTDDNFTSIVKAVMWGRNVYDSISKFLQFQLTVNVVAVIVAFTGACITQDSPLKAVQMLWVNLIMDTLASLALATEPPTESLLLRKPYGRNKPLISRTMMKNILGHAFYQLVVVFTLLFAGEKFFDIDSGRNAPLHAPPSEHYTIVFNTFVLMQLFNEINARKIHGERNVFEGIFNNAIFCTIVLGTFVVQIIIVQFGGKPFSCSELSIEQWLWSIFLGMGTLLWGQLISTIPTSRLKFLKEAGHGTQKEEIPEEELAEDVEEIDHAERELRRGQILWFRGLNRIQTQIRVVNAFRSSLYEGLEKPESRSSIHNFMTHPEFRIEDSEPHIPLIDDTDAEDDAPTKRNSSPPPSPNKNNNAVDSGIHLTIEMNKSATSSSPGSPLHSLETSL

SEQ ID NO: 38172 - protein, 1184 aa, Homo sapiens
MGDMANNSVAYSGVKNSLKEANHDGDFGITLAELRALMELRSTDALRKIQESYGDVYGICTKLKTSPNEGLSGNPADLERREAVFGKNFIPPKKPKTFLQLVWEALQDVTLIILEIAAIVSLGLSFYQPPEGDNALCGEVSVGEEEGEGETGWIEGAAILLSVVCVVLVTAFNDWSKEKQFRGLQSRIEQEQKFTVIRGGQVIQIPVADITVGDIAQVKYGDLLPADGILIQGNDLKIDESSLTGESDHVKKSLDKDPLLLSGTHVMEGSGRMVVTAVGVNSQTGIIFTLLGAGGEEEEKKDEKKKEKKNKKQDGAIENRNKAKAQDGAAMEMQPLKSEEGGDGDEKDKKKANLPKKEKSVLQGKLTKLAVQIGKAGLLMSAITVIILVLYFVIDTFWVQKRPWLAECTPIYIQYFVKFFIIGVTVLVVAVPEGLPLAVTISLAYSVKKMMKDNNLVRHLDACETMGNATAICSDKTGTLTMNRMTVVQAYINEKHYKKVPEPEAIPPNILSYLVTGISVNCAYTSKILPPEKEGGLPRHVGNKTECALLGLLLDLKRDYQDVRNEIPEEALYKVYTFNSVRKSMSTVLKNSDGSYRIFSKGASEIILKKCFKILSANGEAKVFRPRDRDDIVKTVIEPMASEGLRTICLAFRDFPAGEPEPEWDNENDIVTGLTCIAVVGIEDPVRPEVPDAIKKCQRAGITVRMVTGDNINTARAIATKCGILHPGEDFLCLEGKDFNRRIRNEKGEIEQERIDKIWPKLRVLARSSPTDKHTLVKGIIDSTVSDQRQVVAVTGDGTNDGPALKKADVGFAMGIAGTDVAKEASDIILTDDNFTSIVKAVMWGRNVYDSISKFLQFQLTVNVVAVIVAFTGACITQDSPLKAVQMLWVNLIMDTLASLALATEPPTESLLLRKPYGRNKPLISRTMMKNILGHAFYQLVVVFTLLFAGEKFFDIDSGRNAPLHAPPSEHYTIVFNTFVLMQLFNEINARKIHGERNVFEGIFNNAIFCTIVLGTFVVQLISTIPTSRLKFLKEAGHGTQKEEIPEEELAEDVEEIDHAERELRRGQILWFRGLNRIQTQIRVVNAFRSSLYEGLEKPESRSSIHNFMTHPEFRIEDSEPHIPLIDDTDAEDDAPTKRNSSPPPSPNKNNNAVDSGIHLTIEMNKSATSSSPGSPLHSLETSL

SEQ ID NO: 38173 - protein, 1176 aa, Homo sapiens
MGDMANNSVAYSGVKNSLKEANHDGDFGITLAELRALMELRSTDALRKIQESYGDVYGICTKLKTSPNEGLSGNPADLERREAVFGKNFIPPKKPKTFLQLVWEALQDVTLIILEIAAIVSLGLSFYQPPEGDNALCGEVSVGEEEGEGETGWIEGAAILLSVVCVVLVTAFNDWSKEKQFRGLQSRIEQEQKFTVIRGGQVIQIPVADITVGDIAQVKYGDLLPADGILIQGNDLKIDESSLTGESDHVKKSLDKDPLLLSGTHVMEGSGRMVVTAVGVNSQTGIIFTLLGAGGEEEEKKDEKKKEKKNKKQDGAIENRNKAKAQDGAAMEMQPLKSEEGGDGDEKDKKKANLPKKEKSVLQGKLTKLAVQIGKAGLLMSAITVIILVLYFVIDTFWVQKRPWLAECTPIYIQYFVKFFIIGVTVLVVAVPEGLPLAVTISLAYSVKKMMKDNNLVRHLDACETMGNATAICSDKTGTLTMNRMTVVQAYINEKHYKKVPEPEAIPPNILSYLVTGISVNCAYTSKILPPEKEGGLPRHVGNKTECALLGLLLDLKRDYQDVRNEIPEEALYKVYTFNSVRKSMSTVLKNSDGSYRIFSKGASEIILKKCFKILSANGEAKVFRPRDRDDIVKTVIEPMASEGLRTICLAFRDFPAGEPEPEWDNENDIVTGLTCIAVVGIEDPVRPEVPDAIKKCQRAGITVRMVTGDNINTARAIATKCGILHPGEDFLCLEGKDFNRRIRNEKGEIEQERIDKIWPKLRVLARSSPTDKHTLVKGIIDSTVSDQRQVVAVTGDGTNDGPALKKADVGFAMGIAGTDVAKEASDIILTDDNFTSIVKAVMWGRNVYDSISKFLQFQLTVNVVAVIVAFTGACITQDSPLKAVQMLWVNLIMDTLASLALATEPPTESLLLRKPYGRNKPLISRTMMKNILGHAFYQLVVVFTLLFAGEKFFDIDSGRNAPLHAPPSEHYTIVFNTFVLMQLFNEINARKIHGERNVFEGIFNNAIFCTIVLGTFVVQIIIVQFGGKPFSCSELSIEQWLWSIFLGMGTLLWGQLISTIPTSRLKFLKEAGHGTQKEEIPEEELAEDVEEIDHAERELRRGQILWFRGLNRIQTQMDVVNAFQSGSSIQGALRRQPSIASQHHDVTNISTPTHVVFSSSTASTTVGYSSGECIS

SEQ ID NO: 38174 - protein, 963 aa, Homo sapiens [sequence omitted]

SEQ ID NO: 38175 - protein, 1220 aa, Homo sapiens; identical to SEQ ID NO: 38171

SEQ ID NO: 38176 - protein, 101 aa, Homo sapiens
MGDMANNSVAYSGVKNSLKEANHDGDFGITLAELRALMELRSTDALRKIQESYGDVYGICTKLKTSPNEGEFYYACFWFFVQRVLYIWLINEHAYIILAIV

SEQ ID NO: 38177 - protein, 1199 aa, Homo sapiens
MGDMTNSDFYSKNQRNESSHGGEFGCTMEELRSLMELRGTEAVVKIKETYGDTEAICRRLKTSPVEGLPGTAPDLEKRKQIFGQNFIPPKKPKTFLQLVWEALQDVTLIILEIAAIISLGLSFYHPPGEGNEGCATAQGGAEDEGEAEAGWIEGAAILLSVICVVLVTAFNDWSKEKQFRGLQSRIEQEQKFTVVRAGQVVQIPVAEIVVGDIAQVKYGDLLPADGLFIQGNDLKIDESSLTGESDQVRKSVDKDPMLLSGTHVMEGSGRMLVTAVGVNSQTGIIFTLLGAGGEEEEKKDKKGVKKGDGLQLPAADGAAASNAADSANASLVNGKMQDGNVDASQSKAKQQDGAAAMEMQPLKSAEGGDADDRKKASMHKKEKSVLQGKLTKLAVQIGKAGLVMSAITVIILVLYFTVDTFVVNKKPWLPECTPVYVQYFVKFFIIGVTVLVVAVPEGLPLAVTISLAYSVKKMMKDNNLVRHLDACETMGNATAICSDKTGTLTTNRMTVVQAYVGDVHYKEIPDPSSINTKTMELLINAIAINSAYTTKILPPEKEGALPRQVGNKTECGLLGFVLDLKQDYEPVRSQMPEEKLYKVYTFNSVRKSMSTVIKLPDESFRMYSKGASEIVLKKCCKILNGAGEPRVFRPRDRDEMVKKVIEPMACDGLRTICVAYRDFPSSPEPDWDNENDILNELTCICVVGIEDPVRPEVPEAIRKCQRAGITVRMVTGDNINTARAIAIKCGIIHPGEDFLCLEGKEFNRRIRNEKGEIEQERIDKIWPKLRVLARSSPTDKHTLVKGIIDSTHTEQRQVVAVTGDGTNDGPALKKADVGFAMGIAGTDVAKEASDIILTDDNFSSIVKAVMWGRNVYDSISKFLQFQLTVNVVAVIVAFTGACITQDSPLKAVQMLWVNLIMDTFASLALATEPPTETLLLRKPYGRNKPLISRTMMKNILGHAVYQLALIFTLLFVGEKMFQIDSGRNAPLHSPPSEHYTIIFNTFVMMQLFNEINARKIHGERNVFDGIFRNPIFCTIVLGTFAIQIVIVQFGGKPFSCSPLQLDQWMWCIFIGLGELVWGQVIATIPTSRLKFLKEAGRLTQKEEIPEEELNEDVEEIDHAERELRRGQILWFRGLNRIQTQIEVVNTFKSGASFQGALRRQSSVTSQSQDVANLSSPSRVSLSNALSSPTSLPPAAAGRE

SEQ ID NO: 38178 - protein, 1229 aa, Homo sapiens
MGDMTNSDFYSKNQRNESSHGGEFGCTMEELRSLMELRGTEAVVKIKETYGDTEAICRRLKTSPVEGLPGTAPDLEKRKQIFGQNFIPPKKPKTFLQLVWEALQDVTLIILEIAAIISLGLSFYHPPGEGNEGCATAQGGAEDEGEAEAGWIEGAAILLSVICVVLVTAFNDWSKEKQFRGLQSRIEQEQKFTVVRAGQVVQIPVAEIVVGDIAQVKYGDLLPADGLFIQGNDLKIDESSLTGESDQVRKSVDKDPMLLSGTHVMEGSGRMLVTAVGVNSQTGIIFTLLGAGGEEEEKKDKKGVKKGDGLQLPAADGAAASNAADSANASLVNAKQQDGAAAMEMQPLKSAEGGDADDRKKASMHKKEKSVLQGKLTKLAVQIGKAGLVMSAITVIILVLYFTVDTFVVNKKPWLPECTPVYVQYFVKFFIIGVTVLVVAVPEGLPLAVTISLAYSVKKMMKDNNLVRHLDACETMGNATAICSDKTGTLTTNRMTVVQAYVGDVHYKEIPDPSSINTKTMELLINAIAINSAYTTKILPPEKEGALPRQVGNKTECGLLGFVLDLKQDYEPVRSQMPEEKLYKVYTFNSVRKSMSTVIKLPDESFRMYSKGASEIVLKKCCKILNGAGEPRVFRPRDRDEMVKKVIEPMACDGLRTICVAYRDFPSSPEPDWDNENDILNELTCICVVGIEDPVRPEVPEAIRKCQRAGITVRMVTGDNINTARAIAIKCGIIHPGEDFLCLEGKEFNRRIRNEKGEIEQERIDKIWPKLRVLARSSPTDKHTLVKGIIDSTHTEQRQVVAVTGDGTNDGPALKKADVGFAMGIAGTDVAKEASDIILTDDNFSSIVKAVMWGRNVYDSISKFLQFQLTVNVVAVIVAFTGACITQDSPLKAVQMLWVNLIMDTFASLALATEPPTETLLLRKPYGRNKPLISRTMMKNILGHAVYQLALIFTLLFVGEKMFQIDSGRNAPLHSPPSEHYTIIFNTFVMMQLFNEINARKIHGERNVFDGIFRNPIFCTIVLGTFAIQIVIVQFGGKPFSCSPLQLDQWMWCIFIGLGELVWGQVIATIPTSRLKFLKEAGRLTQKEEIPEEELNEDVEEIDHAERELRRGQILWFRGLNRIQTQIRVVKAFRSSLYEGLEKPESRTSIHNFMAHPEFRIEDSQPHIPLIDDTDLEEDAALKQNSSPPSSLNKNNSAIDSGINLTTDTSKSATSSSPGSPIHSLETSL

SEQ ID NO: 38179 - protein, 1243 aa, Homo sapiens [sequence omitted]

SEQ ID NO: 38180 - protein, 1243 aa, Homo sapiens [sequence omitted]

SEQ ID NO: 38181 - protein, 1198 aa, Homo sapiens
MGDMTNSDFYSKNQRNESSHGGEFGCTMEELRSLMELRGTEAVVKIKETYGDTEAICRRLKTSPVEGLPGTAPDLEKRKQIFGQNFIPPKKPKTFLQLVWEALQDVTLIILEIAAIISLGLSFYHPPGEGNEGCATAQGGAEDEGEAEAGWIEGAAILLSVICVVLVTAFNDWSKEKQFRGLQSRIEQEQKFTVVRAGQVVQIPVAEIVVGDIAQVKYGDLLPADGLFIQGNDLKIDESSLTGESDQVRKSVDKDPMLLSGTHVMEGSGRMLVTAVGVNSQTGIIFTLLGAGGEEEEKKDKKAKQQDGAAAMEMQPLKSAEGGDADDRKKASMHKKEKSVLQGKLTKLAVQIGKAGLVMSAITVIILVLYFTVDTFVVNKKPWLPECTPVYVQYFVKFFIIGVTVLVVAVPEGLPLAVTISLAYSVKKMMKDNNLVRHLDACETMGNATAICSDKTGTLTTNRMTVVQAYVGDVHYKEIPDPSSINTKTMELLINAIAINSAYTTKILPPEKEGALPRQVGNKTECGLLGFVLDLKQDYEPVRSQMPEEKLYKVYTFNSVRKSMSTVIKLPDESFRMYSKGASEIVLKKCCKILNGAGEPRVFRPRDRDEMVKKVIEPMACDGLRTICVAYRDFPSSPEPDWDNENDILNELTCICVVGIEDPVRPEVPEAIRKCQRAGITVRMVTGDNINTARAIAIKCGIIHPGEDFLCLEGKEFNRRIRNEKGEIEQERIDKIWPKLRVLARSSPTDKHTLVKGIIDSTHTEQRQVVAVTGDGTNDGPALKKADVGFAMGIAGTDVAKEASDIILTDDNFSSIVKAVMWGRNVYDSISKFLQFQLTVNVVAVIVAFTGACITQDSPLKAVQMLWVNLIMDTFASLALATEPPTETLLLRKPYGRNKPLISRTMMKNILGHAVYQLALIFTLLFVGEKMFQIDSGRNAPLHSPPSEHYTIIFNTFVMMQLFNEINARKIHGERNVFDGIFRNPIFCTIVLGTFAIQIVIVQFGGKPFSCSPLQLDQWMWCIFIGLGELVWGQVIATIPTSRLKFLKEAGRLTQKEEIPEEELNEDVEEIDHAERELRRGQILWFRGLNRIQTQIRVVKAFRSSLYEGLEKPESRTSIHNFMAHPEFRIEDSQPHIPLIDDTDLEEDAALKQNSSPPSSLNKNNSAIDSGINLTTDTSKSATSSSPGSPIHSLETSL

SEQ ID NO: 38182 - protein, 1198 aa, Homo sapiens; identical to SEQ ID NO: 38181

SEQ ID NO: 38183 - protein, 432 aa, Homo sapiens
MTVVQAYVGDVHYKEIPDPSSINTKTMELLINAIAINSAYTTKILPPEKEGALPRQVGNVYDSISKFLQFQLTVNVVAVIVAFTGACITQDSPLKAVQMLWVNLIMDTFASLALATEPPTETLLLRKPYGRNKPLISRTMMKNILGHAVYQLALIFTLLFVGEKMFQIDSGRNAPLHSPPSEHYTIIFNTFVMMQLFNEINARKIHGERNVFDGIFRNPIFCTIVLGTFAIQIVIVQFGGKPFSCSPLQLDQWMWCIFIGLGELVWGQVIATIPTSRLKFLKEAGRLTQKEEIPEEELNEDVEEIDHAERELRRGQILWFRGLNRIQTQIRVVKAFRSSLYEGLEKPESRTSIHNFMAHPEFRIEDSQPHIPLIDDTDLEEDAALKQNSSPPSSLNKNNSAIDSGINLTTDTSKSATSSSPGSPIHSLETSL

SEQ ID NO: 38184 - protein, 1178 aa, Homo sapiens
MELRGTEAVVKIKETYGDTEAICRRLKTSPVEGLPGTAPDLEKRKQIFGQNFIPPKKPKTFLQLVWEALQDVTLIILEIAAIISLGLSFYHPPGEGNEGCATAQGGAEDEGEAEAGWIEGAAILLSVICVVLVTAFNDWSKEKQFRGLQSRIEQEQKFTVVRAGQVVQIPVAEIVVGDIAQVKYGDLLPADGLFIQGNDLKIDESSLTGESDQVRKSVDKDPMLLSGTHVMEGSGRMLVTAVGVNSQTGIIFTLLGAGGEEEEKKDKKGKMQDGNVDASQSKAKQQDGAAAMEMQPLKSAEGGDADDRKKASMHKKEKSVLQGKLTKLAVQIGKAGLVMSAITVIILVLYFTVDTFVVNKKPWLPECTPVYVQYFVKFFIIGVTVLVVAVPEGLPLAVTISLAYSVKKMMKDNNLVRHLDACETMGNATAICSDKTGTLTTNRMTVVQAYVGDVHYKEIPDPSSINTKTMELLINAIAINSAYTTKILPPEKEGALPRQVGNKTECGLLGFVLDLKQDYEPVRSQMPEEKLYKVYTFNSVRKSMSTVIKLPDESFRMYSKGASEIVLKKCCKILNGAGEPRVFRPRDRDEMVKKVIEPMACDGLRTICVAYRDFPSSPEPDWDNENDILNELTCICVVGIEDPVRPEVPEAIRKCQRAGITVRMVTGDNINTARAIAIKCGIIHPGEDFLCLEGKEFNRRIRNEKGEIEQERIDKIWPKLRVLARSSPTDKHTLVKGIIDSTHTEQRQVVAVTGDGTNDGPALKKADVGFAMGIAGTDVAKEASDIILTDDNFSSIVKAVMWGRNVYDSISKFLQFQLTVNVVAVIVAFTGACITQDSPLKAVQMLWVNLIMDTFASLALATEPPTETLLLRKPYGRNKPLISRTMMKNILGHAVYQLALIFTLLFVGEKMFQIDSGRNAPLHSPPSEHYTIIFNTFVMMQLFNEINARKIHGERNVFDGIFRNPIFCTIVLGTFAIQIVIVQFGGKPFSCSPLQLDQWMWCIFIGLGELVWGQVIATIPTSRLKFLKEAGRLTQKEEIPEEELNEDVEEIDHAERELRRGQILWFRGLNRIQTQIRVVKAFRSSLYEGLEKPESRTSIHNFMAHPEFRIEDSQPHIPLIDDTDLEEDAALKQNSSPPSSLNKNNSAIDSGINLTTDTSKSATSSSPGSPIHSLETSL

SEQ ID NO: 38185 - protein, 1220 aa, Homo sapiens
MGDMANSSIEFHPKPQQQRDVPQAGGFGCTLAELRTLMELRGAEALQKIEEAYGDVSGLCRRLKTSPTEGLADNTNDLEKRRQIYGQNFIPPKQPKTFLQLVWEALQDVTLIILEVAAIVSLGLSFYAPPGEESEACGNVSGGAEDEGEAEAGWIEGAAILLSVICVVLVTAFNDWSKEKQFRGLQSRIEQEQKFTVIRNGQLLQVPVAALVVGDIAQVKYGDLLPADGVLIQANDLKIDESSLTGESDHVRKSADKDPMLLSGTHVMEGSGRMVVTAVGVNSQTGIIFTLLGAGGEEEEKKDKKGKQQDGAMESSQTKAKKQDGAVAMEMQPLKSAEGGEMEEREKKKANAPKKEKSVLQGKLTKLAVQIGKAGLVMSAITVIILVLYFVIETFVVEGRTWLAECTPVYVQYFVKFFIIGVTVLVVAVPEGLPLAVTISLAYSVKKMMKDNNLVRHLDACETMGNATAICSDKTGTLTTNRMTVVQSYLGDTHYKEIPAPSALTPKILDLLVHAISINSAYTTKILPPEKEGALPRQVGNKTECALLGFVLDLKRDFQPVREQIPEDKLYKVYTFNSVRKSMSTVIRMPDGGFRLFSKGASEILLKKCTNILNSNGELRGFRPRDRDDMVRKIIEPMACDGLRTICIAYRDFSAGQEPDWDNENEVVGDLTCIAVVGIEDPVRPEVPEAIRKCQRAGITVRMVTGDNINTARAIAAKCGIIQPGEDFLCLEGKEFNRRIRNEKGEIEQERLDKVWPKLRVLARSSPTDKHTLVKGIIDSTTGEQRQVVAVTGDGTNDGPALKKADVGFAMGIAGTDVAKEASDIILTDDNFTSIVKAVMWGRNVYDSISKFLQFQLTVNVVAVIVAFTGACITQDSPLKAVQMLWVNLIMDTFASLALATEPPTESLLLRKPYGRDKPLISRTMMKNILGHAVYQLAIIFTLLFVGELFFDIDSGRNAPLHSPPSEHYTIIFNTFVMMQLFNEINARKIHGERNVFDGIFSNPIFCTIVLGTFGIQIVIVQFGGKPFSCSPLSTEQWLWCLFVGVGELVWGQVIATIPTSQLKCLKEAGHGPGKDEMTDEELAEGEEEIDHAERELRRGQILWFRGLNRIQTQIRVVKAFRSSLYEGLEKPESKTSIHNFMATPEFLINDYTHNIPLIDDTDVDENEERLRAPPPPSPNQNNNAIDSGIYLTTHVTKSATSSVFSSSPGSPLHSVETSL

SEQ ID NO: 38186 - protein, 1220 aa, Homo sapiens; identical to SEQ ID NO: 38185

SEQ ID NO: 38187 - protein, 1173 aa, Homo sapiens
MGDMANSSIEFHPKPQQQRDVPQAGGFGCTLAELRTLMELRGAEALQKIEEAYGDVSGLCRRLKTSPTEGLADNTNDLEKRRQIYGQNFIPPKQPKTFLQLVWEALQDVTLIILEVAAIVSLGLSFYAPPGEESEACGNVSGGAEDEGEAEAGWIEGAAILLSVICVVLVTAFNDWSKEKQFRGLQSRIEQEQKFTVIRNGQLLQVPVAALVVGDIAQVKYGDLLPADGVLIQANDLKIDESSLTGESDHVRKSADKDPMLLSGTHVMEGSGRMVVTAVGVNSQTGIIFTLLGAGGEEEEKKDKKGKQQDGAMESSQTKAKKQDGAVAMEMQPLKSAEGGEMEEREKKKANAPKKEKSVLQGKLTKLAVQIGKAGLVMSAITVIILVLYFVIETFVVEGRTWLAECTPVYVQYFVKFFIIGVTVLVVAVPEGLPLAVTISLAYSVKKMMKDNNLVRHLDACETMGNATAICSDKTGTLTTNRMTVVQSYLGDTHYKEIPAPSALTPKILDLLVHAISINSAYTTKILPPEKEGALPRQVGNKTECALLGFVLDLKRDFQPVREQIPEDKLYKVYTFNSVRKSMSTVIRMPDGGFRLFSKGASEILLKKCTNILNSNGELRGFRPRDRDDMVRKIIEPMACDGLRTICIAYRDFSAGQEPDWDNENEVVGDLTCIAVVGIEDPVRPEVPEAIRKCQRAGITVRMVTGDNINTARAIAAKCGIIQPGEDFLCLEGKEFNRRIRNEKGEIEQERLDKVWPKLRVLARSSPTDKHTLVKGIIDSTTGEQRQVVAVTGDGTNDGPALKKADVGFAMGIAGTDVAKEASDIILTDDNFTSIVKAVMWGRNVYDSISKFLQFQLTVNVVAVIVAFTGACITQDSPLKAVQMLWVNLIMDTFASLALATEPPTESLLLRKPYGRDKPLISRTMMKNILGHAVYQLAIIFTLLFVGELFFDIDSGRNAPLHSPPSEHYTIIFNTFVMMQLFNEINARKIHGERNVFDGIFSNPIFCTIVLGTFGIQIVIVQFGGKPFSCSPLSTEQWLWCLFVGVGELVWGQVIATIPTSQLKCLKEAGHGPGKDEMTDEELAEGEEEIDHAERELRRGQILWFRGLNRIQTQMEVVSTFKRSGSVQGAVRRRSSVLSQLHDVTNLSTPTHAILSAANPTSAAGNPGGESVP

SEQ ID NO: 38188 - protein, 1159 aa, Homo sapiens
MGDMANSSIEFHPKPQQQRDVPQAGGFGCTLAELRTLMELRGAEALQKIEEAYGDVSGLCRRLKTSPTEGLADNTNDLEKRRQIYGQNFIPPKQPKTFLQLVWEALQDVTLIILEVAAIVSLGLSFYAPPGEESEACGNVSGGAEDEGEAEAGWIEGAAILLSVICVVLVTAFNDWSKEKQFRGLQSRIEQEQKFTVIRNGQLLQVPVAALVVGDIAQVKYGDLLPADGVLIQANDLKIDESSLTGESDHVRKSADKDPMLLSGTHVMEGSGRMVVTAVGVNSQTGIIFTLLGAGGEEEEKKDKKAKKQDGAVAMEMQPLKSAEGGEMEEREKKKANAPKKEKSVLQGKLTKLAVQIGKAGLVMSAITVIILVLYFVIETFVVEGRTWLAECTPVYVQYFVKFFIIGVTVLVVAVPEGLPLAVTISLAYSVKKMMKDNNLVRHLDACETMGNATAICSDKTGTLTTNRMTVVQSYLGDTHYKEIPAPSALTPKILDLLVHAISINSAYTTKILPPEKEGALPRQVGNKTECALLGFVLDLKRDFQPVREQIPEDKLYKVYTFNSVRKSMSTVIRMPDGGFRLFSKGASEILLKKCTNILNSNGELRGFRPRDRDDMVRKIIEPMACDGLRTICIAYRDFSAGQEPDWDNENEVVGDLTCIAVVGIEDPVRPEVPEAIRKCQRAGITVRMVTGDNINTARAIAAKCGIIQPGEDFLCLEGKEFNRRIRNEKGEIEQERLDKVWPKLRVLARSSPTDKHTLVKGIIDSTTGEQRQVVAVTGDGTNDGPALKKADVGFAMGIAGTDVAKEASDIILTDDNFTSIVKAVMWGRNVYDSISKFLQFQLTVNVVAVIVAFTGACITQDSPLKAVQMLWVNLIMDTFASLALATEPPTESLLLRKPYGRDKPLISRTMMKNILGHAVYQLAIIFTLLFVGELFFDIDSGRNAPLHSPPSEHYTIIFNTFVMMQLFNEINARKIHGERNVFDGIFSNPIFCTIVLGTFGIQIVIVQFGGKPFSCSPLSTEQWLWCLFVGVGELVWGQVIATIPTSQLKCLKEAGHGPGKDEMTDEELAEGEEEIDHAERELRRGQILWFRGLNRIQTQMEVVSTFKRSGSVQGAVRRRSSVLSQLHDVTNLSTPTHAILSAANPTSAAGNPGGESVP

SEQ ID NO: 38189 - protein, 1159 aa, Homo sapiens; identical to SEQ ID NO: 38188

SEQ ID NO: 38190 - protein, 1154 aa, Homo sapiens
MGDMANSSIEFHPKPQQQRDVPQAGGFGCTLAELRTLMELRGAEALQKIEEAYGDVSGLCRRLKTSPTEGLADNTNDLEKRRQIYGQNFIPPKQPKTFLQLVWEALQDVTLIILEVAAIVSLGLSFYAPPGEESEACGNVSGGAEDEGEAEAGWIEGAAILLSVICVVLVTAFNDWSKEKQFRGLQSRIEQEQKFTVIRNGQLLQVPVAALVVGDIAQVKYGDLLPADGVLIQANDLKIDESSLTGESDHVRKSADKDPMLLSGTHVMEGSGRMVVTAVGVNSQTGIIFTLLGAGGEEEEKKDKKAKKQDGAVAMEMQPLKSAEGGEMEEREKKKANAPKKEKSVLQGKLTKLAVQIGKAGLVMSAITVIILVLYFVIETFVVEGRTWLAECTPVYVQYFVKFFIIGVTVLVVAVPEGLPLAVTISLAYSVKKMMKDNNLVRHLDACETMGNATAICSDKTGTLTTNRMTVVQSYLGDTHYKEIPAPSALTPKILDLLVHAISINSAYTTKILPPEKEGALPRQVGNKTECALLGFVLDLKRDFQPVREQIPEDKLYKVYTFNSVRKSMSTVIRMPDGGFRLFSKGASEILLKKCTNILNSNGELRGFRPRDRDDMVRKIIEPMACDGLRTICIAYRDFSAGQEPDWDNENEVVGDLTCIAVVGIEDPVRPEVPEAIRKCQRAGITVRMVTGDNINTARAIAAKCGIIQPGEDFLCLEGKEFNRRIRNEKGEIEQERLDKVWPKLRVLARSSPTDKHTLVKGIIDSTTGEQRQVVAVTGDGTNDGPALKKADVGFAMGIAGTDVAKEASDIILTDDNFTSIVKAVMWGRNVYDSISKFLQFQLTVNVVAVIVAFTGACITQDSPLKAVQMLWVNLIMDTFASLALATEPPTESLLLRKPYGRDKPLISRTMMKNILGHAVYQLAIIFTLLFVGELFFDIDSGRNAPLHSPPSEHYTIIFNTFVMMQLFNEINARKIHGERNVFDGIFSNPIFCTIVLGTFGIQIVIVQFGGKPFSCSPLSTEQWLWCLFVGVGELVWGQVIATIPTSQLKCLKEAGHGPGKDEMTDEELAEGEEEIDHAERELRRGQILWFRGLNRIQTQMEVVSTFKRSGSVQGAVRRRSSVLSQLHDVTNLSTPTHAILSAANPTSAAGSES

SEQ ID NO: 38191 - protein, 1170 aa, Homo sapiens
MTNPSDRVLPANSMAESREGDFGCTVMELRKLMELRSRDALTQINVHYGGVQNLCSRLKTSPVEGLSGNPADLEKRRQVFGHNVIPPKKPKTFLELVWEALQDVTLIILEIAAIISLVLSFYRPAGEENELCGQVATTPEDENEAQAGWIEGAAILFSVIIVVLVTAFNDWSKEKQFRGLQCRIEQEQKFSIIRNGQLIQLPVAEIVVGDIAQVKYGDLLPADGILIQGNDLKIDESSLTGESDHVKKSLDKDPMLLSGTHVMEGSGRMVVTAVGVNSQTGIILTLLGVNEDDEGEKKKKGKKQGVPENRNKAKTQDGVALEIQPLNSQEGIDNEEKDKKAVKVPKKEKSVLQGKLTRLAVQIGKAGLLMSALTVFILILYFVIDNFVINRRPWLPECTPIYIQYFVKFFIIGITVLVVAVPEGLPLAVTISLAYSVKKMMKDNNLVRHLDACETMGNATAICSDKTGTLTMNRMTVVQAYIGGIHYRQIPSPDVFLPKVLDLIVNGISINSAYTSKILPPEKEGGLPRQVGNKTECALLGFVTDLKQDYQAVRNEVPEEKLYKVYTFNSVRKSMSTVIRNPNGGFRMYSKGASEIILRKCNRILDRKGEAVPFKNKDRDDMVRTVIEPMACDGLRTICIAYRDFDDTEPSWDNENEILTELTCIAVVGIEDPVRPEVPDAIAKCKQAGITVRMVTGDNINTARAIATKCGILTPGDDFLCLEGKEFNRLIRNEKGEVEQEKLDKIWPKLRVLARSSPTDKHTLVKGIIDSTVGEHRQVVAVTGDGTNDGPALKKADVGFAMGIAGTDVAKEASDIILTDDNFTSIVKAVMWGRNVYDSISKFLQFQLTVNVVAVIVAFTGACITQDSPLKAVQMLWVNLIMDTFASLALATEPPTESLLKRRPYGRNKPLISRTMMKNILGHAFYQLIVIFILVFAGEKFFDIDSGRKAPLHSPPSQHYTIVFNTFVLMQLFNEINSRKIHGEKNVFSGIYRNIIFCSVVLGTFICQIFIVEFGGKPFSCTSLSLSQWLWCLFIGIGELLWGQFISAIPTRSLKFLKEAGHGTTKEEITKDAEGLDEIDHAEMELRRGQILWFRGLNRIQTQIDVINTFQTGASFKGVLRRQNMGQHLDVKLVPSSSYVAVAPVKSSPTTSVPAVSSPPMGNQSGQSVP

SEQ ID NO: 38192 - protein, 129 aa, Homo sapiens
  VARIANT 1: note = MOD_RES - Any amino acid
XIGELLWGQFISAIPTRSLKFLKEAGHGTTKEEITKDAEGLDEIDHAEMELRRGQILWFRGLNRIQTQIDVINTFQTGASFKGVLRRQNMGQHLDVKLVPSSSYVAVAPVKSSPTTSVPAVSSPPMGSE

SEQ ID NO: 38193 - protein, 1205 aa, Homo sapiens
MTNPSDRVLPANSMAESREGDFGCTVMELRKLMELRSRDALTQINVHYGGVQNLCSRLKTSPVEGLSGNPADLEKRRQVFGHNVIPPKKPKTFLELVWEALQDVTLIILEIAAIISLVLSFYRPAGEENELCGQVATTPEDENEAQAGWIEGAAILFSVIIVVLVTAFNDWSKEKQFRGLQCRIEQEQKFSIIRNGQLIQLPVAEIVVGDIAQVKYGDLLPADGILIQGNDLKIDESSLTGESDHVKKSLDKDPMLLSGTHVMEGSGRMVVTAVGVNSQTGIILTLLGVNEDDEGEKKKKGKKQGVPENRNKAKTQDGVALEIQPLNSQEGIDNEEKDKKAVKVPKKEKSVLQGKLTRLAVQIGKAGLLMSALTVFILILYFVIDNFVINRRPWLPECTPIYIQYFVKFFIIGITVLVVAVPEGLPLAVTISLAYSVKKMMKDNNLVRHLDACETMGNATAICSDKTGTLTMNRMTVVQAYIGGIHYRQIPSPDVFLPKVLDLIVNGISINSAYTSKILPPEKEGGLPRQVGNKTECALLGFVTDLKQDYQAVRNEVPEEKLYKVYTFNSVRKSMSTVIRNPNGGFRMYSKGASEIILRKCNRILDRKGEAVPFKNKDRDDMVRTVIEPMACDGLRTICIAYRDFDDTEPSWDNENEILTELTCIAVVGIEDPVRPEVPDAIAKCKQAGITVRMVTGDNINTARAIATKCGILTPGDDFLCLEGKEFNRLIRNEKGEVEQEKLDKIWPKLRVLARSSPTDKHTLVKGIIDSTVGEHRQVVAVTGDGTNDGPALKKADVGFAMGIAGTDVAKEASDIILTDDNFTSIVKAVMWGRNVYDSISKFLQFQLTVNVVAVIVAFTGACITQDSPLKAVQMLWVNLIMDTFASLALATEPPTESLLKRRPYGRNKPLISRTMMKNILGHAFYQLIVIFILVFAGEKFFDIDSGRKAPLHSPPSQHYTIVFNTFVLMQLFNEINSRKIHGEKNVFSGIYRNIIFCSVVLGTFICQIFIVEFGGKPFSCTSLSLSQWLWCLFIGIGELLWGQFISAIPTRSLKFLKEAGHGTTKEEITKDAEGLDEIDHAEMELRRGQILWFRGLNRIQTQIKVVKAFHSSLHESIQKPYNQKSIHSFMTHPEFAIEEELPRTPLLDEEEEENPDKASKFGTRVLLLDGEVTPYANTNNNAVDCNQVQLPQSDSSLQSLETSV

SEQ ID NO: 38194 - protein, 1170 aa, Homo sapiens; identical to SEQ ID NO: 38191

SEQ ID NO: 38195 - protein, 1158 aa, Homo sapiens
MTNPSDRVLPANSMAESREGDFGCTVMELRKLMELRSRDALTQINVHYGGVQNLCSRLKTSPVEGLSGNPADLEKRRQVFGHNVIPPKKPKTFLELVWEALQDVTLIILEIAAIISLVLSFYRPAGEENELCGQVATTPEDENEAQAGWIEGAAILFSVIIVVLVTAFNDWSKEKQFRGLQCRIEQEQKFSIIRNGQLIQLPVAEIVVGDIAQVKYGDLLPADGILIQGNDLKIDESSLTGESDHVKKSLDKDPMLLSGTHVMEGSGRMVVTAVGVNSQTGIILTLLGVNEDDEGEKKKKAKTQDGVALEIQPLNSQEGIDNEEKDKKAVKVPKKEKSVLQGKLTRLAVQIGKAGLLMSALTVFILILYFVIDNFVINRRPWLPECTPIYIQYFVKFFIIGITVLVVAVPEGLPLAVTISLAYSVKKMMKDNNLVRHLDACETMGNATAICSDKTGTLTMNRMTVVQAYIGGIHYRQIPSPDVFLPKVLDLIVNGISINSAYTSKILPPEKEGGLPRQVGNKTECALLGFVTDLKQDYQAVRNEVPEEKLYKVYTFNSVRKSMSTVIRNPNGGFRMYSKGASEIILRKCNRILDRKGEAVPFKNKDRDDMVRTVIEPMACDGLRTICIAYRDFDDTEPSWDNENEILTELTCIAVVGIEDPVRPEVPDAIAKCKQAGITVRMVTGDNINTARAIATKCGILTPGDDFLCLEGKEFNRLIRNEKGEVEQEKLDKIWPKLRVLARSSPTDKHTLVKGIIDSTVGEHRQVVAVTGDGTNDGPALKKADVGFAMGIAGTDVAKEASDIILTDDNFTSIVKAVMWGRNVYDSISKFLQFQLTVNVVAVIVAFTGACITQDSPLKAVQMLWVNLIMDTFASLALATEPPTESLLKRRPYGRNKPLISRTMMKNILGHAFYQLIVIFILVFAGEKFFDIDSGRKAPLHSPPSQHYTIVFNTFVLMQLFNEINSRKIHGEKNVFSGIYRNIIFCSVVLGTFICQIFIVEFGGKPFSCTSLSLSQWLWCLFIGIGELLWGQFISAIPTRSLKFLKEAGHGTTKEEITKDAEGLDEIDHAEMELRRGQILWFRGLNRIQTQIDVINTFQTGASFKGVLRRQNMGQHLDVKLVPSSSYVAVAPVKSSPTTSVPAVSSPPMGNQSGQSVP

SEQ ID NO: 38196 - protein, 1134 aa, Homo sapiens
MTNPSDRVLPANSMAESREGDFGCTVMELRKLMELRSRDALTQINVHYGGVQNLCSRLKTSPVEGLSGNPADLEKRRQVFGHNVIPPKKPKTFLELVWEALQDVTLIILEIAAIISLVLSFYRPAGEENELCGQVATTPEDENEAQAGWIEGAAILFSVIIVVLVTAFNDWSKEKQFRGLQCRIEQEQKFSIIRNGQLIQLPVAEIVVGDIAQVKYGDLLPADGILIQGNDLKIDESSLTGESDHVKKSLDKDPMLLSGTHVMEGSGRMVVTAVGVNSQTGIILTLLGVNEDDEGEKKKKGKKQGVPENRNKAKTQDGVALEIQPLNSQEGIDNEEKDKKAVKVPKKEKSVLQGKLTRLAVQIGKAGLLMSALTVFILILYFVIDNFVINRRPWLPECTPIYIQYFVKFFIIGITVLVVAVPEGLPLAVTISLAYSVKKMMKDNNLVRHLDACETMGNATAICSDKTGTLTMNRMTVVQAYIGGIHYRQIPSPDVFLPKVLDLIVNGISINSAYTSKILPPEKEGGLPRQVGNKTECALLGFVTDLKQDYQAVRNEVPEEKLYKVYTFNSVRKSMSTVIRNPNGGFRMYSKGASEIILRKCNRILDRKGEAVPFKNKDRDDMVRTVIEPMACDGLRTICIAYRDFDDTEPSWDNENEILTELTCIAVVGIEDPVRPEVPDAIAKCKQAGITVRMVTGDNINTARAIATKCGILTPGDDFLCLEGKEFNRLIRNEKGEVEQEKLDKIWPKLRVLARSSPTDKHTLVKGIIDSTVGEHRQVVAVTGDGTNDGPALKKADVGFAMGIAGTDVAKEASDIILTDDNFTSIVKAVMWGRNVYDSISKFLQFQLTVNVVAVIVAFTGACITQDSPLKAVQMLWVNLIMDTFASLALATEPPTESLLKRRPYGRNKPLISRTMMKNILGHAFYQLIVIFILVFAGEKFFDIDSGRKAPLHSPPSQHYTIVFNTFVLMQLFNEINSRKIHGEKNVFSGIYRNIIFCSVVLGTFICQFISAIPTRSLKFLKEAGHGTTKEEITKDAEGLDEIDHAEMELRRGQILWFRGLNRIQTQIDVINTFQTGASFKGVLRRQNMGQHLDVKLVPSSSYVAVAPVKSSPTTSVPAVSSPPMGNQSGQSVP

SEQ ID NO: 38197 - protein, 117 aa, Homo sapiens
  VARIANT 1: note = MOD_RES - Any amino acid
XGGKPFSCTSLSLSQWLWCLFIGIGELLWGQFISAIPTRSLKFLKEAGHGTTKEEITKDAEGLDEIDHAEMELRRGQILWFRGLNRIQTQHLLQDSDLLPDKEEAIISSSLFPSCNF

SEQ ID NO: 38198 - protein, 888 aa, Homo sapiens
MKVARFQKIPNGENETMIPVLTSKKASELPVSEVASILQADLQNGLNKCEVSHRRAFHGWNEFDISEDEPLWKKYISQFKNPLIMLLLASAVISVLMHQFDDAVSITVAILIVVTVAFVQEYRSEKSLEELSKLVPPECHCVREGKLEHTLARDLVPGDTVCLSVGDRVPADLRLFEAVDLSIDESSLTGETTPCSKVTAPQPAATNGDLASRSNIAFMGTLVRCGKAKGVVIGTGENSEFGEVFKMMQAEEAPKTPLQKSMDLLGKQLSFYSFGIIGIIMLVGWLLGKDILEMFTISVSLAVAAIPEGLPIVVTVTLALGVMRMVKKRAIVKKLPIVETLGCCNVICSDKTGTLTKNEMTVTHIFTSDGLHAEVTGVGYNQFGEVIVDGDVVHGFYNPAVSRIVEAGCVCNDAVIRNNTLMGKPTEGALIALAMKMGLDGLQQDYIRKAEYPFSSEQKWMAVKCVHRTQQDRPEICFMKGAYEQVIKYCTTYQSKGQTLTLTQQQRDVYQQEKARMGSAGLRVLALASGPELGQLTFLGLVGIIDPPRTGVKEAVTTLIASGVSIKMITGDSQETAVAIASRLGLYSKTSQSVSGEEIDAMDVQQLSQIVPKVAVFYRASPRHKMKIIKSLQKNGSVVAMTGDGVNDAVALKAADIGVAMGQTGTDVCKEAADMILVDDDFQTIMSAIEEGKGIYNNIKNFVRFQLSTSIAALTLISLATLMNFPNPLNAMQILWINIIMDGPPAQSLGVEPVDKDVIRKPPRNWKDSILTKNLILKILVSSIIIVCGTLFVFWRELRDNVITPRDTTMTFTCFVFFDMFNALSSRSQTKSVFEIGLCSNRMFCYAVLGSIMGQLLVIYFPPLQKVFQTESLSILGLALGEEWTAAG

SEQ ID NO: 38199 - protein, 958 aa, Homo sapiens
KVARFQKIPNGENETMIPVLTSKKASELPVSEVASILQADLQNGLNKCEVSHRRAFHGWNEFDISEDEPLWKKYISQFKNPLIMLLLASAVISVLMHQFDDAVSITVAILIVVTVAFVQEYRSEKSLEELSKLVPPECHCVREGKLEHTLARDLVPGDTVCLSVGDRVPADLRLFEAVDLSIDESSLTGETTPCSKVTAPQPAATNGDLASRSNIAFMGTLVRCGKAKGVVIGTGENSEFGEVFKMMQAEEAPKTPLQKSMDLLGKQLSFYSFGIIGIIMLVGWLLGKDILEMFTISVSLAVAAIPEGLPIVVTVTLALGVMRMVKKRAIVKKLPIVETLGCCNVICSDKTGTLTKNEMTVTHIFTSDGLHAEVTGVGYNQFGEVIVDGDVVHGFYNPAVSRIVEAGCVCNDAVIRNNTLMGKPTEGALIALAMKMGLDGLQQDYIRKAEYPFSSEQKWMAVKCVHRTQQDRPEICFMKGAYEQVIKYCTTYQSKGQTLTLTQQQRDVYQQEKARMGSAGLRVLALASGPELGQLTFLGLVGIIDPPRTGVKEAVTTLIASGVSIKMITGDSQETAVAIASRLGLYSKTSQSVSGEEIDAMDVQQLSQIVPKVAVFYRASPRHKMKIIKSLQKNGSVVAMTGDGVNDAVALKAADIGVAMGQTGTDVCKEAADMILVDDDFQTIMSAIEEGKGIYNNIKNFVRFQLSTSIAALTLISLATLMNFPNPLNAMQILWINIIMDGPPAQSLGVEPVDKDVIRKPPRNWKDSILTKNLILKILVSSIIIVCGTLFVFWRELRDNVITPRDTTMTFTCFVFFDMFNALSSRSQTKSVFEIGLCSNRMFCYAVLGSIMGQLLVIYFPPLQKVFQTESLSILDLLFLLGLTSSVCIVAEIIKKVERSREKIQKHVSSTSSSFLEVSSSSGNFVAVWLWERSGQQLVEIHPHLETGLPLTEDVSCV

SEQ ID NO: 38200 - protein, 949 aa, Homo sapiens
MKVARFQKIPNGENETMIPVLTSKKASELPVSEVASILQADLQNGLNKCEVSHRRAFHGWNEFDISEDEPLWKKYISQFKNPLIMLLLASAVISVLMHQFDDAVSITVAILIVVTVAFVQEYRSEKSLEELSKLVPPECHCVREGKLEHTLARDLVPGDTVCLSVGDRVPADLRLFEAVDLSIDESSLTGETTPCSKVTAPQPAATNGDLASRSNIAFMGTLVRCGKAKGVVIGTGENSEFGEVFKMMQAEEAPKTPLQKSMDLLGKQLSFYSFGIIGIIMLVGWLLGKDILEMFTISVSLAVAAIPEGLPIVVTVTLALGVMRMVKKRAIVKKLPIVETLGCCNVICSDKTGTLTKNEMTVTHIFTSDGLHAEVTGVGYNQFGEVIVDGDVVHGFYNPAVSRIVEAGCVCNDAVIRNNTLMGKPTEGALIALAMKMGLDGLQQDYIRKAEYPFSSEQKWMAVKCVHRTQQDRPEICFMKGAYEQVIKYCTTYQSKGQTLTLTQQQRDVYQQEKARMGSAGLRVLALASGPELGQLTFLGLVGIIDPPRTGVKEAVTTLIASGVSIKMITGDSQETAVAIASRLGLYSKTSQSVSGEEIDAMDVQQLSQIVPKVAVFYRASPRHKMKIIKSLQKNGSVVAMTGDGVNDAVALKAADIGVAMGQTGTDVCKEAADMILVDDDFQTIMSAIEEGKGIYNNIKNFVRFQLSTSIAALTLISLATLMNFPNPLNAMQILWINIIMDGPPAQSLGVEPVDKDVIRKPPRNWKDSILTKNLILKILVSSIIIVCGTLFVFWRELRDNVITPRDTTMTFTCFVFFDMFNALSSRSQTKSVFEIGLCSNRMFCYAVLGSIMGQLLVIYFPPLQKVFQTESLSILDLLFLLGLTSSVCIVAEIIKKVERSREKIQKHVSSTSSSFLEVWLWERSGQQLVEIHPHLETGLPLTEDVSCV

SEQ ID NO: 38201 - protein, 973 aa, Homo sapiens
MDSLLPPSRFSYFKKYPLHAIRRYLSTLRNQRAEEQVARFQKIPNGENETMIPVLTSKKASELPVSEVASILQADLQNGLNKCEVSHRRAFHGWNEFDISEDEPLWKKYISQFKNPLIMLLLASAVISVLMHQFDDAVSITVAILIVVTVAFVQEYRSEKSLEELSKLVPPECHCVREGKLEHTLARDLVPGDTVCLSVGDRVPADLRLFEAVDLSIDESSLTGETTPCSKVTAPQPAATNGDLASRSNIAFMGTLVRCGKAKGVVIGTGENSEFGEVFKMMQAEEAPKTPLQKSMDLLGKQLSFYSFGIIGIIMLVGWLLGKDILEMFTISVSLAVAAIPEGLPIVVTVTLALGVMRMVKKRAIVKKLPIVETLGCCNVICSDKTGTLTKNEMTVTHIFTSDGLHAEVTGVGYNQFGEVIVDGDVVHGFYNPAVSRIVEAGCVCNDAVIRNNTLMGKPTEGALIALAMKMGLDGLQQDYIRKAEYPFSSEQKWMAVKCVHRTQQDRPEICFMKGAYEQVIKYCTTYQSKGQTLTLTQQQRDVYQQEKARMGSAGLRVLALASGPELGQLTFLGLVGIIDPPRTGVKEAVTTLIASGVSIKMITGDSQETAVAIASRLGLYSKTSQSVSGEEIDAMDVQQLSQIVPKVAVFYRASPRHKMKIIKSLQKNGSVVAMTGDGVNDAVALKAADIGVAMGQTGTDVCKEAADMILVDDDFQTIMSAIEEGKGIYNNIKNFVRFQLSTSIAALTLISLATLMNFPNPLNAMQILWINIIMDGPPAQSLGVEPVDKDVIRKPPRNWKDSILTKNLILKILVSSIIIVCGTLFVFWRELRDNVITPRDTTMTFTCFVFFDMFNALSSRSQTKSVFEIGLCSNRMFCYAVLGSIMGQLLVIYFPPLQKVFQTESLSILDLLFLLGLTSSVCIVAEIIKKVERSREKIQKHVWLWERSGQQLVEIHPHLETGLPLTEDVSCV

SEQ ID NO: 38202 - protein, 939 aa, Homo sapiens
MKVARFQKIPNGENETMIPVLTSKKASELPVSEVASILQADLQNGLNKCEVSHRRAFHGWNEFDISEDEPLWKKYISQFKNPLIMLLLASAVISVLMHQFDDAVSITVAILIVVTVAFVQEYRSEKSLEELSKLVPPECHCVREGKLEHTLARDLVPGDTVCLSVGDRVPADLRLFEAVDLSIDESSLTGETTPCSKVTAPQPAATNGDLASRSNIAFMGTLVRCGKAKGVVIGTGENSEFGEVFKMMQAEEAPKTPLQKSMDLLGKQLSFYSFGIIGIIMLVGWLLGKDILEMFTISVSLAVAAIPEGLPIVVTVTLALGVMRMVKKRAIVKKLPIVETLGCCNVICSDKTGTLTKNEMTVTHIFTSDGLHAEVTGVGYNQFGEVIVDGDVVHGFYNPAVSRIVEAGCVCNDAVIRNNTLMGKPTEGALIALAMKMGLDGLQQDYIRKAEYPFSSEQKWMAVKCVHRTQQDRPEICFMKGAYEQVIKYCTTYQSKGQTLTLTQQQRDVYQQEKARMGSAGLRVLALASGPELGQLTFLGLVGIIDPPRTGVKEAVTTLIASGVSIKMITGDSQETAVAIASRLGLYSKTSQSVSGEEIDAMDVQQLSQIVPKVAVFYRASPRHKMKIIKSLQKNGSVVAMTGDGVNDAVALKAADIGVAMGQTGTDVCKEAADMILVDDDFQTIMSAIEEGKGIYNNIKNFVRFQLSTSIAALTLISLATLMNFPNPLNAMQILWINIIMDGPPAQSLGVEPVDKDVIRKPPRNWKDSILTKNLILKILVSSIIIVCGTLFVFWRELRDNVITPRDTTMTFTCFVFFDMFNALSSRSQTKSVFEIGLCSNRMFCYAVLGSIMGQLLVIYFPPLQKVFQTESLSILDLLFLLGLTSSVCIVAEIIKKVERSREKIQKHVWLWERSGQQLVEIHPHLETGLPLTEDVSCV

SEQ ID NO: 38203 - protein, 919 aa, Homo sapiens
MKVARFQKIPNGENETMIPVLTSKKASELPVSEVASILQADLQNGLNKCEVSHRRAFHGWNEFDISEDEPLWKKYISQFKNPLIMLLLASAVISVLMHQFDDAVSITVAILIVVTVAFVQEYRSEKSLEELSKLVPPECHCVREGKLEHTLARDLVPGDTVCLSVGDRVPADLRLFEAVDLSIDESSLTGETTPCSKVTAPQPAATNGDLASRSNIAFMGTLVRCGKAKGVVIGTGENSEFGEVFKMMQAEEAPKTPLQKSMDLLGKQLSFYSFGIIGIIMLVGWLLGKDILEMFTISVSLAVAAIPEGLPIVVTVTLALGVMRMVKKRAIVKKLPIVETLGCCNVICSDKTGTLTKNEMTVTHIFTSDGLHAEVTGVGYNQFGEVIVDGDVVHGFYNPAVSRIVEAGCVCNDAVIRNNTLMGKPTEGALIALAMKMGLDGLQQDYIRKAEYPFSSEQKWMAVKCVHRTQQDRPEICFMKGAYEQVIKYCTTYQSKGQTLTLTQQQRDVYQQEKARMGSAGLRVLALASGPELGQLTFLGLVGIIDPPRTGVKEAVTTLIASGVSIKMITGDSQETAVAIASRLGLYSKTSQSVSGEEIDAMDVQQLSQIVPKVAVFYRASPRHKMKIIKSLQKNGSVVAMTGDGVNDAVALKAADIGVAMGQTGTDVCKEAADMILVDDDFQTIMSAIEEGKGIYNNIKNFVRFQLSTSIAALTLISLATLMNFPNPLNAMQILWINIIMDGPPAQSLGVEPVDKDVIRKPPRNWKDSILTKNLILKILVSSIIIVCGTLFVFWRELRDNVITPRDTTMTFTCFVFFDMFNALSSRSQTKSVFEIGLCSNRMFCYAVLGSIMGQLLVIYFPPLQKVFQTESLSILDLLFLLGLTSSVCIVAEIIKKVERSREKIQKHVSSTSSSFLEV

SEQ ID NO: 38204 - protein, 903 aa, Homo sapiens
MIPVLTSKKASELPVSEVASILQADLQNGLNKCEVSHRRAFHGWNEFDISEDEPLWKKYISQFKNPLIMLLLASAVISVLMHQFDDAVSITVAILIVVTVAFVQEYRSEKSLEELSKLVPPECHCVREGKLEHTLARDLVPGDTVCLSVGDRVPADLRLFEAVDLSIDESSLTGETTPCSKVTAPQPAATNGDLASRSNIAFMGTLVRCGKAKGVVIGTGENSEFGEVFKMMQAEEAPKTPLQKSMDLLGKQLSFYSFGIIGIIMLVGWLLGKDILEMFTISVSLAVAAIPEGLPIVVTVTLALGVMRMVKKRAIVKKLPIVETLGCCNVICSDKTGTLTKNEMTVTHIFTSDGLHAEVTGVGYNQFGEVIVDGDVVHGFYNPAVSRIVEAGCVCNDAVIRNNTLMGKPTEGALIALAMKMGLDGLQQDYIRKAEYPFSSEQKWMAVKCVHRTQQDRPEICFMKGAYEQVIKYCTTYQSKGQTLTLTQQQRDVYQQEKARMGSAGLRVLALASGPELGQLTFLGLVGIIDPPRTGVKEAVTTLIASGVSIKMITGDSQETAVAIASRLGLYSKTSQSVSGEEIDAMDVQQLSQIVPKVAVFYRASPRHKMKIIKSLQKNGSVVAMTGDGVNDAVALKAADIGVAMGQTGTDVCKEAADMILVDDDFQTIMSAIEEGKGIYNNIKNFVRFQLSTSIAALTLISLATLMNFPNPLNAMQILWINIIMDGPPAQSLGVEPVDKDVIRKPPRNWKDSILTKNLILKILVSSIIIVCGTLFVFWRELRDNVITPRDTTMTFTCFVFFDMFNALSSRSQTKSVFEIGLCSNRMFCYAVLGSIMGQLLVIYFPPLQKVFQTESLSILDLLFLLGLTSSVCIVAEIIKKVERSREKIQKHVSSTSSSFLEV

SEQ ID NO: 38205 - protein, 120 aa, Homo sapiens
MKVARFQKIPNGENETMIPVLTSKKASELPVSEVASILQADLQNGLNKCEVSHRRAFHGWNEFDISEDEPLWKKYISQFKNPLIMLLLASAVISVLMHQFDDAVSITVAILIVVTVAFVQ

SEQ ID NO: 38206 - protein, 903 aa, Homo sapiens; identical to SEQ ID NO: 38204

SEQ ID NO: 38207 - protein, 923 aa, Homo sapiens
MIPVLTSKKASELPVSEVASILQADLQNGLNKCEVSHRRAFHGWNEFDISEDEPLWKKYISQFKNPLIMLLLASAVISVLMHQFDDAVSITVAILIVVTVAFVQEYRSEKSLEELSKLVPPECHCVREGKLEHTLARDLVPGDTVCLSVGDRVPADLRLFEAVDLSIDESSLTGETTPCSKVTAPQPAATNGDLASRSNIAFMGTLVRCGKAKGVVIGTGENSEFGEVFKMMQAEEAPKTPLQKSMDLLGKQLSFYSFGIIGIIMLVGWLLGKDILEMFTISVSLAVAAIPEGLPIVVTVTLALGVMRMVKKRAIVKKLPIVETLGCCNVICSDKTGTLTKNEMTVTHIFTSDGLHAEVTGVGYNQFGEVIVDGDVVHGFYNPAVSRIVEAGCVCNDAVIRNNTLMGKPTEGALIALAMKMGLDGLQQDYIRKAEYPFSSEQKWMAVKCVHRTQQDRPEICFMKGAYEQVIKYCTTYQSKGQTLTLTQQQRDVYQQEKARMGSAGLRVLALASGPELGQLTFLGLVGIIDPPRTGVKEAVTTLIASGVSIKMITGDSQETAVAIASRLGLYSKTSQSVSGEEIDAMDVQQLSQIVPKVAVFYRASPRHKMKIIKSLQKNGSVVAMTGDGVNDAVALKAADIGVAMGQTGTDVCKEAADMILVDDDFQTIMSAIEEGKGIYNNIKNFVRFQLSTSIAALTLISLATLMNFPNPLNAMQILWINIIMDGPPAQSLGVEPVDKDVIRKPPRNWKDSILTKNLILKILVSSIIIVCGTLFVFWRELRDNVITPRDTTMTFTCFVFFDMFNALSSRSQTKSVFEIGLCSNRMFCYAVLGSIMGQLLVIYFPPLQKVFQTESLSILDLLFLLGLTSSVCIVAEIIKKVERSREKIQKHVWLWERSGQQLVEIHPHLETGLPLTEDVSCV

SEQ ID NO: 38208 - protein, 82 aa, Homo sapiens
MIPVLTSKKASELPVSEVASILQADLQNGLNKCEVSHRRAFHGWNEFDISEDEPLWKKYISQFKNPLIMLLLASAVISVLMH

SEQ ID NO: 38209 - protein, 919 aa, Homo sapiens; identical to SEQ ID NO: 38203

SEQ ID NO: 38210 - protein, 102 aa, Homo sapiens
MKVARFQKIPNGENETMIPVLTSKKASELPVSEVASILQADLQNGLNKCEVSHRRAFHGWNEFDISEDEPLWKKYISQFKNPLIMLLLASAVISVLMHQFDD

SEQ ID NO: 38211 - protein, 919 aa, Homo sapiens; identical to SEQ ID NO: 38203

SEQ ID NO: 38212 - protein, 923 aa, Homo sapiens; identical to SEQ ID NO: 38207

SEQ ID NO: 38213 - protein, 944 aa, Homo sapiens
MDSLLPPSRFSYFKKYPLHAIRRYLSTLRNQRAEEQVARFQKIPNGENETMIPVLTSKKASELPVSEVASILQFKNPLIMLLLASAVISVLMHQFDDAVSITVAILIVVTVAFVQEYRSEKSLEELSKLVPPECHCVREGKLEHTLARDLVPGDTVCLSVGDRVPADLRLFEAVDLSIDESSLTGETTPCSKVTAPQPAATNGDLASRSNIAFMGTLVRCGKAKGVVIGTGENSEFGEVFKMMQAEEAPKTPLQKSMDLLGKQLSFYSFGIIGIIMLVGWLLGKDILEMFTISVSLAVAAIPEGLPIVVTVTLALGVMRMVKKRAIVKKLPIVETLGCCNVICSDKTGTLTKNEMTVTHIFTSDGLHAEVTGVGYNQFGEVIVDGDVVHGFYNPAVSRIVEAGCVCNDAVIRNNTLMGKPTEGALIALAMKMGLDGLQQDYIRKAEYPFSSEQKWMAVKCVHRTQQDRPEICFMKGAYEQVIKYCTTYQSKGQTLTLTQQQRDVYQQEKARMGSAGLRVLALASGPELGQLTFLGLVGIIDPPRTGVKEAVTTLIASGVSIKMITGDSQETAVAIASRLGLYSKTSQSVSGEEIDAMDVQQLSQIVPKVAVFYRASPRHKMKIIKSLQKNGSVVAMTGDGVNDAVALKAADIGVAMGQTGTDVCKEAADMILVDDDFQTIMSAIEEGKGIYNNIKNFVRFQLSTSIAALTLISLATLMNFPNPLNAMQILWINIIMDGPPAQSLGVEPVDKDVIRKPPRNWKDSILTKNLILKILVSSIIIVCGTLFVFWRELRDNVITPRDTTMTFTCFVFFDMFNALSSRSQTKSVFEIGLCSNRMFCYAVLGSIMGQLLVIYFPPLQKVFQTESLSILDLLFLLGLTSSVCIVAEIIKKVERSREKIQKHVSSTSSSFLEVWLWERSGQQLVEIHPHLETGLPLTEDVSCV

SEQ ID NO: 38214 - protein, 946 aa, Homo sapiens
MVEGRVSEFLKKLGFSGGGRQYQALEKDEEEALIDEQSELKAIEKEKKVTALPPKEACKCQKEDLARAFCVDLHTGLSEFSVTQRRLAHGWNEFVADNSEPVWKKYLDQFKNPLILLLLGSALVSVLTKEYEDAVSIATAVLVVVTVAFIQEYRSEKSLEELTKMVPPECNCLREGKLQHLLARELVPGDVVSLSIGDRIPADIRLTEVTDLLVDESSFTGEAEPCSKTDSPLTGGGDLTTLSNIVFMGTLVQYGRGQGVVIGTGESSQFGEVFKMMQAEETPKTPLQKSMDRLGKQLTLFSFGIIGLIMLIGWSQGKQLLSMFTIGVSLAVAAIPEGLPIVVMVTLVLGVLRMAKKRVIVKKLPIVETLGCCSVLCSDKTGTLTANEMTVTQLVTSDGLRAEVSGVGYDGQGTVCLLPSKEVIKEFSNVSVGKLVEAGCVANNAVIRKNAVMGQPTEGALMALAMKMDLSDIKNSYIRKKEIPFSSEQKWMAVKCSLKTEDQEDIYFMKGALEEVIRYCTMYNNGGIPLPLTPQQRSFCLQEEKRMGSLGLRVLALASGPELGRLTFLGLVGIIDPPRVGVKEAVQVLSESGVSVKMITGDALETALAIGRNIGLCNGKLQAMSGEEVDSVEKGELADRVGKVSVFFRTSPKHKLKIIKALQESGAIVAMTGDGVNDAVALKSADIGIAMGQTGTDVSKEAANMILVDDDFSAIMNAVEEGKGIFYNIKNFVRFQLSTSISALSLITLSTVFNLPSPLNAMQILWINIIMDGPPAQSLGVEPVDKDAFRQPPRSVRDTILSRALILKILMSAAIIISGTLFIFWKEMPEDRASTPRTTTMTFTCFVFFDLFNALTCRSQTKLIFEIGFLRNHMFLYSVLGSILGQLAVIYIPPLQRVFQTENLGALDLLFLTGLASSVFILSELLKLCEKYCCSPKRVQMHPEDV

SEQ ID NO: 38215 - protein, 975 aa, Homo sapiens
MVEGRVSEFLKKLGFSGGGRQYQALEKDEEEALIDEQSELKAIEKEKKVTALPPKEACKCQKEDLARAFCVDLHTGLSEFSVTQRRLAHGWNEFVADNSEPVWKKYLDQFKNPLILLLLGSALVSVLTKEYEDAVSIATAVLVVVTVAFIQEYRSEKSLEELTKMVPPECNCLREGKLQHLLARELVPGDVVSLSIGDRIPADIRLTEVTDLLVDESSFTGEAEPCSKTDSPLTGGGDLTTLSNIVFMGTLVQYGRGQGVVIGTGESSQFGEVFKMMQAEETPKTPLQKSMDRLGKQLTLFSFGIIGLIMLIGWSQGKQLLSMFTIGVSLAVAAIPEGLPIVVMVTLVLGVLRMAKKRVIVKKLPIVETLGCCSVLCSDKTGTLTANEMTVTQLVTSDGLRAEVSGVGYDGQGTVCLLPSKEVIKEFSNVSVGKLVEAGCVANNAVIRKNAVMGQPTEGALMALAMKMDLSDIKNSYIRKKEIPFSSEQKWMAVKCSLKTEDQEDIYFMKGALEEVIRYCTMYNNGGIPLPLTPQQRSFCLQEEKRMGSLGLRVLALASGPELGRLTFLGLVGIIDPPRVGVKEAVQVLSESGVSVKMITGDALETALAIGRNIGLCNGKLQAMSGEEVDSVEKGELADRVGKVSVFFRTSPKHKLKIIKALQESGAIVAMTGDGVNDAVALKSADIGIAMGQTGTDVSKEAANMILVDDDFSAIMNAVEEGKGIFYNIKNFVRFQLSTSISALSLITLSTVFNLPSPLNAMQILWINIIMDGPPAQRSSQKTEVCCTAVRLGVEGRGESTWAGRAGLGVEPVDKDAFRQPPRSVRDTILSRALILKILMSAAIIISGTLFIFWKEMPEDRASTPRTTTMTFTCFVFFDLFNALTCRSQTKLIFEIGFLRNHMFLYSVLGSILGQLAVIYIPPLQRVFQTENLGALDLLFLTGLASSVFILSELLKLCEKYCCSPKRVQMHPEDV

SEQ ID NO: 38216 - protein, 795 aa, Homo sapiens
MRTPSASPRQCLSWSLSPSSSLREGKLQHLLARELVPGDVVSLSIGDRIPADIRLTEVTDLLVDESSFTGEAEPCSKTDSPLTGGGDLTTLSNIVFMGTLVQYGRGQGVVIGTGESSQFGEVFKMMQAEETPKTPLQKSMDRLGKQLTLFSFGIIGLIMLIGWSQGKQLLSMFTIGVSLAVAAIPEGLPIVVMVTLVLGVLRMAKKRVIVKKLPIVETLGCCSVLCSDKTGTLTANEMTVTQLVTSDGLRAEVSGVGYDGQGTVCLLPSKEVIKEFSNVSVGKLVEAGCVANNAVIRKNAVMGQPTEGALMALAMKMDLSDIKNSYIRKKEIPFSSEQKWMAVKCSLKTEDQEDIYFMKGALEEVIRYCTMYNNGGIPLPLTPQQRSFCLQEEKRMGSLGLRVLALASGPELGRLTFLGLVGIIDPPRVGVKEAVQVLSESGVSVKMITGDALETALAIGRNIGLCNGKLQAMSGEEVDSVEKGELADRVGKVSVFFRTSPKHKLKIIKALQESGAIVAMTGDGVNDAVALKSADIGIAMGQTGTDVSKEAANMILVDDDFSAIMNAVEEGKGIFYNIKNFVRFQLSTSISALSLITLSTVFNLPSPLNAMQILWINIIMDGPPAQSLGVEPVDKDAFRQPPRSVRDTILSRALILKILMSAAIIISGTLFIFWKEMPEDRASTPRTTTMTFTCFVFFDLFNALTCRSQTKLIFEIGFLRNHMFLYSVLGSILGQLAVIYIPPLQRVFQTENLGALDLLFLTGLASSVFILSELLKLCEKYCCSPKRVQMHPEDV

SEQ ID NO: 38217 - protein, 1029 aa, Homo sapiens
MEAAHLLPAADVLRHFSVTAEGGLSPAQVTGARERYGPNELPSEEGKSLWELVLEQFEDLLVRILLLAALVSFVLAWFEEGEETTTAFVEPLVIMLILVANAIVGVWQERNAESAIEALKEYEPEMGKVIRSDRKGVQRIRARDIVPGDIVEVAVGDKVPADLRLIEIKSTTLRVDQSILTGESVSVTKHTEAIPDPRAVNQDKKNMLFSGTNITSGKAVGVAVATGLHTELGKIRSQMAAVEPERTPLQRKLDEFGRQLSHAISVICVAVWVINIGHFADPAHGGSWLRGAVYYFKIAVALAVAAIPEGLPAVITTCLALGTRRMARKNAIVRSLPSVETLGCTSVICSDKTGTLTTNQMSVCRMFVVAEADAGSCLLHEFTISGTTYTPEGEVRQGDQPVRCGQFDGLVELATICALCNDSALDYNEAKGVYEKVGEATETALTCLVEKMNVFDTDLQALSRVERAGACNTVIKQLMRKEFTLEFSRDRKSMSVYCTPTRPHPTGQGSKMFVKGAPESVIERCSSVRVGSRTAPLTPTSREQILAKIRDWGSGSDTLRCLALATRDAPPRKEDMELDDCSKFVQYETDLTFVGCVGMLDPPRPEVAACITRCYQAGIRVVMITGDNKGTAVAICRRLGIFGDTEDVAGKAYTGREFDDLSPEQQRQACRTARCFARVEPAHKSRIVENLQSFNEITAMTGDGVNDAPALKKAEIGIAMGSGTAVAKSAAEMVLSDDNFASIVAAVEEGRAIYSNMKQFIRYLISSNVGEVVCIFLTAILGLPEALIPVQLLWVNLVTDGLPATALGFNPPDLDIMEKLPRSPREALISGWLFFRYLAIGVYVGLATVAAATWWFVYDAEGPHINFYQLRNFLKCSEDNPLFAGIDCEVFESRFPTTMALSVLVTIEMCNALNSVSENQSLLRMPPWMNPWLLVAVAMSMALHFLILLVPPLPLIFQVTPLSGRQWVVVLQISLPVILLDEALKYLSRNHMHACLYPGLLRTVSQAWSRQPLTTSWTPDHTGLASLKK

SEQ ID NO: 38218 - protein, 1043 aa, Homo sapiens
MEAAHLLPAADVLRHFSVTAEGGLSPAQVTGARERYGPNELPSEEGKSLWELVLEQFEDLLVRILLLAALVSFVLAWFEEGEETTTAFVEPLVIMLILVANAIVGVWQERNAESAIEALKEYEPEMGKVIRSDRKGVQRIRARDIVPGDIVEVAVGDKVPADLRLIEIKSTTLRVDQSILTGESVSVTKHTEAIPDPRAVNQDKKNMLFSGTNITSGKAVGVAVATGLHTELGKIRSQMAAVEPERTPLQRKLDEFGRQLSHAISVICVAVWVINIGHFADPAHGGSWLRGAVYYFKIAVALAVAAIPEGLPAVITTCLALGTRRMARKNAIVRSLPSVETLGCTSVICSDKTGTLTTNQMSVCRMFVVAEADAGSCLLHEFTISGTTYTPEGEVRQGDQPVRCGQFDGLVELATICALCNDSALDYNEAKGVYEKVGEATETALTCLVEKMNVFDTDLQALSRVERAGACNTVIKQLMRKEFTLEFSRDRKSMSVYCTPTRPHPTGQGSKMFVKGAPESVIERCSSVRVGSRTAPLTPTSREQILAKIRDWGSGSDTLRCLALATRDAPPRKEDMELDDCSKFVQYETDLTFVGCVGMLDPPRPEVAACITRCYQAGIRVVMITGDNKGTAVAICRRLGIFGDTEDVAGKAYTGREFDDLSPEQQRQACRTARCFARVEPAHKSRIVENLQSFNEITAMTGDGVNDAPALKKAEIGIAMGSGTAVAKSAAEMVLSDDNFASIVAAVEEGRAIYSNMKQFIRYLISSNVGEVVCIFLTAILGLPEALIPVQLLWVNLVTDGLPATALGFNPPDLDIMEKLPRSPREALISGWLFFRYLAIGVYVGLATVAAATWWFVYDAEGPHINFYQLRNFLKCSEDNPLFAGIDCEVFESRFPTTMALSVLVTIEMCNALNSVSENQSLLRMPPWMNPWLLVAVAMSMALHFLILLVPPLPLIFQVTPLSGRQWVVVLQISLPVILLDEALKYLSRNHMHACLYPGLLRTVSQAWSRQPLTTSWTPDHTGRNEPEVSAGNRVESPVCTSD

SEQ ID NO: 38219 - protein, 1052 aa, Homo sapiens
MEAAHLLPAADVLRHFSVTAEGGLSPAQVTGARERYGPNELPSEEGKSLWELVLEQFEDLLVRILLLAALVSFVLAWFEEGEETTTAFVEPLVIMLILVANAIVGVWQERNAESAIEALKEYEPEMGKVIRSDRKGVQRIRARDIVPGDIVEVAVGDKVPADLRLIEIKSTTLRVDQSILTGESVSVTKHTEAIPDPRAVNQDKKNMLFSGTNITSGKAVGVAVATGLHTELGKIRSQMAAVEPERTPLQRKLDEFGRQLSHAISVICVAVWVINIGHFADPAHGGSWLRGAVYYFKIAVALAVAAIPEGLPAVITTCLALGTRRMARKNAIVRSLPSVETLGCTSVICSDKTGTLTTNQMSVCRMFVVAEADAGSCLLHEFTISGTTYTPEGEVRQGDQPVRCGQFDGLVELATICALCNDSALDYNEAKGVYEKVGEATETALTCLVEKMNVFDTDLQALSRVERAGACNTVIKQLMRKEFTLEFSRDRKSMSVYCTPTRPHPTGQGSKMFVKGAPESVIERCSSVRVGSRTAPLTPTSREQILAKIRDWGSGSDTLRCLALATRDAPPRKEDMELDDCSKFVQYETDLTFVGCVGMLDPPRPEVAACITRCYQAGIRVVMITGDNKGTAVAICRRLGIFGDTEDVAGKAYTGREFDDLSPEQQRQACRTARCFARVEPAHKSRIVENLQSFNEITAMTGDGVNDAPALKKAEIGIAMGSGTAVAKSAAEMVLSDDNFASIVAAVEEGRAIYSNMKQFIRYLISSNVGEVVCIFLTAILGLPEALIPVQLLWVNLVTDGLPATALGFNPPDLDIMEKLPRSPREALISGWLFFRYLAIGVYVGLATVAAATWWFVYDAEGPHINFYQLRNFLKCSEDNPLFAGIDCEVFESRFPTTMALSVLVTIEMCNALNSVSENQSLLRMPPWMNPWLLVAVAMSMALHFLILLVPPLPLIFQVTPLSGRQWVVVLQISLPVILLDEALKYLSRNHMHACLYPGLLRTVSQAWSRQPLTTSWTPDHTGLASLGQGHSIVSLSELLREGGSREEMSQK

SEQ ID NO: 38220 - protein, 1029 aa, Homo sapiens; identical to SEQ ID NO: 38217

SEQ ID NO: 38221 - protein, 216 aa, Homo sapiens
MEKLPRSPREALISGWLFFRYLAIGVYVGLATVAAATWWFVYDAEGPHINFYQLRNFLKCSEDNPLFAGIDCEVFESRFPTTMALSVLVTIEMCNALNSVSENQSLLRMPPWMNPWLLVAVAMSMALHFLILLVPPLPLIFQVTPLSGRQWVVVLQISLPVILLDEALKYLSRNHMHGPGTQHRLAVRAAQRGRKQGRNEPEVSAGNRVESPGPGG

SEQ ID NO: 38222 - protein, 999 aa, Homo sapiens
MEAAHLLPAADVLRHFSVTAEGGLSPAQVTGARERYGPNELPSEEGKSLWELVLEQFEDLLVRILLLAALVSFVLAWFEEGEETTTAFVEPLVIMLILVANAIVGVWQERNAESAIEALKEYEPEMGKVIRSDRKGVQRIRARDIVPGDIVEVAVGDKVPADLRLIEIKSTTLRVDQSILTGESVSVTKHTEAIPDPRAVNQDKKNMLFSGTNITSGKAVGVAVATGLHTELGKIRSQMAAVEPERTPLQRKLDEFGRQLSHAISVICVAVWVINIGHFADPAHGGSWLRGAVYYFKIAVALAVAAIPEGLPAVITTCLALGTRRMARKNAIVRSLPSVETLGCTSVICSDKTGTLTTNQMSVCRMFVVAEADAGSCLLHEFTISGTTYTPEGEVRQGDQPVRCGQFDGLVELATICALCNDSALDYNEAKGVYEKVGEATETALTCLVEKMNVFDTDLQALSRVERAGACNTVIKQLMRKEFTLEFSRDRKSMSVYCTPTRPHPTGQGSKMFVKGAPESVIERCSSVRVGSRTAPLTPTSREQILAKIRDWGSGSDTLRCLALATRDAPPRKEDMELDDCSKFVQYETDLTFVGCVGMLDPPRPEVAACITRCYQAGIRVVMITGDNKGTAVAICRRLGIFGDTEDVAGKAYTGREFDDLSPEQQRQACRTARCFARVEPAHKSRIVENLQSFNEITAMTGDGVNDAPALKKAEIGIAMGSGTAVAKSAAEMVLSDDNFASIVAAVEEGRAIYSNMKQFIRYLISSNVGEVVCIFLTAILGLPEALIPVQLLWVNLVTDGLPATALGFNPPDLDIMEKLPRSPREALISGWLFFRYLAIGVYVGLATVAAATWWFVYDAEGPHINFYQLRNFLKCSEDNPLFAGIDCEVFESRFPTTMALSVLVTIEMCNALNSVSENQSLLRMPPWMNPWLLVAVAMSMALHFLILLVPPLPLIFQVTPLSGRQWVVVLQISLPVILLDEALKYLSRNHMHEEMSQK

SEQ ID NO: 38223 - protein, 998 aa, Homo sapiens
MEAAHLLPAADVLRHFSVTAEGGLSPAQVTGARERYGPNELPSEEGKSLWELVLEQFEDLLVRILLLAALVSFVLAWFEEGEETTTAFVEPLVIMLILVANAIVGVWQERNAESAIEALKEYEPEMGKVIRSDRKGVQRIRARDIVPGDIVEVAVGDKVPADLRLIEIKSTTLRVDQSILTGESVSVTKHTEAIPDPRAVNQDKKNMLFSGTNITSGKAVGVAVATGLHTELGKIRSQMAAVEPERTPLQRKLDEFGRQLSHAISVICVAVWVINIGHFADPAHGGSWLRGAVYYFKIAVALAVAAIPEGLPAVITTCLALGTRRMARKNAIVRSLPSVETLGCTSVICSDKTGTLTTNQMSVCRMFVVAEADAGSCLLHEFTISGTTYTPEGEVRQGDQPVRCGQFDGLVELATICALCNDSALDYNEAKGVYEKVGEATETALTCLVEKMNVFDTDLQALSRVERAGACNTVIKQLMRKEFTLEFSRDRKSMSVYCTPTRPHPTGQGSKMFVKGAPESVIERCSSVRVGSRTAPLTPTSREQILAKIRDWGSGSDTLRCLALATRDAPPRKEDMELDDCSKFVQYETDLTFVGCVGMLDPPRPEVAACITRCYQAGIRVVMITGDNKGTAVAICRRLGIFGDTEDVAGKAYTGREFDDLSPEQQRQACRTARCFARVEPAHKSRIVENLQSFNEITAMTGDGVNDAPALKKAEIGIAMGSGTAVAKSAAEMVLSDDNFASIVAAVEEGRAIYSNMKQFIRYLISSNVGEVVCIFLTAILGLPEALIPVQLLWVNLVTDGLPATALGFNPPDLDIMEKLPRSPREALISGWLFFRYLAIGVYVGLATVAAATWWFVYDAEGPHINFYQLRNFLKCSEDNPLFAGIDCEVFESRFPTTMALSVLVTIEMCNALNSVSENQSLLRMPPWMNPWLLVAVAMSMALHFLILLVPPLPLIFQVTPLSGRQWVVVLQISLPVILLDEALKYLSRNHMHGHTQS

SEQ ID NO: 38224 - protein, 998 aa, Homo sapiens
MEAAHLLPAADVLRHFSVTAEGGLSPAQVTGARERYGPNELPSEEGKSLWELVLEQFEDLLVRILLLAALVSFVLAWFEEGEETTTAFVEPLVIMLILVANAIVGVWQERNAESAIEALKEYEPEMGKVIRSDRKGVQRIRARDIVPGDIVEVAVGDKVPADLRLIEIKSTTLRVDQSILTGESVSVTKHTEAIPDPRAVNQDKKNMLFSGTNITSGKAVGVAVATGLHTELGKIRSQMAAVEPERTPLQRKLDEFGRQLSHAISVICVAVWVINIGHFADPAHGGSWLRGAVYYFKIAVALAVAAIPEGLPAVITTCLALGTRRMARKNAIVRSLPSVETLGCTSVICSDKTGTLTTNQMSVCRMFVVAEADAGSCLLHEFTISGTTYTPEGEVRQGDQPVRCGQFDGLVELATICALCNDSALDYNEAKGVYEKVGEATETALTCLVEKMNVFDTDLQALSRVERAGACNTVIKQLMRKEFTLEFSRDRKSMSVYCTPTRPHPTGQGSKMFVKGAPESVIERCSSVRVGSRTAPLTPTSREQILAKIRDWGSGSDTLRCLALATRDAPPRKEDMELDDCSKFVQYETDLTFVGCVGMLDPPRPEVAACITRCYQAGIRVVMITGDNKGTAVAICRRLGIFGDTEDVAGKAYTGREFDDLSPEQQRQACRTARCFARVEPAHKSRIVENLQSFNEITAMTGDGVNDAPALKKAEIGIAMGSGTAVAKSAAEMVLSDDNFASIVAAVEEGRAIYSNMKQFIRYLISSNVGEVVCIFLTAILGLPEALIPVQLLWVNLVTDGLPATALGFNPPDLDIMEKLPRSPREALISGWLFFRYLAIGVYVGLATVAAATWWFVYDAEGPHINFYQLRNFLKCSEDNPLFAGIDCEVFESRFPTTMALSVLVTIEMCNALNSVSENQSLLRMPPWMNPWLLVAVAMSMALHFLILLVPPLPLIFQVTPLSGRQWVVVLQISLPVILLDEALKYLSRNHMHEMSQK

SEQ ID NO: 38225 - protein, 461 aa, Homo sapiens
MTVPKEMPEKWARAQAPPSWSRKKPSWGTEEERRARANDREYNEKFQYASNCIKTSKYNILTFLPVNLFEQFQEVANTYFLFLLILQLIPQISSLSWFTTIVPLVLVLTITAVKDATDDYFRHKSDNQVNNRQSQVLINGILQQEQWMNVCVGDIIKLENNQFVAADLLLLSSSEPHGLCYIETAELDGETNMKVRQAIPVTSELGDISKLAKFDGEVICEPPNNKLDKFSGTLYWKENKFPLSNQNMLLRGCVLRNTEWCFGLVIFAGPDTKLMQNSGRTKFKRTSIDRLMNTLVLWIFGFLVCMGVILAIGNAIWEHEVGMRFQVYLPWDEAVDSAFFSGFLSFWSYIIILNTVVPISLYVSVEVIRLGHSYFINWDKKMFCMKKRTPAEARTTTLNEELGQVEYIFSDKTGTLTQNIMVFNKCSINGHSYVGSEGPRRKGPSWPGTVAHAYSHSTLGG

SEQ ID NO: 38226 - protein, 387 aa, Homo sapiens
MAVCAKKRPPEEERRARANDREYNEKFQYASNCIKTSKYNILTFLPVNLFEQFQEVANTYFLFLLILQLIPQISSLSWFTTIVPLVLVLTITAVKDATDDYFRHKSDNQVNNRQSQVLINGILQQEQWMNVCVGDIIKLENNQFVAADLLLLSSSEPHGLCYIETAELDGETNMKVRQAIPVTSELGDISKLAKFDGEVICEPPNNKLDKFSGTLYWKENKFPLSNQNMLLRGCVLRNTEWCFGLVIFAGPDTKLMQNSGRTKFKRTSIDRLMNTLVLWIFGFLVCMGVILAIGNAIWEHEVGMRFQVYLPWDEAVDSAFFSGFLSFWSYIIILNTVVPISLYVRYVPSLTWGLSRESGGPIELFFSMKMKSLRSNEKSSSSCTVNI

SEQ ID NO: 38227 - protein, 1223 aa, Homo sapiens
MDTLRAVPLFSISGLFSFPYRVSHGIAGILLGEMAVCAKKRPPEEERRARANDREYNEKFQYASNCIKTSKYNILTFLPVNLFEQFQEVANTYFLFLLILQLIPQISSLSWFTTIVPLVLVLTITAVKDATDDYFRHKSDNQVNNRQSQVLINGILQQEQWMNVCVGDIIKLENNQFVAADLLLLSSSEPHGLCYIETAELDGETNMKVRQAIPVTSELGDISKLAKFDGEVICEPPNNKLDKFSGTLYWKENKFPLSNQNMLLRGCVLRNTEWCFGLVIFAGPDTKLMQNSGRTKFKRTSIDRLMNTLVLWIFGFLVCMGVILAIGNAIWEHEVGMRFQVYLPWDEAVDSAFFSGFLSFWSYIIILNTVVPISLYVSVEVIRLGHSYFINWDKKMFCMKKRTPAEARTTTLNEELGQVEYIFSDKTGTLTQNIMVFNKCSINGHSYGDVFDVLGHKAELGERPEPVDFSFNPLADKKFLFWDPSLLEAVKIGDPHTHEFFRLLSLCHTVMSEEKNEGELYYKAQSPDEGALVTAARNFGFVFRSRTPKTITVHEMGTAITYQLLAILDFNNIRKRMSVIVRNPEGKIRLYCKGADTILLDRLHHSTQELLNTTMDHLNEYAGEGLRTLVLAYKDLDEEYYEEWAERRLQASLAQDSREDRLASIYEEVENNMMLLGATAIEDKLQQGVPETIALLTLANIKIWVLTGDKQETAVNIGYSCKMLTDDMTEVFIVTGHTVLEVREELRKAREKMMDSSRSVGNGFTYQDKLSSSKLTSVLEAVAGEYALVINGHSLAHALEADMELEFLETACACKAVICCRVTPLQKAQVVELVKKYKKAVTLAIGDGANDVSMIKTAHIGVGISGQEGIQAVLASDYSFSQFKFLQRLLLVHGRWSYLRMCKFLCYFFYKNFAFTMVHFWFGFFCGFSAQTVYDQYFITLYNIVYTSLPVLAMGVFDQDVPEQRSMEYPKLYEPGQLNLLFNKREFFICIAQGIYTSVLMFFIPYGVFADATRDDGTQLADYQSFAVTVATSLVIVVSVQIGLDTGYWTAINHFFIWGSLAVYFAILFAMHSNGLFDMFPNQFRFVGNAQNTLAQPTVWLTIVLTTVVCIMPVVAFRFLRLNLKPDLSDTVRYTQLVRKKQKAQHRCMRRVGRTGSRRSGYAFSHQEGFGELIMSGKNMRLSSLALSSFTTRSSSSWIESLRRKKSDSASSPSGGADKPLKG

SEQ ID NO: 38228 - protein, 1147 aa, Homo sapiens
MADQIPLYPVRSAAAAAANRKRAAYYSAAGPRPGADRHSRYQLEDESAHLDEMPLMMSEEGFENEESDYHTLPRARIMQRKRGLEWFVCDGWKFLCTSCCGWLINICRRKKELKARTVWLGCPEKCEEKHPRNSIKNQKYNVFTFIPGVLYEQFKFFLNLYFLVISCSQFVPALKIGYLYTYWAPLGFVLAVTMTREAIDEFRRFQRDKEVNSQLYSKLTVRGKVQVKSSDIQVGDLIIVEKNQRIPSDMVFLRTSEKAGSCFIRTDQLDGETDWKLKVAVSCTQQLPALGDLFSISAYVYAQKPQMDIHSFEGTFTREDSDPPIHESLSIENTLWASTIVASGTVIGVVIYTGKETRSVMNTSNPKNKVGLLDLELNRLTKALFLALVALSIVMVTLQGFVGPWYRNLFRFLLLFSYIIPISLRVNLDMGKAVYGWMMMKDENIPGTVVRTSTIPEELGRLVYLLTDKTGTLTQNEMIFKRLHLGTVSYGADTMDEIQSHVRDSYSQMQSQAGGNNTGSTPLRKAQSSAPKVRKSVSSRIHEAVKAIVLCHNVTPVYESRAGVTEETEFAEADQDFSDENRTYQASSPDEVALVQWTESVGLTLVSRDLTSMQLKTPSGQVLSFCILQLFPFTSESKRMGVIVRDESTAEITFYMKGADVAMSPIVQYNDWLEEECGNMAREGLRTLVVAKKALTEEQYQDFESRYTQAKLSMHDRSLKVAAVVESLEREMELLCLTGVEDQLQADVRPTLEMLRNAGIKIWMLTGDKLETATCIAKSSHLVSRTQDIHIFRQVTSRGEAHLELNAFRRKHDCALVISGDSLEVCLKYYEHEFVELACQCPAVVCCRCSPTQKARIVTLLQQHTGRRTCAIGDGGNDVSMIQAADCGIGIEGKEGKQASLAADFSITQFRHIGRLLMVHGRNSYKRSAALGQFVMHRGLIISTMQAVFSSVFYFASVPLYQGFLMVGYATIYTMFPVFSLVLDQDVKPEMAMLYPELYKDLTKGRSLSFKTFLIWVLISIYQGGILMYGALVLFESEFVHVVAISFTALILTELLMVALTVRTWHWLMVVAEFLSLGCYVSSLAFLNEYFGIGRVSFGAFLDVAFITTVTFLWKVSAITVVSCLPLYVLKYLRRKLSPPSYCKLAS

SEQ ID NO: 38229 - protein, 135 aa, Homo sapiens
MQAVFSSVFYFASVPLYQGFLMVGYATIYTMFPVFSLVLDQDVKPEMAMLYPELYKDLTKSQQDGRSNRRQHERLTSGTSGHVWDPGSFFRIRVSGKGARNAGKILVLQNLPHLGFNKYLPRRHPHVWGPGALRV

SEQ ID NO: 38230 - protein, 1136 aa, Homo sapiens
MADQIPLYPVRSAAAAAANRKRAAYYSAAGPRPGADRHSRYQLEDESAHLDEMPLMMSEEGFENEESDYHTLPRARIMQRKRGLEWFVCDGWKFLCTSCCGWLINICRRKKELKARTVWLGCPEKCEEKHPRNSIKNQKYNVFTFIPGVLYEQFKFFLNLYFLVISCSQFVPALKIGYLYTYWAPLGFVLAVTMTREAIDEFRRFQRDKEVNSQLYSKLTVRGKVQVKSSDIQVGDLIIVEKNQRIPSDMVFLRTSEKAGSCFIRTDQLDGETDWKLKVAVSCTQQLPALGDLFSISAYVYAQKPQMDIHSFEGTFTREDSDPPIHESLSIENTLWASTIVASGTVIGVVIYTGKETRSVMNTSNPKNKVGLLDLELNRLTKALFLALVALSIVMVTLQGFVGPWYRNLFRFLLLFSYIIPISLRVNLDMGKAVYGWMMMKDENIPGTVVRTSTIPEELGRLVYLLTDKTGTLTQNEMIFKRLHLGTVSYGADTMDEIQSHVRDSYSQMQSQAGGNNTGSTPLRKAQSSAPKVRKSVSSRIHEAVKAIVLCHNVTPVYESRAGVTEETEFAEADQDFSDENRTYQASSPDEVALVQWTESVGLTLVSRDLTSMQLKTPSGQVLSFCILQLFPFTSESKRMGVIVRDESTAEITFYMKGADVAMSPIVQYNDWLEEECGNMAREGLRTLVVAKKALTEEQYQDFESRYTQAKLSMHDRSLKVAAVVESLEREMELLCLTGVEDQLQADVRPTLEMLRNAGIKIWMLTGDKLETATCIAKSSHLVSRTQDIHIFRQVTSRGEAHLELNAFRRKHDCALVISGDSLEVCLKYYEHEFVELACQCPAVVCCRCSPTQKARIVTLLQQHTGRRTCAIGDGGNDVSMIQAADCGIGIEGKEGKQASLAADFSITQFRHIGRLLMVHGRNSYKRSAALGQFVMHRGLIISTMQAVFSSVFYFASVPLYQGFLMVGYATIYTMFPVFSLVLDQDVKPEMAMLYPELYKDLTKGRSLSFKTFLIWVLISIYQGGILMYGALVLFESEFVHVVAISFTALILTELLMVALTVRTWHWLMVVAEFLSLGCYVSSLAFLNEYFDVAFITTVTFLWKVSAITVVSCLPLYVLKYLRRKLSPPSYCKLAS

SEQ ID NO: 38231 - protein, 136 aa, Homo sapiens
MPLMMSEEGFENEESDYHTLPRARIMQRKRGLEWFVCDGWKFLCTSCCGWLINICRRKKELKARTVWLGCPEKCEEKHPRNSIKNQKYNVFTFIPGVLYEQFKFFLNLYFLVISCSQFVPALKIGYLYTYWAPLMT

SEQ ID NO: 38232 - protein, 202 aa, Homo sapiens
MQRKRGLEWFVCDGWKFLCTSCCGWLINICRRKKELKARTVWLGCPEKCEEKHPRNSIKNQKYNVFTFIPGVLYEQFKFFLNLYFLVISCSQFVPALKIGYLYTYWAPLGFVLAVTMTREAIDEFRRFQRDKEVNSQLYSKLTVRGKVQVKSSDIQVGDLIIVEKNQRIPSDMVFLRTSEKAVSNNLDYCSHLVLFIFCFLN

SEQ ID NO: 38233 - protein, 457 aa, Homo sapiens
MAREGLRTLVVAKKALTEEQYQDFESRYTQAKLSMHDRSLKVAAVVESLEREMELLCLTGVEDQLQADVRPTLEMLRNAGIKIWMLTGDKLETATCIAKSSHLVSRTQDIHIFRQVTSRGEAHLELNAFRRKHDCALVISGDSLEVCLKYYEHEFVELACQCPAVVCCRCSPTQKARIVTLLQQHTGRRTCAIGDGGNDVSMIQAADCGIGIEGKEGKQASLAADFSITQFRHIGRLLMVHGRNSYKRSAALGQFVMHRGLIISTMQAVFSSVFYFASVPLYQGFLMVGYATIYTMFPVFSLVLDQDVKPEMAMLYPELYKDLTKGRSLSFKTFLIWVLISIYQGGILMYGALVLFESEFVHVVAISFTALILTELLMVALTVRTWHWLMVVAEFLSLGCYVSSLAFLNEYFDVAFITTVTFLWKVSAITVVSCLPLYVLKYLRRKLSPPSYCKLAS

SEQ ID NO: 38234 - protein, 1499 aa, Homo sapiens
MEREPAGTEEPGPPGRRRRREGRTRTVRSNLLPPPGAEDPAAGAAKGERRRRRGCAQHLADNRLKTTKYTLLSFLPKNLFEQFHRPANVYFVFIALLNFVPAVNAFQPGLALAPVLFILAITAFRDLWEDYSRHRSDHKINHLGCLVFSREEKKYVNRFWKEIHVGDFVRLRCNEIFPADILLLSSSDPDGLCHIETANLDGETNLKRRQVVRGFSELVSEFNPLTFTSVIECEKPNNDLSRFRGCIIHDNGKKAGLYKENLLLRGCTLRNTDAVVGIVIYAGHETKALLNNSGPRYKRSKLERQMNCDVLWCVLLLVCMSLFSAVGHGLWIWRYQEKKSLFYVPKSDGSSLSPVTAAVYSFLTMIIVLQVLIPISLYVSIEIVKACQVYFINQDMQLYDEETDSQLQCRALNITEDLGQIQYIFSDKTGTLTENKMVFRRCTVSGVEYSHDANAQRLARYQEADSEEEEVVPRGGSVSQRGSIGSHQSVRVVHRTQSTKSHRRTGSRAEAKRASMLSKHTAFSSPMEKDITPDPKLLEKVSECDKSLAVARHQEHLLAHLSPELSDVFDFFIALTICNTVVVTSPDQPRTKVRVRFELKSPVKTIEDFLRRFTPSCLTSGCSSIGSLAANKSSHKLGSSFPSTPSSDGMLLRLEERLGQPTSAIASNGYSSQADNWASELAQEQESERELRYEAESPDEAALVYAARAYNCVLVERLHDQVSVELPHLGRLTFELLHTLGFDSVRKRMSVVIRHPLTDEINVYTKGADSVVMDLLQPCSSVDARGRHQKKIRSKTQNYLNVYAAEGLRTLCIAKRVLSKEEYACWLQSHLEAESSLENSEELLFQSAIRLETNLHLLGATGIEDRLQDGVPETISKLRQAGLQIWVLTGDKQETAVNIAYACKLLDHDEEVITLNATSQEACAALLDQCLCYVQSRGLQRAPEKTKGKVSMRFSSLCPPSTSTASGRRPSLVIDGRSLAYALEKNLEDKFLFLAKQCRSVLCCRSTPLQKSMVVKLVRSKLKAMTLAIGDGANDVSMIQVADVGVGISGQEGMQAVMASDFAVPKFRYLERLLILHGHWCYSRLANMVLYFFYKNTMFVGLLFWFQFFCGFSASTMIDQWYLIFFNLLFSSLPPLVTGVLDRDVPANVLLTNPQLYKSGQNMEEYRPRTFWFNMADAAFQSLVCFSIPYLAYYDSNVDLFTWGTPIVTIALLTFLLHLGIETKTWTWLNWITCGFSVLLFFTVALIYNASCATCYPPSNPYWTMQALLGDPVFYLTCLMTPVAALLPRLFFRSLQGRVFPTQLQLARQLTRKSPRRCSAPKETFAQGRLPKDSGTEHSSGRTVKTSVPLSQPSWHTQQPVCSLEASGEPSTVDMSMPVREHTLLEGLSAPAPMSSAPGEAVLRSPGGCPEESKVRAASTGRVTPLSSLFSLPTFSLLNWISSWSLVSRLGSVLQFSRTEQLADGQAGRGLPVQPHSGRSGLQGPDHRLLIGASSRRSQ

SEQ ID NO: 38235 - protein, 1134 aa, Homo sapiens
MDCSLVRTLVHRYCAGEENWVDSRTIYVGHREPPPGAEAYIPQRYPDNRIVSSKYTFWNFIPKNLFEQFRRVANFYFLIIFLVQLIIDTPTSPVTSGLPLFFVITVTAIKQGYEDWLRHKADNAMNQCPVHFIQHGKLVRKQSRKLRVGDIVMVKEDETFPCDLIFLSSNRGDGTCHVTTASLDGESSHKTHYAVQDTKGFHTEEDIGGLHATIECEQPQPDLYKFVGRINVYSDLNDPVVRPLGSENLLLRGATLKNTEKIFGVAIYTGMETKMALNYQSKSQKRSAVEKSMNAFLIVYLCILISKALINTVLKYMWQSEPFRDEPWYNQKTESERQRNLFLKAFTDFLAFMVLFNYIIPVSMYVTVEMQKFLGSYFITWDEDMFDEETGEGPLVNTSDLNEELGQVEYIFTDKTGTLTENNMEFKECCIEGHVYVPHVICNGQVLPESSGIDMIDSSPSVNGREREELFFRALCLCHTVQVKDDDSVDGPRKSPDGGKSCVYISSSPDEVALVEGVQRLGFTYLRLKDNYMEILNRENHIERFELLEILSFDSVRRRMSVIVKSATGEIYLFCKGADSSIFPRVIEGKVDQIRARVERNAVEGLRTLCVAYKRLIQEEYEGICKLLQAAKVALQDREKKLAEAYEQIEKDLTLLGATAVEDRLQEKAADTIEALQKAGIKVWVLTGDKMETAAATCYACKLFRRNTQLLELTTKRIEEQSLHDVLFELSKTVLRHSGSLTRDNLSGLSADMQDYGLIIDGAALSLIMKPREDGSSGNYRELFLEICRSCSAVLCCRMAPLQKAQIVKLIKFSKEHPITLAIGDGANDVSMILEAHVGIGVIGKEGRQAARNSDYAIPKFKHLKKMLLVHGHFYYIRISELVQYFFYKNVCFIFPQFLYQFFCGFSQQTLYDTAYLTLYNISFTSLPILLYSLMEQHVGIDVLKRDPTLYRDVAKNALLRWRVFIYWTLLGLFDALVFFFGAYFVFENTTVTSNGQIFGNWTFGTLVFTVMVFTVTLKLALDTHYWTWINHFVIWGSLLFYVVFSLLWGGVIWPFLNYQRMYYVFIQMLSSGPAWLAIVLLVTISLLPDVLKKVLCRQLWPTATERVQTKSQCLSVEQSTIFMLSQTSSSLSF

SEQ ID NO: 38236 - protein, 1191 aa, Homo sapiens
MDCSLVRTLVHRYCAGEENWVDSRTIYVGHREPPPGAEAYIPQRYPDNRIVSSKYTFWNFIPKNLFEQFRRVANFYFLIIFLVQLIIDTPTSPVTSGLPLFFVITVTAIKQGYEDWLRHKADNAMNQCPVHFIQHGKLVRKQSRKLRVGDIVMVKEDETFPCDLIFLSSNRGDGTCHVTTASLDGESSHKTHYAVQDTKGFHTEEDIGGLHATIECEQPQPDLYKFVGRINVYSDLNDPVVRPLGSENLLLRGATLKNTEKIFGVAIYTGMETKMALNYQSKSQKRSAVEKSMNAFLIVYLCILISKALINTVLKYMWQSEPFRDEPWYNQKTESERQRNLFLKAFTDFLAFMVLFNYIIPVSMYVTVEMQKFLGSYFITWDEDMFDEETGEGPLVNTSDLNEELGQVEYIFTDKTGTLTENNMEFKECCIEGHVYVPHVICNGQVLPESSGIDMIDSSPSVNGREREELFFRALCLCHTVQVKDDDSVDGPRKSPDGGKSCVYISSSPDEVALVEGVQRLGFTYLRLKDNYMEILNRENHIERFELLEILSFDSVRRRMSVIVKSATGEIYLFCKGADSSIFPRVIEGKVDQIRARVERNAVEGLRTLCVAYKRLIQEEYEGICKLLQAAKVALQDREKKLAEAYEQIEKDLTLLGATAVEDRLQEKAADTIEALQKAGIKVWVLTGDKMETAAATCYACKLFRRNTQLLELTTKRIEEQSLHDVLFELSKTVLRHSGSLTRDNLSGLSADMQDYGLIIDGAALSLIMKPREDGSSGNYRELFLEICRSCSAVLCCRMAPLQKAQIVKLIKFSKEHPITLAIGDGANDVSMILEAHVGIGVIGKEGRQAARNSDYAIPKFKHLKKMLLVHGHFYYIRISELVQYFFYKNVCFIFPQFLYQFFCGFSQQTLYDTAYLTLYNISFTSLPILLYSLMEQHVGIDVLKRDPTLYRDVAKNALLRWRVFIYWTLLGLFDALVFFFGAYFVFENTTVTSNGQIFGNWTFGTLVFTVMVFTVTLKLALDTHYWTWINHFVIWGSLLFYVVFSLLWGGVIWPFLNYQRMYYVFIQMLSSGPAWLAIVLLVTISLLPDVLKKVLCRQLWPTATERVQNGCAQPRDRDSEFTPLASLQSPGYQSTCPSAAWYSSHSQQVTLAAWKEKVSTEPPPILGGSHHHCSSIPSHSCPRSRVGMLV

SEQ ID NO: 38237 - protein, 1134 aa, Homo sapiens; identical to SEQ ID NO: 38235

SEQ ID NO: 38238 - protein, 935 aa, Homo sapiens
  VARIANT 1: note = MOD_RES - Any amino acid
XYVGHREPPPGAEAYIPQRYPDNRIVSSKYTFWNFIPKNLFEQFRRVANFYFLIIFLVQLIIDTPTSPVTSGLPLFFVITVTAIKQGYEDWLRHKADNAMNQCPVHFIQHGKLVRKQSRKLRVGDIVMVKEDETFPCDLIFLSSNRGDGTCHVTTASLDGESSHKTHYAVQDTKGFHTEEDIGGLHATIECEQPQPDLYKFVGRINVYSDLNDPVVRPLGSENLLLRGATLKNTEKIFGVAIYTGMETKMALNYQSKSQKRSAVEKSMNAFLIVYLCILISKALINTVLKYMWQSEPFRDEPWYNQKTESERQRNLFLKAFTDFLAFMVLFNYIIPVSMYVTVEMQKFLGSYFITWDEDMFDEETGEGPLVNTSDLNEELGQVEYIFTDKTGTLTENNMEFKECCIEGHVYVPHVICNGQVLPESSGIDMIDSSPSVNGREREELFFRALCLCHTVQVKDDDSVDGPRKSPDGGKSCVYISSSPDEVALVEGVQRLGFTYLRLKDNYMEILNRENHIERFELLEILSFDSVRRRMSVIVKSATGEIYLFCKGADSSIFPRVIEGKVDQIRARVERNAVEGLRTLCVAYKRLIQEEYEGICKLLQAAKVALQDREKKLAEAYEQIEKDLTLLGATAVEDRLQEKAADTIEALQKAGIKVWVLTGDKMETAAATCYACKLFRRNTQLLELTTKRIEEQSLHDVLFELSKTVLRHSGSLTRDNLSGLSADMQDYGLIIDGAALSLIMKPREDGSSGNYRELFLEICRSCSAVLCCRMAPLQKAQIVKLIKFSKEHPITLAIGDGANDVSMILEAHVGIGVIGKEGRQAARNSDYAIPKFKHLKKMLLVHGHFYYIRISELVQYFFYKNVCFIFPQFLYQFFCGFSQQTLYDTAYLTLYNISFTSLPILLYSLMEQHVGIDVLKRDPTLYRYHPPNSLS

SEQ ID NO: 38239 - protein, 372 aa, Homo sapiens
MSVIVKSATGEIYLFCKGADSSIFPRVIEGKVDQIRARVERNAVEGLRTLCVAYKRLIQEEYEGICKLLQAAKVALQDREKKLAEAYEQIEKDLTLLGATAVEDRLQEKAADTIEALQKAGIKVWVLTGDKMETAAATCYACKLFRRNTQLLELTTKRIEEQSLHDVLFELSKTVLRHSGSLTRDNLSGLSADMQDYGLIIDGAALSLIMKPREDGSSGNYRELFLEICRSCSAVLCCRMAPLQKAQIVKLIKFSKEHPITLAIGDGANDVSMILEAHVGIGVIGKEGRQAARNSDYAIPKFKHLKKMLLVHGHFYYIRISELVQYFFYKNVCFIFPQFLYQFFCGFSQQGRRQECPAALARVHLLDAPGTV

SEQ ID NO: 38240 - protein, 352 aa, Homo sapiens
  VARIANT 1: note = MOD_RES - Any amino acid
XSIFPRVIEGKVDQIRARVERNAVEGLRTLCVAYKRLIQEEYEGICKLLQAAKVALQDREKKLAEAYEQIEKDLTLLGATAVEDRLQEKAADTIEALQKAGIKVWVLTGDKMETAAATCYACKLFRRNTQLLELTTKRIEEQSLHDVLFELSKTVLRHSGSLTRDNLSGLSADMQDYGLIIDGAALSLIMKPREDGSSGNYRELFLEICRSCSAVLCCRMAPLQKAQIVKLIKFSKEHPITLAIGDGANDVSMILEAHVGIGVIGKEGRQAARNSDYAIPKFKHLKKMLLVHGHFYYIRISELVQYFFYKNVCFIFPQFLYQFFCGFSQQGRRQECPAALARVHLLDAPGTV

SEQ ID NO: 38241 - protein, 1134 aa, Homo sapiens; identical to SEQ ID NO: 38235

SEQ ID NO: 38242 - protein, 1177 aa, Homo sapiens
MWRWIRQQLGFDPPHQSDTRTIYVANRFPQNGLYTPQKFIDNRIISSKYTVWNFVPKNLFEQFRRVANFYFLIIFLVQLMIDTPTSPVTSGLPLFFVITVTAIKQGYEDWLRHNSDNEVNGAPVYVVRSGGLVKTRSKNIRVGDIVRIAKDEIFPADLVLLSSDRLDGSCHVTTASLDGETNLKTHVAVPETALLQTVANLDTLVAVIECQQPEADLYRFMGRMIITQQMEEIVRPLGPESLLLRGARLKNTKEIFGVAVYTGMETKMALNYKSKSQKRSAVEKSMNTFLIIYLVILISEAVISTILKYTWQAEEKWDEPWYNQKTEHQRNSSKILRFISDFLAFLVLYNFIIPISLYVTVEMQKFLGSFFIGWDLDLYHEESDQKAQVNTSDLNEELGQVEYVFTDKTGTLTENEMQFRECSINGMKYQEINGRLVPEGPTPDSSEGNLSYLSSLSHLNNLSHLTTSSSFRTSPENETELIKEHDLFFKAVSLCHTVQISNVQTDCTGDGPWQSNLAPSQLEYYASSPDEKALVEAAARIGIVFIGNSEETMEVKTLGKLERYKLLHILEFDSDRRRMSVIVQAPSGEKLLFAKGAESSILPKCIGGEIEKTRIHVDEFALKGLRTLCIAYRKFTSKEYEEIDKRIFEARTALQQREEKLAAVFQFIEKDLILLGATAVEDRLQDKVRETIEALRMAGIKVWVLTGDKHETAVSVSLSCGHFHRTMNILELINQKSDSECAEQLRQLARRITEDHVIQHGLVVDGTSLSLALREHEKLFMEVCRNCSAVLCCRMAPLQKAKVIRLIKISPEKPITLAVGDGANDVSMIQEAHVGIGIMGKEGRQAARNSDYAIARFKFLSKLLFVHGHFYYIRIATLVQYFFYKNVCFITPQFLYQFYCLFSQQTLYDSVYLTLYNICFTSLPILIYSLLEQHVDPHVLQNKPTLYRDISKNRLLSIKTFLYWTILGFSHAFIFFFGSYLLIGKDTSLLGNGQMFGNWTFGTLVFTVMVITVTVKMALETHFWTWINHLVTWGSIIFYFVFSLFYGGILWPFLGSQNMYFVFIQLLSSGSAWFAIILMVVTCLFLDIIKKVFDRHLHPTSTEKAQLTETNAGIKCLDSMCCFPEGEAACASVGRMLERVIGRCSPTHISRSWSASDPFYTNDRSILTLSTMDSSTC

SEQ ID NO: 38243 - protein, 104 aa, Homo sapiens
MYFVFIQLLSSGSAWFAIILMVVTCLFLDIIKKVFDRHLHPTSTEKAQMYSNTVALSDEFIALQPLSRARNQLSKLRWKKIRVQSAQHMNLLKASTEGRTVGTC

SEQ ID NO: 38244 - protein, 1500 aa, Homo sapiens
MDPSMGVNSVTISVEGMTCNSCVWTIEQQIGKVNGVHHIKVSLEEKNATIIYDPKLQTPKTLQEAIDDMGFDAVIHNPDPLPVLTDTLFLTVTASLTLPWDHIQSTLLKTKGVTDIKIYPQKRTVAVTIIPSIVNANQIKELVPELSLDTGTLEKKSGACEDHSMAQAGEVVLKMKVEGMTCHSCTSTIEGKIGKLQGVQRIKVSLDNQEATIVYQPHLISVEEMKKQIEAMGFPAFVKKQPKYLKLGAIDVERLKNTPVKSSEGSQQRSPSYTNDSTATFIIDGMHCKSCVSNIESTLSALQYVSSIVVSLENRSAIVKYNASSVTPESLRKAIEAVSPGLYRVSITSEVESTSNSPSSSSLQKIPLNVVSQPLTQETVINIDGMTCNSCVQSIEGVISKKPGVKSIRVSLANSNGTVEYDPLLTSPETLRGAIEDMGFDATLSDTNEPLVVIAQPSSEMPLLTSTNEFYTKGMTPVQDKEEGKNSSKCYIQVTGMTCASCVANIERNLRREEGIYSILVALMAGKAEVRYNPAVIQPPMIAEFIRELGFGATVIENADEGDGVLELVVRGMTCASCVHKIESSLTKHRGILYCSVALATNKAHIKYDPEIIGPRDIIHTIESLGFEASLVKKDRSASHLDHKREIRQWRRSFLVSLFFCIPVMGLMIYMMVMDHHFATLHHNQNMSKEEMINLHSSMFLERQILPGLSVMNLLSFLLCVPVQFFGGWYFYIQAYKALKHKTANMDVLIVLATTIAFAYSLIILLVAMYERAKVNPITFFDTPPMLFVFIALGRWLEHIAKGKTSEALAKLISLQATEATIVTLDSDNILLSEEQVDVELVQRGDIIKVVPGGKFPVDGRVIEGHSMVDESLITGEAMPVAKKPGSTVIAGSINQNGSLLICATHVGADTTLSQIVKLVEEAQTSKAPIQQFADKLSGYFVPFIVFVSIATLLVWIVIGFLNFEIVETYFPGYNRSISRTETIIRFAFQASITVLCIACPCSLGLATPTAVMVGTGVGAQNGILIKGGEPLEMAHKVKVVVFDKTGTITHGTPVVNQVKVLTESNRISHHKILAIVGTAESNSEHPLGTAITKYCKQELDTETLGTCIDFQVVPGCGISCKVTNIEGLLHKNNWNIEDNNIKNASLVQIDASNEQSSTSSSMIIDAQISNALNAQQYKVLIGNREWMIRNGLVINNDVNDFMTEHERKGRTAVLVAVDDELCGLIAIADTVKPEAELAIHILKSMGLEVVLMTGDNSKTARSIASQVGITKVFAEVLPSHKVAKVKQLQEEGKRVAMVGDGINDSPALAMANVGIAIGTGTDVAIEAADVVLIRNDLLDVVASIDLSRETVKRIRINFVFALIYNLVGIPIAAGVFMPIGLVLQPWMGSAAMAASSVSVVLSSLFLKLYRKPTYESYELPARSQIGQKSPSEISVHVGIDDTSRNSPKLGLLDRIVNYSRASINSLLSDKRSLNSVVTSEPDKHSLLVGDFREDDDTAL

SEQ ID NO: 38245 - protein, 1422 aa, Homo sapiens
MDPSMGVNSVTISVEGMTCNSCVWTIEQQIGKVNGVHHIKVSLEEKNATIIYDPKLQTPKTLQEAIDDMGFDAVIHNPDPLPVLTDTLFLTVTASLTLPWDHIQSTLLKTKGVTDIKIYPQKRTVAVTIIPSIVNANQIKELVPELSLDTGTLEKKSGACEDHSMAQAGEVVLKMKVEGMTCHSCTSTIEGKIGKLQGVQRIKVSLDNQEATIVYQPHLISVEEMKKQIEAMGFPAFVKKQPKYLKLGAIDVERLKNTPVKSSEGSQQRSPSYTNDSTATFIIDGMHCKSCVSNIESTLSALQYVSSIVVSLENRSAIVKYNASSVTPESLRKAIEAVSPGLYRVSITSEVESTSNSPSSSSLQKIPLNVVSQPLTQETVINIDGMTCNSCVQSIEGVISKKPGVKSIRVSLANSNGTVEYDPLLTSPETLRGAIEDMGFDATLSDTNEPLVVIAQPSSEMPLLTSTNEFYTKGMTPVQDKEEGKNSSKCYIQVTGMTCASCVANIERNLRREEGIYSILVALMAGKAEVRYNPAVIQPPMIAEFIRELGFGATVIENADEGDGVLELVVRGMTCASCVHKIESSLTKHRGILYCSVALATNKAHIKYDPEIIGPRDIIHTIESLGFEASLVKKDRSASHLDHKREIRQWRRSFLVSLFFCIPVMGLMIYMMVMDHHFATLHHNQNMSKEEMINLHSSMFLERQILPGLSVMNLLSFLLCVPVQGKTSEALAKLISLQATEATIVTLDSDNILLSEEQVDVELVQRGDIIKVVPGGKFPVDGRVIEGHSMVDESLITGEAMPVAKKPGSTVIAGSINQNGSLLICATHVGADTTLSQIVKLVEEAQTSKAPIQQFADKLSGYFVPFIVFVSIATLLVWIVIGFLNFEIVETYFPGYNRSISRTETIIRFAFQASITVLCIACPCSLGLATPTAVMVGTGVGAQNGILIKGGEPLEMAHKVKVVVFDKTGTITHGTPVVNQVKVLTESNRISHHKILAIVGTAESNSEHPLGTAITKYCKQELDTETLGTCIDFQVVPGCGISCKVTNIEGLLHKNNWNIEDNNIKNASLVQIDASNEQSSTSSSMIIDAQISNALNAQQYKVLIGNREWMIRNGLVINNDVNDFMTEHERKGRTAVLVAVDDELCGLIAIADTVKPEAELAIHILKSMGLEVVLMTGDNSKTARSIASQVGITKVFAEVLPSHKVAKVKQLQEEGKRVAMVGDGINDSPALAMANVGIAIGTGTDVAIEAADVVLIRNDLLDVVASIDLSRETVKRIRINFVFALIYNLVGIPIAAGVFMPIGLVLQPWMGSAAMAASSVSVVLSSLFLKLYRKPTYESYELPARSQIGQKSPSEISVHVGIDDTSRNSPKLGLLDRIVNYSRASINSLLSDKRSLNSVVTSEPDKHSLLVGDFREDDDTAL

SEQ ID NO: 38246 - protein, 87 aa, Homo sapiens
ECNEEIKMDPSMGVNSVTISVEGMTCNSCVWTIEQQIGKVNGVHHIKVSLEEKNATIIFYAHWFGFAALDGICSNGCFICFCSTFFS

SEQ ID NO: 38247 - protein, 503 aa, Homo sapiens
MDPSMGVNSVTISVEGMTCNSCVWTIEQQIGKVNGVHHIKVKVVVFDKTGTITHGTPVVNQVKVLTESNRISHHKILAIVGTAESNSEHPLGTAITKYCKQELDTETLGTCIDFQVVPGCGISCKVTNIEGLLHKNNWNIEDNNIKNASLVQIDASNEQSSTSSSMIIDAQISNALNAQQYKVLIGNREWMIRNGLVINNDVNDFMTEHERKGRTAVLVAVDDELCGLIAIADTVKPEAELAIHILKSMGLEVVLMTGDNSKTARSIASQVGITKVFAEVLPSHKVAKVKQLQEEGKRVAMVGDGINDSPALAMANVGIAIGTGTDVAIEAADVVLIRNDLLDVVASIDLSRETVKRIRINFVFALIYNLVGIPIAAGVFMPIGLVLQPWMGSAAMAASSVSVVLSSLFLKLYRKPTYESYELPARSQIGQKSPSEISVHVGIDDTSRNSPKLGLLDRIVNYSRASINSLLSDKRSLNSVVTSEPDKHSLLVGDFREDDDTAL

SEQ ID NO: 38248 - protein, 682 aa, Homo sapiens
RNQECNEEIKMDPSMGVNSVTISVEGMTCNSCVWTIEQQIGKVNGVHHIKVSLEEKNATIIYDPKLQTPKTLQEAIDDMGFDAVIHNPDPLPVLTDTLFLTVTASLTLPWDHIQSTLLKTKGVTDIKIYPQKRTVAVTIIPSIVNANQIKELVPELSLDTGTLEKKSGACEDHSMAQAGEVVLKMKVEGMTCHSCTSTIEGKIGKLQGVQRIKVSLDNQEATIVYQPHLISVEEMKKQIEAMGFPAFVKKQPKYLKLGAIDVERLKNTPVKSSEGSQQRSPSYTNDSTATFIIDGMHCKSCVSNIESTLSALQYVSSIVVSLENRSAIVKYNASSVTPESLRKAIEAVSPGLYRVSITSEVESTSNSPSSSSLQKIPLNVVSQPLTQETVINIDGMTCNSCVQSIEGVISKKPGVKSIRVSLANSNGTVEYDPLLTSPETLRGAIEDMGFDATLSDTNEPLVVIAQPSSEMPLLTSTNEFYTKGMTPVQDKEEGKNSSKCYIQVTGMTCASCVANIERNLRREEGIYSILVALMAGKAEVRYNPAVIQPPMIAEFIRELGFGATVIENADEGDGVLELVVRGMTCASCVHKIESSLTKHRGILYCSVALATNKAHIKYDPEIIGPRDIIHTIEVSAKNLCFCVLTYLISTPVNHFWFASDRGNEKKSNSFEHFKQDLSQNLM

SEQ ID NO: 38249 - protein, 274 aa, Homo sapiens [sequence omitted]

SEQ ID NO: 38250 - protein, 181 aa, Homo sapiens
MRPSGTCASCGSDPPPPTQVPSSRNDCGSTVPDNPFVRTLPHTTMSGHQLPPAGTQRPGPAACLVPGSLPSLPSQPGPWGALGTAAAEGMSCSNTRTALEFALFPKEMLLGSWYGWGLSLYRRGRCQDSAHPEEDTCPHGEGAPAQAGESVPSQQLCHHPAGNWGGLYWVIGKAFSLAWNC

SEQ ID NO: 38251 - protein, 213 aa, Homo sapiens
MRVRGPARLIASGARLLLRMLSALPGWGPAHLQRPLLGPASCLGILRPAMTAHSFALPVIIFTTFWGLVGIAGPWFVPKGPNRGVIITMLVATAVCCYLLCPALGMTVAPLSLTTPSSGPSPTQLCLVTSSLLLAPRDPDPQGLPGSWKSSQSSQPARALGSPGHSSGRGDVLLQYPHCSGVCPLSQGDAAGELVWVGSFPLQTGQMPGLSPS

SEQ ID NO: 38252 - protein, 164 aa, Homo sapiens
MTAHSFALPVIIFTTFWGLVGIAGPWFVPKGPNRGVIITMLVATAVCCYLLCPALGMTVAPLSLTTPSSGPSPTQLCLVTSSLLLAPRDPDPQGLPGSWKSSQSSQPARALGSPGHSSGRGDVLLQYPHCSGVCPLSQGDAAGELVWVGSFPLQTGQMPGLSPS

SEQ ID NO: 38253 - protein, 130 aa, Homo sapiens
MRVRGPARLIASGARLLLRMLSALPGWGPAHLQRPLLGPASCLGILRPAMTAHSFALPVIIFTTFWGLVGIAGPWFVPKGPNRGVIITMLVATAVCCYLFWLIAILAQLNPLFGPQLKNETIWYVRFLWE

SEQ ID NO: 38254 - protein, 81 aa, Homo sapiens
MTAHSFALPVIIFTTFWGLVGIAGPWFVPKGPNRGVIITMLVATAVCCYLFWLIAILAQLNPLFGPQLKNETIWYVRFLWE

SEQ ID NO: 38255 - protein, 187 aa, Homo sapiens
MTAHSFALPVIIFTTFWGLVGIAGPWFVPKGPNRGVIITMLVATAVCCYLFWLIAILAQLNPLFGPQLKNETIWCPALGMTVAPLSLTTPSSGPSPTQLCLVTSSLLLAPRDPDPQGLPGSWKSSQSSQPARALGSPGHSSGRGDVLLQYPHCSGVCPLSQGDAAGELVWVGSFPLQTGQMPGLSPS

SEQ ID NO: 38256 - protein, 118 aa, Homo sapiens
MASQSQGIQQLLQAEKRAAEKVSEARKRKNRRLKQAKEEAQAEIEQYRLQREKEFKAKEAAALGSRGSCSTEVEKETQEKMTILQTYFRQNRDEVLDNLLAFVCDIRPEIHENYRING

SEQ ID NO: 38257 - protein, 118 aa, Homo sapiens
MASQSQGIQQLLQAEKRAAEKVADARKRKARRLKQAKEEAQMEVEQYRREREHEFQSKQQAAMGSQGNLSAEVEQATRRQVQGMQSSQQRNRERVLAQLLGMVCDVRPQVHPNYRISA

SEQ ID NO: 38258 - protein, 78 aa, Homo sapiens
MASQSQGIQQLLQAEKRAAEKVADARKRKARRLKQATRRQVQGMQSSQQRNRERVLAQLLGMVCDVRPQVHPNYRISA

SEQ ID NO: 38259 - protein, 118 aa, Homo sapiens; identical to SEQ ID NO: 38257

SEQ ID NO: 38260 - protein, 158 aa, Homo sapiens
GGQQHAVPCPHGGPGGQGQPRAEAAGTGQGHRGGHRPGAVVGAAQHLHRGLGVAGGGPGPGPAVLQTRKARRLKQAKEEAQMEVEQYRREREHEFQSKQQAAMGSQGNLSAEVEQATRRQVQGMQSSQQRNRERVLAQLLGMVCDVRPQVHPNYRISA

SEQ ID NO: 38261 - protein, 78 aa, Homo sapiens; identical to SEQ ID NO: 38258

SEQ ID NO: 38262 - protein, 78 aa, Homo sapiens; identical to SEQ ID NO: 38258

SEQ ID NO: 38263 - protein, 118 aa, Homo sapiens; identical to SEQ ID NO: 38257

SEQ ID NO: 38264 - protein, 78 aa, Homo sapiens; identical to SEQ ID NO: 38258

SEQ ID NO: 38265 - protein, 118 aa, Homo sapiens; identical to SEQ ID NO: 38257

SEQ ID NO: 38266 - protein, 78 aa, Homo sapiens; identical to SEQ ID NO: 38258

SEQ ID NO: 38267 - protein, 78 aa, Homo sapiens; identical to SEQ ID NO: 38258

SEQ ID NO: 38268 - protein, 118 aa, Homo sapiens; identical to SEQ ID NO: 38257

SEQ ID NO: 38269 - protein, 78 aa, Homo sapiens; identical to SEQ ID NO: 38258

SEQ ID NO: 38270 - protein, 118 aa, Homo sapiens; identical to SEQ ID NO: 38257

SEQ ID NO: 38271 - protein, 118 aa, Homo sapiens; identical to SEQ ID NO: 38257

SEQ ID NO: 38272 - protein, 77 aa, Homo sapiens
MEVEQYRREREHEFQSKQQAAMGSQGNLSAEVEQATRRQVQGMQSSQQRNRERVLAQLLGMVCDVRPQVHPNYRISA

SEQ ID NO: 38273 - protein, 115 aa, Homo sapiens
VEPGIQQLLQAEKRAAEKVADARKRKARRLKQAKEEAQMEVEQYRREREHEFQSKQQAAMGSQGNLSAEVEQATRRQVQGMQSSQQRNRERVLAQLLGMVCDVRPQVHPNYRISA

SEQ ID NO: 38274 - protein, 155 aa, Homo sapiens
MSESKSGPEYASFFAVMGASAAMVFSALGAAYGTAKSGTGIAAMSVMRPEQIMKSIIPVVMAGIIAIYGLVVAVLIANSLNDDISLYKSFLQLGAGLSVGLSGLAAGFAIGIVGDAGVRGTAQQPRLFVGMILILIFAEVLGLYGLIVALILSTK

SEQ ID NO: 38275 - protein, 158 aa, Homo sapiens
MWSNLGIGLAISLSVVGAAWGIYITGSSIIGGGVKAPRIKTKNLVSIIFCEAVAIYGIIMAIVISNMAEPFSATDPKAIGHRNYHAGYSMFGAGLTVGLSNLFCGVCVGIVGSGAALADAQNPSLFVKILIVEIFGSAIGLFGVIVAILQTSRVKMGD

SEQ ID NO: 38276 - protein, 42 aa, Homo sapiens
VGSGAALADAQNPSLFVKILIVEIFGSLASLGSSSQFFRPPE

SEQ ID NO: 38277 - protein, 252 aa, Homo sapiens
MTGLALLYSGVFVAFWACALAVGEAGSWRAGAASRPSWPGRNSAGKWPAGNTGPPRALHPRLWGLAPARASDSDKGDPDFQLLEEGFLTETSPFMWSNLGIGLAISLSVVGAAWGIYITGSSIIGGGVKAPRIKTKNLVSIIFCEAVAIYGIIMAIVISNMAEPFSATDPKAIGHRNYHAGYSMFGAGLTVGLSNLFCGVCVGIVGSGAALADAQNPSLFVKILIVEIFGSAIGLFGVIVAILQTSRVKMGD

SEQ ID NO: 38278 - protein, 205 aa, Homo sapiens
MTGLALLYSGVFVAFWACALAVGVCYTIFDLGFRFDVAWFLTETSPFMWSNLGIGLAISLSVVGAAWGIYITGSSIIGGGVKAPRIKTKNLVSIIFCEAVAIYGIIMAIVISNMAEPFSATDPKAIGHRNYHAGYSMFGAGLTVGLSNLFCGVCVGIVGSGAALADAQNPSLFVKILIVEIFGSAIGLFGVIVAILQTSRVKMGD

SEQ ID NO: 38279 - protein, 86 aa, Homo sapiens
MWSNLGIGLAISLSVVGAAWGIYITGSSIIGGGVKAPRIKTKNLVSIIFCEAVAIYGIIMAIVISNMAEPFSATDPKAIGHRNYHA

SEQ ID NO: 38280 - protein, 158 aa, Homo sapiens; identical to SEQ ID NO: 38275

SEQ ID NO: 38281 - protein, 261 aa, Homo sapiens
MTGLALLYSGVFVAFWACALAVGVCYTIFDLGFRFDVAWFLTETSPFMWSNLGIGLAISLSVVGAAWGIYITGSSIIGGGVKAPRIKTKNLVSIIFCEAVAIYGIIMAIVISNMAEPFSATDPKAIGHRNYHAGYSMFGAGLTVGLSNLFCGVCVGIVGSGAALADAQNPSLFVKILIVEIFGSAIGLFGVIVAILQVMNPLGKPLCPCPQPSLTLLLEKLKCSPSLPITIDSPKQLPPPHFHLLVFSYRGSLFLSLIWCH

SEQ ID NO: 38282 - protein, 226 aa, Homo sapiens
MALSDADVQKQIKHMMAFIEQEANEKAEEIDAKAEEEFNIEKGRLVQTQRLKIMEYYEKKEKQIEQQKKIQMSNLMNQARLKVLRARDDLITDLLNEAKQRLSKVVKDTTRYQVLLDGLVLQGLYQLLEPRMIVRCRKQDFPLVKAAVQKAIPMYKIATKNDVDVQIDQESYLPEDIAGGVEIYNGDRKIKVSNTLESRLDLIAQQMMPEVRGALFGANANRKFLD

SEQ ID NO: 38283 - protein, 196 aa, Homo sapiens
MALSDADVQKQIKHMMAFIEQEANEKAEEIDAKAEEEFNIEKGRLVQTQRLKIMEYYEKKEKQIEQQKKIQMSNLMNQARLKVLRARDDLITGLYQLLEPRMIVRCRKQDFPLVKAAVQKAIPMYKIATKNDVDVQIDQESYLPEDIAGGVEIYNGDRKIKVSNTLESRLDLIAQQMMPEVRGALFGANANRKFLD

SEQ ID NO: 38284 - protein, 204 aa, Homo sapiens
MALSDADVQKQAEEEFNIEKGRLVQTQRLKIMEYYEKKEKQIEQQKKIQMSNLMNQARLKVLRARDDLITDLLNEAKQRLSKVVKDTTRYQVLLDGLVLQGLYQLLEPRMIVRCRKQDFPLVKAAVQKAIPMYKIATKNDVDVQIDQESYLPEDIAGGVEIYNGDRKIKVSNTLESRLDLIAQQMMPEVRGALFGANANRKFLD

SEQ ID NO: 38285 - protein, 351 aa, Homo sapiens
MSFFPELYFNVDNGYLEGLVRGLKAGVLSQADYLNLVQCETLEDLKLHLQSTDYGNFLANEASPLTVSVIDDRLKEKMVVEFRHMRNHAYEPLASFLDFITYSYMIDNVILLITGTLHQRSIAELVPKCHPLGSFEQMEAVNIAQTPAELYNAILVDTPLAAFFQDCISEQDLDEMNIEIIRNTLYKAYLESFYKFCTLLGGTTADAMCPILEFEADRRAFIITINSFGTELSKEDRAKLFPHCGRLYPEGLAQLARADDYEQVKNVADYYPEYKLLFEGAGSNPGDKTLEDRFFEHEVKLNKLAFLNQFHFGVFYAFVKLKEQECRNIVWIAECIAQRHRAKIDNYIPIF

SEQ ID NO: 38286 - protein, 274 aa, Homo sapiens
MVVEFRHMRNHAYEPLASFLDFITYSYMIDNVILLITGTLHQRSIAELVPKCHPLGSFEQMEAVNIAQTPAELYNAILVDTPLAAFFQDCISEQDLDEMNIEIIRNTLYKAYLESFYKFCTLLGGTTADAMCPILEFEADRRAFIITINSFGTELSKEDRAKLFPHCGRLYPEGLAQLARADDYEQVKNVADYYPEYKLLFEGAGSNPGDKTLEDRFFEHEVKLNKLAFLNQFHFGVFYAFVKLKEQECRNIVWIAECIAQRHRAKIDNYIPIF

SEQ ID NO: 38287 - protein, 392 aa, Homo sapiens
MSFFPELYFNVDNGYLEGLVRGLKAGVLSQADYLNLVQCETLEDLKLHLQSTDYGNFLANEASPLTVSVIDDRLKEKMVVEFRHMRNHAYEPLASFLDFITQESEAGTPEGPGNMPKLGSRPSPGHRPPFLRVSLLPWPPSSYSYMIDNVILLITGTLHQRSIAELVPKCHPLGSFEQMEAVNIAQTPAELYNAILVDTPLAAFFQDCISEQDLDEMNIEIIRNTLYKAYLESFYKFCTLLGGTTADAMCPILEFEADRRAFIITINSFGTELSKEDRAKLFPHCGRLYPEGLAQLARADDYEQVKNVADYYPEYKLLFEGAGSNPGDKTLEDRFFEHEVKLNKLAFLNQFHFGVFYAFVKLKEQECRNIVWIAECIAQRHRAKIDNYIPIF

SEQ ID NO: 38288 - protein, 382 aa, Homo sapiens
MTEFWLISAPGEKTCQQTWEKLHAATSKNNNLAVTSKFNIPDLKVGTLDVLVGLSDELAKLDAFVEGVVKKVAQYMADVLEDSKDKVQENLLANGVDLVTYITRFQWDMAKYPIKQSLKNISEIIAKGVTQIDNDLKSRASAYNNLKGNLQNLERKNAGSLLTRSLAEIVKKDDFVLDSEYLVTLLVVVPKLNHNDWIKQYETLAEMVVPRSSNVLSEDQDSYLCNVTLFRKAVDDFRHKARENKFIVRDFQYNEEEMKADKEEMNRLSTDKKKQFGPLVRWLKVNFSEAFIAWIHVKALRVFVESVLRYGLPVNFQAMLLQPNKKTLKKLREVLHELYKHLDSSAAAIIDAPMDIPGLNLSQQEYYPYVYYKIDCNLLEFK

SEQ ID NO: 38289 - protein, 382 aa, Homo sapiens; identical to SEQ ID NO: 38288

SEQ ID NO: 38290 - protein, 350 aa, Homo sapiens
MAVFVVLLALVAGVLGNEFSILKSPGSVVFRNGNWPIPGERIPDVAALSMGFSVKEDLSWPGLAVGNLFHRPRATVMVMVKGVNKLALPPGSVISYPLENAVPFSLDSVANSIHSLFSEETPVVLQLAPSEERVYMVGKANSVFEDLSVTLRQLRNRLFQENSVLSSLPLNSLSRNNEVDLLFLSELQVLHDISSLLSRHKHLAKDHSPDLYSLELAGLDEIGKRYGEDSEQFRDASKILVDALQKFADDMYSLYGGNAVVELVTVKSFDTSLIRKTRTILEAKQAKNPASPYNLAYKYNFEYSVVFNMVLWIMIALALAVIITSYNIWNMDPGYDSIIYRMTNQKIRMD

SEQ ID NO: 38291 - protein, 243 aa, Homo sapiens
  VARIANT 1: note = MOD_RES - Any amino acid
XCPAGPFRVAPQCCGRRGTMAVFVVLLALVAGVLGNEFSILKSPGSVVFRNGNWPIPGERIPDVAALSMGFSVKEDLSWPGLAVGNLFHRPRATVMVMVKGVNKLALPPGSVISYPLENVDLLFLSELQVLHDISSLLSRHKHLAKDHSPDLYSLELAGLDEIGKRYGEDSEQFRDASKILVDALQKFADDMYSLYGGNAVVELVTVKSFDTSLIRKTRTILEAKQAKNPASPYNLAYKYNFE

SEQ ID NO: 38292 - protein, 203 aa, Homo sapiens
ESERVTSSRCGCRPCPAGPFRVAPQCCGRRGTMAVFVVLLALVAGVLGNEFSILKSPGSVVFRNGNWPIPGERIPDVAALSMGFSVKEDLSWPGLAVGNLFHRPRATVMVMVKGVNKLALPPGSVISYPLENRVYMVGKANSVFEDLSVTLRQLRNRLFQENSVLSSLPLNSLSRNNEVDLLFLSELQVLHDISSLLSRHKHL

SEQ ID NO: 38293 - protein, 259 aa, Homo sapiens
  VARIANT 1: note = MOD_RES - Any amino acid
XVPPARSVSPRSAAAAAAPWLCLSCSWRWWRDLSWPGLAVGNLFHRPRATVMVMVKGVNKLALPPGSVISYPLENAVPFSLDSVANSIHSLFSEETPVVLQLAPSEERVYMVGKANSVFEDLSVTLRQLRNRLFQENSVLSSLPLNSLSRNNEVDLLFLSELQVLHDISSLLSRHKHLAKDHSPDLYSLELAGLDEIGKRYGEDSEQFRDASKILVDALQKFADDMYSLYGGNAVVELVTVKSFDTSLIRKTRTILEAK

SEQ ID NO: 38294 - protein, 318 aa, Homo sapiens
MAVFVVLLALVAGVLGNEFSILKSPGSVVFRNGNWPIPGERIPDVAALSMGFSVKEDLSWPGLAVGNLFHRPRATVMVMVKGVNKLALPPGSVISYPLENRVYMVGKANSVFEDLSVTLRQLRNRLFQENSVLSSLPLNSLSRNNEVDLLFLSELQVLHDISSLLSRHKHLAKDHSPDLYSLELAGLDEIGKRYGEDSEQFRDASKILVDALQKFADDMYSLYGGNAVVELVTVKSFDTSLIRKTRTILEAKQAKNPASPYNLAYKYNFEYSVVFNMVLWIMIALALAVIITSYNIWNMDPGYDSIIYRMTNQKIRMD

SEQ ID NO: 38295 - protein, 272 aa, Homo sapiens
MAVFVVLLALVAGVLGNEFSILKSPGSVVFRNGNWPIPGERIPDVAALSMGFSVKEDLSWPGLAVGNLFHRPRATVMVMVKGVNKLALPPGSVISYPLENVDLLFLSELQVLHDISSLLSRHKHLAKDHSPDLYSLELAGLDEIGKRYGEDSEQFRDASKILVDALQKFADDMYSLYGGNAVVELVTVKSFDTSLIRKTRTILEAKQAKNPASPYNLAYKYNFEYSVVFNMVLWIMIALALAVIITSYNIWNMDPGYDSIIYRMTNQKIRMD

SEQ ID NO: 38296 - protein, 165 aa, Homo sapiens
MAVFVVLLALVAGVLGNEFSILKSPGSVVFRNGNWPIPGERIPDVAALSMGFSVKEDLSWPGLAVGNLFHRPRATVMVMVKGVNKLALPPGSVISYPLENAVPFSLDSVANSIHSLFSEETPVVLQLAPSEERVYMVGTMKLTCSFFLNCKCYMIFQACCLVISI

SEQ ID NO: 38297 - protein, 274 aa, Homo sapiens
MVMVKGVNKLALPPGSVISYPLENAVPFSLDSVANSIHSLFSEETPVVLQLAPSEERVYMVGKANSVFEDLSVTLRQLRNRLFQENSVLSSLPLNSLSRNNEVDLLFLSELQVLHDISSLLSRHKHLAKDHSPDLYSLELAGLDEIGKRYGEDSEQFRDASKILVDALQKFADDMYSLYGGNAVVELVTVKSFDTSLIRKTRTILEAKQAKNPASPYNLAYKYNFEYSVVFNMVLWIMIALALAVIITSYNIWNMDPGYDSIIYRMTNQKIRMD

SEQ ID NO: 38298 - protein, 838 aa, Homo sapiens
MGELFRSEEMTLAQLFLQSEAAYCCVSELGELGKVQFRDLNPDVNVFQRKFVNEVRRCEEMDRKLRFVEKEIRKANIPIMDTGENPEVPFPRDMIDLEANFEKIENELKEINTNQEALKRNFLELTELKFILRKTQQFFDEAELHHQQMADPDLLEESSSLLEPSEMGRGTPLRLGFVAGVINRERIPTFERMLWRVCRGNVFLRQAEIENPLEDPVTGDYVHKSVFIIFFQGDQLKNRVKKICEGFRASLYPCPETPQERKEMASGVNTRIDDLQMVLNQTEDHRQRVLQAAAKNIRVWFIKVRKMKAIYHTLNLCNIDVTQKCLIAEVWCPVTDLDSIQFALRRGTEHSGSTVPSILNRMQTNQTPPTYNKTNKFTYGFQNIVDAYGIGTYREINPAPYTIITFPFLFAVMFGDFGHGILMTLFAVWMVLRESRILSQKNENEMFSTVFSGRYIILLMGVFSMYTGLIYNDCFSKSLNIFGSSWSVRPMFTYNWTEETLRGNPVLQLNPALPGVFGGPYPFGIDPIWNIATNKLTFLNSFKMKMSVILGIIHMLFGVSLSLFNHIYFKKPLNIYFGFIPEIIFMTSLFGYLVILIFYKWTAYDAHTSENAPSLLIHFINMFLFSYPESGYSMLYSGQKGIQCFLVVVALLCVPWMLLFKPLVLRRQYLRRKHLGTLNFGGIRVGNGPTEEDAEIIQHDQLSTHSEDADEFDFGDTMVHQAIHTIEYCLGCISNTASYLRLWALSLAHAQLSEVLWTMVIHIGLSVKSLAGGLVLFFFFTAFATLTVAILLIMEGLSAFLHALRLHWVEFQNKFYSGTGFKFLPFSFEHIREGKFEE

SEQ ID NO: 38299 - protein, 837 aa, Homo sapiens
MGELFRSEEMTLAQLFLQSEAAYCCVSELGELGKVQFRDLNPDVNVFQRKFVNEVRRCEEMDRKLRFVEKEIRKANIPIMDTGENPEVPFPRDMIDLEANFEKIENELKEINTNQEALKRNFLELTELKFILRKTQQFFDEMADPDLLEESSSLLEPSEMGRGTPLRLGFVAGVINRERIPTFERMLWRVCRGNVFLRQAEIENPLEDPVTGDYVHKSVFIIFFQGDQLKNRVKKICEGFRASLYPCPETPQERKEMASGVNTRIDDLQMVLNQTEDHRQRVLQAAAKNIRVWFIKVRKMKAIYHTLNLCNIDVTQKCLIAEVWCPVTDLDSIQFALRRGTEHSGSTVPSILNRMQTNQTPPTYNKTNKFTYGFQNIVDAYGIGTYREINPAPYTIITFPFLFAVMFGDFGHGILMTLFAVWMVLRESRILSQKNENEMFSTVFSGRYIILLMGVFSMYTGLIYNDCFSKSLNIFGSSWSVRPMFTYNWTEETLRGNPVLQLNPALPGVFGGPYPFGIDPIWNIATNKLTFLNSFKMKMSVILGIIHMLFGVSLSLFNHIYFKKPLNIYFGFIPEIIFMTSLFGYLVILIFYKWTAYDAHTSENAPSLLIHFINMFLFSYPESGYSMLYSGQKGIQCFLVVVALLCVPWMLLFKPLVLRRQYLRRKHLGTLNFGGIRVGNGPTEEDAEIIQHDQLSTHSEDADEPSEDEVFDFGDTMVHQAIHTIEYCLGCISNTASYLRLWALSLAHAQLSEVLWTMVIHIGLSVKSLAGGLVLFFFFTAFATLTVAILLIMEGLSAFLHALRLHWVEFQNKFYSGTGFKFLPFSFEHIREGKFEE

SEQ ID NO: 38300 - protein, 831 aa, Homo sapiens
MGELFRSEEMTLAQLFLQSEAAYCCVSELGELGKVQFRDLNPDVNVFQRKFVNEVRRCEEMDRKLRFVEKEIRKANIPIMDTGENPEVPFPRDMIDLEANFEKIENELKEINTNQEALKRNFLELTELKFILRKTQQFFDEMADPDLLEESSSLLEPSEMGRGTPLRLGFVAGVINRERIPTFERMLWRVCRGNVFLRQAEIENPLEDPVTGDYVHKSVFIIFFQGDQLKNRVKKICEGFRASLYPCPETPQERKEMASGVNTRIDDLQMVLNQTEDHRQRVLQAAAKNIRVWFIKVRKMKAIYHTLNLCNIDVTQKCLIAEVWCPVTDLDSIQFALRRGTEHSGSTVPSILNRMQTNQTPPTYNKTNKFTYGFQNIVDAYGIGTYREINPAPYTIITFPFLFAVMFGDFGHGILMTLFAVWMVLRESRILSQKNENEMFSTVFSGRYIILLMGVFSMYTGLIYNDCFSKSLNIFGSSWSVRPMFTYNWTEETLRGNPVLQLNPALPGVFGGPYPFGIDPIWNIATNKLTFLNSFKMKMSVILGIIHMLFGVSLSLFNHIYFKKPLNIYFGFIPEIIFMTSLFGYLVILIFYKWTAYDAHTSENAPSLLIHFINMFLFSYPESGYSMLYSGQKGIQCFLVVVALLCVPWMLLFKPLVLRRQYLRRKHLGTLNFGGIRVGNGPTEEDAEIIQHDQLSTHSEDADEFDFGDTMVHQAIHTIEYCLGCISNTASYLRLWALSLAHAQLSEVLWTMVIHIGLSVKSLAGGLVLFFFFTAFATLTVAILLIMEGLSAFLHALRLHWVEFQNKFYSGTGFKFLPFSFEHIREGKFEE

SEQ ID NO: 38301 - protein, 788 aa, Homo sapiens
MGELFRSEEMTLAQLFLQSEAAYCCVSELGELGKVQFRDLNPDVNVFQRKFVNEVRRCEEMDRKLRFVEKEIRKANIPIMDTGENPEVPFPRDMIDLEMADPDLLEESSSLLEPSEMGRGTPLRLGFVAGVINRERIPTFERMLWRVCRGNVFLRQAEIENPLEDPVTGDYVHKSVFIIFFQGDQLKNRVKKICEGFRASLYPCPETPQERKEMASGVNTRIDDLQMVLNQTEDHRQRVLQAAAKNIRVWFIKVRKMKAIYHTLNLCNIDVTQKCLIAEVWCPVTDLDSIQFALRRGTEHSGSTVPSILNRMQTNQTPPTYNKTNKFTYGFQNIVDAYGIGTYREINPAPYTIITFPFLFAVMFGDFGHGILMTLFAVWMVLRESRILSQKNENEMFSTVFSGRYIILLMGVFSMYTGLIYNDCFSKSLNIFGSSWSVRPMFTYNWTEETLRGNPVLQLNPALPGVFGGPYPFGIDPIWNIATNKLTFLNSFKMKMSVILGIIHMLFGVSLSLFNHIYFKKPLNIYFGFIPEIIFMTSLFGYLVILIFYKWTAYDAHTSENAPSLLIHFINMFLFSYPESGYSMLYSGQKGIQCFLVVVALLCVPWMLLFKPLVLRRQYLRRKHLGTLNFGGIRVGNGPTEEDAEIIQHDQLSTHSEDADEFDFGDTMVHQAIHTIEYCLGCISNTASYLRLWALSLAHAQLSEVLWTMVIHIGLSVKSLAGGLVLFFFFTAFATLTVAILLIMEGLSAFLHALRLHWVEFQNKFYSGTGFKFLPFSFEHIREGKFEE

SEQ ID NO: 38302 - protein, 483 aa, Homo sapiens
MQTNQTPPTYNKTNKFTYGFQNIVDAYGIGTYREINPAPYTIITFPFLFAVMFGDFGHGILMTLFAVWMVLRESRILSQKNENEMFSTVFSGRYIILLMGVFSMYTGLIYNDCFSKSLNIFGSSWSVRPMFTYNWTEETLRGNPVLQLNPALPGVFGGPYPFGIDPIWNIATNKLTFLNSFKMKMSVILGIIHMLFGVSLSLFNHIYFKKPLNIYFGFIPEIIFMTSLFGYLVILIFYKWTAYDAHTSENAPSLLIHFINMFLFSYPESGYSMLYSGQKGIQCFLVVVALLCVPWMLLFKPLVLRRQYLRRKHLGTLNFGGIRVGNGPTEEDAEIIQHDQLSTHSEDADEPSEDEVFDFGDTMVHQAIHTIEYCLGCISNTASYLRLWALSLAHAQLSEVLWTMVIHIGLSVKSLAGGLVLFFFFTAFATLTVAILLIMEGLSAFLHALRLHWVEFQNKFYSGTGFKFLPFSFEHIREGKFEE

SEQ ID NO: 38303 - protein, 837 aa, Homo sapiens
MGELFRSEEMTLAQLFLQSEAAYCCVSELGELGKVQFRDLNPDVNVFQRKFVNEVRRCEEMDRKLRFVEKEIRKANIPIMDTGENPEVPFPRDMIDLEANFEKIENELKEINTNQEALKRNFLELTELKFILRKTQQFFDEMADPDLLEESSSLLEPSEMGRGTPLRLGFVAGVINRERIPTFERMLWRVCRGNVFLRQAEIENPLEDPVTGDYVHKSVFIIFFQGDQLKNRVKKICEGFRASLYPCPETPQERKEMASGVNTRIDDLQMVLNQTEDHRQRVLQAAAKNIRVWFIKVRKMKAIYHTLNLCNIDVTQKCLIAEVWCPVTDLDSIQFALRRGTEHSGSTVPSILNRMQTNQTPPTYNKTNKFTYGFQNIVDAYGIGTYREINPAPYTIITFPFLFAVMFGDFGHGILMTLFAVWMVLRESRILSQKNENEMFSTVFSGRYIILLMGVFSMYTGLIYNDCFSKSLNIFGSSWSVRPMFTYNWTEETLRGNPVLQLNPALPGVFGGPYPFGIDPIWNIATNKLTFLNSFKMKMSVILGIIHMLFGVSLSLFNHIYFKKPLNIYFGFIPEIIFMTSLFGYLVILIFYKWTAYDAHTSENAPSLLIHFINMFLFSYPESGYSMLYSGQKGIQCFLVVVALLCVPWMLLFKPLVLRRQYLRRKHLGTLNFGGIRVGNGPTEEDAEIIQHDQLSTHSEDADEPSTSGQFDFGDTMVHQAIHTIEYCLGCISNTASYLRLWALSLAHAQLSEVLWTMVIHIGLSVKSLAGGLVLFFFFTAFATLTVAILLIMEGLSAFLHALRLHWVEFQNKFYSGTGFKFLPFSFEHIREGKFEE

SEQ ID NO: 38304 - protein, 856 aa, Homo sapiens
MGSLFRSETMCLAQLFLQSGTAYECLSALGEKGLVQFRDLNQNVSSFQRKFVGEVKRCEELERILVYLVQEINRADIPLPEGEASPPAPPLKQVLEMQEQLQKLEVELREVTKNKEKLRKNLLELIEYTHMLRVTKTFVKRNVEFEPTYEEFPSLESDSLLDYSCMQRLGAKLGFVSGLINQGKVEAFEKMLWRVCKGYTIVSYAELDESLEDPETGEVIKWYVFLISFWGEQIGHKVKKICDCYHCHVYPYPNTAEERREIQEGLNTRIQDLYTVLHKTEDYLRQVLCKAAESVYSRVIQVKKMKAIYHMLNMCSFDVTNKCLIAEVWCPEADLQDLRRALEEGSRESGATIPSFMNIIPTKETPPTRIRTNKFTEGFQNIVDAYGVGSYREVNPALFTIITFPFLFAVMFGDFGHGFVMFLFALLLVLNENHPRLNQSQEIMRMFFNGRYILLLMGLFSVYTGLIYNDCFSKSVNLFGSGWNVSAMYSSSHPPAEHKKMVLWNDSVVRHNSILQLDPSIPGVFRGPYPLGIDPIWNLATNRLTFLNSFKMKMSVILGIIHMTFGVILGIFNHLHFRKKFNIYLVSIPELLFMLCIFGYLIFMIFYKWLVFSAETSRVAPSILIEFINMFLFPASKTSGLYTGQEYVQRVLLVVTALSVPVLFLGKPLFLLWLHNGRSCFGVNRSGYTLIRKDSEEEVSLLGSQDIEEGNHQVEDGCREMACEEFNFGEILMTQVIHSIEYCLGCISNTASYLRLWALSLAHAQLSDVLWAMLMRVGLRVDTTYGVLLLLPVIALFAVLTIFILLIMEGLSAFLHAIRLHWVEFQNKFYVGAGTKFVPFSFSLLSSKFNNDDSVA

SEQ ID NO: 38305 - protein, 372 aa, Homo sapiens
MGSLFRSETMCLAQLFLQSGTAYECLSALGEKGLVQFRDLNQNVSSFQRKFVGEVKRCEELERILVYLVQEINRADIPLPEGEASPPAPPLKQVLEMQEQLQKLEVELREVTKNKEKLRKNLLELIEYTHMLRVTKTFVKRNVEFEPTYEEFPSLESDSLLDYSCMQRLGAKLGFVSGLINQGKVEAFEKMLWRVCKGYTIVSYAELDESLEDPETGEVIKWYVFLISFWGEQIGHKVKKICDCYHCHVYPYPNTAEERREIQEGLNTRIQDLYTVLHKTEDYLRQVLCKAAESVYSRVIQVKKMKAIYHMLNMCSFDVTNKCLIAEVWCPEADLQDLRRALEEGSVRLPSSPLPGTEERLMELINSEKKRK

SEQ ID NO: 38306 - protein, 840 aa, Homo sapiens
MVSVFRSEEMCLSQLFLQVEAAYCCVAELGELGLVQFKDLNMNVNSFQRKFVNEVRRCESLERILRFLEDEMQNEIVVQLLEKSPLTPLPREMITLETVLEKLEGELQEANQNQQALKQSFLELTELKYLLKKTQDFFETETNLADDFFTEDTSGLLELKAVPAYMTGKLGFIAGVINRERMASFERLLWRICRGNVYLKFSEMDAPLEDPVTKEEIQKNIFIIFYQGEQLRQKIKKICDGFRATVYPCPEPAVERREMLESVNVRLEDLITVITQTESHRQRLLQEAAANWHSWLIKVQKMKAVYHILNMCNIDVTQQCVIAEIWFPVADATRIKRALEQGMELSGSSMAPIMTTVQSKTAPPTFNRTNKFTAGFQNIVDAYGVGSYREINPAPYTIITFPFLFAVMFGDCGHGTVMLLAALWMILNERRLLSQKTDNEIWNTFFHGRYLILLMGIFSIYTGLIYNDCFSKSLNIFGSSWSVQPMFRNGTWNTHVMEESLYLQLDPAIPGVYFGNPYPFGIDPIWNLASNKLTFLNSYKMKMSVILGIVQMVFGVILSLFNHIYFRRTLNIILQFIPEMIFILCLFGYLVFMIIFKWCCFDVHVSQHAPSILIHFINMFLFNYSDSSNAPLYKHQQEVQSFFVVMALISVPWMLLIKPFILRASHRKSQLQASRIQEDATENIEGDSSSPSSRSGQRTSADTHGALDDHGEEFNFGDVFVHQAIHTIEYCLGCISNTASYLRLWALSLAHAQLSEVLWTMVMNSGLQTRGWGGIVGVFIIFAVFAVLTVAILLIMEGLSAFLHALRLHWVEFQNKFYVGDGYKFSPFSFKHILDGTAEE

SEQ ID NO: 38307 - protein, 840 aa, Homo sapiens; identical to SEQ ID NO: 38306

SEQ ID NO: 38308 - protein, 840 aa, Homo sapiens; identical to SEQ ID NO: 38306

SEQ ID NO: 38309 - protein, 1035 aa, Homo sapiens
MGKAENYELYSVELGPGPGGDMAAKMSKKKKAGGGGGKRKEKLENMKKEMEINDHQLSVAELEQKYQTSATKGLSASLAAELLLRDGPNALRPPRGTPEYVKFARQLAGGLQCLMWVAAAICLIAFAIQASEGDLTTDDNLYLAIALIAVVVVTGCFGYYQEFKSTNIIASFKNLVPQQATVIRDGDKFQINADQLVVGDLVEMKGGDRVPADIRILAAQGCKVDNSSLTGESEPQTRSPECTHESPLETRNIAFFSTMCLEGTVQGLVVNTGDRTIIGRIASLASGVENEKTPIAIEIEHFVDIIAGLAILFGATFFIVAMCIGYTFLRAMVFFMAIVVAYVPEGLLATVTVCLSLTAKRLASKNCVVKNLEAVETLGSTSVICSDKTGTLTQNRMTVSHLWFDNHIHTADTTEDQSGQTFDQSSETWRALCRVLTLCNRAAFKSGQDAVPVPKRIVIGDASETALLKFSELTLGNAMGYRDRFPKVCEIPFNSTNKFQLSIHTLEDPRDPRHLLVMKGAPERVLERCSSILIKGQELPLDEQWREAFQTAYLSLGGLGERVLGFCQLYLNEKDYPPGYAFDVEAMNFPSSGLCFAGLVSMIDPPRATVPDAVLKCRTAGIRVIMVTGDHPITAKAIAASVGIISEGSETVEDIAARLRVPVDQVNRKDARACVINGMQLKDMDPSELVEALRTHPEMVFARTSPQQKLVIVESCQRLGAIVAVTGDGVNDSPALKKADIGVAMGIAGSDAAKNAADMILLDDNFASIVTGVEQGRLIFDNLKKSIAYTLTKNIPELTPYLIYITVSVPLPLGCITILFIELCTDIFPSVSLAYEKAESDIMHLRPRNPKRDRLVNEPLAAYSYFQIGAIQSFAGFTDYFTAMAQEGWFPLLCVGLRAQWEDHHLQDLQDSYGQEWTFGQRLYQQYTCYTVFFISIEVCQIADVLIRKTRRLSAFQQGFFRNKILVIAIVFQVCIGCFLCYCPGMPNIFNFMPIRFQWWLVPLPYGILIFVYDEIRKLGVRCCPGSWWDQELYY

SEQ ID NO: 38310 - protein, 291 aa, Homo sapiens
MAALQEKKTCGQRMEEFQRYCWNPDTGQMLGRTLSRWVWISLYYVAFYVVMTGLFALCLYVLMQTVDPYTPDYQDQLRSPGVTLRPDVYGEKGLEIVYNVSDNRTWADLTQTLHAFLAGYSPAAQEDSINCTSEQYFFQESFRAPNHTKFSCKFTADMLQNCSGLADPNFGFEEGKPCFIIKMNRIVKFLPSNGSAPRVDCAFLDQPRELGQPLQVKYYPPNGTFSLHYFPYYGKKAQPHYSNPLVAAKLLNIPRNAEVAIVCKVMAEHVTFNNPHDPYEGKVEFKLKIEK

SEQ ID NO: 38311 - protein, 1045 aa, Homo sapiens
MHQKTPEIYSVELSGTKDIVKTDKGDGKEKYRGLKNNCLELKKKNHKEEFQKELHLDDHKLSNRELEEKYGTDIIMGLSSTRAAELLARDGPNSLTPPKQTPEIVKFLKQMVGGFSILLWVGAFLCWIAYGIQYSSDKSASLNNVYLGCVLGLVVILTGIFAYYQEAKSTNIMSSFNKMIPQQALVIRDSEKKTIPSEQLVVGDIVEVKGGDQIPADIRVLSSQGCRVDNSSLTGESEPQPRSSEFTHENPLETKNICFYSTTCLEASTSPVGTVTGMVINTGDRTIIGHIASLASGVGNEKTPIAIEIEHFVHIVAGVAVSIGILFFIIAVSLKYQVLDSIIFLIGIIVANVPEGLLATVTVTLSLTAKRMAKKNCLVKNLEAVETLGSTSIICSDKTGTLTQNRMTVAHLWFDNQIFVADTSEDHSNQVFDQSSRTWASLSKIITLCNRAEFKPGQENVPIMKKAVIGDASETALLKFSEVILGDVMEIRKRNRKVAEIPFNSTNKFQLSIHEMDDPHGKRFLMVMKGAPERILEKCSTIMINGEEHPLDKSTAKTFHTAYMELGGLGERVLGFCHLYLPADEFPETYSFDIDAMNFPTSNLCFVGLLSMIDPPRSTVPDAVTKCRSAGIKVIMVTGDHPITAKAIAKSVGIISANSETVEDIAHRLNIAVEQVNKRDAKAAVVTGMELKDMSSEQLDEILANYQEIVFARTSPQQKLIIVEGCQRQDAVVAVTGDGVNDSPALKKADIGIAMGIAGSDAAKNAADMVLLDDNFASIVTGVEEGRLIFDNLKKTIAYSLTKNIAELCPFLIYIIVGLPLPIGTITILFIDLGTDIIPSIALAYEKAESDIMNRKPRHKNKDRLVNQPLAVYSYLHIGLMQALGAFLVYFTVYAQEGFLPRTLINLRVEWEKDYVNDLKDSYGQEWTRYQREYLEWTGYTAFFVGILVQQIADLIIRKTRRNSIFQQGLFRNKVIWVGITSQIIIGLILSYGLGSVTALSFTMLRAQYWFVAVPHAILIWVYDEVRKLFIRLYPGSWWDKNMYY

SEQ ID NO: 38312 - protein, 1039 aa, Homo sapiens
MHQKTPEIYSVELSGTKDIVKTDKGDGKEKYRGLKNNCLELKKKNHKEEFQKELHLDDHKLSNRELEEKYGTDIIMGLSSTRAAELLARDGPNSLTPPKQTPEIVKFLKQMVGGFSILLWVGAFLCWIAYGIQYSSDKSASLNNVYLGCVLGLVVILTGIFAYYQEAKSTNIMSSFNKMIPQQALVIRDSEKKTIPSEQLVVGDIVEVKGGDQIPADIRVLSSQGCRVDNSSLTGESEPQPRSSEFTHENPLETKNICFYSTTCLEGTVTGMVINTGDRTIIGHIASLASGVGNEKTPIAIEIEHFVHIVAGVAVSIGILFFIIAVSLKYQVLDSIIFLIGIIVANVPEGLLATVTVTLSLTAKRMAKKNCLVKNLEAVETLGSTSIICSDKTGTLTQNRMTVAHLWFDNQIFVADTSEDHSNQVFDQSSRTWASLSKIITLCNRAEFKPGQENVPIMKKAVIGDASETALLKFSEVILGDVMEIRKRNRKVAEIPFNSTNKFQLSIHEMDDPHGKRFLMVMKGAPERILEKCSTIMINGEEHPLDKSTAKTFHTAYMELGGLGERVLGFCHLYLPADEFPETYSFDIDAMNFPTSNLCFVGLLSMIDPPRSTVPDAVTKCRSAGIKVIMVTGDHPITAKAIAKSVGIISANSETVEDIAHRLNIAVEQVNKRDAKAAVVTGMELKDMSSEQLDEILANYQEIVFARTSPQQKLIIVEGCQRQDAVVAVTGDGVNDSPALKKADIGIAMGIAGSDAAKNAADMVLLDDNFASIVTGVEEGRLIFDNLKKTIAYSLTKNIAELCPFLIYIIVGLPLPIGTITILFIDLGTDIIPSIALAYEKAESDIMNRKPRHKNKDRLVNQPLAVYSYLHIGLMQALGAFLVYFTVYAQEGFLPRTLINLRVEWEKDYVNDLKDSYGQEWTRYQREYLEWTGYTAFFVGILVQQIADLIIRKTRRNSIFQQGLFRNKVIWVGITSQIIIGLILSYGLGSVTALSFTMLRAQYWFVAVPHAILIWVYDEVRKLFIRLYPGSWWDKNMYY

SEQ ID NO: 38313 - protein, 1023 aa, Homo sapiens
MGKGVGRDKYEPAAVSEQGDKKGKKGKKDRDMDELKKEVSMDDHKLSLDELHRKYGTDLSRGLTSARAAEILARDGPNALTPPPTTPEWIKFCRQLFGGFSMLLWIGAILCFLAYSIQAATEEEPQNDNLYLGVVLSAVVIITGCFSYYQEAKSSKIMESFKNMVPQQALVIRNGEKMSINAEEVVVGDLVEVKGGDRIPADLRIISANGCKVDNSSLTGESEPQTRSPDFTNENPLETRNIAFFSTNCVEGTARGIVVYTGDRTVMGRIATLASGLEGGQTPIAAEIEHFIHIITGVAVFLGVSFFILSLILEYTWLEAVIFLIGIIVANVPEGLLATVTVCLTLTAKRMARKNCLVKNLEAVETLGSTSTICSDKTGTLTQNRMTVAHMWFDNQIHEADTTENQSGVSFDKTSATWLALSRIAGLCNRAVFQANQENLPILKRAVAGDASESALLKCIELCCGSVKEMRERYAKIVEIPFNSTNKYQLSIHKNPNTSEPQHLLVMKGAPERILDRCSSILLHGKEQPLDEELKDAFQNAYLELGGLGERVLGFCHLFLPDEQFPEGFQFDTDDVNFPIDNLCFVGLISMIDPPRAAVPDAVGKCRSAGIKVIMVTGDHPITAKAIAKGVGIISEGNETVEDIAARLNIPVSQVNPRDAKACVVHGSDLKDMTSEQLDDILKYHTEIVFARTSPQQKLIIVEGCQRQGAIVAVTGDGVNDSPALKKADIGVAMGIAGSDVSKQAADMILLDDNFASIVTGVEEGRLIFDNLKKSIAYTLTSNIPEITPFLIFIIANIPLPLGTVTILCIDLGTDMVPAISLAYEQAESDIMKRQPRNPKTDKLVNERLISMAYGQIGMIQALGGFFTYFVILAENGFLPIHLLGLRVDWDDRWINDVEDSYGQQWTYEQRKIVEFTCHTAFFVSIVVVQWADLVICKTRRNSVFQQGMKNKILIFGLFEETALAAFLSYCPGMGVALRMYPLKPTWWFCAFPYSLLIFVYDEVRKLIIRRRPGGWVEKETYY

SEQ ID NO: 38314 - protein, 680 aa, Homo sapiens
GKEVGRDKYEPAAVSEQGDKKGKKGKKDRDMDELKKEVSMDDHKLSLDELHRKYGTDLSRGLTSARAAEILARDGPNALTPPPTTPEWIKFCRQLFGGFSMLLWIGAILCFLAYSIQAATEEEPQNDNLYLGVVLSAVVIITGCFSYYQEAKSSKIMESFKNMVPQQALVIRNGEKMSINAEEVVVGDLVEVKGGDRIPADLRIISANGCKVDNSSLTGESEPQTRSPDFTNENPLETRNIAFFSTNCVEGTARGIVVYTGDRTVMGRIATLASGLEGGQTPIAAEIEHFIHIITGVAVFLGVSFFILSLILEYTWLEAVIFLIGIIVANVPEGLLATVTVCLTLTAKRMARKNCLVKNLEAVETLGSTSTICSDKTGTLTQNRMTVAHMWFDNQIHEADTTENQSGVSFDKTSATWLALSRIAGLCNRAVFQANQENLPILKRAVAGDASESALLKCIELCCGSVKEMRERYAKIVEIPFNSTNKYQLSIHKNPNTSEPQHLLVMKGAPERILDRCSSILLHGKEQPLDEELKDAFQNAYLELGGLGERVLGFCHLFLPDEQFPEGFQFDTDDVNFPIDNLCFVGLISMIDPPRAAVPDAVGKCRSAGIKVIMVTGDHPITAKAIAKGVGIISEGNEPMSRGKSWSSPATQPSSSVSWWCSGPTWSSVRPGGIRSSSRG

SEQ ID NO: 38315 - protein, 144 aa, Homo sapiens
MDELKKEVSMDDHKLSLDELHRKYGTDLSRGLTSARAAEILARDGPNALTPPPTTPEWIKFCRQLFGGFSMLLWIGAILCFLAYSIQAATEEEPQNDNLYLGVVLSAVVIITGCFSYYQEAKSSKIMESFKNMVPQQALVIRNG

SEQ ID NO: 38316 - protein, 992 aa, Homo sapiens
MDELKKEVSMDDHKLSLDELHRKYGTDLSRGLTSARAAEILARDGPNALTPPPTTPEWIKFCRQLFGGFSMLLWIGAILCFLAYSIQAATEEEPQNDNLYLGVVLSAVVIITGCFSYYQEAKSSKIMESFKNMVPQQALVIRNGEKMSINAEEVVVGDLVEVKGGDRIPADLRIISANGCKVDNSSLTGESEPQTRSPDFTNENPLETRNIAFFSTNCVEGTARGIVVYTGDRTVMGRIATLASGLEGGQTPIAAEIEHFIHIITGVAVFLGVSFFILSLILEYTWLEAVIFLIGIIVANVPEGLLATVTVCLTLTAKRMARKNCLVKNLEAVETLGSTSTICSDKTGTLTQNRMTVAHMWFDNQIHEADTTENQSGVSFDKTSATWLALSRIAGLCNRAVFQANQENLPILKRAVAGDASESALLKCIELCCGSVKEMRERYAKIVEIPFNSTNKYQLSIHKNPNTSEPQHLLVMKGAPERILDRCSSILLHGKEQPLDEELKDAFQNAYLELGGLGERVLGFCHLFLPDEQFPEGFQFDTDDVNFPIDNLCFVGLISMIDPPRAAVPDAVGKCRSAGIKVIMVTGDHPITAKAIAKGVGIISEGNETVEDIAARLNIPVSQVNPRDAKACVVHGSDLKDMTSEQLDDILKYHTEIVFARTSPQQKLIIVEGCQRQGAIVAVTGDGVNDSPALKKADIGVAMGIAGSDVSKQAADMILLDDNFASIVTGVEEGRLIFDNLKKSIAYTLTSNIPEITPFLIFIIANIPLPLGTVTILCIDLGTDMVPAISLAYEQAESDIMKRQPRNPKTDKLVNERLISMAYGQIGMIQALGGFFTYFVILAENGFLPIHLLGLRVDWDDRWINDVEDSYGQQWTYEQRKIVEFTCHTAFFVSIVVVQWADLVICKTRRNSVFQQGMKNKILIFGLFEETALAAFLSYCPGMGVALRMYPLKPTWWFCAFPYSLLIFVYDEVRKLIIRRRPGGWVEKETYY

SEQ ID NO: 38317 - protein, 106 aa, Homo sapiens
MDELKKEVSMDDHKLSLDELHRKYGTDLSRGLTSARAAEILARDGPNALTPPPTTPEWIKFCRQLFGGFSMLLWIGAILCFLAYSIQAATEEEPQNDNLYLGVVLS

SEQ ID NO: 38318 - protein, 157 aa, Homo sapiens
RQPRNPKTDKLVNERLISMAYGQIGMIQALGGFFTYFVILAENGFLPIHLLGLRVDWDDRWINDVEDSYGQQWTYEQRKIVEFTCHTAFFVSIVVVQWADLVICKTRRNSVFQQGMKNKILIFGLFEETALAAFLSYCPGMGVALRMYPLKTLTQYS

SEQ ID NO: 38319 - protein, 159 aa, Homo sapiens
MKRQPRNPKTDKLVNERLISMAYGQIGMIQALGGFFTYFVILAENGFLPIHLLGLRVDWDDRWINDVEDSYGQQWTYEQRKIVEFTCHTAFFVSIVVVQWADLVICKTRRNSVFQQGMKNKILIFGLFEETALAAFLSYCPGMGVALRMYPLKTLTQYS

SEQ ID NO: 38320 - protein, 1023 aa, Homo sapiens
MAFKVGRDKYEPAAVSEQGDKKGKKGKKDRDMDELKKEVSMDDHKLSLDELHRKYGTDLSRGLTSARAAEILARDGPNALTPPPTTPEWIKFCRQLFGGFSMLLWIGAILCFLAYSIQAATEEEPQNDNLYLGVVLSAVVIITGCFSYYQEAKSSKIMESFKNMVPQQALVIRNGEKMSINAEEVVVGDLVEVKGGDRIPADLRIISANGCKVDNSSLTGESEPQTRSPDFTNENPLETRNIAFFSTNCVEGTARGIVVYTGDRTVMGRIATLASGLEGGQTPIAAEIEHFIHIITGVAVFLGVSFFILSLILEYTWLEAVIFLIGIIVANVPEGLLATVTVCLTLTAKRMARKNCLVKNLEAVETLGSTSTICSDKTGTLTQNRMTVAHMWFDNQIHEADTTENQSGVSFDKTSATWLALSRIAGLCNRAVFQANQENLPILKRAVAGDASESALLKCIELCCGSVKEMRERYAKIVEIPFNSTNKYQLSIHKNPNTSEPQHLLVMKGAPERILDRCSSILLHGKEQPLDEELKDAFQNAYLELGGLGERVLGFCHLFLPDEQFPEGFQFDTDDVNFPIDNLCFVGLISMIDPPRAAVPDAVGKCRSAGIKVIMVTGDHPITAKAIAKGVGIISEGNETVEDIAARLNIPVSQVNPRDAKACVVHGSDLKDMTSEQLDDILKYHTEIVFARTSPQQKLIIVEGCQRQGAIVAVTGDGVNDSPALKKADIGVAMGIAGSDVSKQAADMILLDDNFASIVTGVEEGRLIFDNLKKSIAYTLTSNIPEITPFLIFIIANIPLPLGTVTILCIDLGTDMVPAISLAYEQAESDIMKRQPRNPKTDKLVNERLISMAYGQIGMIQALGGFFTYFVILAENGFLPIHLLGLRVDWDDRWINDVEDSYGQQWTYEQRKIVEFTCHTAFFVSIVVVQWADLVICKTRRNSVFQQGMKNKILIFGLFEETALAAFLSYCPGMGVALRMYPLKPTWWFCAFPYSLLIFVYDEVRKLIIRRRPGGWVEKETYY

SEQ ID NO: 38321 - protein, 1020 aa, Homo sapiens
MGRGAGREYSPAATTAENGGGKKKQKEKELDELKKEVAMDDHKLSLDELGRKYQVDLSKGLTNQRAQDVLARDGPNALTPPPTTPEWVKFCRQLFGGFSILLWIGAILCFLAYGIQAAMEDEPSNDNLYLGVVLAAVVIVTGCFSYYQEAKSSKIMDSFKNMVPQQALVIREGEKMQINAEEVVVGDLVEVKGGDRVPADLRIISSHGCKVDNSSLTGESEPQTRSPEFTHENPLETRNICFFSTNCVEGTARGIVIATGDRTVMGRIATLASGLEVGRTPIAMEIEHFIQLITGVAVFLGVSFFVLSLILGYSWLEAVIFLIGIIVANVPEGLLATVTVCLTLTAKRMARKNCLVKNLEAVETLGSTSTICSDKTGTLTQNRMTVAHMWFDNQIHEADTTEDQSGATFDKRSPTWTALSRIAGLCNRAVFKAGQENISVSKRDTAGDASESALLKCIELSCGSVRKMRDRNPKVAEIPFNSTNKYQLSIHEREDSPQSHVLVMKGAPERILDRCSTILVQGKEIPLDKEMQDAFQNAYMELGGLGERVLGFCQLNLPSGKFPRGFKFDTDELNFPTEKLCFVGLMSMIDPPRAAVPDAVGKCRSAGIKVIMVTGDHPITAKAIAKGVGIISEGNETVEDIAARLNIPMSQVNPREAKACVVHGSDLKDMTSEQLDEILKNHTEIVFARTSPQQKLIIVEGCQRQGAIVAVTGDGVNDSPALKKADIGIAMGISGSDVSKQAADMILLDDNFASIVTGVEEGRLIFDNLKKSIAYTLTSNIPEITPFLLFIIANIPLPLGTVTILCIDLGTDMVPAISLAYEAAESDIMKRQPRNSQTDKLVNERLISMAYGQIGMIQALGGFFTYFVILAENGFLPSRLLGIRLDWDDRTMNDLEDSYGQEWTYEQRKVVEFTCHTAFFASIVVVQWADLIICKTRRNSVFQQGMKNKILIFGLLEETALAAFLSYCPGMGVALRMYPLKVTWWFCAFPYSLLIFIYDEVRKLILRRYPGGWVEKETYY

SEQ ID NO: 38322 - protein, 1009 aa, Homo sapiens
MGRGAGREYSPAATTAENGGGKKKQKEKELDELKKEVAMDDHKLSLDELGRKYQVDLSKGLTNQRAQDVLARDGPNALTPPPTTPEWVKFCRQLFGGFSILLWIGAILCFLAYGIQAAMEDEPSNDNLYLGVVLAAVVIVTGCFSYYQEAKSSKIMDSFKNMVPQQALVIREGEKMQINAEEVVVGDLVEVKGGDRVPADLRIISSHGCKVDNSSLTGESEPQTRSPEFTHENPLETRNICFFSTNCVEGTARGIVIATGDRTVMGRIATLASGLEVGRTPIAMEIEHFIQLITGVAVFLGVSFFVLSLILGYSWLEAVIFLIGIIVANVPEGLLATVTVCLTLTAKRMARKNCLVKNLEAVETLGSTSTICSDKTGTLTQNRMTVAHMWFDNQIHEADTTEDQSGATFDKRSPTWTALSRIAGLCNRAVFKAGQENISVSKRDTAGDASESALLKCIELSCGSVRKMRDRNPKVAEIPFNSTNKYQLSIHEREDSPQSHVLVMKGAPERILDRCSTILVQGKEIPLDKEMQDAFQNAYMELGGLGERVLGFCQLNLPSGKFPRGFKFDTDELNFPTEKLCFVGLMSMIDPPRAAVPDAVGKCRSAGIKVIMVTGDHPITAKAIAKGVGIISEGNETVEDIAARLNIPMSQVNPREAKACVVHGSDLKDMTSEQLDEILKNHTEIVFARTSPQQKLIIVEGCQRQGAIVAVTGDGVNDSPALKKADIGIAMGISGSDVSKQAADMILLDDNFASIVTGVEEGRLIFDNLKKSIAYTLTSNIPEITPFLLFIIANIPLPLGTVTILCIDLGTDMVPAISLAYEAAESDIMKRQPRNSQTDKLVNERLISMAYGQIGMIQALGGFFTYFVILAENGFLPSRLLGIRLDWDDRTMNDLEDSYGQEWTYEQRKVVEFTCHTAFFASIVVVQWADLIICKTRRNSVFQQGMKNKILIFGLLEETALAAFLSYCPGMGVALRMYPLNLLIFIYDEVRKLILRRYPGGWVEKETYY

SEQ ID NO: 38323 - protein, 723 aa, Homo sapiens
MLSSALALSGALVKRLKPPNGHFILTDTHDLNTSKIEHSLFTVCLTLTAKRMARKNCLVKNLEAVETLGSTSTICSDKTGTLTQNRMTVAHMWFDNQIHEADTTEDQSGATFDKRSPTWTALSRIAGLCNRAVFKAGQENISVSKRDTAGDASESALLKCIELSCGSVRKMRDRNPKVAEIPFNSTNKYQLSIHEREDSPQSHVLVMKGAPERILDRCSTILVQGKEIPLDKEMQDAFQNAYMELGGLGERVLGFCQLNLPSGKFPRGFKFDTDELNFPTEKLCFVGLMSMIDPPRAAVPDAVGKCRSAGIKVIMVTGDHPITAKAIAKGVGIISEGNETVEDIAARLNIPMSQVNPREAKACVVHGSDLKDMTSEQLDEILKNHTEIVFARTSPQQKLIIVEGCQRQGAIVAVTGDGVNDSPALKKADIGIAMGISGSDVSKQAADMILLDDNFASIVTGVEEGRLIFDNLKKSIAYTLTSNIPEITPFLLFIIANIPLPLGTVTILCIDLGTDMVPAISLAYEAAESDIMKRQPRNSQTDKLVNERLISMAYGQIGMIQALGGFFTYFVILAENGFLPSRLLGIRLDWDDRTMNDLEDSYGQEWTYEQRKVVEFTCHTAFFASIVVVQWADLIICKTRRNSVFQQGMKNKILIFGLLEETALAAFLSYCPGMGVALRMYPLKVTWWFCAFPYSLLIFIYDEVRKLILRRYPGGWVEKETYY

SEQ ID NO: 38324 - protein, 714 aa, Homo sapiens
  VARIANT 1: note = MOD_RES - Any amino acid
XQLITGVAVFLGVSFFVLSLILGYSWLEAVIFLIGIIVANVPEGLLATVTVCLTLTAKRMARKNCLVKNLEAVETLGSTSTICSDKTGTLTQNRMTVAHMWFDNQIHEADTTEDQSGATFDKRSPTWTALSRIAGLCNRAVFKAGQENISVSKRDTAGDASESALLKCIELSCGSVRKMRDRNPKVAEIPFNSTNKYQLSIHEREDSPQSHVLVMKGAPERILDRCSTILVQGKEIPLDKEMQDAFQNAYMELGGLGERVLGFCQLNLPSGKFPRGFKFDTDELNFPTEKLCFVGLMSMIDPPRAAVPDAVGKCRSAGIKVIMVTGDHPITAKAIAKGVGIISEGNETVEDIAARLNIPMSQVNPREAKACVVHGSDLKDMTSEQLDEILKNHTEIVFARTSPQQKLIIVEGCQRQGAIVAVTGDGVNDSPALKKADIGIAMGISGSDVSKQAADMILLDDNFASIVTGVEEGRLIFDNLKKSIAYTLTSNIPEITPFLLFIIANIPLPLGTVTILCIDLGTDMVPAISLAYEAAESDIMKRQPRNSQTDKLVNERLISMAYGQIENGFLPSRLLGIRLDWDDRTMNDLEDSYGQEWTYEQRKVVEFTCHTAFFASIVVVQWADLIICKTRRNSVFQQGMKNKILIFGLLEETALAAFLSYCPGMGVALRMYPLKVTWWFCAFPYSLLIFIYDEVRKLILRRYPGGWVEKETYY

SEQ ID NO: 38325 - protein, 272 aa, Homo sapiens
MDSFKNMVPQQALVIREGEKMQINAEEVVVGDLVEVKGGDRVPADLRIISSHGCKVDNSSLTGESEPQTRSPEFTHENPLETRNICFFSTNCVEGTARGIVIATGDRTVMGRIATLASGLEVGRTPIAMEIEHFIQLITGVAVFLGVSFFVLSLILGYSWLEAVIFLIGIIVANVPEGLLATVTVCLTLTAKRMARKNCLVKNLEAVETLGSTSTICSDKTGTLTQNRMTVAHMWFDNQIHEADTTEDQSGDWVLQRGWIGLEEAEGSGVVG

SEQ ID NO: 38326 - protein, 1013 aa, Homo sapiens
MGDKKDDKDSPKKNKGKERRDLDDLKKEVAMTEHKMSVEEVCRKYNTDCVQGLTHSKAQEILARDGPNALTPPPTTPEWVKFCRQLFGGFSILLWIGAILCFLAYGIQAGTEDDPSGDNLYLGIVLAAVVIITGCFSYYQEAKSSKIMESFKNMVPQQALVIREGEKMQVNAEEVVVGDLVEIKGGDRVPADLRIISAHGCKVDNSSLTGESEPQTRSPDCTHDNPLETRNITFFSTNCVEGTARGVVVATGDRTVMGRIATLASGLEVGKTPIAIEIEHFIQLITGVAVFLGVSFFILSLILGYTWLEAVIFLIGIIVANVPEGLLATVTVCLTLTAKRMARKNCLVKNLEAVETLGSTSTICSDKTGTLTQNRMTVAHMWFDNQIHEADTTEDQSGTSFDKSSHTWVALSHIAGLCNRAVFKGGQDNIPVLKRDVAGDASESALLKCIELSSGSVKLMRERNKKVAEIPFNSTNKYQLSIHETEDPNDNRYLLVMKGAPERILDRCSTILLQGKEQPLDEEMKEAFQNAYLELGGLGERVLGFCHYYLPEEQFPKGFAFDCDDVNFTTDNLCFVGLMSMIDPPRAAVPDAVGKCRSAGIKVIMVTGDHPITAKAIAKGVGIISEGNETVEDIAARLNIPVSQVNPRDAKACVIHGTDLKDFTSEQIDEILQNHTEIVFARTSPQQKLIIVEGCQRQGAIVAVTGDGVNDSPALKKADIGVAMGIAGSDVSKQAADMILLDDNFASIVTGVEEGRLIFDNLKKSIAYTLTSNIPEITPFLLFIMANIPLPLGTITILCIDLGTDMVPAISLAYEAAESDIMKRQPRNPRTDKLVNERLISMAYGQIGMIQALGGFFSYFVILAENGFLPGNLVGIRLNWDDRTVNDLEDSYGQQWTYEQRKVVEFTCHTAFFVSIVVVQWADLIICKTRRNSVFQQGMKNKILIFGLFEETALAAFLSYCPGMDVALRMYPLKPSWWFCAFPYSFLIFVYDEIRKLILRRNPGGWVEKETYY

SEQ ID NO: 38327 - protein, 983 aa, Homo sapiens
MTEHKMSVEEVCRKYNTDCVQGLTHSKAQEILARDGPNALTPPPTTPEWVKFCRQLFGGFSILLWIGAILCFLAYGIQAGTEDDPSGDNLYLGIVLAAVVIITGCFSYYQEAKSSKIMESFKNMVPQQALVIREGEKMQVNAEEVVVGDLVEIKGGDRVPADLRIISAHGCKVDNSSLTGESEPQTRSPDCTHDNPLETRNITFFSTNCVEGTARGVVVATGDRTVMGRIATLASGLEVGKTPIAIEIEHFIQLITGVAVFLGVSFFILSLILGYTWLEAVIFLIGIIVANVPEGLLATVTVCLTLTAKRMARKNCLVKNLEAVETLGSTSTICSDKTGTLTQNRMTVAHMWFDNQIHEADTTEDQSGTSFDKSSHTWVALSHIAGLCNRAVFKGGQDNIPVLKRDVAGDASESALLKCIELSSGSVKLMRERNKKVAEIPFNSTNKYQLSIHETEDPNDNRYLLVMKGAPERILDRCSTILLQGKEQPLDEEMKEAFQNAYLELGGLGERVLGFCHYYLPEEQFPKGFAFDCDDVNFTTDNLCFVGLMSMIDPPRAAVPDAVGKCRSAGIKVIMVTGDHPITAKAIAKGVGIISEGNETVEDIAARLNIPVSQVNPRDAKACVIHGTDLKDFTSEQIDEILQNHTEIVFARTSPQQKLIIVEGCQRQGAIVAVTGDGVNDSPALKKADIGVAMGIAGSDVSKQAADMILLDDNFASIVTGVEEGRLIFDNLKKSIAYTLTSNIPEITPFLLFIMANIPLPLGTITILCIDLGTDMVPAISLAYEAAESDIMKRQPRNPRTDKLVNERLISMAYGQIGMIQALGGFFSYFVILAENGFLPGNLVGIRLNWDDRTVNDLEDSYGQQWTYEQRKVVEFTCHTAFFVSIVVVQWADLIICKTRRNSVFQQGMKNKILIFGLFEETALAAFLSYCPGMDVALRMYPLKPSWWFCAFPYSFLIFVYDEIRKLILRRNPGGWVEKETYY

SEQ ID NO: 38328 - protein, 1226 aa, Homo sapiens
MGDKKDDKDSPKKNKGKERRDLDDLKKEVAMTEHKMSVEEVCRKYNTDCVQGLTHSKAQEILARDGPNALTPPPTTPEWVKFCRQLFGGFSILLWIGAILCFLAYGIQAGTEDDPSGDNLYLGIVLAAVVIITGCFSYYQEAKSSKIMESFKNMVPQQALVIREGEKMQVNAEEVVVGDLVEIKGGDRVPADLRIISAHGCKVDNSSLTGESEPQTRSPDCTHDNPLETRNITFFSTNCVEGTARGVVVATGDRTVMGRIATLASGLEVGKTPIAIEIEHFIQLITGVAVFLGVSFFILSLILGYTWLEAVIFLIGIIVANVPEGLLATVTVCLTLTAKRMARKNCLVKNLEAVETLGSTSTICSDKTGTLTQNRMTVAHMWFDNQIHEADTTEDQSGTSFDKSSHTWVALSHIAGLCNRAVFKGGQDNIPVLKRDVAGDASESALLKCIELSSGSVKLMRERNKKVAEIPFNSTNKYQLSIHETEDPNDNRYLLVMKGAPERILDRCSTILLQGKEQPLDEEMKEAFQNAYLELGGLGERVLGFCHYYLPEEQFPKGFAFDCDDVNFTTDNLCFVGLMSMIDPPRAAVPDAVGKCRSAGIKVIMVTGDHPITAKAIAKGVGIISEGNETVEDIAARLNIPVSQVNPRDAKACVIHGTDLKDFTSEQIDEILQNHTEIVFARTSPQQKLIIVEGCQRQGAIVAVTGDGVNDSPALKKADIGVAMGIAGSDVSKQAADMILLDDNFASIVTGVEEGRLIFDNLKKSIAYTLTSNIPEITPFLLFIMANIPLPLGTITILCIDLGTDMVPAISLAYEAAESDIMKRQPRNPRTDKLVNERLISMAYGQIGMIQALGGFFSYFVILAENGFLPGNLVGIRLNWDDRTVNDLEDSYGQQWTYEQRKVVEFTCHTAFFVSIVVVQWADLIICKTRRNSVFQQGMKNKILIFGLFEETALAAFLSYCPGMDVALRMYPLKPSWWFCAFPYSFLIFVYDEIRKLILRRNPGGEGARQGSRGGRGAAGSQAAGPRLPSPCWMALPPGSHSSLSSHLSGHPLCLLTGLCLCGFLVSLPLCPSLCWAARLACLSPSLTLSLSFLLCLSRLGGEGNLLLTSAPPHRPSLPRPPGPGPPLSVPPILYSGGRSPLFLWPHLGPHPLHYLLPPPLWLASLPCPKPLSSLFSVSVSLPLLTPLSIPPAPATSLGSFLLPFSPPADAISGSGQLSNISVGRE

SEQ ID NO: 38329 - protein, 147 aa, Homo sapiens
MGSGGSDSYRIATSQDKKDDKDSPKKNKGKERRDLDDLKKEVAMTEHKMSVEEVCRKYNTDCVQGLTHSKAQEILARDGPNALTPPPTTPEWVKFCRQLFGGFSILLWIGAILCFLAYGIQAGTEDDPSGDNLYLGIVLAAVVIITG

SEQ ID NO: 38330 - protein, 682 aa, Homo sapiens
MGRIATLASGLEVGKTPIAIEIEHFIQLITGVAVFLGVSFFILSLILGYTWLEAVIFLIGIIVANVPEGLLATVTVCLTLTAKRMARKNCLVKNLEAVETLGSTSTICSDKTGTLTQNRMTVAHMWFDNQIHEADTTEDQSGTSFDKSSHTWVALSHIAGLCNRAVFKGGQDNIPVLKRDVAGDASESALLKCIELSSGSVKLMRERNKKVAEIPFNSTNKYQLSIHETEDPNDNRYLLVMKGAPERILDRCSTILLQGKEQPLDEEMKEAFQNAYLELGGLGERVLGFCHYYLPEEQFPKGFAFDCDDVNFTTDNLCFVGLMSMIDPPRAAVPDAVGKCRSAGIKVIMVTGDHPITAKAIAKGVGIISEGNETVEDIAARLNIPVSQVNPRDAKACVIHGTDLKDFTSEQIDEILQNHTEIVFARTSPQQKLIIVEGCQRQGAIVAVTGDGVNDSPALKKADIGVAMGIAGSDVSKQAADMILLDDNFASIVTGVEEGRLIFDNLKKSIAYTLTSNIPEITPFLLFIMANIPLPLGTITILCIDLGTDMVPAISLAYEAAESDIMKRQPRNPRTDKLVNERLISMAYGQIGMIQALGGFFSYFVILAENGFLPGNLVGIRLNWDDRTVNDLEDSYGQQWTYEQRKVVEFTCHTAFFVSIVVVQWADLIICKTRRTRSSSRA

SEQ ID NO: 38331 - protein, 1024 aa, Homo sapiens
MGGWEEERNRRATDKKDDKDSPKKNKGKERRDLDDLKKEVAMTEHKMSVEEVCRKYNTDCVQGLTHSKAQEILARDGPNALTPPPTTPEWVKFCRQLFGGFSILLWIGAILCFLAYGIQAGTEDDPSGDNLYLGIVLAAVVIITGCFSYYQEAKSSKIMESFKNMVPQQALVIREGEKMQVNAEEVVVGDLVEIKGGDRVPADLRIISAHGCKVDNSSLTGESEPQTRSPDCTHDNPLETRNITFFSTNCVEGTARGVVVATGDRTVMGRIATLASGLEVGKTPIAIEIEHFIQLITGVAVFLGVSFFILSLILGYTWLEAVIFLIGIIVANVPEGLLATVTVCLTLTAKRMARKNCLVKNLEAVETLGSTSTICSDKTGTLTQNRMTVAHMWFDNQIHEADTTEDQSGTSFDKSSHTWVALSHIAGLCNRAVFKGGQDNIPVLKRDVAGDASESALLKCIELSSGSVKLMRERNKKVAEIPFNSTNKYQLSIHETEDPNDNRYLLVMKGAPERILDRCSTILLQGKEQPLDEEMKEAFQNAYLELGGLGERVLGFCHYYLPEEQFPKGFAFDCDDVNFTTDNLCFVGLMSMIDPPRAAVPDAVGKCRSAGIKVIMVTGDHPITAKAIAKGVGIISEGNETVEDIAARLNIPVSQVNPRDAKACVIHGTDLKDFTSEQIDEILQNHTEIVFARTSPQQKLIIVEGCQRQGAIVAVTGDGVNDSPALKKADIGVAMGIAGSDVSKQAADMILLDDNFASIVTGVEEGRLIFDNLKKSIAYTLTSNIPEITPFLLFIMANIPLPLGTITILCIDLGTDMVPAISLAYEAAESDIMKRQPRNPRTDKLVNERLISMAYGQIGMIQALGGFFSYFVILAENGFLPGNLVGIRLNWDDRTVNDLEDSYGQQWTYEQRKVVEFTCHTAFFVSIVVVQWADLIICKTRRNSVFQQGMKNKILIFGLFEETALAAFLSYCPGMDVALRMYPLKPSWWFCAFPYSFLIFVYDEIRKLILRRNPGGWVEKETYY

SEQ ID NO: 38332 - protein, 1026 aa, Homo sapiens
MGSGGSDSYRIATSQDKKDDKDSPKKNKGKERRDLDDLKKEVAMTEHKMSVEEVCRKYNTDCVQGLTHSKAQEILARDGPNALTPPPTTPEWVKFCRQLFGGFSILLWIGAILCFLAYGIQAGTEDDPSGDNLYLGIVLAAVVIITGCFSYYQEAKSSKIMESFKNMVPQQALVIREGEKMQVNAEEVVVGDLVEIKGGDRVPADLRIISAHGCKVDNSSLTGESEPQTRSPDCTHDNPLETRNITFFSTNCVEGTARGVVVATGDRTVMGRIATLASGLEVGKTPIAIEIEHFIQLITGVAVFLGVSFFILSLILGYTWLEAVIFLIGIIVANVPEGLLATVTVCLTLTAKRMARKNCLVKNLEAVETLGSTSTICSDKTGTLTQNRMTVAHMWFDNQIHEADTTEDQSGTSFDKSSHTWVALSHIAGLCNRAVFKGGQDNIPVLKRDVAGDASESALLKCIELSSGSVKLMRERNKKVAEIPFNSTNKYQLSIHETEDPNDNRYLLVMKGAPERILDRCSTILLQGKEQPLDEEMKEAFQNAYLELGGLGERVLGFCHYYLPEEQFPKGFAFDCDDVNFTTDNLCFVGLMSMIDPPRAAVPDAVGKCRSAGIKVIMVTGDHPITAKAIAKGVGIISEGNETVEDIAARLNIPVSQVNPRDAKACVIHGTDLKDFTSEQIDEILQNHTEIVFARTSPQQKLIIVEGCQRQGAIVAVTGDGVNDSPALKKADIGVAMGIAGSDVSKQAADMILLDDNFASIVTGVEEGRLIFDNLKKSIAYTLTSNIPEITPFLLFIMANIPLPLGTITILCIDLGTDMVPAISLAYEAAESDIMKRQPRNPRTDKLVNERLISMAYGQIGMIQALGGFFSYFVILAENGFLPGNLVGIRLNWDDRTVNDLEDSYGQQWTYEQRKVVEFTCHTAFFVSIVVVQWADLIICKTRRNSVFQQGMKNKILIFGLFEETALAAFLSYCPGMDVALRMYPLKPSWWFCAFPYSFLIFVYDEIRKLILRRNPGGWVEKETYY

SEQ ID NO: 38333 - protein, 1029 aa, Homo sapiens
MGLWGKKGTVAPHDQSPRRRPKKGLIKKKMVKREKQKRNMEELKKEVVMDDHKLTLEELSTKYSVDLTKGHSHQRAKEILTRGGPNTVTPPPTTPEWVKFCKQLFGGFSLLLWTGAILCFVAYSIQIYFNEEPTKDNLYLSIVLSVVVIVTGCFSYYQEAKSSKIMESFKNMVPQQALVIRGGEKMQINVQEVVLGDLVEIKGGDRVPADLRLISAQGCKVDNSSLTGESEPQSRSPDFTHENPLETRNICFFSTNCVEGTARGIVIATGDSTVMGRIASLTSGLAVGQTPIAAEIEHFIHLITVVAVFLGVTFFALSLLLGYGWLEAIIFLIGIIVANVPEGLLATVTVCLTLTAKRMARKNCLVKNLEAVETLGSTSTICSDKTGTLTQNRMTVAHMWFDMTVYEADTTEEQTGKTFTKSSDTWFMLARIAGLCNRADFKANQEILPIAKRATTGDASESALLKFIEQSYSSVAEMREKNPKVAEIPFNSTNKYQMSIHLREDSSQTHVLMMKGAPERILEFCSTFLLNGQEYSMNDEMKEAFQNAYLELGGLGERVLGFCFLNLPSSFSKGFPFNTDEINFPMDNLCFVGLISMIDPPRAAVPDAVSKCRSAGIKVIMVTGDHPITAKAIAKGVGIISEGTETAEEVAARLKIPISKVDASAAKAIVVHGAELKDIQSKQLDQILQNHPEIVFARTSPQQKLIIVEGCQRLGAVVAVTGDGVNDSPALKKADIGIAMGISGSDVSKQAADMILLDDNFASIVTGVEEGRLIFDNLKKSIMYTLTSNIPEITPFLMFIILGIPLPLGTITILCIDLGTDMVPAISLAYESAESDIMKRLPRNPKTDNLVNHRLIGMAYGQIGMIQALAGFFTYFVILAENGFRPVDLLGIRLHWEDKYLNDLEDSYGQQWTYEQRKVVEFTCQTAFFVTIVVVQWADLIISKTRRNSLFQQGMRNKVLIFGILEETLLAAFLSYTPGMDVALRMYPLKITWWLCAIPYSILIFVYDEIRKLLIRQHPDGWVERETYY

SEQ ID NO: 38334 - protein, 165 aa, Homo sapiens
MIQALAGFFTYFVILAENGFRPVDLLGIRLHWEDKYLNDLEDSYGQQWTYEQRKVVEFTCQTAFFVTIVVVQWADLIISKTRRNSLFQQGMRNKVLIFGILEETLLAAFLSYTPGMDVALRMYPLKITWWLCAIPYSILIFVYDEIRKLLIRQHPDGWVERETYY

SEQ ID NO: 38335 - protein, 295 aa, Homo sapiens
MGKRKCSPASQSLFLFQFQKMELKFKILLFYVIFYGCLAGIFIGTIQVMLLTISEFKPTYQDRVAPPGLTQIPQIQKTEISFRPNDPKSYEAYVLNIVRFLEKYKDSAQRDDMIFEDCGDVPSEPKERGDFNHERGERKVCRFKLEWLGNCSGLNDETYGYKEGKPCIIIKLNRVLGFKPKPPKNESLETYPVMKYNPNVLPVQCTGKRDEDKDKVGNVEYFGLGNSPGFPLQYYPYYGKLLQPKYLQPLLAVQFTNLTMDTEIRIECKAYGENIGYSEKDRFQGRFDVKIEVKS

SEQ ID NO: 38336 - protein, 303 aa, Homo sapiens
MARGKAKEEGSWKKFIWNSEKKEFLGRTGGSWFKILLFYVIFYGCLAGIFIGTIQVMLLTISEFKPTYQDRVAPPGLTQIPQIQKTEISFRPNDPKSYEAYVLNIVRFLEKYKDSAQRDDMIFEDCGDVPSEPKERGDFNHERGERKVCRFKLEWLGNCSGLNDETYGYKEGKPCIIIKLNRVLGFKPKPPKNESLETYPVMKYNPNVLPVQCTGKRDEDKDKVGNVEYFGLGNSPGFPLQYYPYYGKLLQPKYLQPLLAVQFTNLTMDTEIRIECKAYGENIGYSEKDRFQGRFDVKIEVKS

SEQ ID NO: 38337 - protein, 303 aa, Homo sapiens; identical to SEQ ID NO: 38336

SEQ ID NO: 38338 - protein, 247 aa, Homo sapiens
MLLTISEFKPTYQDRVAPPGLTQIPQIQKTEISFRPNDPKSYEAYVLNIVRFLEKYKDSAQRDDMIFEDCGDVPSEPKERGDFNHERGERKVCRFKLEWLGNCSGLNDETYGYKEGKPCIIIKLNRVLGFKPKPPKNESLETYPVMKYNPNVLPVQCTGKRDEDKDKVGNVEYFGLGNSPGFPLQYYPYYGKLLQPKYLQPLLAVQFTNLTMDTEIRIECKAYGENIGYSEKDRFQGRFDVKIEVKS

SEQ ID NO: 38339 - protein, 290 aa, Homo sapiens
MVIQKEKKSCGQVVEEWKEFVWNPRTHQFMGRTGTSWAFILLFYLVFYGFLTAMFTLTMWVMLQTVSDHTPKYQDRLATPGLMIRPKTENLDVIVNVSDTESWDQHVQKLNKFLEPYNDSIQAQKNDVCRPGRYYEQPDNGVLNYPKRACQFNRTQLGNCSGIGDSTHYGYSTGQPCVFIKMNRVINFYAGANQSMNVTCAGKRDEDAENLGNFVMFPANGNIDLMYFPYYGKKFHVNYTQPLVAVKFLNVTPNVEVNVECRINAANIATDDERDKFAGRVAFKLRINKT

SEQ ID NO: 38340 - protein, 279 aa, Homo sapiens
MTKNEKKSLNQSLAEWKLFIYNPTTGEFLGRTAKSWGLILLFYLVFYGFLAALFSFTMWVMLQTLNDEVPKYRDQIPSPGLMVFPKPVTALEYTFSRSDPTSYAGYIEDLKKFLKPYTLEEQKNLTVCPDGALFEQKGPVYVACQFPISLLQACSGMNDPDFGYSQGNPCILVKMNRIIGLKPEGVPRIDCVSKNEDIPNVAVYPHNGMIDLKYFPYYGKKLHVGYLQPLVAVQVSFAPNNTGKEVTVECKIDGSANLKSQDDRDKFLGRVMFKITARA

SEQ ID NO: 38341 - protein, 193 aa, Homo sapiens
MLSEGDILFSSLLSSPSLFWPPGLILLFYLVFYGFLAALFSFTMWVMLQTLNDEVPKYRDQIPSPGLMVFPKPVTALEYTFSRSDPTSYAGYIEDLKKFLKPYTLEEQKNLTVCPDGALFEQKGPVYVACQFPISLLQACSGMNDPDFGYSQGNPCILVKMNRIIGLKPEGVPRIDCVSKTNNVKDGMKIYQM

SEQ ID NO: 38342 - protein, 712 aa, Homo sapiens
MALLAMHSWRWAAAAAAFEKRRHSAILIRPLVSVSGSGPQWRPHQLGALGTARAYQIPESLKSITWQRLGKGNSGQFLDAAKALQVWPLIEKRTCWHGHAGGGLHTDPKEGAMNIVVPFMFKYAVDSLNQMSGNMLNLSDAPNTVATMATAVLIGYGVSRAGAAFFNEVRNAVFGKVAQNSIRRIAKNVFLHLHNLDLGFHLSRQTGALSKAIDRGTRGISFVLSALVFNLLPIMFEVMLVSGVLYYKCGAQFALVTLGTLGTYTAFTVAVTRWRTRFRIEMNKADNDAGNAAIDSLLNYETVKYFNNERYEAQRYDGFLKTYETASLKSTSTLAMLNFGQSAIFSVGLTAIMVLASQGIVAGTLTVGDLVMVNGLLFQLSLPLNFLGTVYRETRQALIDMNTLFTLLKVDTQIKDKVMASPLQITPQTATVAFDNVHFEYIEGQKVLSGISFEVPAGKKVAIVGGSGSGKSTIVRLLFRFYEPQKGSIYLAGQNIQDVSLESLRRAVGVVPQDAVLFHNTIYYNLLYGNISASPEEVYAVAKLAGLHDAILRMPHGYDTQVGERGLKLSGGEKQRVAIARAILKDPPVILYDEATSSLDSITEETILGAMKDVVKHRTSIFIAHRLSTVVDADEIIVLDQGKVAERGTHHGLLANPHSIYSEMWHTQSSRVQNHDNPKWEAKKENISKEEERKKLQEEIVNSVKGCGNCSC

SEQ ID NO: 38343 - protein, 681 aa, Homo sapiens
MRLWKAVVVTLAFMSVDICVTTAIYVFSHLDRSLLEDIRHFNIFDSVLDLWAACLYRSCLLLGATIGVAKNSALGPRRLRASWLVITLVCLFVGIYAMVKLLLFSEVRRPIRDPWFWALFVWTYISLGASFLLWWLLSTVRPGTQALEPGAATEAEGFPGSGRPPPEQASGATLQKLLSYTKPDVAFLVAASFFLIVAALGETFLPYYTGRAIDGIVIQKSMDQFSTAVVIVCLLAIGSSFAAGIRGGIFTLIFARLNIRLRNCLFRSLVSQETSFFDENRTGDLISRLTSDTTMVSDLVSQNINVFLRNTVKVTGVVVFMFSLSWQLSLVTFMGFPIIMMVSNIYGKYYKRLSKEVQNALARASNTAEETISAMKTVRSFANEEEEAEVYLRKLQQVYKLNRKEAAAYMYYVWGSGLTLLVVQVSILYYGGHLVISGQMTSGNLIAFIIYEFVLGDCMESVGSVYSGLMQGVGAAEKVFEFIDRQPTMVHDGSLAPDHLEGRVDFENVTFTYRTRPHTQVLQNVSFSLSPGKVTALVGPSGSGKSSCVNILENFYPLEGGRVLLDGKPISAYDHKYLHRVISLVSQEPVLFARSITDNISYGLPTVPFEMVVEAAQKANAHGFIMELQDGYSTETGEKGAQLSGGQKQRVAMARALVRNPPVLILDEATSALDAESEYLI

SEQ ID NO: 38344 - protein, 683 aa, Homo sapiens
MRLWKAVVVTLAFMSVDICVTTAIYVFSHLDRSLLEDIRHFNIFDSVLDLWAACLYRSCLLLGATIGVAKNSALGPRRLRASWLVITLVCLFVGIYAMVKLLLFSEVRRPIRDPWFWALFVWTYISLGASFLLWWLLSTVRPGTQALEPGAATEAEGFPGSGRPPPEQASGATLQKLLSYTKPDVAFLVAASFFLIVAALGETFLPYYTGRAIDGIVIQKSMDQFSTAVVIVCLLAIGSSFAAGIRGGIFTLIFARLNIRLRNCLFRSLVSQETSFFDENRTGDLISRLTSDTTMVSDLVSQNINVFLRNTVKVTGVVVFMFSLSWQLSLVTFMGFPIIMMVSNIYGKYYKRLSKEVQNALARASNTAEETISAMKTVRSFANEEEEAEVYLRKLQQVYKLNRKEAAAYMYYVWGSGLTLLVVQVSILYYGGHLVISGQMTSGNLIAFIIYEFVLGDCMESVGSVYSGLMQGVGAAEKVFEFIDRQPTMVHDGSLAPDHLEGRVDFENVTFTYRTRPHTQVLQNVSFSLSPGKVTALVGPSGSGKSSCVNILENFYPLEGGRVLLDGKPISAYDHKYLHRVISLVSQEPVLFARSITDNISYGLPTVPFEMVVEAAQKANAHGFIMELQDGYSTETGEKGAQLSGGQKQRVAMARALVRNPPVLILDEATSALDAESEYLCAG

SEQ ID NO: 38345 - protein, 99 aa, Homo sapiens
MAAPAEPCAGQGVWNQTEPEPAATSLLSLCFLRTAGVWVPPMYLWVLGPIYLLFIHHHGRGYLRMSPLFKAKMVAAIPGSLEPGNVRGRQGTGWNLVKS

SEQ ID NO: 38346 - protein, 123 aa, Homo sapiens
MPSAGTLPWVQGIICNANNPCFRYPTPGEAPGVVGNFNKSIVARLFSDARRLLLYSQKDTSMKDMRKVLRTLQQIKKSSSNLKLQDFLVDNETFSGFLYHNLSLPKSTVDKMLRADVILHKVS

SEQ ID NO: 38347 - protein, 2261 aa, Homo sapiens
MACWPQLRLLLWKNLTFRRRQTCQLLLEVAWPLFIFLILISVRLSYPPYEQHECHFPNKAMPSAGTLPWVQGIICNANNPCFRYPTPGEAPGVVGNFNKSIVARLFSDARRLLLYSQKDTSMKDMRKVLRTLQQIKKSSSNLKLQDFLVDNETFSGFLYHNLSLPKSTVDKMLRADVILHKVFLQGYQLHLTSLCNGSKSEEMIQLGDQEVSELCGLPREKLAAAERVLRSNMDILKPILRTLNSTSPFPSKELAEATKTLLHSLGTLAQELFSMRSWSDMRQEVMFLTNVNSSSSSTQIYQAVSRIVCGHPEGGGLKIKSLNWYEDNNYKALFGGNGTEEDAETFYDNSTTPYCNDLMKNLESSPLSRIIWKALKPLLVGKILYTPDTPATRQVMAEVNKTFQELAVFHDLEGMWEELSPKIWTFMENSQEMDLVRMLLDSRDNDHFWEQQLDGLDWTAQDIVAFLAKHPEDVQSSNGSVYTWREAFNETNQAIRTISRFMECVNLNKLEPIATEVWLINKSMELLDERKFWAGIVFTGITPGSIELPHHVKYKIRMDIDNVERTNKIKDGYWDPGPRADPFEDMRYVWGGFAYLQDVVEQAIIRVLTGTEKKTGVYMQQMPYPCYVDDIFLRVMSRSMPLFMTLAWIYSVAVIIKGIVYEKEARLKETMRIMGLDNSILWFSWFISSLIPLLVSAGLLVVILKLGNLLPYSDPSVVFVFLSVFAVVTILQCFLISTLFSRANLAAACGGIIYFTLYLPYVLCVAWQDYVGFTLKIFASLLSPVAFGFGCEYFALFEEQGIGVQWDNLFESPVEEDGFNLTTSVSMMLFDTFLYGVMTWYIEAVFPGQYGIPRPWYFPCTKSYWFGEESDEKSHPGSNQKRISEICMEEEPTHLKLGVSIQNLVKVYRDGMKVAVDGLALNFYEGQITSFLGHNGAGKTTTMSILTGLFPPTSGTAYILGKDIRSEMSTIRQNLGVCPQHNVLFDMLTVEEHIWFYARLKGLSEKHVKAEMEQMALDVGLPSSKLKSKTSQLSGGMQRKLSVALAFVGGSKVVILDEPTAGVDPYSRRGIWELLLKYRQGRTIILSTHHMDEADVLGDRIAIISHGKLCCVGSSLFLKNQLGTGYYLTLVKKDVESSLSSCRNSSSTVSYLKKEDSVSQSSSDAGLGSDHESDTLTIDVSAISNLIRKHVSEARLVEDIGHELTYVLPYEAAKEGAFVELFHEIDDRLSDLGISSYGISETTLEEIFLKVAEESGVDAETSDGTLPARRNRRAFGDKQSCLRPFTEDDAADPNDSDIDPESRETDLLSGMDGKGSYQVKGWKLTQQQFVALLWKRLLIARRSRKGFFAQIVLPAVFVCIALVFSLIVPPFGKYPSLELQPWMYNEQYTFVSNDAPEDTGTLELLNALTKDPGFGTRCMEGNPIPDTPCQAGEEEWTTAPVPQTIMDLFQNGNWTMQNPSPACQCSSDKIKKMLPVCPPGAGGLPPPQRKQNTADILQDLTGRNISDYLVKTYVQIIAKSLKNKIWVNEFRYGGFSLGVSNTQALPPSQEVNDAIKQMKKHLKLAKDSSADRFLNSLGRFMTGLDTKNNVKVWFNNKGWHAISSFLNVINNAILRANLQKGENPSHYGITAFNHPLNLTKQQLSEVALMTTSVDVLVSICVIFAMSFVPASFVVFLIQERVSKAKHLQFISGVKPVIYWLSNFVWDMCNYVVPATLVIIIFICFQQKSYVSSTNLPVLALLLLLYGWSITPLMYPASFVFKIPSTAYVVLTSVNLFIGINGSVATFVLELFTDNKLNNINDILKSVFLIFPHFCLGRGLIDMVKNQAMADALERFGENRFVSPLSWDLVGRNLFAMAVEGVVFFLITVLIQYRFFIRPRPVNAKLSPLNDEDEDVRRERQRILDGGGQNDILEIKELTKIYRRKRKPAVDRICVGIPPGECFGLLGVNGAGKSSTFKMLTGDTTVTRGDAFLNKNSILSNIHEVHQNMGYCPQFDAITELLTGREHVEFFALLRGVPEKEVGKVGEWAIRKLGLVKYGEKYAGNYSGGNKRKLSTAMALIGGPPVVFLDEPTTGMDPKARRFLWNCALSVVKEGRSVVLTSHSMEECEALCTRMAIMVNGRFRCLGSVQHLKNRFGDGYTIVVRIAGSNPDLKPVQDFFGLAFPGSVLKEKHRNMLQYQLPSSLSSLARIFSILSQSKKRLHIEDYSVSQTTLDQVFVNFAKDQSDDDHLKDLSLHKNQTVVDVAVLTSFLQDEKVKESYV

SEQ ID NO: 38348 - protein, 363 aa, Homo sapiens
MACWPQLRLLLWKNLTFRRRQTCQLLLEVAWPLFIFLILISVRLSYPPYEQHECHFPNKAMPSAGTLPWVQGIICNANNPCFRYPTPGEAPGVVGNFNKSIVARLFSDARRLLLYSQKDTSMKDMRKVLRTLQQIKKSSSNLKLQDFLVDNETFSGFLYHNLSLPKSTVDKMLRADVILHKVFLQGYQLHLTSLCNGSKSEEMIQLGDQEVSELCGLPREKLAAAERVLRSNMDILKPILMDVTCDDIAHGQLTVPRSAAVAATGDAKPNMMGRETLLSICASVPKVEFHERHILKHFSFCVCVSVSLFPAKGIVSFSWASFRIWVLWKAVFWQHGESMAVWEGQLGLGLNIAFEYFTSIDVG

SEQ ID NO: 38349 - protein, 1543 aa, Homo sapiens
MNKMALASFMKGRTVIGTPDEETMDIELPKKYHEMVGVIFSDTFSYRLKFNWGYRIPVIKEHSEYTEHCWAMHGEIFCYLAKYWLKGFVAFQAAINAAIIEVTTNHSVMEELTSVIGINMKIPPFISKGEIMNEWFHFTCLVSFSSFIYFASLNVARERGKFKKLMTVMGLRESAFWLSWGLTYICFIFIMSIFMALVITSIPIVFHTGFMVIFTLYSLYGLSLIALAFLMSVLIRKPMLAGLAGFLFTVFWGCLGFTVLYRQLPLSLGWVLSLLSPFAFTAGMAQITHLDNYLSGVIFPDPSGDSYKMIATFFILAFDTLFYLIFTLYFERVLPDKDGHGDSPLFFLKSSFWSKHQNTHHEIFENEINPEHSSDDSFEPVSPEFHGKEAIRIRNVIKEYNGKTGKVEALQGIFFDIYEGQITAILGHNGAGKSTLLNILSGLSVSTEGSATIYNTQLSEITDMEEIRKNIGFCPQFNFQFDFLTVRENLRVFAKIKGIQPKEVEQEVKRIIMELDMQSIQDIIAKKLSGGQKRKLTLGIAILGDPQVLLLDEPTAGLDPFSRHRVWSLLKEHKVDRLILFSTQFMDEADILADRKVFLSNGKLKCAGSSLFLKRKWGIGYHLSLHRNEMCDTEKITSLIKQHIPDAKLTTESEEKLVYSLPLEKTNKFPDLYSDLDKCSDQGIRNYAVSVTSLNEVFLNLEGKSAIDEPDFDIGKQEKIHVTRNTGDESEMEQVLCSLPETRKAVSSAALWRRQIYAVATLRFLKLRRERRALLCLLLVLGIAFIPIILEKIMYKVTRETHCWEFSPSMYFLSLEQIPKTPLTSLLIVNNTGSNIEDLVHSLKCQDIVLEIDDFRNRNGSDDPSYNGAIIVSGDQKDYRFSVACNTKKLNCFPVLMGIVSNALMGIFNFTELIQMESTSFSRDDIVLDLGFIDGSIFLLLITNCVSPFIGMSSISDYKKNVQSQLWISGLWPSAYWCGQALVDIPLYFLILFSIHLIYYFIFLGFQLSWELMFVLVVCIIGCAVSLIFLTYVLSFIFRKWRKNNGFWSFGFFIILICVSTIMVSTQYEKLNLILCMIFIPSFTLLGYVMLLIQLDFMRNLDSLDNRINEVNKTILLTTLIPYLQSVIFLFVIRCLEMKYGNEIMNKDPVFRISPRSRETHPNPEEPEEEDEDVQAERVQAANALTAPNLEEEPVITASCLHKEYYETKKSCFSTRKKKIAIRNVSFCVKKGEVLGLLGHNGAGKSTSIKMITGCTKPTAGVVVLQGSRASVRQQHDNSLKFLGYCPQENSLWPKLTMKEHLELYAAVKGLGKEDAALSISRLVEALKLQEQLKAPVKTLSEGIKRKLCFVLSILGNPSVVLLDEPFTGMDPEGQQQMWQILQATVKNKERGTLLTTHYMSEAEAVCDRMAMMVSGTLRCIGSIQHLKNKFGRDYLLEIKMKEPTQVEALHTEILKLFPQAAWQERYSSLMAYKLPVEDVHPLSRAFFKLEAMKQTFNLEEYSLSQATLEQVFLELCKEQELGNVDDKIDTTVEWKLLPQEDP

SEQ ID NO: 38350 - protein, 466 aa, Homo sapiens
MNKMALASFMKGRTVIGTPDEETMDIELPKKYHEMVGVIFSDTFSYRLKFNWGYRIPVIKEHSEYTEHCWAMHGEIFCYLAKYWLKGFVAFQAAINAAIIEVTTNHSVMEELTSVIGINMKIPPFISKGEIMNEWFHFTCLVSFSSFIYFASLNVARERGKFKKLMTVMGLRESAFWLSWGLTYICFIFIMSIFMALVITSIPIVFHTGFMVIFTLYSLYGLSLIALAFLMSVLIRKPMLAGLAGFLFTVFWGCLGFTVLYRQLPLSLGWVLSLLSPFAFTAGMAQITHLDNYLSGVIFPDPSGDSYKMIATFFILAFDTLFYLIFTLYFERVLPDKDGHGDSPLFFLKSSFWSKHQNTHHEIFENEINPEHSSDDSFEPVSPEFHGKEAIRIRNVIKEYNGKTGKVEALQGIFFDIYEGQITAILGHNGAGKSTLLNILSGLSVSTEGKKNYNGIRHAKHSRHYC

SEQ ID NO: 38351 - protein, 92 aa, Homo sapiens
MNKMALASFMKGRTVIGTPDEETMDIELPKKYHEMVGVIFSDTFSYRLKFNWGYRIPVIKEHSEYTGHNKSFCNGGVDISYWNKYEDTTFHF

SEQ ID NO: 38352 - protein, 452 aa, Homo sapiens
MNKMALASFMKGRTVIGTPDEETMDIELPKKYHEMVGVIFSDTFSYRLKFNWGYRIPVIKEHSEYTEHCWAMHGEIFCYLAKYWLKGFVAFQAAINAAIIEVTTNHSVMEELTSVIGINMKIPPFISKGEIMNEWFHFTCLVSFSSFIYFASLNVARERGKFKKLMTVMGLRESAFWLSWGLTYICFIFIMSIFMALVITSIPIVFHTGFMVIFTLYSLYGLSLIALAFLMSVLIRKPMLAGLAGFLFTVFWGCLGFTVLYRQLPLSLGWVLSLLSPFAFTAGMAQITHLDNYLSGVIFPDPSGDSYKMIATFFILAFDTLFYLIFTLYFERVLPDKDGHGDSPLFFLKSSFWSKHQNTHHEIFENEINPEHSSDDSFEPVSPEFHGKEAIRIRNVIKEYNGKTGKVEALQGSEERLCPAAHRLRCGERLCPAAHHLGCEERPCPAATPSGN

SEQ ID NO: 38353 - protein, 2595 aa, Homo sapiens
MASLFHQLQILVWKNWLGVKRQPLWTLVLILWPVIIFIILAITRTKFPPTAKPTCYLAPRNLPSTGFFPFLQTLLCDTDSKCKDTPYGPQDLLRRKGIDDALFKDSEILRKSSNLDKDSSLSFQSTQVPERRHASLATVFPSPSSDLEIPGTYTFNGSQVLARILGLEKLLKQNSTSEDIRRELCDSYSGYIVDDAFSWTFLGRNVFNKFCLSNMTLLESSLQELNKQFSQLSSDPNNQKIVFQEIVRMLSFFSQVQEQKAVWQLLSSFPNVFQNDTSLSNLFDVLRKANSVLLVVQKVYPRFATNEGFRTLQKSVKHLLYTLDSPAQGDSDNITHVWNEDDGQTLSPSSLAAQLLILENFEDALLNISANSPYIPYLACVRNVTDSLARGSPENLRLLQSTIRFKKSFLRNGSYEDYFPPVPEVLKSKLSQLRNLTELLCESETFSLIEKSCQLSDMSFGSLCEESEFDLQLLEAAELGTEIAASLLYHDNVISKKVRDLLTGDPSKINLNMDQFLEQALQMNYLENITQLIPIIEAMLHVNNSADASEKPGQLLEMFKNVEELKEDLRRTTGMSNRTIDKLLAIPIPDNRAEIISQVFWLHSCDTNITTPKLEDAMKEFCNLSLSERSRQSYLIGLTLLHYLNIYNFTYKVFFPRKDQKPVEKMMELFIRLKEILNQMASGTHPLLDKMRSLKQMHLPRSVPLTQAMYRSNRMNTPQGSFSTISQALCSQGITTEYLTAMLPSSQRPKGNHTKDFLTYKLTKEQIASKYGIPINSTPFCFSLYKDIINMPAGPVIWAFLKPMLLGRILYAPYNPVTKAIMEKSNVTLRQLAELREKSQEWMDKSPLFMNSFHLLNQAIPMLQNTLRNPFVQVFVKFSVGLDAVELLKQIDELDILRLKLENNIDIIDQLNTLSSLTVNISSCVLYDRIQAAKTIDEMEREAKRLYKSNELFGSVIFKLPSNRSWHRGYDSGNVFLPPVIKYTIRMSLKTAQTTRSLRTKIWAPGPHNSPSHNQIYGRAFIYLQDSIERAIIELQTGRNSQEIAVQVQAIPYPCFMKDNFLTSVSYSLPIVLMVAWVVFIAAFVKKLVYEKDLRLHEYMKMMGVNSCSHFFAWLIESVGFLLVTIVILIIILKFGNILPKTNGFILFLYFSDYSFSVIAMSYLISVFFNNTNIAALIGSLIYIIAFFPFIVLVTVENELSYVLKVFMSLLSPTAFSYASQYIARYEEQGIGLQWENMYTSPVQDDTTSFGWLCCLILADSFIYFLIAWYVRNVFPGTYGMAAPWYFPILPSYWKERFGCAEVKPEKSNGLMFTNIMMQNTNPSASPEYMFSSNIEPEPKDLTVGVALHGVTKIYGSKVAVDNLNLNFYEGHITSLLGPNGAGKTTTISMLTGLFGASAGTIFVYGKDIKTDLHTVRKNMGVCMQHDVLFSYLTTKEHLLLYGSIKVPHWTKKQLHEEVKRTLKDTGLYSHRHKRVGTLSGGMKRKLSISIALIGGSRVVILDEPSTGVDPCSRRSIWDVISKNKTARTIILSTHHLDEAEVLSDRIAFLEQGGLRCCGSPFYLKEAFGDGYHLTLTKKKSPNLNANAVCDTMAVTAMIQSHLPEAYLKEDIGGELVYVLPPFSTKVSGAYLSLLRALDNGMGDLNIGCYGISDTTVEEVFLNLTKESQKNSAMSLEHLTQKKIGNSNANGISTPDDLSVSSSNFTDRDDKILTRGERLDGFGLLLKKIMAILIKRFHHTRRNWKGLIAQVILPIVFVTTAMGLGTLRNSSNSYPEIQISPSLYGTSEQTAFYANYHPSTEALVSAMWDFPGIDNMCLNTSDLQCLNKDSLEKWNTSGEPITNFGVCSCSENVQECPKFNYSPPHRRTYSSQVIYNLTGQRVENYLISTANEFVQKRYGGWSFGLPLTKDLRFDITGVPANRTLAKVWYDPEGYHSLPAYLNSLNNFLLRVNMSKYDAARHGIIMYSHPYPGVQDQEQATISSLIDILVALSILMGYSVTTASFVTYVVREHQTKAKQLQHISGIGVTCYWVTNFIYDMVFYLVPVAFSIGIIAIFKLPAFYSENNLGAVSLLLLLFGYATFSWMYLLAGLFHETGMAFITYVCVNLFFGINSIVSLSVVYFLSKEKPNDPTLELISETLKRIFLIFPQFCFGYGLIELSQQQSVLDFLKAYGVEYPNETFEMNKLGAMFVALVSQGTMFFSLRLLINESLIKKLRLFFRKFNSSHVRETIDEDEDVRAERLRVESGAAEFDLVQLYCLTKTYQLIHKKIIAVNNISIGIPAGECFGLLGVNGAGKTTIFKMLTGDIIPSSGNILIRNKTGSLGHVDSHSSLVGYCPQEDALDDLVTVEEHLYFYARVHGIPEKDIKETVHKLLRRLHLMPFKDRATSMCSYGTKRKLSTALALIGKPSILLLDEPSSGMDPKSKRHLWKIISEEVQNKCSVILTSHSMEECEALCTRLAIMVNGKFQCIGSLQHIKSRFGRGFTVKVHLKNNKVTMETLTKFMQLHFPKTYLKDQHLSMLEYHVPVTAGGVANIFDLLETNKTALNITNFLVSQTTLEEVFINFAKDQKSYETADTSSQGSTISVDSQDDQMES

SEQ ID NO: 38354 - protein, 2277 aa, Homo sapiens
MFTYIKIITSGDSDNITHVWNEDDGQTLSPSSLAAQLLILENFEDALLNISANSPYIPYLACVRNVTDSLARGSPENLRLLQSTIRFKKSFLRNGSYEDYFPPVPEVLKSKLSQLRNLTELLCESETFSLIEKSCQLSDMSFGSLCEESEFDLQLLEAAELGTEIAASLLYHDNVISKKVRDLLTGDPSKINLNMDQFLEQALQMNYLENITQLIPIIEAMLHVNNSADASEKPGQLLEMFKNVEELKEDLRRTTGMSNRTIDKLLAIPIPDNRAEIISQVFWLHSCDTNITTPKLEDAMKEFCNLSLSERSRQSYLIGLTLLHYLNIYNFTYKVFFPRKDQKPVEKMMELFIRLKEILNQMASGTHPLLDKMRSLKQMHLPRSVPLTQAMYRSNRMNTPQGSFSTISQALCSQGITTEYLTAMLPSSQRPKGNHTKDFLTYKLTKEQIASKYGIPINSTPFCFSLYKDIINMPAGPVIWAFLKPMLLGRILYAPYNPVTKAIMEKSNVTLRQLAELREKSQEWMDKSPLFMNSFHLLNQAIPMLQNTLRNPFVQVFVKFSVGLDAVELLKQIDELDILRLKLENNIDIIDQLNTLSSLTVNISSCVLYDRIQAAKTIDEMEREAKRLYKSNELFGSVIFKLPSNRSWHRGYDSGNVFLPPVIKYTIRMSLKTAQTTRSLRTKIWAPGPHNSPSHNQIYGRAFIYLQDSIERAIIELQTGRNSQEIAVQVQAIPYPCFMKDNFLTSVSYSLPIVLMVAWVVFIAAFVKKLVYEKDLRLHEYMKMMGVNSCSHFFAWLIESVGFLLVTIVILIIILKFGNILPKTNGFILFLYFSDYSFSVIAMSYLISVFFNNTNIAALIGSLIYIIAFFPFIVLVTVENELSYVLKVFMSLLSPTAFSYASQYIARYEEQGIGLQWENMYTSPVQDDTTSFGWLCCLILADSFIYFLIAWYVRNVFPGTYGMAAPWYFPILPSYWKERFGCAEVKPEKSNGLMFTNIMMQNTNPSASPEYMFSSNIEPEPKDLTVGVALHGVTKIYGSKVAVDNLNLNFYEGHITSLLGPNGAGKTTTISMLTGLFGASAGTIFVYGKDIKTDLHTVRKNMGVCMQHDVLFSYLTTKEHLLLYGSIKVPHWTKKQLHEEVKRTLKDTGLYSHRHKRVGTLSGGMKRKLSISIALIGGSRVVILDEPSTGVDPCSRRSIWDVISKNKTARTIILSTHHLDEAEVLSDRIAFLEQGGLRCCGSPFYLKEAFGDGYHLTLTKKKSPNLNANAVCDTMAVTAMIQSHLPEAYLKEDIGGELVYVLPPFSTKVSGAYLSLLRALDNGMGDLNIGCYGISDTTVEEVFLNLTKESQKNSAMSLEHLTQKKIGNSNANGISTPDDLSVSSSNFTDRDDKILTRGERLDGFGLLLKKIMAILIKRFHHTRRNWKGLIAQVILPIVFVTTAMGLGTLRNSSNSYPEIQISPSLYGTSEQTAFYANYHPSTEALVSAMWDFPGIDNMCLNTSDLQCLNKDSLEKWNTSGEPITNFGVCSCSENVQECPKFNYSPPHRRTYSSQVIYNLTGQRVENYLISTANEFVQKRYGGWSFGLPLTKDLRFDITGVPANRTLAKVWYDPEGYHSLPAYLNSLNNFLLRVNMSKYDAARHGIIMYSHPYPGVQDQEQATISSLIDILVALSILMGYSVTTASFVTYVVREHQTKAKQLQHISGIGVTCYWVTNFIYDMVFYLVPVAFSIGIIAIFKLPAFYSENNLGAVSLLLLLFGYATFSWMYLLAGLFHETGMAFITYVCVNLFFGINSIVSLSVVYFLSKEKPNDPTLELISETLKRIFLIFPQFCFGYGLIELSQQQSVLDFLKAYGVEYPNETFEMNKLGAMFVALVSQGTMFFSLRLLINESLIKKLRLFFRKFNSSHVRETIDEDEDVRAERLRVESGAAEFDLVQLYCLTKTYQLIHKKIIAVNNISIGIPAGECFGLLGVNGAGKTTIFKMLTGDIIPSSGNILIRNKTGSLGHVDSHSSLVGYCPQEDALDDLVTVEEHLYFYARVHGIPEKDIKETVHKLLRRLHLMPFKDRATSMCSYGTKRKLSTALALIGKPSILLLDEPSSGMDPKSKRHLWKIISEEVQNKCSVILTSHSMEECEALCTRLAIMVNGKFQCIGSLQHIKSRFGRGFTVKVHLKNNKVTMETLTKFMQLHFPKTYLKDQHLSMLEYHVPVTAGGVANIFDLLETNKTALNITNFLVSQTTLEEVFINFAKDQKSYETADTSSQGSTISVDSQDDQMES

SEQ ID NO: 38355 - protein, 5058 aa, Homo sapiens
MGHAGCQFKALLWKNWLCRLRNPVLFLAEFFWPCILFVILTVLRFQEPPRYRDICYLQPRDLPSCGVIPFVQSLLCNTGSRCRNFSYEGSMEHHFRLSRFQTAADPKKVNNLAFLKEIQDLAEEIHGMMDKAKNLKRLWVERSNTPDSSYGSSFFTMDLNKTEEVILKLESLHQQPHIWDFLLLLPRLHTSHDHVEDGMDVAVNLLQTILNSLISLEDLDWLPLNQTFSQVSELVLNVTISTLTFLQQHGVAVTEPVYHLSMQNIVWDPQKVQYDLKSQFGFDDLHTEQILNSSAELKEIPTDTSLEKMVCSVLSSTSEDEAEKWGHVGGCHPKWSEAKNYLVHAVSWLRVYQQVFVQWQQGSLLQKTLTGMGHSLEALRNQFEEESKPWKVVEALHTALLLLNDSLSADGPKDNHTFPKILQHLWKLQSLLQNLPQWPALKRFLQLDGALRNAIAQNLHFVQEVLICLETSANDFKWFELNQLKLEKDVFFWELKQMLAKNAVCPNGRFSEKEVFLPPGNSSIWGGLQGLLCYCNSSETSVLNKLLGSVEDADRILQEVITWHKNMSVLIPEEYLDWQELEMQLSEASLSCTRLFLLLGADPSPENDVFSSDCKHQLVSTVIFHTLEKTQFFLEQAYYWKAFKKFIRKTCEVAQYVNMQESFQNRLLAFPEESPCFEENMDWKMISDNYFQFLNNLLKSPTASISRALNFTKHLLMMEKKLHTLEDEQMNFLLSFVEFFEKLLLPNLFDSSIVPSFHSLPSLTEDILNISSLWTNHLKSLKRDPSATDAQKLLEFGNEVIWKMQTLGSHWIRKEPKNLLRFIELILFEINPKLLELWAYGISKGKRAKLENFFTLLNFSVPENEILSTSFNFSQLFHSDWPKSPAMNIDFVRLSEAIITSLHEFGFLEQEQISEALNTVYAIRNASDLFSALSEPQKQEVDKILTHIHLNVFQDKDSALLLQIYSSFYRYIYELLNIQSRGSSLTFLTQISKHILDIIKQFNFQNISKAFAFLFKTAEVLGGISNVSYCQQLLSIFNFLELQAQSFMSTEGQELEVIHTTLTGLKQLLIIDEDFRISLFQYMSQFFNSSVEDLLDNKCLISDNKHISSVNYSTSEESSFVFPLAQIFSNLSANVSVFNKFMSIHCTVSWLQMWTEIWETISQLFKFDMNVFTSLHHGFTQLLDELEDDVKVSKSCQGILPTHNVARLILNLFKNVTQANDFHNWEDFLDLRDFLVALGNALVSVKKLNLEQVEKSLFTMEAALHQLKTFPFNESTSREFLNSLLEVFIEFSSTSEYIVRNLDSINDFLSNNLTNYGEKFENIITELREAIVFLRNVSHDRDLFSCADIFQNVTECILEDGFLYVNTSQRMLRILDTLNSTFSSENTISSLKGCIVWLDVINHLYLLSNSSFSQGHLQNILGNFRDIENKMNSILKIVTWVLNIKKPLCSSNGSHINCVNIYLKDVTDFLNIVLTTVFEKEKKPKFEILLALLNDSTKQVRMSINNLTTDFDFASQSNWRYFTELILRPIEMSDEIPNQFQNIWLHLITLGKEFQKLVKGIYFNILENNSSSKTENLLNIFATSPKEKDVNSVGNSIYHLASYLAFSLSHDLQNSPKIIISPEIMKATGLGIQLIRDVFNSLMPVVHHTSPQNAGYMQALKKVTSVMRTLKKADIDLLVDQLEQVSVNLMDFFKNISSVGTGNLVVNLLVGLMEKFADSSHSWNVNHLLQLSRLFPKDVVDAVIDVYYVLPHAVRLLQGVPGKNITEGLKDVYSFTLLHGITISNITKEDFAIVIKILLDTIELVSDKPDIISEALACFPVVWCWNHTNSGFRQNSKIDPCNVHGLMSSSFYGKVASILDHFHLSPQGEDSPCSNESSRMEITRKVVCIIHELVDWNSILLELSEVFHVNISLVKTVQKFWHKILPFVPPSINQTRDSISELCPSGSIKQVALQIIEKLKNVNFTKVTSGENILDKLSSLNKILNINEDTETSVQNIISSNLERTVQLISEDWSLEKSTHNLLSLFMMLQNANVTGSSLEALSSFIEKSETPYNFEELWPKFQQIMKDLTQDFRIRHLLSEMNKGIKSINSMALQKITLQFAHFLEILDSPSLKTLEIIEDFLLVTKNWLQEYANEDYSRMIETLFIPVTNESSTEDIALLAKAIATFWGSLKNISRAGNFDVAFLTHLLNQEQLTNFSVVQLLFENILINLINNLAGNSQEAAWNLNDTDLQIMNFINLILNHMQSETSRKTVLSLRSIVDFTEQFLKTFFSLFLKEDSENKISLLLKYFHKDVIAEMSFVPKDKILEILKLDQFLTLMIQDRLMNIFSSLKETIYHLMKSSFILDNGEFYFDTHQGLKFMQDLFNALLRETSMKNKTENNIDFFTVVSQLFFHVNKSEDLFKLNQDLGSALHLVRECSTEMARLLDTILHSPNKDFYALYPTLQEVILANLTDLLFFINNSFPLRNRATLEITKRLVGAISRASEESHVLKPLLEMSGTLVMLLNDSADLRDLATSMDSIVKLLKLVKKVSGKMSTVFKTHFISNTKDSVKFFDTLYSIMQQSVQNLVKEIATLKKIDHFTFEKINDLLVPFLDLAFEMIGVEPYISSNSDIFSMSPSILSYMNQSKDFSDILEEIAEFLTSVKMNLEDMRSLAVAFNNETQTFSMDSVNLREEILGCLVPINNITNQMDFLYPNPISTHSGPQDIKWEIIHEVIPFLDKILSQNSTEIGSFLKMVICLTLEALWKNLKKDNWNVSNVLMTFTQHPNNLLKTIETVLEASSGIKSDYEGDLNKSLYFDTPLSQNITHHQLEKAIHNVLSRIALWRKGLLFNNSEWITSTRTLFQPLFEIFIKATTGKNVTSEKEERTKKEMIDFPYSFKPFFCLEKYLGGLFVLTKYWQQIPLTDQSVVEICEVFQQTVKPSEAMEMLQKVKMMVVRVLTIVAENPSWTKDILCATLSCKQNGIRHLILSAIQGVTLAQDHFQEIEKIWSSPNQLNCESLSKNLSSTLESFKSSLENATGQDCTSQPRLETVQQHLYMLAKSLEETWSSGNPIMTFLSNFTVTEDVKIKDLMKNITKLTEELRSSIQISNETIHSILEANISHSKVLFSALTVALSGKCDQEILHLLLTFPKGEKSWIAAEELCSLPGSKVYSLIVLLSRNLDVRAFIYKTLMPSEANGLLNSLLDIVSSLSALLAKAQHVFEYLPEFLHTFKITALLETLDFQQVSQNVQARSSAFGSFQFVMKMVCKDQASFLSDSNMFINLPRVKELLEDDKEKFNIPEDSTPFCLKLYQEILQLPNGALVWTFLKPILHGKILYTPNTPEINKVIQKANYTFYIVDKLKTLSETLLEMSSLFQRSGSGQMFNQLQEALRNKFVRNFVENQLHIDVDKLTEKLQTYGGLLDEMFNHAGAGRFRFLGSILVNLSSCVALNRFQALQSVDILETKAHELLQQNSFLASIIFSNSLFDKNFRSESVKLPPHVSYTIRTNVLYSVRTDVVKNPSWKFHPQNLPADGFKYNYVFAPLQDMIERAIILVQTGQEALEPAAQTQAAPYPCHTSDLFLNNVGFFFPLIMMLTWMVSVASMVRKLVYEQEIQIEEYMRMMGVHPVIHFLAWFLENMAVLTISSATLAIVLKTSGIFAHSNTFIVFLFLLDFGMSVVMLSYLLSAFFSQANTAALCTSLVYMISFLPYIVLLVLHNQLSFVNQTFLCLLSTTAFGQGVFFITFLEGQETGIQWNNMYQALEQGGMTFGWVCWMILFDSSLYFLCGWYLSNLIPGTFGLRKPWYFPFTASYWKSVGFLVEKRQYFLSSSLFFFNENFDNKGSSLQNREGELEGSAPGVTLVSVTKEYEGHKAVVQDLSLTFYRDQITALLGTNGAGKTTIISMLTGLHPPTSGTIIINGKNLQTDLSRVRMELGVCPQQDILLDNLTVREHLLLFASIKAPQWTKKELHQQVNQTLQDVDLTQHQHKQTRALSGGLKRKLSLGIAFMGMSRTVVLDEPTSGVDPCSRHSLWDILLKYREGRTIIFTTHHLDEAEALSDRVAVLQHGRLRCCGPPFCLKEAYGQGLRLTLTRQPSVLEAHDLKDMACVTSLIKIYIPQAFLKDSSGSELTYTIPKDTDKACLKGLFQALDENLHQLHLTGYGISDTTLEEVFLMLLQDSNKKSHIALGTESELQNHRPTGHLSGYCGSLARPATVQGVQLLRAQVAAILARRLRRTLRAGKSTLADLLLPVLFVALAMGLFMVRPLATEYPPLRLTPGHYQRAETYFFSSGGDNLDLTRVLLRKFRDQDLPCADLNPRQKNSSCWRTDPFSHPEFQDSCGCLKCPNRSASAPYLTNHLGHTLLNLSGFNMEEYLLAPSEKPRLGGWSFGLKIPSEAGGANGNISKPPTLAKVWYNQKGFHSLPSYLNHLNNLILWQHLPPTVDWRQYGITLYSHPYGGALLNKDKILESIRQCGVALCIVLGFSILSASIGSSVVRDRVIGAKRLQHISGLGYRMYWFTNFLYDMLFYLVSVCLCVAVIVAFQLTAFTFRKNLAATALLLSLFGYATLPWMYLMSRIFSSSDVAFISYVSLNFIFGLCTMLITIMPRLLAIISKAKNLQNIYDVLKWVFTIFPQFCLGQGLVELCYNQIKYDLTHNFGIDSYVSPFEMNFLGWIFVQLASQGTVLLLLRVLLHWDLLRWPRGHSTLQGTVKSSKDTDVEKEEKRVFEGRTNGDILVLYNLSKHYRRFFQNIIAVQDISLGIPKGECFGLLGVNGAGKSTTFKMLNGEVSLTSGHAIIRTPMGDAVDLSSAGTAGVLIGYCPQQDALDELLTGWEHLYYYCSLRGIPRQCIPEVAGDLIRRLHLEAHADKPVATYSGGTKRKLSTALALVGKPDILLLDEPSSGMDPCSKRYLWQTIMKEVREGCAAVLTSHSMEECEALCTRLAIMVNGSFKCLGSPQHIKNRFGDGYTVKVWLCKEANQHCTVSDHLKLYFPGIQFKGQHLNLLEYHVPKRWGCLADLFKVIENNKTFLNIKHYSINQTTLEQVFINFASEQQQTLQSTLDPSTDSHHTHHLPI

SEQ ID NO: 38356 - protein, 788 aa, Homo sapiens
MGLFMVRPLATEYPPLRLTPGHYQRAETYFFRKNSSCWRTDPFSHPEFQDSCGCLKCPNRSASAPYLTNHLGHTLLNLSGFNMEEYLLAPSEKPRLGGWSFGLKIPSEAGGANGNISKPPTLAKVWYNQKGFHSLPSYLNHLNNLILWQHLPPTVDWRQYGITLYSHPYGGALLNKDKILESIRQCGVALCIVLGFSILSASIGSSVVRDRVIGAKRLQHISGLGYRMYWFTNFLYDMLFYLVSVCLCVAVIVAFQLTAFTFRKNLAATALLLSLFGYATLPWMYLMSRIFSSSDVAFISYVSLNFIFGLCTMLITIMPRLLAIISKAKNLQNIYDVLKWVFTIFPQFCLGQGLVELCYNQIKYDLTHNFGIDSYVSPFEMNFLGWIFVQLASQGTVLLLLRVLLHWDLLRWPRGHSTLQGTVKSSKDTDVEKEEKRVFEGRTNGDILVLYNLSKHYRRFFQNIIAVQDISLGIPKGECFGLLGVNGAGKSTTFKMLNGEVSLTSGHAIIRTPMGDAVDLSSAGTAGVLIGYCPQQDALDELLTGWEHLYYYCSLRGIPRQCIPEVAGDLIRRLHLEAHADKPVATYSGGTKRKLSTALALVGKPDILLLDEPSSGMDPCSKRYLWQTIMKEVREGCAAVLTSHSMEECEALCTRLAIMVNGSFKCLGSPQHIKNRFGDGYTVKVWLCKEANQHCTVSDHLKLYFPGIQFKGQHLNLLEYHVPKRWGCLADLFKVIENNKTFLNIKHYSINQTTLEQVFINFASEQQQTLQSTLDPSTDSHHTHHLPI

SEQ ID NO: 38357 - protein, 2436 aa, Homo sapiens
MGFLHQLQLLLWKNVTLKRRSPWVLAFEIFIPLVLFFILLGLRQKKPTISVKEVAFYTAAPLTSAGILPVMQSLCPDGQRDEFGFLQYANSTVTQLLERLDRVVEEGNLFDPARPSLGSELEALRQHLEALSAGPGTSGSHLDRSTVSSFSLDSVARNPQELWRFLTQNLSLPNSTAQALLAARVDPPEVYHLLFGPSSALDSQSGLHKGQEPWSRLGGNPLFRMEELLLAPALLEQLTCTPGSGELGRILTVPESQKGALQGYRDAVCSGQAAARARRFSGLSAELRNQLDVAKVSQQLGLDAPNGSDSSPQAPPPRRLQALLGDLLDAQKVLQDVDVLSALALLLPQGACTGRTPGPPASGAGGAANGTGAGAVMGPNATAEEGAPSAAALATPDTLQGQCSAFVQLWAGLQPILCGNNRTIEPEALRRGNMSSLGFTSKEQRNLGLLVHLMTSNPKILYAPAGSEVDRVILKANETFAFVGNVTHYAQVWLNISAEIRSFLEQGRLQQHLRWLQQYVAELRLHPEALNLSLDELPPALRQDNFSLPSGMALLQQLDTIDNAACGWIQFMSKVSVDIFKGFHDEESIVNYTLNQAYQDNVTVFASVIFQTRKDGSLPPHVHYKIRQNSSFTEKTNEIRRAYWRPGPNTGGRFYFLYGFVWIQDMMERAIIDTFVGHDVVEPGSYVQMFPYPCYTRDDFLFVIEHMMPLCMVISWVYSVAMTIQHIVAEKEHRLKEVMKTMGLNNAVHWVAWFITGFVQLSISVTALTAILKYGQVLMHSHVVIIWLFLAVYAVATIMFCFLVSVLYSKAKLASACGGIIYFLSYVPYMYVAIREEVAHDKITAFEKCIASLMSTTAFGLGSKYFALYEVAGVGIQWHTFSQSPVEGDDFNLLLAVTMLMVDAVVYGILTWYIEAVHPGMYGLPRPWYFPLQKSYWLGSGRTEAWEWSWPWARTPRLSVMEEDQACAMESRRFEETRGMEEEPTHLPLVVCVDKLTKVYKDDKKLALNKLSLNLYENQVVSFLGHNGAGKTTTMSILTGLFPPTSGSATIYGHDIRTEMDEIRKNLGMCPQHNVLFDRLTVEEHLWFYSRLKSMAQEEIRREMDKMIEDLELSNKRHSLVQTLSGGMKRKLSVAIAFVGGSRAIILDEPTAGVDPYARRAIWDLILKYKPGRTILLSTHHMDEADLLGDRIAIISHGKLKCCGSPLFLKGTYGDGYRLTLVKRPAEPGGPQEPGLASSPPGRAPLSSCSELQVSQFIRKHVASCLLVSDTSTELSYILPSEAAKKGAFERLFQHLERSLDALHLSSFGLMDTTLEEVFLKVSEEDQSLENSEADVKESRKDVLPGAEGPASGEGHAGNLARCSELTQSQASLQSASSVGSARGDEGAGYTDVYGDYRPLFDNPQDPDNVSLQEVEAEALSRVGQGSRKLDGGWLKVRQFHGLLVKRFHCARRNSKALFSQILLPAFFVCVAMTVALSVPEIGDLPPLVLSPSQYHNYTQPRGNFIPYANEERREYRLRLSPDASPQQLVSTFRLPSGVGATCVLKSPANGSLGPTLNLSSGESRLLAARFFDSMCLESFTQGLPLSNFVPPPPSPAPSDSPASPDEDLQAWNVSLPPTAGPEMWTSAPSLPRLVREPVRCTCSAQGTGFSCPSSVGGHPPQMRVVTGDILTDITGHNVSEYLLFTSDRFRLHRYGAITFGNVLKSIPASFGTRAPPMVRKIAVRRAAQVFYNNKGYHSMPTYLNSLNNAILRANLPKSKGNPAAYGITVTNHPMNKTSASLSLDYLLQGTDVVIAIFIIVAMSFVPASFVVFLVAEKSTKAKHLQFVSGCNPIIYWLANYVWDMLNYLVPATCCVIILFVFDLPAYTSPTNFPAVLSLFLLYGWSITPIMYPASFWFEVPSSAYVFLIVINLFIGITATVATFLLQLFEHDKDLKVVNSYLKSCFLIFPNYNLGHGLMEMAYNEYINEYYAKIGQFDKMKSPFEWDIVTRGLVAMAVEGVVGFLLTIMCQYNFLRRPQRMPVSTKPVEDDVDVASERQRVLRGDADNDMVKIENLTKVYKSRKIGRILAVDRLCLGVRPGECFGLLGVNGAGKTSTFKMLTGDESTTGGEAFVNGHSVLKELLQVQQSLGYCPQCDALFDELTAREHLQLYTRLRGISWKDEARVVKWALEKLELTKYADKPAGTYSGGNKRKLSTAIALIGYPAFIFLDEPTTGMDPKARRFLWNLILDLIKTGRSVVLTSHSMEECEALCTRLAIMVNGRLRCLGSIQHLKNRFGDGYMITVRTKSSQSVKDVVRFFNRNFPEAMLKERHHTKVQYQLKSEHISLAQVFSKMEQVSGVLGIEDYSVSQTTLDNVFVNFAKKQSDNLEQQETEPPSALQSPLGCLLSLLRPRSAPTELRALVADEPEDLDTEDEGLISFEEERAQLSFNTDTLC

SEQ ID NO: 38358 - protein, 2436 aa, Homo sapiens
MGFLHQLQLLLWKNVTLKRRSPWVLAFEIFIPLVLFFILLGLRQKKPTISVKEVSFYTAAPLTSAGILPVMQSLCPDGQRDEFGFLQYANSTVTQLLERLDRVVEEGNLFDPARPSLGSELEALRQHLEALSAGPGTSGSHLDRSTVSSFSLDSVARNPQELWRFLTQNLSLPNSTAQALLAARVDPPEVYHLLFGPSSALDSQSGLHKGQEPWSRLGGNPLFRMEELLLAPALLEQLTCTPGSGELGRILTVPESQKGALQGYRDAVCSGQAAARARRFSGLSAELRNQLDVAKVSQQLGLDAPNGSDSSPQAPPPRRLQALLGDLLDAQKVLQDVDVLSALALLLPQGACTGRTPGPPASGAGGAANGTGAGAVMGPNATAEEGAPSAAALATPDTLQGQCSAFVQLWAGLQPILCGNNRTIEPEALRRGNMSSLGFTSKEQRNLGLLVHLMTSNPKILYAPAGSEVDRVILKANETFAFVGNVTHYAQVWLNISAEIRSFLEQGRLQQHLRWLQQYVAELRLHPEALNLSLDELPPALRQDNFSLPSGMALLQQLDTIDNAACGWIQFMSKVSVDIFKGFHDEESIVNYTLNQAYQDNVTVFASVIFQTRKDGSLPPHVHYKIRQNSSFTEKTNEIRRAYWRPGPNTGGRFYFLYGFVWIQDMMERAIIDTFVGHDVVEPGSYVQMFPYPCYTRDDFLFVIEHMMPLCMVISWVYSVAMTIQHIVAEKEHRLKEVMKTMGLNNAVHWVAWFITGFVQLSISVTALTAILKYGQVLMHSHVVIIWLFLAVYAVATIMFCFLVSVLYSKAKLASACGGIIYFLSYVPYMYVAIREEVAHDKITAFEKCIASLMSTTAFGLGSKYFALYEVAGVGIQWHTFSQSPVEGDDFNLLLAVTMLMVDAVVYGILTWYIEAVHPGMYGLPRPWYFPLQKSYWLGSGRTEAWEWSWPWARTPRLSVMEEDQACAMESRRFEETRGMEEEPTHLPLVVCVDKLTKVYKDDKKLALNKLSLNLYENQVVSFLGHNGAGKTTTMSILTGLFPPTSGSATIYGHDIRTEMDEIRKNLGMCPQHNVLFDRLTVEEHLWFYSRLKSMAQEEIRREMDKMIEDLELSNKRHSLVQTLSGGMKRKLSVAIAFVGGSRAIILDEPTAGVDPYARRAIWDLILKYKPGRTILLSTHHMDEADLLGDRIAIISHGKLKCCGSPLFLKGTYGDGYRLTLVKRPAEPGGPQEPGLASSPPGRAPLSSCSELQVSQFIRKHVASCLLVSDTSTELSYILPSEAAKKGAFERLFQHLERSLDALHLSSFGLMDTTLEEVFLKVSEEDQSLENSEADVKESRKDVLPGAEGPASGEGHAGNLARCSELTQSQASLQSASSVGSARGDEGAGYTDVYGDYRPLFDNPQDPDNVSLQEVEAEALSRVGQGSRKLDGGWLKVRQFHGLLVKRFHCARRNSKALFSQILLPAFFVCVAMTVALSVPEIGDLPPLVLSPSQYHNYTQPRGNFIPYANEERREYRLRLSPDASPQQLVSTFRLPSGVGATCVLKSPANGSLGPTLNLSSGESRLLAARFFDSMCLESFTQGLPLSNFVPPPPSPAPSDSPASPDEDLQAWNVSLPPTAGPEMWTSAPSLPRLVREPVRCTCSAQGTGFSCPSSVGGHPPQMRVVTGDILTDITGHNVSEYLLFTSDRFRLHRYGAITFGNVLKSIPASFGTRAPPMVRKIAVRRAAQVFYNNKGYHSMPTYLNSLNNAILRANLPKSKGNPAAYGITVTNHPMNKTSASLSLDYLLQGTDVVIAIFIIVAMSFVPASFVVFLVAEKSTKAKHLQFVSGCNPIIYWLANYVWDMLNYLVPATCCVIILFVFDLPAYTSPTNFPAVLSLFLLYGWSITPIMYPASFWFEVPSSAYVFLIVINLFIGITATVATFLLQLFEHDKDLKVVNSYLKSCFLIFPNYNLGHGLMEMAYNEYINEYYAKIGQFDKMKSPFEWDIVTRGLVAMAVEGVVGFLLTIMCQYNFLRRPQRMPVSTKPVEDDVDVASERQRVLRGDADNDMVKIENLTKVYKSRKIGRILAVDRLCLGVRPGECFGLLGVNGAGKTSTFKMLTGDESTTGGEAFVNGHSVLKELLQVQQSLGYCPQCDALFDELTAREHLQLYTRLRGISWKDEARVVKWALEKLELTKYADKPAGTYSGGNKRKLSTAIALIGYPAFIFLDEPTTGMDPKARRFLWNLILDLIKTGRSVVLTSHSMEECEALCTRLAIMVNGRLRCLGSIQHLKNRFGDGYMITVRTKSSQSVKDVVRFFNRNFPEAMLKERHHTKVQYQLKSEHISLAQVFSKMEQVSGVLGIEDYSVSQTTLDNVFVNFAKKQSDNLEQQETEPPSALQSPLGCLLSLLRPRSAPTELRALVADEPEDLDTEDEGLISFEEERAQLSFNTDTLC

SEQ ID NO: 38359 - protein, 2466 aa, Homo sapiens
MGRKTSRVQQGPPRSPACSAHGERSWGLEFPPFRWLLGIAGRTHLAALPPFQWVLAFEIFIPLVLFFILLGLRQKKPTISVKEVAFYTAAPLTSAGILPVMQSLCPDGQRDEFGFLQYANSTVTQLLERLDRVVEEGNLFDPARPSLGSELEALRQHLEALSAGPGTSGSHLDRSTVSSFSLDSVARNPQELWRFLTQNLSLPNSTAQALLAARVDPPEVYHLLFGPSSALDSQSGLHKGQEPWSRLGGNPLFRMEELLLAPALLEQLTCTPGSGELGRILTVPESQKGALQGYRDAVCSGQAAARARRFSGLSAELRNQLDVAKVSQQLGLDAPNGSDSSPQAPPPRRLQALLGDLLDAQKVLQDVDVLSALALLLPQGACTGRTPGPPASGAGGAANGTGAGAVMGPNATAEEGAPSAAALATPDTLQGQCSAFVQLWAGLQPILCGNNRTIEPEALRRGNMSSLGFTSKEQRNLGLLVHLMTSNPKILYAPAGSEVDRVILKANETFAFVGNVTHYAQVWLNISAEIRSFLEQGRLQQHLRWLQQYVAELRLHPEALNLSLDELPPALRQDNFSLPSGMALLQQLDTIDNAACGWIQFMSKVSVDIFKGFHDEESIVNYTLNQAYQDNVTVFASVIFQTRKDGSLPPHVHYKIRQNSSFTEKTNEIRRAYWRPGPNTGGRFYFLYGFVWIQDMMERAIIDTFVGHDVVEPGSYVQMFPYPCYTRDDFLFVIEHMMPLCMVISWVYSVAMTIQHIVAEKEHRLKEVMKTMGLNNAVHWVAWFITGFVQLSISVTALTAILKYGQVLMHSHVVIIWLFLAVYAVATIMFCFLVSVLYSKAKLASACGGIIYFLSYVPYMYVAIREEVAHDKITAFEKCIASLMSTTAFGLGSKYFALYEVAGVGIQWHTFSQSPVEGDDFNLLLAVTMLMVDAVVYGILTWYIEAVHPGMYGLPRPWYFPLQKSYWLGSGRTEAWEWSWPWARTPRLSVMEEDQACAMESRRFEETRGMEEEPTHLPLVVCVDKLTKVYKDDKKLALNKLSLNLYENQVVSFLGHNGAGKTTTMSILTGLFPPTSGSATIYGHDIRTEMDEIRKNLGMCPQHNVLFDRLTVEEHLWFYSRLKSMAQEEIRREMDKMIEDLELSNKRHSLVQTLSGGMKRKLSVAIAFVGGSRAIILDEPTAGVDPYARRAIWDLILKYKPGRTILLSTHHMDEADLLGDRIAIISHGKLKCCGSPLFLKGTYGDGYRLTLVKRPAEPGGPQEPGLASSPPGRAPLSSCSELQVSQFIRKHVASCLLVSDTSTELSYILPSEAAKKGAFERLFQHLERSLDALHLSSFGLMDTTLEEVFLKVSEEDQSLENSEADVKESRKDVLPGAEGPASGEGHAGNLARCSELTQSQASLQSASSVGSARGDEGAGYTDVYGDYRPLFDNPQDPDNVSLQEVEAEALSRVGQGSRKLDGGWLKVRQFHGLLVKRFHCARRNSKALFSQILLPAFFVCVAMTVALSVPEIGDLPPLVLSPSQYHNYTQPRGNFIPYANEERREYRLRLSPDASPQQLVSTFRLPSGVGATCVLKSPANGSLGPTLNLSSGESRLLAARFFDSMCLESFTQGLPLSNFVPPPPSPAPSDSPASPDEDLQAWNVSLPPTAGPEMWTSAPSLPRLVREPVRCTCSAQGTGFSCPSSVGGHPPQMRVVTGDILTDITGHNVSEYLLFTSDRFRLHRYGAITFGNVLKSIPASFGTRAPPMVRKIAVRRAAQVFYNNKGYHSMPTYLNSLNNAILRANLPKSKGNPAAYGITVTNHPMNKTSASLSLDYLLQGTDVVIAIFIIVAMSFVPASFVVFLVAEKSTKAKHLQFVSGCNPIIYWLANYVWDMLNYLVPATCCVIILFVFDLPAYTSPTNFPAVLSLFLLYGWSITPIMYPASFWFEVPSSAYVFLIVINLFIGITATVATFLLQLFEHDKDLKVVNSYLKSCFLIFPNYNLGHGLMEMAYNEYINEYYAKIGQFDKMKSPFEWDIVTRGLVAMAVEGVVGFLLTIMCQYNFLRRPQRMPVSTKPVEDDVDVASERQRVLRGDADNDMVKIENLTKVYKSRKIGRILAVDRLCLGVRPGECFGLLGVNGAGKTSTFKMLTGDESTTGGEAFVNGHSVLKELLQVQQSLGYCPQCDALFDELTAREHLQLYTRLRGISWKDEARVVKWALEKLELTKYADKPAGTYSGGNKRKLSTAIALIGYPAFIFLDEPTTGMDPKARRFLWNLILDLIKTGRSVVLTSHSMEECEALCTRLAIMVNGRLRCLGSIQHLKNRFGDGYMITVRTKSSQSVKDVVRFFNRNFPEAMLKERHHTKVQYQLKSEHISLAQVFSKMEQVSGVLGIEDYSVSQTTLDNVFVNFAKKQSDNLEQQETEPPSALQSPLGCLLSLLRPRSAPTELRALVADEPEDLDTEDEGLISFEEERAQLSFNTDTLC

SEQ ID NO: 38360 - protein, 2435 aa, Homo sapiens
MGFLHQLQLLLWKNVTLKRRSPWVLAFEIFIPLVLFFILLGLRQKKPTISVKEAFYTAAPLTSAGILPVMQSLCPDGQRDEFGFLQYANSTVTQLLERLDRVVEEGNLFDPARPSLGSELEALRQHLEALSAGPGTSGSHLDRSTVSSFSLDSVARNPQELWRFLTQNLSLPNSTAQALLAARVDPPEVYHLLFGPSSALDSQSGLHKGQEPWSRLGGNPLFRMEELLLAPALLEQLTCTPGSGELGRILTVPESQKGALQGYRDAVCSGQAAARARRFSGLSAELRNQLDVAKVSQQLGLDAPNGSDSSPQAPPPRRLQALLGDLLDAQKVLQDVDVLSALALLLPQGACTGRTPGPPASGAGGAANGTGAGAVMGPNATAEEGAPSAAALATPDTLQGQCSAFVQLWAGLQPILCGNNRTIEPEALRRGNMSSLGFTSKEQRNLGLLVHLMTSNPKILYAPAGSEVDRVILKANETFAFVGNVTHYAQVWLNISAEIRSFLEQGRLQQHLRWLQQYVAELRLHPEALNLSLDELPPALRQDNFSLPSGMALLQQLDTIDNAACGWIQFMSKVSVDIFKGFHDEESIVNYTLNQAYQDNVTVFASVIFQTRKDGSLPPHVHYKIRQNSSFTEKTNEIRRAYWRPGPNTGGRFYFLYGFVWIQDMMERAIIDTFVGHDVVEPGSYVQMFPYPCYTRDDFLFVIEHMMPLCMVISWVYSVAMTIQHIVAEKEHRLKEVMKTMGLNNAVHWVAWFITGFVQLSISVTALTAILKYGQVLMHSHVVIIWLFLAVYAVATIMFCFLVSVLYSKAKLASACGGIIYFLSYVPYMYVAIREEVAHDKITAFEKCIASLMSTTAFGLGSKYFALYEVAGVGIQWHTFSQSPVEGDDFNLLLAVTMLMVDAVVYGILTWYIEAVHPGMYGLPRPWYFPLQKSYWLGSGRTEAWEWSWPWARTPRLSVMEEDQACAMESRRFEETRGMEEEPTHLPLVVCVDKLTKVYKDDKKLALNKLSLNLYENQVVSFLGHNGAGKTTTMSILTGLFPPTSGSATIYGHDIRTEMDEIRKNLGMCPQHNVLFDRLTVEEHLWFYSRLKSMAQEEIRREMDKMIEDLELSNKRHSLVQTLSGGMKRKLSVAIAFVGGSRAIILDEPTAGVDPYARRAIWDLILKYKPGRTILLSTHHMDEADLLGDRIAIISHGKLKCCGSPLFLKGTYGDGYRLTLVKRPAEPGGPQEPGLASSPPGRAPLSSCSELQVSQFIRKHVASCLLVSDTSTELSYILPSEAAKKGAFERLFQHLERSLDALHLSSFGLMDTTLEEVFLKVSEEDQSLENSEADVKESRKDVLPGAEGPASGEGHAGNLARCSELTQSQASLQSASSVGSARGDEGAGYTDVYGDYRPLFDNPQDPDNVSLQEVEAEALSRVGQGSRKLDGGWLKVRQFHGLLVKRFHCARRNSKALFSQILLPAFFVCVAMTVALSVPEIGDLPPLVLSPSQYHNYTQPRGNFIPYANEERREYRLRLSPDASPQQLVSTFRLPSGVGATCVLKSPANGSLGPTLNLSSGESRLLAARFFDSMCLESFTQGLPLSNFVPPPPSPAPSDSPASPDEDLQAWNVSLPPTAGPEMWTSAPSLPRLVREPVRCTCSAQGTGFSCPSSVGGHPPQMRVVTGDILTDITGHNVSEYLLFTSDRFRLHRYGAITFGNVLKSIPASFGTRAPPMVRKIAVRRAAQVFYNNKGYHSMPTYLNSLNNAILRANLPKSKGNPAAYGITVTNHPMNKTSASLSLDYLLQGTDVVIAIFIIVAMSFVPASFVVFLVAEKSTKAKHLQFVSGCNPIIYWLANYVWDMLNYLVPATCCVIILFVFDLPAYTSPTNFPAVLSLFLLYGWSITPIMYPASFWFEVPSSAYVFLIVINLFIGITATVATFLLQLFEHDKDLKVVNSYLKSCFLIFPNYNLGHGLMEMAYNEYINEYYAKIGQFDKMKSPFEWDIVTRGLVAMAVEGVVGFLLTIMCQYNFLRRPQRMPVSTKPVEDDVDVASERQRVLRGDADNDMVKIENLTKVYKSRKIGRILAVDRLCLGVRPGECFGLLGVNGAGKTSTFKMLTGDESTTGGEAFVNGHSVLKELLQVQQSLGYCPQCDALFDELTAREHLQLYTRLRGISWKDEARVVKWALEKLELTKYADKPAGTYSGGNKRKLSTAIALIGYPAFIFLDEPTTGMDPKARRFLWNLILDLIKTGRSVVLTSHSMEECEALCTRLAIMVNGRLRCLGSIQHLKNRFGDGYMITVRTKSSQSVKDVVRFFNRNFPEAMLKERHHTKVQYQLKSEHISLAQVFSKMEQVSGVLGIEDYSVSQTTLDNVFVNFAKKQSDNLEQQETEPPSALQSPLGCLLSLLRPRSAPTELRALVADEPEDLDTEDEGLISFEEERAQLSFNTDTLC

SEQ ID NO: 38361 - protein, 196 aa, Homo sapiens
MLTGDESTTGGEAFVNGHSVLKELLQVQQSLGYCPQCDALFDELTAREHLQLYTRLRGISWKDEARVVKWALEKLELTKYADKPAGTYSGGNKRKLSTAIALIGYPAFIFLDEPTTGMDPKARRFLWNLILDLIKTGRSVVLTSHSMEECEALCTRLAIMERSPAVPGQHPAPEEPVWRWLHDHGADQEQPECEGR

SEQ ID NO: 38362 - protein, 1704 aa, Homo sapiens
MAVLRQLALLLWKNYTLQKRKVLVTVLELFLPLLFSGILIWLRLKIQSENVPNATIYPGQSIQELPLFFTFPPPGDTWELAYIPSHSDAAKTVTETVRRALVINMRVRGFPSEKDFEDYIRYDNCSSSVLAAVVFEHPFNHSKEPLPLAVKYHLRFSYTRRNYMWTQTGSFFLKETEGWHTTSLFPLFPNPGPREPTSPDGGEPGYIREGFLAVQHAVDRAIMEYHADAATRQLFQRLTVTIKRFPYPPFIADPFLVAIQYQLPLLLLLSFTYTALTIARAVVQEKERRLKEYMRMMGLSSWLHWSAWFLLFFLFLLIAASFMTLLFCVKVKPNVAVLSRSDPSLVLAFLLCFAISTISFSFMVSTFFSKANMAAAFGGFLYFFTYIPYFFVAPRYNWMTLSQKLCSCLLSNVAMAMGAQLIGKFEAKGMGIQWRDLLSPVNVDDDFCFGQVLGMLLLDSVLYGLVTWYMEAVFPGQFGVPQPWYFFIMPSYWCGKPRAVAGKEEEDSDPEKALRNEYFEAEPEDLVAGIKIKHLSKVFRVGNKDRAAVRDLNLNLYEGQITVLLGHNGAGKTTTLSMLTGLFPPTSGRAYISGYEISQDMVQIRKSLGLCPQHDILFDNLTVAEHLYFYAQLKGLSRQKCPEEVKQMLHIIGLEDKWNSRSRFLSGGMRRKLSIGIALIAGSKVLILDEPTSGMDAISRRAIWDLLQRQKSDRTIVLTTHFMDEADLLGDRIAIMAKGELQCCGSSLFLKQKYGAGYHMTLVKEPHCNPEDISQLVHHHVPNATLESSAGAELSFILPRESTHRFEGLFAKLEKKQKELGIASFGASITTMEEVFLRVGKLVDSSMDIQAIQLPALQYQHERRASDWAVDSNLCGAMDPSDGIGALIEEERTAVKLNTGLALHCQQFWAMFLKKAAYSWREWKMVAAQVLVPLTCVTLALLAINYSSELFDDPMLRLTLGEYGRTVVPFSVPGTSQLGQQLSEHLKDALQAEGQEPREVLGDLEEFLIFRASVEGGGFNERCLVAASFRDVGERTVVNALFNNQAYHSPATALAVVDNLLFKLLCGPHASIVVSNFPQPRSALQAAKDQFNEGRKGFDIALNLLFAMAFLASTFSILAVSERAVQAKHVQFVSGVHVASFWLSALLWDLISFLIPSLLLLVVFKAFDVRAFTRDGHMADTLLLLLLYGWAIIPLMYLMNFFFLGAATAYTRLTIFNILSGIATFLMVTIMRIPAVKLEELSKTLDHVFLVLPNHCLGMAVSSFYENYETRRYCTSSEVAAHYCKKYNIQYQENFYAWSAPGVGRFVASMAASGCAYLILLFLIETNLLQRLRGILCALRRRRTLTELYTRMPVLPEDQDVADERTRILAPSPDSLLHTPLIIKELSKVYEQRVPLLAVDRLSLAVQKGECFGLLGFNGAGKTTTFKMLTGEESLTSGDAFVGGHRISSDVGKVRQRIGYCPQFDALLDHMTGREMLVMYARLRGIPERHIGACVENTLRGLLLEPHANKLVRTYSGGNKRKLSTGIALIGEPAVIFLDEPSTGMDPVARRLLWDTVARARESGKAIIITSHSMEECEALCTRLAIMVQGQFKCLGSPQHLKSKFGSGYSLRAKVQSEGQQEALEEFKAFVDLTFPGSVLEDEHQGMVHYHLPGRDLSWAKVFGILEKAKEKYGVDDYSVSQISLEQVFLSFAHLQPPTAEEGR

SEQ ID NO: 38363 - protein, 1708 aa, Homo sapiens
TAPPPSPSLPLQDRAATSAHLALFTLSFQSTFLLFPAGCSAYLNLLRPPTSLAALGVPFSKTMAVLRQLALLLWKNYTLQKRKVLVTVLELFLPLLFSGILIWLRLKIQSENVPNATIYPGQSIQELPLFFTFPPPGDTWELAYIPSHSDAAKTVTETVRRALVINMRVRGFPSEKDFEDYIRYDNCSSSVLAAVVFEHPFNHSKEPLPLAVKYHLRFSYTRRNYMWTQTGSFFLKETEGWHTTSLFPLFPNPGPREPTSPDGGEPGYIREGFLAVQHAVDRAIMEYHADAATRQLFQRLTVTIKRFPYPPFIADPFLVAIQYQLPLLLLLSFTYTALTIARAVVQEKERRLKEYMRMMGLSSWLHWSAWFLLFFLFLLIAASFMTLLFCVKVKPNVAVLSRSDPSLVLAFLLCFAISTISFSFMVSTFFSKGMGIQWRDLLSPVNVDDDFCFGQVLGMLLLDSVLYGLVTWYMEAVFPGQFGVPQPWYFFIMPSYWCGKPRAVAGKEEEDSDPEKALRNEYFEAEPEDLVAGIKIKHLSKVFRVGNKDRAAVRDLNLNLYEGQITVLLGHNGAGKTTTLSMLTGLFPPTSGRAYISGYEISQDMVQIRKSLGLCPQHDILFDNLTVAEHLYFYAQLKGLSRQKCPEEVKQMLHIIGLEDKWNSRSRFLSGGMRRKLSIGIALIAGSKVLILDEPTSGMDAISRRAIWDLLQRQKSDRTIVLTTHFMDEADLLGDRIAIMAKGELQCCGSSLFLKQKYGAGYHMTLVKEPHCNPEDISQLVHHHVPNATLESSAGAELSFILPRESTHRFEGLFAKLEKKQKELGIASFGASITTMEEVFLRVGKLVDSSMDIQAIQLPALQYQHERRASDWAVDSNLCGAMDPSDGIGALIEEERTAVKLNTGLALHCQQFWAMFLKKAAYSWREWKMVAAQVLVPLTCVTLALLAINYSSELFDDPMLRLTLGEYGRTVVPFSVPGTSQLGQQLSEHLKDALQAEGQEPREVLGDLEEFLIFRASVEGGGFNERCLVAASFRDVGERTVVNALFNNQAYHSPATALAVVDNLLFKLLCGPHASIVVSNFPQPRSALQAAKDQFNEGRKGFDIALNLLFAMAFLASTFSILAVSERAVQAKHVQFVSGVHVASFWLSALLWDLISFLIPSLLLLVVFKAFDVRAFTRDGHMADTLLLLLLYGWAIIPLMYLMNFFFLGAATAYTRLTIFNILSGIATFLMVTIMRIPAVKLEELSKTLDHVFLVLPNHCLGMAVSSFYENYETRRYCTSSEVAAHYCKKYNIQYQENFYAWSAPGVGRFVASMAASGCAYLILLFLIETNLLQRLRGILCALRRRRTLTELYTRMPVLPEDQDVADERTRILAPSPDSLLHTPLIIKELSKVYEQRVPLLAVDRLSLAVQKGECFGLLGFNGAGKTTTFKMLTGEESLTSGDAFVGGHRISSDVGKVRQRIGYCPQFDALLDHMTGREMLVMYARLRGIPERHIGACVENTLRGLLLEPHANKLVRTYSGGNKRKLSTGIALIGEPAVIFLDEPSTGMDPVARRLLWDTVARARESGKAIIITSHSMEECEALCTRLAIMVQGQFKCLGSPQHLKSKFGSGYSLRAKVQSEGQQEALEEFKAFVDLTFPGSVLEDEHQGMVHYHLPGRDLSWAKVFGILEKAKEKYGVDDYSVSQISLEQVFLSFAHLQPPTAEEGR

SEQ ID NO: 38364 - protein, 2273 aa, Homo sapiens [sequence omitted]

SEQ ID NO: 38365 - protein, 979 aa, Homo sapiens
MGFVRQIQLLLWKNWTLRKRQKIRFVVELVWPLSLFLVLIWLRNANPLYSHHECHFPNKAMPSAGMLPWLQGIFCNVNNPCFQSPTPGESPGIVSNYNNSILARVYRDFQELLMNAPESQHLGRIWTELHILSQFMDTLRTHPERIAGRGIRIRDILKDEETLTLFLIKNIGLSDSVVYLLINSQVRPEQFAHGVPDLALKDIACSEALLERFIIFSQRRGAKTVRYALCSLSQGTLQWIEDTLYANVDFFKLFRVLPTLLDSRSQGINLRSWGGILSDMSPRIQEFIHRPSMQDLLWVTRPLMQNGGPETFTKLMGILSDLLCGYPEGGGSRVLSFNWYEDNNYKAFLGIDSTRKDPIYSYDRRTTSFCNALIQSLESNPLTKIAWRAAKPLLMGKILYTPDSPAARRILKNANSTFEELEHVRKLVKAWEEVGPQIWYFFDNSTQMNMIRDTLGNPTVKDFLNRQLGEEGITAEAILNFLYKGPRESQADDMANFDWRDIFNITDRTLRLVNQYLECLVLDKFESYNDETQLTQRALSLLEENMFWAGVVFPDMYPWTSSLPPHVKYKIRMDIDVVEKTNKIKDRYWDSGPRADPVEDFRYIWGGFAYLQDMVEQGITRSQVQAEAPVGIYLQQMPYPCFVDDSFMIILNRCFPIFMVLAWIYSVSMTVKSIVLEKELRLKETLKNQGVSNAVIWCTWFLDSFSIMSMSIFLLTIFIMSLLSPVAFGFGTEYLVRFEEQGLGLQWSNIGNSPTEGDEFSFLLSMQMMLLDAAVYGLLAWYLDQVFPGDYGTPLPWYFLLQESYWLGGEGCSTREERALEKTEPLTEETEDPEHPEGIHDSFFEREHPGWVPGVCVKNLVKIFEPCGRPAVDRLNITFYENQITAFLGHNGAGKTTTFSAGAPLSSKGPERHLLRGEHGPPWFPKEQQTRTSQGAANPRDTVFKSFGEPQEGTTACTPCDGMFSRAVQCEWNVGPVPF

SEQ ID NO: 38366 - protein, 392 aa, Homo sapiens [sequence omitted]

SEQ ID NO: 38367 - protein, 543 aa, Homo sapiens [sequence omitted]

SEQ ID NO: 38368 - protein, 1065 aa, Homo sapiens
MDVVLHHVPEAKLVECIGQELIFLLPNKNFKHRAYASLFRELEETLADLGLSSFGISDTPLEEIFLKVTEDSDSGPLFAGGAQQKRENVNPRHPCLGPREKAGQTPQDSNVCSPGAPAAHPEGQPPPEPECPGPQLNTGTQLVLQHVQALLVKRFQHTIRSHKDFLAQIVLPATFVFLALMLSIVIPPFGEYPALTLHPWIYGQQYTFFSMDEPGSEQFTVLADVLLNKPGFGNRCLKEGWLPEYPCGNSTPWKTPSVSPNITQLFQKQKWTQVNPSPSCRCSTREKLTMLPECPEGAGGLPPPQRTQRSTEILQDLTDRNISDFLVKTYPALIRSSLKSKFWVNEQRYGGISIGGKLPVVPITGEALVGFLSDLGRIMNVSGGPITREASKEIPDFLKHLETEDNIKVWFNNKGWHALVSFLNVAHNAILRASLPKDRSPEEYGITVISQPLNLTKEQLSEITVLTTSVDAVVAICVIFSMSFVPASFVLYLIQERVNKSKHLQFISGVSPTTYWVTNFLWDIMNYSVSAGLVVGIFIGFQKKAYTSPENLPALVALLLLYGWAVIPMMYPASFLFDVPSTAYVALSCANLFIGINSSAITFILELFENNRTLLRFNAVLRKLLIVFPHFCLGRGLIDLALSQAVTDVYARFGEEHSANPFHWDLIGKNLFAMVVEGVVYFLLTLLVQRHFFLSQWIAEPTKEPIVDEDDDVAEERQRIITGGNKTDILRLHELTKIYPGTSSPAVDRLCVGVRPGECFGLLGVNGAGKTTTFKMLTGDTTVTSGDATVAGKSILTNISEVHQNMGYCPQFDAIDELLTGREHLYLYARLRGVPAEEIEKVANWSIKSLGLTVYADCLAGTYSGGNKRKLSTAIALIGCPPLVLLDEPTTGMDPQARRMLWNVIVSIIREGRAVVLTSHSMEECEALCTRLAIMVKGAFRCMGTIQHLKSKFGDGYIVTMKIKSPKDDLLPDLNPVEQFFQGNFPGSVQRERHYNMLQFQVSSSSLARIFQLLLSHKDSLLIEEYSVTQTTLDQVFVNFAKQQTESHDLPLHPRAAGASRQAQD

SEQ ID NO: 38369 - protein, 1642 aa, Homo sapiens
MSTAIREVGVWRQTRTLLLKNYLIKCRTKKSSVQEILFPLFFLFWLILISMMHPNKKYEEVPNIELNPMDKFTLSNLILGYTPVTNITSSIMQKVSTDHLPDVIITEEYTNEKEMLTSSLSKPSNFVGVVFKDSMSYELRFFPDMIPVSSIYMDSRAGCSKSCEAAQYWSSGFTVLQASIDAAIIQLKTNVSLWKELESTKAVIMGETAVVEIDTFPRGVILIYLVIAFSPFGYFLAIHIVAEKEKKIKEFLKIMGLHDTAFWLSWVLLYTSLIFLMSLLMAVIATASLLFPQSSSIVIFLLFFLYGLSSVFFALMLTPLFKKSKHVGIVEFFVTVAFGFIGLMIILIESFPKSLVWLFSPFCHCTFVIGIAQVMHLEDFNEGASFSNLTAGPYPLIITIIMLTLNSIFYVLLAVYLDQVIPGEFGLRRSSLYFLKPSYWSKSKRNYEELSEGNVNGNISFSEIIEPVSSEFVGKEAIRISGIQKTYRKKGENVEALRNLSFDIYEGQITALLGHSGTGKSTLMNILCGLCPPSDGFASIYGHRVSEIDEMFEARKMIGICPQLDIHFDVLTVEENLSILASIKGIPANNIIQEVQKVLLDLDMQTIKDNQAKKLSGGQKRKLSLGIAVLGNPKILLLDEPTAGMDPCSRHIVWNLLKYRKANRVTVFSTHFMDEADILADRKAVISQGMLKCVGSSMFLKSKWGIGYRLSMYIDKYCATESLSSLVKQHIPGATLLQQNDQQLVYSLPFKDMDKFSGLFSALDSHSNLGVISYGVSMTTLEDVFLKLEVEAEIDQADYSVFTQQPLEEEMDSKSFDEMEQSLLILSETKAALVSTMSLWKQQMYTIAKFHFFTLKRESKSVRSVLLLLLIFFTVQIFMFLVHHSFKNAVVPIKLVPDLYFLKPGDKPHKYKTSLLLQNSADSDISDLISFFTSQNIMVTMINDSDYVSVAPHSAALNVMHSEKDYVFAAVFNSTMVYSLPILVNIISNYYLYHLNVTETIQIWSTPFFQEITDIVFKIELYFQAALLGIIVTAMPPYFAMENAENHKIKAYTQLKLSGLLPSAYWIGQAVVDIPLFFIILILMLGSLLAFHYGLYFYTVKFLAVVFCLIGYVPSVILFTYIASFTFKKILNTKEFWSFIYSVAALACIAITEITFFMGYTIATILHYAFCIIIPIYPLLGCLISFIKISWKNVRKNVDTYNPWDRLSVAVISPYLQCVLWIFLLQYYEKKYGGRSIRKDPFFRNLSTKSKNRKLPEPPDNEDEDEDVKAERLKVKELMGCQCCEEKPSIMVSNLHKEYDDKKDFLLSRKVKKVATKYISFCVKKGEILGLLGPNGAGKSTIINILVGDIEPTSGQVFLGDYSSETSEDDDSLKCMGYCPQINPLWPDTTLQEHFEIYGAVKGMSASDMKEVISRITHALDLKEHLQKTVKKLPAGIKRKLCFALSMLGNPQITLLDEPSTGMDPKAKQHMWRAIRTAFKNRKRAAILTTHYMEEAEAVCDRVAIMVSGQLRCIGTVQHLKSKFGKGYFLEIKLKDWIENLEVDRLQREIQYIFPNASRQESFSSILAYKIPKEDVQSLSQSFFKLEEAKHAFAIEEYSFSQATLEQVFVELTKEQEEEDNSCGTLNSTLWWERTQEDRVVF

SEQ ID NO: 38370 - protein, 1643 aa, Homo sapiens
MSTAIREVGVWRQTRTLLLKNYLIKCRTKKSSVQEILFPLFFLFWLILISMMHPNKKYEEVPNIELNPMDKFTLSNLILGYTPVTNITSSIMQKVSTDHLPDVIITEEYTNEKEMLTSSLSKPSNFVGVVFKDSMSYELRFFPDMIPVSSIYMDSRAGCSKSCEAAQYWSSGFTVLQASIDAAIIQLKTNVSLWKELESTKAVIMGETAVVEIDTFPRGVILIYLVIAFSPFGYFLAIHIVAEKEKKIKEFLKIMGLHDTAFWLSWVLLYTSLIFLMSLLMAVIATASLLFPQSSSIVIFLLFFLYGLSSVFFALMLTPLFKKSKHVGIVEFFVTVAFGFIGLMIILIESFPKSLVWLFSPFCHCTFVIGIAQVMHLEDFNEGASFSNLTAGPYPLIITIIMLTLNSIFYVLLAVYLDQVIPGEFGLRRSSLYFLKPSYWSKSKRNYEELSEGNVNGNISFSEIIEPVSSEFVGKEAIRISGIQKTYRKKGENVEALRNLSFDIYEGQITALLGHSGTGKSTLMNILCGLCPPSDGFASIYGHRVSEIDEMFEARKMIGICPQLDIHFDVLTVEENLSILASIKGIPANNIIQEVQKVLLDLDMQTIKDNQAKKLSGGQKRKLSLGIAVLGNPKILLLDEPTAGMDPCSRHIVWNLLKYRKANRVTVFSTHFMDEADILADRKAVISQGMLKCVGSSMFLKSKWGIGYRLSMYIDKYCATESLSSLVKQHIPGATLLQQNDQQLVYSLPFKDMDKFSGLFSALDSHSNLGVISYGVSMTTLEDVFLKLEVEAEIDQADYSVFTQQPLEEEMDSKSFDEMEQSLLILSETKAALVSTMSLWKQQMYTIAKFHFFTLKRESKSVRSVLLLLLIFFTVQIFMFLVHHSFKNAVVPIKLVPDLYFLKPGDKPHKYKTSLLLQNSAADSDISDLISFFTSQNIMVTMINDSDYVSVAPHSAALNVMHSEKDYVFAAVFNSTMVYSLPILVNIISNYYLYHLNVTETIQIWSTPFFQEITDIVFKIELYFQAALLGIIVTAMPPYFAMENAENHKIKAYTQLKLSGLLPSAYWIGQAVVDIPLFFIILILMLGSLLAFHYGLYFYTVKFLAVVFCLIGYVPSVILFTYIASFTFKKILNTKEFWSFIYSVAALACIAITEITFFMGYTIATILHYAFCIIIPIYPLLGCLISFIKISWKNVRKNVDTYNPWDRLSVAVISPYLQCVLWIFLLQYYEKKYGGRSIRKDPFFRNLSTKSKNRKLPEPPDNEDEDEDVKAERLKVKELMGCQCCEEKPSIMVSNLHKEYDDKKDFLLSRKVKKVATKYISFCVKKGEILGLLGPNGAGKSTIINILVGDIEPTSGQVFLGDYSSETSEDDDSLKCMGYCPQINPLWPDTTLQEHFEIYGAVKGMSASDMKEVISRITHALDLKEHLQKTVKKLPAGIKRKLCFALSMLGNPQITLLDEPSTGMDPKAKQHMWRAIRTAFKNRKRAAILTTHYMEEAEAVCDRVAIMVSGQLRCIGTVQHLKSKFGKGYFLEIKLKDWIENLEVDRLQREIQYIFPNASRQESFSSILAYKIPKEDVQSLSQSFFKLEEAKHAFAIEEYSFSQATLEQVFVELTKEQEEEDNSCGTLNSTLWWERTQEDRVVF

SEQ ID NO: 38371 - protein, 1617 aa, Homo sapiens
MNMKQKSVYQQTKALLCKNFLKKWRMKRESLLEWGLSILLGLCIALFSSSMRNVQFPGMAPQNLGRVDKFNSSSLMVVYTPISNLTQQIMNKTALAPLLKGTSVIGAPNKTHMDEILLENLPYAMGIIFNETFSYKLIFFQGYNSPLWKEDFSAHCWDGYGEFSCTLTKYWNRGFVALQTAINTAIIEITTNHPVMEELMSVTAITMKTLPFITKNLLHNEMFILFFLLHFSPLVYFISLNVTKERKKSKNLMKMMGLQDSAFWLSWGLIYAGFIFIISIFVTIIITFTQIIVMTGFMVIFILFFLYGLSLVALVFLMSVLLKKAVLTNLVVFLLTLFWGCLGFTVFYEQLPSSLEWILNICSPFAFTTGMIQIIKLDYNLNGVIFPDPSGDSYTMIATFSMLLLDGLIYLLLALYFDKILPYGDERHYSPLFFLNSSSCFQHQRTNAKVIEKEIDAEHPSDDYFEPVAPEFQGKEAIRIRNVKKEYKGKSGKVEALKGLLFDIYEGQITAILGHSGAGKSSLLNILNGLSVPTEGSVTIYNKNLSEMQDLEEIRKITGVCPQFNVQFDILTVKENLSLFAKIKGIHLKEVEQEVQRILLELDMQNIQDNLAKHLSEGQKRKLTFGITILGDPQILLLDEPTTGLDPFSRDQVWSLLRERRADHVILFSTQSMDEADILADRKVIMSNGRLKCAGSSMFLKRRWGLGYHLSLHRNEICNPEQITSFITHHIPDAKLKTENKEKLVYTLPLERTNTFPDLFSDLDKCSDQGVTGYDISMSTLNEVFMKLEGQSTIEQDFEQVEMIRDSESLNEMELAHSSFSEMQTAVSDMGLWRMQVFAMARLRFLKLKRQTKVLLTLLLVFGIAIFPLIVENIMYAMLNEKIDWEFKNELYFLSPGQLPQEPRTSLLIINNTESNIEDFIKSLKHQNILLEVDDFENRNGTDGLSYNGAIIVSGKQKDYRFSVVCNTKRLHCFPILMNIISNGLLQMFNHTQHIRIESSPFPLSHIGLWTGLPDGSFFLFLVLCSISPYITMGSISDYKKNAKSQLWISGLYTSAYWCGQALVDVSFFILILLLMYLIFYIENMQYLLITSQIVFALVIVTPGYAASLVFFIYMISFIFRKRRKNSGLWSFYFFFASTIMFSITLINHFDLSILITTMVLVPSYTLLGFKTFLEVRDQEHYREFPEANFELSATDFLVCFIPYFQTLLFVFVLRCMELKCGKKRMRKDPVFRISPQSRDAKPNPEEPIDEDEDIQTERIRTATALTTSILDEKPVIIASCLHKEYAGQKKSCFSKRKKKIAARNISFCVQEGEILGLLGPNGAGKSSSIRMISGITKPTAGEVELKGCSSVLGHLGYCPQENVLWPMLTLREHLEVYAAVKGLRKADARLAIARLVSAFKLHEQLNVPVQKLTAGITRKLCFVLSLLGNSPVLLLDEPSTGIDPTGQQQMWQAIQAVVKNTERGVLLTTHNLAEAEALCDRVAIMVSGRLRCIGSIQHLKNKLGKDYILELKVKETSQVTLVHTEILKLFPQAAGQERYSSLLTYKLPVADVYPLSQTFHKLEAVKHNFNLEEYSLSQCTLEKVFLELSKEQEVGNFDEEIDTTMRWKLLPHSDEP

SEQ ID NO: 38372 - protein, 477 aa, Homo sapiens [sequence omitted]

SEQ ID NO: 38373 - protein, 2146 aa, Homo sapiens
MAFWTQLMLLLWKNFMYRRRQPVQLLVELLWPLFLFFILVAVRHSHPPLEHHECHFPNKPLPSAGTVPWLQGLICNVNNTCFPQLTPGEEPGRLSNFNDSLVSRLLADARTVLGGASAHRTLAGLGKLIATLRAARSTAQPQPTKQSPLEPPMLDVAELLTSLLRTESLGLALGQAQEPLHSLLEAAEDLAQELLALRSLVELRALLQRPRGTSGPLELLSEALCSVRGPSSTVGPSLNWYEASDLMELVGQEPESALPDSSLSPACSELIGALDSHPLSRLLWRRLKPLILGKLLFAPDTPFTRKLMAQVNRTFEELTLLRDVREVWEMLGPRIFTFMNDSSNVAMLQRLLQMQDEGRRQPRPGGRDHMEALRSFLDPGSGGYSWQDAHADVGHLVGTLGRVTECLSLDKLEAAPSEAALVSRALQLLAEHRFWAGVVFLGPEDSSDPTEHPTPDLGPGHVRIKIRMDIDVVTRTNKIRDRFWDPGPAADPLTDLRYVWGGFVYLQDLVERAAVRVLSGANPRAGLYLQQMPYPCYVDDVFLRVLSRSLPLFLTLAWIYSVTLTVKAVVREKETRLRDTMRAMGLSRAVLWLGWFLSCLGPFLLSAALLVLVLKLGDILPYSHPGVVFLFLAAFAVATVTQSFLLSAFFSRANLAAACGGLAYFSLYLPYVLCVAWRDRLPAGGRVAASLLSPVAFGFGCESLALLEEQGEGAQWHNVGTRPTADVFSLAQVSGLLLLDAALYGLATWYLEAVCPGQYGIPEPWNFPFRRSYWCGPRPPKSPAPCPTPLDPKVLVEEAPPGLSPGVSVRSLEKRFPGSPQPALRGLSLDFYQGHITAFLGHNGAGKTTTLSILSGLFPPSGGSAFILGHDVRSSMAAIRPHLGVCPQYNVLFDMLTVDEHVWFYGRLKGLSAAVVGPEQDRLLQDVGLVSKQSVQTRHLSGGMQRKLSVAIAFVGGSQVVILDEPTAGVDPASRRGIWELLLKYREGRTLILSTHHLDEAELLGDRVAVVAGGRLCCCGSPLFLRRHLGSGYYLTLVKARLPLTTNEKADTDMEGSVDTRQEKKNGSQGSRVGTPQLLALVQHWVPGARLVEELPHELVLVLPYTGAHDGSFATLFRELDTRLAELRLTGYGISDTSLEEIFLKVVEECAADTDMEDGSCGQHLCTGIAGLDVTLRLKMPPQETALENGEPAGSAPETDQGSGPDAVGRVQGWALTRQQLQALLLKRFLLARRSRRGLFAQIVLPALFVGLALVFSLIVPPFGHYPALRLSPTMYGAQVSFFSEDAPGDPGRARLLEALLQEAGLEEPPVQHSSHRFSAPEVPAEVAKVLASGNWTPESPSPACQCSRPGARRLLPDCPAAAGGPPPPQAVTGSGEVVQNLTGRNLSDFLVKTYPRLVRQGLKTKKWVNEVRYGGFSLGGRDPGLPSGQELGRSVEELWALLSPLPGGALDRVLKNLTAWAHSLDAQDSLKIWFNNKGWHSMVAFVNRASNAILRAHLPPGPARHAHSITTLNHPLNLTKEQLSEGALMASSVDVLVSICVVFAMSFVPASFTLVLIEERVTRAKHLQLMGGLSPTLYWLGNFLWDMCNYLVPACIVVLIFLAFQQRAYVAPANLPALLLLLLLYGWSITPLMYPASFFFSVPSTAYVVLTCINLFIGINGSMATFVLELFSDQKLQEVSRILKQVFLIFPHFCLGRGLIDMVRNQAMADAFERLGDRQFQSPLRWEVVGKNLLAMVIQGPLFLLFTLLLQHRSQLLPQPRVRSLPLLGEEDEDVARERERVVQGATQGDVLVLRNLTKVYRGQRMPAVDRLCLGIPPGECFGLLGVNGAGKTSTFRMVTGDTLASRGEAVLAGHSVAREPSAAHLSMGYCPQSDAIFELLTGREHLELLARLRGVPEAQVAQTAGSGLARLGLSWYADRPAGTYSGGNKRKLATALALVGDPAVVFLDEPTTGMDPSARRFLWNSLLAVVREGRSVMLTSHSMEECEALCSRLAIMVNGRFRCLGSPQHLKGRFAAGHTLTLRVPAARSQPAAAFVAAEFPGAELREAHGGRLRFQLPPGGRCALARVFGELAVHGAEHGVEDFSVSQTMLEEVFLYFSKDQGKDEDTEEQKEAGVGVDPAPGLQHPKRVSQFLDDPSTAETVL

SEQ ID NO: 38374 - protein, 2146 aa, Homo sapiens; identical to SEQ ID NO: 38373

SEQ ID NO: 38375 - protein, 164 aa, Homo sapiens
MAFWTQLMLLLWKNFMYRRRQPVQLLVELLWPLFLFFILVAVRHSHPPLEHHECHFPNKPLPSAGTVPWLQGLICNVNNTCFPQLTPGEEPGRLSNFNDSLVSRLLADARTVLGGASAHRTLAGLGKLIATLRAARSTAQPQPTKQSPLEPPMLDVAELLTSLL

SEQ ID NO: 38376 - protein, 1581 aa, Homo sapiens
MRKRKISVCQQTWALLCKNFLKKWRMKRESLMEWLNSLLLLLCLYIYPHSHQVNDFSSLLTMDLGRVDTFNESRFSVVYTPVTNTTQQIMNKVASTPFLAGKEVLGLPDEESIKEFTANYPEEIVRVTFTNTYSYHLKFLLGHGMPAKKEHKDHTAHCYETNEDVYCEVSVFWKEGFVALQAAINAAIIEITTNHSVMEELMSVTGKNMKMHSFIGQSGVITDLYLFSCIISFSSFIYYASVNVTRERKRMKALMTMMGLRDSAFWLSWGLLYAGFIFIMALFLALVIRSTQFIILSGFMVVFSLFLLYGLSLVALAFLMSILVKKSFLTGLVVFLLTVFWGCLGFTSLYRHLPASLEWILSLLSPFAFMLGMAQLLHLDYDLNSNAFPHPSDGSNLIVATNFMLAFDTCLYLALAIYFEKILPNEYGHRRPPLFFLKSSFWSQTQKTDHVALEDEMDADPSFHDSFEQAPPEFQGKEAIRIRNVTKEYKGKPDKIEALKDLVFDIYEGQITAILGHSGAGKSTLLNILSGLSVPTKGSVTIYNNKLSEMADLENLSKLTGVCPQSNVQFDFLTVRENLRLFAKIKGILPQEVDKEIFLLDEPTAGLDPFSRHQVWNLLKERKTDRVILFSTQFMDEADILADRKVFLSQGKLKCAGSSLFLKKKWGIGYHLSLQLNEICVEENITSLVKQHIPDAKLSAKSEGKLIYTLPLERTNKFPELYKDLDSYPDLGIENYGVSMTTLNEVFLKLEGKSTINESDIAILGEVQAEKADDTERLVEMEQVLSSLNKMRKTIGGVALWRQQICAIARVRLLKLKHERKALLALLLILMAGFCPLLVEYTMVKIYQNSYTWELSPHLYFLAPGQQPHDPLTQLLIINKTGASIDDFIQSVEHQNIALEVDAFGTRNGTDDPSYNGAITVCCNEKNYSFSLACNAKRLNCFPVLMDIVSNGLLGMVKPSVHIRTERSTFLENGQDNPIGFLAYIMFWLVLTSSCPPYIAMSSIDDYKNRARSQLRISGLSPSAYWFGQALVDVSLYFLVFVFIYLMSYISNFEDMLLTIIHIIQIPCAVGYSFSLIFMTYVISFIFRKGRKNSGIWSFCFYVVTVFSVAGFAFSIFESDIPFIFTFLIPPATMIGCLFLSSHLLFSSLFSEERMDVQPFLVFLIPFLHFIIFLFTLRCLEWKFGKKSMRKDPFFRISPRSSDVCQNPEEPEGEDEDVQMERVRTANALNSTNFDEKPVIIASCLRKEYAGKRKGCFSKRKNKIATRNVSFCVRKGEVLGLLGHNGAGKSTSIKVITGDTKPTAGQVLLKGSGGGDALEFLGYCPQENALWPNLTVRQHLEVYAAVKGLRKGDAEVAITRLVDALKLQDQLKSPVKTLSEGIKRKLCFVLSILGNPSVVLLDEPSTGMDPEGQQQMWQAIRATFRNTERGALLTTHYMAEAEAVCDRVAIMVSGRLRCIGSIQHLKSKFGKDYLLEMKVKNLAQVEPLHAEILRLFPQAARQERYSSLMVYKLPVEDVQPLAQAFFKLEKVKQSFDLEEYSLSQSTLEQVFLELSKEQELGDFEEDFDPSVKWKLLPQEEP

SEQ ID NO: 38377 - protein, 266 aa, Homo sapiens
MRKRKISVCQQTWALLCKNFLKKWRMKRESLMEWLNSLLLLLCLYIYPHSHQVNDFSSLLTMDLGRVDTFNESRFSVVYTPVTNTTQQIMNKVASTPFLAGKEVLGLPDEESIKEFTANYPEEIVRVTFTNTYSYHLKFLLGHGMPAKKEHKDHTAHCYETNEDVYCEVSVFWKEGFVALQAAINAAIIEITTNHSVMEELMSVTGKNMKMHSFIGQSGVITDLYLFSCIISFSSFIYYASVNVTRERKRMKALMTMMGLRDSAFW

SEQ ID NO: 38378 - protein, 1621 aa, Homo sapiens
MRKRKISVCQQTWALLCKNFLKKWRMKRESLMEWLNSLLLLLCLYIYPHSHQVNDFSSLLTMDLGRVDTFNESRFSVVYTPVTNTTQQIMNKVASTPFLAGKEVLGLPDEESIKEFTANYPEEIVRVTFTNTYSYHLKFLLGHGMPAKKEHKDHTAHCYETNEDVYCEVSVFWKEGFVALQAAINAAIIEITTNHSVMEELMSVTGKNMKMHSFIGQSGVITDLYLFSCIISFSSFIYYASVNVTRERKRMKALMTMMGLRDSAFWLSWGLLYAGFIFIMALFLALVIRSTQFIILSGFMVVFSLFLLYGLSLVALAFLMSILVKKSFLTGLVVFLLTVFWGCLGFTSLYRHLPASLEWILSLLSPFAFMLGMAQLLHLDYDLNSNAFPHPSDGSNLIVATNFMLAFDTCLYLALAIYFEKILPNEYGHRRPPLFFLKSSFWSQTQKTDHVALEDEMDADPSFHDSFEQAPPEFQGKEAIRIRNVTKEYKGKPDKIEALKDLVFDIYEGQITAILGHSGAGKSTLLNILSGLSVPTKGSVTIYNNKLSEMADLENLSKLTGVCPQSNVQFDFLTVRENLRLFAKIKGILPQEVDKEIQRVLLELEMKNIQDVLAQNLSGGQKRKLTFGIAILGDPQIFLLDEPTAGLDPFSRHQVWNLLKERKTDRVILFSTQFMDEADILADRKVFLSQGKLKCAGSSLFLKKKWGIGYHLSLQLNEICVEENITSLVKQHIPDAKLSAKSEGKLIYTLPLERTNKFPELYKDLDSYPDLGIENYGVSMTTLNEVFLKLEGKSTINESDIAILGEVQAEKADDTERLVEMEQVLSSLNKMRKTIGGVALWRQQICAIARVRLLKLKHERKALLALLLILMAGFCPLLVEYTMVKIYQNSYTWELSPHLYFLAPGQQPHDPLTQLLIINKTGASIDDFIQSVEHQNIALEVDAFGTRNGTDDPSYNGAITVCCNEKNYSFSLACNAKRLNCFPVLMDIVSNGLLGMVKPSVHIRTERSTFLENGQDNPIGFLAYIMFWLVLTSSCPPYIAMSSIDDYKNRARSQLRISGLSPSAYWFGQALVDVSLYFLVFVFIYLMSYISNFEDMLLTIIHIIQIPCAVGYSFSLIFMTYVISFIFRKGRKNSGIWSFCFYVVTVFSVAGFAFSIFESDIPFIFTFLIPPATMIGCLFLSSHLLFSSLFSEERMDVQPFLVFLIPFLHFIIFLFTLRCLEWKFGKKSMRKDPFFRISPRSSDVCQNPEEPEGEDEDVQMERVRTANALNSTNFDEKPVIIASCLRKEYAGKRKGCFSKRKNKIATRNVSFCVRKGEVLGLLGHNGAGKSTSIKVITGDTKPTAGQVLLKGSGGGDALEFLGYCPQENALWPNLTVRQHLEVYAAVKGLRKGDAEVAITRLVDALKLQDQLKSPVKTLSEGIKRKLCFVLSILGNPSVVLLDEPSTGMDPEGQQQMWQAIRATFRNTERGALLTTHYMAEAEAVCDRVAIMVSGRLRCIGSIQHLKSKFGKDYLLEMKVKNLAQVEPLHAEILRLFPQAARQERYSSLMVYKLPVEDVQPLAQAFFKLEKVKQSFDLEEYSLSQSTLEQVFLELSKEQELGDFEEDFDPSVKWKLLPQEEP

SEQ ID NO: 38379 - protein, 1103 aa, Homo sapiens
MDLGRVDTFNESRFSVVYTPVTNTTQQIMNKVASTPFLAGKEVLGLPDEESIKEFTANYPEEIVRVTFTNTYSYHLKFLLGHGMPAKKEHKDHTAHCYETNEDVYCEVSVFWKEGFVALQAAINAAIIEITTNHSVMEELMSVTGKNMKMHSFIGQSGVITDLYLFSCIISFSSFIYYASVNVTRERKRMKALMTMMGLRDSAFWLSWGLLYAGFIFIMALFLALVIRSTQFIILSGFMVVFSLFLLYGLSLVALAFLMSILVKKSFLTGLVVFLLTVFWGCLGFTSLYRHLPASLEWILSLLSPFAFMLGMAQLLHLDYDLNSNAFPHPSDGSNLIVATNFMLAFDTCLYLALAIYFEKILPNEYGHRRPPLFFLKSSFWSQTQKTDHVALEDEMDADPSFHDSFEQAPPEFQGKEAIRIRNVTKEYKGKPDKIEALKDLVFDIYEGQITAILGHSGAGKSTLLNILSGLSVPTKGSVTIYNNKLSEMADLENLSKLTGVCPQSNVQFDFLTVRENLRLFAKIKGILPQEVDKEIQRVLLELEMKNIQDVLAQNLSGGQKRKLTFGIAILGDPQIFLLDEPTAGLDPFSRHQVWNLLKERKTDRVILFSTQFMDEADILADRKVFLSQGKLKCAGSSLFLKKKWGIGYHLSLQLNEICVEENITSLVKQHIPDAKLSAKSEGKLIYTLPLERTNKFPELYKDLDSYPDLGIENYGVSMTTLNEVFLKLEGKSTINESDIAILGEVQAEKADDTERLVEMEQVLSSLNKMRKTIGGVALWRQQICAIARVRLLKLKHERKALLALLLILMAGFCPLLVEYTMVKIYQNSYTWELSPHLYFLAPGQQPHDPLTQLLIINKTGASIDDFIQSVEHQNIALEVDAFGTRNGTDDPSYNGAITVCCNEKNYSFSLACNAKRLNCFPVLMDIVSNGLLGMVKPSVHIRTERSTFLENGQDNPIGFLAYIMFWLVLTSSCPPYIAMSSIDDYKNRARSQLRISGLSPSAYWFGQALVDVSLYFLVFVFIYLMSYISNFEDMLLTIIHIIQIPCAVGYSFSLIFMTYVISFIFRKGRKNSGIWSFCFYVVSIFLVDVYCIYLIYNSELIL

SEQ ID NO: 38380 - protein, 156 aa, Homo sapiens
MLGMAQLLHLDYDLNSNAFPHPSDGSNLIVATNFMLAFDTCLYLALAIYFEKILPNEYGHRRPPLFFLKSSFWSQTQKTDHVALEDEMDADPSFHDSFEQAPPEFQGKEAIRIRNVTKEYKGKPDKIEALKDLVFDIYEGQITAILVTVELESQHC

SEQ ID NO: 38381 - protein, 1624 aa, Homo sapiens
MSKRRMSVGQQTWALLCKNCLKKWRMKRQTLLEWLFSFLLVLFLYLFFSNLHQVHDTPQMSSMDLGRVDSFNDTNYVIAFAPESKTTQEIMNKVASAPFLKGRTIMGWPDEKSMDELDLNYSIDAVRVIFTDTFSYHLKFSWGHRIPMMKEHRDHSAHCQAVNEKMKCEGSEFWEKGFVAFQAAINAAIIEIATNHSVMEQLMSVTGVHMKILPFVAQGGVATDFFIFFCIISFSTFIYYVSVNVTQERQYITSLMTMMGLRESAFWLSWGLMYAGFILIMATLMALIVKSAQIVVLTGFVMVFTLFLLYGLSLITLAFLMSVLIKKPFLTGLVVFLLIVFWGILGFPALYTRLPAFLEWTLCLLSPFAFTVGMAQLIHLDYDVNSNAHLDSSQNPYLIIATLFMLVFDTLLYLVLTLYFDKILPAEYGHRCSPLFFLKSCFWFQHGRANHVVLENETDSDPTPNDCFEPVSPEFCGKEAIRIKNLKKEYAGKCERVEALKGVVFDIYEGQITALLGHSGAGKTTLLNILSGLSVPTSGSVTVYNHTLSRMADIENISKFTGFCPQSNVQFGFLTVKENLRLFAKIKGILPHEVEKEVQRVVQELEMENIQDILAQNLSGGQNRKLTFGIAILGDPQVLLLDEPTAGLDPLSRHRIWNLLKEGKSDRVILFSTQFIDEADILADRKVFISNGKLKCAGSSLFLKKKWGIGYHLSLHLNERCDPESITSLVKQHISDAKLTAQSEEKLVYILPLERTNKFPELYRDLDRCSNQGIEDYGVSITTLNEVFLKLEGKSTIDESDIGIWGQLQTDGAKDIGSLVELEQVLSSFHETRKTISGVALWRQQVCAIAKVRFLKLKKERKSLWTILLLFGISFIPQLLEHLFYESYQKSYPWELSPNTYFLSPGQQPQDPLTHLLVINKTGSTIDNFLHSLRRQNIAIEVDAFGTRNGTDDPSYNGAIIVSGDEKDHRFSIACNTKRLNCFPVLLDVISNGLLGIFNSSEHIQTDRSTFFEEHMDYEYGYRSNTFFWIPMAASFTPYIAMSSIGDYKKKAHSQLRISGLYPSAYWFGQALVDVSLYFLILLLMQIMDYIFSPEEIIFIIQNLLIQILCSIGYVSSLVFLTYVISFIFRNGRKNSGIWSFFFLIVVIFSIVATDLNEYGFLGLFFGTMLIPPFTLIGSLFIFSEISPDSMDYLGASESEIVYLALLIPYLHFLIFLFILRCLEMNCRKKLMRKDPVFRISPRSNAIFPNPEEPEGEEEDIQMERMRTVNAMAVRDFDETPVIIASCLRKEYAGKKKNCFSKRKKKIATRNVSFCVKKGEVIGLLGHNGAGKSTTIKMITGDTKPTAGQVILKGSGGGEPLGFLGYCPQENALWPNLTVRQHLEVYAAVKGLRKGDAMIAITRLVDALKLQDQLKAPVKTLSEGIKRKLCFVLSILGNPSVVLLDEPSTGMDPEGQQQMWQVIRATFRNTERGALLTTHYMAEAEAVCDRVAIMVSGRLRCIGSIQHLKSKFGKDYLLEMKLKNLAQMEPLHAEILRLFPQAAQQERFSSLMVYKLPVEDVRPLSQAFFKLEIVKQSFDLEEYSLSQSTLEQVFLELSKEQELGDLEEDFDPSVKWKLLLQEEP

SEQ ID NO: 38382 - protein, 1435 aa, Homo sapiens
MSKRRMSVGQQTWALLCKNCLKKWRMKRQTLLEWLFSFLLVLFLYLFFSNLHQVHDTPQMSSMDLGRVDSFNDTNYVIAFAPESKTTQEIMNKVASAPFLKGRTIMGWPDEKSMDELDLNYSIDAVRVIFTDTFSYHLKFSWGHRIPMMKEHRDHSAHCQAVNEKMKCEGSEFWEKGFVAFQAAINAAIIEIATNHSVMEQLMSVTGVHMKILPFVAQGGVATDFFIFFCIISFSTFIYYVSVNVTQERQYITSLMTMMGLRESAFWLSWGLMYAGFILIMATLMALIVKSAQIVVLTGFVMVFTLFLLYGLSLITLAFLMSVLIKKPFLTGLVVFLLIVFWGILGFPALYTRLPAFLEWTLCLLSPFAFTVGMAQLIHLDYDVNSNAHLDSSQNPYLIIATLFMLVFDTLLYLVLTLYFDKILPAEYGHRCSPLFFLKSCFWFQHGRANHVVLENETDSDPTPNDCFEPVSPEFCGKEAIRIKNLKKEYAGKCERVEALKGVVFDIYEGQITALLGHSGAGKTTLLNILSGLSVPTSGSVTVYNHTLSRMADIENISKFTGFCPQSNVQFGFLTVKENLRLFAKIKGILPHEVEKEVQRVVQELEMENIQDILAQNLSGGQNRKLTFGIAILGDPQVLLLDEPTAGLDPLSRHRIWNLLKEGKSDRVILFSTQFIDEADILADRKVFISNGKLKCAGSSLFLKKKWGIGYHLSLHLNERCDPESITSLVKQHISDAKLTAQSEEKLVYILPLERTNKFPELYRDLDRCSNQGIEDYGVSITTLNEVFLKLEGKSTIDESDIGIWGQLQTDGAKDIGSLVELEQVLSSFHETRKTISGVALWRQQVCAIAKVRFLKLKKERKSLWTILLLFGISFIPQLLEHLFYESYQKSYPWELSPNTYFLSPGQQPQDPLTHLLVINKTGSTIDNFLHSLRRQNIAIEVDAFGTRNGTDDPSYNGAIIVSGDEKDHRFSIACNTKRLNCFPVLLDVISNGLLGIFNSSEHIQTDRSTFFEEHMDYEYGYRSNTFFWIPMAASFTPYIAMSSIGDYKKKAHSQLRISGLYPSAYWFGQALVDVSLYFLILLLMQIMDYIFSPEEIIFIIQNLLIQILCSIGYVSSLVFLTYVISFIFRNGRKNSGIWSFFFLIVVIFSIVATDLNEYGFLGLFFGTMLIPPFTLIGSLFIFSEISPDSMDYLGASESEIVYLALLIPYLHFLIFLFILRCLEMNCRKKLMRKDPVFRISPRSNAIFPNPEEPEGEEEDIQMERMRTVNAMAVRDFDETPVIIASCLRKEYAGKKKNCFSKRKKKIATRNVSFCVKKGEVIGLLGHNGAGKSTTIKMITGDTKPTAGQVILKGSGGGEPLGFLGYCPQENALWPNLTVRQHLEVYAAVKGLRKGDAMIAITRLVDALKLQDQLKAPVKTLSEGIKRKAGDSGHL

SEQ ID NO: 38383 - protein, 1140 aa, Homo sapiens
MSVGQQTWALLCKNCLKKWRMKRQTLLEWLFSFLLVLFLYLFFSNLHQVHDTPQMSSMDLGRVDSFNDTNYVIAFAPESKTTQEIMNKVASAPFLKGRTIMGWPDEKSMDELDLNYSIDAVRVIFTDTFSYHLKFSWGHRIPMMKEHRDHSAHCQAVNEKMKCEGSEFWEKGFVAFQAAINAAIIEIATNHSVMEQLMSVTGVHMKILPFVAQGGVATDFFIFFCIISFSTFIYYVSVNVTQERQYITSLMTMMGLRESAFWLSWGLMYAGFILIMATLMALIVKSAQIVVLTGFVMVFTLFLLYGLSLITLAFLMSVLIKKPFLTGLVVFLLIVFWGILGFPALYTRLPAFLEWTLCLLSPFAFTVGMAQLIHLDYDVNSNAHLDSSQNPYLIIATLFMLVFDTLLYLVLTLYFDKILPAEYGHRCSPLFFLKSCFWFQHGRANHVVLENETDSDPTPNDCFEPVSPEFCGKEAIRIKNLKKEYAGKCERVEALKGVVFDIYEGQITALLGHSGAGKTTLLNILSGLSVPTSGSVTVYNHTLSRMADIENISKFTGFCPQSNVQFGFLTVKENLRLFAKIKGILPHEVEKEVQRVVQELEMENIQDILAQNLSGGQNRKLTFGIAILGDPQVLLLDEPTAGLDPLSRHRIWNLLKEGKSDRVILFSTQFIDEADILADRKVFISNGKLKCAGSSLFLKKKWGIGYHLSLHLNERCDPESITSLVKQHISDAKLTAQSEEKLVYILPLERTNKFPELYRDLDRCSNQGIEDYGVSITTLNEVFLKLEGKSTIDESDIGIWGQLQTDGAKDIGSLVELEQVLSSFHETRKTISGVALWRQQVCAIAKVRFLKLKKERKSLWTILLLFGISFIPQLLEHLFYESYQKSYPWELSPNTYFLSPGQQPQDPLTHLLVINKTGSTIDNFLHSLRRQNIAIEVDAFGTRNGTDDPSYNGAIIVSGDEKDHRFSIACNTKRLNCFPVLLDVISNGLLGIFNSSEHIQTDRSTFFEEHMDYEYGYRSNTFFWIPMAASFTPYIAMSSIGDYKKKAHSQLRISGLYPSAYWFGQALVDVSLYFLILLLMQIMDYIFSPEEIIFIIQNLLIQVVIFSIVATDLNEYGFLGLFWHHVNTSLHIDWLSIHFF

SEQ ID NO: 38384 - protein, 738 aa, Homo sapiens
MRGPPAWPLRLLEPPSPAEPGRLLPVACVWAAASRVPGSLSPFTGLRPARLWGAGPALLWGVGAARRWRSGCRGGGPGASRGVLGLARLLGLWARGPGSCRCGAFAGPGAPRLPRARFPGGPAAAAWAGDEAWRRGPAAPPGDKGRLRPAAAGLPEARKLLGLAYPERRRLAAAVGFLTMSSVISMSAPFFLGKIIDVIYTNPTVDYSDNLTRLCLGLSAVFLCGAAANAIRVYLMQTSGQRIVNRLRTSLFSSILRQEVAFFDKTRTGELINRLSSDTALLGRSVTENLSDGLRAGAQASVGISMMFFVSPNLATFVLSVVPPVSIIAVIYGRYLRKLTKVTQDSLAQATQLAEERIGNVRTVRAFGKEMTEIEKYASKVDHVMQLARKEAFARAGFFGATGLSGNLIVLSVLYKGGLLMGSAHMTVGELSSFLMYAFWVGISIGGLSSFYSELMKGLGAGGRLWELLEREPKLPFNEGVILNEKSFQGALEFKNVHFAYPARPEVPIFQDFSLSIPSGSVTALVGPSGSGKSTVLSLLLRLYDPASGTISLDGHDIRQLNPVWLRSKIGTVSQEPILFSCSIAENIAYGADDPSSVTAEEIQRVAEVANAVAFIRNFPQGFNTVVGEKGVLLSGGQKQRIAIARALLKNPKILLLDEATSALDAENEYLVQEALDRLMDGRTVLVIAHRLSTIKNANMVAVLDQGKITEYGKHEELLSKPNGIYRKLMNKQSFISA

SEQ ID NO: 38385 - protein, 842 aa, Homo sapiens
MVTVGNYCEAEGPVGPAWMQDGLSPCFFFTLVPSTRMALGTLALVLALPCRRRERPAGADSLSWGAGPRISPYVLQLLLATLQAALPLAGLAGRVGTARGAPLPSYLLLASVLESLAGACGLWLLVVERSQARQRLAMGIWIKFRHSPGLLLLWTVAFAAENLALVSWNSPQWWWARADLGQQVQFSLWVLRYVVSGGLFVLGLWAPGLRPQSYTLQVHEEDQDVERSQVRSAAQQSTWRDFGRKLRLLSGYLWPRGSPALQLVVLICLGLMGLERALNVLVPIFYRNIVNLLTEKAPWNSLAWTVTSYVFLKFLQGGGTGSTGFVSNLRTFLWIRVQQFTSRRVELLIFSHLHELSLRWHLGRRTGEVLRIADRGTSSVTGLLSYLVFNVIPTLADIIIGIIYFSMFFNAWFGLIVFLCMSLYLTLTIVVTEWRTKFRRAMNTQENATRARAVDSLLNFETVKYYNAESYEVERYREAIIKYQGLEWKSSASLVLLNQTQNLVIGLGLLAGSLLCAYFVTEQKLQVGDYVLFGTYIIQLYMPLNWFGTYYRMIQTNFIDMENMFDLLKEETEVKDLPGAGPLRFQKGRIEFENVHFSYADGRETLQDVSFTVMPGQTLALVGPSGAGKSTILRLLFRFYDISSGCIRIDGQDISQVTQASLRSHIGVVPQDTVLFNDTIADNIRYGRVTAGNDEVEAAAQAAGIHDAIMAFPEGYRTQVGERGLKLSGGEKQRVAIARTILKAPGIILLDEATSALDTSNERAIQASLAKVCANRTTIVVAHRLSTVVNADQILVIKDGCIVERGRHEALLSRGGVYADMWQLQQGQEETSEDTKPQTMER

SEQ ID NO: 38386 - protein, 211 aa, Homo sapiens
MVTVGNYCEAEGPVGPAWMQDGLSPCFFFTLVPSTRMALGTLALVLALPCRRRERPAGADSLSWGAGPRISPYALPGGPHCQAIYFWPPCWRVWPAPVACGCLSWSGARHGSVWQWASGSSSGTALVSCSSGLWRLQLRTWPWCLGTAHSGGGQGQTWASRFSLACGCCGMWSLEGCLSWVSGPLDFVPSPIHCRFMKRTKMWKGASELAD

SEQ ID NO: 38387 - protein, 796 aa, Homo sapiens
MVTVGNYCEAEGPVGPAWMQDGLSPCFFFTLVPSTRMALGTLALVLALPCRRRERPAGADSLSWGAGPRISPYVLQLLLATLQAALPLAGLAGRVGTARGAPLPSYLLLASVLESLAGACGLWLLVVERSQARQRLAMGIWIKFRHSPGLLLLWTVAFAAENLALVSWNSPQWWWARADLGQQVRSAAQQSTWRDFGRKLRLLSGYLWPRGSPALQLVVLICLGLMGLERALNVLVPIFYRNIVNLLTEKAPWNSLAWTVTSYVFLKFLQGGGTGSTGFVSNLRTFLWIRVQQFTSRRVELLIFSHLHELSLRWHLGRRTGEVLRIADRGTSSVTGLLSYLVFNVIPTLADIIIGIIYFSMFFNAWFGLIVFLCMSLYLTLTIVVTEWRTKFRRAMNTQENATRARAVDSLLNFETVKYYNAESYEVERYREAIIKYQGLEWKSSASLVLLNQTQNLVIGLGLLAGSLLCAYFVTEQKLQVGDYVLFGTYIIQLYMPLNWFGTYYRMIQTNFIDMENMFDLLKEETEVKDLPGAGPLRFQKGRIEFENVHFSYADGRETLQDVSFTVMPGQTLALVGPSGAGKSTILRLLFRFYDISSGCIRIDGQDISQVTQASLRSHIGVVPQDTVLFNDTIADNIRYGRVTAGNDEVEAAAQAAGIHDAIMAFPEGYRTQVGERGLKLSGGEKQRVAIARTILKAPGIILLDEATSALDTSNERAIQASLAKVCANRTTIVVAHRLSTVVNADQILVIKDGCIVERGRHEALLSRGGVYADMWQLQQGQEETSEDTKPQTMER

SEQ ID NO: 38388 - protein, 753 aa, Homo sapiens
MALLAMHSWRWAAAAAAFEKRRHSAILIRPLVSVSGSGPQWRPHQLGALGTARAYQQIPESLKSITWQRLGKGNSGQFLDAAKALQVWPLIEKRTCWHGHAGGGLHTDPKEGLKDVDTRKIIKAMLSYVWPKDRPDLRARVAISLGFLGGAKAMNIVVPFMFKYAVDSLNQMSGNMLNLSDAPNTVATMATAVLIGYGVSRAGAAFFNEVRNAVFGKVAQNSIRRIAKNVFLHLHNLDLGFHLSRQTGALSKAIDRGTRGISFVLSALVFNLLPIMFEVMLVSGVLYYKCGAQFALVTLGTLGTYTAFTVAVTRWRTRFRIEMNKADNDAGNAAIDSLLNYETVKYFNNERYEAQRYDGFLKTYETASLKSTSTLAMLNFGQSAIFSVGLTAIMVLASQGIVAGTLTVGDLVMVNGLLFQLSLPLNFLGTVYRETRQALIDMNTLFTLLKVDTQIKDKVMASPLQITPQTATVAFDNVHFEYIEGQKVLSGISFEVPAGKKVAIVGGSGSGKSTIVRLLFRFYEPQKGSIYLAGQNIQDVSLESLRRAVGVVPQDAVLFHNTIYYNLLYGNISASPEEVYAVAKLAGLHDAILRMPHGYDTQVGERGLKLSGGEKQRVAIARAILKDPPVILYDEATSSLDSITEETILGAMKDVVKHRTSIFIAHRLSTVVDADEIIVLDQGKVAERGTHHGLLANPHSIYSEMWHTQSSRVQNHDNPKWEAKKENISKEEERKKLQEEIVNSVKGCGNCSC

SEQ ID NO: 38389 - protein, 752 aa, Homo sapiens
MALLAMHSWRWAAAAAAFEKRRHSAILIRPLVSVSGSGPQWRPHQLGALGTARAYQIPESLKSITWQRLGKGNSGQFLDAAKALQVWPLIEKRTCWHGHAGGGLHTDPKEGLKDVDTRKIIKAMLSYVWPKDRPDLRARVAISLGFLGGAKAMNIVVPFMFKYAVDSLNQMSGNMLNLSDAPNTVATMATAVLIGYGVSRAGAAFFNEVRNAVFGKVAQNSIRRIAKNVFLHLHNLDLGFHLSRQTGALSKAIDRGTRGISFVLSALVFNLLPIMFEVMLVSGVLYYKCGAQFALVTLGTLGTYTAFTVAVTRWRTRFRIEMNKADNDAGNAAIDSLLNYETVKYFNNERYEAQRYDGFLKTYETASLKSTSTLAMLNFGQSAIFSVGLTAIMVLASQGIVAGTLTVGDLVMVNGLLFQLSLPLNFLGTVYRETRQALIDMNTLFTLLKVDTQIKDKVMASPLQITPQTATVAFDNVHFEYIEGQKVLSGISFEVPAGKKVAIVGGSGSGKSTIVRLLFRFYEPQKGSIYLAGQNIQDVSLESLRRAVGVVPQDAVLFHNTIYYNLLYGNISASPEEVYAVAKLAGLHDAILRMPHGYDTQVGERGLKLSGGEKQRVAIARAILKDPPVILYDEATSSLDSITEETILGAMKDVVKHRTSIFIAHRLSTVVDADEIIVLDQGKVAERGTHHGLLANPHSIYSEMWHTQSSRVQNHDNPKWEAKKENISKEEERKKLQEEIVNSVKGCGNCSC

SEQ ID NO: 38390 - protein, 702 aa, Homo sapiens
MALLAMHSWRWAAAAAAFEKRRHSAILIRPLVSVSGSGPQWRPHQLGALGTARAYQALQVWPLIEKRTCWHGHAGGGLHTDPKEGLKDVDTRKIIKAMLSYVWPKDRPDLRARVAISLGFLGGAKAMNIVVPFMFKYAVDSLNQMSGNMLNLSDAPNTVATMATAVLIGYGVSRAGAAFFNEVRNAVFGKVAQNSIRRIAKNVFLHLHNLDLGFHLSRQTGALSKAIDRGTRGISFVLSALVFNLLPIMFEVMLVSGVLYYKCGAQFALVTLGTLGTYTAFTVAVTRWRTRFRIEMNKADNDAGNAAIDSLLNYETVKYFNNERYEAQRYDGFLKTYETASLKSTSTLAMLNFGQSAIFSVGLTAIMVLASQGIVAGTLTVGDLVMVNGLLFQLSLPLNFLGTVYRETRQALIDMNTLFTLLKVDTQIKDKVMASPLQITPQTATVAFDNVHFEYIEGQKVLSGISFEVPAGKKVAIVGGSGSGKSTIVRLLFRFYEPQKGSIYLAGQNIQDVSLESLRRAVGVVPQDAVLFHNTIYYNLLYGNISASPEEVYAVAKLAGLHDAILRMPHGYDTQVGERGLKLSGGEKQRVAIARAILKDPPVILYDEATSSLDSITEETILGAMKDVVKHRTSIFIAHRLSTVVDADEIIVLDQGKVAERGTHHGLLANPHSIYSEMWHTQSSRVQNHDNPKWEAKKENIS

SEQ ID NO: 38391 - protein, 726 aa, Homo sapiens
MALLAMHSWRWAAAAAAFEKRRHSAILIRPLVSVSGSGPQWRPHQLGALGTARAYQALQVWPLIEKRTCWHGHAGGGLHTDPKEGLKDVDTRKIIKAMLSYVWPKDRPDLRARVAISLGFLGGAKAMNIVVPFMFKYAVDSLNQMSGNMLNLSDAPNTVATMATAVLIGYGVSRAGAAFFNEVRNAVFGKVAQNSIRRIAKNVFLHLHNLDLGFHLSRQTGALSKAIDRGTRGISFVLSALVFNLLPIMFEVMLVSGVLYYKCGAQFALVTLGTLGTYTAFTVAVTRWRTRFRIEMNKADNDAGNAAIDSLLNYETVKYFNNERYEAQRYDGFLKTYETASLKSTSTLAMLNFGQSAIFSVGLTAIMVLASQGIVAGTLTVGDLVMVNGLLFQLSLPLNFLGTVYRETRQALIDMNTLFTLLKVDTQIKDKVMASPLQITPQTATVAFDNVHFEYIEGQKVLSGISFEVPAGKKVAIVGGSGSGKSTIVRLLFRFYEPQKGSIYLAGQNIQDVSLESLRRAVGVVPQDAVLFHNTIYYNLLYGNISASPEEVYAVAKLAGLHDAILRMPHGYDTQVGERGLKLSGGEKQRVAIARAILKDPPVILYDEATSSLDSITEETILGAMKDVVKHRTSIFIAHRLSTVVDADEIIVLDQGKVAERGTHHGLLANPHSIYSEMWHTQSSRVQNHDNPKWEAKKENISKEEERKKLQEEIVNSVKGCGNCSC

SEQ ID NO: 38392 - protein, 735 aa, Homo sapiens
MLVHLFRVGIRGGPFPGRLLPPLRFQTFSAVRNTWRNGKTGQLHKAEGEYSDGYRSSSLLRAVAHLRSQLWAHLPRAPLAPRWSPSAWCWVGGALLGPMVLSKHPHLCLVALCEAEEAPPASSTPHVVGSRFNWKLFWQFLHPHLLVLGVAVVLALGAALVNVQIPLLLGQLVEVVAKYTRDHVGSFMTESQNLSTHLLILYGVQGLLTFGYLVLLSHVGERMAVDMRRALFSSLLRQDITFFDANKTGQLVSRLTTDVQEFKSSFKLVISQGLRSCTQVAGCLVSLSMLSTRLTLLLMVATPALMGVGTLMGSGLRKLSRQCQEQIARAMGVADEALGNVRTVRAFAMEQREEERYGAELEACRCRAEELGRGIALFQGLSNIAFNCMVLGTLFIGGSLVAGQQLTGGDLMSFLVASQTVQRSMANLSVLFGQVVRGLSAGARVFEYMALNPCIPLSGGCCVPKEQLRGSVTFQNVCFSYPCRPGFEVLKDFTLTLPPGKIVALVGQSGGGKTTVASLLERFYDPTAGVVMLDGRDLRTLDPSWLRGQVVGFISQEPVLFGTTIMENIRFGKLEASDEEVYTAAREANAHEFITSFPEGYNTVVGERGTTLSGGQKQRLAIARALIKQPTVLILDEATSALDAESERVVQEALDRASAGRTVLVIAHRLSTVRGAHCIVVMADGRVWEAGTHEELLKKGGLYAELIRRQALDAPRTAAPPPKKPEGPRSHQHKS

SEQ ID NO: 38393 - protein, 467 aa, Homo sapiens
MLVHLFRVGIRGGPFPGRLLPPLRFQTFSAVRRLLRLQPRVSQKEGTLGVSDHAQSALPTGGPLSWPWRYSDGYRSSSLLRAVAHLRSQLWAHLPRAPLAPRWSPSAWCWVGGALLGPMVLSKHPHLCLVALCEAEEAPPASSTPHVVGSRFNWKLFWQFLHPHLLVLGVAVVLALGAALVNVQIPLLLGQLVEVVAKYTRDHVGSFMTESQNLSTHLLILYGVQGLLTFGYLVLLSHVGERMAVDMRRALFSSLLRQDITFFDANKTGQLVSRLTTDVQEFKSSFKLVISQGLRSCTQVAGCLVSLSMLSTRLTLLLMVATPALMGVGTLMGSGLRKLSRQCQEQIARAMGVADEALGNVRTVRAFAMEQREEERYGAELEACRCRAEELGRGIALFQGLSNIAFNCMVLGTLFIGGSLVAGQQLTGGDLMSFLVASQTVQRQVHGQPLCPVWAGGPGAECRCPGL

SEQ ID NO: 38394 - protein, 718 aa, Homo sapiens
MLVHLFRVGIRGGPFPGRLLPPLRFQTFSAVRYSDGYRSSSLLRAVAHLRSQLWAHLPRAPLAPRWSPSAWCWVGGALLGPMVLSKHPHLCLVALCEAEEAPPASSTPHVVGSRFNWKLFWQFLHPHLLVLGVAVVLALGAALVNVQIPLLLGQLVEVVAKYTRDHVGSFMTESQNLSTHLLILYGVQGLLTFGYLVLLSHVGERMAVDMRRALFSSLLRQDITFFDANKTGQLVSRLTTDVQEFKSSFKLVISQGLRSCTQVAGCLVSLSMLSTRLTLLLMVATPALMGVGTLMGSGLRKLSRQCQEQIARAMGVADEALGNVRTVRAFAMEQREEERYGAELEACRCRAEELGRGIALFQGLSNIAFNCMVLGTLFIGGSLVAGQQLTGGDLMSFLVASQTVQRSMANLSVLFGQVVRGLSAGARVFEYMALNPCIPLSGGCCVPKEQLRGSVTFQNVCFSYPCRPGFEVLKDFTLTLPPGKIVALVGQSGGGKTTVASLLERFYDPTAGVVMLDGRDLRTLDPSWLRGQVVGFISQEPVLFGTTIMENIRFGKLEASDEEVYTAAREANAHEFITSFPEGYNTVVGERGTTLSGGQKQRLAIARALIKQPTVLILDEATSALDAESERVVQEALDRASAGRTVLVIAHRLSTVRGAHCIVVMADGRVWEAGTHEELLKKGGLYAELIRRQALDAPRTAAPPPKKPEGPRSHQHKS

SEQ ID NO: 38395 - protein, 701 aa, Homo sapiens
MLVHLFRVGIRGGPFPGRLLPPLRFQTFSAVRYSDGYRSSSLLRAVAHLRSQLWAHLPRALLGPMVLSKHPHLCLVALCEAEEAPPASSTPHVVGSRFNWKLFWQFLHPHLLVLGVAVVLALGAALVNVQIPLLLGQLVEVVAKYTRDHVGSFMTESQNLSTHLLILYGVQGLLTFGYLVLLSHVGERMAVDMRRALFSSLLRQDITFFDANKTGQLVSRLTTDVQEFKSSFKLVISQGLRSCTQVAGCLVSLSMLSTRLTLLLMVATPALMGVGTLMGSGLRKLSRQCQEQIARAMGVADEALGNVRTVRAFAMEQREEERYGAELEACRCRAEELGRGIALFQGLSNIAFNCMVLGTLFIGGSLVAGQQLTGGDLMSFLVASQTVQRSMANLSVLFGQVVRGLSAGARVFEYMALNPCIPLSGGCCVPKEQLRGSVTFQNVCFSYPCRPGFEVLKDFTLTLPPGKIVALVGQSGGGKTTVASLLERFYDPTAGVVMLDGRDLRTLDPSWLRGQVVGFISQEPVLFGTTIMENIRFGKLEASDEEVYTAAREANAHEFITSFPEGYNTVVGERGTTLSGGQKQRLAIARALIKQPTVLILDEATSALDAESERVVQEALDRASAGRTVLVIAHRLSTVRGAHCIVVMADGRVWEAGTHEELLKKGGLYAELIRRQALDAPRTAAPPPKKPEGPRSHQHKS

SEQ ID NO: 38396 - protein, 431 aa, Homo sapiens
MLVHLFRVGIRGGPFPGRLLPPLRFQTFSAVRYSDGYRSSSLLRAVAHLRSQLWAHLPRAPLAPRWSPSAWCWVGGALLGPMVLSKHPHLCLVALCEAEEAPPASSTPHVVGSRFNWKLFWQFLHPHLLVLGVAVVLALGAALVNVQIPLLLGQLVEVVAKYTRDHVGSFMTESQNLSTHLLILYGVQGLLTFGYLVLLSHVGERMAVDMRRALFSSLLRQDITFFDANKTGQLVSRLTTDVQEFKSSFKLVISQGLRSCTQVAGCLVSLSMLSTRLTLLLMVATPALMGVGTLMGSGLRKLSRQCQEQIARAMGVADEALGNVRTVRAFAMEQREEERYGAELEACRCRAEELGRGIALFQGLSNIAFNCMVLGTLFIGGSLVAGQQLTGGDLMSFLVASQTVQSFLRVAPCPNSLPLQAVTFHAWKDHP

SEQ ID NO: 38397 - protein, 693 aa, Homo sapiens
MLVHLFRVGIRGGPFPGRLLPPLRFQTFSAVRYSDGYRSSSLLRAVAHLRSQLWAHLPRAPLAPRWSPSAWCWVGGALLGPMVLSKHPHLCLVALCEAEEAPPASSTPHVVGSRFNWKLFWQFLHPHLLVLGVAVVLALGAALVNVQIPLLLGQLVEVVAKYTRDHVGSFMTESQNLSTHLLILYGVQGLLTFGYLVLLSHVGERMAVDMRRALFSSLLRQDITFFDANKTGQLVSRLTTDVQEFKSSFKLVISQGLRSCTQVAGCLVSLSMLSTRLTLLLMVATPALMGVGTLMGSGLRKLSRQCQEQIARAMGVADEALGNVRTVRAFAMEQREEERYGAELEACRCRAEELGRGIALFQGLSNIAFNCMVLGTLFIGGSLVAGQQLTGGDLMSFLVASQTVQRSMANLSVLFGQVVRGLSAGARVFEYMALNPCIPLSGGCCVPKEQLRGSVTFQNVCFSYPCRPGFEVLKDFTLTLPPGKIVALVGQSGGGKTTVASLLERFYDPTAGVVMLDGRDLRTLDPSWLRGQVVGFISQEPVLFGTTIMENIRFGKLEASDEEVYTAAREANAHEFITSFPEGYNTVVGERGTTLSGGQKQRLAIARALIKQPTVLILDEATSALDAESERVVQEALDRASAGRTVLAGTHEELLKKGGLYAELIRRQALDAPRTAAPPPKKPEGPRSHQHKS

SEQ ID NO: 38398 - protein, 630 aa, Homo sapiens
MRVKLLLPAAPVLPRQHAGAFISGRDSGWPIPRQAATAPPLPDILSCQLALGAALVNVQIPLLLGQLVEVVAKYTRDHVGSFMTESQNLSTHLLILYGVQGLLTFGYLVLLSHVGERMAVDMRRALFSSLLRQDITFFDANKTGQLVSRLTTDVQEFKSSFKLVISQGLRSCTQVAGCLVSLSMLSTRLTLLLMVATPALMGVGTLMGSGLRKLSRQCQEQIARAMGVADEALGNVRTVRAFAMEQREEERYGAELEACRCRAEELGRGIALFQGLSNIAFNCMVLGTLFIGGSLVAGQQLTGGDLMSFLVASQTVQRSMANLSVLFGQVVRGLSAGARVFEYMALNPCIPLSGGCCVPKEQLRGSVTFQNVCFSYPCRPGFEVLKDFTLTLPPGKIVALVGQSGGGKTTVASLLERFYDPTAGVVMLDGRDLRTLDPSWLRGQVVGFISQEPVLFGTTIMENIRFGKLEASDEEVYTAAREANAHEFITSFPEGYNTVVGERGTTLSGGQKQRLAIARALIKQPTVLILDEATSALDAESERVVQEALDRASAGRTVLVIAHRLSTVRGAHCIVVMADGRVWEAGTHEELLKKGGLYAELIRRQALDAPRTAAPPPKKPEGPRSHQHKS

SEQ ID NO: 38399 - protein, 766 aa, Homo sapiens
MRLWKAVVVTLAFMSVDICVTTAIYVFSHLDRSLLEDIRHFNIFDSVLDLWAACLYRSCLLLGATIGVAKNSALGPRRLRASWLVITLVCLFVGIYAMVKLLLFSEVRRPIRDPWFWALFVWTYISLGASFLLWWLLSTVRPGTQALEPGAATEAEGFPGSGRPPPEQASGATLQKLLSYTKPDVAFLVAASFFLIVAALGETFLPYYTGRAIDGIVIQKSMDQFSTAVVIVCLLAIGSSFAAGIRGGIFTLIFARLNIRLRNCLFRSLVSQETSFFDENRTGDLISRLTSDTTMVSDLVSQNINVFLRNTVKVTGVVVFMFSLSWQLSLVTFMGFPIIMMVSNIYGKYYKRLSKEVQNALARASNTAEETISAMKTVRSFANEEEEAEVYLRKLQQVYKLNRKEAAAYMYYVWGSGLTLLVVQVSILYYGGHLVISGQMTSGNLIAFIIYEFVLGDCMESVGSVYSGLMQGVGAAEKVFEFIDRQPTMVHDGSLAPDHLEGRVDFENVTFTYRTRPHTQVLQNVSFSLSPGKVTALVGPSGSGKSSCVNILENFYPLEGGRVLLDGKPISAYDHKYLHRVISLVSQEPVLFARSITDNISYGLPTVPFEMVVEAAQKANAHGFIMELQDGYSTETGEKGAQLSGGQKQRVAMARALVRNPPVLILDEATSALDAESEYLIQQAIHGNLQKHTVLIIAHRLSTVEHAHLIVVLDKGRVVQQGTHQQLLAQGGLYAKLVQRQMLGLQPAADFTAGHNEPVANGSHKA

SEQ ID NO: 38400 - protein, 723 aa, Homo sapiens
MRLWKAVVVTLAFMSVDICVTTAIYVFSHLDRSLLEDIRHFNIFDSVLDLWAACLYRSCLLLGATIGVAKNSALGPRRLRASWLVITLVCLFVGIYAMVKLLLFSEVRRPIRDPWFWALFVWTYISLGASFLLWWLLSTVRPGTQALEPGAATEAEGFPGSGRPPPEQASGATLQKLLSYTKPDVAFLVAASFFLIVAALGETFLPYYTGRAIDGIVIQKSMDQFSTAVVIVCLLAIGSSFAAGIRGGIFTLIFARLNIRLRNCLFRSLVSQETSFFDENRTGDLISRLTSDTTMVSDLVSQNINVFLRNTVKVTGVVVFMFSLSWQLSLVTFMGFPIIMMVSNIYGKYYKRLSKEVQNALARASNTAEETISAMKTVRSFANEEEEAEVYLRKLQQVYKLNRKEAAAYMYYVWGSGSVGSVYSGLMQGVGAAEKVFEFIDRQPTMVHDGSLAPDHLEGRVDFENVTFTYRTRPHTQVLQNVSFSLSPGKVTALVGPSGSGKSSCVNILENFYPLEGGRVLLDGKPISAYDHKYLHRVISLVSQEPVLFARSITDNISYGLPTVPFEMVVEAAQKANAHGFIMELQDGYSTETGEKGAQLSGGQKQRVAMARALVRNPPVLILDEATSALDAESEYLIQQAIHGNLQKHTVLIIAHRLSTVEHAHLIVVLDKGRVVQQGTHQQLLAQGGLYAKLVQRQMLGLQPAADFTAGHNEPVANGSHKA

SEQ ID NO: 38401 - protein, 766 aa, Homo sapiens; identical to SEQ ID NO: 38399

SEQ ID NO: 38402 - protein, 769 aa, Homo sapiens
MRLWKAVVVTLAFMSVDICVTTAIYVFSHLDRSLLEDIRHFNIFDSVLDLWAACLYRSCLLLGATIGVAKNSALGPRRLRASWLVITLVCLFVGIYAMVKLLLFSEVRRPIRDPWFWALFVWTYISLGASFLLWWLLSTVRPGTQALEPGAATEAEGFPGSGRPPPEQASGATLQKLLSYTKPDVAFLVAASFFLIVAALGETFLPYYTGRAIDGIVIQKSMDQFSTAVVIVCLLAIGSSFAAGIRGGIFTLIFARLNIRLRNCLFRSLVSQETSFFDENRTGDLISRLTSDTTMVSDLVSQNINVFLRNTVKVTGVVVFMFSLSWQLSLVTFMGFPIIMMVSNIYGKYYKRLSKEVQNALARASNTAEETISAMKTVRSFANEEEEAEVYLRKLQQVYKLNRKEAAAYMYYVWGSGLTLLVVQVSILYYGGHLVISGQMTSGNLIAFIIYEFVLGDCMESVGSVYSGLMQGVGAAEKVFEFIDRQPTMVHDGSLAPDHLEGRVDFENVTFTYRTRPHTQVLQNVSFSLSPGKVTALVGPSGSGKSSCVNILENFYPLEGGRVLLDGKPISAYDHKYLHRVISLVSQEPVLFARSITDNISYGLPTVPFEMVVEAAQKANAHGFIMELQDGYSTETGEKGAQLSGGQKQRVAMARALVRNPPVLILDEATSALDAESEYLSPQIQQAIHGNLQKHTVLIIAHRLSTVEHAHLIVVLDKGRVVQQGTHQQLLAQGGLYAKLVQRQMLGLQPAADFTAGHNEPVANGSHKA

SEQ ID NO: 38403 - protein, 703 aa, Homo sapiens
MRLWKAVVVTLAFMSVDICVTTAIYVFSHLDRSLLEDIRHFNIFDSVLDLWAACLYRSCLLLGATIGVAKNSALGPRRLRASWLVITLVCLFVGIYAMVKLLLFSEVRRPIRDPWFWALFVWTYISLGASFLLWWLLSTVRPGTQALEPGAATEAEGFPGSGRPPPEQASGATLQKLLSYTKPDVAFLVAASFFLIVAALGETFLPYYTGRAIDGIVIQKSMDQFSTAVVIVCLLAIGSSFAAGIRGGIFTLIFARLNIRLRNCLFRSLVSQETSFFDENRTGDLISRLTSDTTMVSDLVSQNINVFLRNTVKVTGVVVFMFSLSWQLSLVTFMGFPIIMMVSNIYGKYYKRLSKEVQNALARASNTAEETISAMKTVRSFANEEEEAEVYLRKLQQVYKLNRKEAAAYMYYVWGSGLTLLVVQVSILYYGGHLVISGQMTSGNLIAFIIYEFVLGDCMENVSFSLSPGKVTALVGPSGSGKSSCVNILENFYPLEGGRVLLDGKPISAYDHKYLHRVISLVSQEPVLFARSITDNISYGLPTVPFEMVVEAAQKANAHGFIMELQDGYSTETGEKGAQLSGGQKQRVAMARALVRNPPVLILDEATSALDAESEYLIQQAIHGNLQKHTVLIIAHRLSTVEHAHLIVVLDKGRVVQQGTHQQLLAQGGLYAKLVQRQMLGLQPAADFTAGHNEPVANGSHKA

SEQ ID NO: 38404 - protein, 766 aa, Homo sapiens; identical to SEQ ID NO: 38399

SEQ ID NO: 38405 - protein, 1464 aa, Homo sapiens
MCLLVFPLVPRSPDYILPCSPGWRLRLAASFLLSVFPLLDLLPVALPPGAGPGPIGLEVLAGCVAAVAWISHSLALWVLAHSPHGHSRGPLALALVALLPAPALVLTVLWHCQRGTLLPPLLPGPMARLCLLILQLAALLAYALGWAAPGGPREPWAQEPLLPEDQEPEVAEDGESWLSRFSYAWLAPLLARGACGELRQPQDICRLPHRLQPTYLARVFQAHWQEGARLWRALYGAFGRCYLALGLLKLVGTMLGFSGPLLLSLLVGFLEEGQEPLSHGLLYALGLAGGAVLGAVLQNQYGYEVYKVTLQARGAVLNILYCKALQLGPSRPPTGEALNLLGTDSERLLNFAGSFHEAWGLPLQLAITLYLLYQQVGVAFVGGLILALLLVPVNKVIATRIMASNQEMLQHKDARVKLVTELLSGIRVIKFCGWEQALGARVEACRARELGRLRVIKYLDAACVYLWAALPVVISIVIFITYVLMGHQLTATKVFTALALVRMLILPLNNFPWVINGLLEAKVSLDRIQLFLDLPNHNPQAYYSPDCGRLGAQIKWLLCSDPPAEPSTVLELHGALFSWDPVGTSLETFISHLEVKKGMLVGIVGKVGCGKSSLLAAIAGELHRLRGHVAVRGLSKGFGLATQEPWIQFATIRDNILFGKTFDAQLYKEVLEACALNDDLSILPAGDQTEVGEKGVTLSGGQRARIALARAVYQEKELYLLDDPLAAVDADVANHLLHRCILGMLSYTTRLLCTHRTEYLERADAVLLMEAGRLIRAGPPSEILPLVQAVPKAWAENGQESDSATAQSVQNPEKTKEGLEEEQSTSGRLLQEESKKEGAVALHVYQAYWKAVGQGLALAILFSLLLMQATRNAADWWLSHWISQLKAENSSQEAQPSTSPASMGLFSPQLLLFSPGNLYIPVFPLPKAAPNGSSDIRFYLTVYATIAGVNSLCTLLRAVLFAAGTLQAAATLHRRLLHRVLMAPVTFFNATPTGRILNRFSSDVACADDSLPFILNILLANAAGLLGLLAVLGSGLPWLLLLLPPLSIMYYHVQRHYRASSRELRRLGSLTLSPLYSHLADTLAGLSVLRATGATYRFEEENLRLLELNQRCQFATSATMQWLDIRLQLMGAAVVSAIAGIALVQHQQGLANPGLVGLSLSYALSLTGLLSGLVSSFTQTEAMLVSVERLEEYTCDLPQEPQGQPLQLGTGWLTQGGVEFQDVVLAYRPGLPNALDGVTFCVQPGEKLGIVGRTGSGKSSLLLVLFRLLEPSSGRVLLDGVDTSQLELAQLRSQLAIIPQEPFLFSGTVRENLDPQGLHKDRALWQALKQCHLSEVITSMGGLDGELGEGGRSLSLGQRQLLCLARALLTDAKILCIDEATASVDQKTDQLLQQTICKRFANKTVLTIAHRLNTILNSDRVLVLQAGRVVELDSPATLRNQPHSLFQQLLQSSQQGVPASLGGP

SEQ ID NO: 38406 - protein, 1492 aa, Homo sapiens
MERLLAQLCGSSAAWPLPLWEGDTTGHCFTQLVLSALPHALLAVLSACYLGTPRSPDYILPCSPGWRLRLAASFLLSVFPLLDLLPVALPPGAGPGPIGLEVLAGCVAAVAWISHSLALWVLAHSPHGHSRGPLALALVALLPAPALVLTVLWHCQRGTLLPPLLPGPMARLCLLILQLAALLAYALGWAAPGGPREPWAQEPLLPEDQEPEVAEDGESWLSRFSYAWLAPLLARGACGELRQPQDICRLPHRLQPTYLARVFQAHWQEGARLWRALYGAFGRCYLALGLLKLVGTMLGFSGPLLLSLLVGFLEEGQEPLSHGLLYALGLAGGAVLGAVLQNQYGYEVYKVTLQARGAVLNILYCKALQLGPSRPPTGEALNLLGTDSERLLNFAGSFHEAWGLPLQLAITLYLLYQQVGVAFVGGLILALLLVPVNKVIATRIMASNQEMLQHKDARVKLVTELLSGIRVIKFCGWEQALGARVEACRARELGRLRVIKYLDAACVYLWAALPVVISIVIFITYVLMGHQLTATKVFTALALVRMLILPLNNFPWVINGLLEAKVSLDRIQLFLDLPNHNPQAYYSPDPPAEPSTVLELHGALFSWDPVGTSLETFISHLEVKKGMLVGIVGKVGCGKSSLLAAIAGELHRLRGHVAVRGLSKGFGLATQEPWIQFATIRDNILFGKTFDAQLYKEVLEACALNDDLSILPAGDQTEVGEKGVTLSGGQRARIALARAVYQEKELYLLDDPLAAVDADVANHLLHRCILGMLSYTTRLLCTHRTEYLERADAVLLMEAGRLIRAGPPSEILPLVQAVPKAWAENGQESDSATAQSVQNPEKTKEGLEEEQSTSGRLLQEESKKEGAVALHVYQAYWKAVGQGLALAILFSLLLMQATRNAADWWLSHWISQLKAENSSQEAQPSTSPASMGLFSPQLLLFSPGNLYIPVFPLPKAAPNGSSDIRFYLTVYATIAGVNSLCTLLRAVLFAAGTLQAAATLHRRLLHRVLMAPVTFFNATPTGRILNRFSSDVACADDSLPFILNILLANAAGLLGLLAVLGSGLPWLLLLLPPLSIMYYHVQRHYRASSRELRRLGSLTLSPLYSHLADTLAGLSVLRATGATYRFEEENLRLLELNQRCQFATSATMQWLDIRLQLMGAAVVSAIAGIALVQHQQGLANPGLVGLSLSYALSLTGLLSGLVSSFTQTEAMLVSVERLEEYTCDLPQEPQGQPLQLGTGWLTQGGVEFQDVVLAYRPGLPNALDGVTFCVQPGEKLGIVGRTGSGKSSLLLVLFRLLEPSSGRVLLDGVDTSQLELAQLRSQLAIIPQEPFLFSGTVRENLDPQGLHKDRALWQALKQCHLSEVITSMGGLDGELGEGGRSLSLGQRQLLCLARALLTDAKILCIDEATASVDQKTDQLLQQTICKRFANKTVLTIAHRLNTILNSDRVLVLQAGRVVELDSPATLRNQPHSLFQQLLQSSQQGVPASLGGP

SEQ ID NO: 38407 - protein, 1344 aa, Homo sapiens
MTRKRTYWVPNSSGGLVNRGIDIGDDMVSGLIYKTYTLQDGPWSQQERNPEAPGRAAVPPWGKYDAALRTMIPFRPKPRFPAPQPLDNAGLFSYLTVSWLTPLMIQSLRSRLDENTIPPLSVHDASDKNVQRLHRLWEEEVSRRGIEKASVLLVMLRFQRTRLIFDALLGICFCIASVLGPILIIPKILEYSEEQLGNVVHGVGLCFALFLSECVKSLSFSSSWIINQRTAIRFRAAVSSFAFEKLIQFKSVIHITSGEAISFFTGDVNYLFEGVCYGPLVLITCASLVICSISSYFIIGYTAFIAILCYLLVFPLAVFMTRMAVKAQHHTSEVSDQRIRVTSEVLTCIKLIKMYTWEKPFAKIIEDLRRKERKLLEKCGLVQSLTSITLFIIPTVATAVWVLIHTSLKLKLTASMAFSMLASLNLLRLSVFFVPIAVKGLTNSKSAVMRFKKFFLQESPVFYVQTLQDPSKALVFEEATLSWQQTCPGIVNGALELERNGHASEGMTRPRDALGPEEEGNSLGPELHKINLVVSKGMMLGVCGNTGSGKSSLLSAILEEMHLLEGSVGVQGSLAYVPQQAWIVSGNIRENILMGGAYDKARYLQVLHCCSLNRDLELLPFGDMTEIGERGLNLSGGQKQRISLARAVYSDRQIYLLDDPLSAVDAHVGKHIFEECIKKTLRGKTVVLVTHQLQYLEFCGQIILLENGKICENGTHSELMQKKGKYAQLIQKMHKEATSDMLQDTAKIAEKPKVESQALATSLEESLNGNAVPEHQLTQEEEMEEGSLSWRVYHHYIQAAGGYMVSCIIFFFVVLIVFLTIFSFWWLSYWLEQGSGTNSSRESNGTMADLGNIADNPQLSFYQLVYGLNALLLICVGVCSSGIFTKVTRKASTALHNKLFNKVFRCPMSFFDTIPIGRLLNCFAGDLEQLDQLLPIFSEQFLVLSLMVIAVLLIVSVLSPYILLMGAIIMVICFIYYMMFKKAIGVFKRLENYSRSPLFSHILNSLQGLSSIHVYGKTEDFISQFKRLTDAQNNYLLLFLSSTRWMALRLEIMTNLVTLAVALFVAFGISSTPYSFKVMAVNIVLQLASSFQATARIGLETEAQFTAVERILQYMKMCVSEAPLHMEGTSCPQGWPQHGEIIFQDYHMKYRDNTPTVLHGINLTIRGHEVVGIVGRTGSGKSSLGMALFRLVEPMAGRILIDGVDICSIGLEDLRSKLSVIPQDPVLLSGTIRFNLDPFDRHTDQQIWDALERTFLTKAIILIDEATASIDMETDTLIQRTIREAFQGCTVLVIAHRVTTVLNCDHILVMGNGKVVEFDRPEVLRKKPGSLFAALMATATSSLR

SEQ ID NO: 38408 - protein, 1382 aa, Homo sapiens
MTRKRTYWVPNSSGGLVNRGIDIGDDMVSGLIYKTYTLQDGPWSQQERNPEAPGRAAVPPWGKYDAALRTMIPFRPKPRFPAPQPLDNAGLFSYLTVSWLTPLMIQSLRSRLDENTIPPLSVHDASDKNVQRLHRLWEEEVSRRGIEKASVLLVMLRFQRTRLIFDALLGICFCIASVLGPILIIPKILEYSEEQLGNVVHGVGLCFALFLSECVKSLSFSSSWIINQRTAIRFRAAVSSFAFEKLIQFKSVIHITSGEAISFFTGDVNYLFEGVCYGPLVLITCASLVICSISSYFIIGYTAFIAILCYLLVFPLAVFMTRMAVKAQHHTSEVSDQRIRVTSEVLTCIKLIKMYTWEKPFAKIIEDLRRKERKLLEKCGLVQSLTSITLFIIPTVATAVWVLIHTSLKLKLTASMAFSMLASLNLLRLSVFFVPIAVKGLTNSKSAVMRFKKFFLQESPVFYVQTLQDPSKALVFEEATLSWQQTCPGIVNGALELERNGHASEGMTRPRDALGPEEEGNSLGPELHKINLVVSKGMMLGVCGNTGSGKSSLLSAILEEMHLLEGSVGVQGSLAYVPQQAWIVSGNIRENILMGGAYDKARYLQVLHCCSLNRDLELLPFGDMTEIGERGLNLSGGQKQRISLARAVYSDRQIYLLDDPLSAVDAHVGKHIFEECIKKTLRGKTVVLVTHQLQYLEFCGQIILLENGKICENGTHSELMQKKGKYAQLIQKMHKEATSDMLQDTAKIAEKPKVESQALATSLEESLNGNAVPEHQLTQEEEMEEGSLSWRVYHHYIQAAGGYMVSCIIFFFVVLIVFLTIFSFWWLSYWLEQGSGTNSSRESNGTMADLGNIADNPQLSFYQLVYGLNALLLICVGVCSSGIFTKVTRKASTALHNKLFNKVFRCPMSFFDTIPIGRLLNCFAGDLEQLDQLLPIFSEQFLVLSLMVIAVLLIVSVLSPYILLMGAIIMVICFIYYMMFKKAIGVFKRLENYSRSPLFSHILNSLQGLSSIHVYGKTEDFISQFKRLTDAQNNYLLLFLSSTRWMALRLEIMTNLVTLAVALFVAFGISSTPYSFKVMAVNIVLQLASSFQATARIGLETEAQFTAVERILQYMKMCVSEAPLHMEGTSCPQGWPQHGEIIFQDYHMKYRDNTPTVLHGINLTIRGHEVVGIVGRTGSGKSSLGMALFRLVEPMAGRILIDGVDICSIGLEDLRSKLSVIPQDPVLLSGTIRFNLDPFDRHTDQQIWDALERTFLTKAISKFPKKLHTDVVENGGNFSVGERQLLCIARAVLRNSKIILIDEATASIDMETDTLIQRTIREAFQGCTVLVIAHRVTTVLNCDHILVMGNGKVVEFDRPEVLRKKPGSLFAALMATATSSLR

SEQ ID NO: 38409 - protein, 1382 aa, Homo sapiens; identical to SEQ ID NO: 38408

SEQ ID NO: 38410 - protein, 1382 aa, Homo sapiens; identical to SEQ ID NO: 38408

SEQ ID NO: 38411 - protein, 755 aa, Homo sapiens
MTRKRTYWVPNSSGGLVNRGIDIGDDMVSGLIYKTYTLQDGPWSQQERNPEAPGRAAVPPWGKYDAALRTMIPFRPKPRFPAPQPLDNAGLFSYLTVSWLTPLMIQSLRSRLDENTIPPLSVHDASDKNVQRLHRLWEEEVSRRGIEKASVLLVMLRFQRTRLIFDALLGICFCIASVLGPILIIPKILEYSEEQLGNVVHGVGLCFALFLSECVKSLSFSSSWIINQRTAIRFRAAVSSFAFEKLIQFKSVIHITSGEAISFFTGDVNYLFEGVCYGPLVLITCASLVICSISSYFIIGYTAFIAILCYLLVFPLAVFMTRMAVKAQHHTSEVSDQRIRVTSEVLTCIKLIKMYTWEKPFAKIIEDLRRKERKLLEKCGLVQSLTSITLFIIPTVATAVWVLIHTSLKLKLTASMAFSMLASLNLLRLSVFFVPIAVKGLTNSKSAVMRFKKFFLQESPVFYVQTLQDPSKALVFEEATLSWQQTCPGIVNGALELERNGHASEGMTRPRDALGPEEEGNSLGPELHKINLVVSKGMMLGVCGNTGSGKSSLLSAILEEMHLLEGSVGVQGSLAYVPQQAWIVSGNIRENILMGGAYDKARYLQVLHCCSLNRDLELLPFGDMTEIGERGLNLSGGQKQRISLARAVYSDRQIYLLDDPLSAVDAHVGKHIFEECIKKTLRGKTVVLVTHQLQYLEFCGQIILLENGKICENGTHSELMQKKGKYAQLIQKMHKEATSCRSISSHRRRRWKKAP

SEQ ID NO: 38412 - protein, 1359 aa, Homo sapiens
MVGEGPYLISDLDQRGRRRSFAERYDPSLKTMIPVRPCARLAPNPVDDAGLLSFATFSWLTPVMVKGYRQRLTVDTLPPLSTYDSSDTNAKRFRVLWDEEVARVGPEKASLSHVVWKFQRTRVLMDIVANILCIIMAAIGPVILIHQILQQTERTSGKVWVGIGLCIALFATEFTKVFFWALAWAINYRTAIRLKVALSTLVFENLVSFKTLTHISVGEVLNILSSDSYSLFEAALFCPLPATIPILMVFCAAYAFFILGPTALIGISVYVIFIPVQMFMAKLNSAFRRSAILVTDKRVQTMNEFLTCIRLIKMYAWEKSFTNTIQDIRRRERKLLEKAGFVQSGNSALAPIVSTIAIVLTLSCHILLRRKLTAPVAFSVIAMFNVMKFSIAILPFSIKAMAEANVSLRRMKKILIDKSPPSYITQPEDPDTVLLLANATLTWEHEASRKSTPKKLQNQKRHLCKKQRSEAYSERSPPAKGATGPEEQSDSLKSVLHSISFVVRKGKILGICGNVGSGKSSLLAALLGQMQLQKGVVAVNGTLAYVSQQAWIFHGNVRENILFGEKYDHQRYQHTVRVCGLQKDLSNLPYGDLTEIGERGLNLSGGQRQRISLARAVYSDRQLYLLDDPLSAVDAHVGKHVFEECIKKTLRGKTVVLVTHQLQFLESCDEVILLEDGEICEKGTHKELMEERGRYAKLIHNLRGLQFKDPEHLYNAAMVEAFKESPAEREEDAGIIVLAPGNEKDEGKESETGSEFVDTKVPEHQLIQTESPQEGTVTWKTYHTYIKASGGYLLSLFTVFLFLLMIGSAAFSNWWLGLWLDKGSRMTCGPQGNRTMCEVGAVLADIGQHVYQWVYTASMVFMLVFGVTKGFVFTKTTLMASSSLHDTVFDKILKSPMSFFDTTPTGRLMNRFSKDMDELDVRLPFHAENFLQQFFMVVFILVILAAVFPAVLLVVASLAVGFFILLRIFHRGVQELKKVENVSRSPWFTHITSSMQGLGIIHAYGKKESCITYHLLYFNCALRWFALRMDVLMNILTFTVALLVTLSFSSISTSSKGLSLSYIIQLSGLLQVCVRTGTETQAKFTSVELLREYISTCVPECTHPLKVGTCPKDWPSRGEITFRDYQMRYRDNTPLVLDSLNLNIQSGQTVGIVGRTGSGKSSLGMALFRLVEPASGTIFIDEVDICILSLEDLRTKLTVIPQDPVLFVGTVRYNLDPFESHTDEMLWQVLERTFMRDTIMKLPEKLQAEVTENGENFSVGERQLLCVARALLRNSKIILLDEATASMDSKTDTLVQNTIKDAFKGCTVLTIAHRLNTVLNCDHVLVMENGKVIEFDKPEVLAEKPDSAFAMLLAAEVRL

SEQ ID NO: 38413 - protein, 633 aa, Homo sapiens
MVGEGPYLISDLDQRGRRRSFAERYDPSLKTMIPVRPCARLAPNPVDDAGLLSFATFSWLTPVMVKGYRQRLTVDTLPPLSTYDSSDTNAKRFRVLWDEEVARVGPEKASLSHVVWKFQRTRVLMDIVANILCIIMAAIGPTVLIHQILQQTERTSGKVWVGIGLCIALFATEFTKVFFWALAWAINYRTAIRLKVALSTLVFENLVSFKTLTHISVGEVLNILSSDSYSLFEAALFCPLPATIPILMVFCAAYAFFILGPTALIGISVYVIFIPVQMFMAKLNSAFRRSAILVTDKRVQTMNEFLTCIRLIKMYAWEKSFTNTIQDIRRRERKLLEKAGFVQSGNSALAPIVSTIAIVLTLSCHILLRRKLTAPVAFSVIAMFNVMKFSIAILPFSIKAMAEANVSLRRMKKILIDKSPPSYITQPEDPDTVLLLANATLTWEHEASRKSTPKKLQNQKRHLCKKQRSEAYSERSPPAKGATGPEEQSDSLKSVLHSISFVVRKGKILGICGNVGSGKSSLLAALLGQMQLQKGVVAVNGTLAYVSQQAWIFHGNVRENILFGEKYDHQRLGSGASTSLGGRGRGLAWPALSTPTVSSTCWTTPCRPWTPTWGSTSLRSALRRRSGERQSSW

SEQ ID NO: 38414 - protein, 935 aa, Homo sapiens
MVGEGPYLISDLDQRGRRRSFAERYDPSLKTMIPVRPCARLAPNPVDDAGLLSFATFSWLTPVMVKGYRQRLTVDTLPPLSTYDSSDTNAKRFRVLWDEEVARVGPEKASLSHVVWKFQRTRVLMDIVANILCIIMAAIGPTVLIHQILQQTERTSGKVWVGIGLCIALFATEFTKVFFWALAWAINYRTAIRLKVALSTLVFENLVSFKTLTHISVGEVLNILSSDSYSLFEAALFCPLPATIPILMVFCAAYAFFILGPTALIGISVYVIFIPVQMFMAKLNSAFRRSAILVTDKRVQTMNEFLTCIRLIKMYAWEKSFTNTIQDIRRRERKLLEKAGFVQSGNSALAPIVSTIAIVLTLSCHILLRRKLTAPVAFSVIAMFNVMKFSIAILPFSIKAMAEANVSLRRMKKILIDKSPPSYITQPEDPDTVLLLANATLTWEHEASRKSTPKKLQNQKRHLCKKQRSEAYSERSPPAKGATGPEEQSDSLKSVLHSISFVVRKGKILGICGNVGSGKSSLLAALLGQMQLQKGVVAVNGTLAYVSQQAWIFHGNVRENILFGEKYDHQRYQHTVRVCGLQKDLSNLPYGDLTEIGERGLNLSGGQRQRISLARAVYSDRQLYLLDDPLSAVDAHVGKHVFEECIKKTLRGKTVVLVTHQLQFLESCDEVILLEDGEICEKGTHKELMEERGRYAKLIHNLRGLQFKDPEHLYNAAMVEAFKESPAEREEDAVLAPGNEKDEGKESETGSEFVDTKVPEHQLIQTESPQEGTVTWKTYHTYIKASGGYLLSLFTVFLFLLMIGSAAFSNWWLGLWLDKGSRMTCGPQGNRTMCEVGAVLADIGQHVYQWVYTASMVFMLVFGVTKGFVFTKTTLMASSSLHDTVFDKHFPQRSPGAQEGGECQPVTLVHPHHLLHAGPGHHSRLWQEGELHHLV

SEQ ID NO: 38415 - protein, 930 aa, Homo sapiens
MVGEGPYLISDLDQRGRRRSFAERYDPSLKTMIPVRPCARLAPNPVDDAGLLSFATFSWLTPVMVKGYRQRLTVDTLPPLSTYDSSDTNAKRFRVLWDEEVARVGPEKASLSHVVWKFQRTRVLMDIVANILCIIMAAIGPTVLIHQILQQTERTSGKVWVGIGLCIALFATEFTKVFFWALAWAINYRTAIRLKVALSTLVFENLVSFKTLTHISVGEMFMAKLNSAFRRSAILVTDKRVQTMNEFLTCIRLIKMYAWEKSFTNTIQDIRRRERKLLEKAGFVQSGNSALAPIVSTIAIVLTLSCHILLRRKLTAPVAFSVIAMFNVMKFSIAILPFSIKAMAEANVSLRRMKKILIDKSPPSYITQPEDPDTVLLLANATLTWEHEASRKSTPKKLQNQKRHLCKKQRSEAYSERSPPAKGATGPEEQSDSLKSVLHSISFVVRKGKILGICGNVGSGKSSLLAALLGQMQLQKGVVAVNGTLAYVSQQAWIFHGNVRENILFGEKYDHQRYQHTVRVCGLQKDLSNLPYGDLTEIGERGLNLSGGQRQRISLARAVYSDRQLYLLDDPLSAVDAHVGKHVFEECIKKTLRGKTVVLVTHQLQFLESCDEVILLEDGEICEKGTHKELMEERGRYAKLIHNLRGLQFKDPEHLYNAAMVEAFKESPAEREEDAGIIVPEHQLIQTESPQEGTVTWKTYHTYIKASGGYLLSLFTVFLFLLMIGSAAFSNWWLGLWLDKGSRMTCGPQGNRTMCEVGAVLADIGQHVYQWVYTASMVFMLVFGVTKGFVFTKTTLMASSSLHDTVFDKILKSPMSFFDTTPTGRLMNRFSKDMDELDVRLPFHAENFLQQFFMVVFILVILAAVFPAVLLVVASLAVGFFILLRIFHRGVQELKKVENVSRSPWFTHITSSMQGLGIIHAYGKKESCIT

SEQ ID NO: 38416 - protein, 106 aa, Homo sapiens
MVGEGPYLISDLDQRGRRRSFAERYDPSLKTMIPVRPCARLAPNPVDDAGLLSFATFSWLTPVMVKGYRQRLTVDTLPPLSTYDSSDTNAKRFRVLWDEEVARVGP

SEQ ID NO: 38417 - protein, 285 aa, Homo sapiens
MVGEGPYLISDLDQRGRRRSFAERYDPSLKTMIPVRPCARLAPNPVDDAGLLSFATFSWLTPVMVKGYRQRLTVDTLPPLSTYDSSDTNAKRFRVLWDEEVARVGPEKASLSHVVWKFQRTRVLMDIVANILCIIMAAIGPTVLIHQILQQTERTSGKVWVGIGLCIALFATEFTKVFFWALAWAINYRTAIRLKVALSTLVFENLVSFKTLTHISVGEVLNILSSDSYSLFEAALFCPLPATIPILMVFCAAYAFFILGPTALIGISVCLWPSSIQLSEGQQFW

SEQ ID NO: 38418 - protein, 293 aa, Homo sapiens
MLEKFCNSTFWNSSFLDSPEADLPLCFEQTVLVWIPLGYLWLLAPWQLLHVYKSRTKRSSTTKLYLAKQVFVGFLLILAAIELALVLTEDSGQATVPAVRYTNPSLYLGTWLLVLLIQYSRQWCVQKNSWFLSLFWILSILCGTFQFQTLIRTLLQGDNSNLAYSCLFFISYGFQILILIFSAFSENNESSNNPSSIASFLSSITYSWYDSIILKGYKRPLTLEDVWEVDEEMKTKTLVSKFETHMKRELQKARRALQRRQEKSSQQNSGARLPGLNKNQSQSQDALVLVTFP

SEQ ID NO: 38419 - protein, 1545 aa, Homo sapiens
MLEKFCNSTFWNSSFLDSPEADLPLCFEQTVLVWIPLGYLWLLAPWQLLHVYKSRTKRSSTTKLYLAKQVFVGFLLILAAIELALVLTEDSGQATVPAVRYTNPSLYLGTWLLVLLIQYSRQWCVQKNSWFLSLFWILSILCGTFQFQTLIRTLLQGDNSNLAYSCLFFISYGFQILILIFSAFSENNESSNNPSSIASFLSSITYSWYDSIILKGYKRPLTLEDVWEVDEEMKTKTLVSKFETHMKRELQKARRALQRRQEKSSQQNSGARLPGLNKNQSQSQDALVLEDVEKKKKKSGTKKDVPKSWLMKALFKTFYMVLLKSFLLKLVNDIFTFVSPQLLKLLISFASDRDTYLWIGYLCAILLFTAALIQSFCLQCYFQLCFKLGVKVRTAIMASVYKKALTLSNLARKEYTVGETVNLMSVDAQKLMDVTNFMHMLWSSVLQIVLSIFFLWRELGPSVLAGVGVMVLVIPINAILSTKSKTIQVKNMKNKDKRLKIMNEILSGIKILKYFAWEPSFRDQVQNLRKKELKNLLAFSQLQCVVIFVFQLTPVLVSVVTFSVYVLVDSNNILDAQKAFTSITLFNILRFPLSMLPMMISSMLQASVSTERLEKYLGGDDLDTSAIRHDCNFDKAMQFSEASFTWEHDSEATVRDVNLDIMAGQLVAVIGPVGSGKSSLISAMLGEMENVHGHITIKGTTAYVPQQSWIQNGTIKDNILFGTEFNEKRYQQVLEACALLPDLEMLPGGDLAEIGEKGINLSGGQKQRISLARATYQNLDIYLLDDPLSAVDAHVGKHIFNKVLGPNGLLKGKTRLLVTHSMHFLPQVDEIVVLGNGTIVEKGSYSALLAKKGEFAKNLKTFLRHTGPEEEATVHDGSEEEDDDYGLISSVEEIPEDAASITMRRENSFRRTLSRSSRSNGRHLKSLRNSLKTRNVNSLKEDEELVKGQKLIKKEFIETGKVKFSIYLEYLQAIGLFSIFFIILAFVMNSVAFIGSNLWLSAWTSDSKIFNSTDYPASQRDMRVGVYGALGLAQGIFVFIAHFWSAFGFVHASNILHKQLLNNILRAPMRFFDTTPTGRIVNRFAGDISTVDDTLPQSLRSWITCFLGIISTLVMICMATPVFTIIVIPLGIIYVSVQMFYVSTSRQLRRLDSVTRSPIYSHFSETVSGLPVIRAFEHQQRFLKHNEVRIDTNQKCVFSWITSNRWLAIRLELVGNLTVFFSALMMVIYRDTLSGDTVGFVLSNALNITQTLNWLVRMTSEIETNIVAVERITEYTKVENEAPWVTDKRPPPDWPSKGKIQFNNYQVRYRPELDLVLRGITCDIGSMEKIGVVGRTGAGKSSLTNCLFRILEAAGGQIIIDGVDIASIGLHDLREKLTIIPQDPILFSGSLRMNLDPFNNYSDEEIWKALELAHLKSFVASLQLGLSHEVTEAGGNLSIGQRQLLCLGRALLRKSKILVLDEATAAVDLETDNLIQTTIQNEFAHCTVITIAHRLHTIMDSDKVMVLDNGKIIECGSPEELLQIPGPFYFMAKEAGIENVNSTKF

SEQ ID NO: 38420 - protein, 1527 aa, Homo sapiens
MDALCGSGELGSKFWDSNLSVHTENPDLTPCFQNSLLAWVPCIYLWVALPCYLLYLRHHCRGYIILSHLSKLKMVLGVLLWCVSWADLFYSFHGLVHGRAPAPVFFVTPLVVGVTMLLATLLIQYERLQGVQSSGVLIIFWFLCVVCAIVPFRSKILLAKAEGEISDPFRFTTFYIHFALVLSALILACFREKPPFFSAKNVDPNPYPETSAGFLSRLFFWWFTKMAIYGYRHPLEEKDLWSLKEEDRSQMVVQQLLEAWRKQEKQTARHKASAAPGKNASGEDEVLLGARPRPRKPSFLKALLATFGSSFLISACFKLIQDLLSFINPQLLSILIRFISNPMAPSWWGFLVAGLMFLCSMMQSLILQHYYHYIFVTGVKFRTGIMGVIYRKALVITNSVKRASTVGEIVNLMSVDAQRFMDLAPFLNLLWSAPLQIILAIYFLWQNLGPSVLAGVAFMVLLIPLNGAVAVKMRAFQVKQMKLKDSRIKLMSEILNGIKVLKLYAWEPSFLKQVEGIRQGELQLLRTAAYLHTTTTFTWMCSPFLVTLITLWVYVYVDPNNVLDAEKAFVSVSLFNILRLPLNMLPQLISNLTQASVSLKRIQQFLSQEELDPQSVERKTISPGYAITIHSGTFTWAQDLPPTLHSLDIQVPKGALVAVVGPVGCGKSSLVSALLGEMEKLEGKVHMKGSVAYVPQQAWIQNCTLQENVLFGKALNPKRYQQTLEACALLADLEMLPGGDQTEIGEKGINLSGGQRQRVSLARAVYSDADIFLLDDPLSAVDSHVAKHIFDHVIGPEGVLAGKTRVLVTHGISFLPQTDFIIVLADGQVSEMGPYPALLQRNGSFANFLCNYAPDEDQGHLEDSWTALEGAEDKEALLIEDTLSNHTDLTDNDPVTYVVQKQFMRQLSALSSDGEGQGRPVPRRHLGPSEKVQVTEAKADGALTQEEKAAIGTVELSVFWDYAKAVGLCTTLAICLLYVGQSAAAIGANVWLSAWTNDAMADSRQNNTSLRLGVYAALGILQGFLVMLAAMAMAAGGIQAARVLHQALLHNKIRSPQSFFDTTPSGRILNCFSKDIYVVDEVLAPVILMLLNSFFNAISTLVVIMASTPLFTVVILPLAVLYTLVQRFYAATSRQLKRLESVSRSPIYSHFSETVTGASVIRAYNRSRDFEIISDTKVDANQRSCYPYIISNRWLSIGVEFVGNCVVLFAALFAVIGRSSLNPGLVGLSVSYSLQVTFALNWMIRMMSDLESNIVAVERVKEYSKTETEAPWVVEGSRPPEGWPPRGEVEFRNYSVRYRPGLDLVLRDLSLHVHGGEKVGIVGRTGAGKSSMTLCLFRILEAAKGEIRIDGLNVADIGLHDLRSQLTIIPQDPILFSGTLRMNLDPFGSYSEEDIWWALELSHLHTFVSSQPAGLDFQCSEGGENLSVGQRQLVCLARALLRKSRILVLDEATAAIDLETDNLIQATIRTQFDTCTVLTIAHRLNTIMDYTRVLVLDKGVVAEFDSPANLIAARGIFYGMARDAGLA

SEQ ID NO: 38421 - protein, 572 aa, Homo sapiens
MDALCGSGELGSKFWDSNLSVHTENPDLTPCFQNSLLAWVPCIYLWVALPCYLLYLRHHCRGYIILSHLSKLKMVLGVLLWCVSWADLFYSFHGLVHGRAPAPVFFVTPLVVGVTMLLATLLIQYERLQGVQSSGVLIIFWFLCVVCAIVPFRSKILLAKAEGEISDPFRFTTFYIHFALVLSALILACFREKPPFFSAKNVDPNPYPETSAGFLSRLFFWWFTKMAIYGYRHPLEEKDLWSLKEEDRSQMVVQQLLEAWRKQEKQTARHKASAAPGKNASGEDEVLLGARPRPRKPSFLKALLATFGSSFLISACFKLIQDLLSFINPQLLSILIRFISNPMAPSWWGFLVAGLMFLCSMMQSLILQHYYHYIFVTGVKFRTGIMGVIYRKALVITNSVKRASTVGEIVNLMSVDAQRFMDLAPFLNLLWSAPLQIILAIYFLWQNLGPSVLAGVAFMVLLIPLNGAVAVKMRAFQVKQMKLKDSRIKLMSEILNGIKVLKLYAWEPSFLKQVEGIRQGELQLLRTAAYLHTTTTFTWMCSPFLVRLGTGLGPCLQGSGCPGMARAHWTLP

SEQ ID NO: 38422 - protein, 1238 aa, Homo sapiens
MDALCGSGELGSKFWDSNLSVHTENPDLTPCFQNSLLAWVPCIYLWVALPCYLLYLRHHCRGYIILSHLSKLKMVLGVLLWCVSWADLFYSFHGLVHGRAPAPVFFVTPLVVGVTMLLATLLIQYERLQGVQSSGVLIIFWFLCVVCAIVPFRSKILLAKAEGEISDPFRFTTFYIHFALVLSALILACFREKPPFFSAKNVDPNPYPETSAGFLSRLFFWWFTKMAIYGYRHPLEEKDLWSLKEEDRSQMVVQQLLEAWRKQEKQTARHKASAAPGKNASGEDEVLLGARPRPRKPSFLKALLATFGSSFLISACFKLIQDLLSFINPQLLSILIRFISNPMAPSWWGFLVAGLMFLCSMMQSLILQHYYHYIFVTGVKFRTGIMGVIYRKALVITNSVKRASTVGEIVNLMSVDAQRFMDLAPFLNLLWSAPLQIILAIYFLWQNLGPSVLAGVAFMVLLIPLNGAVAVKMRAFQVKQMKLKDSRIKLMSEILNGIKVLKLYAWEPSFLKQVEGIRQGELQLLRTAAYLHTTTTFTWMCSPFLVTLITLWVYVYVDPNNVLDAEKAFVSVSLFNILRLPLNMLPQLISNLTQASVSLKRIQQFLSQEELDPQSVERKTISPGYAITIHSGTFTWAQDLPPTLHSLDIQVPKGALVAVVGPVGCGKSSLVSALLGEMEKLEGKVHMKGSVAYVPQQAWIQNCTLQENVLFGKALNPKRYQQTLEACALLADLEMLPGGDQTEIGEKGINLSGGQRQRVSLARAVYSDADIFLLDDPLSAVDSHVAKHIFDHVIGPEGVLAGKTRVLVTHGISFLPQTDFIIVLADGQVSEMGPYPALLQRNGSFANFLCNYAPDEDQGHLEDSWTALEGAEDKEALLIEDTLSNHTDLTDNDPVTYVVQKQFMRQLSALSSDGEGQGRPVPRRHLGPSEKVQVTEAKADGALTQEEKAAIGTVELSVFWDYAKAVGLCTTLAICLLYVGQSAAAIGANVWLSAWTNDAMADSRQNNTSLRLGVYAALGILQGFLVMLAAMAMAAGGIQAARVLHQALLHNKIRSPQSFFDTTPSGRILNCFSKDIYVVDEVLAPVILMLLNSFFNAISTLVVIMASTPLFTVVILPLAVLYTLVQRFYAATSRQLKRLESVSRSPIYSHFSETVTGASVIRAYNRSRDFEIISDTKVDANQRSCYPYIISNRSEAASLAPCSSRNSQQALWCSGSLSLLSPKQKTGPALPLPHFLLI

SEQ ID NO: 38423 - protein, 1325 aa, Homo sapiens
MLPVYQEVKPNPLQDANLCSRVFFWWLNPLFKIGHKRRLEEDDMYSVLPEDRSQHLGEELQGFWDKEVLRAENDAQKPSLTRAIIKCYWKSYLVLGIFTLIEESAKVIQPIFLGKIINYFENYDPMDSVALNTAYAYATVLTFCTLILAILHHLYFYHVQCAGMRLRVAMCHMIYRKALRLSNMAMGKTTTGQIVNLLSNDVNKFDQVTVFLHFLWAGPLQAIAVTALLWMEIGISCLAGMAVLIILLPLQSCFGKLFSSLRSKTATFTDARIRTMNEVITGIRIIKMYAWEKSFSNLITNLRKKEISKILRSSCLRGMNLASFFSASKIIVFVTFTTYVLLGSVITASRVFVAVTLYGAVRLTVTLFFPSAIERVSEAIVSIRRIQTFLLLDEISQRNRQLPSDGKKMVHVQDFTAFWDKASETPTLQGLSFTVRPGELLAVVGPVGAGKSSLLSAVLGELAPSHGLVSVHGRIAYVSQQPWVFSGTLRSNILFGKKYEKERYEKVIKACALKKDLQLLEDGDLTVIGDRGTTLSGGQKARVNLARAVYQDADIYLLDDPLSAVDAEVSRHLFELCICQILHEKITILVTHQLQYLKAASQILILKDGKMVQKGTYTEFLKSGIDFGSLLKKDNEESEQPPVPGTPTLRNRTFSESSVWSQQSSRPSLKDGALESQDTENVPVTLSEENRSEGKVGFQAYKNYFRAGAHWIVFIFLILLNTAAQVAYVLQDWWLSYWANKQSMLNVTVNGGGNVTEKLDLNWYLGIYSGLTVATVLFGIARSLLVFYVLVNSSQTLHNKMFESILKAPVLFFDRNPIGRILNRFSKDIGHLDDLLPLTFLDFIQTLLQVVGVVSVAVAVIPWIAIPLVPLGIIFIFLRRYFLETSRDVKRLESTTRSPVFSHLSSSLQGLWTIRAYKAEERCQELFDAHQDLHSEAWFLFLTTSRWFAVRLDAICAMFVIIVAFGSLILAKTLDAGQVGLALSYALTLMGMFQWCVRQSAEVENMMISVERVIEYTDLEKEAPWEYQKRPPPAWPHEGVIIFDNVNFMYSPGGPLVLKHLTALIKSQEKVGIVGRTGAGKSSLISALFRLSEPEGKIWIDKILTTEIGLHDLRKKMSIIPQEPVLFTGTMRKNLDPFNEHTDEELWNALQEVQLKETIEDLPGKMDTELAESGSNFSVGQRQLVCLARAILRKNQILIIDEATANVDPRTDELIQKKIREKFAHCTVLTIAHRLNTIIDSDKIMVLDSGRLKEYDEPYVLLQNKESLFYKMVQQLGKAEAAALTETAKQVYFKRNYPHIGHTDHMVTNTSNGQPSTLTIFETAL

SEQ ID NO: 38424 - protein, 1278 aa, Homo sapiens
MLPVYQEVKPNPLQDANLCSRVFFWWLNPLFKIGHKRRLEEDDMYSVLPEDRSQHLGEELQGFWDKEVLRAENDAQKPSLTRAIIKCYWKSYLVLGIFTLIEESAKVIQPIFLGKIINYFENYDPMDSVALNTAYAYATVLTFCTLILAILHHLYFYHVQCAGMRLRVAMCHMIYRKALRLSNMAMGKTTTGQIVNLLSNDVNKFDQVTVFLHFLWAGPLQAIAVTALLWMEIGISCLAGMAVLIILLPLQSCFGKLFSSLRSKTATFTDARIRTMNEVITGIRIIKMYAWEKSFSNLITNLRKKEISKILRSSCLRGMNLASFFSASKIIVFVTFTTYVLLGSVITASRVFVAVTLYGAVRLTVTLFFPSAIERVSEAIVSIRRIQTFLLLDEISQRNRQLPSDGKKMVHVQDFTAFWDKASETPTLQGLSFTVRPGELLAVVGPVGAGKSSLLSAVLGELAPSHGLVSVHGRIAYVSQQPWVFSGTLRSNILFGKKYEKERYEKVIKACALKKDLQLLEDGDLTVIGDRGTTLSGGQKARVNLARAVYQDADIYLLDDPLSAVDAEVSRHLFELCICQILHEKITILVTHQLQYLKAASQILILKDGKMVQKGTYTEFLKSGIDFGSLLKKDNEESEQPPVPGTPTLRNRTFSESSVWSQQSSRPSLKDGALESQDVAYVLQDWWLSYWANKQSMLNVTVNGGGNVTEKLDLNWYLGIYSGLTVATVLFGIARSLLVFYVLVNSSQTLHNKMFESILKAPVLFFDRNPIGRILNRFSKDIGHLDDLLPLTFLDFIQTLLQVVGVVSVAVAVIPWIAIPLVPLGIIFIFLRRYFLETSRDVKRLESTTRSPVFSHLSSSLQGLWTIRAYKAEERCQELFDAHQDLHSEAWFLFLTTSRWFAVRLDAICAMFVIIVAFGSLILAKTLDAGQVGLALSYALTLMGMFQWCVRQSAEVENMMISVERVIEYTDLEKEAPWEYQKRPPPAWPHEGVIIFDNVNFMYSPGGPLVLKHLTALIKSQEKVGIVGRTGAGKSSLISALFRLSEPEGKIWIDKILTTEIGLHDLRKKMSIIPQEPVLFTGTMRKNLDPFNEHTDEELWNALQEVQLKETIEDLPGKMDTELAESGSNFSVGQRQLVCLARAILRKNQILIIDEATANVDPRTDELIQKKIREKFAHCTVLTIAHRLNTIIDSDKIMVLDSGRLKEYDEPYVLLQNKESLFYKMVQQLGKAEAAALTETAKQVYFKRNYPHIGHTDHMVTNTSNGQPSTLTIFETAL

SEQ ID NO: 38425 - protein, 859 aa, Homo sapiens
MLPVYQEVKPNPLQDANLCSRVFFWWLNPLFKIGHKRRLEEDDMYSVLPEDRSQHLGEELQGFWDKEVLRAENDAQKPSLTRAIIKCYWKSYLVLGIFTLIEESAKVIQPIFLGKIINYFENYDPMDSVALNTAYAYATVLTFCTLILAILHHLYFYHVQCAGMRLRVAMCHMIYRKALRLSNMAMGKTTTGQIVNLLSNDVNKFDQVTVFLHFLWAGPLQAIAVTALLWMEIGISCLAGMAVLIILLPLQSCFGKLFSSLRSKTATFTDARIRTMNEVITGIRIIKMYAWEKSFSNLITNLRKKEISKILRSSCLRGMNLASFFSASKIIVFVTFTTYVLLGSVITASRVFVAVTLYGAVRLTVTLFFPSAIERVSEAIVSIRRIQTFLLLDEISQRNRQLPSDGKKMVHVQDFTAFWDKASETPTLQGLSFTVRPGELLAVVGPVGAGKSSLLSAVLGELAPSHGLVSVHGRIAYVSQQPWVFSGTLRSNILFGKKYEKERYEKVIKACALKKDLQLLEDGDLTVIGDRGTTLSGGQKARVNLARAVYQDADIYLLDDPLSAVDAEVSRHLFELCICQILHEKITILVTHQLQYLKAASQILILKDGKMVQKGTYTEFLKSGIDFGSLLKKDNEESEQPPVPGTPTLRNRTFSESSVWSQQSSRPSLKDGALESQDTENVPVTLSEENRSEGKVGFQAYKNYFRAGAHWIVFIFLILLNTAAQVAYVLQDWWLSYWANKQSMLNVTVNGGGNVTEKLDLNWYLGIYSGLTVATVLFGIARSLLVFYVLVNSSQTLHNKMFESILKAPVLFFDRNPIGRILNRFSKDIGHLDDLLPLTFLDFIQRWDLAVLSWLVSNS

SEQ ID NO: 38426 - protein, 784 aa, Homo sapiens
MLPVYQEVKPNPLQDANLCSRVFFWWLNPLFKIGHKRRLEEDDMYSVLPEDRSQHLGEELQGFWDKEVLRAENDAQKPSLTRAIIKCYWKSYLVLGIFTLIEALRLSNMAMGKTTTGQIVNLLSNDVNKFDQVTVFLHFLWAGPLQAIAVTALLWMEIGISCLAGMAVLIILLPLQSCFGKLFSSLRSKTATFTDARIRTMNEVITGIRIIKMYAWEKSFSNLITNLRKKEISKILRSSCLRGMNLASFFSASKIIVFVTFTTYVLLGSVITASRVFVAVTLYGAVRLTVTLFFPSAIERVSEAIVSIRRIQTFLLLDEISQRNRQLPSDGKKMVHVQDFTAFWDKASETPTLQGLSFTVRPGELLAVVGPVGAGKSSLLSAVLGELAPSHGLVSVHGRIAYVSQQPWVFSGTLRSNILFGKKYEKERYEKVIKACALKKDLQLLEDGDLTVIGDRGTTLSGGQKARVNLARAVYQDADIYLLDDPLSAVDAEVSRHLFELCICQILHEKITILVTHQLQYLKAASQILILKDGKMVQKGTYTEFLKSGIDFGSLLKKDNEESEQPPVPGTPTLRNRTFSESSVWSQQSSRPSLKDGALESQDTENVPVTLSEENRSEGKVGFQAYKNYFRAGAHWIVFIFLILLNTAAQVAYVLQDWWLSYWANKQSMLNVTVNGGGNVTEKLDLNWYLGIYSGLTVATVLFGIARSLLVFYVLVNSSQTLHNKMFESILKAPVLFFDRNPIGRILNRFSKDIGHLDDLLPLTFLDFIQRWDLAVLSWLVSNS

SEQ ID NO: 38427 - protein, 24 aa, Homo sapiens
MLPVYQEVKPNPLQDANLCSRVFF

SEQ ID NO: 38428 - protein, 1394 aa, Homo sapiens
MKDIDIGKEYIIPSPGYRSVRERTSTSGTHRDREDSKFRRTRPLECQDALETAARAEGLSLDASMHSQLRILDEEHPKGKYHHGLSALKPIRTTSKHQHPVDNAGLFSCMTFSWLSSLARVAHKKGELSMEDVWSLSKHESSDVNCRRLERLWQEELNEVGPDAASLRRVVWIFCRTRLILSIVCLMITQLAGFSGPAFMVKHLLEYTQATESNLQYSLLLVLGLLLTEIVRSWSLALTWALNYRTGVRLRGAILTMAFKKILKLKNIKEKSLGELINICSNDGQRMFEAAAVGSLLAGGPVVAILGMIYNVIILGPTGFLGSAVFILFYPAMMFASRLTAYFRRKCVAATDERVQKMNEVLTYIKFIKMYAWVKAFSQSVQKIREEERRILEKAGYFQSITVGVAPIVVVIASVVTFSVHMTLGFDLTAAQAFTVVTVFNSMTFALKVTPFSVKSLSEASVAVDRFKSLFLMEEVHMIKNKPASPHIKIEMKNATLAWDSSHSSIQNSPKLTPKMKKDKRASRGKKEKVRQLQRTEHQAVLAEQKGHLLLDSDERPSPEEEEGKHIHLGHLRLQRTLHSIDLEIQEGKLVGICGSVGSGKTSLISAILGQMTLLEGSIAISGTFAYVAQQAWILNATLRDNILFGKEYDEERYNSVLNSCCLRPDLAILPSSDLTEIGERGANLSGGQRQRISLARALYSDRSIYILDDPLSALDAHVGNHIFNSAIRKHLKSKTVLFVTHQLQYLVDCDEVIFMKEGCITERGTHEELMNLNGDYATIFNNLLLGETPPVEINSKKETSGSQKKSQDKGPKTGSVKKEKAVKPEEGQLVQLEEKGQGSVPWSVYGVYIQAAGGPLAFLVIMALFMLNVGSTAFSTWWLSYWIKQGSGNTTVTRGNETSVSDSMKDNPHMQYYASIYALSMAVMLILKAIRGVVFVKGTLRASSRLHDELFRRILRSPMKFFDTTPTGRILNRFSKDMDEVDVRLPFQAEMFIQNVILVFFCVGMIAGVFPWFLVAVGPLVILFSVLHIVSRYQELLDDNQAPFFLFTCAMRWLAVRLDLISIALITTTGLMIVLMHGQIPPAYAGLAISYAVQLTGLFQFTVRLASETEARFTSVERINHYIKTLSLEAPARIKNKAPSPDWPQEGEVTFENAEMRYRENLPLVLKKVSFTIKPKEKIGIVGRTGSGKSSLGMALFRLVELSGGCIKIDGVRISDIGLADLRSKLSIIPQEPVLFSGTVRSNLDPFNQYTEDQIWDALERTHMKECIAQLPLKLESEVMENGDNFSVGERQLLCIARALLRHCKILILDEATAAMDTETDLLIQETIREAFADCTMLTIAHRLHTVLGSDRIMVLAQGQVVEFDTPSVLLSNDSSRFYAMFAAAENKVAVKG

SEQ ID NO: 38429 - protein, 1437 aa, Homo sapiens
MKDIDIGKEYIIPSPGYRSVRERTSTSGTHRDREDSKFRRTRPLECQDALETAARAEGLSLDASMHSQLRILDEEHPKGKYHHGLSALKPIRTTSKHQHPVDNAGLFSCMTFSWLSSLARVAHKKGELSMEDVWSLSKHESSDVNCRRLERLWQEELNEVGPDAASLRRVVWIFCRTRLILSIVCLMITQLAGFSGPAFMVKHLLEYTQATESNLQYSLLLVLGLLLTEIVRSWSLALTWALNYRTGVRLRGAILTMAFKKILKLKNIKEKSLGELINICSNDGQRMFEAAAVGSLLAGGPVVAILGMIYNVIILGPTGFLGSAVFILFYPAMMFASRLTAYFRRKCVAATDERVQKMNEVLTYIKFIKMYAWVKAFSQSVQKIREEERRILEKAGYFQSITVGVAPIVVVIASVVTFSVHMTLGFDLTAAQAFTVVTVFNSMTFALKVTPFSVKSLSEASVAVDRFKSLFLMEEVHMIKNKPASPHIKIEMKNATLAWDSSHSSIQNSPKLTPKMKKDKRASRGKKEKVRQLQRTEHQAVLAEQKGHLLLDSDERPSPEEEEGKHIHLGHLRLQRTLHSIDLEIQEGKLVGICGSVGSGKTSLISAILGQMTLLEGSIAISGTFAYVAQQAWILNATLRDNILFGKEYDEERYNSVLNSCCLRPDLAILPSSDLTEIGERGANLSGGQRQRISLARALYSDRSIYILDDPLSALDAHVGNHIFNSAIRKHLKSKTVLFVTHQLQYLVDCDEVIFMKEGCITERGTHEELMNLNGDYATIFNNLLLGETPPVEINSKKETSGSQKKSQDKGPKTGSVKKEKAVKPEEGQLVQLEEKGQGSVPWSVYGVYIQAAGGPLAFLVIMALFMLNVGSTAFSTWWLSYWIKQGSGNTTVTRGNETSVSDSMKDNPHMQYYASIYALSMAVMLILKAIRGVVFVKGTLRASSRLHDELFRRILRSPMKFFDTTPTGRILNRFSKDMDEVDVRLPFQAEMFIQNVILVFFCVGMIAGVFPWFLVAVGPLVILFSVLHIVSRVLIRELKRLDNITQSPFLSHITSSIQGLATIHAYNKGQEFLHRYQELLDDNQAPFFLFTCAMRWLAVRLDLISIALITTTGLMIVLMHGQIPPAYAGLAISYAVQLTGLFQFTVRLASETEARFTSVERINHYIKTLSLEAPARIKNKAPSPDWPQEGEVTFENAEMRYRENLPLVLKKVSFTIKPKEKIGIVGRTGSGKSSLGMALFRLVELSGGCIKIDGVRISDIGLADLRSKLSIIPQEPVLFSGTVRSNLDPFNQYTEDQIWDALERTHMKECIAQLPLKLESEVMENGDNFSVGERQLLCIARALLRHCKILILDEATAAMDTETDLLIQETIREAFADCTMLTIAHRLHTVLGSDRIMVLAQGQVVEFDTPSVLLSNDSSRFYAMFAAAENKVAVKG

SEQ ID NO: 38430 - protein, 208 aa, Homo sapiens
MKDIDIGKEYIIPSPGYRSVRERTSTSGTHRDREDSKFRRTRPLECQDALETAARAEGLSLDASMHSQLRILDEEHPKGKYHHGLSALKPIRTTSKHQHPVDNAGLFSCMTFSWLSSLARVAHKKGELSMEDVWSLSKHESSDVNCRRLERLWQEELNEVGPDAASLRRVVWIFCRTRLILSIVCLMITQLAGFSGPNFQDGCILRSE

SEQ ID NO: 38431 - protein, 836 aa, Homo sapiens
MHSQLRILDEEHPKGKYHHGLSALKPIRTTSKHQHPVDNAGLFSCMTFSWLSSLARVAHKKGELSMEDVWSLSKHESSDVNCRRLERLWQEELNEVGPDAASLRRVVWIFCRTRLILSIVCLMITQLAGFSGPAFMVKHLLEYTQATESNLQYSLLLVLGLLLTEIVRSWSLALTWALNYRTGVRLRGAILTMAFKKILKLKNIKEKSLGELINICSNDGQRMFEAAAVGSLLAGGPVVAILGMIYNVIILGPTGFLGSAVFILFYPAMMFASRLTAYFRRKCVAATDERVQKMNEVLTYIKFIKMYAWVKAFSQSVQKIREEERRILEKAGYFQSITVGVAPIVVVIASVVTFSVHMTLGFDLTAAQAFTVVTVFNSMTFALKVTPFSVKSLSEASVAVDRFKSLFLMEEVHMIKNKPASPHIKIEMKNATLAWDSSHSSIQNSPKLTPKMKKDKRASRGKKEKVRQLQRTEHQAVLAEQKGHLLLDSDERPSPEEEEGKHIHLGHLRLQRTLHSIDLEIQEGKLVGICGSVGSGKTSLISAILGQMTLLEGSIAISGTFAYVAQQAWILNATLRDNILFGKEYDEERYNSVLNSCCLRPDLAILPSSDLTEIGERGANLSGGQRQRISLARALYSDRSIYILDDPLSALDAHVGNHIFNSAIRKHLKSKTVLFVTHQLQYLVDCDEVIFMKEGCITERGTHEELMNLNGDYATIFNNLLLGETPPVEINSKKETSGSQKKSQDKGPKTGSVKKEKAVKPEEGQLVQLEEKGQGSVPWSVYGHPGCWGPLGIPGYYGPFHAECRQHRLQHLVVELLDQARKREHHCDSRERDLGE

SEQ ID NO: 38432 - protein, 225 aa, Homo sapiens
MKDIDIGKEYIIPSPGYRSVRERTSTSGTHRDREDSKFRRTRPLECQDALETAARAEGLSLDASMHSQLRILDEEHPKGKYHHGLSALKPIRTTSKHQHPVDNAGLFSCMTFSWLSSLARVAHKKGELSMEDVWSLSKHESSDVNCRRLERLWQEELNEVGPDAASLRRVVWIFCRTRLILSIVCLMITQLAGFSGPPSFGDCSISAEVCGNRLHCTAILLSCFT

SEQ ID NO: 38433 - protein, 231 aa, Homo sapiens
MKDIDIGKEYIIPSPGYRSVRERTSTSGTHRDREDSKFRRTRPLECQDALETAARAEGLSLDASMHSQLRILDEEHPKGKYHHGLSALKPIRTTSKHQHPVDNAGLFSCMTFSWLSSLARVAHKKGELSMEDVWSLSKHESSDVNCRRLERLWQEELNEVGPDAASLRRVVWIFCRTRLILSIVCLMITQLAGFSGPVSSNHPFRQSPGARPRPALTLLFCCRGCAQLWAR

SEQ ID NO: 38434 - protein, 147 aa, Homo sapiens
MKDIDIGKEYIIPSPGYRSVRERTSTSGTHRDREDSKFRRTRPLECQDALETAARAEGLSLDASMHSQLRILDEEHPKGKYHHGLSALKPIRTTSKHQHPVDNAGLFSCMTFSWLSSLARVAHKKGELSMEDVWSLSKHESSDVNCR

SEQ ID NO: 38435 - protein, 212 aa, Homo sapiens
MKDIDIGKEYIIPSPGYRSVRERTSTSGTHRDREDSKFRRTRPLECQDALETAARAEGLSLDASMHSQLRILDEEHPKGKYHHGLSALKPIRTTSKHQHPVDNAGLFSCMTFSWLSSLARVAHKKGELSMEDVWSLSKHESSDVNCRRLERLWQEELNEVGPDAASLRRVVWIFCRTRLILSIVCLMITQLAGFSGPLAWCCQDLDLGGVSL

SEQ ID NO: 38436 - protein, 1503 aa, Homo sapiens
MAAPAEPCAGQGVWNQTEPEPAATSLLSLCFLRTAGVWVPPMYLWVLGPIYLLFIHHHGRGYLRMSPLFKAKMVLGFALIVLCTSSVAVALWKIQQGTPEAPEFLIHPTVWLTTMSFAVFLIHTERKKGVQSSGVLFGYWLLCFVLPATNAAQQASGAGFQSDPVRHLSTYLCLSLVVAQFVLSCLADQPPFFPEDPQQSNPCPETGAAFPSKATFWWVSGLVWRGYRRPLRPKDLWSLGRENSSEELVSRLEKEWMRNRSAARRHNKAIAFKRKGGSGMKAPETEPFLRQEGSQWRPLLKAIWQVFHSTFLLGTLSLIISDVFRFTVPKLLSLFLEFIGDPKPPAWKGYLLAVLMFLSACLQTLFEQQNMYRLKVLQMRLRSAITGLVYRKVLALSSGSRKASAVGDVVNLVSVDVQRLTESVLYLNGLWLPLVWIVVCFVYLWQLLGPSALTAIAVFLSLLPLNFFISKKRNHHQEEQMRQKDSRARLTSSILRNSKTIKFHGWEGAFLDRVLGIRGQELGALRTSGLLFSVSLVSFQVSTFLVALVVFAVHTLVAENAMNAEKAFVTLTVLNILNKAQAFLPFSIHSLVQARVSFDRLVTFLCLEEVDPGVVDSSSSGSAAGKDCITIHSATFAWSQESPPCLHRINLTVPQGCLLAVVGPVGAGKSSLLSALLGELSKVEGFVSIEGAVAYVPQEAWVQNTSVVENVCFGQELDPPWLERVLEACALQPDVDSFPEGIHTSIGEQGMNLSGGQKQRLSLARAVYRKAAVYLLDDPLAALDAHVGQHVFNQVIGPGGLLQGTTRILVTHALHILPQADWIIVLANGAIAEMGSYQELLQRKGALMCLLDQARQPGDRGEGETEPGTSTKDPRGTSAGRRPELRRERSIKSVPEKDRTTSEAQTEVPLDDPDRAGWPAGKDSIQYGRVKATVHLAYLRAVGTPLCLYALFLFLCQQVASFCRGYWLSLWADDPAVGGQQTQAALRGGIFGLLGCLQAIGLFASMAAVLLGGARASRLLFQRLLWDVVRSPISFFERTPIGHLLNRFSKETDTVDVDIPDKLRSLLMYAFGLLEVSLVVAVATPLATVAILPLFLLYAGFQSLYVVSSCQLRRLESASYSSVCSHMAETFQGSTVVRAFRTQAPFVAQNNARVDESQRISFPRLVADRWLAANVELLGNGLVFAAATCAVLSKAHLSAGLVGFSVSAALQVTQTLQWVVRNWTDLENSIVSVERMQDYAWTPKEAPWRLPTCAAQPPWPQGGQIEFRDFGLRYRPELPLAVQGVSFKIHAGEKVGIVGRTGAGKSSLASGLLRLQEAAEGGIWIDGVPIAHVGLHTLRSRISIIPQDPILFPGSLRMNLDLLQEHSDEAIWAALETVQLKALVASLPGQLQYKCADRGEDLSVGQKQLLCLARALLRKTQILILDEATAAVDPGTELQMQAMLGSWFAQCTVLLIAHRLRSVMDCARVLVMDKGQVAESGSPAQLLAQKGLFYRLAQESGLV

SEQ ID NO: 38437 - protein, 441 aa, Homo sapiens [sequence omitted]

SEQ ID NO: 38438 - protein, 871 aa, Homo sapiens
MAAPAEPCAGQGVWNQTEPEPAATSLLSLCFLRTAGVWVPPMYLWVLGPIYLLFIHHHGRGYLRMSPLFKAKMVLGFALIVLCTSSVAVALWKIQQGTPEAPEFLIHPTVWLTTMSFAVFLIHTERKKGVQSSGVLFGYWLLCFVLPATNAAQQASGAGFQSDPVRHLSTYLCLSLVVAQFVLSCLADQPPFFPEDPQQSNPCPETGAAFPSKATFWWVSGLVWRGYRRPLRPKDLWSLGRENSSEELVSRLEKEWMRNRSAARRHNKAIAFKRKGGSGMKAPETEPFLRQEGSQWRPLLKAIWQVFHSTFLLGTLSLIISDVFRFTVPKLLSLFLEFIGDPKPPAWKGYLLAVLMFLSACLQTLFEQQNMYRLKVLQMRLRSAITGLVYRKVLALSSGSRKASAVGDVVNLVSVDVQRLTESVLYLNGLWLPLVWIVVCFVYLWQLLGPSALTAIAVFLSLLPLNFFISKKRNHHQEEQMRQKDSRARLTSSILRNSKTIKFHGWEGAFLDRVLGIRGQELGALRTSGLLFSVSLVSFQVSTFLVALVVFAVHTLVAENAMNAEKAFVTLTVLNILNKAQAFLPFSIHSLVQARVSFDRLVTFLCLEEVDPGVVDSSSSGSAAGKDCITIHSATFAWSQESPPCLHRINLTVPQGCLLAVVGPVGAGKSSLLSALLGELSKVEGFVSIEGAVAYVPQEAWVQNTSVVENVCFGQELDPPWLERVLEACALQPDVDSFPEGIHTSIGEQGMNLSGGQKQRLSLARAVYRKAAVYLLDDPLAALDAHVGQHVFNQVIGPGGLLQGTKQNLGPAPRTPEAPLQAGGPSLDARGPSSQSLRRTVPLQKPRQRFLWMTLTGQDGQQERTASNTAG

SEQ ID NO: 38439 - protein, 672 aa, Homo sapiens
MAAPAEPCAGQGVWNQTEPEPAATSLLSLCFLRTAGVWVPPMYLWVLGPIYLLFIHHHGRGYLRMSPLFKAKMVAAIPGSLEPGNVLGFALIVLCTSSVAVALWKIQQGTPEAPEFLIHPTVWLTTMSFAVFLIHTERKKGVQSSGVLFGYWLLCFVLPATNAAQQASGAGFQSDPVRHLSTYLCLSLVVAQFVLSCLADQPPFFPEDPQQSNPCPETGAAFPSKATFWWVSGLVWRGYRRPLRPKDLWSLGRENSSEELVSRLEKEWMRNRSAARRHNKAIAFKRKGGSGMKAPETEPFLRQEGSQWRPLLKAIWQVFHSTFLLGTLSLIISDVFRFTVPKLLSLFLEFIGDPKPPAWKGYLLAVLMFLSACLQTLFEQQNMYRLKVLQMRLRSAITGLVYRKVLALSSGSRKASAVGDVVNLVSVDVQRLTESVLYLNGLWLPLVWIVVCFVYLWQLLGPSALTAIAVFLSLLPLNFFISKKRNHHQEEQMRQKDSRARLTSSILRNSKTIKFHGWEGAFLDRVLGIRGQELGALRTSGLLFSVSLVSFQVSTFLVALVVFAVHTLVAENAMNAEKAFVTLTVLNILNKAQAFLPFSIHSLVQARVSFDRLVTFLCLEEVDPGVVDSSSSGSAAGKDCITIHSATFAWSQESPPCLHRVLLYHAGWSAMA

SEQ ID NO: 38440 - protein, 1549 aa, Homo sapiens
MSLSFCGNNISSYNINDGVLQNSCFVDALNLVPHVFLLFITFPILFIGWGSQSSKVQIHHNTWLHFPGHNLRWILTFALLFVHVCEIAEGIVSDSRRESRHLHLFMPAVMGFVATTTSIVYYHNIETSNFPKLLLALFLYWVMAFITKTIKLVKYCQSGLDISNLRFCITGMMVILNGLLMAVEINVIRVRRYVFFMNPQKVKPPEDLQDLGVRFLQPFVNLLSKATYWWMNTLIISAHKKPIDLKAIGKLPIAMRAVTNYVCLKDAYEEQKKKVADHPNRTPSIWLAMYRAFGRPILLSSTFRYLADLLGFAGPLCISGIVQRVNETQNGTNNTTGISETLSSKEFLENAYVLAVLLFLALILQRTFLQASYYVTIETGINLRGALLAMIYNKILRLSTSNLSMGEMTLGQINNLVAIETNQLMWFLFLCPNLWAMPVQIIMGVILLYNLLGSSALVGAAVIVLLAPIQYFIATKLAEAQKSTLDYSTERLKKTNEILKGIKLLKLYAWEHIFCKSVEETRMKELSSLKTFALYTSLSIFMNAAIPIAAVLATFVTHAYASGNNLKPAEAFASLSLFHILVTPLFLLSTVVRFAVKAIISVQKLNEFLLSDEIGDDSWRTGESSLPFESCKKHTGVQPKTINRKQPGRYHLDSYEQSTRRLRPAETEDIAIKVTNGYFSWGSGLATLSNIDIRIPTGQLTMIVGQVGCGKSSLLLAILGEMQTLEGKVHWSNVNESEPSFEATRSRNRYSVAYAAQKPWLLNATVEENITFGSPFNKQRYKAVTDACSLQPDIDLLPFGDQTEIGERGINLSGGQRQRICVARALYQNTNIVFLDDPFSALDIHLSDHLMQEGILKFLQDDKRTLVLVTHKLQYLTHADWIIAMKDGSVLREGTLKDIQTKDVELYEHWKTLMNRQDQELEKDMEADQTTLERKTLRRAMYSREAKAQMEDEDEEEEEEEDEDDNMSTVMRLRTKMPWKTCWRYLTSGGFFLLILMIFSKLLKHSVIVAIDYWLATWTSEYSINNTGKADQTYYVAGFSILCGAGIFLCLVTSLTVEWMGLTAAKNLHHNLLNKIILGPIRFFDTTPLGLILNRFSADTNIIDQHIPPTLESLTRSTLLCLSAIGMISYATPVFLVALLPLGVAFYFIQKYFRVASKDLQELDDSTQLPLLCHFSETAEGLTTIRAFRHETRFKQRMLELTDTNNIAYLFLSAANRWLEVRTDYLGACIVLTASIASISGSSNSGLVGLGLLYALTITNYLNWVVRNLADLEVQMGAVKKVNSFLTMESENYEGTMDPSQVPEHWPQEGEIKIHDLCVRYENNLKPVLKHVKAYIKPGQKVGICGRTGSGKSSLSLAFFRMVDIFDGKIVIDGIDISKLPLHTLRSRLSIILQDPILFSGSIRFNLDPECKCTDDRLWEALEIAQLKNMVKSLPGGLDAVVTEGGENFSVGQRQLFCLARAFVRKSSILIMDEATASIDMATENILQKVVMTAFADRTVVTIAHRVHTILTADLVIVMKRGNILEYDTPESLLAQENGVFASFVRADM

SEQ ID NO: 38441 - protein, 1549 aa, Homo sapiens
MSLSFCGNNISSYNINDGVLQNSCFVDALNLVPHVFLLFITFPILFIGWGSQSSKVQIHHNTWLHFPGHNLRWILTFALLFVHVCEIAEGIVSDSRRESRHLHLFMPAVMGFVATTTSIVYYHNIETSNFPKLLLALFLYWVMAFITKTIKLVKYCQSGLDISNLRFCITGMMVILNGLLMAVEINVIRVRRYVFFMNPQKVKPPEDLQDLGVRFLQPFVNLLSKATYWWMNTLIISAHKKPIDLKAIGKLPIAMRAVTNYVCLKDAYEEQKKKVADHPNRTPSIWLAMYRAFGRPILLSSTFRYLADLLGFAGPLCISGIVQRVNETQNGTNNTTGISETLSSKEFLENAYVLAVLLFLALILQRTFLQASYYVTIETGINLRGALLAMIYNKILRLSTSNLSMGEMTLGQINNLVAIETNQLMWFLFLCPNLWAMPVQIIMGVILLYNLLGSSALVGAAVIVLLAPIQYFIATKLAEAQKSTLDYSTERLKKTNEILKGIKLLKLYAWEHIFCKSVEETRMKELSSLKTFALYTSLSIFMNAAIPIAAVLATFVTHAYASGNNLKPAEAFASLSLFHILVTPLFLLSTVVRFAVKAIISVQKLNEFLLSDEIGDDSWRTGESSLPFESCKKHTGVQPKTINRKQPGRYHLDSYEQSTRRLRPAETEDIAIKVTNGYFSWGSGLATLSNIDIRIPTGQLTMIVGQVGCGKSSLLLAILGEMQTLEGKVHWSNVNESEPSFEATRSRNRYSVAYAAQKPWLLNATVEENITFGSPFNKQRYKAVTDACSLQPDIDLLPFGDQTEIGERGINLSGGQRQRICVARALYQNTNIVFLDDPFSALDIHLSDHLMQEGILKFLQDDKRTLVLVTHKLQYLTHADWIIAMKDGSVLREGTLKDIQTKDVELYEHWKTLMNRQDQELEKDMEADQTTLERKTLRRAMYSREAKAQMEDEDEEEEEEEDEDDNMSTVMRLRTKMPWKTCWRYLTSGGFFLLILMIFSKLLKHSVIVAIDYWLATWTSEYSINNTGKADQTYYVAGFSILCGAGIFLCLVTSLTVEWMGLTAAKNLHHNLLNKIILGPIRFFDTTPLGLILNRFSADTNIIDQHIPPTLESLTRSTLLCLSAIGMISYATPVFLVALLPLGVAFYFIQKYFRVASKDLQELDDSTQLPLLCHFSETAEGLTTIRAFRHETRFKQRMLELTDTNNIAYLFLSAANRWLEVRTDYLGACIVLTASIASISGSSNSGLVGLGLLYALTITNYLNWVVRNLADLEVQMGAVKKVNSFLTMESENYEGTMDPSQVPEHWPQEGEIKIHDLCVRYENNLKPVLKHVKAYIKPGQKVGICGRTGSGKSSLSLAFFRMVDIFDGKIVIDGIDISKLPLHTLRSRLSIILQDPILFSGSIRFNLDPECKCTDDRLWEALEIAQLKNMVKSLPGGLDAVVTEGGENFSVGQRQLFCLARAFVRKSSILIMDEATASIDMATENILQKVVMTAFADRTVVTIAHRVSSIMDAGLVLVFSEGILVECDTVPNLLAHKNGLFSTLVMTNK

SEQ ID NO: 38442 - protein, 149 aa, Homo sapiens
MSLSFCGNNISSYNINDGVLQNSCFVDALNLVPHVFLLFITFPILFIGWGSQSSKVQIHHNTWLHFPGHNLRWILTFALLFVHVCEIAEGIVSDSRRESRHLHLFMPAVMGFVATTTSIVYYHNIETSNFPKLLLGFSHHESKSCYQHS

SEQ ID NO: 38443 - protein, 1513 aa, Homo sapiens
MSLSFCGNNISSYNINDGVLQNSCFVDALNLVPHVFLLFITFPILFIGWGSQSSKVQIHHNTWLHFPGHNLRWILTFALLFVHVCEIAEGIVSDSRRESRHLHLFMPAVMGFVATTTSIVYYHNIETSNFPKLLLALFLYWVMAFITKTIKLVKYCQSGLDISNLRFCITGMMVILNGLLMAVEINVIRVRRYVFFMNPQKVKPPEDLQDLGVRFLQPFVNLLSKATYWWMNTLIISAHKKPIDLKAIGKLPIAMRAVTNYVCLKDAYEEQKKKVADHPNRTPSIWLAMYRAFGRPILLSSTFRYLADLLGFAGPLCISGIVQRVNETQNGTNNTTGISETLSSKEFLENAYVLAVLLFLALILQRTFLQASYYVTIETGINLRGALLAMIYNKILRLSTSNLSMGEMTLGQINNLVAIETNQLMWFLFLCPNLWAMPVQIIMGVILLYNLLGSSALVGAAVIVLLAPIQYFIATKLAEAQKSTLDYSTERLKKTNEILKGIKLLKLYAWEHIFCKSVEETRMKELSSLKTFALYTSLSIFMNAAIPIAAVLATFVTHAYASGNNLKPAEAFASLSLFHILVTPLFLLSTVVRFAVKAIISVQKLNEFLLSDEIGDDSWRTGESSLPFESCKKHTGVVTNGYFSWGSGLATLSNIDIRIPTGQLTMIVGQVGCGKSSLLLAILGEMQTLEGKVHWSNVNESEPSFEATRSRNRYSVAYAAQKPWLLNATVEENITFGSPFNKQRYKAVTDACSLQPDIDLLPFGDQTEIGERGINLSGGQRQRICVARALYQNTNIVFLDDPFSALDIHLSDHLMQEGILKFLQDDKRTLVLVTHKLQYLTHADWIIAMKDGSVLREGTLKDIQTKDVELYEHWKTLMNRQDQELEKDMEADQTTLERKTLRRAMYSREAKAQMEDEDEEEEEEEDEDDNMSTVMRLRTKMPWKTCWRYLTSGGFFLLILMIFSKLLKHSVIVAIDYWLATWTSEYSINNTGKADQTYYVAGFSILCGAGIFLCLVTSLTVEWMGLTAAKNLHHNLLNKIILGPIRFFDTTPLGLILNRFSADTNIIDQHIPPTLESLTRSTLLCLSAIGMISYATPVFLVALLPLGVAFYFIQKYFRVASKDLQELDDSTQLPLLCHFSETAEGLTTIRAFRHETRFKQRMLELTDTNNIAYLFLSAANRWLEVRTDYLGACIVLTASIASISGSSNSGLVGLGLLYALTITNYLNWVVRNLADLEVQMGAVKKVNSFLTMESENYEGTMDPSQVPEHWPQEGEIKIHDLCVRYENNLKPVLKHVKAYIKPGQKVGICGRTGSGKSSLSLAFFRMVDIFDGKIVIDGIDISKLPLHTLRSRLSIILQDPILFSGSIRFNLDPECKCTDDRLWEALEIAQLKNMVKSLPGGLDAVVTEGGENFSVGQRQLFCLARAFVRKSSILIMDEATASIDMATENILQKVVMTAFADRTVVTIAHRVSSIMDAGLVLVFSEGILVECDTVPNLLAHKNGLFSTLVMTNK

SEQ ID NO: 38444 - protein, 745 aa, Homo sapiens [sequence omitted]

SEQ ID NO: 38445 - protein, 227 aa, Homo sapiens
MDGRLRNPDQSLTEDVVAFAASVAHLYSNLTKPLLDVAVTSYTLLRAARSRGAGTAWPSAIAGLVVFLTANVLRAFSPKFGELVAEEARRKGELRYMHSRVVANSEEIAFYGGHEVELALLQRSYQDLASQINLILLERLWYVMLEQFLMKYVWSASGLLMVAVPIITATGYSESGETQGSKRIQARGLSPIPLGAELTRAQLSQPAAHFCCRGHRGPAASLDAFRG

SEQ ID NO: 38446 - protein, 223 aa, Homo sapiens
  VARIANT 1: note = MOD_RES - Any amino acid
XLFSTVAAPFYLPASSVGGFHLFIVASTDAEAVKKAALEKKEEELVSERTEAFTIARNLLTAAADAIERIMSSYKEVTELAGYTARVHEMFQVFEDVQRCHFKRPRELEDAQAGSGTIGRSGVRVEGPLKIRGQVVDVEQGIICENIPIVTPSGEVVVASLNIRVEEGMHLLITGPNGCGKSSLFRILGGLWPTYGGVLYKPPPQRMFYIPQRPYMSVGSLRD

SEQ ID NO: 38447 - protein, 740 aa, Homo sapiens
MTHMLNAAADRVKWTRSSAAKRAACLVAAAYALKTLYPIIGKRLKQSGHGKKKAAAYPAAENTEILHCTETICEKPSPGVNADFFKQLLELRKILFPKLVTTETGWLCLHSVALISRTFLSIYVAGLDGKIVKSIVEKKPRTFIIKLIKWLMIAIPATFVNSAIRYLECKLALAFRTRLVDHAYETYFTNQTYYKVINMDGRLANPDQSLTEDIMMFSQSVAHLYSNLTKPILDVMLTSYTLIQTATSRGASPIGPTLLAGLVVYATAKVLKACSPKFGKLVAEEAHRKGYLRYVHSRIIANVEEIAFYRGHKVEMKQLQKSYKALADQMNLILSKRLWYIMIEQFLMKYVWSSSGLIMVAIPIITATGFADGEDGQKQVMVSERTEAFTTARNLLASGADAIERIMSSYKEVTELAGYTARVYNMFWVFDEVKRGIYKRTAVIQESESHSKNGAKVELPLSDTLAIKGKVIDVDHGIICENVPIITPAGEVVASRLNFKVEEGMHLLITGPNGCGKSSLFRILSGLWPVYEGVLYKPPPQHMFYIPQRPYMSLGSLRDQVIYPDSVDDMHDKGYTDQDLERILHNVHLYHIVQREGGWDAVMDWKDVLSGGEKQRMGMARMFYHKPKYALLDECTSAVSIDVEGKIFQAAKGAGISLLSITHRPSLWKYHTHLLQFDGEGGWRFEQLDTAIRLTLSEEKQKLESQLAGIPKMQQRLNELCKILGEDSVLKTIKNEDETS

SEQ ID NO: 38448 - protein, 236 aa, Homo sapiens
MAAFSKYLTARNSSLAGAAFLLLCLLHKRRRALGLHGKKSGKPPLQNNEKEGKKERAVVDKVFFSRLIQILKIMVPRTFCKETGYLVLIAVMLVSRTYCDVWMIQNGTLIESGIIGRSRKDFKRYLLNFIAAMPLISLVNNFLKYGLNELKLCFRVRLTKYLYEEYLQAFTYYKMGNLDNRIANPDQLLTQDVEKFCNSVVDLYSNLSKPFLDIVLYIFKLTSAIGAQVLGKILWH

SEQ ID NO: 38449 - protein, 659 aa, Homo sapiens
MAAFSKYLTARNSSLAGAAFLLLCLLHKRRRALGLHGKKSGKPPLQNNEKEGKKERAVVDKVFFSRLIQILKIMVPRTFCKETGYLVLIAVMLVSRTYCDVWMIQNGTLIESGIIGRSRKDFKRYLLNFIAAMPLISLVNNFLKYGLNELKLCFRVRLTKYLYEEYLQAFTYYKMGNLDNRIANPDQLLTQDVEKFCNSVVDLYSNLSKPFLDIVLYIFKLTSAIGAQGPASMMAYLVVSGLFLTRLRRPIGKMTITEQKYEGEYRYVNSRLITNSEEIAFYNGNKREKQTVHSVFRKLVEHLHNFILFRFSMGFIDSIIAKYLATVVGYLVVSRPFLDLSHPRHLKSTHSELLEDYYQSGRMLLRMSQALGRIVLAGREMTRLAGFTARITELMQVLKDLNHGKYERTMVSQQEKGIEGVQVIPLIPGAGEIIIADNIIKFDHVPLATPNGDVLIRDLNFEVRSGANVLICGPNGCGKSSLFRVLGELWPLFGGRLTKPERGKLFYVPQRPYMTLGTLRDQVIYPDGREDQKRKGISDLVLKEYLDNVQLGHILEREGGWDSVQDWMDVLSGGEKQRMAMARLFYHKPQFAILDECTSAVSVDVEGYIYSHCRKVGITLFTVSHRKSLWKHHEYYLHMDGRGNYEFKQITEDTVEFGS

SEQ ID NO: 38450 - protein, 549 aa, Homo sapiens
MAAFSKYLTARNSSLAGAAFLLLCLLHKRRRALGLHGKKSGKPPLQNNEKEGKKERAVVDKVFFSRLIQILKIMVPRTFCKETGYLVLIAVMLVSRTYCDVWMIQNGTLIESGIIGRSRKDFKRYLLNFIAAMPLISLVNNFLKYGLNELKLCFRVRLTKYLYEEYLQAFTYYKMGNLDNRIANPDQLLTQDVEKFCNSVVDLYSNLSKPFLDIVLYIFKLTSAIGAQGPASMMAYLVVSGLFLTRLRRPIGKMTITEQKYEGEYRYVNSRLITNSFTARITELMQVLKDLNHGKYERTMVSQQEKGIEGVQVIPLIPGAGEIIIADNIIKFDHVPLATPNGDVLIRDLNFEVRSGANVLICGPNGCGKSSLFRVLGELWPLFGGRLTKPERGKLFYVPQRPYMTLGTLRDQVIYPDGREDQKRKGISDLVLKEYLDNVQLGHILEREGGWDSVQDWMDVLSGGEKQRMAMARLFYHKPQFAILDECTSAVSVDVEGYIYSHCRKVGITLFTVSHRKSLWKHHEYYLHMDGRGNYEFKQITEDTVEFGS

SEQ ID NO: 38451 - protein, 683 aa, Homo sapiens
MAAFSKYLTARNSSLAGAAFLLLCLLHKRRRALGLHGYFMETWREKSDEVMGELTDHVTHCKKSGKPPLQNNEKEGKKERAVVDKVFFSRLIQILKIMVPRTFCKETGYLVLIAVMLVSRTYCDVWMIQNGTLIESGIIGRSRKDFKRYLLNFIAAMPLISLVNNFLKYGLNELKLCFRVRLTKYLYEEYLQAFTYYKMGNLDNRIANPDQLLTQDVEKFCNSVVDLYSNLSKPFLDIVLYIFKLTSAIGAQGPASMMAYLVVSGLFLTRLRRPIGKMTITEQKYEGEYRYVNSRLITNSEEIAFYNGNKREKQTVHSVFRKLVEHLHNFILFRFSMGFIDSIIAKYLATVVGYLVVSRPFLDLSHPRHLKSTHSELLEDYYQSGRMLLRMSQALGRIVLAGREMTRLAGFTARITELMQVLKDLNHGKYERTMVSQQEKGIEGVQVIPLIPGAGEIIIADNIIKFDHVPLATPNGDVLIRDLNFEVRSGANVLICGPNGCGKSSLFRVLGELWPLFGGRLTKPERGKLFYVPQRPYMTLGTLRDQVIYPDGREDQKRKGISDLVLKEYLDNVQLGHILEREGGWDSVQDWMDVLSGGEKQRMAMARLFYHKPQFAILDECTSAVSVDVEGYIYSHCRKVGITLFTVSHRKSLWKHHEYYLHMDGRGNYEFKQITEDTVEFGS

SEQ ID NO: 38452 - protein, 586 aa, Homo sapiens
MVPRTFCKETGYLVLIAVMLVSRTYCDVWMIQNGTLIESGIIGRSRKDFKRYLLNFIAAMPLISLVNNFLKYGLNELKLCFRVRLTKYLYEEYLQAFTYYKMGNLDNRIANPDQLLTQDVEKFCNSVVDLYSNLSKPFLDIVLYIFKLTSAIGAQGPASMMAYLVVSGLFLTRLRRPIGKMTITEQKYEGEYRYVNSRLITNSEEIAFYNGNKREKQTVHSVFRKLVEHLHNFILFRFSMGFIDSIIAKYLATVVGYLVVSRPFLDLSHPRHLKSTHSELLEDYYQSGRMLLRMSQALGRIVLAGREMTRLAGFTARITELMQVLKDLNHGKYERTMVSQQEKGIEGVQVIPLIPGAGEIIIADNIIKFDHVPLATPNGDVLIRDLNFEVRSGANVLICGPNGCGKSSLFRVLGELWPLFGGRLTKPERGKLFYVPQRPYMTLGTLRDQVIYPDGREDQKRKGISDLVLKEYLDNVQLGHILEREGGWDSVQDWMDVLSGGEKQRMAMARLFYHKPQFAILDECTSAVSVDVEGYIYSHCRKVGITLFTVSHRKSLWKHHEYYLHMDGRGNYEFKQITEDTVEFGS

SEQ ID NO: 38453 - protein, 488 aa, Homo sapiens
MLIVLNSTLKSFDQFTCNLLYVSWRKDLTEHLHRLYFRGRAYYTLNVLRDDIDNPDQRISQDVERFCRQLSSMASKLIISPFTLVYYTYQCFQSTGWLGPVSIFGYFILGTVVNKTLMGPIVMKLVHQEKLEGDFRAGHVEHMRTDRRLQRLLQTQRELMSKELWLYIGINTFDYLGSILSYVVIAIPIFSGVYGDLSPAELSTLVSKNAFVCIYLISCFTQLIDLSTTLSDVAGYTHRIGQLRETLLDMSLKSQDCEILGESEWGLDTPPGWPAAEPADTAFLLERVSISAPSSDKPLIKDLSLKISEGQSLLITGNTGTGKTSLLRVLGGLWTSTRGSVQMLTDFGPHGVLFLPQKPFFTDGTLREQVIYPLKEVYPDSGSADDERILRFLELAGLSNLVARTEGLDQQVDWNWYDVLSPGEMQRLSFARLFYLQPKYAVLDEATSALTEEVESELYRIGQQLGMTFISVGHRQSLEKVPVLTRMA

SEQ ID NO: 38454 - protein, 606 aa, Homo sapiens
MAVAGPAPGAGARPRLDLQFLQRFLQILKVLFPSWSSQNALMFLTLLCLTLLEQFVIYQVGLIPSQYYGVLGNKDLEGFKTLTFLAVMLIVLNSTLKSFDQFTCNLLYVSWRKDLTEHLHRLYFRGRAYYTLNVLRDDIDNPDQRISQDVERFCRQLSSMASKLIISPFTLVYYTYQCFQSTGWLGPVSIFGYFILGTVVNKTLMGPIVMKLVHQEKLEGDFRFKHMQIRVNAEPAAFYRAGHVEHMRTDRRLQRLLQTQRELMSKELWLYIGINTFDYLGSILSYVVIAIPIFSGVYGDLSPAELSTLVSKNAFVCIYLISCFTQLIDLSTTLSDVAGYTHRIGQLRETLLDMSLKSQDCEILGESEWGLDTPPGWPAAEPADTAFLLERVSISAPSSDKPLIKDLSLKISEGQSLLITGNTGTGKTSLLRVLGGLWTSTRGSVQMLTDFGPHGVLFLPQKPFFTDGTLREQVIYPLKEVYPDSGSADDERILRFLELAGLSNLVARTEGLDQQVDWNWYDVLSPGEMQRLSFARLFYLQPKYAVLDEATSALTEEVESELYRIGQQLGMTFISVGHRQSLEKFHSLVLKLCGGGRWELMRIKVE

SEQ ID NO: 38455 - protein, 98 aa, Homo sapiens
MRSLLLSTVGINTFDYLGSILSYVVIAIPIFSGVYGDLSPAELSTLVSKNAFVCIYLISCFTQLIDLSTTLSDVAGYTHRIGQLRETLLDMSLKSQDC

SEQ ID NO: 38456 - protein, 599 aa, Homo sapiens
MADKLTRIAIVNHDKCKPKKCRQECKKSCPVVRMGKLCIEVTPQSKIAWISETLCIGCGICIKKCPFGALSIVNLPSNLEKETTHRYCANAFKLHRLPIPRPGEVLGLVGTNGIGKSTALKILAGKQKPNLGKYDDPPDWQEILTYFRGSELQNYFTKILEDDLKAIIKPQYVDQIPKAAKGTVGSILDRKDETKTQAIVCQQLDLTHLKERNVEDLSGGELQRFACAVVCIQKADIFMFDEPSSYLDVKQRLKAAITIRSLINPDRYIIVVEHDLSVLDYLSDFICCLYGVPSAYGVVTMPFSVREGINIFLDGYVPTENLRFRDASLVFKVAETANEEEVKKMCMYKYPGMKKKMGEFELAIVAGEFTDSEIMVMLGENGTGKTTFIRMLAGRLKPDEGGEVPVLNVSYKPQKISPKSTGSVRQLLHEKIRDAYTHPQFVTDVMKPLQIENIIDQEVQTLSGGELQRVALALCLGKPADVYLIDEPSAYLDSEQRLMAARVVKRFILHAKKTAFVVEHDFIMATYLADRVIVFDGVPSKNTVANSPQTLLAGMNKFLSQLEITFRRDPNNYRPRINKLNSIKDVEQKKSGNYFFLDD

SEQ ID NO: 38457 - protein, 210 aa, Homo sapiens
MADKLTRIAIVNHDKCKPKKCRQECKKSCPVVRMGKLCIEVTPQSKIAWISETLCIGCGICIKKCPFGALSIVNLPSNLEKETTHRYCANAFKLHRLPIPRPGEVLGLVGTNGIGKSTALKILAGKQKPNLGKYDDPPDWQEILTYFRGSELQNYFTKILEDDLKAIIKPQYVDQIPKAAKGTVGSILDRKDETKTQAIVCQQLDLTHLK

SEQ ID NO: 38458 - protein, 845 aa, Homo sapiens
MPKAPKQQPPEPEWIGDGESTSPSDKVVKKGKKDKKIKKTFFEELAVEDKQAGEEEKVLKEKEQQQQQQQQQQKKKRDTRKGRRKKDVDDDGEEKELMERLKKLSVPTSDEEDEVPAPKPRGGKKTKGGNVFAALIQDQSEEEEEEEKHPPKPAKPEKNRINKAVSEEQQPALKGKKGKEEKSKGKAKPQNKFAALDNEEEDKEEEIIKEKEPPKQGKEKAKKAEQGSEEEGEGEEEEEEGGESKADDPYAHLSKKEKKKLKKQMEYERQVASLKAANAAENDFSVSQAEMSSRQAMLENASDIKLEKFSISAHGKELFVNADLYIVAGRRYGLVGPNGKGKTTLLKHIANRALSIPPNIDVLLCEQEVVADETPAVQAVLRADTKRLKLLEEERRLQGQLEQGDDTAAERLEKVYEELRATGAAAAEAKARRILAGLGFDPEMQNRPTQKFSGGWRMRVSLARALFMEPTLLMLDEPTNHLDLNAVIWLNNYLQGWRKTLLIVSHDQGFLDDVCTDIIHLDAQRLHYYRGNYMTFKKMYQQKQKELLKQYEKQEKKLKELKAGGKSTKQAEKQTKEALTRKQQKCRRKNQDEESQEAPELLKRPKEYTVRFTFPDPPPLSPPVLGLHGVTFGYQGQKPLFKNLDFGIDMDSRICIVGPNGVGKSTLLLLLTGKLTPTHGEMRKNHRLKIGFFNQQYAEQLRMEETPTEYLQRGFNLPYQDARKCLGRFGLESHAHTIQICKLSGGQKARVVFAELACREPDVLILDEPTNNLDIESIDALGEAINEYKGAVIVVSHDARLITETNCQLWVVEEQSVSQIDGDFEDYKREVLEALGEVMVSRPRE

SEQ ID NO: 38459 - protein, 807 aa, Homo sapiens
MPKAPKQQPPEPEWIGDGESTSPSDKVVKKGKKDKKIKKTFFEELAVEDKQAGEEEKVLKEKEQQQQQQQQQQKKKRDTRKGRRKKDVDDDGEEKELMERLKKLSVPTSDEEDEVPAPKPRGGKKTKGGNVFAALIQDQSEEEEEEEKHPPKPAKPEKNRINKAVSEEQQPALKGKKGKEEKSKGKAKPQNKFAALDNEEEDKEEEIIKEKEPPKQGKEKAKKAEQMEYERQVASLKAANAAENDFSVSQAEMSSRQAMLENASDIKLEKFSISAHGKELFVNADLYIVAGRRYGLVGPNGKGKTTLLKHIANRALSIPPNIDVLLCEQEVVADETPAVQAVLRADTKRLKLLEEERRLQGQLEQGDDTAAERLEKVYEELRATGAAAAEAKARRILAGLGFDPEMQNRPTQKFSGGWRMRVSLARALFMEPTLLMLDEPTNHLDLNAVIWLNNYLQGWRKTLLIVSHDQGFLDDVCTDIIHLDAQRLHYYRGNYMTFKKMYQQKQKELLKQYEKQEKKLKELKAGGKSTKQAEKQTKEALTRKQQKCRRKNQDEESQEAPELLKRPKEYTVRFTFPDPPPLSPPVLGLHGVTFGYQGQKPLFKNLDFGIDMDSRICIVGPNGVGKSTLLLLLTGKLTPTHGEMRKNHRLKIGFFNQQYAEQLRMEETPTEYLQRGFNLPYQDARKCLGRFGLESHAHTIQICKLSGGQKARVVFAELACREPDVLILDEPTNNLDIESIDALGEAINEYKGAVIVVSHDARLITETNCQLWVVEEQSVSQIDGDFEDYKREVLEALGEVMVSRPRE

SEQ ID NO: 38460 - protein, 807 aa, Homo sapiens; identical to SEQ ID NO: 38459

SEQ ID NO: 38461 - protein, 845 aa, Homo sapiens; identical to SEQ ID NO: 38458

SEQ ID NO: 38462 - protein, 238 aa, Homo sapiens
MPKAPKQQPPEPEWIGDGESTSPSDKVVKKGKKDKKIKKTFFEELAVEDKQAGEEEKVLKEKEQQQQQQQQQQKKKRDTRKGRRKKDVDDDGEEKELMERLKKLSRGFNLPYQDARKCLGRFGLESHAHTIQICKLSGGQKARVVFAELACREPDVLILDEPTNNLDIESIDALGEAINEYKGAVIVVSHDARLITETNCQLWVVEEQSVSQIDGDFEDYKREVLEALGEVMVSRPRE

SEQ ID NO: 38463 - protein, 807 aa, Homo sapiens; identical to SEQ ID NO: 38459

SEQ ID NO: 38464 - protein, 238 aa, Homo sapiens; identical to SEQ ID NO: 38462

SEQ ID NO: 38465 - protein, 340 aa, Homo sapiens [sequence omitted]

SEQ ID NO: 38466 - protein, 845 aa, Homo sapiens; identical to SEQ ID NO: 38458

SEQ ID NO: 38467 - protein, 807 aa, Homo sapiens; identical to SEQ ID NO: 38459

SEQ ID NO: 38468 - protein, 807 aa, Homo sapiens; identical to SEQ ID NO: 38459

SEQ ID NO: 38469 - protein, 238 aa, Homo sapiens; identical to SEQ ID NO: 38462

SEQ ID NO: 38470 - protein, 340 aa, Homo sapiens [sequence omitted]

SEQ ID NO: 38471 - protein, 845 aa, Homo sapiens; identical to SEQ ID NO: 38458

SEQ ID NO: 38472 - protein, 340 aa, Homo sapiens [sequence omitted]

SEQ ID NO: 38473 - protein, 845 aa, Homo sapiens; identical to SEQ ID NO: 38458

SEQ ID NO: 38474 - protein, 340 aa, Homo sapiens [sequence omitted]

SEQ ID NO: 38475 - protein, 340 aa, Homo sapiens [sequence omitted]

SEQ ID NO: 38476 - protein, 340 aa, Homo sapiens [sequence omitted]

SEQ ID NO: 38477 - protein, 340 aa, Homo sapiens [sequence omitted]

SEQ ID NO: 38478 - protein, 807 aa, Homo sapiens; identical to SEQ ID NO: 38459

SEQ ID NO: 38479 - protein, 807 aa, Homo sapiens; identical to SEQ ID NO: 38459

SEQ ID NO: 38480 - protein, 238 aa, Homo sapiens; identical to SEQ ID NO: 38462

SEQ ID NO: 38481 - protein, 533 aa, Homo sapiens
MPKAPKQQPPEPEWIGDGESTSPSDKVVKKGKKDKKIKKTFFEELAVEDKQAGEEEKVLKEKEQQQQQQQQQQQKKKRDTRKGRRKKDVDDDGEEKELMERLKKLSVPTSDEEDEVPAPKPRGGKKTKGGNVFAALIQDQSEEEEEEEKHPPKPAKPEKNRINKAVSEEQQPALKGKKGKEEKSKGKAKPQNKFAALDNEEEDKEEEIIKEKEPPKQGKEKAKKAEQGSEEEGEGEEEEEEGGESKADDPYAHLSKKEKKKLKKQMEYERQVASLKAANAAENDFSVSQAEMSSRQAMLENASDIKLEKFSISAHGKELFVNADLYIVAGRRYGLVGPNGKGKTTLLKHIANRALSIPPNIDVLLCEQEVVADETPAVQAVLRDDTAAERLEKVYEELRATGAAAAEAKARRILAGLGFDPEMQNRPTQKFSGGWRMRVSLARALFMEPTLLMLDEPTNNLDIESIDALGEAINEYKGAVIVVSHDARLITETNCQLWVVEEQSVSQIDGDFEDYKREVLEALGEVMVSRPRE

SEQ ID NO: 38482 - protein, 238 aa, Homo sapiens; identical to SEQ ID NO: 38462

SEQ ID NO: 38483 - protein, 845 aa, Homo sapiens; identical to SEQ ID NO: 38458

SEQ ID NO: 38484 - protein, 845 aa, Homo sapiens; identical to SEQ ID NO: 38458

SEQ ID NO: 38485 - protein, 238 aa, Homo sapiens; identical to SEQ ID NO: 38462

SEQ ID NO: 38486 - protein, 533 aa, Homo sapiens; identical to SEQ ID NO: 38481

SEQ ID NO: 38487 - protein, 532 aa, Homo sapiens
MPKAPKQQPPEPEWIGDGESTSPSDKVVKKGKKDKKIKKTFFEELAVEDKQAGEEEKVLKEKEQQQQQQQQQQKKKRDTRKGRRKKDVDDDGEEKELMERLKKLSVPTSDEEDEVPAPKPRGGKKTKGGNVFAALIQDQSEEEEEEEKHPPKPAKPEKNRINKAVSEEQQPALKGKKGKEEKSKGKAKPQNKFAALDNEEEDKEEEIIKEKEPPKQGKEKAKKAEQGSEEEGEGEEEEEEGGESKADDPYAHLSKKEKKKLKKQMEYERQVASLKAANAAENDFSVSQAEMSSRQAMLENASDIKLEKFSISAHGKELFVNADLYIVAGRRYGLVGPNGKGKTTLLKHIANRALSIPPNIDVLLCEQEVVADETPAVQAVLRDDTAAERLEKVYEELRATGAAAAEAKARRILAGLGFDPEMQNRPTQKFSGGWRMRVSLARALFMEPTLLMLDEPTNNLDIESIDALGEAINEYKGAVIVVSHDARLITETNCQLWVVEEQSVSQIDGDFEDYKREVLEALGEVMVSRPRE

SEQ ID NO: 38488 - protein, 532 aa, Homo sapiens; identical to SEQ ID NO: 38487

SEQ ID NO: 38489 - protein, 532 aa, Homo sapiens; identical to SEQ ID NO: 38487

SEQ ID NO: 38490 - protein, 532 aa, Homo sapiens; identical to SEQ ID NO: 38487

SEQ ID NO: 38491 - protein, 533 aa, Homo sapiens; identical to SEQ ID NO: 38481

SEQ ID NO: 38492 - protein, 634 aa, Homo sapiens
MPSDLAKKKAAKKKEAAKARQRPRKGHEENGDVVTEPQVAEKNEANGRETTEVDLLTKELEDFEMKKAAARAVTGVLASHPNSTDVHIINLSLTFHGQELLSDTKLELNSGRRYGLIGLNGIGKSMLLSAIGKREVPIPEHIDIYHLTREMPPSDKTPLHCVMEVDTERAMLEKEAERLAHEDAECEKLMELYERLEELDADKAEMRASRILHGLGFTPAMQRKKLKDFSGGWRMRVALARALFIRPFMLLLDEPTNHLDLDACVWLEEELKTFKRILVLVSHSQDFLNGVCTNIIHMHNKKLKYYTGNYDQYVKTRLELEENQMKRFHWEQDQIAHMKNYIARFGHGSAKLARQAQSKEKTLQKMMASGLTERVVSDKTLSFYFPPCGKIPPPVIMVQNVSFKYTKDGPCIYNNLEFGIDLDTRVALVGPNGAGKSTLLKLLTGELLPTDGMIRKHSHVKIGRYHQHLQEQLDLDLSPLEYMMKCYPEIKEKEEMRKIIGRYGLTGKQQVSPIRNLSDGQKCRVCLAWLAWQNPHMLFLDEPTNHLDIETIDALADAINEFEGGMMLVSHDFRLIQQVAQEIWVCEKQTITKWPGDILAYKEHLKSKLVDEEPQLTKRTHNVCTLTLASLPRP

SEQ ID NO: 38493 - protein, 623 aa, Homo sapiens
MPSDLAKKKAAKKKEAAKARQRPRKGHEENGDVVTEPQVAEKNEANGRETTEVDLLTKELEDFEMKKAAARAVTGVLASHPNSTDVHIINLSLTFHGQELLSDTKLELNSGRRYGLIGLNGIGKSMLLSAIGKREVPIPEHIDIYHLTREMPPSDKTPLHCVMEVDTERAMLEKEAERLAHEDAECEKLMELYERLEELDADKAEMRASRILHGLGFTPAMQRKKLKDFSGGWRMRVALARALFIRPFMLLLDEPTNHLDLDACVWLEEELKTFKRILVLVSHSQDFLNGVCTNIIHMHNKKLKYYTGNYDQYVKTRLELEENQMKRFHWEQDQIAHMKNYIARFGHGSAKLARQAQSKEKTLQKMMASGLTERVVSDKTLSFYFPPCGKIPPPVIMVQNVSFKYTKDGPCIYNNLEFGIDLDTRVALVGPNGAGKSTLLKLLTGELLPTDGMIRKHSHVKIGRYHQHLQEQLDLDLSPLEYMMKCYPEIKEKEEMRKIIGRYGLTGKQQVSPIRNLSDGQKCRVCLAWLAWQNPHMLFLDEPTNHLDIETIDALADAINEFEGGMMLVSHDFRLIQQVAQEIWVCEKQTITKWPGDILAYKEHLKSKLVDEEPQLTKRTHNV

SEQ ID NO: 38494 - protein, 240 aa, Homo sapiens
MPSDLAKKKAAKKKEAAKARQRPRKGHEENGDVVTEPQVAEKNEANGRETTEVDLLTKELEDFEMKKAAARAVTGVLASHPNSTDVHIINLSLTFHGQELLSDTKLELNSGRRYGLIGLNGIGKSMLLSAIGKREVPIPEHIDIYHLTREMPPSDKTPLHCVMEVDTERAMLEKEAERLAHEDAECEKLMELYERLEELDADKAEMRASRILHGLGFTPAMQRKKLKDFSGGWRMRVALA

SEQ ID NO: 38495 - protein, 288 aa, Homo sapiens
MPSDLAKKKAAKKKEAAKARQRPRKGHEENGDVVTEPQVAEKNEANGRETTEVDLLTKELEDFEMKKAAARAVTGVLASHPNSTDVHIINLSLTFHGQELLSDTKLELNSGRRYGLIGLNGIGKSMLLSAIGKREVPIPEHIDIYHLTREMPPSDKTPLHCVMEVDTERAMLEKEAERLAHEDAECEKLMELYERLEELDADKAEMRASRILHGLGFTPAMQRKKLKDFSGGWRMRVALARALFIRPFMLLLDEPTNHLDLDACVWLEEELKTFKRILVLVSHSQDFL

SEQ ID NO: 38496 - protein, 786 aa, Homo sapiens
MVRRGWSVCTAILLARLWCLVPTHTFLSEYPEAAEYPHPGWVYWLQMAVAPGHLRAWVMRNNVTTNIPSAFSGTLTHEEKAVLTVFTGTATAVHVQVAALASAKLESSVFVTDCVSCKIENVCDSALQGKRVPMSGLQGSSIVIMPPSNRPLKASAASCTWSVQVQGGPHHLGVVAISGKVLSAAHGAGRAYGWGFPGDPMEEGYKTLLKGISGKFNSGELVAIMGPSGAGKSTLMNILAGYRETGMKGAVLINGLPRDLRCFRKVSCYIMQDDMLLPHLTVQEAMMVSAHLKLQEKDEGRREMVKEILTALGLLSCANTRTGSLSGGQRKRLAIALELVNNPPVMFFDEPTSGLDSASCFQVVSLMKGLAQGGRSIICTIHQPSAKLFELFDQLYVLSQGQCVYRGKVCNLVPYLRDLGLNCPTYHNPADFVMEVASGEYGDQNSRLVRAVREGMCDSDHKRDLGGDAEVNPFLWHRPSEEVKQTKRLKGLRKDSSSMEGCHSFSASCLTQFCILFKRTFLSIMRDSVLTHLRITSHIGIGLLIGLLYLGIGNEAKKVLSNSGFLFFSMLFLMFAALMPTVLTFPLEMGVFLREHLNYWYSLKAYYLAKTMADVPFQIMFPVAYCSIVYWMTSQPSDAVRFVLFAALGTMTSLVAQSLGLLIGAASTSLQVATFVGPVTAIPVLLFSGFFVSFDTIPTYLQWMSYISYVRYGFEGVILSIYGLDREDLHCDIDETCHFQKSEAILRELDVENAKLYLDFIVLGIFFISLRLIAYFVLRYKIRAER

SEQ ID NO: 38497 - protein, 677 aa, Homo sapiens
MRISLPRAPERDGGVSASSLLDTVTNASSYSAEMTEPKSVCVSVDEVVSSNMEATETDLLNGHLKKVDNNLTEAQRFSSLPRRAAVNIEFRDLSYSVPEGPWWRKKGYKTLLKGISGKFNSGELVAIMGPSGAGKSTLMNILAGYRETGMKGAVLINGLPRDLRCFRKVSCYIMQDDMLLPHLTVQEAMMVSAHLKLQEKDEGRREMVKEILTALGLLSCANTRTGSLSGGQRKRLAIALELVNNPPVMFFDEPTSGLDSASCFQVVSLMKGLAQGGRSIICTIHQPSAKLFELFDQLYVLSQGQCVYRGKVCNLVPYLRDLGLNCPTYHNPADFVMEVASGEYGDQNSRLVRAVREGMCDSDHKRDLGGDAEVNPFLWHRPSEEDSSSMEGCHSFSASCLTQFCILFKRTFLSIMRDSVLTHLRITSHIGIGLLIGLLYLGIGNEAKKVLSNSGFLFFSMLFLMFAALMPTVLTFPLEMGVFLREHLNYWYSLKAYYLAKTMADVPFQIMFPVAYCSIVYWMTSQPSDAVRFVLFAALGTMTSLVAQSLGLLIGAASTSLQVATFVGPVTAIPVLLFSGFFVSFDTIPTYLQWMSYISYVRYGFEGVILSIYGLDREDLHCDIDETCHFQKSEAILRELDVENAKLYLDFIVLGIFFISLRLIAYFVLRYKIRAER

SEQ ID NO: 38498 - protein, 663 aa, Homo sapiens
MIMRLPQPHGTNASSYSAEMTEPKSVCVSVDEVVSSNMEATETDLLNGHLKKVDNNLTEAQRFSSLPRRAAVNIEFRDLSYSVPEGPWWRKKGYKTLLKGISGKFNSGELVAIMGPSGAGKSTLMNILAGYRETGMKGAVLINGLPRDLRCFRKVSCYIMQDDMLLPHLTVQEAMMVSAHLKLQEKDEGRREMVKEILTALGLLSCANTRTGSLSGGQRKRLAIALELVNNPPVMFFDEPTSGLDSASCFQVVSLMKGLAQGGRSIICTIHQPSAKLFELFDQLYVLSQGQCVYRGKVCNLVPYLRDLGLNCPTYHNPADFVMEVASGEYGDQNSRLVRAVREGMCDSDHKRDLGGDAEVNPFLWHRPSEEDSSSMEGCHSFSASCLTQFCILFKRTFLSIMRDSVLTHLRITSHIGIGLLIGLLYLGIGNEAKKVLSNSGFLFFSMLFLMFAALMPTVLTFPLEMGVFLREHLNYWYSLKAYYLAKTMADVPFQIMFPVAYCSIVYWMTSQPSDAVRFVLFAALGTMTSLVAQSLGLLIGAASTSLQVATFVGPVTAIPVLLFSGFFVSFDTIPTYLQWMSYISYVRYGFEGVILSIYGLDREDLHCDIDETCHFQKSEAILRELDVENAKLYLDFIVLGIFFISLRLIAYFVLRYKIRAER

SEQ ID NO: 38499 - protein, 678 aa, Homo sapiens
MACLMAAFSVGTAMNASSYSAEMTEPKSVCVSVDEVVSSNMEATETDLLNGHLKKVDNNLTEAQRFSSLPRRAAVNIEFRDLSYSVPEGPWWRKKGYKTLLKGISGKFNSGELVAIMGPSGAGKSTLMNILAGYRETGMKGAVLINGLPRDLRCFRKVSCYIMQDDMLLPHLTVQEAMMVSAHLKLQEKDEGRREMVKEILTALGLLSCANTRTGSLSGGQRKRLAIALELVNNPPVMFFDEPTSGLDSASCFQVVSLMKGLAQGGRSIICTIHQPSAKLFELFDQLYVLSQGQCVYRGKVCNLVPYLRDLGLNCPTYHNPADFVMEVASGEYGDQNSRLVRAVREGMCDSDHKRDLGGDAEVNPFLWHRPSEEVKQTKRLKGLRKDSSSMEGCHSFSASCLTQFCILFKRTFLSIMRDSVLTHLRITSHIGIGLLIGLLYLGIGNEAKKVLSNSGFLFFSMLFLMFAALMPTVLTFPLEMGVFLREHLNYWYSLKAYYLAKTMADVPFQIMFPVAYCSIVYWMTSQPSDAVRFVLFAALGTMTSLVAQSLGLLIGAASTSLQVATFVGPVTAIPVLLFSGFFVSFDTIPTYLQWMSYISYVRYGFEGVILSIYGLDREDLHCDIDETCHFQKSEAILRELDVENAKLYLDFIVLGIFFISLRLIAYFVLRYKIRAER

SEQ ID NO: 38500 - protein, 824 aa, Homo sapiens
MLAVQQTEHLPACPPARRWSSNFCPESTEGGPSLLGLRDMVRRGWSVCTAILLARLWCLVPTHTFLSEYPEAAEYPHPGWVYWLQMAVAPGHLRAWVMRNNVTTNIPSAFSGTLTHEEKAVLTVFTGTATAVHVQVAALASAKLESSVFVTDCVSCKIENVCDSALQGKRVPMSGLQGSSIVIMPPSNRPLASAASCTWSVQVQGGPHHLGVVAISGKVLSAAHGAGRAYGWGFPGDPMEEGYKTLLKGISGKFNSGELVAIMGPSGAGKSTLMNILAGYRETGMKGAVLINGLPRDLRCFRKVSCYIMQDDMLLPHLTVQEAMMVSAHLKLQEKDEGRREMVKEILTALGLLSCANTRTGSLSGGQRKRLAIALELVNNPPVMFFDEPTSGLDSASCFQVVSLMKGLAQGGRSIICTIHQPSAKLFELFDQLYVLSQGQCVYRGKVCNLVPYLRDLGLNCPTYHNPADFVMEVASGEYGDQNSRLVRAVREGMCDSDHKRDLGGDAEVNPFLWHRPSEEVKQTKRLKGLRKDSSSMEGCHSFSASCLTQFCILFKRTFLSIMRDSVLTHLRITSHIGIGLLIGLLYLGIGNEAKKVLSNSGFLFFSMLFLMFAALMPTVLTFPLEMGVFLREHLNYWYSLKAYYLAKTMADVPFQIMFPVAYCSIVYWMTSQPSDAVRFVLFAALGTMTSLVAQSLGLLIGAASTSLQVATFVGPVTAIPVLLFSGFFVSFDTIPTYLQWMSYISYVRYGFEGVILSIYGLDREDLHCDIDETCHFQKSEAILRELDVENAKLYLDFIVLGIFFISLRLIAYFVLRYKIRAER

SEQ ID NO: 38501 - protein, 666 aa, Homo sapiens
MACLMAAFSVGTAMNASSYSAEMTEPKSVCVSVDEVVSSNMEATETDLLNGHLKKVDNNLTEAQRFSSLPRRAAVNIEFRDLSYSVPEGPWWRKKGYKTLLKGISGKFNSGELVAIMGPSGAGKSTLMNILAGYRETGMKGAVLINGLPRDLRCFRKVSCYIMQDDMLLPHLTVQEAMMVSAHLKLQEKDEGRREMVKEILTALGLLSCANTRTGSLSGGQRKRLAIALELVNNPPVMFFDEPTSGLDSASCFQVVSLMKGLAQGGRSIICTIHQPSAKLFELFDQLYVLSQGQCVYRGKVCNLVPYLRDLGLNCPTYHNPADFVMEVASGEYGDQNSRLVRAVREGMCDSDHKRDLGGDAEVNPFLWHRPSEEDSSSMEGCHSFSASCLTQFCILFKRTFLSIMRDSVLTHLRITSHIGIGLLIGLLYLGIGNEAKKVLSNSGFLFFSMLFLMFAALMPTVLTFPLEMGVFLREHLNYWYSLKAYYLAKTMADVPFQIMFPVAYCSIVYWMTSQPSDAVRFVLFAALGTMTSLVAQSLGLLIGAASTSLQVATFVGPVTAIPVLLFSGFFVSFDTIPTYLQWMSYISYVRYGFEGVILSIYGLDREDLHCDIDETCHFQKSEAILRELDVENAKLYLDFIVLGIFFISLRLIAYFVLRYKIRAER

SEQ ID NO: 38502 - protein, 668 aa, Homo sapiens
MLGTQGWTKQRKPCPQNASSYSAEMTEPKSVCVSVDEVVSSNMEATETDLLNGHLKKVDNNLTEAQRFSSLPRRAAVNIEFRDLSYSVPEGPWWRKKGYKTLLKGISGKFNSGELVAIMGPSGAGKSTLMNILAGYRETGMKGAVLINGLPRDLRCFRKVSCYIMQDDMLLPHLTVQEAMMVSAHLKLQEKDEGRREMVKEILTALGLLSCANTRTGSLSGGQRKRLAIALELVNNPPVMFFDEPTSGLDSASCFQVVSLMKGLAQGGRSIICTIHQPSAKLFELFDQLYVLSQGQCVYRGKVCNLVPYLRDLGLNCPTYHNPADFVMEVASGEYGDQNSRLVRAVREGMCDSDHKRDLGGDAEVNPFLWHRPSEEDSSSMEGCHSFSASCLTQFCILFKRTFLSIMRDSVLTHLRITSHIGIGLLIGLLYLGIGNEAKKVLSNSGFLFFSMLFLMFAALMPTVLTFPLEMGVFLREHLNYWYSLKAYYLAKTMADVPFQIMFPVAYCSIVYWMTSQPSDAVRFVLFAALGTMTSLVAQSLGLLIGAASTSLQVATFVGPVTAIPVLLFSGFFVSFDTIPTYLQWMSYISYVRYGFEGVILSIYGLDREDLHCDIDETCHFQKSEAILRELDVENAKLYLDFIVLGIFFISLRLIAYFVLRYKIRAER

SEQ ID NO: 38503 - protein, 646 aa, Homo sapiens
MAEKALEAVGCGLGPGAVAMAVTLEDGAEPPVLTTHLKKVENHITEAQRFSHLPKRSAVDIEFVELSYSVREGPCWRKRGYKTLLKCLSGKFCRRELIGIMGPSGAGKSTFMNILAGYRESGMKGQILVNGRPRELRTFRKMSCYIMQDDMLLPHLTVLEAMMVSANLKLSEKQEVKKELVTEILTALGLMSCSHTRTALLSGGQRKRLAIALELVNNPPVMFFDEPTSGLDSASCFQVVSLMKSLAQGGRTIICTIHQPSAKLFEMFDKLYILSQGQCIFKGVVTNLIPYLKGLGLHCPTYHNPADFIIEVASGEYGDLNPMLFRAVQNGLCAMAEKKSSPEKNEVPAPCPPCPPEVDPIESHTFATSTLTQFCILFKRTFLSILRDTVLTHLRFMSHVVIGVLIGLLYLHIGDDASKVFNNTGCLFFSMLFLMFAALMPTVLTFPLEMAVFMREHLNYWYSLKAYYLAKTMADVPFQVVCPVVYCSIVYWMTGQPAETSRFLLFSALATATALVAQSLGLLIGAASNSLQVATFVGPVTAIPVLLFSGFFVSFKTIPTYLQWSSYLSYVRYGFEGVILTIYGMERGDLTCLEERCPFREPQSILRALDVEDAKLYMDFLVLGIFFLALRLLAYLVLRYRVKSER

SEQ ID NO: 38504 - protein, 646 aa, Homo sapiens; identical to SEQ ID NO: 38503

SEQ ID NO: 38505 - protein, 646 aa, Homo sapiens; identical to SEQ ID NO: 38503

SEQ ID NO: 38506 - protein, 651 aa, Homo sapiens
MGDLSSLTPGGSMGLQVNRGSQSSLEGAPATAPEPHSLGILHASYSVSHRVRPWWDITSCRQQWTRQILKDVSLYVESGQIMCILGSSGSGKTTLLDAMSGRLGRAGTFLGEVYVNGRALRREQFQDCFSYVLQSDTLLSSLTVRETLHYTALLAIRRGNPGSFQKKVEAVMAELSLSHVADRLIGNYSLGGISTGERRRVSIAAQLLQDPKVMLFDEPTTGLDCMTANQIVVLLVELARRNRIVVLTIHQPRSELFQLFDKIAILSFGELIFCGTPAEMLDFFNDCGYPCPEHSNPFDFYMDLTSVDTQSKEREIETSKRVQMIESAYKKSAICHKTLKNIERMKHLKTLPMVPFKTKDSPGVFSKLGVLLRRVTRNLVRNKLAVITRLLQNLIMGLFLLFFVLRVRSNVLKGAIQDRVGLLYQFVGATPYTGMLNAVNLFPVLRAVSDQESQDGLYQKWQMMLAYALHVLPFSVVATMIFSSVCYWTLGLHPEVARFGYFSAALLAPHLIGEFLTLVLLGIVQNPNIVNSVVALLSIAGVLVGSGFLRNIQEMPIPFKIISYFTFQKYCSEILVVNEFYGLNFTCGSSNVSVTTNPMCAFTQGIQFIEKTCPGATSRFTMNFLILYSFIPALVILGIVVFKIRDHLISR

SEQ ID NO: 38507 - protein, 480 aa, Homo sapiens
MCILGSSGSGKTTLLDAMSGRLGRAGTFLGEVYVNGRALRREQFQDCFSYVLQSDTLLSSLTVRETLHYTALLAIRRGNPGSFQKKVEAVMAELSLSHVADRLIGNYSLGGISTGERRRVSIAAQLLQDPMDLTSVDTQSKEREIETSKRVQMIESAYKKSAICHKTLKNIERMKHLKTLPMVPFKTKDSPGVFSKLGVLLRRVTRNLVRNKLAVITRLLQNLIMGLFLLFFVLRVRSNVLKGAIQDRVGLLYQFVGATPYTGMLNAVNLFPVLRAVSDQESQDGLYQKWQMMLAYALHVLPFSVVATMIFSSVCYWTLGLHPEVARFGYFSAALLAPHLIGEFLTLVLLGIVQNPNIVNSVVALLSIAGVLVGSGFLRNIQEMPIPFKIISYFTFQKYCSEILVVNEFYGLNFTCGSSNVSVTTNPMCAFTQGIQFIEKTCPGATSRFTMNFLILYSFIPALVILGIVVFKIRDHLISR

SEQ ID NO: 38508 - protein, 256 aa, Homo sapiens
MGLFLLFFVLRVRSNVLKGAIQDRVGLLYQFVGATPYTGMLNAVNLFPVLRAVSDQESQDGLYQKWQMMLAYALHVLPFSVVATMIFSSVCYWTLGLHPEVARFGYFSAALLAPHLIGEFLTLVLLGIVQNPNIVNSVVALLSIAGVLVGSGFLRNIQEMPIPFKIISYFTFQKYCSEILVVNEFYGLNFTCGSSNVSVTTNPMCAFTQGIQFIEKTCPGATSRFTMNFLILYSFIPALVILGIVVFKIRDHLISR

SEQ ID NO: 38509 - protein, 673 aa, Homo sapiens
MAGKAAEERGLPKGATPQDTSGLQDRLFSSESDNSLYFTYSGQPNTLEVRDLNYQVDLASQVPWFEQLAQFKMPWTSPSCQNSCELGIQNLSFKVRSGQMLAIIGSSGCGRASLLDVITGRGHGGKIKSGQIWINGQPSSPQLVRKCVAHVRQHNQLLPNLTVRETLAFIAQMRLPRTFSQAQRDKRVEDVIAELRLRQCADTRVGNMYVRGLSGGERRRVSIGVQLLWNPGILILDEPTSGLDSFTAHNLVKTLSRLAKGNRLVLISLHQPRSDIFRLFDLVLLMTSGTPIYLGAAQHMVQYFTAIGYPCPRYSNPADFYVDLTSIDRRSREQELATREKAQSLAALFLEKVRDLDDFLWKAETKDLDEDTCVESSVTPLDTNCLPSPTKMPGAVQQFTTLIRRQISNDFRDLPTLLIHGAEACLMSMTIGFLYFGHGSIQLSFMDTAALLFMIGALIPFNVILDVISKCYSERAMLYYELEDGLYTTGPYFFAKILGELPEHCAYIIIYGMPTYWLANLRPGLQPFLLHFLLVWLVVFCCRIMALAAAALLPTFHMASFFSNALYNSFYLAGGFMINLSSLWTVPAWISKVSFLRWCFEGLMKIQFSRRTYKMPLGNLTIAVSGDKILSVMELDSYPLYAIYLIVIGLSGGFMVLYYVSLRFIKQKPSQDW

SEQ ID NO: 38510 - protein, 791 aa, Homo sapiens
MAGTSAPGSKRRSEPPAPRPGPPPGTGHPPSKRARGFSAAAAPDPDDPFGAHGDFTADDLEELDTLASQALSQCPAAARDVSSDHKVHRLLDGMSKNPSGKNRETVPIKDNFELEVLQAQYKELKEKMKVMEEEVLIKNGEIKILRDSLHQTESVLEEQRRSHFLLEQEKTQALSDKEKEFSKKLQSLQSELQFKDAEMNELRTKLQTSERANKLAAPSVSHVSPRKNPSVVIKPEACSPQFGKTSFPTKESFSANMSLPHPCQTESGYKPLVGREDSKPHSLRGDSIKQEEAQKSFVDSWRQRSNTQGSILINLLLKQPLIPGSSLSLCHLLSSSSESPAGTPLQPPGFGSTLAGMSGLRTTGSYDGSFSLSALREAQNLAFTGLNLVARNECSRDGDPAEGGRRAFPLCQLPGAVHFLPLVQFFIGLHCQALQDLAAAKRSGAPGDSPTHSSCVSSGVETNPEDSVCILEGFSVTALSILQHLVCHSGAVVSLLLSGVGADSAAGEGNRSLVHRLSDGDMTSALRGVADDQGQHPLLKMLLHLLAFSSAATGHLQASVLTQCLKVLVKLAENTSCDFLPRFQCVFQVLPKCLSPETPLPSVLLAVELLSLLADHDQLAPQLCSHSEGCLLLLLYMYITSRPDRVALETQWLQLEQEVVWLLAKLGVQSPLPPVTGSNCQCNVEVVRALTVMLHRQWLTVRRAGGPPRTDQQRRTVRCLRDTVLLLHGLSQKDKLFMMHCVEVLHQFDQVMPGVSMLIRGLPDVTDCEEAALDDLCAAETDVEDPEVECG

SEQ ID NO: 38511 - protein, 764 aa, Homo sapiens
MAGTSAPGSKRRSEPPAPRPGPPPGTGHPPSKRARGFSAAAAPDPDDPFGAHGDFTADDLEELDTLASQALSQCPAAARDVSSDHKVHRLLDGMSKNPSGKNRETVPIKDNFELEVLQAQYKELKEKMKVMEEEVLIKNGEIKILRDSLHQTESVLEEQRRSHFLLEQEKTQALSDKEKEFSKKLQSLQSELQFKDAEMNELRTKLQTSERANKLAAPSVSHVSPRKNPSVVIKPEACSPQFGKTSFPTKESFSANMSLPHPCQTESGYKPLVGREDSKPHSLRGDSIKQEEAQKSFVDSWRQRSNTQGSILINLLLKQPLIPGSSLSLCHLLSSSSESPAGTPLQPPGFGSTLAGMSGLRTTGSYDGSFSLSALREAQNLAFTGLNLVARNECSRDGDPAEGGRRAFPLCQLPGAVHFLPLVQFFIGLHCQALQDLAAAKRSGAPGDSPTHSSCVSSGVETNPEDSVCILEGFSVTALSILQHLVCHSGAVVSLLLSGVGADSAAGEGNRSLVHRLSDGDMTSALRGVADDQGQHPLLKMLLHLLAFSSAATGHLQASVLTQCLKVLVKLAENTSCDFLPRFQCVFQVLPKCLSPETPLPSVLLAVELLSLLADHDQLAPQLCSHSEGCLLLLLYMYITSRPDRVALETQWLQLEQEVVRALTVMLHRQWLTVRRAGGPPRTDQQRRTVRCLRDTVLLLHGLSQKDKLFMMHCVEVLHQFDQVMPGVSMLIRGLPDVTDCEEAALDDLCAAETDVEDPEVECG

SEQ ID NO: 38512 - protein, 664 aa, Homo sapiens
MKVMEEEVLIKNGEIKILRDSLHQTESVLEEQRRSHFLLEQEKTQALSDKEKEFSKKLQSLQSELQFKDAEMNELRTKLQTSERANKLAAPSVSHVSPRKNPSVVIKPEACSPQFGKTSFPTKESFSANMSLPHPCQTESGYKPLVGREDSKPHSLRGDSIKQEEAQKSFVDSWRQRSNTQGSILINLLLKQPLIPGSSLSLCHLLSSSSESPAGTPLQPPGFGSTLAGMSGLRTTGSYDGSFSLSALREAQNLAFTGLNLVARNECSRDGDPAEGGRRAFPLCQLPGAVHFLPLVQFFIGLHCQALQDLAAAKRSGAPGDSPTHSSCVSSGVETNPEDSVCILEGFSVTALSILQHLVCHSGAVVSLLLSGVGADSAAGEGNRSLVHRLSDGDMTSALRGVADDQGQHPLLKMLLHLLAFSSAATGHLQASVLTQCLKVLVKLAENTSCDFLPRFQCVFQVLPKCLSPETPLPSVLLAVELLSLLADHDQLAPQLCSHSEGCLLLLLYMYITSRPDRVALETQWLQLEQEVVWLLAKLGVQSPLPPVTGSNCQCNVEVVRALTVMLHRQWLTVRRAGGPPRTDQQRRTVRCLRDTVLLLHGLSQKDKLFMMHCVEVLHQFDQVMPGVSMLIRGLPDVTDCEEAALDDLCAAETDVEDPEVECG

SEQ ID NO: 38513 - protein, 698 aa, Homo sapiens
MSKNPSGKNRETVPIKDNFELEVLQAQYKELKEKMKVMEEEVLIKNGEIKILRDSLHQTESVLEEQRRSHFLLEQEKTQALSDKEKEFSKKLQSLQSELQFKDAEMNELRTKLQTSERANKLAAPSVSHVSPRKNPSVVIKPEACSPQFGKTSFPTKESFSANMSLPHPCQTESGYKPLVGREDSKPHSLRGDSIKQEEAQKSFVDSWRQRSNTQGSILINLLLKQPLIPGSSLSLCHLLSSSSESPAGTPLQPPGFGSTLAGMSGLRTTGSYDGSFSLSALREAQNLAFTGLNLVARNECSRDGDPAEGGRRAFPLCQLPGAVHFLPLVQFFIGLHCQALQDLAAAKRSGAPGDSPTHSSCVSSGVETNPEDSVCILEGFSVTALSILQHLVCHSGAVVSLLLSGVGADSAAGEGNRSLVHRLSDGDMTSALRGVADDQGQHPLLKMLLHLLAFSSAATGHLQASVLTQCLKVLVKLAENTSCDFLPRFQCVFQVLPKCLSPETPLPSVLLAVELLSLLADHDQLAPQLCSHSEGCLLLLLYMYITSRPDRVALETQWLQLEQEVVWLLAKLGVQSPLPPVTGSNCQCNVEVVRALTVMLHRQWLTVRRAGGPPRTDQQRRTVRCLRDTVLLLHGLSQKDKLFMMHCVEVLHQFDQVMPGVSMLIRGLPDVTDCEEAALDDLCAAETDVEDPEVECG

SEQ ID NO: 38514 - protein, 196 aa, Homo sapiens
MSKNPSGKNRETVPIKDNFELEVLQAQYKELKEKMKVMEEEVLIKNGEIKILRDSLHQTESVLEEQRRSHFLLEQEKTQALSDKEKEFSKKLQSLQSELQFKDAEMNELRTKLQTSERANKLAAPSVSHVSPRKNPSVVIKPEACSPQFGKTSFPTKESFSANMSLPHPCQTESGYKPLVGREDSKPHSLRGDSIK

SEQ ID NO: 38515 - protein, 46 aa, Homo sapiens
MSKNPSGKNRETVPIKDNFELEVLQAQYKELKEKLCKKADTSYHHL

SEQ ID NO: 38516 - protein, 775 aa, Homo sapiens
GFLIHPLVVALQQPPLPVLPPLPLPPPPPPPPYGRLLANSNAHPGPFPPSTGAQSTAHPPVSTHHHHHQQQQQQQQQQQQQQQQQQQHHGNSGPPPPGAFPHPLEGGSSHHAHPYAMSPSLGSLRPYPPGPAHLPPPHSQVSYSQAGPNGPPVSSSSNSSSSTSQGSYPCSHPSPSQGPQGAPYPFPPVPTVTTSSATLSTVIATVASSPAGYKTASPPGPPPYGKRAPSPGAYKTATPPGYKPGSPPSFRTGTPPGYRGTSPPAGPGTFKPGSPTVGPGPLPPAGPSGLPSLPPPPAAPASGPPLSATQIKQEPAEEYETPESPVPPARSPSPPPKVVDVPSHASQSARFNKHLDRGFNSCARSDLYFVPLEGSKLAKKRADLVEKVRREAEQRAREEKEREREREREKEREREKERELERSVKLAQEGRAPVECPSLGPVPHRPPFEPGSAVATVPPYLGPDTPALRTLSEYARPHVMSPGNRNHPFYVPLGAVDPGLLGYNVPALYSSDPAAREREREARERDLRDRLKPGFEVKPSELEPLHGVPGPGLDPFPRHGGLALQPGPPGLHPFPFHPSLGPLERERLALAAGPALRPDMSYAERLAAERQHAERVAALGNDPLARLQMLNVTPHHHQHSHIHSHLHLHQQDAIHAASASVHPLIDPLASGSHLTRIPYPAGTLPNPLLPHPLHENEVLRHQLFAAPYRDLPASLSAPMSAAHQLQAMHAQSAELQRLALEQQQWLHAHHPLHSVPLPAQEDYYSHLKKESDKPL

SEQ ID NO: 38517 - protein, 1190 aa, Homo sapiens
MKTRQNKDSMSMRSGRKKEAPGPREELRSRGRASPGGVSTSSSDGKAEKSRQTAKKARVEEASTPKVNKQGRSEEISESESEETNAPKKTKTEQELPRPQSPSDLDSLDGRSLNDDGSSDPRDIDQDNRSTSPSIYSPGSVENDSDSSSGLSQGPARPYHPPPLFPPSPQPPDSTPRQPEASFEPHPSVTPTGYHAPMEPPTSRMFQAPPGAPPPHPQLYPGGTGGVLSGPPMGPKGGGAASSVGGPNGGKQHPPPTTPISVSSSGASGAPPTKPPTTPVGGGNLPSAPPPANFPHVTPNLPPPPALRPLNNASASPPGLGAQPLPGHLPSPHAMGQGMGGLPPGPEKGPTLAPSPHSLPPASSSAPAPPMRFPYSSSSSSSAAASSSSSSSSSSASPFPASQALPSYPHSFPPPTSLSVSNQPPKYTQPSLPSQAVWSQGPPPPPPYGRLLANSNAHPGPFPPSTGAQSTAHPPVSTHHHHHQQQQQQQQQQQQQQQQQQQHHGNSGPPPPGAFPHPLEGGSSHHAHPYAMSPSLGSLRPYPPGPAHLPPPHSQVSYSQAGPNGPPVSSSSNSSSSTSQGSYPCSHPSPSQGPQGAPYPFPPVPTVTTSSATLSTVIATVASSPAGYKTASPPGPPPYGKRAPSPGAYKTATPPGYKPGSPPSFRTGTPPGYRGTSPPAGPGTFKPGSPTVGPGPLPPAGPSGLPSLPPPPAAPASGPPLSATQIKQEPAEEYETPESPVPPARSPSPPPKVVDVPSHASQSARFNKHLDRGFNSCARSDLYFVPLEGSKLAKKRADLVEKVRREAEQRAREEKEREREREREKEREREKERELERSVKLAQEGRAPVECPSLGPVPHRPPFEPGSAVATVPPYLGPDTPALRTLSEYARPHVMSPGNRNHPFYVPLGAVDPGLLGYNVPALYSSDPAAREREREARERDLRDRLKPGFEVKPSELEPLHGVPGPGLDPFPRHGGLALQPGPPGLHPFPFHPSLGPLERERLALAAGPALRPDMSYAERLAAERQHAERVAALGNDPLARLQMLNVTPHHHQHSHIHSHLHLHQQDAIHAASASVHPLIDPLASGSHLTRIPYPAGTLPNPLLPHPLHENEVLRHQLFAAPYRDLPASLSAPMSAAHQLQAMHAQSAELQRLALEQQQWLHAHHPLHSVPLPAQEDYYSHLKKESDKPL

SEQ ID NO: 38518 - protein, 1190 aa, Homo sapiens; identical to SEQ ID NO: 38517

SEQ ID NO: 38519 - protein, 1190 aa, Homo sapiens; identical to SEQ ID NO: 38517

SEQ ID NO: 38520 - protein, 172 aa, Homo sapiens
MLVIHLEEHVIIAFSQHNTIMDLVQFFVTFFSCFLSLLLVAAVVWKIKQTCWASRRREQLLRERQQMASRPFASVDVALEVGAEQTEFLRGPLEGAPKPIAIEPCAGNRAAVLTVFLCLPRGSSGAPPPGQSGLAIASALIDISQQKASDSKDKTSGVRNRKHLSTRQGTCV

SEQ ID NO: 38521 - protein, 1379 aa, Homo sapiens
METGGRARTGTPQPAAPGVWRARPAGGGGGGASSWLLDGNSWLLCYGFLYLALYAQVSQSKPCERTGSCFSGRCVNSTCLCDPGWVGDQCQHCQGRFKLTEPSGYLTDGPINYKYKTKCTWLIEGYPNAVLRLRFNHFATECSWDHMYVYDGDSIYAPLIAVLSGLIVPEIRGNETVPEVVTTSGYALLHFFSDAAYNLTGFNIFYSINSCPNNCSGHGKCTTSVSVPSQVYCECDKYWKGEACDIPYCKANCGSPDHGYCDLTGEKLCVCNDSWQGPDCSLNVPSTESYWILPNVKPFSPSVGRASHKAVLHGKFMWVIGGYTFNYSSFQMVLNYNLESSIWNVGTPSRGPLQRYGHSLALYQENIFMYGGRIETNDGNVTDELWVFNIHSQSWSTKTPTVLGHGQQYAVEGHSAHIMELDSRDVVMIIIFGYSAIYGYTSSIQEYHISSNTWLVPETKGAIVQGGYGHTSVYDEITKSIYVHGGYKALPGNKYGLVDDLYKYEVNTKTWTILKESGFARYLHSAVLINGAMLIFGGNTHNDTSLSNGAKCFSADFLAYDIACDEWKILPKPNLHRDVNRFGHSAVVINGSMYIFGGFSSVLLNDILVYKPPNCKAFRDEELCKNAGPGIKCVWNKNHCESWESGNTNNILRAKCPPKTAASDDRCYRYADCASCTANTNGCQWCDDKKCISANSNCSMSVKNYTKCHVRNEQICNKLTSCKSCSLNLNCQWDQRQQECQALPAHLCGEGWSHIGDACLRVNSSRENYDNAKLYCYNLSGNLASLTTSKEVEFVLDEIQKYTQQKVSPWVGLRKINISYWGWEDMSPFTNTTLQWLPGEPNDSGFCAYLERAAVAGLKANPCTSMANGLVCEKPVVSPNQNARPCKKPCSLRTSCSNCTSNGMECMWCSSTKRCVDSNAYIISFPYGQCLEWQTATCSPQNCSGLRTCGQCLEQPGCGWCNDPSNTGRGHCIEGSSRGPMKLIGMHHSEMVLDTNLCPKEKNYEWSFIQCPACQCNGHSTCINNNVCEQCKNLTTGKQCQDCMPGYYGDPTNGGQCTACTCSGHANICHLHTGKCFCTTKGIKGDQCQLCDSENRYVGNPLRGTCYYSLLIDYQFTFSLLQEDDRHHTAINFIANPEQSNKNLDISINASNNFNLNITWSVGSTAGTISGEETSIVSKNNIKEYRDSFSYEKFNFRSNPNITFYVYVSNFSWPIKIQIAFSQHNTIMDLVQFFVTFFSCFLSLLLVAAVVWKIKQTCWASRRREQLLRERQQMASRPFASVDVALEVGAEQTEFLRGPLEGAPKPIAIEPCAGNRAAVLTVFLCLPRGSSGAPPPGQSGLAIASALIDISQQKASDSKDKTSGVRNRKHLSTRQGTCV

SEQ ID NO: 38522 - protein, 430 aa, Homo sapiens
MECMWCSSTKRCVDSNAYIISFPYGQCLEWQTATCSPQNCSGLRTCGQCLEQPGCGWCNDPSNTGRGHCIEGSSRGPMKLIGMHHSEMVLDTNLCPKEKNYEWSFIQCPACTCSGHANICHLHTGKCFCTTKGIKGDQCQLCDSENRYVGNPLRGTCYYSLLIDYQFTFSLLQEDDRHHTAINFIANPEQSNKNLDISINASNNFNLNITWSVGSTAGTISGEETSIVSKNNIKEYRDSFSYEKFNFRSNPNITFYVYVSNFSWPIKIQIAFSQHNTIMDLVQFFVTFFSCFLSLLLVAAVVWKIKQTCWASRRREQLLRERQQMASRPFASVDVALEVGAEQTEFLRGPLEGAPKPIAIEPCAGNRAAVLTVFLCLPRGSSGAPPPGQSGLAIASALIDISQQKASDSKDKTSGVRNRKHLSTRQGTCV

SEQ ID NO: 38523 - protein, 68 aa, Homo sapiens
MPKHEFSVDMTCGGCAEAVSRVLNKLGGVKYDIDLPNKKVCIESEHSMDTLLATLKKTGKTVSYLGLE

SEQ ID NO: 38524 - protein, 68 aa, Homo sapiens; identical to SEQ ID NO: 38523

SEQ ID NO: 38525 - protein, 68 aa, Homo sapiens; identical to SEQ ID NO: 38523

SEQ ID NO: 38526 - protein, 310 aa, Homo sapiens
MAAAVAAAPGALGSLHAGGARLVAACSAWLCPGLRLPGSLAGRRAGPAIWAQGWVPAAGGPAPKRGYSSEMKTEDELRVRHLEEENRGIVVLGINRAYGKNSLSKNLIKMLSKAVDALKSDKKVRTIIIRSEVPGIFCAANLPVPTIAAIDGLALGGGLELALACDIRVAASSAKMGLVETKLAIIPGGGGTQRLPRAIGMSLAKELIFSARVLDGKEAKAVGLISHVLEQNQEGDAAYRKALDLAREFLPQGPVAMRVAKLAINQGMEVDLVTGLAIEEACYAQTIPTKDRLEGLLAFKEKRPPRYKGE

SEQ ID NO: 38527 - protein, 339 aa, Homo sapiens
MAAAVAAAPGALGSLHAGGARLVAACSAWLCPGLRLPGSLAGRRAGPAIWAQGWVPAAGGPAPKRGYSSEMKTEDELRVRHLEEENRGIVVLGINRAYGKNSLSKNLIKMLSKAVDALKSDKKVRTIIIRSEVPGIFCAGADLKERAKMSSSEVGPFVSKIRAVINDIANLPVPTIAAIDGLALGGGLELALACDIRVAASSAKMGLVETKLAIIPGGGGTQRLPRAIGMSLAKELIFSARVLDGKEAKAVGLISHVLEQNQEGDAAYRKALDLAREFLPQGPVAMRVAKLAINQGMEVDLVTGLAIEEACYAQTIPTKDRLEGLLAFKEKRPPRYKGE

SEQ ID NO: 38528 - protein, 255 aa, Homo sapiens
MAAAVAAAPGALGSLHAGGARLVAACSAWLCPGLRLPGSLAGRRAGPAIWAQGWVPAAGGPAPKRGYSSEMKTEDELRVRHLEEENRGIVVLGINRAYGKNSLSKNLIKMLSKAVDALKSDKKVRTIIIRSEVPGIFCAGADLKERAKMSSSEVGPFVSKIRAVINDIANLPVPTIAAIDGLALGGGLELALACDIRVAASSAKMGLVETKLAIIPGGVTSSTEVLNPSKSSMKIGIIIFQTPVNIDILASSHES

SEQ ID NO: 38529 - protein, 643 aa, Homo sapiens
MPLLFLERFPWPSLRTYTGLSGLALLGTIISAYRALSQPEAGPGEPDQLTASLQPEPPAPARPSAGGPRARDVAQYLLSDSLFVWVLVNTACCVLMLVAKLIQCIVFGPLRVSERQHLKDKFWNFIFYKFIFIFGVLNVQTVEEVVMWCLWFAGLVFLHLMVQLCKDRFEYLSFSPTTPMSSHGRVLSLLVAMLLSCCGLAAVCSITGYTHGMHTLAFMAAESLLVTVRTAHVILRYVIHLWDLNHEGTWEGKGTYVYYTDFVMELTLLSLDLMHHIHMLLFGNIWLSMASLVIFMQLRYLFHEVQRRIRRHKNYLRVVGNMEARFAVATPEELAVNNDDCAICWDSMQAARKLPCGHLFHNSCLRSWLEQDTSCPTCRMSLNIADNNRVREEHQGENLDENLVPVAAAEGRPRLNQHNHFFHFDGSRIASWLPSFSVEVMHTTNILGITQASNSQLNAMAHQIQEMFPQVPYHLVLQDLQLTRSVEITTDNILEGRIQVPFPTQRSDSIRPALNSPVERPSSDQEEGETSAQTERVPLDLSPRLEETLDFGEVEVEPSEVEDFEARGSRFSKSADERQRMLVQRKDELLQQARKRFLNKSSEDDAASESFLPSEGASSDPVTLRRRMLAAAAERRLQKQQTS

SEQ ID NO: 38530 - protein, 317 aa, Homo sapiens
MRDSACWQRKDELLQQARKRFLNKSSEDDAASESFLPSEGASSDPVTLRRRMLAARNGGFRSSRPPSAPLPSSAASCALCPTDWRRPVPIPLHGKAGLTALPLYKACGLIVFGQLINLILLCNTFYVTFLFPLETLQILTVGMISSGVDWTAWGGGRSGGSEVACLQQAASTPASCVRPTNAGVLSTTPSGKSVGEAHSVSPPPRRGVTSVIKLLSLLWKHVDCARRPTGSCTPQQGILEKELLVRYLEQRRGKSRAIGCDEVTPFCPTTSGTDFPSLQSKAGLISVNSGAPASHECAPWVPSPLSISLSRLDLGSG

SEQ ID NO: 38531 - protein, 545 aa, Homo sapiens
MATDAALRRLLRLHRTEIAVAVDSAFPLLHALADHDVVPEDKFQETLHLKEKEGCPQAFHALLSWLLTQDSTAILDFWRVLFKDYNLERYGRLQPILDSFPKDVDLSQPRKGRKPPAVPKALVPPPRLPTKRKASEEARAAAPAALTPRGTASPGSQLKAKPPKKPESSAEQQRLPLGNGIQTMSASVQRAVAMSSGDVPGARGAVEGILIQQVFESGGSKKCIQVGGEFYTPSKFEDSGSGKNKARSSSGPKPLVRAKGAQGAAPGGGEARLGQQGSVPAPLALPSDPQLHQKNEDECAVCRDGGELICCDGCPRAFHLACLSPPLREIPSGTWRCSSCLQATVQEVQPRAEEPRPQEPPVETPLPPGLRSAGEEVRGPPGEPLAGMDTTLVYKHLPAPPSAAPLPGLDSSALHPLLCVGPEGQQNLAPGARCGVCGDGTDVLRCTHCAAAFHWRCHFPAGTSRPGTGLRCRSCSGDVTPAPVEGVLAPSPARLAPGPAKDDTASHEPALHRDDLESLLSEHTFDGILQWAIQSMARPAAPFPS

SEQ ID NO: 38532 - protein, 244 aa, Homo sapiens
MWLVYSSGAPGTQQPARNRVFFPIGMAPGGVCWRPDGWGTGGQGRISGPGSMGAGQRLGSSGTQRCCWGSCFGKEVALRRVLHPSPKNEDECAVCRDGGELICCDGCPRAFHLACLSPPLREIPSGTWRCSSCLQATVQEVQPRAEEPRPQEPPVETPLPPGLRSAGEEPRCQGWTPRPCTPYCVWVLRVSRTWLLVRVAGCAEMVRTCCGVLTAPLPSTGAATSQPAPPGPGRACAADPAQET

SEQ ID NO: 38533 - protein, 348 aa, Homo sapiens
MWLVYSSGAPGTQQPARNRVFFPIGMAPGGVCWRPDGWGTGGQGRISGPGSMGAGQRLGSSGTQRCCWGSCFGKEVALRRVLHPSPVCMGVSCLCQKNEDECAVCRDGGELICCDGCPRAFHLACLSPPLREIPSGTWRCSSCLQATVQEVQPRAEEPRPQEPPVETPLPPGLRSAGEEVRGPPGEPLAGMDTTLVYKHLPAPPSAAPLPGLDSSALHPLLCVGPEGQQNLAPGARCGVCGDGTDVLRCTHCAAAFHWRCHFPAGTSRPGTGLRCRSCSGDVTPAPVEGVLAPSPARLAPGPAKDDTASHEPALHRDDLESLLSEHTFDGILQWAIQSMARPAAPFPS

SEQ ID NO: 38534 - protein, 338 aa, Homo sapiens
MWLVYSSGAPGTQQPARNRVFFPIGMAPGGVCWRPDGWGTGGQGRISGPGSMGAGQRLGSSGTQRCCWGSCFGKEVALRRVLHPSPKNEDECAVCRDGGELICCDGCPRAFHLACLSPPLREIPSGTWRCSSCLQATVQEVQPRAEEPRPQEPPVETPLPPGLRSAGEEVRGPPGEPLAGMDTTLVYKHLPAPPSAAPLPGLDSSALHPLLCVGPEGQQNLAPGARCGVCGDGTDVLRCTHCAAAFHWRCHFPAGTSRPGTGLRCRSCSGDVTPAPVEGVLAPSPARLAPGPAKDDTASHEPALHRDDLESLLSEHTFDGILQWAIQSMARPAAPFPS

SEQ ID NO: 38535 - protein, 348 aa, Homo sapiens; identical to SEQ ID NO: 38533

SEQ ID NO: 38536 - protein, 1238 aa, Homo sapiens
MKVVPEKNAVRILWGRERGARAMGAQRLLQELVEDKTRWMKWEGKRVELPDSPRSTFLLAFSPDRTLLASTHVNHNIYITEVKTGKCVHSLIGHRRTPWCVTFHPTISGLIASGCLDGEVRIWDLHGGSESWFTDSNNAIASLAFHPTAQLLLIATANEIHFWDWSRREPFAVVKTASEMERVRLVRFDPLGHYLLTAIVNPSNQQGDDEPEIPIDGTELSHYRQRALLQSQPVRRTPLLHNFLHMLSSRSSGIQVGEQSTVQDSATPSPPPPPPQPSTERPRTSAYIRLRQRVSYPTAECCQHLGILCLCSRCSGTRVPSLLPHQDSVPPASARATTPSFSFVQTEPFHPPEQASSTQQDQGLLNRPSAFSTVQSSTAGNTLRNLSLGPTRRSLGGPLSSHPSRYHREIAPGLTGSEWTRTVLSLNSRSEAESMPPPRTSASSVSLLSVLRQQEGGSQASVYTSATEGRGFPASGLATESDGGNGSSQNNSGSIRHELQCDLRRFFLEYDRLQELDQSLSGEAPQTQQAQEMLNNNIESERPGPSHQPTPHSSENNSNLSRGHLNRCRACHNLLTFNNDTLRWERTTPNYSSGEASSSWQVPSSFESVPSSGSQLPPLERTEGQTPSSSRLELSSSASPQEERTVGVAFNQETGHWERIYTQSSRSGTVSQEALHQDMPEESSEEDSLRRRLLESSLISLSRYDGAGSREHPIYPDPARDNGDRSRHRAPRNARMSAPSLGRFVPRRFLLPEYLPYAGIFHERGQPGLATHSSVNRVLAGAVIGDGQSAVASNIANTTYRLQWWDFTKFDLPEISNASVNVLVQNCKIYNDASCDISADGQLLAAFIPSSQRGFPDEGILAVYSLAPHNLGEMLYTKRFGPNAISVSLSPMGRYVMVGLASRRILLHPSTEHMVAQVFRLQQAHGGETSMRRVFNVLYPMPADQRRHVSINSARWLPEPGLGLAYGTNKGDLVICRPEALNSGVEYYWDQLNETVFTVHSNSRSSERPGTSRATWRTDRDMGLMNAIGLQPRNPATSVTSQGTQTLALQLQNAETQTEREVPEPGTAASGPGEGEGSEYGASGEDALSRIQRLMAEGGMTAVVQREQSTTMASMGGFGNNIIVSHRIHRSSQTGTEPGAAHTSSPQPSTSRGLLPEAGQLAERGLSPRTASWDQPGTPGREPTQPTLPSSSPVPIPVSLPSAEGPTLHCELTNNNHLLDGGSSRGDAAGPRGEPRNR

SEQ ID NO: 38537 - protein, 722 aa, Homo sapiens
MKVVPEKNAVRILWGRERGARAMGAQRLLQELVEDKTRWMKWEGKRVELPDSPRSTFLLAFSPDRTLLASTHVNHNIYITEVKTGKCVHSLIGHRRTPWCVTFHPTISGLIASGCLDGEVRIWDLHGGSESWFTDSNNAIASLAFHPTAQLLLIATANEIHFWDWSRREPFAVVKTASEMERVRLVRFDPLGHYLLTAIVNPSNQQGDDEPEIPIDGTELSHYRQRALLQSQPVRRTPLLHNFLHMLSSRSSGIQTEPFHPPEQASSTQQDQGLLNRPSAFSTVQSSTAGNTLRNLSLGPTRRSLGGPLSSHPSRYHREIAPGLTGSEWTRTVLSLNSRSEAESMPPPRTSASSVSLLSVLRQQEGGSQASVYTSATEGRGFPASGLATESDGGNGSSQNNSGSIRHELQCDLRRFFLEYDRLQELDQSLSGEAPQTQQAQEMLNNNIESERPGPSHQPTPHSSENNSNLSRGHLNRCRACHNLLTFNNDTLRWERTTPNYSSGEASSSWQVPSSFESVPSSGSQLPPLERTEGQTPSSSRLELSSSASPQEERTVGVAFNQETGHWERIYTQSSRSGTVSQEALHQDMPEESSEEDSLRRRSLALSPRLEYSGAILAHCKLRLPGSCHSPASASQVAGTTGAHHHARLIFAFLVEMEFHHVSQAGLELLTSGDLPTSASQSAGITGVSHRAWPRLLESSLISLSRYDGAGSREHPIYPDPA

SEQ ID NO: 38538 - protein, 1208 aa, Homo sapiens
MKVVPEKNAVRILWGRERGARAMGAQRLLQELVEDKTRWMKWEGKRVELPDSPRSTFLLAFSPDRTLLASTHVNHNIYITEVKTGKCVHSLIGHRRTPWCVTFHPTISGLIASGCLDGEVRIWDLHGGSESWFTDSNNAIASLAFHPTAQLLLIATANEIHFWDWSRREPFAVVKTASEMERVRLVRFDPLGHYLLTAIVNPSNQQGDDEPEIPIDGTELSHYRQRALLQSQPVRRTPLLHNFLHMLSSRSSGIQTEPFHPPEQASSTQQDQGLLNRPSAFSTVQSSTAGNTLRNLSLGPTRRSLGGPLSSHPSRYHREIAPGLTGSEWTRTVLSLNSRSEAESMPPPRTSASSVSLLSVLRQQEGGSQASVYTSATEGRGFPASGLATESDGGNGSSQNNSGSIRHELQCDLRRFFLEYDRLQELDQSLSGEAPQTQQAQEMLNNNIESERPGPSHQPTPHSSENNSNLSRGHLNRCRACHNLLTFNNDTLRWERTTPNYSSGEASSSWQVPSSFESVPSSGSQLPPLERTEGQTPSSSRLELSSSASPQEERTVGVAFNQETGHWERIYTQSSRSGTVSQEALHQDMPEESSEEDSLRRRLLESSLISLSRYDGAGSREHPIYPDPARLSPAAYYAQRMIQYLSRRDSIRQRSMRYQQNRLRSSTSSSSSDNQGPSVEGTDLEFEDFEDNGDRSRHRAPRNARMSAPSLGRFVPRRFLLPEYLPYAGIFHERGQPGLATHSSVNRVLAGAVIGDGQSAVASNIANTTYRLQWWDFTKFDLPEISNASVNVLVQNCKIYNDASCDISADGQLLAAFIPSSQRGFPDEGILAVYSLAPHNLGEMLYTKRFGPNAISVSLSPMGRYVMVGLASRRILLHPSTEHMVAQVFRLQQAHGGETSMRRVFNVLYPMPADQRRHVSINSARWLPEPGLGLAYGTNKGDLVICRPEALNSGVEYYWDQLNETVFTVHSNSRSSERPGTSRATWRTDRDMGLMNAIGLQPRNPATSVTSQGTQTLALQLQNAETQTEREVPEPGTAASGPGEGEGSEYGASGEDALSRIQRLMAEGGMTAVVQREQSTTMASMGGFGNNIIVSHRIHRSSQTGTEPGAAHTSSPQPSTSRGLLPEAGQLAERGLSPRTASWDQPGTPGREPTQPTLPSSSPVPIPVSLPSAEGPTLHCELTNNNHLLDGGSSRGDAAGPRGEPRNR

SEQ ID NO: 38539 - protein, 1269 aa, Homo sapiens
MKVVPEKNAVRILWGRERGARAMGAQRLLQELVEDKTRWMKWEGKRVELPDSPRSTFLLAFSPDRTLLASTHVNHNIYITEVKTGKCVHSLIGHRRTPWCVTFHPTISGLIASGCLDGEVRIWDLHGGSESWFTDSNNAIASLAFHPTAQLLLIATANEIHFWDWSRREPFAVVKTASEMERVRLVRFDPLGHYLLTAIVNPSNQQGDDEPEIPIDGTELSHYRQRALLQSQPVRRTPLLHNFLHMLSSRSSGIQVGEQSTVQDSATPSPPPPPPQPSTERPRTSAYIRLRQRVSYPTAECCQHLGILCLCSRCSGTRVPSLLPHQDSVPPASARATTPSFSFVQTEPFHPPEQASSTQQDQGLLNRPSAFSTVQSSTAGNTLRNLSLGPTRRSLGGPLSSHPSRYHREIAPGLTGSEWTRTVLSLNSRSEAESMPPPRTSASSVSLLSVLRQQEGGSQASVYTSATEGRGFPASGLATESDGGNGSSQNNSGSIRHELQCDLRRFFLEYDRLQELDQSLSGEAPQTQQAQEMLNNNIESERPGPSHQPTPHSSENNSNLSRGHLNRCRACHNLLTFNNDTLRWERTTPNYSSGEASSSWQVPSSFESVPSSGSQLPPLERTEGQTPSSSRLELSSSASPQEERTVGVAFNQETGHWERIYTQSSRSGTVSQEALHQDMPEESSEEDSLRRLSPAAYYAQRMIQYLSRRDSIRQRSMRYQQNRLRSSTSSSSSDNQGPSVEGTDLEFEDFEDNGDRSRHRAPRNARMSAPSLGRFVPRRFLLPEYLPYAGIFHERGQPGLATHSSVNRVLAGAVIGDGQSAVASNIANTTYRLQWWDFTKFDLPEISNASVNVLVQNCKIYNDASCDISADGQLLAAFIPSSQRGFPDEGILAVYSLAPHNLGEMLYTKRFGPNAISVSLSPMGRYVMVGLASRRILLHPSTEHMVAQVFRLQQAHGGETSMRRVFNVLYPMPADQRRHVSINSARWLPEPGLGLAYGTNKGDLVICRPEALNSGVEYYWDQLNETVFTVHSNSRSSERPGTSRATWRTDRDMGLMNAIGLQPRNPATSVTSQGTQTLALQLQNAETQTEREVPEPGTAASGPGEGEGSEYGASGEDALSRIQRLMAEGGMTAVVQREQSTTMASMGGFGNNIIVSHRIHRSSQTGTEPGAAHTSSPQPSTSRGLLPEAGQLAERGLSPRTASWDQPGTPGREPTQPTLPSSSPVPIPVSLPSAEGPTLHCELTNNNHLLDGGSSRGDAAGPRGEPRNR

SEQ ID NO: 38540 - protein, 1298 aa, Homo sapiens
MKVVPEKNAVRILWGRERGARAMGAQRLLQELVEDKTRWMKWEGKRVELPDSPRSTFLLAFSPDRTLLASTHVNHNIYITEVKTGKCVHSLIGHRRTPWCVTFHPTISGLIASGCLDGEVRIWDLHGGSESWFTDSNNAIASLAFHPTAQLLLIATANEIHFWDWSRREPFAVVKTASEMERVRLVRFDPLGHYLLTAIVNPSNQQGDDEPEIPIDGTELSHYRQRALLQSQPVRRTPLLHNFLHMLSSRSSGIQVGEQSTVQDSATPSPPPPPPQPSTERPRTSAYIRLRQRVSYPTAECCQHLGILCLCSRCSGTRVPSLLPHQDSVPPASARATTPSFSFVQTEPFHPPEQASSTQQDQGLLNRPSAFSTVQSSTAGNTLRNLSLGPTRRSLGGPLSSHPSRYHREIAPGLTGSEWTRTVLSLNSRSEAESMPPPRTSASSVSLLSVLRQQEGGSQASVYTSATEGRGFPASGLATESDGGNGSSQNNSGSIRHELQCDLRRFFLEYDRLQELDQSLSGEAPQTQQAQEMLNNNIESERPGPSHQPTPHSSENNSNLSRGHLNRCRACHNLLTFNNDTLRWERTTPNYSSGEASSSWQVPSSFESVPSSGSQLPPLERTEGQTPSSSRLELSSSASPQEERTVGVAFNQETGHWERIYTQSSRSGTVSQEALHQDMPEESSEEDSLRRRLLESSLISLSRYDGAGSREHPIYPDPARLSPAAYYAQRMIQYLSRRDSIRQRSMRYQQNRLRSSTSSSSSDNQGPSVEGTDLEFEDFEDNGDRSRHRAPRNARMSAPSLGRFVPRRFLLPEYLPYAGIFHERGQPGLATHSSVNRVLAGAVIGDGQSAVASNIANTTYRLQWWDFTKFDLPEISNASVNVLVQNCKIYNDASCDISADGQLLAAFIPSSQRGFPDEGILAVYSLAPHNLGEMLYTKRFGPNAISVSLSPMGRYVMVGLASRRILLHPSTEHMVAQVFRLQQAHGGETSMRRVFNVLYPMPADQRRHVSINSARWLPEPGLGLAYGTNKGDLVICRPEALNSGVEYYWDQLNETVFTVHSNSRSSERPGTSRATWRTDRDMGLMNAIGLQPRNPATSVTSQGTQTLALQLQNAETQTEREVPEPGTAASGPGEGEGSEYGASGEDALSRIQRLMAEGGMTAVVQREQSTTMASMGGFGNNIIVSHRIHRSSQTGTEPGAAHTSSPQPSTSRGLLPEAGQLAERGLSPRTASWDQPGTPGREPTQPTLPSSSPVPIPVSLPSAEGPTLHCELTNNNHLLDGGSSRGDAAGPRGEPRNR

SEQ ID NO: 38541 - protein, 24 aa, Homo sapiens
MKVVPEKNAVRILWGRERGARAMG

SEQ ID NO: 38542 - protein, 1269 aa, Homo sapiens; identical to SEQ ID NO: 38539

SEQ ID NO: 38543 - protein, 1238 aa, Homo sapiens; identical to SEQ ID NO: 38536

SEQ ID NO: 38544 - protein, 1179 aa, Homo sapiens
MKVVPEKNAVRILWGRERGARAMGAQRLLQELVEDKTRWMKWEGKRVELPDSPRSTFLLAFSPDRTLLASTHVNHNIYITEVKTGKCVHSLIGHRRTPWCVTFHPTISGLIASGCLDGEVRIWDLHGGSESWFTDSNNAIASLAFHPTAQLLLIATANEIHFWDWSRREPFAVVKTASEMERVRLVRFDPLGHYLLTAIVNPSNQQGDDEPEIPIDGTELSHYRQRALLQSQPVRRTPLLHNFLHMLSSRSSGIQTEPFHPPEQASSTQQDQGLLNRPSAFSTVQSSTAGNTLRNLSLGPTRRSLGGPLSSHPSRYHREIAPGLTGSEWTRTVLSLNSRSEAESMPPPRTSASSVSLLSVLRQQEGGSQASVYTSATEGRGFPASGLATESDGGNGSSQNNSGSIRHELQCDLRRFFLEYDRLQELDQSLSGEAPQTQQAQEMLNNNIESERPGPSHQPTPHSSENNSNLSRGHLNRCRACHNLLTFNNDTLRWERTTPNYSSGEASSSWQVPSSFESVPSSGSQLPPLERTEGQTPSSSRLELSSSASPQEERTVGVAFNQETGHWERIYTQSSRSGTVSQEALHQDMPEESSEEDSLRRLSPAAYYAQRMIQYLSRRDSIRQRSMRYQQNRLRSSTSSSSSDNQGPSVEGTDLEFEDFEDNGDRSRHRAPRNARMSAPSLGRFVPRRFLLPEYLPYAGIFHERGQPGLATHSSVNRVLAGAVIGDGQSAVASNIANTTYRLQWWDFTKFDLPEISNASVNVLVQNCKIYNDASCDISADGQLLAAFIPSSQRGFPDEGILAVYSLAPHNLGEMLYTKRFGPNAISVSLSPMGRYVMVGLASRRILLHPSTEHMVAQVFRLQQAHGGETSMRRVFNVLYPMPADQRRHVSINSARWLPEPGLGLAYGTNKGDLVICRPEALNSGVEYYWDQLNETVFTVHSNSRSSERPGTSRATWRTDRDMGLMNAIGLQPRNPATSVTSQGTQTLALQLQNAETQTEREVPEPGTAASGPGEGEGSEYGASGEDALSRIQRLMAEGGMTAVVQREQSTTMASMGGFGNNIIVSHRIHRSSQTGTEPGAAHTSSPQPSTSRGLLPEAGQLAERGLSPRTASWDQPGTPGREPTQPTLPSSSPVPIPVSLPSAEGPTLHCELTNNNHLLDGGSSRGDAAGPRGEPRNR

SEQ ID NO: 38545 - protein, 648 aa, Homo sapiens
MEKARRGGDGVPRGPVLHIVVVGFHHKKGCQVEFSYPPLIPGDGHDSHTLPEEWKYLPFLALPDGAHNYQEDTVFFHLPPRNGNGATVFGISCYRQIEAKALKVRQADITRETVQKSVCVLSKLPLYGLLQAKLQLITHAYFEEKDFSQISILKELYEHMNSSLGGASLEGSQVYLGLSPRDLVLHFRHKVLILFKLILLEKKVLFYISPVNKLVGALMTVLSLFPGMIEHGLSDCSQYRPRKSMSEDGGLQESNPCADDFVSASTADVSHTNLGTIRKVMAGNHGEDAAMKTEEPLFQVEDSSKGQEPNDTNQYLKPPSRPSPDSSESDWETLDPSVLEDPNLKEREQLGSDQTNLFPKDSVPSESLPITVQPQANTGQVVLIPGLISGLEEDQYGMPLAIFTKGYLCLPYMALQQHHLLSDVTVRGFVAGATNILFRQQKHLSDAIVEVEEALIQIHDPELRKLLNPTTADLRFADYLVRHVTENRDDVFLDGTGWEGGDEWIRAQFAVYIHALLAATLQLDNEKILSDYGTTFVTAWKNTHNYRVWNSNKHPALAEINPNHPFQGQYSVSDMKLRFSHSVQNSERGKKIGNVMVTTSRNVVQTGKAVGQSVGGAFSSAKTAMSSWLSTFTTSTSQSLTEPPDEKP

SEQ ID NO: 38546 - protein, 590 aa, Homo sapiens
MEKARRGGDGVPRGPVLHIVVVGFHHKKGCQVEFSYPPLIPGDGHDSHTLPEEWKYLPFLALPDGAHNYQEDTVFFHLPPRNGNGATVFGISCYRQIEAKALKVRQADITRETVQKSVCVLSKLPLYGLLQAKLQLITHAYFEEKDFSQISILKELYEHMNSSLGGASLEGSQVYLGLSPRDLVLHFRHKVLILFKLILLEKKVLFYISPVNKLVGALMTVLSLFPGMIEHGLSDCSQYRPRKSMSEDGGLQESNPCADDFVSASTADVSHTNLGTIRKVMAGNHGEDAAMKTEEPLFQVEDSSKGQEPNDTNQYLKPPSRPSPDSSESDWETLDPSVLEDPNLKEREQLGSDQTNLFPKDSVPSESLPITVQPQANTGQVVLIPGLISGLEEDQYGMPLAIFTKGYLCLPYMALQQHHLLSDVTVRGFVAGATNILFRQQKHLSDAIVEVEEALIQIHDPELRKLLNPTTADLRFADYLVRHVTENRDDVFLDGTGWEGGDEWIRAQFAVYIHALLAATLQLVLFRIVNVKKIGNVMVTTSRNVVQTGKAVGQSVGGAFSSAKTAMSSWLSTFTTSTSQSLTEPPDEKP

SEQ ID NO: 38547 - protein, 463 aa, Homo sapiens
MEKARRGGDGVPRGPVLHIVVVGFHHKKGCQVEFSYPPLIPGDGHDSHTLPEEWKYLPFLALPDGAHNYQEDTVFFHLPPRNGNGATVFGISCYRQIEAKALKVRQADITRETVQKSVCVLSKLPLYGLLQAKLQLITHAYFEEKDFSQISILKELYEHMNSSLGGASLEGSQVYLGLSPRDLVLHFRHKVLILFKLILLEKKVLFYISPVNKLVGALMTVLSLFPGMIEHGLSDCSQYRPRKSMSEDGGLQESNPCADDFVSASTADVSHTNLGTIRKVMAGNHGEDAAMKTEEPLFQVEDSSKGQEPNDTNQYLKPPSRPSPDSSESDWETLDPSVLEDPNLKEREQLGSDQTNLFPKDSVPSESLPITVQPQANTGQVVLIPGLISGLEEDQYGMPLAIFTKCTQDVLPQANHSFKFLITDRRITPRPLRRRLVSATLTNMLQEKSCWKKHIKCRRRVQK

SEQ ID NO: 38548 - protein, 843 aa, Homo sapiens
MSSAMLVTCLPDPSSSFREDAPRPPVPGEEGETPPCQPGVGKGQVTKPMPVSSNTRRNEDGLGEPEGRASPDSPLTRWTKSLHSLLGDQDGAYLFRTFLEREKCVDTLDFWFACNGFRQMNLKDTKTLRVAKAIYKRYIENNSIVSKQLKPATKTYIRDGIKKQQIDSIMFDQAQTEIQSVMEENAYQMFLTSDIYLEYVRSGGENTAYMSNGGLGSLKVVCGYLPTLNEEEEWTCADFKCKLSPTVVGLSSKTLRATASVRSTETVDSGYRSFKRSDPVNPYHIGSGYVFAPATSANDSEISSDALTDDSMSMTDSSVDGIPPYRVGSKKQLQREMHRSVKANGQVSLPHFPRTHRLPKEMTPVEPATFAAELISRLEKLKLELESRHSLEERLQQIREDEEREGSELTLNSREGAPTQHPLSLLPSGSYEEDPQTILDDHLSRVLKTPGCQSPGVGRYSPRSRSPDHHHHHHSQYHSLLPPGGKLPPAAASPGACPLLGGKGFVTKQTTKHVHHHYIHHHAVPKTKEEIEAEATQRVHCFCPGGSEYYCYSKCKSHSKAPETMPSEQFGGSRGSTLPKRNGKGTEPGLALPAREGGAPGGAGALQLPREEGDRSQDVWQWMLESERQSKPKPHSAQSTKKAYPLESARSSPGERASRHHLWGGNSGHPRTTPRAHLFTQDPAMPPLTPPNTLAQLEEACRRLAEVSKPPKQRCCVASQQRDRNHSATVQTGATPFSNPSLAPEDHKEPKKLAGVHALQASELVVTYFFCGEEIPYRRMLKAQSLTLGHFKEQLSKKGNYRYYFKKASDEFACGAVFEEIWEDETVLPMYEGRILGKVERID

SEQ ID NO: 38549 - protein, 778 aa, Homo sapiens
MSSAMLVTCLPDPSSSFREDAPRPPVPGEEGETPPCQPGVGKGQVTKPMPVSSNTRRNEDGLGEPEGRASPDSPLTRWTKSLHSLLGDQDGAYLFRTFLEREKCVDTLDFWFACNGFRQMNLKDTKTLRVAKAIYKRYIENNSIVSKQLKPATKTYIRDGIKKQQIDSIMFDQAQTEIQSVMEENAYQMFLTSDIYLEYVRSGGENTAYMSNGGLGSLKVVCGYLPTLNEEEEWTCADFKCKLSPTVVGLSSKTLRATASVRSTETVDSGYRSFKRSDPVNPYHIGSGYVFAPATSANDSEISSDALTDDSMSMTDSSVDGIPPYRVGSKKQLQREMHRSVKANGQVSLPHFPRTHRLPKEMTPVEPATFAAELISRLEKLKLELESRHSLEERLQQIREDEEREGSELTLNSREGAPTQHPLSLLPSGSYEEDPQTILDDHLSRVLKTPGCQSPGVGRYSPRSRSPDHHHHHHSQYHSLLPPGGKLPPAAASPGACPLLGGKGFVTKQTTKHVHHHYIHHHAVPKTKEEIEAEATQRVHCFCPGGSEYYCYSKCKSHSKAPETMPSEQFGAQSTKKAYPLESARSSPGERASRHHLWGGNSGHPRTTPRAHLFTQDPAMPPLTPPNTLAQLEEACRRLAEVSKPPKQRCCVASQQRDRNHSATVQTGATPFSNPSLAPEDHKEPKKLAGVHALQASELVVTYFFCGEEIPYRRMLKAQSLTLGHFKEQLSKKGNYRYYFKKASDEFACGAVFEEIWEDETVLPMYEGRILGKVERID

SEQ ID NO: 38550 - protein, 160 aa, Homo sapiens
MSSAMLVTCLPDPSSSFREDAPRPPVPGEEGETPPCQPGVGKGQVTKPMPVSSNTRRNEDGLGEPEGRASPDSPLTRWTKSLHSLLGDQDGAYLFRTFLEREKCVDTLDFWFACNGFRQMNLKDTKTLRVVNDFCHDILFYLYCKLCIIKSSFKENYLVQ

SEQ ID NO: 38551 - protein, 306 aa, Homo sapiens
MSEVTRSLLQRWGASFRRGADFDSWGQLVEAIDEYQILARHLQKEAQAQHNNSEFTEEQKKTIGKIATCLELRSAALQSTQSQEEFKLEDLKKLEPILKNILTYNKEFPFDVQPVPLRRILAPGEEENLEFEEDEEEGGAGAGSPDSFPARVPGTLLPRLPSEPGMTLLTIRIEKIGLKDAGQCIDPYITVSVKDLNGIDLTPVQDTPVASRKEDTYVHFNVDIELQKHVEKLTKGAAIFFEFKHYKPKKRFTSTKCFAFMEMDEIKPGPIVIELYKKPTDFKRKKLQLLTKKPLYLHLHQTLHKE

SEQ ID NO: 38552 - protein, 224 aa, Homo sapiens
MSEVTRSLLQRWGASFRRGADFDSWGQLVEAIDEYQILARHLQKEAQAQHNNSEFTEEQKKTIGKIATCLELRSAALQSTQSQEEFKLEDLKKLEPILKNILTYNKEFPFDVQPVPLRRILAPGEEENLEFEEDEEEGGAGAGSPDSFPARVPGAAIFFEFKHYKPKKRFTSTKCFAFMEMDEIKPGPIVIELYKKPTDFKRKKLQLLTKKPLYLHLHQTLHKE

SEQ ID NO: 38553 - protein, 282 aa, Homo sapiens
MIATEAVVRAAQGLARHLQKEAQAQHNNSEFTEEQKKTIGKIATCLELRSAALQSTQSQEEFKLEDLKKLEPILKNILTYNKEFPFDVQPVPLRRILAPGEEENLEFEEDEEEGGAGAGSPDSFPARVPGTLLPRLPSEPGMTLLTIRIEKIGLKDAGQCIDPYITVSVKDLNGIDLTPVQDTPVASRKEDTYVHFNVDIELQKHVEKLTKGAAIFFEFKHYKPKKRFTSTKCFAFMEMDEIKPGPIVIELYKKPTDFKRKKLQLLTKKPLYLHLHQTLHKE

SEQ ID NO: 38554 - protein, 894 aa, Homo sapiens
MAWRCPRMGRVPLAWCLALCGWACMAPRGTQAEESPFVGNPGNITGARGLTGTLRCQLQVQGEPPEVHWLRDGQILELADSTQTQVPLGEDEQDDWIVVSQLRITSLQLSDTGQYQCLVFLGHQTFVSQPGYVGLEGLPYFLEEPEDRTVAANTPFNLSCQAQGPPEPVDLLWLQDAVPLATAPGHGPQRSLHVPGLNKTSSFSCEAHNAKGVTTSRTATITVLPQQPRNLHLVSRQPTELEVAWTPGLSGIYPLTHCTLQAVLSNDGMGIQAGEPDPPEEPLTSQASVPPHQLRLGSLHPHTPYHIRVACTSSQGPSSWTHWLPVETPEGVPLGPPENISATRNGSQAFVHWQEPRAPLQGTLLGYRLAYQGQDTPEVLMDIGLRQEVTLELQGDGSVSNLTVCVAAYTAAGDGPWSLPVPLEAWRPGQAQPVHQLVKEPSTPAFSWPWWYVLLGAVVAAACVLILALFLVHRRKKETRYGEVFEPTVERGELVVRYRVRKSYSRRTTEATLNSLGISEELKEKLRDVMVDRHKVALGKTLGEGEFGAVMEGQLNQDDSILKVAVKTMKIAICTRSELEDFLSEAVCMKEFDHPNVMRLIGVCFQGSERESFPAPVVILPFMKHGDLHSFLLYSRLGDQPVYLPTQMLVKFMADIASGMEYLSTKRFIHRDLAARNCMLNENMSVCVADFGLSKKIYNGDYYRQGRIAKMPVKWIAIESLADRVYTSKSDVWSFGVTMWEIATRGQTPYPGVENSEIYDYLRQGNRLKQPADCLDGLYALMSRCWELNPQDRPSFTELREDLENTLKALPPAQEPDEILYVNMDEGGGYPEPPGAAGGADPPTQPDPKDSCSCLTAAEVHPAGRYVLCPSTTPSPAQPADRGSPAAPGQEDGA

SEQ ID NO: 38555 - protein, 885 aa, Homo sapiens
MAWRCPRMGRVPLAWCLALCGWACMAPRGTQAEESPFVGNPGNITGARGLTGTLRCQLQVQGEPPEVHWLRDGQILELADSTQTQVPLGEDEQDDWIVVSQLRITSLQLSDTGQYQCLVFLGHQTFVSQPGYVGLEGLPYFLEEPEDRTVAANTPFNLSCQAQGPPEPVDLLWLQDAVPLATAPGHGPQRSLHVPGLNKTSSFSCEAHNAKGVTTSRTATITVLPQQPRNLHLVSRQPTELEVAWTPGLSGIYPLTHCTLQAVLSNDGMGIQAGEPDPPEEPLTSQASVPPHQLRLGSLHPHTPYHIRVACTSSQGPSSWTHWLPVETPEGVPLGPPENISATRNGSQAFVHWQEPRAPLQGTLLGYRLAYQGQDTPEVLMDIGLRQEVTLELQGDGSVSNLTVCVAAYTAAGDGPWSLPVPLEAWRPVKEPSTPAFSWPWWYVLLGAVVAAACVLILALFLVHRRKKETRYGEVFEPTVERGELVVRYRVRKSYSRRTTEATLNSLGISEELKEKLRDVMVDRHKVALGKTLGEGEFGAVMEGQLNQDDSILKVAVKTMKIAICTRSELEDFLSEAVCMKEFDHPNVMRLIGVCFQGSERESFPAPVVILPFMKHGDLHSFLLYSRLGDQPVYLPTQMLVKFMADIASGMEYLSTKRFIHRDLAARNCMLNENMSVCVADFGLSKKIYNGDYYRQGRIAKMPVKWIAIESLADRVYTSKSDVWSFGVTMWEIATRGQTPYPGVENSEIYDYLRQGNRLKQPADCLDGLYALMSRCWELNPQDRPSFTELREDLENTLKALPPAQEPDEILYVNMDEGGGYPEPPGAAGGADPPTQPDPKDSCSCLTAAEVHPAGRYVLCPSTTPSPAQPADRGSPAAPGQEDGA

SEQ ID NO: 38556 - protein, 251 aa, Homo sapiens
MTRLTVLALLAGLLASSRAGSSPLLDIVGGRKARPRQFPFLASIQNQGRHFCGGALIHARFVMTAASCFQSQNPGVSTVVLGAYDLRRRERQSRQTFSISSMSENGYDPQQNLNDLMLLQLDREANLTSSVTILPLPLQNATVEAGTRCQVAGWGSQRSGGRLSRFPRFVNVTVTPEDQCRPNNVCTGVLTRRGGICNGDGGTPLVCEGLAHGVASFSLGPCGRGPDFFTRVALFRDWIDGVLNNPGPGPA

SEQ ID NO: 38557 - protein, 226 aa, Homo sapiens
AEGKWGLAHGRAEAHVWPGQGGWRLGPPQGRWTGSSPLLDIVGGRKARPRQFPFLASIQNQGRHFCGGALIHARFVMTAASCFQSQNPGVSTVVLGAYDLRRRERQSRQTFSISSMSENGYDPQQNLNDLMLLQLDREANLTSSVTILPLPLQNATVEAGTRCQVAGWGSQRSGGRLSRFPRFVNVTVTPEDQCRPNNVCTGVLTRRGGICNVSAPCGGRRGPERY

SEQ ID NO: 38558 - protein, 2624 aa, Homo sapiens
MFRRARLSVKPNVRPGVGARGSTASNPQRGRESPRPPDPATDSASKPAEPTDVPTVDFGGAEPQEKAPRSSTEKTGGDNDVEESSRSSSTVSQRRKRISSTSSLVKSSVSVPSESHPLSTINQEAPQPTATSTKEKQPCSDRYRIYKAQKLREMLKEELRKEKKQWKNKYAINESQRPPDRSKMTMRDFIYYLPDNNPMTSSLEQEKKTEKPSTPVQTREQEGKSTPNAEDNEMEEETDDGPLLVPRVKVAEDGSIILDEESLTVEVLRTKGPCVVEENDPIFERGSTTTYSSFRKNYYSKPWSNKETDMFFLAISMVGTDFSMIGQLFPHRARIEIKNKFKREEKTNGWRIDKAFQEKRPFDFDFFAHLLQKVLAEEEKRKQKSVKNHSLKEKKSTKPRKNVKVKKVACEGVNNDPDESMSSRISDTERSQKDAQTVEEESLTLSREDAEQVALEVDLNQKKRRRKKQDGANELGVNNLLENATVQAGPSKGEKHKNKCQAIRPELKEGECSKEQMLSCTQNIDGIVGFASTEKVEKRTDPILSLSNQQDATSVATESSESSTSDLPSFEVGIRALCEVNNAEGSCIEERNVDLKNNSLEIDQTENVKPMLRGRFQRPKPNLSRAGKKSVLSQGKTESESKNSHSKTSVEKNHVEKDKMNTLDILRMETTERENPEAETVSVLGEKNCLQEGSQLKALRPVQVRGRLQKPKPNAGKAAERKEILISQEEIGANVEKNENESCADRDTPQHMEDQSRKDFEEEDVILQPEKNDSFQNVQPDEPKVLNECLSVQENNKANKLNQVPILRTRFQKPKPNIGRGTGRREISSKEEVLEKILVSGEMAAALRETVRLDTSPKEMVPAEINTKEMQSDLKETGRRAISPREKILDVIDDTIEMETGLKAMGREICLREKTPEVIDATEEIDKDLEEAGRREISPQKNGPEEVKPLGEVETDLKATGNESSPREKTPEVTDATEEIDKNLEETGRRKISPRENGPEEVKPVDEMETDLNATGRESSPREKTPEVIDATEEIDLEETEREVSPQENGLEEVKPLGEMETDLKATGRDSFPRGKTPEVIDAIEEIEIDLEETEREISPQENGLEEVKPLGEMQTDLKATGREISPREKTPEVIDATEEIDKDLEETGRREISPEENGPEEVKPVDEMETDLKTTGREGSSREKTREVIDAAEVIETDLEETEREISPQENGPEEVKPVGKMETDLKEIREEISQREKVLAEFSAIREKEIDLKETGKRDIPIMEKVSGKMAVVEEMEADLKETGKENFRERGSEEICVTEEKVAELKQTGKTDISPRENELEETSTSRQTDTHLMQSGSNDFSAVPSLDIQNISSEVLSMMHTPVEEKRNSEKEVSSHFSHFKISSQTHESDKTEVQGIQSPDVPEQFSDINLSKSLPQEQKPLEIKPAPFVRSRFKRPKPNLARAALKRETTESEKYIYEKKSETKKMETIVMQENNEQTDTLPSQHDEASLMISREKDTLGHRNEEAVILPCTQTERNLSPSNSCEPKEESQSAPVQKNDSVVSVGTNNVNTFQQEMKESVIQTARQVRGRLQRPRPNIRKTGQRQIVDKGEAKGIIKEGRTILPKDETEKKVLTVSNSQIETEIEVPSSAVPEHRMYENQSQVVLVENLHVNKTNETIRHENKPYVPSSAQMTRRKFQKAKPNLGRAHSKKEEPVLEKVTTDQSKEGKPEDHLLQKGASNTQLLLKEKAELLTSLEVSARKDCVGSKESALAKIDAELEEVGPSRRVGEETVGDNSPSSVVEEQYLNKLTSCPQPLNETSYSKIALDGKTTISSTSEYERNRGERRSHKKFKPNVTRGRGSKRVRGKTSKKEPRASKAMLVTLRASQEEDDDADDFESDYEEESYHLAPEEVNKAPVFVPVGLRSPEPVSAQIEETMEELEITVNVPDVGCIAVVEHELPNTDVTTEEMKQEENLSVPFEMTTSEHIQDEPGTNDGSTEAAITLLTMGDLVLQSEISSEQGDVGVCIIPHVHSKDKSHIPSSLDNVNHKIVHECQELSSPVITTSPASFEENKIVLEEQSSREEISLMEKVKENATPTRNTISKVTSNLRIRSRLAKPKPNLEKTLGTNRLDDYQEVSSLCVTKGAEMETQRETEKNASKATELENKNLGPVTTAENKDQSKLACVHGIKGTSISSEVNLTERNENQEESSQEVHMLSVAPVASSETGPCTLGLDRGLGENSVEEPQIKDSKGDSVLTLPVPEYTPTSIPEVQQENIINPQDLTVNLVANVPQDGEDEQAFILTLVEIPANAVEEFTDATAQFMPNPLLPAPILVKSVNTEERGDMSICLPATSVGQDAMGLSISGRDNSKKPPDNLDLVSRKRFQCRLDKNDHIPPAKKRSLTLRDDCQEYTTEVHSKELTNVFEETGESHKGQDIFLTSGSTLTTPEPQRQQVEAAFQSRGSRSPDACMDKNVPQLPQDEMIVSDKEERTDAAPKSQQMDSRTSSSKASLSRPGRRPLGFLSLICSKNSLESDEPMQVHSKKRLKPLIPGLRKKLKRSNPFNESQEKNRESSDLLPSPSVITTQSENISSSATQVSCDQPLLKEGYKSAQKRAPQGEATTVSEYFFNDIFIEVDETE

SEQ ID NO: 38559 - protein, 463 aa, Homo sapiens
MLVTLRASQEEDDDADDFESDYEEESYHLAPEEVNKAPVFVPVGLRSPEPVSAQIEETMEELEITVNVPDVGCIAVVEHELPNTDVTTEEMKQEENLSVPFEMTTSEHIQDEPGTNDGSTEAAITLLTMGDLVLQSEISSEQGDGVCIIPHVHSKDKSHIPSSLDNVNHKIVHECQELSSPVITTSPASFEENKIVLEEQSSREEISLMEKVKENATPTRNTISKVTSNLRIRSRLAKPKPNLEKTLGTNRLDDYQEVSSLCVTKGAEMETQRETEKNASKATELENKNLGPVTTAENKDQSKLACVHGIKGTSISSEVNLTERNENQEESSQEVHMLSVAPVASSETGPCTLGLDRGLGENSVEEPQIKDSKGDSVLTLPVPEYTPTSIPEVQQENIINPQDLTVFVYQQLQLVKMPWVYLFLEEIILKSRLIIWILYLGRDFNAGLIKMTTFLLPKNVHSL

SEQ ID NO: 38560 - protein, 814 aa, Homo sapiens
MFRRARLSVKPNVRPGVGARGSTASNPQRGRESPRPPDPATDSASKPAEPTDVPTVDFGGAEPQEKAPRSSTEKTGGDNDVEESSRSSSTVSQRRKRISSTSSLVKSSVSVPSESHPLSTINQEAPQPTATSTKEKQPCSDRYRIYKAQKLREMLKEELRKEKKQWKNKYAINESQRPPDRSKMTMRDFIYYLPDNNPMTSSLEQEKKTEKPSTPVQTREQEGKSTPNAEDNEMEEETDDGPLLVPRVKVAEDGSIILDEESLTVEVLRTKGPCVVEENDPIFERGSTTTYSSFRKNYYSKPWSNKETDMFFLAISMVGTDFSMIGQLFPHRARIEIKNKFKREEKTNGWRIDKAFQEKRPFDFDFFAHLLQKVLAEEEKRKQKSVKNHSLKEKKSTKPRKNVKVKKVACEGVNNDPDESMSSRISDTERSQKDAQTVEEESLTLSREDAEQVALEVDLNQKKRRRKKQDGANELGVNNLLENATVQAGPSKGEKHKNKCQAIRPELKEGECSKEQMLSCTQNIDGIVGFASTEKVEKRTDPILSLSNQQDATSVATESSESSTSDLPSFEVGIRALCEVNNAEGSCIEERNVDLKNNSLEIDQTENVKPMLRGRFQRPKPNLSRAGKKSVLSQGKTESESKNSHSKTSVEKNHVEKDKMNTLDILRMETTERENPEAETVSVLGEKNCLQEGSQLKALRPVQVRGRLQKPKPNAGKAAERKEILISQEEIGANVEKNENESCADRDTPQHMEDQSRKDFEEEDVILQPEKNDSFQNVQPDEPKVLNECLSVQENNKANKLNQVPILRTRFQKP

SEQ ID NO: 38561 - protein, 846 aa, Homo sapiens
MFRRARLSVKPNVRPGVGARGSTASNPQRGRESPRPPDPATDSASKPAEPTDVPTVDFGGAEPQEKAPRSSTEKTGGDNDVEESSRSSSTVSQRRKRISSTSSLVKSSVSVPSESHPLSTINQEAPQPTATSTKEKQPCSDRYRIYKAQKLREMLKEELRKEKKQWKNKYAINESQRPPDRSKMTMRDFIYYLPDNNPMTSSLEQEKKTEKPSTPVQTREQEGKSTPNAEDNEMEEETDDGPLLVPRVKVAEDGSIILDEESLTVEVLRTKGPCVVEENDPIFERGSTTTYSSFRKNYYSKPWSNKETDMFFLAISMVGTDFSMIGQLFPHRARIEIKNKFKREEKTNGWRIDKAFQEKRPFDFDFFAHLLQKVLAEEEKRKQKSVKNHSLKEKKSTKPRKNVKVKKVACEGVNNDPDESMSSRISDTERSQKDAQTVEEESLTLSREDAEQVALEVDLNQKKRRRKKQDGANELGVNNLLENATVQAGPSKGEKHKNKCQAIRPELKEGECSKEQMLSCTQNIDGIVGFASTEKVEKRTDPILSLSNQQDATSVATESSESSTSDLPSFEVGIRALCEVNNAEGSCIEERNVDLKNNSLEIDQTENVKPMLRGRFQRPKPNLSRAGKKSVLSQGKTESESKNSHSKTSVEKNHVEKDKMNTLDILRMETTERENPEAETVSVLGEKNCLQEGSQLKALRPVQVRGRLQKPKPNAGKAAERKEILISQEEIGANVEKNENESCADRDTPQHMEDQSRKDFEEEDVILQPEKNDSFQNVQPDEPKVLNECLSVQENNKANKLNQVPILRTRFQKPKPNIGRGTGRREISSKEEVLEKILSLGKWRQH

SEQ ID NO: 38562 - protein, 2132 aa, Homo sapiens
MSSRISDTERSQKDAQTVEEESLTLSREDAEQVALEVDLNQKKRRRKKQDGANELGVNNLLENATVQAGPSKGEKHKNKCQAIRPELKEGECSKEQMLSCTQNIDGIVGFASTEKVEKRTDPILSLSNQQDATSVATESSESSTSDLPSFEVGIRALCEVNNAEGSCIEERNVDLKNNSLEIDQTENVKPMLRGRFQRPKPNLSRAGKKSVLSQGKTESESKNSHSKTSVEKNHVEKDKMNTLDILRMETTERENPEAETVSVLGEKNCLQEGSQLKALRPVQVRGRLQKPKPNAGKAAERKEILISQEEIGANVEKNENESCADRDTPQHMEDQSRKDFEEEDVILQPEKNDSFQNVQPDEPKVLNECLSVQENNKANKLNQVPILRTRFQKPKPNIGRGTGRREISSKEEVLEKILVSGEMAAALRETVRLDTSPKEMVPAEINTKEMQSDLKETGRRAISPREKILDVIDDTIEMETGLKAMGREICLREKTPEVIDATEEIDKDLEEAGRREISPQKNGPEEVKPLGEVETDLKATGNESSPREKTPEVTDATEEIDKNLEETGRRKISPRENGPEEVKPVDEMETDLNATGRESSPREKTPEVIDATEEIDLEETEREVSPQENGLEEVKPLGEMETDLKATGRDSFPRGKTPEVIDAIEEIEIDLEETEREISPQENGLEEVKPLGEMQTDLKATGREISPREKTPEVIDATEEIDKDLEETGRREISPEENGPEEVKPVDEMETDLKTTGREGSSREKTREVIDAAEVIETDLEETEREISPQENGPEEVKPVGKMETDLKEIREEISQREKVLAEFSAIREKEIDLKETGKRDIPIMEKVSGKMAVVEEMEADLKETGKENFRERGSEEICVTEEKVAELKQTGKTDISPRENELEETSTSRQTDTHLMQSGSNDFSAVPSLDIQNISSEVLSMMHTPVEEKRNSEKEVSSHFSHFKISSQTHESDKTEVQGIQSPDVPEQFSDINLSKSLPQEQKPLEIKPAPFVRSRFKRPKPNLARAALKRETTESEKYIYEKKSETKKMETIVMQENNEQTDTLPSQHDEASLMISREKDTLGHRNEEAVILPCTQTERNLSPSNSCEPKEESQSAPVQKNDSVVSVGTNNVNTFQQEMKESVIQTARQVRGRLQRPRPNIRKTGQRQIVDKGEAKGIIKEGRTILPKDETEKKVLTVSNSQIETEIEVPSSAVPEHRMYENQSQVVLVENLHVNKTNETIRHENKPYVPSSAQMTRRKFQKAKPNLGRAHSKKEEPVLEKVTTDQSKEGKPEDHLLQKGASNTQLLLKEKAELLTSLEVSARKDCVGSKESALAKIDAELEEVGPSRRVGEETVGDNSPSSVVEEQYLNKLTSCPQPLNETSYSKIALDGKTTISSTSEYERNRGERRSHKKFKPNVTRGRGSKRVRGKTSKKEPRASKAMLVTLRASQEEDDDADDFESDYEEESYHLAPEEVNKAPVFVPVGLRSPEPVSAQIEETMEELEITVNVPDVGCIAVVEHELPNTDVTTEEMKQEENLSVPFEMTTSEHIQDEPGVCIIPHVHSKDKSHIPSSLDNVNHKIVHECQELSSPVITTSPASFEENKIVLEEQSSREEISLMEKVKENATPTRNTISKVTSNLRIRSRLAKPKPNLEKTLGTNRLDDYQEVSSLCVTKGAEMETQRETEKNASKATELENKNLGPVTTAENKDQSKLACVHGIKGTSISSEVNLTERNENQEESSQEVHMLSVAPVASSETGPCTLGLDRGLGENSVEEPQIKDSKGDSVLTLPVPEYTPTSIPEVQQENIINPQDLTVNLVANVPQDGEDEQAFILTLVEIPANAVEEFTDATAQFMPNPLLPAPILVKSVNTEERGDMSICLPATSVGQDAMGLSISGRDNSKKPPDNLDLVSRKRFQCRLDKNDHIPPAKKRSLTLRDDCQEYTTEVHSKELTNVFEETGESHKGQDIFLTSGSTLTTPEPQRQQVEAAFQSRGSRSPDACMDKNVPQLPQDEMIVSDKEERTDAAPKSQQMDSRTSSSKASLSRPGRRPLGFLSLICSKNSLESDEPMQVHSKKRLKPLIPGLRKKLKRSNPFNESQEKNRESSDLLPSPSVITTQSENISSSATQSPF

SEQ ID NO: 38563 - protein, 463 aa, Homo sapiens; identical to SEQ ID NO: 38559

SEQ ID NO: 38564 - protein, 505 aa, Homo sapiens
MGLVSSKKPDKEKPIKEKDKGQWSPLKVSAQDKDAPPLPPLVVFNHLTPPPPDEHLDEDKHFVVALYDYTAMNDRDLQMLKGEKLQVLKGTGDWWLARSLVTGREGYVPSNFVARVESLEMERWFFRSQGRKEAERQLLAPINKAGSFLIRESETNKGAFSLSVKDVTTQGELIKHYKIRCLDEGGYYISPRITFPSLQALVQHYSKKGDGLCQRLTLPCVRPAPQNPWAQDEWEIPRQSLRLVRKLGSGQFGEVWMGYYKNNMKVAIKTLKEGTMSPEAFLGEANVMKALQHERLVRLYAVVTKEPIYIVTEYMARGCLLDFLKTDEGSRLSLPRLIDMSAQIAEGMAYIERMNSIHRDLRAANILVSEALCCKIADFGLARIIDSEYTAQEGAKFPIKWTAPEAIHFGVFTIKADVWSFGVLLMEVVTYGRVPYPGMSNPEVIRNLERGYRMPRPDTCPPELYRGVIAECWRSRPEERPTFEFLQSVLEDFYTATERQYELQP

SEQ ID NO: 38565 - protein, 590 aa, Homo sapiens
MGLVSSKKPDKEKPIKEKDKGQWSPLKVSAQDKDAPPLPPLVVFNHLTPPPPDEHLDEDKHFVVALYDYTAMNDRDLQMLKGEKLQVLKGTGDWWLARSLVTGREGYVPSNFVARVESLEMERWFFRSQGRKEAERQLLAPINKAGSFLIRESETNKGAFSLSVKDVTTQGELIKHYKIRCLDEGGYYISPRITFPSLQALVQHYSKKGDGLCQRLTLPCVRPAPQNPWAQDEWEIPRQSLRLVRKLGSGQFGEVWMGYYKNNMKVAIKTLKEGTMSPEAFLGEANVMKALQHERLVRLYAVVTKEPIYIVTEYMARGCLLDFLKTDEGSRLSLPRLIDMSAQIAEGMAYIERMNSIHRDLRAANILVSEALCCKIADFGLARIIDSEYTAQEGAKFPIKWTAPEAIHFGVFTIKADVWSFGVLLMEVVTYGRVPYPGMSNPEVIRNLERGYRMPRPDTCPPELYRGVIAECWRSRPEERPTFDCTPGRVTRPLCAASFVEGCNSDLARSSGVLSPSKVFRTGKRLSSSKAPVLGTPRAGRVPASAPCVDPALPRYRSQTGSRGRQQGQPQPRLRSSTAGLFCNKVTSVR

SEQ ID NO: 38566 - protein, 204 aa, Homo sapiens
MATASPSVFLLMVNGQVESAQFPEYDDLYCKYCFVYGQDWAPTAGLEEGISQITSKSQDVRQALVWNFPIDVTFKSTNPYGWPQIVLSVYGPDVFGNDVVRGYGAVHVPFSPGRHKRTIPMFVPESTSKLQKFTSWFMGRRPEYTDPKVVAQGEGREVTRVRSQGFVTLLFNVVTKDMRKLGYDTGPSDTQGVLGPSPPQSFPQ

SEQ ID NO: 38567 - protein, 153 aa, Homo sapiens
MATASPSVFLLMVNGQVESAQFPEYDDLYCKYCFVYGQDWAPTAGLEEGISQITSKSQDVRQALVWNFPIDVTFKSTNPYGWPQIVLSVYGPDVFGNDVVRGYGAVHVPFSPGRHKRTIPMFVPESTSKLQKFTSLCLVASSDLQAAPPTEDK

SEQ ID NO: 38568 - protein, 161 aa, Homo sapiens
MATASPSVFLLMVNGQVESAQFPEYDDLYCKYCFVYGQDWAPTAGLEEGISQITSKSQDVRQALVWNFPIDVTFKSTNPYGWPQIVLSVYGPDVFGNDVVRGYGAVHVPFSPGRHKRTIPMFVPESTSKLQKFTSWFMGRRPEYTDPKVVAQGEGREAQPG

SEQ ID NO: 38569 - protein, 187 aa, Homo sapiens
MATASPSVFLLMVNGQVESAQFPEYDDLYCKYCFVYGQDWAPTAGLEEGISQITSKSQDVRQALVWNFPIDVTFKSTNPYGWPQIVLSVYGPDVFGNDVVRGYGAVHVPFSPGRHKRTIPMFVPESTSKLQKFTSWFMGRRPEYTDPKVVAQGEGREDENAEAEIPRSTWVSLCPSPAWLMLPFCPQ

SEQ ID NO: 38570 - protein, 133 aa, Homo sapiens
LLMVNGQVESAQFPEYDDLYCKYCFVYGQDWAPTAGLEEGISQITSKSQDVRQALVWNFPIDVTFKSTNPYGWPQIVLSVYGPDVFGNDVVRGYGAVHVPFSPGRHKRTIPMFVPESTSKLQKFTRSASCSTH

SEQ ID NO: 38571 - protein, 204 aa, Homo sapiens; identical to SEQ ID NO: 38566

SEQ ID NO: 38572 - protein, 147 aa, Homo sapiens
MMTSTASTALCTARTGPPQRVWRRGSHRSHPRAKMCGKHWCGTSPLMSPLKAPTPTAGHRSCSACMDQMCSGTMWFEAMGPCTCPSHLAGTKGPSPCLSQNLRLNCRSLQAGSWGGGPSTQTPRWWLRVKAGKPPSGLSVKDSSVSR

SEQ ID NO: 38573 - protein, 175 aa, Homo sapiens
MAEVHVIGQIIGASGFSESSLFCKWGIHTGAAWKLLSGVREGQTQVDTPQIGDMAYWSHPIDLHFATKGLQGWPRLHFQVWSQDSFGRCQLAGYGFCHVPSSPGTHQLACPTWRPLGSWREQLARAFVGGGPQLLHGDTIYSGADRYRLHTAAGGTVHLEIGLLLRNFDRYGVEC

SEQ ID NO: 38574 - protein, 298 aa, Homo sapiens
MGPKDSAKCLHRGPQPSHWAAGDGPTQERCGPRSLGSPVLGLDTCRAWDHVDGQILGQLRPLTEEEEEEGAGATLSRGPAFPGMGSEELRLASFYDWPLTAEVPPELLAAAGFFHTGHQDKVRCFFCYGGLQSWKRGDDPWTEHAKWFPSCQFLLRSKGRDFVHSVQETHSQLLGSWDPWEEPEDAAPVAPSVPASGYPELPTPRREVQSESAQEPGGVSPAEAQRAWWVLEPPGARDVEAQLRRLQEERTCKVCLDRAVSIVFVPCGHLVCAECAPGLQLCPICRAPVRSRVRTFLS

SEQ ID NO: 38575 - protein, 280 aa, Homo sapiens
MGPKDSAKCLHRGPQPSHWAAGDGPTQERCGPRSLGSPVLGLDTCRAWDHVDGQILGQLRPLTEEEEEEGAGATLSRGPAFPGMGSEELRLASFYDWPLTAEVPPELLAAAGFFHTGHQDKVRCFFCYGGLQSWKRGDDPWTEHAKWFPSCQFLLRSKGRDFVHSVQETHSQLLGSWDPWEEPEDAAPVAPSVPASGYPELPTPRREVQSESAQEPGARDVEAQLRRLQEERTCKVCLDRAVSIVFVPCGHLVCAECAPGLQLCPICRAPVRSRVRTFLS

SEQ ID NO: 38576 - protein, 1187 aa, Homo sapiens
MRPRGAAFAAGPPGDLHLGTAIGFAGAIWRSRSPAMSTLLDIKSSVLRQVQVCPSFRRRTEQDPGSASADPQEPATGAWKPGDGVEFFAHMRLMLKKGEGRQGLPCLEVPLRSGSPAPPEPVDPSLGLRALAPEEVEMLYEEALYTVLYRAGTMGPDQVDDEEALLSYLQQVFGTSLEEHTEAIERVRKAKAPTYALKVSVMRAKNLLAKDPNGFSDPYCMLGILPASDATREPRAQKEQRFGFRKGSKRGGPLPAKCIQVTEVKSSTLNPVWKEHFLFEIEDVSTDQLHLDIWDHDDDVSLVEACRKLNEVIGLKGMGRYFKQIVKSARANGTAGPTEDHTDDFLGCLNIPVREVPVAGVDRWFKLEPRSSASRVQGHCHLVLKLITTQRDTAMSQRGRSGFLSHLLLLSHLLRLEHSAEEPNSSSWRGELSTPAATILCLHGAQSNLSPLQLAVLHWQVSSRHHQTCTLDYSYLLGLLEDMQAHWEEAPSLPQEQEESLADSLSAFSEFGLQLLRQLRDYFPATNSTAVHRLELLLKCLGKLQLFQPSFEICPFESELNMDIAAALKRGNREWYDRILNDKSPREQPGPQRLPGLVVLADAVYDDLQFCYSVYASLFHSILNVDVFTLTFRQLERLVAEEAWVLTEELSPKMTLEVASGLFELYLTLADLQRFWDSIPGRDSRSLALAGIHAPFLPAVKLWFQVLRDQAKWRLQGAVDMDTLEPVDASSRHSSSAATAGLCLSHIQELWVRLAWPDPAQAQGLGTQLGQDVCEATLFYTELLRKKVDTQPGAAGEAVSEALCVVLNNVELVRKAAGQALKGLAWPEGATGPEGVLPRPLLSCTQALDDDLQREAHTVTAHLTSKMVGDIRKYVQHISLSPDSIQNDEAVAPLMKYLDEKLALLNASLVKGNLSRVLEALWELLLQAILQALGANRDVSADFYSRFHFTLEALVSFFHAEGQGLPLESLRDGSYKRLKEELRLHKCSTRECIEQFYLDKLKQRTLEQNRFGRLSVRCHYEAAEQRLAVEVLHAADLLPLDANGLSDPFVIVELGPPHLFPLVRSQRTQVKTRTLHPVYDELFYFSVPAEACRRRAACVLFTVMDHDWLSTNDFAGEAALGLGGVTGVARPQVGGGARAGQPVTLHLCRPRAQVRSALRRLEGRTSKEAQEFVKKLKELEKCMEADP

SEQ ID NO: 38577 - protein, 1169 aa, Homo sapiens
MSTLLDIKSSVLRQVQVCPSFRRRTEQDPGSASADPQEPATGAWKPGDGVEFFAHMRLMLKKGEGRQGLPCLEAWGSPCRQSPHPGPHTQVPLRSGSPAPPEPVDPSLGLRALAPEEVEMLYEEALYTVLYRAGTMGPDQVDDEEALLSYLQQVFGTSLEEHTEAIERVRKAKAPTYALKVSVMRAKNLLAKDPNGFSDPYCMLGILPASDATREPRAQKEQRFGFRKGSKRGGPLPAKCIQVTEVKSSTLNPVWKEHFLFEIEDVSTDQLHLDIWDHDDDVSLVEACRKLNEVIGLKGMGRYFKQIVKSARANGTAGPTEDHTDDFLGCLNIPVREVPVAGVDRWFKLEPRSSASRVQGHCHLVLKLITTQRDTAMSQRGRSGFLSHLLLLSHLLRLEHSAEEPNSSSWRGELSTPAATILCLHGAQSNLSPLQLAVLHWQVSSRHHQTCTLDYSYLLGLLEDMQAHWEEAPSLPQEQEESLADSLSAFSEFGLQLLRQLRDYFPATNSTAVHRLELLLKCLGKLQLFQPSFEICPFESELNMDIAAALKRGNREWYDRILNDKSPREQPGPQRLPGLVVLADAVYDDLQFCYSVYASLFHSILNVDVFTLTFRQLERLVAEEAWVLTEELSPKMTLEVASGLFELYLTLADLQRFWDSIPGRDSRSLALAGIHAPFLPAVKLWFQVLRDQAKWRLQGAVDMDTLEPVDASSRHSSSAATAGLCLSHIQELWVRLAWPDPAQAQGLGTQLGQDVCEATLFYTELLRKKVDTQPGAAGEAVSEALCVVLNNVELVRKAAGQALKGLAWPEGATGPEGVLPRPLLSCTQALDDDLQREAHTVTAHLTSKMVGDIRKYVQHISLSPDSIQNDEAVAPLMKYLDEKLALLNASLVKGNLSRVLEALWELLLQAILQALGANRDVSADFYSRFHFTLEALVSFFHAEGQGLPLESLRDGSYKRLKEELRLHKCSTRECIEQFYLDKLKQRTLEQNRFGRLSVRCHYEAAEQRLAVEVLHAADLLPLDANGLSDPFVIVELGPPHLFPLVRSQRTQVKTRTLHPVYDELFYFSVPAEACRRRAACVLFTVMDHDWLSTNDFAGEAALGLGGVTGVARPQVGGGARAGQPVTLHLCRPRAQVRSALRRLEGRTSKEAQEFVKKLKELEKCMEADP

SEQ ID NO: 38578 - protein, 1169 aa, Homo sapiens; identical to SEQ ID NO: 38577

SEQ ID NO: 38579 - protein, 1116 aa, Homo sapiens
MSTLLDIKSSVLRQVQVCPSFRRRTEQDPGSASADPQEPATGAWKPGDGVEFFAHMRLMLKKGEGRQGLPCLEVPLRSGSPAPPEPVDPSLGLRALAPEEVEMLYEEALYTVLYRAGTMGPDQVDDEEALLSYLQQVFGTSLEEHTEAIERVRKAKAPTYALKVSVMRAKNLLAKDPNGFSDPYCMLGILPASDATREPRAQKEQRFGFRKGSKRGGPLPAKCIQVTEVKSSTLNPVWKEHFLFEIEDVSTDQLHLDIWDHDDDVSLVEACRKLNEVIGLKGMGRYFKQIVKSARANGTAGPTEDHTDDFLGCLNIPVRRDTAMSQRGRSGFLSHLLLLSHLLRLEHSAEEPNSSSWRGELSTPAATILCLHGAQSNLSPLQLAVLHWQVSSRHHQTCTLDYSYLLGLLEDMQAHWEEAPSLPQEQEESLADSLSAFSEFGLQLLRQLRDYFPATNSTAVHRLELLLKCLGKLQLFQPSFEICPFESELNMDIAAALKRGNREWYDRILNDKSPREQPGPQRLPGLVVLADAVYDDLQFCYSVYASLFHSILNVDVFTLTFRQLERLVAEEAWVLTEELSPKMTLEVASGLFELYLTLADLQRFWDSIPGRDSRSLALAGIHAPFLPAVKLWFQVLRDQAKWRLQGAVDMDTLEPVDASSRHSSSAATAGLCLSHIQELWVRLAWPDPAQAQGLGTQLGQDVCEATLFYTELLRKKVDTQPGAAGEAVSEALCVVLNNVELVRKAAGQALKGLAWPEGATGPEGVLPRPLLSCTQALDDDLQREAHTVTAHLTSKMVGDIRKYVQHISLSPDSIQNDEAVAPLMKYLDEKLALLNASLVKGNLSRVLEALWELLLQAILQALGANRDVSADFYSRFHFTLEALVSFFHAEGQGLPLESLRDGSYKRLKEELRLHKCSTRECIEQFYLDKLKQRTLEQNRFGRLSVRCHYEAAEQRLAVEVLHAADLLPLDANGLSDPFVIVELGPPHLFPLVRSQRTQVKTRTLHPVYDELFYFSVPAEACRRRAACVLFTVMDHDWLSTNDFAGEAALGLGGVTGVARPQVGGGARAGQPVTLHLCRPRAQVRSALRRLEGRTSKEAQEFVKKLKELEKCMEADP

SEQ ID NO: 38580 - protein, 1152 aa, Homo sapiens
MSTLLDIKSSVLRQVQVCPSFRRRTEQDPGSASADPQEPATGAWKPGDGVEFFAHMRLMLKKGEGRQGLPCLEVPLRSGSPAPPEPVDPSLGLRALAPEEVEMLYEEALYTVLYRAGTMGPDQVDDEEALLSYLQQVFGTSLEEHTEAIERVRKAKAPTYALKVSVMRAKNLLAKDPNGFSDPYCMLGILPASDATREPRAQKEQRFGFRKGSKRGGPLPAKCIQVTEVKSSTLNPVWKEHFLFEIEDVSTDQLHLDIWDHDDDVSLVEACRKLNEVIGLKGMGRYFKQIVKSARANGTAGPTEDHTDDFLGCLNIPVREVPVAGVDRWFKLEPRSSASRVQGHCHLVLKLITTQRDTAMSQRGRSGFLSHLLLLSHLLRLEHSAEEPNSSSWRGELSTPAATILCLHGAQSNLSPLQLAVLHWQVSSRHHQTCTLDYSYLLGLLEDMQAHWEEAPSLPQEQEESLADSLSAFSEFGLQLLRQLRDYFPATNSTAVHRLELLLKCLGKLQLFQPSFEICPFESELNMDIAAALKRGNREWYDRILNDKSPREQPGPQRLPGLVVLADAVYDDLQFCYSVYASLFHSILNVDVFTLTFRQLERLVAEEAWVLTEELSPKMTLEVASGLFELYLTLADLQRFWDSIPGRDSRSLALAGIHAPFLPAVKLWFQVLRDQAKWRLQGAVDMDTLEPVDASSRHSSSAATAGLCLSHIQELWVRLAWPDPAQAQGLGTQLGQDVCEATLFYTELLRKKVDTQPGAAGEAVSEALCVVLNNVELVRKAAGQALKGLAWPEGATGPEGVLPRPLLSCTQALDDDLQREAHTVTAHLTSKMVGDIRKYVQHISLSPDSIQNDEAVAPLMKYLDEKLALLNASLVKGNLSRVLEALWELLLQAILQALGANRDVSADFYSRFHFTLEALVSFFHAEGQGLPLESLRDGSYKRLKEELRLHKCSTRECIEQFYLDKLKQRTLEQNRFGRLSVRCHYEAAEQRLAVEVLHAADLLPLDANGLSDPFVIVELGPPHLFPLVRSQRTQVKTRTLHPVYDELFYFSVPAEACRRRAACVLFTVMDHDWLSTNDFAGEAALGLGGVTGVARPQVGGGARAGQPVTLHLCRPRAQVRSALRRLEGRTSKEAQEFVKKLKELEKCMEADP

SEQ ID NO: 38581 - protein, 178 aa, Homo sapiens
MSQRGRSGFLSHLLLLSHLLRLEHSAEEPNSSSWRGELSTPAATILCLHGAQSNLSPLQLAVLHWQVSSRHHQTCTLDYSYLLGLLEDMQAHWEEAPSLPQEQEESLADSLSAFSEFGLQLLRQLRDYFPATNSTAVHRLELLLKCLGKLQLFQPSFEICPRVGAEHGHCCGPEERQP

SEQ ID NO: 38582 - protein, 593 aa, Homo sapiens
MAAASSSDSDACGAESNEANSKWLDAHYDPMANIHTFSACLALADLHGDGEYKLVVGDLGPGGQQPRLKVLKGPLVMTESPLPALPAAAATFLMEQHEPRTPALALASGPCVYVYKNLRPYFKFSLPQLPPNPLEQDLWNQAKEDRIDPLTLKEMLESIRETAEEPLSIQSLRFLQLELSEMEAFVNQHKSNSIKRQTVITTMTTLKKNLADEDAVSCLVLGTENKELLVLDPEAFTILAKMSLPSVPVFLEVSGQFDVEFRLAAACRNGNIYILRRDSKHPKYCIELSAQPVGLIRVHKVLVVGSTQDSLHGFTHKGKKLWTVQMPAAILTMNLLEQHSRGLQAVMAGLANGEVRIYRDKALLNVIHTPDAVTSLCFGRYGREDNTLIMTTRGGGLIIKILKRTAVFVEGGSEVGPPPAQAMKLNVPRKTRLYVDQTLREREAGTAMHRAFQTDLYLLRLRAARAYLQALESSLSPLSTTAREPLKLHAVVQGLGPTFKLTLHLQNTSTTRPVLGLLVCFLYNEALYSLPRAFFKVPLLVPGLNYPLETFVESLSNKGISDIIKVLVLREGQSAPLLSAHVNMPGSEGLAAA

SEQ ID NO: 38583 - protein, 165 aa, Homo sapiens
MSPGPQLWHLLQALVSMCIRISDPTSSSACPNCLQILWNKTFGTRPKRETAEEPLSIQSLRFLQLELSEMEAFVNQHKSNSIKRQTVITTMTTLKKNLADEDAVSCLVLGTENKELLVLDPEAFTILAKMSLPSVPVFLEVSGQFDVEFRLAAACRNGNIYILRR

SEQ ID NO: 38584 - protein, 723 aa, Homo sapiens
MLSSMAAAGSVKAALQVAEVLEAIVSCCVGPEGRQVLCTKPTGEVLLSRNGGRLLEALHLEHPIARMIVDCVSSHLKKTGDGAKTFIIFLCHLLRGLHAITDREKDPLMCENIQTHGRHWKNCSRWKFISQALLTFQTQILDGIMDQYLSRHFLSIFSSAKERTLCRSSLELLLEAYFCGRVGRNNHKFISQLMCDYFFKCMTCKSGIGVFELVDDHFVELNVGVTGLPVSDSRIIAGLVLQKDFSVYRPADGDMRMVIVTETIQPLFSTSGSEFILNSEAQFQTSQFWIMEKTKAIMKHLHSQNVKLLISSVKQPDLVSYYAGVNGISVVECLSSEEVSLIRRIIGLSPFVPPQAFSQCEIPNTALVKFCKPLILRSKRYVHLGLISTCAFIPHSIVLCGPVHGLIEQHEDALHGALKMLRQLFKDLDLNYMTQTNDQNGTSSLFIYKNSGESYQAPDPGNGSIQRPYQDTVAENKDALEKTQTYLKVHSNLVIPDVELETYIPYSTPTLTPTDTFQTVETLTCLSLERNRLTDYYEPLLKNNSTAYSTRGNRIEISYENLQVTNITRKGSMLPVSCKLPNMGTSQSYLSSSMPAGCVLPVGGNFEILLHYYLLNYAKKCHQSEETMVSMIIANALLGIPKVLYKSKTGKYSFPHTYIRAVHALQTNQPLVSSQTGLESVMGKYQLLTSVLQCLTKILTIDMVITVKRHPQKVHNQDSEDEL

SEQ ID NO: 38585 - protein, 710 aa, Homo sapiens
MVMACRVVNKRRHMGLQQLSSFAETGRTFLGPLKSSKFIIDEECHESVLISSTVRLLESLDLTSAVGQLLNEAVQAQNNTYRTGISTLLFLVGAWSSAVEECLHLGVPISIIVSVMSEGLNFCSEEVVSLHVPVHNIFDCMDSTKTFSQLETFSVSLCPFLQVPSDTDLIEELHGLKDVASQTLTISNLSGRPLKSYELFKPQTKVEADNNTSRTLKNSLLADTCCRQSILIHSRHFNRTDNTEGVSKPDGFQEHVTATHKTYRCNDLVELAVGLSHGDHSSMKLVEEAVQLQYQNACVQQGNCTKPFMFDISRIFTCCLPGLPETSSCVCPGYITVVSVSNNPVIKELQNQPVRIVLIEGDLTENYRHLGFNKSANIKTVLDSMRLQEDSSEELWANHVLQVLIQFKVNLVLVQGNVSERLIEKCINSKRLVIGSVNGSVMQAFAEAAGAVQVAYITQVNEDCVGDGVCVTFWRSSPLDVVDRNNRIAILLKTEGINLVTAVLTNPVTAQMQIKEDRFWTCAYRLYYALKEEKVFLGGGAVEFLCLSCLHILAEQSLKKENHACSGWLHNTSSWLASSLAIYRPTVLKFLANGWQKYLSTLLYNTANYSSEFEASTYIQHHLQNATDSGSPSSYILNEYSKLNSRIFNSDISNKLEQIPRVYDVVTPKIEAWRRALDLVLLVLQTDSEIITGHGHTQINSQELTGFLFL

SEQ ID NO: 38586 - protein, 191 aa, Homo sapiens
MVMACRVVNKRRHMGLQQLSSFAETGRTFLGPLKSSKFIIDEECHESVLISSTVRLLESLDLTSAVGQLLNEAVQAQNNTYRTGISTLLFLVGAWSSAVEECLHLGVPISIIVSVMSEGLNFCSEEVVSLHVPVHNIFDCMDSTKTFSQLETFSVSLCPFLQVPSDTDLIEELHGLKDVASQTLTISNLSG

SEQ ID NO: 38587 - protein, 710 aa, Homo sapiens; identical to SEQ ID NO: 38585

SEQ ID NO: 38588 - protein, 721 aa, Homo sapiens
MLLPVFTLKLRHKISPRMVAIGRYDGTHPCLAAATQTGKVFIHNPHTRNQHVSASRVFQSPLESDVSLLSINQAVSCLTAGVLNPELGYDALLVGTQTNLLAYDVYNNSDLFYREVADGANAIVLGTLGDISSPLAIIGGNCALQGFNHEGSDLFWTVTGDNVNSLALCDFDGDGKKELLVGSEDFDIRVFKEDEIVAEMTETEIVTSLCPMYGSRFGYALSNGTVGVYDKTSRYWRIKSKNHAMSIHAFDLNSDGVNELITGWSNGKVDARSDRTGEVIFKDNFSSAIAGVVEGDYRMDGHIQLICCSVDGEIRGYLPGTAEMRGNLMDTSAEQDLIRELSQKKQNLLLELRNYEENAKAELASPLNEADGHRGIIPANTRLHTTLSVSLGNETQTAHTELRISTSNDTIIRAVLIFAEGIFTGESHVVHPSIHNLSSSICIPIVPPKDVPVDLHLKAFVGYRSSTQFHVFESTRQLPRFSMYALTSLDPASEPISYVNFTIAERAQRVVVWLGQNFLLPEDTHIQNAPFQVCFTSLRNGGHLHIKIKLSGEITINTDDIDLAGDIIQSMASFFAIEDLQVEADFPVYFEELRKVLVKVDEYHSVHQKLSADMADHSNLIRSLLVGAEDARLMRDMKTMKSRYMELYDLNRDLLNGYKIRCNNHTELLGNLKAVNQAIQRAGRLRVGKPKNQVITACRDAIRSNNINTLFKIMRVGTASS

SEQ ID NO: 38589 - protein, 519 aa, Homo sapiens
MAEERVATRTQFPVSTESQKPRQKKAPEFPILEKQNWLIHLHYIRKDYEACKAVIKEQLQETQGLCEYAIYVQALIFRLEGNIQESLELFQTCAVLSPQSADNLKQVARSLFLLGKHKAAIEVYNEAAKLNQKDWEISHNLGVCYIYLKQFNKAQDQLHNALNLNRHDLTYIMLGKIHLLEGDLDKAIEVYKKAVEFSPENTELLTTLGLLYLQLGIYQKAFEHLGNALTYDPTNYKAILAAGSMMQTHGDFDVALTKYRVVACAVPESPPLWNNIGMCFFGKKKYVAAISCLKRANYLAPFDWKILYNLGLVHLTMQQYASAFHFLSAAINFQPKMGELYMLLAVALTNLEDIENAKRAYAEAVHLDKCNPLVNLNYAVLLYNQGEKKNALAQYQEMEKKVSLLKDNSSLEFDSEMVEMAQKLGAALQVGEALVWTKPVKDPKSKHQTTSTSKPASFQQPLGSNQALGQAMSSAAAYRTLPSGAGGTSQFTKPPSLPLEPEPAVESSPTETSEQIREK

SEQ ID NO: 38590 - protein, 527 aa, Homo sapiens
MALTVVPSFSVSGVWKRTQFPVSTESQKPRQKKAPEFPILEKQNWLIHLHYIRKDYEACKAVIKEQLQETQGLCEYAIYVQALIFRLEGNIQESLELFQTCAVLSPQSADNLKQVARSLFLLGKHKAAIEVYNEAAKLNQKDWEISHNLGVCYIYLKQFNKAQDQLHNALNLNRHDLTYIMLGKIHLLEGDLDKAIEVYKKAVEFSPENTELLTTLGLLYLQLGIYQKAFEHLGNALTYDPTNYKAILAAGSMMQTHGDFDVALTKYRVVACAVPESPPLWNNIGMCFFGKKKYVAAISCLKRANYLAPFDWKILYNLGLVHLTMQQYASAFHFLSAAINFQPKMGELYMLLAVALTNLEDIENAKRAYAEAVHLDKCNPLVNLNYAVLLYNQGEKKNALAQYQEMEKKVSLLKDNSSLEFDSEMVEMAQKLGAALQVGEALVWTKPVKDPKSKHQTTSTSKPASFQQPLGSNQALGQAMSSAAAYRTLPSGAGGTSQFTKPPSLPLEPEPAVESSPTETSEQIREK

SEQ ID NO: 38591 - protein, 507 aa, Homo sapiens
MIWNTRNSTYIFTAPEFPILEKQNWLIHLHYIRKDYEACKAVIKEQLQETQGLCEYAIYVQALIFRLEGNIQESLELFQTCAVLSPQSADNLKQVARSLFLLGKHKAAIEVYNEAAKLNQKDWEISHNLGVCYIYLKQFNKAQDQLHNALNLNRHDLTYIMLGKIHLLEGDLDKAIEVYKKAVEFSPENTELLTTLGLLYLQLGIYQKAFEHLGNALTYDPTNYKAILAAGSMMQTHGDFDVALTKYRVVACAVPESPPLWNNIGMCFFGKKKYVAAISCLKRANYLAPFDWKILYNLGLVHLTMQQYASAFHFLSAAINFQPKMGELYMLLAVALTNLEDIENAKRAYAEAVHLDKCNPLVNLNYAVLLYNQGEKKNALAQYQEMEKKVSLLKDNSSLEFDSEMVEMAQKLGAALQVGEALVWTKPVKDPKSKHQTTSTSKPASFQQPLGSNQALGQAMSSAAAYRTLPSGAGGTSQFTKPPSLPLEPEPAVESSPTETSEQIREK

SEQ ID NO: 38592 - protein, 347 aa, Homo sapiens
MLGKIHLLEGDLDKAIEVYKKAVEFSPENTELLTTLGLLYLQLGIYQKAFEHLGNALTYDPTNYKAILAAGSMMQTHGDFDVALTKYRVVACAVPESPPLWNNIGMCFFGKKKYVAAISCLKRANYLAPFDWKILYNLGLVHLTMQQYASAFHFLSAAINFQPKMGELYMLLAVALTNLEDIENAKRAYAEAVHLDKCNPLVNLNYAVLLYNQGEKKNALAQYQEMEKKVSLLKDNSSLEFDSEMVEMAQKLGAALQVGEALVWTKPVKDPKSKHQTTSTSKPASFQQPLGSNQALGQAMSSAAAYRTLPSGAGGTSQFTKPPSLPLEPEPAVESSPTETSEQIREK

SEQ ID NO: 38593 - protein, 341 aa, Homo sapiens
MSVLDALWEDRDVRFDLSAQQMKTRPGEVLIDCLDSIEDTKGNNGDRGRLLVTNLRILWHSLALSRVNVSVGYNCILNITTRTANSKLRGQTEALYILTKCNSTRFEFIFTNLVPGSPRLFTSVMAVHRAYETSKMYRDFKLRSALIQNKQLRLLPQEHVYDKINGVWNLSSDQGNLGTFFITNVRIVWHANMNDSFNVSIPYLQIRSIKIRDSKFGLALVIESSQQSGGYVLGFKIDPVEKLQESVKEINSLHKVYSASPIFGVDYEMEEKPQPLEALTVEQIQDDVEIDSDGHTDAFVAYFADGNKQQDREPVFSEELGLAIEKLKDGFTLQGLWEVMS

SEQ ID NO: 38594 - protein, 320 aa, Homo sapiens
MSVLDALWEDRDVRFDLSAQQMKTRPGEVLIDCLDSIEDTKGNNGDRGRLLVTNLRILWHSLALSRVNVSVGYNCILNITTRTANSKLRGQTEALYILTKCNSTRFEFIFTNLVPGSPRLFTSVMAVHRAYETSKMYRDFKLRSALIQNKQLRLLPQEHVYDKINGVWNLSSDQGNLGTFFITNVRIVWHANMNDSFNVSIPYLQISGGYVLGFKIDPVEKLQESVKEINSLHKVYSASPIFGVDYEMEEKPQPLEALTVEQIQDDVEIDSDGHTDAFVAYFADGNKQQDREPVFSEELGLAIEKLKDGFTLQGLWEVMS

SEQ ID NO: 38595 - protein, 544 aa, Homo sapiens
MSVLDALWEDRDVRFDLSAQQMKTRPGEVLIDCLDSIEDTKGNNGDRGRLLVTNLRILWHSLALSRVNVSVGYNCILNITTRTANSKLRGQTEALYILTKCNSTRFEFIFTNLVPGSPRLFTSVMAVHRAYETSKMYRDFKLRSALIQNKQLRLLPQEHVYDKINGVWNLSSDQGNLGTFFITNVRIVWHANMNDSFNVSIPYLQIRSIKIRDSKFGLALVIESSQQSGGYVLGFKIDPVEKLQESVKEINSLHKVYSASPIFGVDYEMEEKPQPLEALTVEQIQDDVEIDSDGHTDAFVAYFADGNKLDSIASEWVGLPPLPSARCLFGLGEVDDKIYVVAGKDLQTEASLDSVLCYDPVAAKWNEVKKLPIKVYGHNVISHKGMIYCLGGKTDDKKCTNRVFIFNPKKGDWKDLAPMKIPRSMFGVAVHKGKIVIAGGVTEDGLSASVEAFDLTTNKWDVMTEFPQERSSISLVSLAGSLYAIGGFAMIQLESKEFAPTEVNDIWKYEDDKKEWAGMLKEIRYASGASCLATRLNLFKLSKL

SEQ ID NO: 38596 - protein, 715 aa, Homo sapiens
MDLILNRMDYLQVGVTSQKTMKLIPASRHRATQKVVIGDHDGVVMCFGMKKGEAAAVFKTLPGPKIARLELGGVINTPQEKIFIAAASEIRGFTKRGKQFLSFETNLTESIKAMHISGSDLFLSASYIYNHYCDCKDQHYYLSGDKINDVICLPVERLSRITPVLACQDRVLRVLQGSDVMYAVEVPGPPTVLALHNGNGGDSGEDLLFGTSDGKLALIQITTSKPVRKWEIQNEKKRGGILCIDSFDIVGDGVKDLLVGRDDGMVEVYSFDNANEPVLRFDQMLSESVTSIQGGCVGKDSYDEIVVSTYSGWVTGLTTEPIHKESGPGEELKINQEMQNKISSLRNELEHLQYKVLQERENYQQSSQSSKAKSAVPSFGINDKFTLNKDDASYSLILEVQTAIDNVLIQSDVPIDLLDVDKNSAVVSFSSCDSESNDNFLLATYRCQADTTRLELKIRSIEGQYGTLQAYVTPRIQPKTCQVRQYHIKPLSLHQRTHFIDHDRPMNTLTLTGQFSFAEVHSWVVFCLPEVPEKPPAGECVTFYFQNTFLDTQLESTYRKGEGVFKSDNISTISILKDVLSKEATKRKINLNISYEINEVSVKHTLKLIHPKLEYQLLLAKKVQLIDALKELQIHEGNTNFLIPEYHCILEEADHLQEEYKKQPAHLERLYGMITDLFIDKFKFKGTNVKTKVPLLLEILDSYDQNALISFFDAA

SEQ ID NO: 38597 - protein, 672 aa, Homo sapiens
MDLILNRMDYLQVGVTSQKTMKLIPASRHRATQKVVIGDHDGVVMCFGMKKGEAAAVFKTLPGPKIARLELGGVINTPQEKIFIAAASEIRGFTKRGKQFLSFETNLTESIKAMHISGSDLFLSASYIYNHYCDCKDQHYYLSGDKINDVICLPVERLSRITPVLACQDRVLRVLQGSDVMYAVEVPGPPTVLALHNGNGGDSGEDLLFGTSDGKLALIQITTSKPVRKWEIQNEKKRGGILCIDSFDIVGDGVKDLLVGRDDGMVEVYSFDNANEPVLRFDQMLSESVTSIQGGCVGKDSYDEIVVSTYSGWVTGLTTEPIHKESGPGEELKINQEMQNKISSLRNELEHLQYKVLQERENYQQSSQSSKAKSAVPSFGINDKFTLNKDDASYSLILEVQTAIDNVLIQSDVPIDLLDVDKNSAVVSFSSCDSESNDNFLLATYRCQADTTRLELKIRSIEGQYGTLQAYVTPRIQPKTCQVRQYHIKPLSLHQRTHFIDHDRPMNTLTLTGQFSFAEVHSWVVFCLPEVPEKPPAGECVTFYFQNTFLDTQLESTYRKGEGVFKSDNISTISILKDVLSKEATKRKINLNISYEINEVSVKHTLKLIHPKLEYQLLLAKKVQLIDALKELQIHEGNTNFLIPEYHCILEEADHLQEEYKKQPAHLERLYG

SEQ ID NO: 38598 - protein, 138 aa, Homo sapiens
DVLSKEATKRKINLNISYEINEVSVKHTLKLIHPKLEYQLLLAKKVQLIDALKELQIHEGNTNFLIPEYHCILEEADHLQEEYKKQPAHLERLYGMITDLFIDKFKFKGTNVKTKVPLLLEILDSYDQNALISFFDAA

SEQ ID NO: 38599 - protein, 887 aa, Homo sapiens
MSLFKARDWWSTILGDKEEFDQGCLCLANVDNSGNGQDKIIVGSFMGYLRIFSPHPAKTGDGAQAEDLLLEVDLRDPVLQVEVGKFVSGTEMLHLAVLHSRKLCVYSVSGTLGNVEHGNQCQMKLMYEHNLQRTACNMTYGSFGGVKGRDLICIQSMDGMLMVFEQESYAFGRFLPGFLLPGPLAYSSRTDSFLTVSSCQQVESYKYQVLAFATDADKRQETEQQKLGSGKRLVVDWTLNIGEQALDICIVSFNQSASSVFVLGERNFFCLKDNGQIRFMKKLDWSPSCFLPYCSVSEGTINTLIGNHNNMLHIYQDVTLKWATQLPHIPVAVRVGCLHDLKGVIVTLSDDGHLQCSYLGTDPSLFQAPNVQSRELNYDELDVEMKELQKIIKDVNKSQGVWPMTEREDDLNVSVVVSPNFDSVSQATDVEVGTDLVPSVTVKVTLQNRVILQKAKLSVYVQPPLELTCDQFTFEFMTPDLTRTVSFSVYLKRSYTPSELEGNAVVSYSRPTDRNPDGIPRVIQCKFRLPLKLICLPGQPSKTASHKITIDTNKSPVSLLSLFPGFASQSDDDQVNVMGFHFLGGARITVLASKTSQRYRIQSEQFEDLWLITNELILRLQEYFEKQGVKDFACSFSGSIPLQEYFELIDHHFELRINGEKLEELLSERAVQFRAIQRRLLARFKDKTPAPLQHLDTLLDGTYKQVIALADAVEENQGNLFQSFTRLKSATHLVILLIALWQKLSADQVAILEAAFLPLQEDTQELGWEETVDAAISHLLKTCLSKSSKEQALNLNSQLNIPKDTSQLKKHITLLCDRLSKGGRLCLSTDAAAPQTMVMPGGCTTIPESDLEERSVEQDSTELFTNHRHLTAETPRPEVSPLQGVSE

SEQ ID NO: 38600 - protein, 847 aa, Homo sapiens
MSLFKARDWWSTILGDKEEFDQGCLCLANVDNSGNGQDKIIVGSFMGYLRIFSPHPAKTGDGAQAEDLLLEVDLRDPVLQVEVGKFVSGTEMLHLAVLHSRKLCVYSVSGTLGNVEHGNQCQMKLMYEHNLQRTACNMTYGSFGGVKGRDLICIQSMDGMLMVFEQESYAFGRFLPGFLLPGPLAYSSRTDSFLTVSSCQQVESYKYQVLAFATDADKRQETEQQKLGSGKRLVVDWTLNIGEQALDICIVSFNQSASSVFVLGERNFFCLKDNGQIRFMKKLDWSPSCFLPYCSVSEGTINTLIGNHNNMLHIYQDVTLKWATQLPHIPVAVRVGCLHDLKGVIVTLSDDGHLQCSYLGTDPSLFQAPNVQSRELNYDELDVEMKELQKIIKDVNKSQGVWPMTEREDDLNVSVVVSPNFDSVSQATDVEVGTDLVPSVTVKVTLQNRVILQKAKLSVYVQPPLELTCDQFTFEFMSIPRVIQCKFRLPLKLICLPGQPSKTASHKITIDTNKSPVSLLSLFPGFASQSDDDQVNVMGFHFLGGARITVLASKTSQRYRIQSEQFEDLWLITNELILRLQEYFEKQGVKDFACSFSGSIPLQEYFELIDHHFELRINGEKLEELLSERAVQFRAIQRRLLARFKDKTPAPLQHLDTLLDGTYKQVIALADAVEENQGNLFQSFTRLKSATHLVILLIALWQKLSADQVAILEAAFLPLQEDTQELGWEETVDAAISHLLKTCLSKSSKEQALNLNSQLNIPKDTSQLKKHITLLCDRLSKGGRLCLSTDAAAPQTMVMPGGCTTIPESDLEERSVEQDSTELFTNHRHLTAETPRPEVSPLQGVSE

SEQ ID NO: 38601 - protein, 852 aa, Homo sapiens
MSLFKARDWWSTILGDKEEFDQGCLCLANVDNSGNGQDKIIVGSFMGYLRIFSPHPAKTGDGAQAEDLLLEVDLRDPVLQVEVGKFVSGTEMLHLAVLHSRKLCVYSVSGTLGNVEHGNQCQMKLMYEHNLQRTACNMTYGSFGGVKGRDLICIQSMDGMLMVFEQESYAFGRFLPGFLLPGPLAYSSRTDSFLTVSSCQQVESYKYQVLAFATDADKRQETEQQKLGSGKRLVVDWTLNIGEQALDICIVSFNQSASSVFVLGERNFFCLKDNGQIRFMKKLDWSPSCFLPYCSVSEGTINTLIGNHNNMLHIYQDVTLKWATQLPHIPVAVRVGCLHDLKGVIVTLSDDGHLQCSYLGTDPSLFQAPNVQSRELNYDELDVEMKELQKIIKDVNKSQGVWPMTEREDDLNVSVVVSPNFDSVSQATDVEVGTDLVPSVTVKVTLQNRVILQKAKLSVYVQPPLELTCDQFTFEFMSLNVLGIPRVIQCKFRLPLKLICLPGQPSKTASHKITIDTNKSPVSLLSLFPGFASQSDDDQVNVMGFHFLGGARITVLASKTSQRYRIQSEQFEDLWLITNELILRLQEYFEKQGVKDFACSFSGSIPLQEYFELIDHHFELRINGEKLEELLSERAVQFRAIQRRLLARFKDKTPAPLQHLDTLLDGTYKQVIALADAVEENQGNLFQSFTRLKSATHLVILLIALWQKLSADQVAILEAAFLPLQEDTQELGWEETVDAAISHLLKTCLSKSSKEQALNLNSQLNIPKDTSQLKKHITLLCDRLSKGGRLCLSTDAAAPQTMVMPGGCTTIPESDLEERSVEQDSTELFTNHRHLTAETPRPEVSPLQGVSE

SEQ ID NO: 38602 - protein, 882 aa, Homo sapiens
MSLFKARDWWSTILGDKEEFDQGCLCLANVDNSGNGQDKIIVGSFMGYLRIFSPHPAKTGDGAQAEDLLLEVDLRDPVLQVEVGKFVSGTEMLHLAVLHSRKLCVYSVSGTLGNVEHGNQCQMKLMYEHNLQRTACNMTYGSFGGVKGRDLICIQSMDGMLMVFEQESYAFGRFLPGFLLPGPLAYSSRTDSFLTVSSCQQVESYKYQVLAFATDADKRQETEQQKLGSGKRLVVDWTLNIGEQALDICIVSFNQSASSVFVLGERNFFCLKDNGQIRFMKKLDWSPSCFLPYCSVSEGTINTLIGNHNNMLHIYQDVTLKWATQLPHIPVAVRVGCLHDLKGVIVTLSDDGHLQCSYLGTDPSLFQAPNVQSRELNYDELDVEMKELQKIIKDVNKSQGVWPMTEREDDLNVSVVVSPNFDSVSQATDVEVGTDLVPSVTVKVTLQNRVILQKAKLSVYVQPPLELTCDQFTFEFMTPDLTRTVSFSVYLKRSYTPSELEGNAVVSYSRPTGIPRVIQCKFRLPLKLICLPGQPSKTASHKITIDTNKSPVSLLSLFPGFASQSDDDQVNVMGFHFLGGARITVLASKTSQRYRIQSEQFEDLWLITNELILRLQEYFEKQGVKDFACSFSGSIPLQEYFELIDHHFELRINGEKLEELLSERAVQFRAIQRRLLARFKDKTPAPLQHLDTLLDGTYKQVIALADAVEENQGNLFQSFTRLKSATHLVILLIALWQKLSADQVAILEAAFLPLQEDTQELGWEETVDAAISHLLKTCLSKSSKEQALNLNSQLNIPKDTSQLKKHITLLCDRLSKGGRLCLSTDAAAPQTMVMPGGCTTIPESDLEERSVEQDSTELFTNHRHLTAETPRPEVSPLQGVSE

SEQ ID NO: 38603 - protein, 481 aa, Homo sapiens
MSLFKARDWWSTILGDKEEFDQGCLCLANVDNSGNGQDKIIVGSFMGYLRIFSPHPAKTGDGAQAEDLLLEVDLRDPVLQVEVGKFVSGTEMLHLAVLHSRKLCVYSVSGTLGNVEHGNQCQMKLMYEHNLQRTACNMTYGSFGGVKGRDLICIQSMDGMLMVFEQESYAFGRFLPGFLLPGPLAYSSRTDSFLTVSSCQQVESYKYQVLAFATDADKRQETEQQKLGSGKRLVVDWTLNIGEQALDICIVSFNQSASSVFVLGERNFFCLKDNGQIRFMKKLDWSPSCFLPYCSVSEGTINTLIGNHNNMLHIYQDVTLKWATQLPHIPVAVRVGCLHDLKGVIVTLSDDGHLQCSYLGTDPSLFQAPNVQSRELNYDELDVEMKELQKIIKDVNKSQGVWPMTEREDDLNVSVVVSPNFDSVSQATDVEVGTDLVPSVTVKVTLQNRVILQKAKLSVYVQPPLELTCDQFTFEFMNFPS

SEQ ID NO: 38604 - protein, 852 aa, Homo sapiens
MSLFKARDWWSTILGDKEEFDQGCLCLANVDNSGNGQDKIIVGSFMGYLRIFSPHPAKTGDGAQAEDLLLEVDLRDPVLQVEVGKFVSGTEMLHLAVLHSRKLCVYSVSGTLGNVEHGNQCQMKLMYEHNLQRTACNMTYGSFGGVKGRDLICIQSMDGMLMVFEQESYAFGRFLPGFLLPGPLAYSSRTDSFLTVSSCQQVESYKYQVLAFATDADKRQETEQQKLGSGKRLVVDWTLNIGEQALDICIVSFNQSASSVFVLGERNFFCLKDNGQIRFMKKLDWSPSCFLPYCSVSEGTINTLIGNHNNMLHIYQDVTLKWATQLPHIPVAVRVGCLHDLKGVIVTLSDDGHLQCSYLGTDPSLFQAPNVQSRELNYDELDVEMKELQKIIKDVNKSQGVWPMTEREDDLNVSVVVSPNFDSVSQATDVEVGTDLVPSVTVKVTLQNRVILQKAKLSVYVQPPLELTCDQFTFEFMNRNPDGIPRVIQCKFRLPLKLICLPGQPSKTASHKITIDTNKSPVSLLSLFPGFASQSDDDQVNVMGFHFLGGARITVLASKTSQRYRIQSEQFEDLWLITNELILRLQEYFEKQGVKDFACSFSGSIPLQEYFELIDHHFELRINGEKLEELLSERAVQFRAIQRRLLARFKDKTPAPLQHLDTLLDGTYKQVIALADAVEENQGNLFQSFTRLKSATHLVILLIALWQKLSADQVAILEAAFLPLQEDTQELGWEETVDAAISHLLKTCLSKSSKEQALNLNSQLNIPKDTSQLKKHITLLCDRLSKGGRLCLSTDAAAPQTMVMPGGCTTIPESDLEERSVEQDSTELFTNHRHLTAETPRPEVSPLQGVSE

SEQ ID NO: 38605 - protein, 887 aa, Homo sapiens
MSLFKARDWWSTILGDKEEFDQGCLCLANVDNSGNGQDKIIVGSFMGYLRIFSPHPAKTGDGAQAEDLLLEVDLRDPVLQVEVGKFVSGTEMLHLAVLHSRKLCVYSVSGTLGNVEHGNQCQMKLMYEHNLQRTACNMTYGSFGGVKGRDLICIQSMDGMLMVFEQESYAFGRFLPGFLLPGPLAYSSRTDSFLTVSSCQQVESYKYQVLAFATDADKRQETEQQKLGSGKRLVVDWTLNIGEQALDICIVSFNQSASSVFVLGERNFFCLKDNGQIRFMKKLDWSPSCFLPYCSVSEGTINTLIGNHNNMLHIYQDVTLKWATQLPHIPVAVRVGCLHDLKGVIVTLSDDGHLQCSYLGTDPSLFQAPNVQSRELNYDELDVEMKELQKIIKDVNKSQGVWPMTEREDDLNVSVVVSPNFDSVSQATDVEVGTDLVPSVTVKVTLQNRVILQKAKLSVYVQPPLELTCDQFTFEFMTPDLTRTVSFSVYLKRSYTPSELEGNAVVSYSRPTVQNSLGIPRVIQCKFRLPLKLICLPGQPSKTASHKITIDTNKSPVSLLSLFPGFASQSDDDQVNVMGFHFLGGARITVLASKTSQRYRIQSEQFEDLWLITNELILRLQEYFEKQGVKDFACSFSGSIPLQEYFELIDHHFELRINGEKLEELLSERAVQFRAIQRRLLARFKDKTPAPLQHLDTLLDGTYKQVIALADAVEENQGNLFQSFTRLKSATHLVILLIALWQKLSADQVAILEAAFLPLQEDTQELGWEETVDAAISHLLKTCLSKSSKEQALNLNSQLNIPKDTSQLKKHITLLCDRLSKGGRLCLSTDAAAPQTMVMPGGCTTIPESDLEERSVEQDSTELFTNHRHLTAETPRPEVSPLQGVSE

SEQ ID NO: 38606 - protein, 310 aa, Homo sapiens
MGYLRIFSPHPAKTGDGAQAEDLLLEVDLRDPVLQVEVGKFVSGTEMLHLAVLHSRKLCVYSVSGTLGNVEHGNQCQMKLMYEHNLQRTACNMTYGSFGGVKGRDLICIQSMDGMLMVFEQESYAFGRFLPGFLLPGPLAYSSRTDSFLTVSSCQQVESYKYQVLAFATDADKRQETEQQKLGSGKRLVVDWTLNIGEQALDICIVSFNQSASSVFVLGERNFFCLKDNGQIRFMKKLDWSPSCFLPYCSVSEGTINTLIGNHNNMLHIYQDVTLKWATQLPHIPVAVRVGCLQFSLWKHLLPRSSTLEK

SEQ ID NO: 38607 - protein, 97 aa, Homo sapiens
MSLFKARDWWSTILGDKEEFDQGCLCLANVDNSGNGQDKIIVGSFMGYLRIFSPHPAKTGDGAQAEDLLLEVDLRDPVLQVEVGKFVSGTEMLHLAV

SEQ ID NO: 38608 - protein, 454 aa, Homo sapiens
  VARIANT 1: note = MOD_RES - Any amino acid
XDLVPSVTVKVTLQNRVILQKAKLSVYVQPPLELTCDQFTFEFMTPDLTRTVSFSVYLKRSYTPSELEGNAVVSYSRPTDRNPDGIPRVIQCKFRLPLKLICLPGQPSKTASHKITIDTNKSPVSLLSLFPGFASQSDDDQVNVMGFHFLGGARITVLASKTSQRYRIQSEQFEDLWLITNELILRLQEYFEKQGVKDFACSFSGSIPLQEYFELIDHHFELRINGEKLEELLSERAVQFRAIQRRLLARFKDKTPAPLQHLDTLLDGTYKQVIALADAVEENQGNLFQSFTRLKSATHLVILLIALWQKLSADQVAILEAAFLPLQEDTQELGWEETVDAAISHLLKTCLSKSSKEQALNLNSQLNIPKDTSQLKKHITLLCDRLSKGGRLCLSTDAAAPQTMVMPGGCTTIPESDLEERSVEQDSTELFTNHRHLTAETPRPGKRLDGLHKR

SEQ ID NO: 38609 - protein, 408 aa, Homo sapiens
MKLMYEHNLQRTACNMTYGSFGGVKGRDLICIQSMDGMLMVFEQESYAFGRFLPGFLLPGPLAYSSRTDSFLTVSSCQQVESYKYQVLAFATDADKRQETEQQKLGSGKRLVVDWTLNIGEQALDICIVSFNQSASSVFVLGERNFFCLKDNGQIRFMKKLDWSPSCFLPYCSVSEGTINTLIGNHNNMLHIYQDVTLKWATQLPHIPVAVRVGCLHDLKGVIVTLSDDGHLQCSYLGTDPSLFQAPNVQSRELNYDELDVEMKELQKIIKDVNKSQGVWPMTEREDDLNVSVVVSPNFDSVSQATDVEVGTDLVPSVTVKVTLQNRVILQKAKLSVYVQPPLELTCDQFTFEFMTPDLTRTVSFSVYLKRSIHHQNWKEMLLFLIPDQQIEILMAFRELSNVNLDFP

SEQ ID NO: 38610 - protein, 327 aa, Homo sapiens
MEGSNGFGIDSILSHRAGSPALPKGDPLLGDCRSPLELSPRSESSSDCSSPASPGRDCLETGTPRPGGASGPGLDSHLQPGQLSAPAQSRTVTSSFLIRDILADCKPLAACAPYSSSGQPAAPEPGGRLAAKAAEDFRDKLDKSGSNASSDSEYKVKEEGDREISSSRDSPPVRLKKPRKARTAFTDHQLAQLERSFERQKYLSVQDRMELAASLNLTDTQVKTWYQNRRTKWKRQTAVGLELLAEAGNYSALQRMFPSPYFYPQSLVSNLDPGAALYLYRGPSAPPPALQRPLVPRILIHGLQGASEPPPPLPPLAGVLPRAAQPR

SEQ ID NO: 38611 - protein, 327 aa, Homo sapiens; identical to SEQ ID NO: 38610

SEQ ID NO: 38612 - protein, 89 aa, Homo sapiens
MTTSQKHRDFVAEPMGEKPVGSLAGIGEVLGKKLEERGFDKAYVVLGQFLVLKKDEDLFREWLKDTCGANAKQSRDCFGCLREWCDAFL

SEQ ID NO: 38613 - protein, 89 aa, Homo sapiens; identical to SEQ ID NO: 38612

SEQ ID NO: 38614 - protein, 89 aa, Homo sapiens; identical to SEQ ID NO: 38612

SEQ ID NO: 38615 - protein, 28 aa, Homo sapiens
MTTSQKHRDFVAEPMGEKPVGSLAGIGE

SEQ ID NO: 38616 - protein, 89 aa, Homo sapiens; identical to SEQ ID NO: 38612

SEQ ID NO: 38617 - protein, 320 aa, Homo sapiens
MADEKTFRIGFIVLGLFLLALGTFLMSHDRPQVYGTFYAMGSVMVIGGIIWSMCQCYPKITFVPADSDFQGILSPKAMGLLENGLAAEMKSPSPQPPYVRLWEEAAYDQSLPDFSHIQMKVMSYSEDHRSLLAPEMGQPKLGTSDGGEGGPGDVQAWMEAAVVIHKGSDESEGERRLTQSWPGPLACPQGPAPLASFQDDLDMDSSEGSSPNASPHDREEACSPQQEPQGCRCPLDRFQDFALIDAPTLEDEPQEGQQWEIALPNNWQRYPRTKVEEKEASDTGGEEPEKEEEDLYYGLPDGAGDLLPDKELGFEPDTQG

SEQ ID NO: 38618 - protein, 254 aa, Homo sapiens
MQRPGEPGAARFGPPEGCADHRPHRYRSFMIEEILTEPPGPKGAAPAAAAAAAGELLKFGVQALLAARPFHSHLAVLKAEQAAVFKFPLAPLGCSGLSSALLAAGPGLPGAAGAPHLPLELQLRGKLEAAGPGEPGTKAKKGRRSRTVFTELQLMGLEKRFEKQKYLSTPDRIDLAESLGLSQLQVKTWYQNRRMKWKKIVLQGGGLESPTKPKGRPKKNSIPTSEQLTEQERAKDAEKPAEVPGEPSDRSRED

SEQ ID NO: 38619 - protein, 100 aa, Homo sapiens
MGLEKRFEKQKYLSTPDRIDLAESLGLSQLQVKTWYQNRRMKWKKIVLQGGGLESPTKPKGRPKKNSIPTSEQLTEQERAKDAEKPAEVPGEPSDRSRED

SEQ ID NO: 38620 - protein, 279 aa, Homo sapiens
MHCHAELRLSSPGQLKAARRRYKTFMIDEILSKETCDYFEKLSLYSVCPSLVVRPKPLHSCTGSPSLRAYPLLSVITRQPTVISHLVPATPGIAQALSCHQVTEAVSAEAPGGEALASSESETEQPTPRQKKPRRSRTIFTELQLMGLEKKFQKQKYLSTPDRLDLAQSLGLTQLQVKTWYQNRRMKWKKMVLKGGQEAPTKPKGRPKKNSIPTSEEIEAEEKMNSQAQGQEQLEPSQGQEELCEAQEPKARDVPLEMAEPPDPPQELPIPSSEPPPLS

SEQ ID NO: 38621 - protein, 628 aa, Homo sapiens
MEPPDAPAQARGAPRLLLLAVLLAAHPDAQAEVRLSVPPLVEVMRGKSVILDCTPTGTHDHYMLEWFLTDRSGARPRLASAEMQGSELQVTMHDTRGRSPPYQLDSQGRLVLAEAQVGDERDYVCVVRAGAAGTAEATARLNVFAKPEATEVSPNKGTLSVMEDSAQEIATCNSRNGNPAPKITWYRNGQRLEVPVEMNPEGYMTSRTVREASGLLSLTSTLYLRLRKDDRDASFHCAAHYSLPEGRHGRLDSPTFHLTLHYPTEHVQFWVGSPSTPAGWVREGDTVQLLCRGDGSPSPEYTLFRLQDEQEEVLNVNLEGNLTLEGVTRGQSGTYGCRVEDYDAADDVQLSKTLELRVAYLDPLELSEGKVLSLPLNSSAVVNCSVHGLPTPALRWTKDSTPLGDGPMLSLSSITFDSNGTYVCEASLPTVPVLSRTQNFTLLVQGSPELKTAEIEPKADGSWREGDEVTLICSARGHPDPKLSWSQLGGSPAEPIPGRQGWVSSSLTLKVTSALSRDGISCEASNPHGNKRHVFHFGTVSPQTSQAGVAVMAVAVSVGLLLLVVAVFYCVRRKGGPCCRQRREKGAPPPGEPGLSHSGSEQPEQTGLLMGGASGGARGGSGGFGDEC

SEQ ID NO: 38622 - protein, 588 aa, Homo sapiens
MEPPDAPAQARGAPRLLLLAVLLAAHPDAQAEVRLSVPPLVEVMRGKSVILDCTPTGTHDHYMLEWFLTDRSGARPRLASAEMQGSELQVTMHDTRGRSPPYQLDSQGRLVLAEAQVGDERDYVCVVRAGAAGTAEATARLNVFAKPEATEVSPNKGTLSVMEDSAQEIATCNSRNGNPAPKITWYRNGQRLEVPVEMNPEGYMTSRTVREASGLLSLTSTLYLRLRKDDRDASFHCAAHYSLPEGRHGRLDSPTFHLTLHYPTEHVQFWVGSPSTPAGWVREGDTVQLLCRGDGSPSPEYTLFRLQDEQEEVLNVNLEGNLTLEGVTRGQSGTYGCRVEDYDAADDVQLSKTLELRVAYLDPLELSEGKVLSLPLNSSAVVNCSVHGLPTPALRWTKDSTPLGDGPMLSLSSITFDSNGTYVCEASLPTVPVLSRTQNFTLLVQGSPELKTAEIEPKADGSWREGDEVTLICSARGHPDPKLSWSQLGGSPAEPIPGRQGWVSSSLTLKVTSALSRDGISCEASNPHGNKRHVFHFGTVSPQTSQAGVAVMAVAVSVGLLLLVVAVFYCVRRKGGPCCRQRREKGAP

SEQ ID NO: 38623 - protein, 106 aa, Homo sapiens
MMTLVPRARTRAGQDHYSHPCPRFSQVLLTEGIMTYCLTKNLSDVNILHRLLKNGNVRNTLLQSKVGLLTYYVKLYPGEVTLLTRPSIQMRLCCITGSVSRPRSQK

SEQ ID NO: 38624 - protein, 106 aa, Homo sapiens; identical to SEQ ID NO: 38623

SEQ ID NO: 38625 - protein, 381 aa, Homo sapiens
MERGMHLGAAAAGEDDLFLHKSLSASTSKRLEAAFRSTPPGMDLSLAPPPRERPASSSSSPLGCFEPADPEGAGLLLPPPGGGGGGSAGSGGGGGGGVGVPGLLVGSAGVGGDPSLSSLPAGAALCLKYGESASRGSVAESSGGEQSPDDDSDGRCELVLRAGVADPRASPGAGGGGAKAAEGCSNAHLHGGASVPPGGLGGGGGGGSSSGSSGGGGGSGSGSGGSSSSSSSSSKKSKEQKALRLNINARERRRMHDLNDALDELRAVIPYAHSPSVRKLSKIATLLLAKNYILMQAQALEEMRRLVAYLNQGQAISAASLPSSAAAAAAAAALHPALGAYEQAAGYPFSAGLPPAASCPEKCALFNSVSSSLCKQCTEKP

SEQ ID NO: 38626 - protein, 225 aa, Homo sapiens
MAELKSLSGDAYLALSHGYAAAAAGLAYGAAREPEAARGYGTPGPGGDLPAAPAPRAPAQAAESSGEQSGDEDDAFEQRRRRRGPGSAADGRRRPREQRSLRLSINARERRRMHDLNDALDGLRAVIPYAHSPSVRKLSKIATLLLAKNYILMQAQALDEMRRLVAFLNQGQGLAAPVNAAPLTPFGQATVCPFSAGAALGPCPDKCAAFSGTPSALCKHCHEKP

SEQ ID NO: 38627 - protein, 412 aa, Homo sapiens
MERIPSAQPPPACLPKAPGLEHGDLPGMYPAHMYQVYKSRRGIKRSEDSKETYKLPHRLIEKKRRDRINECIAQLKDLLPEHLKLTTLGHLEKAVVLELTLKHVKALTNLIDQQQQKIIALQSGLQAGELSGRNVETGQEMFCSGFQTCAREVLQYLAKHENTRDLKSSQLVTHLHRVVSELLQGGTSRKPSDPAPKVMDFKEKPSSPAKGSEGPGKNCVPVIQRTFAHSSGEQSGSDTDTDSGYGGESEKGDLRSEQPCFKSDHGRRFTMGERIGAIKQESEEPPTKKNRMQLSDDEGHFTSSDLISSPFLGPHPHQPPFCLPFYLIPPSATAYLPMLEKCWYPTSVPVLYPGLNASAAALSSFMNPDKISAPLLMPQRLPSPLPAHPSVDSSVLLQALKPIPPLNLETKD

SEQ ID NO: 38628 - protein, 125 aa, Homo sapiens
MPHSSDSSDSSFSRSPPPGKQDSSDDVRRVQRREKNRIAAQKSRQRQTQKADTLHLESEDLEKQNAALRKEIKQLTEELKYFTSVLNSHEPLCSVLAASTPSPPEVVYSAHAFHQPHVSSPRFQP

SEQ ID NO: 38629 - protein, 127 aa, Homo sapiens
MSQGLPAAGSVLQRSVAAPGNQPQPQPQQQSPEDDDRKVRRREKNRVAAQRSRKKQTQKADKLHEEYESLEQENTMLRREIGKLTEELKHLTEALKEHEKMCPLLLCPMNFVPVPPRPDPVAGCLPR

SEQ ID NO: 38630 - protein, 162 aa, Homo sapiens
MKETIMNQEKLAKLQAQVRIGGKGTARRKKKVVHRTATADDKKLQFSLKKLGVNNISGIEEVNMFTNQGTVIHFNNPKVQASLAANTFTITGHAETKQLTEMLPSILNQLGADSLTSLRRLAEALPKQSVDGKAPLATGEDDDDEVPDLVENFDEASKNEAN

SEQ ID NO: 38631 - protein, 206 aa, Homo sapiens
MRRTGAPAQADSRGRGRARGGCPGGEATLSQPPPRGGTRGQEPQMKETIMNQEKLAKLQAQVRIGGKGTARRKKKVVHRTATADDKKLQFSLKKLGVNNISGIEEVNMFTNQGTVIHFNNPKVQASLAANTFTITGHAETKQLTEMLPSILNQLGADSLTSLRRLAEALPKQSVDGKAPLATGEDDDDEVPDLVENFDEASKNEAN

SEQ ID NO: 38632 - protein, 385 aa, Homo sapiens
MAAALFVLLGFALLGTHGASGAAGFVQAPLSQQRWVGGSVELHCEAVGSPVPEIQWWFEGQGPNDTCSQLWDGARLDRVHIHATYHQHAASTISIDTLVEEDTGTYECRASNDPDRNHLTRAPRVKWVRAQAVVLVLEPGTVFTTVEDLGSKILLTCSLNDSATEVTGHRWLKGGVVLKEDALPGQKTEFKVDSDDQWGEYSCVFLPEPMGTANIQLHGPPRVKAVKSSEHINEGETAMLVCKSESVPPVTDWAWYKITDSEDKALMNGSESRFFVSSSQGRSELHIENLNMEADPGQYRCNGTSSKGSDQAIITLRVRSHLAALWPFLGIVAEVLVLVTIIFIYEKRRKPEDVLDDDDAGSAPLKSSGQHQNDKGKNVRQRNSS

SEQ ID NO: 38633 - protein, 205 aa, Homo sapiens
MKQSDASPQERVDSDDQWGEYSCVFLPEPMGTANIQLHGPPRVKAVKSSEHINEGETAMLVCKSESVPPVTDWAWYKITDSEDKALMNGSESRFFVSSSQGRSELHIENLNMEADPGQYRCNGTSSKGSDQAIITLRVRSHLAALWPFLGIVAEVLVLVTIIFIYEKRRKPEDVLDDDDAGSAPLKSSGQHQNDKGKNVRQRNSS

SEQ ID NO: 38634 - protein, 269 aa, Homo sapiens
MAAALFVLLGFALLGTHGASGAAGTVFTTVEDLGSKILLTCSLNDSATEVTGHRWLKGGVVLKEDALPGQKTEFKVDSDDQWGEYSCVFLPEPMGTANIQLHGPPRVKAVKSSEHINEGETAMLVCKSESVPPVTDWAWYKITDSEDKALMNGSESRFFVSSSQGRSELHIENLNMEADPGQYRCNGTSSKGSDQAIITLRVRSHLAALWPFLGIVAEVLVLVTIIFIYEKRRKPEDVLDDDDAGSAPLKSSGQHQNDKGKNVRQRNSS

SEQ ID NO: 38635 - protein, 176 aa, Homo sapiens
MGTANIQLHGPPRVKAVKSSEHINEGETAMLVCKSESVPPVTDWAWYKITDSEDKALMNGSESRFFVSSSQGRSELHIENLNMEADPGQYRCNGTSSKGSDQAIITLRVRSHLAALWPFLGIVAEVLVLVTIIFIYEKRRKPEDVLDDDDAGSAPLKSSGQHQNDKGKNVRQRNSS

SEQ ID NO: 38636 - protein, 994 aa, Homo sapiens
MRRRPPSRGGRGAARARETRRQPRHRSGRRMAEAISCTLNCSCQSFKPGKINHRQCDQCKHGWVAHALSKLRIPPMYPTSQVEIVQSNVVFDISSLMLYGTQAIPVRLKILLDRLFSVLKQDEVLQILHALDWTLQDYIRGYVLQDASGKVLDHWSIMTSEEEVATLQQFLRFGETKSIVELMAIQEKEEQSIIIPPSTANVDIRAFIESCSHRSSSLPTPVDKGNPSSIHPFENLISNMTFMLPFQFFNPLPPALIGSLPEQYMLEQGHDQSQDPKQEVHGPFPDSSFLTSSSTPFQVEKDQCLNCPDAITKKEDSTHLSDSSSYNIVTKFERTQLSPEAKVKPERNSLGTKKGRVFCTACEKTFYDKGTLKIHYNAVHLKIKHKCTIEGCNMVFSSLRSRNRHSANPNPRLHMPMNRNNRDKDLRNSLNLASSENYKCPGFTVTSPDCRPPPSYPGSGEDSKGQPAFPNIGQNGVLFPNLKTVQPVLPFYRSPATPAEVANTPGILPSLPLLSSSIPEQLISNEMPFDALPKKKSRKSSMPIKIEKEAVEIANEKRHNLSSDEDMPLQVVSEDEQEACSPQSHRVSEEQHVQSGGLGKPFPEGERPCHRESVIESSGAISQTPEQATHNSERETEQTPALIMVPREVEDGGHEHYFTPGMEPQVPFSDYMELQQRLLAGGLFSALSNRGMAFPCLEDSKELEHVGQHALARQIEENRFQCDICKKTFKNACSVKIHHKNMHVKEMHTCTVEGCNATFPSRRSRDRHSSNLNLHQKALSQEALESSEDHFRAAYLLKDVAKEAYQDVAFTQQASQTSVIFKGTSRMGSLVYPITQVHSASLESYNSGPLSEGTILDLSTTSSMKSESSSHSSWDSDGVSEEGTVLMEDSDGNCEGSSLVPGEDEYPICVLMEKADQSLASLPSGLPITCHLCQKTYSNKGTFRAHYKTVHLRQLHKCKVPGCNTMFSSVRSRNRHSQNPNLHKSLASSPSHLQ

SEQ ID NO: 38637 - protein, 987 aa, Homo sapiens
MRCRNMFFSFKASLCGCGAATAPSLTAISCTLNCSCQSFKPGKINHRQCDQCKHGWVAHALSKLRIPPMYPTSQVEIVQSNVVFDISSLMLYGTQAIPVRLKILLDRLFSVLKQDEVLQILHALDWTLQDYIRGYVLQDASGKVLDHWSIMTSEEEVATLQQFLRFGETKSIVELMAIQEKEEQSIIIPPSTANVDIRAFIESCSHRSSSLPTPVDKGNPSSIHPFENLISNMTFMLPFQFFNPLPPALIGSLPEQYMLEQGHDQSQDPKQEVHGPFPDSSFLTSSSTPFQVEKDQCLNCPDAITKKEDSTHLSDSSSYNIVTKFERTQLSPEAKVKPERNSLGTKKGRVFCTACEKTFYDKGTLKIHYNAVHLKIKHKCTIEGCNMVFSSLRSRNRHSANPNPRLHMPMNRNNRDKDLRNSLNLASSENYKCPGFTVTSPDCRPPPSYPGSGEDSKGQPAFPNIGQNGVLFPNLKTVQPVLPFYRSPATPAEVANTPGILPSLPLLSSSIPEQLISNEMPFDALPKKKSRKSSMPIKIEKEAVEIANEKRHNLSSDEDMPLQVVSEDEQEACSPQSHRVSEEQHVQSGGLGKPFPEGERPCHRESVIESSGAISQTPEQATHNSERETEQTPALIMVPREVEDGGHEHYFTPGMEPQVPFSDYMELQQRLLAGGLFSALSNRGMAFPCLEDSKELEHVGQHALARQIEENRFQCDICKKTFKNACSVKIHHKNMHVKEMHTCTVEGCNATFPSRRSRDRHSSNLNLHQKALSQEALESSEDHFRAAYLLKDVAKEAYQDVAFTQQASQTSVIFKGTSRMGSLVYPITQVHSASLESYNSGPLSEGTILDLSTTSSMKSESSSHSSWDSDGVSEEGTVLMEDSDGNCEGSSLVPGEDEYPICVLMEKADQSLASLPSGLPITCHLCQKTYSNKGTFRAHYKTVHLRQLHKCKVPGCNTMFSSVRSRNRHSQNPNLHKSLASSPSHLQ

SEQ ID NO: 38638 - protein, 903 aa, Homo sapiens
MAHLGPTPPPHSLNYKSEDRLSEQDWPAYFKVPCCGVDTSQIESEEAEVDVRERETQRDREPKRARDLTLRDSCTDNSMQFGTRTTTAEPGFMGTWQNADTNLLFRMSQQAIRCTLVNCTCECFQPGKINLRTCDQCKHGWVAHALDKLSTQHLYHPTQVEIVQSNVVFDISSLMLYGTQAVPVRLKILLDRLFSVLKQEEVLHILHGLGWTLRDYVRGYILQDAAGKVLDRWAIMSREEEIITLQQFLRFGETKSIVELMAIQEKEGQAVAVPSSKTDSDIRTFIESNNRTRSPSLLAHLENSNPSSIHHFENIPNSLAFLLPFQYINPVSAPLLGLPPNGLLLEQPGLRLREPSLSTQNEYNESSESEVSPTPYKNDQTPNRNALTSITNVEPKTEPACVSPIQNSAPVSDLTKTEHPKSSFRIHRMRRMGSASRKGRVFCNACGKTFYDKGTLKIHYNAVHLKIKHRCTIEGCNMVFSSLRSRNRHSANPNPRLHMPMLRNNRDKDLIRATSGAATPVIASTKSNLALTSPGRPPMGFTTPPLDPVLQNPLPSQLVFSGLKTVQPVPPFYRSLLTPGEMVSPPTSLPTSPIIPTSGTIEQHPPPPSEPVVPAVMMATHEPSADLAPKKKPRKSSMPVKIEKEIIDTADEFDDEDDDPNDGGAVVNDMSHDNHCHSQEEMSPGMSVKDFSKHNRTRCISRTEIRRADSMTSEDQEPERDYENESESSEPKLGEESMEGDEHIHSEVSEKVLMNSERPDENHSEPSHQDVIKVKEEFTDPTYDMFYMSQYGLYNGGGASMAALHESFTSSLNYGSPQKFSPEGDLCSSPDPKICYVCKKSFKSSYSVKLHYRNVHLKEMHVCTVAGCNAAFPSRRSRDRYWEKSNEQNGLLVSWGETLSSLK

SEQ ID NO: 38639 - protein, 1032 aa, Homo sapiens
MAHLGPTPPPHSLNYKSEDRLSEQDWPAYFKVPCCGVDTSQIEAIRCTLVNCTCECFQPGKINLRTCDQCKHGWVAHALDKLSTQHLYHPTQVEIVQSNVVFDISSLMLYGTQAVPVRLKILLDRLFSVLKQEEVLHILHGLGWTLRDYVRGYILQDAAGKVLDRWAIMSREEEIITLQQFLRFGETKSIVELMAIQEKEGQAVAVPSSKTDSDIRTFIESNNRTRSPSLLAHLENSNPSSIHHFENIPNSLAFLLPFQYINPVSAPLLGLPPNGLLLEQPGLRLREPSLSTQNEYNESSESEVSPTPYKNDQTPNRNALTSITNVEPKTEPACVSPIQNSAPVSDLTKTEHPKSSFRIHRMRRMGSASRKGRVFCNACGKTFYDKGTLKIHYNAVHLKIKHRCTIEGCNMVFSSLRSRNRHSANPNPRLHMPMLRNNRDKDLIRATSGAATPVIASTKSNLALTSPGRPPMGFTTPPLDPVLQNPLPSQLVFSGLKTVQPVPPFYRSLLTPGEMVSPPTSLPTSPIIPTSGTIEQHPPPPSEPVVPAVMMATHEPSADLAPKKKPRKSSMPVKIEKEIIDTADEFDDEDDDPNDGGAVVNDMSHDNHCHSQEEMSPGMSVKDFSKHNRTRCISRTEIRRADSMTSEDQEPERDYENESESSEPKLGEESMEGDEHIHSEVSEKVLMNSERPDENHSEPSHQDVIKVKEEFTDPTYDMFYMSQYGLYNGGGASMAALHESFTSSLNYGSPQKFSPEGDLCSSPDPKICYVCKKSFKSSYSVKLHYRNVHLKEMHVCTVAGCNAAFPSRRSRDRHSANINLHRKLLTKELDDMGLDSSQPSLSKDLRDEFLVKIYGAQHPMGLDVREDASSPAGTEDSHLNGYGRGMAEDYMVLDLSTTSSLQSSSSIHSSRESDAGSDEGILLDDIDGASDSGESAHKAEAPALPGSLGAEVSGSLMFSSLSGSNGGIMCNICHKMYSNKGTLRVHYKTVHLREMHKCKVPGCNMMFSSVRSRNRHSQNPNLHKNIPFTSVD

SEQ ID NO: 38640 - protein, 1099 aa, Homo sapiens
MAHLGPTPPPHSLNYKSEDRLSEQDWPAYFKVPCCGVDTSQIESEEAEVDVRERETQRDREPKRARDLTLRDSCTDNSMQFGTRTTTAEPGFMGTWQNADTNLLFRMSQQAIRCTLVNCTCECFQPGKINLRTCDQCKHGWVAHALDKLSTQHLYHPTQVEIVQSNVVFDISSLMLYGTQAVPVRLKILLDRLFSVLKQEEVLHILHGLGWTLRDYVRGYILQDAAGKVLDRWAIMSREEEIITLQQFLRFGETKSIVELMAIQEKEGQAVAVPSSKTDSDIRTFIESNNRTRSPSLLAHLENSNPSSIHHFENIPNSLAFLLPFQYINPVSAPLLGLPPNGLLLEQPGLRLREPSLSTQNEYNESSESEVSPTPYKNDQTPNRNALTSITNVEPKTEPACVSPIQNSAPVSDLTKTEHPKSSFRIHRMRRMGSASRKGRVFCNACGKTFYDKGTLKIHYNAVHLKIKHRCTIEGCNMVFSSLRSRNRHSANPNPRLHMPMLRNNRDKDLIRATSGAATPVIASTKSNLALTSPGRPPMGFTTPPLDPVLQNPLPSQLVFSGLKTVQPVPPFYRSLLTPGEMVSPPTSLPTSPIIPTSGTIEQHPPPPSEPVVPAVMMATHEPSADLAPKKKPRKSSMPVKIEKEIIDTADEFDDEDDDPNDGGAVVNDMSHDNHCHSQEEMSPGMSVKDFSKHNRTRCISRTEIRRADSMTSEDQEPERDYENESESSEPKLGEESMEGDEHIHSEVSEKVLMNSERPDENHSEPSHQDVIKVKEEFTDPTYDMFYMSQYGLYNGGGASMAALHESFTSSLNYGSPQKFSPEGDLCSSPDPKICYVCKKSFKSSYSVKLHYRNVHLKEMHVCTVAGCNAAFPSRRSRDRHSANINLHRKLLTKELDDMGLDSSQPSLSKDLRDEFLVKIYGAQHPMGLDVREDASSPAGTEDSHLNGYGRGMAEDYMVLDLSTTSSLQSSSSIHSSRESDAGSDEGILLDDIDGASDSGESAHKAEAPALPGSLGAEVSGSLMFSSLSGSNGGIMCNICHKMYSNKGTLRVHYKTVHLREMHKCKVPGCNMMFSSVRSRNRHSQNPNLHKNIPFTSVD

SEQ ID NO: 38641 - protein, 327 aa, Homo sapiens
PSEPVVPAVMMATHEPSADLAPKKKPRKSSMPVKIEKEIIDTADEFDDEDDDPNDGGAVVNDMSHDNHCHSQEEMSPGMSVKDFSKHNRTRCISRTEIRRADSMTSEDQEPERDYENESESSEPKLGEESMEGDEHIHSEVSEKVLMNSERPDENHSEPSHQDVIKVKEEFTDPTYDMFYMSQYGLYNGGGASMAALHESFTSSLNYGSPQKFSPEGDLCSSPDPKICYVCKKSFKSSYSVKLHYRNVHLKEMHVCTVAGCNAAFPSRRSRDRNRNLRMERTIGPGHRDSLHLRRGNSNRPGTCCLHTGDSLEESVIVRISCKRLES

SEQ ID NO: 38642 - protein, 860 aa, Homo sapiens
SEEAEVDVRERETQRDREPKRARDLTLRDSCTDNSMQFGTRTTTAEPGFMGTWQNADTNLLFRMSQQAIRCTLVNCTCECFQPGKINLRTCDQCKHGWVAHALDKLSTQHLYHPTQVEIVQSNVVFDISSLMLYGTQAVPVRLKILLDRLFSVLKQEEVLHILHGLGWTLRDYVRGYILQDAAGKVLDRWAIMSREEEIITLQQFLRFGETKSIVELMAIQEKEGQAVAVPSSKTDSDIRTFIESNNRTRSPSLLAHLENSNPSSIHHFENIPNSLAFLLPFQYINPVSAPLLGLPPNGLLLEQPGLRLREPSLSTQNEYNESSESEVSPTPYKNDQTPNRNALTSITNVEPKTEPACVSPIQNSAPVSDLTKTEHPKSSFRIHRMRRMGSASRKGRVFCNACGKTFYDKGTLKIHYNAVHLKIKHRCTIEGCNMVFSSLRSRNRHSANPNPRLHMPMLRNNRDKDLIRATSGAATPVIASTKSNLALTSPGRPPMGFTTPPLDPVLQNPLPSQLVFSGLKTVQPVPPFYRSLLTPGEMVSPPTSLPTSPIIPTSGTIEQHPPPPSEPVVPAVMMATHEPSADLAPKKKPRKSSMPVKIEKEIIDTADEFDDEDDDPNDGGAVVNDMSHDNHCHSQEEMSPGMSVKDFSKHNRTRCISRTEIRRADSMTSEDQEPERDYENESESSEPKLGEESMEGDEHIHSEVSEKVLMNSERPDENHSEPSHQDVIKVKEEFTDPTYDMFYMSQYGLYNGGGASMAALHESFTSSLNYGSPQKFSPEGDLCSSPDPKICYVCKKSFKSSYSVKLHYRNVHLKEMHVCTVAGCNAAFPSRRSRDRNRNLRMERTIGPGHRDSLHLLPT

SEQ ID NO: 38643 - protein, 401 aa, Homo sapiens
MAHLGPTPPPHSLNYKSEDRLSEQDWPAYFKVPCCGVDTSQIESEEAEVDVRERETQRDREPKRARDLTLRDSCTDNSMQFGTRTTTAEPGFMGTWQNADTNLLFRMSQQVPLACTGRVLGADFCPNLEEPYHRLEVQAIRCTLVNCTCECFQPGKINLRTCDQCKHGWVAHALDKLSTQHLYHPTQVEIVQSNVVFDISSLMLYGTQAVPVRLKILLDRLFSVLKQEEVLHILHGLGWTLRDYVRGYILQDAAGKVLDRWAIMSREEEIITLQQFLRFGETKSIVELMAIQEKEGQAVAVPSSKTDSDIRTFIESNNRTRSPSLLAHLENSNPSSIHHFENIPNSLAFLLPFQYINPVSAPLLGLPPNGLLLEQPGLRLREPSLSTQNEYNESSESEVSP

SEQ ID NO: 38644 - protein, 101 aa, Homo sapiens
MCRLLVPLACTGRVLGADFCPNLEEPYHRLEVQAIRCTLVNCTCECFQPGKINLRTCDQCKHGWVAHALDKLSTQHLYHPTQVEIVQSNVVFDISSLMLYG

SEQ ID NO: 38645 - protein, 410 aa, Homo sapiens
MAHLGPTPPPHSLNYKSEDRLSEQDWPAYFKVPCCGVDTSQIESEEAEVDVRERETQRDREPKRARDLTLRDSCTDNSMQFGTRTTTAEPGFMGTWQNADTNLLFRMSQQAGLKLLTSGDPPVLDFQSAGITGVSHCTRLKVAMISKAIRCTLVNCTCECFQPGKINLRTCDQCKHGWVAHALDKLSTQHLYHPTQVEIVQSNVVFDISSLMLYGTQAVPVRLKILLDRLFSVLKQEEVLHILHGLGWTLRDYVRGYILQDAAGKVLDRWAIMSREEEIITLQQFLRFGETKSIVELMAIQEKEGQAVAVPSSKTDSDIRTFIESNNRTRSPSLLAHLENSNPSSIHHFENIPNSLAFLLPFQYINPVSAPLLGLPPNGLLLEQPGLRLREPSLSTQNEYNESSESEVSP

SEQ ID NO: 38646 - protein, 903 aa, Homo sapiens; identical to SEQ ID NO: 38638

SEQ ID NO: 38647 - protein, 903 aa, Homo sapiens
MAHLGPTPPPHSLNYKSEDRLSEQDWPAYFKVPCCGVDTSQIESEEAEVDVRERETQRDREPKRARDLTLRDSCTDNSMQFGTRTTTAEPGFMGTWQNADTNLLFRMSQQAIRCTLVNCTCECFQPGKINLRTCDQCKHGWVAHALDKLSTQHLYHPTQVEIVQSNVVFDISSLMLYGTQAVPVRLKILLDRLFSVLKQEEVLHILHGLGWTLRDYVRGYILQDAAGKVLDRWAIMSREEEIITLQQFLRFGETKSIVELMAIQEKEGQAVAVPSSKTDSDIRTFIESNNRTRSPSLLAHLENSNPSSIHHFENIPNSLAFLLPFQYINPVSAPLLGLPPNGLLLEQPGLRLREPSLSTQNEYNESSESEVSPTPYKNDQTPNRNALTSITNVEPKTEPACVSPIQNSAPVSDLTKTEHPKSSFRIHRMRRMGSASRKGRVFCNACGKTFYDKGTLKIHYNAVHLKIKHRCTIEGCNMVFSSLRSRNRHSANPNPRLHMPMLRNNRDKDLIRATSGAATPVIASTKSNLALTSPGRPPMGFTTPPLDPVLQNPLPSQLVFSGLKTVQPVPPFYRSLLTPGEMVSPPTSLPTSPIIPTSGTIEQHPPPPSEPVVPAVMMATHEPSADLAPKKKPRKSSMPVKIEKEIIDTADEFDDEDDDPNDGGAVVNDMSHDNHCHSQEEMSPGMSVKDFSKHNRTRCISRTEIRRADSMTSEDQEPERDYENESESSEPKLGEESMEGDEHIHSEVSEKVLMNSERPDENHSEPSHQDVIKVKEEFTDPTYDMFYMSQYGLYNGGGASMAALHESFTSSLNYGSPQKFSPEGDLCSSPDPKICYVCKKSFKSSYSVKLHYRNVHLKEMHVCTVAGCNAAFPSRRSRDRNRNLRMERTIGPGHRDSLHLRST

SEQ ID NO: 38648 - protein, 649 aa, Homo sapiens
MLYGTQAVPVRLKILLDRLFSVLKQEEVLHILHGLGWTLRDYVRGYILQDAAGKVLDRWAIMSREEEIITLQQFLRFGETKSIVELMAIQEKEGQAVAVPSSKTDSDIRTFIESNNRTRSPSLLAHLENSNPSSIHHFENIPNSLAFLLPFQYINPVSAPLLGLPPNGLLLEQPGLRLREPSLSTQNEYNESSESEVSPTPYKNDQTPNRNALTSITNVEPKTEPACVSPIQNSAPVSDLTKTEHPKSSFRIHRMRRMGSASRKGRVFCNACGKTFYDKGTLKIHYNAVHLKIKHRCTIEGCNMVFSSLRSRNRHSANPNPRLHMPMLRNNRDKDLIRATSGAATPVIASTKSNLALTSPGRPPMGFTTPPLDPVLQNPLPSQLVFSGLKTVQPVPPFYRSLLTPGEMVSPPTSLPTSPIIPTSGTIEQHPPPPSEPVVPAVMMATHEPSADLAPKKKPRKSSMPVKIEKEIIDTADEFDDEDDDPNDGGAVVNDMSHDNHCHSQEEMSPGMSVKDFSKHNRTRCISRTEIRRADSMTSEDQEPERDYENESESSEPKLGEESMEGDEHIHSEVSEKVLMNSERPDENHSEPSHQDVIKVKEEFTDPTYDMFYMSQYGLYNGGGASMAALHESFTSSLNYGSPQVLPRR

SEQ ID NO: 38649 - protein, 1004 aa, Homo sapiens
MTDDVKEPSRFSLLLAIRCTLVNCTCECFQPGKINLRTCDQCKHGWVAHALDKLSTQHLYHPTQVEIVQSNVVFDISSLMLYGTQAVPVRLKILLDRLFSVLKQEEVLHILHGLGWTLRDYVRGYILQDAAGKVLDRWAIMSREEEIITLQQFLRFGETKSIVELMAIQEKEGQAVAVPSSKTDSDIRTFIESNNRTRSPSLLAHLENSNPSSIHHFENIPNSLAFLLPFQYINPVSAPLLGLPPNGLLLEQPGLRLREPSLSTQNEYNESSESEVSPTPYKNDQTPNRNALTSITNVEPKTEPACVSPIQNSAPVSDLTKTEHPKSSFRIHRMRRMGSASRKGRVFCNACGKTFYDKGTLKIHYNAVHLKIKHRCTIEGCNMVFSSLRSRNRHSANPNPRLHMPMLRNNRDKDLIRATSGAATPVIASTKSNLALTSPGRPPMGFTTPPLDPVLQNPLPSQLVFSGLKTVQPVPPFYRSLLTPGEMVSPPTSLPTSPIIPTSGTIEQHPPPPSEPVVPAVMMATHEPSADLAPKKKPRKSSMPVKIEKEIIDTADEFDDEDDDPNDGGAVVNDMSHDNHCHSQEEMSPGMSVKDFSKHNRTRCISRTEIRRADSMTSEDQEPERDYENESESSEPKLGEESMEGDEHIHSEVSEKVLMNSERPDENHSEPSHQDVIKVKEEFTDPTYDMFYMSQYGLYNGGGASMAALHESFTSSLNYGSPQKFSPEGDLCSSPDPKICYVCKKSFKSSYSVKLHYRNVHLKEMHVCTVAGCNAAFPSRRSRDRHSANINLHRKLLTKELDDMGLDSSQPSLSKDLRDEFLVKIYGAQHPMGLDVREDASSPAGTEDSHLNGYGRGMAEDYMVLDLSTTSSLQSSSSIHSSRESDAGSDEGILLDDIDGASDSGESAHKAEAPALPGSLGAEVSGSLMFSSLSGSNGGIMCNICHKMYSNKGTLRVHYKTVHLREMHKCKVPGCNMMFSSVRSRNRHSQNPNLHKNIPFTSVD

SEQ ID NO: 38650 - protein, 3926 aa, Homo sapiens
MGNEVSLEGGAGDGPLPPGGAGPGPGPGPGPGAGKPPSAPAGGGQLPAAGAARSTAVPPVPGPGPGPGPGPGPGSTSRRLDPKEPLGNQRAASPTPKQASATTPGHESPRETRAQGPAGQEADGPRRTLQVDSRTQRSGRSPSVSPDRGSTPTSPYSVPQIAPLPSSTLCPICKTSDLTSTPSQPNFNTCTQCHNKVCNQCGFNPNPHLTQVKEWLCLNCQMQRALGMDMTTAPRSKSQQQLHSPALSPAHSPAKQPLGKPDQERSRGPGGPQPGSRQAETARATSVPGPAQAAAPPEVGRVSPQPPQPTKPSTAEPRPPAGEAPAKSATAVPAGLGATEQTQEGLTGKLFGLGASLLTQASTLMSVQPEADTQGQPAPSKGTPKIVFNDASKEAGPKPLGSGPGPGPAPGAKTEPGARMGPGSGPGALPKTGGTTSPKHGRAEHQAASKAAAKPKTMPKERAICPLCQAELNVGSKSPANYNTCTTCRLQVCNLCGFNPTPHLVEKTEWLCLNCQTKRLLEGSLGEPTPLPPPTSQQPPVGAPHRASGTSPLKQKGPQGLGQPSGPLPAKASPLSTKASPLPSKASPQAKPLRASEPSKTPSSVQEKKTRVPTKAEPMPKPPPETTPTPATPKVKSGVRRAEPATPVVKAVPEAPKGGEAEDLVGKPYSQDASRSPQSLSDTGYSSDGISSSQSEITGVVQQEVEQLDSAGVTGPHPPSPSEIHKVGSSMRPLLQAQGLAPSERSKPLSSGTGEEQKQRPHSLSITPEAFDSDEELEDILEEDEDSAEWRRRREQQDTAESSDDFGSQLRHDYVEDSSEGGLSPLPPQPPARAAELTDEDFMRRQILEMSAEEDNLEEDDTATSGRGLAKHGTQKGGPRPRPEPSQEPAALPKRRLPHNATTGYEELLPEGGSAEATDGSGTLQGGLRRFKTIELNSTGSYGHELDLGQGPDPSLDREPELEMESLTGSPEDRSRGEHSSTLPASTPSYTSGTSPTSLSSLEEDSDSSPSRRQRLEEAKQQRKARHRSHGPLLPTIEDSSEEEELREEEELLREQEKMREVEQQRIRSTARKTRRDKEELRAQRRRERSKTPPSNLSPIEDASPTEELRQAAEMEELHRSSCSEYSPSPSLDSEAEALDGGPSRLYKSGSEYNLPTFMSLYSPTETPSGSSTTPSSGRPLKSAEEAYEEMMRKAELLQRQQGQAAGARGPHGGPSQPTGPRGLGSFEYQDTTDREYGQAAQPAAEGTPASLGAAVYEEILQTSQSIVRMRQASSRDLAFAEDKKKEKQFLNAESAYMDPMKQNGGPLTPGTSPTQLAAPVSFSTPTSSDSSGGRVIPDVRVTQHFAKETQDPLKLHSSPASPSSASKEIGMPFSQGPGTPATTAVAPCPAGLPRGYMTPASPAGSERSPSPSSTAHSYGHSPTTANYGSQTEDLPQAPSGLAAAGRAAREKPLSASDGEGGTPQPSRAYSYFASSSPPLSPSSPSESPTFSPGKMGPRATAEFSTQTPSPAPASDMPRSPGAPTPSPMVAQGTQTPHRPSTPRLVWQESSQEAPFMVITLASDASSQTRMVHASASTSPLCSPTETQPTTHGYSQTTPPSVSQLPPEPPGPPGFPRVPSAGADGPLALYGWGALPAENISLCRISSVPGTSRVEPGPRTPGTAVVDLRTAVKPTPIILTDQGMDLTSLAVEARKYGLALDPIPGRQSTAVQPLVINLNAQEHTFLATATTVSITMASSVFMAQQKQPVVYGDPYQSRLDFGQGGGSPVCLAQVKQVEQAVQTAPYRSGPRGRPREAKFARYNLPNQVAPLARRDVLITQMGTAQSIGLKPGPVPEPGAEPHRATPAELRSHALPGARKPHTVVVQMGEGTAGTVTTLLPEEPAGALDLTGMRPESQLACCDMVYKLPFGSSCTGTFHPAPSVPEKSMADAAPPGQSSSPFYGPRDPEPPEPPTYRAQGVVGPGPHEEQRPYPQGLPGRLYSSMSDTNLAEAGLNYHAQRIGQLFQGPGRDSAMDLSSLKHSYSLGFADGRYLGQGLQYGSVTDLRHPTDLLAHPLPMRRYSSVSNIYSDHRYGPRGDAVGFQEASLAQYSATTAREISRMCAALNSMDQYGGRHGSGGGGPDLVQYQPQHGPGLSAPQSLVPLRPGLLGNPTFPEGHPSPGNLAQYGPAAGQGTAVRQLLPSTATVRAADGMIYSTINTPIAATLPITTQPASVLRPMVRGGMYRPYASGGITAVPLTSLTRVPMIAPRVPLGPTGLYRYPAPSRFPIASSVPPAEGPVYLGKPAAAKAPGAGGPSRPEMPVGAAREEPLPTTTPAAIKEAAGAPAPAPLAGQKPPADAAPGGGSGALSRPGFEKEEASQEERQRKQQEQLLQLERERVELEKLRQLRLQEELERERVELQRHREEEQLLVQRELQELQTIKHHVLQQQQEERQAQFALQREQLAQQRLQLEQIQQLQQQLQQQLEEQKQRQKAPFPAACEAPGRGPPLAAAELAQNGQYWPPLTHAAFIAMAGPEGLGQPREPVLHRGLPSSASDMSLQTEEQWEASRSGIKKRHSMPRLRDACELESGTEPCVVRRIADSSVQTDDEDGESRYLLSRRRRARRSADCSVQTDDEDSAEWEQPVRRRRSRLPRHSDSGSDSKHDATASSSSAAATVRAMSSVGIQTISDCSVQTEPDQLPRVSPAIHITAATDPKVEIVRYISAPEKTGRGESLACQTEPDGQAQGVAGPQLVGPTAISPYLPGIQIVTPGPLGRFEKKKPDPLEIGYQAHLPPESLSQLVSRQPPKSPQVLYSPVSPLSPHRLLDTSFASSERLNKAHVSPQKHFTADSALRQQTLPRPMKTLQRSLSDPKPLSPTAEESAKERFSLYQHQGGLGSQVSALPPNSLVRKVKRTLPSPPPEEAHLPLAGQASPQLYAASLLQRGLTGPTTVPATKASLLRELDRDLRLVEHESTKLRKKQAELDEEEKEIDAKLKYLELGITQRKESLAKDRGGRDYPPLRGLGEHRDYLSDSELNQLRLQGCTTPAGQFVDFPATAAAPATPSGPTAFQQPRFQPPAPQYSAGSGGPTQNGFPAHQAPTYPGPSTYPAPAFPPGASYPAEPGLPNQQAFRPTGHYAGQTPMPTTQSTLFPVPADSRAPLQKPRQTSLADLEQKVPTNYEVIASPVVPMSSAPSETSYSGPAVSSGYEQGKVPEVPRAGDRGSVSQSPAPTYPSDSHYTSLEQNVPRNYVMIDDISELTKDSTSTAPDSQRLEPLGPGSSGRPGKEPGEPGVLDGPTLPCCYARGEEESEEDSYDPRGKGGHLRSMESNGRPASTHYYGDSDYRHGARVEKYGPGPMGPKHPSKSLAPAAISSKRSKHRKQGMEQKISKFSPIEEAKDVESDLASYPPPAVSSSLVSRGRKFQDEITYGLKKNVYEQQKYYGMSSRDAVEDDRIYGGSSRSRAPSAYSGEKLSSHDFSGWGKGYEREREAVERLQKAGPKPSSLSMAHSRVRPPMRSQASEEESPVSPLGRPRPAGGPLPPGGDTCPQFCSSHSMPDVQEHVKDGPRAHAYKREEGYILDDSHCVVSDSEAYHLGQEETDWFDKPRDARSDRFRHHGGHAVSSSSQKRGPARHSYHDYDEPPEEGLWPHDEGGPGRHASAKEHRHGDHGRHSGRHTGEEPGRRAAKPHARDLGRHEARPHSQPSSAPAMPKKGQPGYPSSAEYSQPSRASSAYHHASDSKKGSRQAHSGPAALQSKAEPQAQPQLQGRQAAPGPQQSQSPSSRQIPSGAASRQPQTQQQQQGLGLQPPQQALTQARLQQQSQPTTRGSAPAASQPAGKPQPGPSTATGPQPAGPPRAEQTNGSKGTAKAPQQGRAPQAQPAPGPGPAGVKAGARPGGTPGAPAGQPGADGESVFSKILPGGAAEQAGKLTEAVSAFGKKFSSFW

SEQ ID NO: 38651 - protein, 233 aa, Homo sapiens
MEPTAPSLTEEDLTEVKKDALENLRVYLCEKIIAERHFDHLRAKKILSREDTEEISCRTSSRKRAGKLLDYLQENPKGLDTLVESIRREKTQNFLIQKITDEVLKLRNIKLEHLKGLKCSSCEPFPDGATNNLSRSNSDESNFSEKLRASTVMYHPEGESSTTPFFSTNSSLNLPVLEVGRTENTIFSSTTLPRPGDPGAPPLPPDLQLEEEGTCANSSEMFLPLRSRTVSRQ

SEQ ID NO: 38652 - protein, 233 aa, Homo sapiens; identical to SEQ ID NO: 38651

SEQ ID NO: 38653 - protein, 156 aa, Homo sapiens
MEPTAPSLTEEDLTEVKKDALENLRVYLCEKIIAERHFDHLRAKKILSREDTEEISCRTSSRKRAGKLLDYLQENPKGLDTLVESIRREKTQNFLIQKITDEVLKLRNIKLEHLKDGATNNLSRSNSDESNFSEKLRASTVMYHPEGESSTTPFFY

SEQ ID NO: 38654 - protein, 835 aa, Homo sapiens
MSRRKQGKPQHLSKREFSPEPLEAILTDDEPDHGPLGAPEGDHDLLTCGQCQMNFPLGDILIFIEHKRKQCNGSLCLEKAVDKPPSPSPIEMKKASNPVEVGIQVTPEDDDCLSTSSRGICPKQEHIADKLLHWRGLSSPRSAHGALIPTPGMSAEYAPQGICKDEPSSYTCTTCKQPFTSAWFLLQHAQNTHGLRIYLESEHGSPLTPRVGIPSGLGAECPSQPPLHGIHIADNNPFNLLRIPGSVSREASGLAEGRFPPTPPLFSPPPRHHLDPHRIERLGAEEMALATHHPSAFDRVLRLNPMAMEPPAMDFSRRLRELAGNTSSPPLSPGRPSPMQRLLQPFQPGSKPPFLATPPLPPLQSAPPPSQPPVKSKSCEFCGKTFKFQSNLVVHRRSHTGEKPYKCNLCDHACTQASKLKRHMKTHMHKSSPMTVKSDDGLSTASSPEPGTSDLVGSASSALKSVVAKFKSENDPNLIPENGDEEEEEDDEEEEEEEEEEEEELTESERVDYGFGLSLEAARHHENSSRGAVVGVGDESRALPDVMQGMVLSSMQHFSEAFHQVLGEKHKRGHLAEAEGHRDTCDEDSVAGESDRIDDGTVNGRGCSPGESASGGLSKKLLLGSPSSLSPFSKRIKLEKEFDLPPAAMPNTENVYSQWLAGYAASRQLKDPFLSFGDSRQSPFASSSEHSSENGSLRFSTPPGELDGGISGRSGTGSGGSTPHISGPGPGRPSSKEGRRSDTCEYCGKVFKNCSNLTVHRRSHTGERPYKCELCNYACAQSSKLTRHMKTHGQVGKDVYKCEICKMPFSVYSTLEKHMKKWHSDRVLNNDIKTE

SEQ ID NO: 38655 - protein, 773 aa, Homo sapiens
MSRRKQGKPQHLSKREFSPEPLEAILTDDEPDHGPLGAPEGDHDLLTCGQCQMNFPLGDILIFIEHKRKQCNGSLCLEKAVDKPPSPSPIEMKKASNPVEVGIQVTPEDDDCLSTSSRGICPKQEHIADKLLHWRGLSSPRSAHGALIPTPGMSAEYAPQGICKDEPSSYTCTTCKQPFTSAWFLLQHAQNTHGLRIYLESEHGSPLTPRVGIPSGLGAECPSQPPLHGIHIADNNPFNLLRIPGSVSREASGLAEGRFPPTPPLFSPPPRHHLDPHRIERLGAEEMALATHHPSAFDRVLRLNPMAMEPPAMDFSRRLRELAGNTSSPPLSPGRPSPMQRLLQPFQPGSKPPFLATPPLPPLQSAPPPSQPPVKSKSCEFCGKTFKFQSNLVVHRRSHTGEKPYKCNLCDHACTQASKLKRHMKTHMHKSSPMTVKSDDGLSTASSPEPGTSDLVGSASSALKSVVAKFKSENDPNLIPENGDEEEEEDDEEEEEEEEEEEEELTESERVDYGFGLSLEAARHHENSSRGAVVGVGDESRALPDVMQGMVLSSMQHFSEAFHQVLGEKHKRGHLAEAEGHRDTCDEDSVAGESDRIDDGTVNGRGCSPGESASGGLSKKLLLGSPSSLSPFSKRIKLEKEFDLPPAAMPNTENVYSQWLAGYAASRQLKDPFLSFGDSRQSPFASSSEHSSENGSLRFSTPPGELDGGISGRSGTGSGGSTPHISGPGPGRPSSKEGRRSDTCSSHTPIRRSTQRAQDVWQFSDGSSRALKF

SEQ ID NO: 38656 - protein, 801 aa, Homo sapiens
MSRRKQGKPQHLSKREFSPEPLEAILTDDEPDHGPLGAPEGDHDLLTCGQCQMNFPLGDILIFIEHKRKQCNGSLCLEKAVDKPPSPSPIEMKKASNPVEVGIQVTPEDDDCLSTSSRGICPKQEHIAGKDEPSSYTCTTCKQPFTSAWFLLQHAQNTHGLRIYLESEHGSPLTPRVGIPSGLGAECPSQPPLHGIHIADNNPFNLLRIPGSVSREASGLAEGRFPPTPPLFSPPPRHHLDPHRIERLGAEEMALATHHPSAFDRVLRLNPMAMEPPAMDFSRRLRELAGNTSSPPLSPGRPSPMQRLLQPFQPGSKPPFLATPPLPPLQSAPPPSQPPVKSKSCEFCGKTFKFQSNLVVHRRSHTGEKPYKCNLCDHACTQASKLKRHMKTHMHKSSPMTVKSDDGLSTASSPEPGTSDLVGSASSALKSVVAKFKSENDPNLIPENGDEEEEEDDEEEEEEEEEEEEELTESERVDYGFGLSLEAARHHENSSRGAVVGVGDESRALPDVMQGMVLSSMQHFSEAFHQVLGEKHKRGHLAEAEGHRDTCDEDSVAGESDRIDDGTVNGRGCSPGESASGGLSKKLLLGSPSSLSPFSKRIKLEKEFDLPPAAMPNTENVYSQWLAGYAASRQLKDPFLSFGDSRQSPFASSSEHSSENGSLRFSTPPGELDGGISGRSGTGSGGSTPHISGPGPGRPSSKEGRRSDTCEYCGKVFKNCSNLTVHRRSHTGERPYKCELCNYACAQSSKLTRHMKTHGQVGKDVYKCEICKMPFSVYSTLEKHMKKWHSDRVLNNDIKTE

SEQ ID NO: 38657 - protein, 243 aa, Homo sapiens
MSRRKQGKPQHLSKREFSPEPLEAILTDDEPDHGPLGAPEGDHDLLTCGQCQMNFPLGDILIFIEHKRKQCNGSLCLEKAVDKPPSPSPIEMKKASNPVEVGIQVTPEDDDCLSTSSRGICPKQEHIADKLLHWRGLSSPRSAHGALIPTPGMSAEYAPQGICKDEPSSYTCTTCKQPFTSAWFLLQHAQNTHGLRIYLESEHGSPLTPRVLHTPPFGVVPRELKMCGSFRMEAREPLSSEKI

SEQ ID NO: 38658 - protein, 798 aa, Homo sapiens
MSKGTDEDIFSGVSFFLTRLSRCEPSRRPPPAPQPTMSRRKQGKPQHLSKREFSPEPLEAILTDDEPDHGPLGAPEGDHDLLTCGQCQMNFPLGDILIFIEHKRKQCNGSLCLEKAVDKPPSPSPIEMKKASNPVEVGIQVTPEDDDCLSTSSRGICPKQEHIADKLLHWRGLSSPRSAHGALIPTPGMSAEYAPQGICKDEPSSYTCTTCKQPFTSAWFLLQHAQNTHGLRIYLESEHGSPLTPRVGIPSGLGAECPSQPPLHGIHIADNNPFNLLRIPGSVSREASGLAEGRFPPTPPLFSPPPRHHLDPHRIERLGAEEMALATHHPSAFDRVLRLNPMAMEPPAMDFSRRLRELAGNTSSPPLSPGRPSPMQRLLQPFQPGSKPPFLATPPLPPLQSAPPPSQPPVKSKSCEFCGKTFKFQSNLVVHRRSHTGEKPYKCNLCDHACTQASKLKRHMKTHMHKSSPMTVKSDDGLSTASSPEPGTSDLVGSASSALKSVVAKFKSENDPNLIPENGDEEEEEDDEEEEEEEEEEEEELTESERVDYGFGLSLEAVVGVGDESRALPDVMQGMVLSSMQHFSEAFHQVLGEKHKRGHLAEAEGHRDTCDEDSVAGESDRIDDGTVNGRGCSPGESASGGLSKKLLLGSPSSLSPFSKRIKLEKEFDLPPAAMPNTENVYSQWLAGYAASRQLKDPFLSFGDSRQSPFASSSEHSSENGSLRFSTPPGELDGGISGRSGTGSGGSTPHISGPGPGRPSSKEGRRSDTCSSHTPIRRSTQRAQDVWQFSDGSSRALKF

SEQ ID NO: 38659 - protein, 442 aa, Homo sapiens
MSAEYAPQGICKDEPSSYTCTTCKQPFTSAWFLLQHAQNTHGLRIYLESEHGSPLTPRSNLVVHRRSHTGEKPYKCNLCDHACTQASKLKRHMKTHMHKSSPMTVKSDDGLSTASSPEPGTSDLVGSASSALKSVVAKFKSENDPNLIPENGDEEEEEDDEEEEEEEEEEEEELTESERVDYGFGLSLEAARHHENSSRGAVVGVGDESRALPDVMQGMVLSSMQHFSEAFHQVLGEKHKRGHLAEAEGHRDTCDEDSVAGESDRIDDGTVNGRGCSPGESASGGLSKKLLLGSPSSLSPFSKRIKLEKEFDLPPAAMPNTENVYSQWLAGYAASRQLKDPFLSFGDSRQSPFASSSEHSSENGSLRFSTPPGELDGGISGRSGTGSGGSTPHISGPGPGRPSSKEGRRSDTCSSHTPIRRSTQRAQDVWQFSDGSSRALKF

SEQ ID NO: 38660 - protein, 793 aa, Homo sapiens
MSRRKQGKPQHLSKREFSPEPLEAILTDDEPDHGPLGAPEGDHDLLTCGQCQMNFPLGDILIFIEHKRKQCNGSLCLEKAVDKPPSPSPIEMKKASNPVEVGIQVTPEDDDCLSTSSRGICPKQEHIAGKDEPSSYTCTTCKQPFTSAWFLLQHAQNTHGLRIYLESEHGSPLTPRVGIPSGLGAECPSQPPLHGIHIADNNPFNLLRIPGSVSREASGLAEGRFPPTPPLFSPPPRHHLDPHRIERLGAEEMALATHHPSAFDRVLRLNPMAMEPPAMDFSRRLRELAGNTSSPPLSPGRPSPMQRLLQPFQPGSKPPFLATPPLPPLQSAPPPSQPPVKSKSCEFCGKTFKFQSNLVVHRRSHTGEKPYKCNLCDHACTQASKLKRHMKTHMHKSSPMTVKSDDGLSTASSPEPGTSDLVGSASSALKSVVAKFKSENDPNLIPENGDEEEEEDDEEEEEEEEEEEEELTESERVDYGFGLSLEAARHHENSSRGAVVGVGDESRALPDVMQGMVLSSMQHFSEAFHQVLGEKHKRGHLAEAEGHRDTCDEDSVAGESDRIDDGTVNGRGCSPGESASGGLSKKLLLGSPSSLSPFSKRIKLEKEFDLPPAAMPNTENVYSQWLAGYAASRQLKDPFLSFGDSRQSPFASSSEHSSENGSLRFSTPPGELDGGISGRSGTGSGGSTPHISGPGPGRPSSKEGRRSDTCEYCGKVFKNCSNLTVHRRSHTGERPYKCELCNYACAQSSKLTRHMKTHGQVLHTPPFGVVPRELKMCGSFRMEAREPLSSEKI

SEQ ID NO: 38661 - protein, 823 aa, Homo sapiens
MSRRKQGNPQHLSQRELITPEADHVEAAILEEDEGLEIEEPSGLGLMVGGPDPDLLTCGQCQMNFPLGDILVFIEHKRKQCGGSLGACYDKALDKDSPPPSSRSELRKVSEPVEIGIQVTPDEDDHLLSPTKGICPKQENIAGKDEPSSYICTTCKQPFNSAWFLLQHAQNTHGFRIYLEPGPASSSLTPRLTIPPPLGPEAVAQSPLMNFLGDSNPFNLLRMTGPILRDHPGFGEGRLPGTPPLFSPPPRHHLDPHRLSAEEMGLVAQHPSAFDRVMRLNPMAIDSPAMDFSRRLRELAGNSSTPPPVSPGRGNPMHRLLNPFQPSPKSPFLSTPPLPPMPPGGTPPPQPPAKSKSCEFCGKTFKFQSNLIVHRRSHTGEKPYKCQLCDHACSQASKLKRHMKTHMHKAGSLAGRSDDGLSAASSPEPGTSELAGEGLKAADGDFRHHESDPSLGHEPEEEDEEEEEEEEELLLENESRPESSFSMDSELSRNRENGGGGVPGVPGAGGGAAKALADEKALVLGKVMENVGLGALPQYGELLADKQKRGAFLKRAAGGGDAGDDDDAGGCGDAGAGGAVNGRGGGFAPGTEPFPGLFPRKPAPLPSPGLNSAAKRIKVEKDLELPPAALIPSENVYSQWLVGYAASRHFMKDPFLGFTDARQSPFATSSEHSSENGSLRFSTPPGDLLDGGLSGRSGTASGGSTPHLGGPGPGRPSSKEGRRSDTCEYCGKVFKNCSNLTVHRRSHTGERPYKCELCNYACAQSSKLTRHMKTHGQIGKEVYRCDICQMPFSVYSTLEKHMKKWHGEHLLTNDVKIEQAERS

SEQ ID NO: 38662 - protein, 894 aa, Homo sapiens
MSRRKQGNPQHLSQRELITPEADHVEAAILEEDEGLEIEEPSGLGLMVGGPDPDLLTCGQCQMNFPLGDILVFIEHKRKQCGGSLGACYDKALDKDSPPPSSRSELRKVSEPVEIGIQVTPDEDDHLLSPTKGICPKQENIAGPCRPAQLPAVAPIAASSHPHSSVITSPLRALGALPPCLPLPCCSARPVSGDGTQGEGQTEAPFGCQCQLSGKDEPSSYICTTCKQPFNSAWFLLQHAQNTHGFRIYLEPGPASSSLTPRLTIPPPLGPEAVAQSPLMNFLGDSNPFNLLRMTGPILRDHPGFGEGRLPGTPPLFSPPPRHHLDPHRLSAEEMGLVAQHPSAFDRVMRLNPMAIDSPAMDFSRRLRELAGNSSTPPPVSPGRGNPMHRLLNPFQPSPKSPFLSTPPLPPMPPGGTPPPQPPAKSKSCEFCGKTFKFQSNLIVHRRSHTGEKPYKCQLCDHACSQASKLKRHMKTHMHKAGSLAGRSDDGLSAASSPEPGTSELAGEGLKAADGDFRHHESDPSLGHEPEEEDEEEEEEEEELLLENESRPESSFSMDSELSRNRENGGGGVPGVPGAGGGAAKALADEKALVLGKVMENVGLGALPQYGELLADKQKRGAFLKRAAGGGDAGDDDDAGGCGDAGAGGAVNGRGGGFAPGTEPFPGLFPRKPAPLPSPGLNSAAKRIKVEKDLELPPAALIPSENVYSQWLVGYAASRHFMKDPFLGFTDARQSPFATSSEHSSENGSLRFSTPPGDLLDGGLSGRSGTASGGSTPHLGGPGPGRPSSKEGRRSDTCEYCGKVFKNCSNLTVHRRSHTGERPYKCELCNYACAQSSKLTRHMKTHGQIGKEVYRCDICQMPFSVYSTLEKHMKKWHGEHLLTNDVKIEQAERS

SEQ ID NO: 38663 - protein, 454 aa, Homo sapiens
MPRCPAGAMDEGPVDLRTRPKAAGLPGAALPLRKRPLRAPSPEPAAPRGAAGLVVPLDPLRGGCDLPAVPGPPHGLARPEALYYPGALLPLYPTRAMGSPFPLVNLPTPLYPMMCPMEHPLSADIAMATRADEDGDTPLHIAVVQGNLPAVHRLVNLFQQGGRELDIYNNLRQTPLHLAVITTLPSVVRLLVTAGASPMALDRHGQTAAHLACEHRSPTCLRALLDSAAPGTLDLEARNYDGLTALHVAVNTECQETVQLLLERGADIDAVDIKSGRSPLIHAVENNSLSMVQLLLQHGANVNAQMYSGSSALHSASGRGLLPLVRTLVRSGADSSLKNCHNDTPLMVARSRRVIDILRGKATRPASTSQPDPSPDRSANTSPESSSRLSSNGLLSASPSSSPSQSPPRDPPGFPMAPPNFFLPSPSPPAFLPFAGVLRGPGRPVPPSPAPGGS

SEQ ID NO: 38664 - protein, 356 aa, Homo sapiens
MEEGRERNRSWPPAECQSLPRVRLFTPTKEETAQRGEVFGQGHPARALLPLYPTRAMGSPFPLVNLPTPLYPMMCPMEHPLSADIAMATRADEDGDTPLHIAVVQGNLPAVHRLVNLFQQGGRELDIYNNLRQTPLHLAVITTLPSVVRLLVTAGASPMALDRHGQTAAHLACEHRSPTCLRALLDSAAPGTLDLEARNYDGLTALHVAVNTECQETVQLLLERGADIDAVDIKSGRSPLIHAVENNSLSMVQLLLQHGANVNAQMYSGSSALHSASGRGLLPLVRTLVRSGADSSLKNCHNDTPLMVARSRRVSRGSCGHAPCTRVSAGWLQASVPERRGVRVSVPLRGGEWVSL

SEQ ID NO: 38665 - protein, 479 aa, Homo sapiens
MGSPAAPEGALGYVREFTRHSSDVLGNLNELRLRGILTDVTLLVGGQPLRAHKAVLIACSGFFYSIFRGRAGVGVDVLSLPGGPEARGFAPLLDFMYTSRLRLSPATAPAVLAAATYLQMEHVVQACHRFIQASYEPLGISLRPLEAEPPTPPTAPPPGSPRRSEGHPDPPTESRSCSQGPPSPASPDPKACNWKKYKYIVLNSQASQAGSLVGERSSGQPCPQARLPSGDEASSSSSSSSSSSEEGPIPGPQSRLSPTAATVQFKCGAPASTPYLLTSQAQDTSGSPSERARPLPGSEFFSCQNCEAVAGCSSGLDSLVPGDEDKPYKCQLCRSSFRYKGNLASHRTVHTGEKPYHCSICGARFNRPANLKTHSRIHSGEKPYKCETCGSRFVQVAHLRAHVLIHTGEKPYPCPTCGTRFRHLQTLKSHVRIHTGEKPYHCDPCGLHFRHKSQLRLHLRQKHGAATNTKVHYHILGGP

SEQ ID NO: 38666 - protein, 42 aa, Homo sapiens
IHTGEKPYPCPTCGTRFRHLQTLKSHVRIHTGEKPYHEPVTS

SEQ ID NO: 38667 - protein, 210 aa, Homo sapiens
MSGRSVRAETRSRAKDDIKRVMAAIEKVRKWEKKWVTVGDTSLRIYKWVPVTEPKVDDKNKNKKKGKDEKCGSEVTTPENSSSPGMMDMHDDNSNQSSIADASPIKQENSSNSSPAPEPNSAVPSDGTEAKVDEAQADGKEHPGAEDASDEQNSQSSMEHSMNSSEKVDRQPSGDSGLAAETSAISQDLEGVPPSKKMKLEASQQNSEEM

SEQ ID NO: 38668 - protein, 231 aa, Homo sapiens
MSGRSVRAETRSRAKDDIKRVMAAIEKVRKWEKKWVTVGDTSLRIYKWVPVTEPKVDDKNKNKKKGKDEKCGSEVTTPENSSSPGMMDMHDDNSNQSSIADASPIKQENSSNSSPAPEPNSAVPSDGTEAKVDEAQADGKEHPGAEDASDEQNSQSSMEHSMNSSEKVDRQPSGDSGLAAETSAISQVPRSRSQRGSQIGREPIGLSGDLEGVPPSKKMKLEASQQNSEEM

SEQ ID NO: 38669 - protein, 202 aa, Homo sapiens
MSGRSVRAETRSRAKDDIKKVMAAIEKVRKWEKKWVTVGDTSLRIFKWVPVTDSKEKEKSKSNSSAAREPNGFPSDASANSSLLLEFQDENSNQSSVSDVYQLKVDSSTNSSPSPQQSESLSPAHTSDFRTDDSQPPTLGQEILEEPSLPSSEVADEPPTLTKEEPVPLETQVVEEEEDSGAPPLKRFCVDQPTVPQTASES

SEQ ID NO: 38670 - protein, 145 aa, Homo sapiens
MSGRSVRAETRSRAKDDIKKVMAAIEKVRKWEKKWVTVGDTSLRIFKWVPVTDSKEKEKSKSNSSAAREPNGFPSDASANSSLLLEFQEPSLPSSEVADEPPTLTKEEPVPLETQVVEEEEDSGAPPLKRFCVDQPTVPQTASES

SEQ ID NO: 38671 - protein, 217 aa, Homo sapiens
MAGRTVRAETRSRAKDDIKKVMATIEKVRRWEKRWVTVGDTSLRIFKWVPVVDPQEEERRRAGGGAERSRGRERRGRGASPRGGGPLILLDLNDENSNQSFHSEGSLQKGTEPSPGGTPQPSRPVSPAGPPEGVPEEAQPPRLGQERDPGGITAGSTDEPPMLTKEEPVPELLEAEAPEAYPVFEPVPPVPEAAQGDTEDSEGAPPLKRICPNAPDP

SEQ ID NO: 38672 - protein, 242 aa, Homo sapiens
MAGRTVRAETRSRAKDDIKKVMATIEKVRRWEKRWVTVGDTSLRIFKWVPVVDPQEEERRRAGGGAERSRGRERRGRGASPRGGGPLILLDLNDENSNQSFHSEGSLQKGTEPSPGGTPQPSRPVSPAGPPEGVPEEAQPPRLGQERDPGGITAGSTDEPPMLTKEEPVPELLEAEDSGVRMTRRALHEKGLKTEPLRRLLPRRGLRTNVRPSSMAVPDTRAPGGGSKAPRAPRTIPQGKGR

SEQ ID NO: 38673 - protein, 1426 aa, Homo sapiens
MHSSNPKVRSSPSGNTQSSPKSKQEVMVRPPTVMSPSGNPQLDSKFSNQGKQGGSASQSQPSPCDSKSGGHTPKALPGPGGSMGLKNGAGNGAKGKGKRERSISADSFDQRDPGTPNDDSDIKECNSADHIKSQDSQHTPHSMTPSNATAPRSSTPSHGQTTATEPTPAQKTPAKVVYVFSTEMANKAAEAVLKGQVETIVSFHIQNISNNKTERSTAPLNTQISALRNDPKPLPQQPPAPANQDQNSSQNTRLQPTPPIPAPAPKPAAPPRPLDRESPGVENKLIPSVGSPASSTPLPPDGTGPNSTPNNRAVTPVSQGSNSSSADPKAPPPPPVSSGEPPTLGENPDGLSQEQLEHRERSLQTLRDIQRMLFPDEKEFTGAQSGGPQQNPGVLDGPQKKPEGPIQAMMAQSQSLGKGPGPRTDVGAPFGPQGHRDVPFSPDEMVPPSMNSQSGTIGPDHLDHMTPEQIAWLKLQQEFYEEKRRKQEQVVVQQCSLQDMMVHQHGPRGVVRGPPPPYQMTPSEGWAPGGTEPFSDGINMPHSLPPRGMAPHPNMPGSQMRLPGFAGMINSEMEGPNVPNPASRPGLSGVSWPDDVPKIPDGRNFPPGQGIFSGPGRGERFPNPQGLSEEMFQQQLAEKQLGLPPGMAMEGIRPSMEMNRMIPGSQRHMEPGNNPIFPRIPVEGPLSPSRGDFPKGIPPQMGPGRELEFGMVPSGMKGDVNLNVNMGSNSQMIPQKMREAGAGPEEMLKLRPGGSDMLPAQQKMVPLPFGEHPQQEYGMGPRPFLPMSQGPGSNSGLRNLREPIGPDQRTNSRLSHMPPLPLNPSSNPTSLNTAPPVQRGLGRKPLDISVAGSQVHSPGINPLKSPTMHQVQSPMLGSPSGNLKSPQTPSQLAGMLAGPAAAASIKSPPVLGSAAASPVHLKSPSLPAPSPGWTSSPKPPLQSPGIPPNHKAPLTMASPAMLGNVESGGPPPPTASQPASVNIPGSLPSSTPYTMPPEPTLSQNPLSIMMSRMSKFAMPSSTPLYHDAIKTVASSDDDSPPARSPNLPSMNNMPGMGINTQNPRISGPNPVVPMPTLSPMGMTQPLSHSNQMPSPNAVGPNIPPHGVPMGPGLMSHNPIMGHGSQEPPMVPQGRMGFPQGFPPVQSPPQQVPFPHNGPSGGQGSFPGGMGFPGEGPLGRPSNLPQSSADAALCKPGGPGGPDSFTVLGNSMPSVFTDPDLQEVIRPGATGIPEFDLSRIIPSEKPSQTLQYFPRGEVPGRKQPQGPGPGFSHMQGMMGEQAPRMGLALPGMGGPGPVGTPDIPLGTAPSMPGHNPMRPPAFLQQGMMGPHHRMMSPAQSTMPGQPTLMSNPAAAVGMIPGKDRGPAGLYTHPGPVGSPGMMMSMQGMMGPQQNIMIPPQMRPRGMAADVGMGGFSQGPGNPGNMMF

SEQ ID NO: 38674 - protein, 1499 aa, Homo sapiens
MRILANKTRLPHPRRREAPGSPPLSPRGHCPPAPAKPMHPENKLTNHGKTGNGGAQSQHQNVNQGPTCNVGSKGVGAGNHGAKANQISPSNSSLKNPQAGVPPFSSLKGKVKRDRSVSVDSGEQREAGTPSLDSEAKEVAPRSKRRCVLERKQPYSGDEWCSGPDSEEDDKPIGATHNCNVADPAMAAPQLGPGQTTQLPLSESSVPGAPHGPPPGLRPDAPGGGGGGGGVPGKPPSQFVYVFTTHLANTAAEAVLQGRADSILAYHQQNVPRAKLDQAPKVPPTPEPLPLSTPSAGTPQSQPPPLPPPPPPAPGSAPPALPPEGPPEDSSQDLAPNSVGAASTGGGTGGTHPNTPTATTANNPLPPGGDPSSAPGPALLGEAAAPGNGQRSLVGSEGLSKEQLEHRERSLQTLRDIERLLLRSGETEPFLKGPPGGAGEGGPPAQAPPPPQQPPTAPPSGLKKYEEPLQSMISQTQSLGGPPLEHEVPGHPPGGDMGQQMNMMIQRLGQDSLTPEQVAWRKLQEEYYEEKRRKEEQIGLHGSRPLQDMMGMGGMMVRGPPPPYHSKPGDQWPPGMGAQLRGPMDVQDPMQLRGGPPFPGPRFPGNQIQRVPGFGGMQSMPMEVPMNAMQRPVRPGMGWTEDLPPMGGPSNFAQNTMPYPGGQGEAERFMTPRVREELLRHQLLEKRSMGMQRPLGMAGSGMGQSMEMERMMQAHRQMDPAMFPGQMAGGEGLAGTPMGMEFGGGRGLLSPPMGQSGLREVDPPMGPGNLNMNMNVNMNMNMNLNVQMTPQQQMLMSQKMRGPGDLMGPQGLSPEEMARVRAQNSSGVMGGPQKMLMPSQFPNQGQQGFSGGQGPYQAMSQDMGNTQDMFSPDQSSMPMSNVGTTRLSHMPLPPASNPPGTVHSAPNRGLGRRPSDLTISINQMGSPGMGHLKSPTLSQVHSPLVTSPSANLKSPQTPSQMVPLPSANPPGPLKSPQVLGSSLSVRSPTGSPSRLKSPSMAVPSPGWVASPKTAMPSPGVSQNKQPPLNMNSSTTLSNMEQGTLPPSGPRSSSSAPPANPPSGLMNPSLPFTSSPDPTPSQNPLSLMMTQMSKYAMPSSTPLYHNAIKTIATSDDELLPDRPLLPPPPPPQGSGPGISNSQPSQMHLNSAAAQSPMGMNLPGQQPLSHEPPPAMLPSPTPLGSNIPLHPNAQGTGGPPQNSMMMAPGGPDSLNAPCGPVPSSSQMMPFPPRLQQPHGAMAPTGGGGGGPGLQQHYPSGMALPPEDLPNQPPGPMPPQQHLMGKAMAGRMGDAYPPGVLPGVASVLNDPELSEVIRPTPTGIPEFDLSRIIPSEKPSSTLQYFPKSENQPPKAQPPNLHLMNLQNMMAEQTPSRPPNLPGQQGVQRGLNMSMCHPGQMSLLGRTGVPPQQGMVPHGLHQGVMSPPQGLMTQQNFMLMKQRGVGGEVYSQPPHMLSPQGSLMGPPPQQNLMVSHPLRQRSVSLDSQMGYLPAPGGMANLPF

SEQ ID NO: 38675 - protein, 1395 aa, Homo sapiens
MRILANKTRLPHPRRREAPGSPPLSPRGHCPPAPAKPMHPENKLTNHGKTGNGGAQSQHQNVNQGPTCNVGSKGVGAGNHGAKANQISPSNSSLKNPQAGVPPFSSLKGKVKRDRSVSVDSGEQREAGTPSLDSEAKEVAPRSKRRCVLERKQPYSGDEWCSGPDSEEDDKPIGATHNCNVADPAMAAPQLGPGQTTQLPLSESSVPGAPHGPPPGLRPDAPGGGGGGGGVPGKPPSQFVYVFTTHLANTAAEAVLQGRADSILAYHQQNVPRAKLDQAPKVPPTPEPLPLSTPSAGTPQSQPPPLPPPPPPAPGSAPPALPPEGPPEDSSQDLAPNSVGAASTGGGTGGTHPNTPTATTANNPLPPGGDPSSAPGPALLGEAAAPGNGQRSLVGSEGLSKEQLEHRERSLQTLRDIERLLLRSGETEPFLKGPPGGAGEGGPPAQAPPPPQQPPTAPPSGLKKYEEPLQSMISQTQSLGGPPLEHEVPGHPPGGDMGQQMNMMIQRLGQDSLTPEQVAWRKLQEEYYEEKRRKEEQIGLHGSRPLQDMMGMGGMMVRGPPPPYHSKPGDQWPPGMGAQLRGPMDVQDPMQLRGGPPFPGPRFPGNQIQRVPGFGGMQSMPMEVPMNAMQRPVRPGMGWTEDLPPMGGPSNFAQNTMPYPGGQGEAERFMTPRVREELLRHQLLEKRSMGMQRPLGMAGSGMGQSMEMERMMQAHRQMDPAMFPGQMAGGEGLAGTPMGMEFGGGRGLLSPPMGQSGLREVDPPMGPGNLNMNMNVNMNMNMNLNVQMTPQQQMLMSQKMRGPGDLMGPQGLSPEEMARVRAQNSSGVMGGPQKMLMPSQFPNQGQQGFSGGQGPYQAMSQDMGNTQDMFSPDQSSMPMSNVGTTRLSHMPLPPASNPPGTVHSAPNRGLGRRPSDLTISINQMGSPGMGHLKSPTLSQVHSPLVTSPSANLKSPQTPSQMVPLPSANPPGPLKSPQVLGSSLSVRSPTGSPSRLKSPSMAVPSPGWVASPKTAMPSPGVSQNKQPPLNMNSSTTLSNMEQGTLPPSGPRSSSSAPPANPPSGLMNPSLPFTSSPDPTPSQNPLSLMMTQMSKYAMPSSTPLYHNAIKTIATSDDELLPDRPLLPPPPPPQGSGPGISNSQPSQMHLNSAAAQSPMGMNLPGQQPLSHEPPPAMLPSPTPLGSNIPLHPNAQGTGGPPQNSMMMAPGGPDSLNAPCGPVPSSSQMMPFPPRLQQPHGAMAPTGGGGGGPGLQQHYPSGMALPPEDLPNQPPGPMPPQQHLMGKAMAGRMGDAYPPGVLPGVASVLNDPELSEVIRPTPTGIPEFDLSRIIPSEFLRTRPFSFCLYLLRILSLLMWLTPLPPLPAGGWPGGQVPAGAVNRALRFCAGLCVCCISVF

SEQ ID NO: 38676 - protein, 1454 aa, Homo sapiens
MRILANKTRLPHPRRREAPGSPPLSPRGHCPPAPAKPMHPENKLTNHGKTGNGGAQSQHQNVNQGPTCNVGSKGVGAGNHGAKANQISPSNSSLKNPQAGVPPFSSLKGKVKRDRSVSVDSGEQREAGTPSLDSEAKEVAPRSKRRCVLERKQPYSGDEWCSGPDSEEDDKPIGATHNCNVADPAMAAPQLGPGQTTQLPLSESSVPGAPHGPPPGLRPDAPGGGGGGGGVPGKPPSQFVYVFTTHLANTAAEAVLQGRADSILAYHQQNVPRAKLDQAPKVPPTPEPLPLSTPSAGTPQSQPPPLPPPPPPAPGSAPPALPPEGPPEDSSQDLAPNSVGAASTGGGTGGTHPNTPTATTANNPLPPGGDPSSAPGPALLGEAAAPGNGQRSLVGSEGLSKEQLEHRERSLQTLRDIERLLLRSGETEPFLKGPPGGAGEGGPPAQAPPPPQQPPTAPPSGLKKYEEPLQSMISQTQSLGGPPLEHEVPGHPPGGDMGQQMNMMIQRLGQDSLTPEQVAWRKLQEEYYEEKRRKEEQIGLHGSRPLQDMMGMGGMMVRGPPPPYHSKPGDQWPPGMGAQLRGPMDVQDPMQLRGGPPFPGPRFPGNQIQRVPGFGGMQSMPMEVPMNAMQRPVRPGMGWTEDLPPMGGPSNFAQNTMPYPGGQGEAERFMTPRVREELLRHQLLEKRSMGMQRPLGMAGSGMGQSMEMERMMQAHRQMDPAMFPGQMAGGEGLAGTPMGMEFGGGRGLLSPPMGQSGLREVDPPMGPGNLNMNMNVNMNMNMNLNVQMTPQQQMLMSQKMRGPGDLMGPQGLSPEEMARVRAQNSSGVMGGPQKMLMPSQFPNQGQQGFSGGQGPYQAMSQDMGNTQDMFSPDQSSMPMSNVGTTRLSHMPLPPASNPPGTVHSAPNRGLGRRPSDLTISINQMGSPGMGHLKSPTLSQVHSPLVTSPSANLKSPQTPSQMVPLPSANPPGPLKSPQVLGSSLSVRSPTGSPSRLKSPSMAVPSPGWVASPKTAMPSPGVSQNKQPPLNMNSSTTLSNMEQGTLPPSGPRSSSSAPPANPPSGLMNPSLPFTSSPDPTPSQNPLSLMMTQMSKYAMPSSTPLYHNAIKTIATSDDELLPDRPLLPPPPPPQGSGPGISNSQPSQMHLNSAAAQSPMGMNLPGQQPLSHEPPPAMLPSPTPLGSNIPLHPNAQGTGGPPQNSMMMAPGGPDSLNAPCGPVPSSSQMMPFPPRLQQPHGAMMAGRMGDAYPPGVLPGVASVLNDPELSEVIRPTPTGIPEFDLSRIIPSEKPSSTLQYFPKSENQPPKAQPPNLHLMNLQNMMAEQTPSRPPNLPGQQGVQRGLNMSMCHPGQMSLLGRTGVPPQQGMVPHGLHQGVMSPPQGLMTQQNFMLMKQRGVGGEVYSQPPHMLSPQGSLMGPPPQQNLMVSHPLRQRSVSLDSQMGYLPAPGGMANLPF

SEQ ID NO: 38677 - protein, 456 aa, Homo sapiens
MDKLNKITVPASQKLRQLQKMVHDIKNNEGGIMNKIKKLKVKAPPSVPRRDYASESPADEEEQWSDDFDSDYENPDEHSDSEMYVMPAEENADDSYEPPPVEQETRPVHPALPFARGEYIDNRSSQRHSPPFSKTLPSKPSWPSEKARLTSTLPALTALQKPQVPPKPKGLLEDEADYVVPVEDNDENYIHPTESSSPPPEKAPMVNRSTKPNSSTPASPPGTASGRNSGAWETKSPPPAAPSPLPRAGKKPTTPLKTTPVASQQNASSVCEEKPIPAERHRGSSHRQEAVQSPVFPPAQKQIHQKPIPLPRFTEGGNPTVDGPLPSFSSNSTISEQEAGVLCKPWYAGACDRKSAEEALHRSNKDGSFLIRKSSGHDSKQPYTLVVFFNKRVYNIPVRFIEATKQYALGRKKNGEEYFGSVAEIIRNHQHSPLVLIDSQNNTKDSTRLKYAVKVS

SEQ ID NO: 38678 - protein, 433 aa, Homo sapiens
MDKLNKITVPASQKLRQLQKMVHDIKNNEGGIMNKIKKLKVKAPPSVPRRDYASESPADEEEQWSDDFDSDYENPDEHSDSEMYVMPAEENADDSYEPPPVEQETRPVHPALPFARGEYIDNRSSQRHSPPFSKTLPSKPSWPSEKARLTSTLPALTALQKPQVPPKPKGLLEDEADYVVPVEDNDENYIHPTESSSPPPEKGRNSGAWETKSPPPAAPSPLPRAGKKPTTPLKTTPVASQQNASSVCEEKPIPAERHRGSSHRQEAVQSPVFPPAQKQIHQKPIPLPRFTEGGNPTVDGPLPSFSSNSTISEQEAGVLCKPWYAGACDRKSAEEALHRSNKDGSFLIRKSSGHDSKQPYTLVVFFNKRVYNIPVRFIEATKQYALGRKKNGEEYFGSVAEIIRNHQHSPLVLIDSQNNTKDSTRLKYAVKVS

SEQ ID NO: 38679 - protein, 174 aa, Homo sapiens
MDKLNKITVPASQKLRQLQKMVHDIKNNEGGIMNKIKKLKVKAPPSVPRRDYASESPADEEEQWSDDFDSDYENPDEHSDSEMYVMPAEENADDSYEPPPVEQETRPVHPALPFARGEYIIFLCDLLKQQNNMPWAERKMVKSTLEVLLKSSGIINIVLWFLLTVRITQKIPPD

SEQ ID NO: 38680 - protein, 185 aa, Homo sapiens
MDKLNKITVPASQKLRQLQKMVHDIKNNEGGIMNKIKKLKVKAPPSVPRRDYASESPADEEEQWSDDFDSDYENPDEHSDSEMYVMPAEENADDSYEPPPVEQETRPVHPALPFARGEYIDNRSSQRHSPPFSKTLPSKPSWPSEKYFGSVAEIIRNHQHSPLVLIDSQNNTKDSTRLKYAVKVS

SEQ ID NO: 38681 - protein, 67 aa, Homo sapiens
LDSYSCLLQLPNRMDKLNKITVPASQKLRQLQKMVHDIKNNEGGIMNKIKKTATMKIQMSTRTQRCT

SEQ ID NO: 38682 - protein, 404 aa, Homo sapiens
MDKLNKITVPASQKLRQLQKMVHDIKNNEGGIMNKIKKLKVKAPPSVPRRDYASESPADEEEQWSDDFDSDYENPDEHSDSEMYVMPAEENADDSYEPPPVEQETRPVHPALPFARGEYIDNRSSQRHSPPFSKTLPSKPSWPSEKARLTSTLPALTALQKPQVPPKPKGLLEDEADYVVPVEDNDENYIHPTESSSPPPEKAPMVNRSTKPNSSTPASPPGTASGRNSGAWETKSPPPAAPSPLPRAGKKPTTPLKTTPVASQQNASSVCEEKPIPAERHRGSSHRQEAVQSPVFPPAQKQIHQKPIPLPRFTEGGNPTVDGPLPSFSSNSTISEQEAGVLCKPWYAGACDRKSAEEALHRSNKYFGSVAEIIRNHQHSPLVLIDSQNNTKDSTRLKYAVKVS

SEQ ID NO: 38683 - protein, 421 aa, Homo sapiens
MDKLNKITVPASQKLRQLQKMVHDIKNNEGGIMNKIKKLKVKAPPSVPRRDYASESPADEEEQWSDDFDSDYENPDEHSDSEMYVMPAEENADDSYEPPPVEQETRPVHPALPFARGEYIDNRSSQRHSPPFSKTLPSKPSWPSEKARLTSTLPALTALQKPQVPPKPKGLLEDEADYVVPVEDNDENYIHPTESSSPPPEKAPMVNRSTKPNSSTPASPPGTASGRNSGAWETKSPPPAAPSPLPRAGKKPTTPLKTTPVASQQNASSVCEEKPIPAERHRGSSHRQEAVQSPVFPPAQKQIHQKPIPLPRFTEGGNPTVDGPLPSFSSNSTISEQEAGVLCKPWYAGACDRKSAEEALHRSNKDPQPPLPSKQWETRKLQYFGSVAEIIRNHQHSPLVLIDSQNNTKDSTRLKYAVKVS

SEQ ID NO: 38684 - protein, 209 aa, Homo sapiens
MDKLNKITVPASQKLRQLQKMVHDIKNNEGGIMNKIKKLKVKAPPSVPRRDYASESPADEEEQWSDDFDSDYENPDEHSDSEMYVMPAEENADDSYEPPPVEQETRPVHPALPFARGEYIDNRSSQRHSPPFSKTLPSKPSWPSEKARLTSTLPALTALQKPQVPPKPKGLLEDEADYVVPVEDNDENYIHPTESSSPPPEKGKNQRHH

SEQ ID NO: 38685 - protein, 299 aa, Homo sapiens
MDKLNKITVPASQKLRQLQKMVHDIKNNEGGIMNKIKKLKVKAPPSVPRRDYASESPADEEEQWSDDFDSDYENPDEHSDSEMYVMPAEENADDSYEPPPVEQETRPVHPALPFARGEYIGRNSGAWETKSPPPAAPSPLPRAGKKPTTPLKTTPVASQQNASSVCEEKPIPAERHRGSSHRQEAVQSPVFPPAQKQIHQKPIPLPRFTEGGNPTVDGPLPSFSSNSTISEQEAGVLCKPWYAGACDRKSAEEALHRSNKYFGSVAEIIRNHQHSPLVLIDSQNNTKDSTRLKYAVKVS

SEQ ID NO: 38686 - protein, 785 aa, Homo sapiens
MLPAAPGKGLGSPDPAPCGPAPPGNTKDIIMIYEEDAEEWALYLTEVFLHVVKREAILLYRLENFSFRHLELLNLTSYKCKLLILSNSLLRDLTPKKCQFLEKILHSPKSVVTLLCGVKSSDQLYELLNISQSRWEISTEQEPEDYISVIQSIIFKDSEDYFEVNIPTDLRAKHSGEISERKEIEELSEASRNTIPLAVVLPTEIPCENPGEIFIILRDEVIGDTVEVEFTSSNKRIRTRPALWNKKVWCMKALEFPAGSVHVNVYCDGIVKATTKIKYYPTAKAKECLFRMADSGESLCQNSIEELDGVLTSIFKHEIPYYEFQSLQTEICSQNKYTHFKELPTLLHCAAKFGLKNLAIHLLQCSGATWASKMKNMEGSDPAHIAERHGHKELKKIFEDFSIQEIDINNEQENDYEEDIASFSTYIPSTQNPAFHHESRKTYGQSADGAEANEMEGEGKQNGSGMETKHSPLEVGSESSEDQYDDLYVFIPGADPENNSQEPLMSSRPPLPPPRPVANAFQLERPHFTLPGTMVEGQMERSQNWGHPGVRQETGDEPKGEKEKKEEEKEQEEEEDPYTFAEIDDSEYDMILANLSIKKKTGSRSFIINRPPAPTPRPTSIPPKEETTPYIAQVFQQKTARRQSDDDKFCGLPKKQDRARIESPAFSTLRGCLTDGQEELILLQEKVKNGKMSMDEALEKFKHWQMGKSGLEMIQQEKLRQLRDCIIGKRPEEENVYNKLTIVHHPGGKETAHNENKFYNVHFSNKLPARPQVEKEFGFCCKKDH

SEQ ID NO: 38687 - protein, 652 aa, Homo sapiens
MLPAAPGKGLGSPDPAPCGPAPPDSEDYFEVNIPTDLRAKHSGEISERKEIEELSEASRNTIPLAVVLPTEIPCENPGEIFIILRDEVIGDTVEVEFTSSNKRIRTRPALWNKKVWCMKALEFPAGSVHVNVYCDGIVKATTKIKYYPTAKAKECLFRMADSGESLCQNSIEELDGVLTSIFKHEIPYYEFQSLQTEICSQNKYTHFKELPTLLHCAAKFGLKNLAIHLLQCSGATWASKMKNMEGSDPAHIAERHGHKELKKIFEDFSIQEIDINNEQENDYEEDIASFSTYIPSTQNPAFHHESRKTYGQSADGAEANEMEGEGKQNGSGMETKHSPLEVGSESSEDQYDDLYVFIPGADPENNSQEPLMSSRPPLPPPRPVANAFQLERPHFTLPGTMVEGQMERSQNWGHPGVRQETGDEPKGEKEKKEEEKEQEEEEDPYTFAEIDDSEYDMILANLSIKKKTGSRSFIINRPPAPTPRPTSIPPKEETTPYIAQVFQQKTARRQSDDDKFCGLPKKQDRARIESPAFSTLRGCLTDGQEELILLQEKVKNGKMSMDEALEKFKHWQMGKSGLEMIQQEKLRQLRDCIIGKRPEEENVYNKLTIVHHPGGKETAHNENKFYNVHFSNKLPARPQVEKEFGFCCKKDH

SEQ ID NO: 38688 - protein, 755 aa, Homo sapiens
MIYEEDAEEWALYLTEVFLHVVKREAILLYRLENFSFRHLELLNLTSYKCKLLILSNSLLRDLTPKKCQFLEKILHSPKSVVTLLCGVKSSDQLYELLNISQSRWEISTEQEPEDYISVIQSIIFKDSEDYFEVNIPTDLRAKHSGEISERKEIEELSEASRNTIPLAVVLPTEIPCENPGEIFIILRDEVIGDTVEVEFTSSNKRIRTRPALWNKKVWCMKALEFPAGSVHVNVYCDGIVKATTKIKYYPTAKAKECLFRMADSGESLCQNSIEELDGVLTSIFKHEIPYYEFQSLQTEICSQNKYTHFKELPTLLHCAAKFGLKNLAIHLLQCSGATWASKMKNMEGSDPAHIAERHGHKELKKIFEDFSIQEIDINNEQENDYEEDIASFSTYIPSTQNPAFHHESRKTYGQSADGAEANEMEGEGKQNGSGMETKHSPLEVGSESSEDQYDDLYVFIPGADPENNSQEPLMSSRPPLPPPRPVANAFQLERPHFTLPGTMVEGQMERSQNWGHPGVRQETGDEPKGEKEKKEEEKEQEEEEDPYTFAEIDDSEYDMILANLSIKKKTGSRSFIINRPPAPTPRPTSIPPKEETTPYIAQVFQQKTARRQSDDDKFCGLPKKQDRARIESPAFSTLRGCLTDGQEELILLQEKVKNGKMSMDEALEKFKHWQMGKSGLEMIQQEKLRQLRDCIIGKRPEEENVYNKLTIVHHPGGKETAHNENKFYNVHFSNKLPARPQVEKEFGFCCKKDH

SEQ ID NO: 38689 - protein, 770 aa, Homo sapiens
MVNCHLKIGNTKDIIMIYEEDAEEWALYLTEVFLHVVKREAILLYRLENFSFRHLELLNLTSYKCKLLILSNSLLRDLTPKKCQFLEKILHSPKSVVTLLCGVKSSDQLYELLNISQSRWEISTEQEPEDYISVIQSIIFKDSEDYFEVNIPTDLRAKHSGEISERKEIEELSEASRNTIPLAVVLPTEIPCENPGEIFIILRDEVIGDTVEVEFTSSNKRIRTRPALWNKKVWCMKALEFPAGSVHVNVYCDGIVKATTKIKYYPTAKAKECLFRMADSGESLCQNSIEELDGVLTSIFKHEIPYYEFQSLQTEICSQNKYTHFKELPTLLHCAAKFGLKNLAIHLLQCSGATWASKMKNMEGSDPAHIAERHGHKELKKIFEDFSIQEIDINNEQENDYEEDIASFSTYIPSTQNPAFHHESRKTYGQSADGAEANEMEGEGKQNGSGMETKHSPLEVGSESSEDQYDDLYVFIPGADPENNSQEPLMSSRPPLPPPRPVANAFQLERPHFTLPGTMVEGQMERSQNWGHPGVRQETGDEPKGEKEKKEEEKEQEEEEDPYTFAEIDDSEYDMILANLSIKKKTGSRSFIINRPPAPTPRPTSIPPKEETTPYIAQVFQQKTARRQSDDDKFCGLPKKQDRARIESPAFSTLRGCLTDGQEELILLQEKVKNGKMSMDEALEKFKHWQMGKSGLEMIQQEKLRQLRDCIIGKRPEEENVYNKLTIVHHPGGKETAHNENKFYNVHFSNKLPARPQVEKEFGFCCKKDH

SEQ ID NO: 38690 - protein, 652 aa, Homo sapiens; identical to SEQ ID NO: 38687

SEQ ID NO: 38691 - protein, 171 aa, Homo sapiens
MHPFYTRAATMIGEIAAAVSFISKFLRTKGLTSERQLQTFSQSLQELLAEHYKHHWFPEKPCKGSGYRCIRINHKMDPLIGQAAQRIGLSSQELFRLLPSELTLWVDPYEVSYRIGEDGSICVLYEASPAGGSTQNSTNVQMVDSRISCKEELLLGRTSPSKNYNMMTVSG

SEQ ID NO: 38692 - protein, 223 aa, Homo sapiens
MRDEIATTVFFVTRLVKKHDKLSKQQIEDFAEKLMTILFETYRSHWHSDCPSKGQAFRCIRINNNQNKDPILERACVESNVDFSHLGLPKEMTIWVDPFEVCCRYGEKNHPFTVASFKGRWEEWELYQQISYAVSRASSDVSSGTSCDEESCSKEPRVIPKVSNPKSIYQVENLKQPFQSWLQIPRKKNVVDGRVGLLGNTYHGSQKHPKCYRPAMHRLDRIL

SEQ ID NO: 38693 - protein, 160 aa, Homo sapiens
MRDEIATTVFFVTRLVKKHDKLSKQQIEDFAEKLMTILFETYRSHWHSDCPSKGQAFRCIRINNNQNKDPILERACVESNVDFSHLGLPKEMTIWVDPFEVCCRYGEKNHPFTVASFKGRWEEWELYQQISYAVSRASSDVSSGTSCDEESCSKEPRVIP

SEQ ID NO: 38694 - protein, 129 aa, Homo sapiens
MEPSQCVEELEDDVFQPEDGEPVTQPGSLLSADLFAQSLLDCPLSRLQLFPLTHCCGPGLRPTSQEDKATQTLSPASPSQGVMLPCGVTEEPQRLFYAPAEPKSCVVADPPLPAQPCFEWRREQERGRP

SEQ ID NO: 38695 - protein, 184 aa, Homo sapiens
MEPSQCVEELEDDVFQPEDGEPVTQPGSLLSADLFAQSLLDCPLSRLQLFPLTHCCGPGLRPTSQEDKATQTLSPASPSQGVMLPCGVTEEPQRLFYGNAGYRLPLPASFPAVLPIGEQPPEGQWQHQAEVQIARKLQCIADQFHRLHVQQHQQNQNRVWWQILLFLHNLALNGEENRNGAGPR

SEQ ID NO: 38696 - protein, 184 aa, Homo sapiens; identical to SEQ ID NO: 38695

SEQ ID NO: 38697 - protein, 163 aa, Homo sapiens
MEPSQCVEELEDDVFQPEDGEPVTQPGSLLSADLFAQSLLDCPLSRLQLFPLTHCCGPGLRPTSQEDKATQTLSPASPSQGVMLPCGVTEEPQRLFYGNAGYRLPLPASFPAVLPIGEQPPEGQWQHQAEHQQNQNRVWWQILLFLHNLALNGEENRNGAGPR

SEQ ID NO: 38698 - protein, 61 aa, Homo sapiens
MEPSQCVEELEDDVFQPEDGEPVTQPGSLLSADLFAQSLLDCPLSRLQLFPLTHCCGPGLR

SEQ ID NO: 38699 - protein, 129 aa, Homo sapiens; identical to SEQ ID NO: 38694

SEQ ID NO: 38700 - protein, 13 aa, Homo sapiens
MEPSQCVEELEDD

SEQ ID NO: 38701 - protein, 184 aa, Homo sapiens; identical to SEQ ID NO: 38695

SEQ ID NO: 38702 - protein, 184 aa, Homo sapiens; identical to SEQ ID NO: 38695

SEQ ID NO: 38703 - protein, 194 aa, Homo sapiens
MSQNGAPGMQEESLQGSWVELHFSNNGNGGSVPASVSIYNGDMEKILLDAQHESGRSSSKSSHCDSPPRSQTPQDTNRASETDTHSIGEKNSSQSEEDDIERRKEVESILKKNSDWIWDWSSRPENIPPKEFLFKHPKRTATLSMRNTSVMKKGGIFSAEFLKVFLPSLLLSHLLAIGLGIYIGRRLTTSTSTF

SEQ ID NO: 38704 - protein, 180 aa, Homo sapiens
MSQNGAPGMQEESLQGSWVELHFSNNGNGGSVPASVSIYNGDMEKILLDAQHESGRSSSKSSHCDSPPRSQTPQDTNRASETDTHSIGEKNSSQSEEDDIERRKEVESILKKNSDWIWDWSSRPENIPPKEFLFKHPKRTATLSMRNTSVMKKGGIFSAEFLKVFLPSLLLSHLLAIGLG

SEQ ID NO: 38705 - protein, 1126 aa, Homo sapiens
MEPNDSTSTAVEEPDSLEVLVKTLDSQTRTFIVGAQMNVKEFKEHIAASVSIPSEKQRLIYQGRVLQDDKKLQEYNVGGKVIHLVERAPPQTHLPSGASSGTGSASATHGGGSPPGTRGPGASVHDRNANSYVMVGTFNLPSDGSAVDVHINMEQAPIQSEPRVRLVMAQHMIRDIQTLLSRMECRGGPQPQHSQPPPQPPAVTPEPVALSSQTSEPVESEAPPREPMEAEEVEERAPAQNPELTPGPAPAGPTPAPETNAPNHPSPAEYVEVLQELQRLESRLQPFLQRYYEVLGAAATTDYNNNHEGREEDQRLINLVGESLRLLGNTFVALSDLRCNLACTPPRHLHVVRPMSHYTTPMVLQQAAIPIQINVGTTVTMTGNGTRPPPTPNAEAPPPGPGQASSVAPSSTNVESSAEGAPPPGPAPPPATSHPRVIRISHQSVEPVVMMHMNIQDSGTQPGGVPSAPTGPLGPPGHGQTLGQQVPGFPTAPTRVVIARPTPPQARPSHPGGPPVSGTLQGAGLGTNASLAQMVSGLVGQLLMQPVLVAQGTPGMAPPPAPATASASAGTTNTATTAGPAPGGPAQPPPTPQPSMADLQFSQLLGNLLGPAGPGAGGSGVASPTITVAMPGVPAFLQGMTDFLQATQTAPPPPPPPPPPPPAPEQQTMPPPGSPSGGAGSPGGLGLESLSPEFFTSVVQGVLSSLLGSLGARAGSSESIAAFIQRLSGSSNIFEPGADGALGFFGALLSLLCQNFSMVDVVMLLHGHFQPLQRLQPQLRSFFHQHYLGGQEPTPSNIRMATHTLITGLEEYVRESFSLVQVQPGVDIIRTNLEFLQEQFNSIAAHVLHCTDSGFGARLLELCNQGLFECLALNLHCLGGQQMELAAVINGRIRRMSRGVNPSLVSWLTTMMGLRLQVVLEHMPVGPDAILRYVRRVGDPPQPLPEEPMEVQGAERASPEPQRENASPAPGTTAEEAMSRGPPPAPEGGSRDEQDGASAETEPWAAAVPPEWVPIIQQDIQSQRKVKPQPPLSDAYLSGMPAKRRKTMQGEGPQLLLSEAVSRAAKAAGARPLTSPESLSRDLEAPEVQESYRQQLRSDIQKRLQEDPNYSPQRFPNAQRAFADDP

SEQ ID NO: 38706 - protein, 1132 aa, Homo sapiens
MEPNDSTSTAVEEPDSLEVLVKTLDSQTRTFIVGAQMNVKEFKEHIAASVSIPSEKQRLIYQGRVLQDDKKLQEYNVGGKVIHLVERAPPQTHLPSGASSGTGSASATHGGGSPPGTRGPGASVHDRNANSYVMVGTFNLPSDGSAVDVHINMEQAPIQSEPRVRLVMAQHMIRDIQTLLSRMETLPYLQCRGGPQPQHSQPPPQPPAVTPEPVALSSQTSEPVESEAPPREPMEAEEVEERAPAQNPELTPGPAPAGPTPAPETNAPNHPSPAEYVEVLQELQRLESRLQPFLQRYYEVLGAAATTDYNNNHEGREEDQRLINLVGESLRLLGNTFVALSDLRCNLACTPPRHLHVVRPMSHYTTPMVLQQAAIPIQINVGTTVTMTGNGTRPPPTPNAEAPPPGPGQASSVAPSSTNVESSAEGAPPPGPAPPPATSHPRVIRISHQSVEPVVMMHMNIQDSGTQPGGVPSAPTGPLGPPGHGQTLGQQVPGFPTAPTRVVIARPTPPQARPSHPGGPPVSGTLQGAGLGTNASLAQMVSGLVGQLLMQPVLVAQGTPGMAPPPAPATASASAGTTNTATTAGPAPGGPAQPPPTPQPSMADLQFSQLLGNLLGPAGPGAGGSGVASPTITVAMPGVPAFLQGMTDFLQATQTAPPPPPPPPPPPPAPEQQTMPPPGSPSGGAGSPGGLGLESLSPEFFTSVVQGVLSSLLGSLGARAGSSESIAAFIQRLSGSSNIFEPGADGALGFFGALLSLLCQNFSMVDVVMLLHGHFQPLQRLQPQLRSFFHQHYLGGQEPTPSNIRMATHTLITGLEEYVRESFSLVQVQPGVDIIRTNLEFLQEQFNSIAAHVLHCTDSGFGARLLELCNQGLFECLALNLHCLGGQQMELAAVINGRIRRMSRGVNPSLVSWLTTMMGLRLQVVLEHMPVGPDAILRYVRRVGDPPQPLPEEPMEVQGAERASPEPQRENASPAPGTTAEEAMSRGPPPAPEGGSRDEQDGASAETEPWAAAVPPEWVPIIQQDIQSQRKVKPQPPLSDAYLSGMPAKRRKTMQGEGPQLLLSEAVSRAAKAAGARPLTSPESLSRDLEAPEVQESYRQQLRSDIQKRLQEDPNYSPQRFPNAQRAFADDP

SEQ ID NO: 38707 - protein, 1077 aa, Homo sapiens
MEPNDSTSTAVEEPDSLEVLVKTLDSQTRTFIVGAQMNVKEFKEHIAASVSIPSEKQRLIYQGRVLQDDKKLQEYNVGGKVIHLVERAPPQTHLPSGASSGTGSASATHGGGSPPGTRGPGASVHDRNANSYVMVGTFNLPSDGSAVDVHINMEQAPIQSEPRVRLVMAQHMIRDIQTLLSRMECRGGPQPQHSQPPPQPPAVTPEPVALSSQTSEPVESEAPPREPMEAEEVEERAPAQNPELTPGPAPAGPTPAPETNAPNHPSPAEYVEVLQELQRLESRLQPFLQRYYEVLGAAATTDYNNNHEGREEDQRLINLVGESLRLLGNTFVALSDLRCNLACTPPRHLHVVRPMSHYTTPMVLQQAAIPIQINVGTTVTMTGNGTRPPPTPNAEAPPPGPGQASSVAPSSTNVESSAEGAPPPGPAPPPATSHPRVIRISHQSVEPVVMMHMNIQDSGTQPGGVPSAPTGPLGPPGHGQTLGQQVPGFPTAPTRVVIARPTPPQARPSHPGGPPVSGTLQGAGLGTNASLAQMVSGLVGQLLMQPVLVAQGTPGMAPPPAPATASASAGTTNTATTAGPAPGGPAQPPPTPQPSMADLQFSQLLGNLLGPAGPGAGGSGVASPTITVAMPGVPAFLQGMTDFLQATQTAPPPPPPPPPPPPAPEQQTMPPPGSPSGGAGSPGGLGLESLSPEFFTSVVQGVLSSLLGSLGARAGSSESIAAFIQRLSGSSNIFEPGADGALGFFGALLSLLCQNFSMVDVVMLLHGHFQPLQRLQPQLRSFFHQHYLGGQEPTPSNIRMATHTLITGLEEYVRESFSLVQVQPGVDIIRTNLEFLQEQFNSIAAHVLHCTDSGFGARLLELCNQGLFECLALNLHCLGGQQMELAAVINGRIRRMSRGVNPSLVSWLTTMMGLRLQVVLEHMPVGPDAILRYVRRVGDPPQPLPEEPMEVQGAERASPEPQRENASPAPGTTAEEAMSRGPPPAPEGGSRDEQDGASAETEPWAAAVPPEWVPIIQQDIQSQRKVKPQPPLSDAYLSGMPAKRRKLRSDIQKRLQEDPNYSPQRFPNAQRAFADDP

SEQ ID NO: 38708 - protein, 1132 aa, Homo sapiens; identical to SEQ ID NO: 38706

SEQ ID NO: 38709 - protein, 1126 aa, Homo sapiens; identical to SEQ ID NO: 38705

SEQ ID NO: 38710 - protein, 1126 aa, Homo sapiens; identical to SEQ ID NO: 38705

SEQ ID NO: 38711 - protein, 1126 aa, Homo sapiens; identical to SEQ ID NO: 38705

SEQ ID NO: 38712 - protein, 1162 aa, Homo sapiens
MEPNDSTSTAVEEPDSLEVLVKTLDSQTRTFIVGAQMNVKEFKEHIAASVSIPSEKQRLIYQGRVLQDDKKLQEYNVGGKVIHLVERAPPQTHLPSGASSGTGSASATHGGGSPPGTRGPGASVHDRNANSYVMVGTFNLPSDGSAVDVHINMEQAPIQSEPRVRLVMAQHMIRDIQTLLSRMECRGGPQPQHSQPPPQPPAVTPEPVALSSQTSEPVESEAPPREPMEAEEVEERAPAQNPELTPGPAPAGPTPAPETNAPNHPSPAEYVEVLQELQRLESRLQPFLQRYYEVLGAAATTDYNNNHEGREEDQRLINLVGESLRLLGNTFVALSDLRCNLACTPPRHLHVVRPMSHYTTPMVLQQAAIPIQINVGTTVTMTGNGTRPPPTPNAEAPPPGPGQASSVAPSSTNVESSAEGAPPPGPAPPPATSHPRVIRISHQSVEPVVMMHMNIQDSGTQPGGVPSAPTGPLGPPGHGQTLGSTLIQLPSLPPEFMHAVAHQITHQAMVAAVASAAAGQQVPGFPTAPTRVVIARPTPPQARPSHPGGPPVSGTLQGAGLGTNASLAQMVSGLVGQLLMQPVLVAQGTPGMAPPPAPATASASAGTTNTATTAGPAPGGPAQPPPTPQPSMADLQFSQLLGNLLGPAGPGAGGSGVASPTITVAMPGVPAFLQGMTDFLQATQTAPPPPPPPPPPPPAPEQQTMPPPGSPSGGAGSPGGLGLESLSPEFFTSVVQGVLSSLLGSLGARAGSSESIAAFIQRLSGSSNIFEPGADGALGFFGALLSLLCQNFSMVDVVMLLHGHFQPLQRLQPQLRSFFHQHYLGGQEPTPSNIRMATHTLITGLEEYVRESFSLVQVQPGVDIIRTNLEFLQEQFNSIAAHVLHCTDSGFGARLLELCNQGLFECLALNLHCLGGQQMELAAVINGRIRRMSRGVNPSLVSWLTTMMGLRLQVVLEHMPVGPDAILRYVRRVGDPPQPLPEEPMEVQGAERASPEPQRENASPAPGTTAEEAMSRGPPPAPEGGSRDEQDGASAETEPWAAAVPPEWVPIIQQDIQSQRKVKPQPPLSDAYLSGMPAKRRKTMQGEGPQLLLSEAVSRAAKAAGARPLTSPESLSRDLEAPEVQESYRQQLRSDIQKRLQEDPNYSPQRFPNAQRAFADDP

SEQ ID NO: 38713 - protein, 245 aa, Homo sapiens
PPRHLHVVRPMSHYTTPMVLQQAAIPIQINVGTTVTMTGPAPPPATSHPRVIRISHQSVEPVVMMHMNIQDSGTQPGGVPSAPTGPLGPPGHGQTLGQQVPGFPTAPTRVVIARPTPPQARPSHPGGPPVSGTLQGAGLGTNASLAQMVSGLVGQLLMQPVLVAQGTPGMAPPPAPATASASAGTTNTATTAGPAPGGPAQPPPTPQPSMADLQFSQLLGNLLGPAGPGAGGSGVASPTITVAMP

SEQ ID NO: 38714 - protein, 1126 aa, Homo sapiens
MEPNDSTSTAVEEPDSLEVLVKTLDSQTRTFIVGAQMNVKEFKEHIAASVSIPSEKQRLIYQGRVLQDDKKLQEYNVGGKVIHLVERAPPQTHLPSGASSGTGSASATHGGGSPPGTRGPGASVHDRNANSYVMVGTFNLPSDGSAVDVHINMEQAPIQSEPRVRLVMAQHMIRDIQTLLSRMECRGGPQPQHSQPPPQPPAVTPEPVALSSQTSEPVESEAPPREPMEAEEVEERAPAQNPELTPGPAPAGPTPAPETNAPNHPSPAEYVEVLQELQRLESRLQPFLQRYYEVLGAAATTDYNNNHEGREEDQRLINLVGESLRLLGNTFVALSDLRCNLACTPPRHLHVVRPMSHYTTPMVLQQAAIPIQINVGTTVTMTGNGTRPPPTPNAEAPPPGPGQASSVAPSSTNVESSAEGAPPPGPAPPPATSHPRVIRISHQSVEPVVMMHMNIQDSGTQPGGVPSAPTGPLGPPGHGQTLGQQVPGFPTAPTRVVIARPTPPQARPSHPGGPPVSGTLQGAGLGTNASLAQMVSGLVGQLLMQPVLVAQGTPGMAPPPAPATASASAGTTNTATTAGPAPGGPAQPPPTPQPSMADLQFSQLLGNLLGPAGPGAGGPGVASPTITVAMPGVPAFLQGMTDFLQATQTAPPPPPPPPPPPPAPEQQTMPPPGSPSGGAGSPGGLGLESLSPEFFTSVVQGVLSSLLGSLGARAGSSESIAAFIQRLSGSSNIFEPGADGALGFFGALLSLLCQNFSMVDVVMLLHGHFQPLQRLQPQLRSFFHQHYLGGQEPTPSNIRMATHTLITGLEEYVRESFSLVQVQPGVDIIRTNLEFLQEQFNSIAAHVLHCTDSGFGARLLELCNQGLFECLALNLHCLGGQQMELAAVINGRIRRMSRGVNPSLVSWLTTMMGLRLQVVLEHMPVGPDAILRYVRRVGDPPQPLPEEPMEVQGAERASPEPQRENASPAPGTTAEEAMSRGPPPAPEGGSRDEQDGASAETEPWAAAVPPEWVPIIQQDIQSQRKVKPQPPLSDAYLSGMPAKRRKTMQGEGPQLLLSEAVSRAAKAAGARPLTSPESLSRDLEAPEVQESYRQQLRSDIQKRLQEDPNYSPQRFPNAQRAFADDP

SEQ ID NO: 38715 - protein, 262 aa, Homo sapiens
MEPNDSTSTAVEEPDSLEVLVKTLDSQTRTFIVGAQMNVKEFKEHIAASVSIPSEKQRLIYQGRVLQDDKKLQEYNVGGKVIHLVERAPPQTHLPSGASSGTGSASATHGGGSPPGTRGPGASVHDRNANSYVMVGTFNLPSDGSAVDVHINMEQAPIQSEPRVRLVMAQHMIRDIQTLLSRMECRGGPQPQHSQPPPQPPAVTPEPVALSSQTSEPVESEAPPREPMEAEEVEERAPAQNPELTPGPAPAGPTPAPETNAP

SEQ ID NO: 38716 - protein, 238 aa, Homo sapiens
SSAEGAPPPGPAPPPATSHPRVIRISHQSVEPVVMMHMNIQGPLSLSPCPDSGTQPGGVPSAPTGPLGPPGHGQTLGQQVPGFPTAPTRVVIARPTPPQARPSHPGGPPVSGTLQGAGLGTNASLAQMVSGLVGQLLMQPVLVAQGTPGMAPPPAPATASASAGTTNTATTAGPAPGGPAQPPPTPQPSMADLQFSQLLGNLLGPAGPGAGGPGVASPTITVAMPGVPAFLQGMTDFL

SEQ ID NO: 38717 - protein, 1126 aa, Homo sapiens; identical to SEQ ID NO: 38714

SEQ ID NO: 38718 - protein, 215 aa, Homo sapiens
MEPNDSTSTAVEEPDSLEVLVKTLDSQTRTFIVGAQMNVKEFKEHIAASVSIPSEKQRLIYQGRVLQDDKKLQEYNVGGKVIHLVERAPPQTHLPSGASSGTGSASATHGGGSPPGTRGPGASVHDRNANSYVMVGTFNLPSEPRVRLVMAQHMIRDIQTLLSRMECRGGPQPQHSQPPPQPPAVTPEPVALSSQTSEPVESEAPPREPMEAEEV

SEQ ID NO: 38719 - protein, 262 aa, Homo sapiens; identical to SEQ ID NO: 38715

SEQ ID NO: 38720 - protein, 743 aa, Homo sapiens [sequence omitted]

SEQ ID NO: 38721 - protein, 1126 aa, Homo sapiens; identical to SEQ ID NO: 38714

SEQ ID NO: 38722 - protein, 1126 aa, Homo sapiens; identical to SEQ ID NO: 38714

SEQ ID NO: 38723 - protein, 136 aa, Homo sapiens
  VARIANT 1: note = MOD_RES - Any amino acid
XRMSRGVNPSLVSWLTTMMGLRLQVVLEHMPVGPDAILRYVRRVGDPPQPLPEEPMEVQGAERASPEPQEWVPIIQQDIQSQRKVKPQPPLSDAYLSGMPAKRRKLRSDIQKRLQEDPNYSPQRFPNAQRAFADDP

SEQ ID NO: 38724 - protein, 262 aa, Homo sapiens; identical to SEQ ID NO: 38715

SEQ ID NO: 38725 - protein, 244 aa, Homo sapiens
MEPNDSTSTAVEEPDSLEVLVKTLDSQTRTFIVGAQMNVKEFKEHIAASVSIPSEKQRLIYQGRVLQDDKKLQEYNVGGKVIHLVERAPPQTHLPSGASSGTGSASATHGGGSPPGTRGPGASVHDRNANSYVMVGTFNLPSEPRVRLVMAQHMIRDIQTLLSRMECRGGPQPQHSQPPPQPPAVTPEPVALSSQTSEPVESEAPPREPMEAEEVEERAPAQNPELTPGPAPAGPTPAPETNAP

SEQ ID NO: 38726 - protein, 197 aa, Homo sapiens
MEPNDSTSTAVEEPDSLEVLVKTLDSQTRTFIVGAQMNVKEFKEHIAASVSIPSEKQRLIYQGRVLQDDKKLQEYNVGGKVIHLVERAPPQTHLPSGASSGTGSASATHGGGSPPGTRGPGASVHDRNANSYVMVGTFNLPSDGSAVDVHINMEQAPIQSEPRVRLVMAQHMIRDIQTLLSRMECRGGPQPQHSQPP

SEQ ID NO: 38727 - protein, 206 aa, Homo sapiens
MEPNDSTSTAVEEPDSLEVLVKTLDSQTRTFIVGAQMNVKEFKEHIAASVSIPSEKQRLIYQGRVLQDDKKLQEYNVGGKVIHLVERAPPQTHLPSGASSGTGSASATHGGGSPPGTRGPGASVHDRNANSYVMVGTFNLPSEPRVRLVMAQHMIRDIQTLLSRMECRGGPQPQHSQPPPQPPAVTPEPVALSSQTSEPVESEAPP

SEQ ID NO: 38728 - protein, 244 aa, Homo sapiens; identical to SEQ ID NO: 38725

SEQ ID NO: 38729 - protein, 1126 aa, Homo sapiens; identical to SEQ ID NO: 38705

SEQ ID NO: 38730 - protein, 244 aa, Homo sapiens; identical to SEQ ID NO: 38725

SEQ ID NO: 38731 - protein, 238 aa, Homo sapiens
SSAEGAPPPGPAPPPATSHPRVIRISHQSVEPVVMMHMNIQGPLSLSPCPDSGTQPGGVPSAPTGPLGPPGHGQTLGQQVPGFPTAPTRVVIARPTPPQARPSHPGGPPVSGTLQGAGLGTNASLAQMVSGLVGQLLMQPVLVAQGTPGMAPPPAPATASASAGTTNTATTAGPAPGGPAQPPPTPQPSMADLQFSQLLGNLLGPAGPGAGGSGVASPTITVAMPGVPAFLQGMTDFL

SEQ ID NO: 38732 - protein, 244 aa, Homo sapiens; identical to SEQ ID NO: 38725

SEQ ID NO: 38733 - protein, 743 aa, Homo sapiens [sequence omitted]

SEQ ID NO: 38734 - protein, 158 aa, Homo sapiens
MEPNDSTSTAVEEPDSLEVLVKTLDSQTRTFIVGAQMNVKEFKEHIAASVSIPSEKQRLIYQGRVLQDDKKLQEYNVGGKVIHLVERAPPQTHLPSGASSGTGSASATHGGGSPPGTRGPGASVHDRNANSYVMVGTFNLPSDGSAVDVHINMEQAPI

SEQ ID NO: 38735 - protein, 226 aa, Homo sapiens
  VARIANT 1: note = MOD_RES - Any amino acid
XSGFGARLLELCNQGLFECLALNLHCLGGQQMELAAVINGRIRRMSRGVNPSLVSWLTTMMGLRLQVVLEHMPVGPDAILRYVRRVGDPPQPLPEEPMEVQGAERASPEPQRENASPAPGTTAEEAMSRGPPPAPEGGSRDEQDGASAETEPWAAAVPPEWVPIIQQDIQSQRKVKPQPPLSDAYLSGMPAKRRKLRSDIQKRLQEDPNYSPQRFPNAQRAFADDP

SEQ ID NO: 38736 - protein, 238 aa, Homo sapiens; identical to SEQ ID NO: 38716

SEQ ID NO: 38737 - protein, 1126 aa, Homo sapiens; identical to SEQ ID NO: 38705

SEQ ID NO: 38738 - protein, 262 aa, Homo sapiens; identical to SEQ ID NO: 38715

SEQ ID NO: 38739 - protein, 158 aa, Homo sapiens; identical to SEQ ID NO: 38734

SEQ ID NO: 38740 - protein, 258 aa, Homo sapiens
MEPNDSTSTAVEEPDSLEVLVKTLDSQTRTFIVGAQMNVKEFKEHIAASVSIPSEKQRLIYQGRVLQDDKKLQEYNVGGKVIHLVERAPPQTHLPSGASSGTGSASATHGGGSPPGTRGPGASVHDRNANSYVMVGTFNLPSDGSAVDVHINMEQAPIQSEPRVRLVMAQHMIRDIQTLLSRMECRGGPQPQHSQPPPQPPAVTPEPVALSSQTSEPVESEAPPREPMEAEEVEERAPAQNPELTPGPAPAGPTPAPE

SEQ ID NO: 38741 - protein, 244 aa, Homo sapiens; identical to SEQ ID NO: 38725

SEQ ID NO: 38742 - protein, 515 aa, Homo sapiens
MEPNDSTSTAVEEPDSLEVLVKTLDSQTRTFIVGAQMNVKEFKEHIAASVSIPSEKQRLIYQGRVLQDDKKLQEYNVGGKVIHLVERAPPQTHLPSGASSGTGSASATHGGGSPPGTRGPGASVHDRNANSYVMVGTFNLPSDGSAVDVHINMEQAPIQSEPRVRLVMAQHMIRDIQTLLSRMECRGGPQPQHSQPPPQPPAVTPEPVALSSQTSEPVESEAPPREPMEAEEVEERAPAQNPELTPGPAPAGPTPAPETNAPNHPSPAEYVEVLQELQRLESRLQPFLQRYYEVLGAAATTDYNNNHEGREEDQRLINLVGESLRLLGNTFVALSDLRCNLACTPPRHLHVVRPMSHYTTPMVLQQAAIPIQINVGTTVTMTGNGTRPPPTPNAEAPPPGPGQASSVAPSSTNVESSAEGAPPPGPAPPPATSHPRVIRISHQSVEPVVMMHMNIQDSGTQPGGVPSAPTGPLGPPGHGQTLGSTLIQLPSLPPEFMHAVAHQITHQAMVAAVAS

SEQ ID NO: 38743 - protein, 233 aa, Homo sapiens
MEPNDSTSTAVEEPDSLEVLVKTLDSQTRTFIVGAQMNVKEFKEHIAASVSIPSEKQRLIYQGRVLQDDKKLQEYNVGGKVIHLVERAPPQTHLPSGASSGTGSASATHGGGSPPGTRGPGASVHDRNANSYVMVGTFNLPSDGSAVDVHINMEQAPIQSEPRVRLVMAQHMIRDIQTLLSRMETLPYLQCRGGPQPQHSQPPPQPPAVTPEPVALSSQTSEPVESEAPPREP

SEQ ID NO: 38744 - protein, 1126 aa, Homo sapiens; identical to SEQ ID NO: 38714

SEQ ID NO: 38745 - protein, 262 aa, Homo sapiens; identical to SEQ ID NO: 38715

SEQ ID NO: 38746 - protein, 136 aa, Homo sapiens; identical to SEQ ID NO: 38723
  VARIANT 1: note = MOD_RES - Any amino acid

SEQ ID NO: 38747 - protein, 185 aa, Homo sapiens
  VARIANT 1: note = MOD_RES - Any amino acid
XLACTPPRHLHVVRPMSHYTTPMVLQQAAIPIQINVGTTVTMTGNGTRPPPTPNAEAPPPGPGQASSVAPSSTNVESSAEGAPPPGPAPPPATSHPRVIRISHQSVEPVVMMHMNIQGQQVPGFPTAPTRVVIARPTPPQARPSHPGGPPVSGTLQGAGLGTNASLAQMVSGLVGQLLMQPVLVA

SEQ ID NO: 38748 - protein, 226 aa, Homo sapiens; identical to SEQ ID NO: 38735
  VARIANT 1: note = MOD_RES - Any amino acid

SEQ ID NO: 38749 - protein, 197 aa, Homo sapiens; identical to SEQ ID NO: 38726

SEQ ID NO: 38750 - protein, 215 aa, Homo sapiens; identical to SEQ ID NO: 38718

SEQ ID NO: 38751 - protein, 233 aa, Homo sapiens; identical to SEQ ID NO: 38743

SEQ ID NO: 38752 - protein, 258 aa, Homo sapiens; identical to SEQ ID NO: 38740

SEQ ID NO: 38753 - protein, 136 aa, Homo sapiens; identical to SEQ ID NO: 38723
  VARIANT 1: note = MOD_RES - Any amino acid

SEQ ID NO: 38754 - protein, 259 aa, Homo sapiens
MEPNDSTSTAVEEPDSLEVLVKTLDSQTRTFIVGAQMNVKEFKEHIAASVSIPSEKQRLIYQGRVLQDDKKLQEYNVGGKVIHLVERAPPQTHLPSGASSGTGSASATHGGGSPPGTRGPGASVHDRNANSYVMVGTFNLPSDGSAVDVHINMEQAPIQSEPRVRLVMAQHMIRDIQTLLSRMECRGGPQPQHSQPPPQPPAVTPEPVALSSQTSEPVESEAPPREPMEAEEVEERAPAQNPELTPGPAPAGPTPAPET

SEQ ID NO: 38755 - protein, 743 aa, Homo sapiens [sequence omitted]

SEQ ID NO: 38756 - protein, 1132 aa, Homo sapiens
MEPNDSTSTAVEEPDSLEVLVKTLDSQTRTFIVGAQMNVKEFKEHIAASVSIPSEKQRLIYQGRVLQDDKKLQEYNVGGKVIHLVERAPPQTHLPSGASSGTGSASATHGGGSPPGTRGPGASVHDRNANSYVMVGTFNLPSDGSAVDVHINMEQAPIQSEPRVRLVMAQHMIRDIQTLLSRMETLPYLQCRGGPQPQHSQPPPQPPAVTPEPVALSSQTSEPVESEAPPREPMEAEEVEERAPAQNPELTPGPAPAGPTPAPETNAPNHPSPAEYVEVLQELQRLESRLQPFLQRYYEVLGAAATTDYNNNHEGREEDQRLINLVGESLRLLGNTFVALSDLRCNLACTPPRHLHVVRPMSHYTTPMVLQQAAIPIQINVGTTVTMTGNGTRPPPTPNAEAPPPGPGQASSVAPSSTNVESSAEGAPPPGPAPPPATSHPRVIRISHQSVEPVVMMHMNIQDSGTQPGGVPSAPTGPLGPPGHGQTLGQQVPGFPTAPTRVVIARPTPPQARPSHPGGPPVSGTLQGAGLGTNASLAQMVSGLVGQLLMQPVLVAQGTPGMAPPPAPATASASAGTTNTATTAGPAPGGPAQPPPTPQPSMADLQFSQLLGNLLGPAGPGAGGPGVASPTITVAMPGVPAFLQGMTDFLQATQTAPPPPPPPPPPPPAPEQQTMPPPGSPSGGAGSPGGLGLESLSPEFFTSVVQGVLSSLLGSLGARAGSSESIAAFIQRLSGSSNIFEPGADGALGFFGALLSLLCQNFSMVDVVMLLHGHFQPLQRLQPQLRSFFHQHYLGGQEPTPSNIRMATHTLITGLEEYVRESFSLVQVQPGVDIIRTNLEFLQEQFNSIAAHVLHCTDSGFGARLLELCNQGLFECLALNLHCLGGQQMELAAVINGRIRRMSRGVNPSLVSWLTTMMGLRLQVVLEHMPVGPDAILRYVRRVGDPPQPLPEEPMEVQGAERASPEPQRENASPAPGTTAEEAMSRGPPPAPEGGSRDEQDGASAETEPWAAAVPPEWVPIIQQDIQSQRKVKPQPPLSDAYLSGMPAKRRKTMQGEGPQLLLSEAVSRAAKAAGARPLTSPESLSRDLEAPEVQESYRQQLRSDIQKRLQEDPNYSPQRFPNAQRAFADDP

SEQ ID NO: 38757 - protein, 197 aa, Homo sapiens; identical to SEQ ID NO: 38726

SEQ ID NO: 38758 - protein, 244 aa, Homo sapiens; identical to SEQ ID NO: 38725

SEQ ID NO: 38759 - protein, 197 aa, Homo sapiens; identical to SEQ ID NO: 38726

SEQ ID NO: 38760 - protein, 515 aa, Homo sapiens; identical to SEQ ID NO: 38742

SEQ ID NO: 38761 - protein, 244 aa, Homo sapiens; identical to SEQ ID NO: 38725

SEQ ID NO: 38762 - protein, 262 aa, Homo sapiens; identical to SEQ ID NO: 38715

SEQ ID NO: 38763 - protein, 262 aa, Homo sapiens; identical to SEQ ID NO: 38715

SEQ ID NO: 38764 - protein, 238 aa, Homo sapiens; identical to SEQ ID NO: 38731

SEQ ID NO: 38765 - protein, 244 aa, Homo sapiens; identical to SEQ ID NO: 38725

SEQ ID NO: 38766 - protein, 206 aa, Homo sapiens; identical to SEQ ID NO: 38727

SEQ ID NO: 38767 - protein, 244 aa, Homo sapiens; identical to SEQ ID NO: 38725

SEQ ID NO: 38768 - protein, 259 aa, Homo sapiens; identical to SEQ ID NO: 38754

SEQ ID NO: 38769 - protein, 185 aa, Homo sapiens; identical to SEQ ID NO: 38747
  VARIANT 1: note = MOD_RES - Any amino acid

SEQ ID NO: 38770 - protein, 206 aa, Homo sapiens; identical to SEQ ID NO: 38727

SEQ ID NO: 38771 - protein, 244 aa, Homo sapiens; identical to SEQ ID NO: 38725

SEQ ID NO: 38772 - protein, 515 aa, Homo sapiens; identical to SEQ ID NO: 38742

SEQ ID NO: 38773 - protein, 238 aa, Homo sapiens; identical to SEQ ID NO: 38716

SEQ ID NO: 38774 - protein, 215 aa, Homo sapiens; identical to SEQ ID NO: 38718

SEQ ID NO: 38775 - protein, 158 aa, Homo sapiens; identical to SEQ ID NO: 38734

SEQ ID NO: 38776 - protein, 233 aa, Homo sapiens; identical to SEQ ID NO: 38743

SEQ ID NO: 38777 - protein, 259 aa, Homo sapiens; identical to SEQ ID NO: 38754

SEQ ID NO: 38778 - protein, 136 aa, Homo sapiens; identical to SEQ ID NO: 38723
  VARIANT 1: note = MOD_RES - Any amino acid

SEQ ID NO: 38779 - protein, 244 aa, Homo sapiens; identical to SEQ ID NO: 38725

SEQ ID NO: 38780 - protein, 1126 aa, Homo sapiens; identical to SEQ ID NO: 38714

SEQ ID NO: 38781 - protein, 136 aa, Homo sapiens; identical to SEQ ID NO: 38723
  VARIANT 1: note = MOD_RES - Any amino acid

SEQ ID NO: 38782 - protein, 215 aa, Homo sapiens; identical to SEQ ID NO: 38718

SEQ ID NO: 38783 - protein, 197 aa, Homo sapiens; identical to SEQ ID NO: 38726

SEQ ID NO: 38784 - protein, 515 aa, Homo sapiens; identical to SEQ ID NO: 38742

SEQ ID NO: 38785 - protein, 245 aa, Homo sapiens
PPRHLHVVRPMSHYTTPMVLQQAAIPIQINVGTTVTMTGPAPPPATSHPRVIRISHQSVEPVVMMHMNIQDSGTQPGGVPSAPTGPLGPPGHGQTLGQQVPGFPTAPTRVVIARPTPPQARPSHPGGPPVSGTLQGAGLGTNASLAQMVSGLVGQLLMQPVLVAQGTPGMAPPPAPATASASAGTTNTATTAGPAPGGPAQPPPTPQPSMADLQFSQLLGNLLGPAGPGAGGPGVASPTITVAMP

SEQ ID NO: 38786 - protein, 245 aa, Homo sapiens; identical to SEQ ID NO: 38713

SEQ ID NO: 38787 - protein, 258 aa, Homo sapiens; identical to SEQ ID NO: 38740

SEQ ID NO: 38788 - protein, 262 aa, Homo sapiens; identical to SEQ ID NO: 38715

SEQ ID NO: 38789 - protein, 743 aa, Homo sapiens [sequence omitted]

SEQ ID NO: 38790 - protein, 258 aa, Homo sapiens; identical to SEQ ID NO: 38740

SEQ ID NO: 38791 - protein, 185 aa, Homo sapiens; identical to SEQ ID NO: 38747
  VARIANT 1: note = MOD_RES - Any amino acid

SEQ ID NO: 38792 - protein, 215 aa, Homo sapiens; identical to SEQ ID NO: 38718

SEQ ID NO: 38793 - protein, 259 aa, Homo sapiens; identical to SEQ ID NO: 38754

SEQ ID NO: 38794 - protein, 158 aa, Homo sapiens; identical to SEQ ID NO: 38734

SEQ ID NO: 38795 - protein, 206 aa, Homo sapiens; identical to SEQ ID NO: 38727

SEQ ID NO: 38796 - protein, 743 aa, Homo sapiens [sequence omitted]

SEQ ID NO: 38797 - protein, 226 aa, Homo sapiens; identical to SEQ ID NO: 38735
  VARIANT 1: note = MOD_RES - Any amino acid

SEQ ID NO: 38798 - protein, 197 aa, Homo sapiens; identical to SEQ ID NO: 38726

SEQ ID NO: 38799 - protein, 238 aa, Homo sapiens; identical to SEQ ID NO: 38731

SEQ ID NO: 38800 - protein, 244 aa, Homo sapiens; identical to SEQ ID NO: 38725

SEQ ID NO: 38801 - protein, 262 aa, Homo sapiens; identical to SEQ ID NO: 38715

SEQ ID NO: 38802 - protein, 743 aa, Homo sapiens [sequence omitted]

SEQ ID NO: 38803 - protein, 244 aa, Homo sapiens; identical to SEQ ID NO: 38725

SEQ ID NO: 38804 - protein, 262 aa, Homo sapiens; identical to SEQ ID NO: 38715

SEQ ID NO: 38805 - protein, 903 aa, Homo sapiens
MEPNDSTSTAVEEPDSLEVLVKTLDSQTRTFIVGAQMNVKEFKEHIAASVSIPSEKQRLIYQGRVLQDDKKLQEYNVGGKVIHLVERAPPQTHLPSGASSGTGSASATHGGGSPPGTRGPGASVHDRNANSYVMVGTFNLPSDGSAVDVHINMEQAPIQSEPRVRLVMAQHMIRDIQTLLSRMECRGGPQPQHSQPPPQPPAVTPEPVALSSQTSEPVESEAPPREPMEAEEVEERAPAQNPELTPGPAPAGPTPAPETNAPNHPSPAEYVEVLQELQRLESRLQPFLQRYYEVLGAAATTDYNNNHEGREEDQRLINLVGESLRLLGNTFVALSDLRCNLACTPPRHLHVVRPMSHYTTPMVLQQAAIPIQINVGTTVTMTGNGTRPPPTPNAEAPPPGPGQASSVAPSSTNVESSAEGAPPPGPAPPPATSHPRVIRISHQSVEPVVMMHMNIQDSGTQPGGVPSAPTGPLGPPGHGQTLGQQVPGFPTAPTRVVIARPTPPQARPSHPGGPPVSGTLGAGLGTNASLAQMVSGLVGQLLMQPVLVAQGTPGSPGGLGLESLSPEFFTSVVQGVLSSLLGSLGARAGSSESIAAFIQRLSGSSNIFEPGADGALGFFGALLSLLCQNFSMVDVVMLLHGHFQPLQRLQPQLRSFFHQHYLGGQEPTPSNIRMATHTLITGLEEYVRESFSLVQVQPGVDIIRTNLEFLQEQFNSIAAHVLHCTDSGFGARLLELCNQGLFECLALNLHCLGGQQMELAAVINGRIRRMSRGVNPSLVSWLTTMMGLRLQVVLEHMPVGPDAILRYVRRVGDPPQPLPEEPMEVQGAERASPEPQEWVPIIQQDIQSQRKVKPQPPLSDAYLSGMPAKRRKLRSDIQKRLQEDPNYSPQRFPNAQRAFADDP

SEQ ID NO: 38806 - protein, 185 aa, Homo sapiens; identical to SEQ ID NO: 38747
  VARIANT 1: note = MOD_RES - Any amino acid

SEQ ID NO: 38807 - protein, 262 aa, Homo sapiens; identical to SEQ ID NO: 38715

SEQ ID NO: 38808 - protein, 206 aa, Homo sapiens; identical to SEQ ID NO: 38727

SEQ ID NO: 38809 - protein, 226 aa, Homo sapiens; identical to SEQ ID NO: 38735
  VARIANT 1: note = MOD_RES - Any amino acid

SEQ ID NO: 38810 - protein, 259 aa, Homo sapiens; identical to SEQ ID NO: 38754

SEQ ID NO: 38811 - protein, 258 aa, Homo sapiens; identical to SEQ ID NO: 38740

SEQ ID NO: 38812 - protein, 158 aa, Homo sapiens; identical to SEQ ID NO: 38734

SEQ ID NO: 38813 - protein, 244 aa, Homo sapiens; identical to SEQ ID NO: 38725

SEQ ID NO: 38814 - protein, 1126 aa, Homo sapiens; identical to SEQ ID NO: 38705

SEQ ID NO: 38815 - protein, 244 aa, Homo sapiens; identical to SEQ ID NO: 38725

SEQ ID NO: 38816 - protein, 515 aa, Homo sapiens; identical to SEQ ID NO: 38742

SEQ ID NO: 38817 - protein, 1126 aa, Homo sapiens; identical to SEQ ID NO: 38705

SEQ ID NO: 38818 - protein, 136 aa, Homo sapiens; identical to SEQ ID NO: 38723
  VARIANT 1: note = MOD_RES - Any amino acid

SEQ ID NO: 38819 - protein, 1132 aa, Homo sapiens; identical to SEQ ID NO: 38756

SEQ ID NO: 38820 - protein, 233 aa, Homo sapiens; identical to SEQ ID NO: 38743

SEQ ID NO: 38821 - protein, 185 aa, Homo sapiens; identical to SEQ ID NO: 38747
  VARIANT 1: note = MOD_RES - Any amino acid

SEQ ID NO: 38822 - protein, 245 aa, Homo sapiens; identical to SEQ ID NO: 38785

SEQ ID NO: 38823 - protein, 233 aa, Homo sapiens; identical to SEQ ID NO: 38743

SEQ ID NO: 38824 - protein, 259 aa, Homo sapiens; identical to SEQ ID NO: 38754

SEQ ID NO: 38825 - protein, 233 aa, Homo sapiens; identical to SEQ ID NO: 38743

SEQ ID NO: 38826 - protein, 515 aa, Homo sapiens; identical to SEQ ID NO: 38742

SEQ ID NO: 38827 - protein, 158 aa, Homo sapiens; identical to SEQ ID NO: 38734

SEQ ID NO: 38828 - protein, 233 aa, Homo sapiens; identical to SEQ ID NO: 38743

SEQ ID NO: 38829 - protein, 244 aa, Homo sapiens; identical to SEQ ID NO: 38725

SEQ ID NO: 38830 - protein, 1132 aa, Homo sapiens; identical to SEQ ID NO: 38706

SEQ ID NO: 38831 - protein, 515 aa, Homo sapiens; identical to SEQ ID NO: 38742

SEQ ID NO: 38832 - protein, 244 aa, Homo sapiens; identical to SEQ ID NO: 38725

SEQ ID NO: 38833 - protein, 743 aa, Homo sapiens [sequence omitted]

SEQ ID NO: 38834 - protein, 244 aa, Homo sapiens; identical to SEQ ID NO: 38725

SEQ ID NO: 38835 - protein, 244 aa, Homo sapiens; identical to SEQ ID NO: 38725

SEQ ID NO: 38836 - protein, 1132 aa, Homo sapiens; identical to SEQ ID NO: 38706

SEQ ID NO: 38837 - protein, 245 aa, Homo sapiens; identical to SEQ ID NO: 38785

SEQ ID NO: 38838 - protein, 258 aa, Homo sapiens; identical to SEQ ID NO: 38740

SEQ ID NO: 38839 - protein, 262 aa, Homo sapiens; identical to SEQ ID NO: 38715

SEQ ID NO: 38840 - protein, 262 aa, Homo sapiens; identical to SEQ ID NO: 38715

SEQ ID NO: 38841 - protein, 245 aa, Homo sapiens; identical to SEQ ID NO: 38713

SEQ ID NO: 38842 - protein, 215 aa, Homo sapiens; identical to SEQ ID NO: 38718

SEQ ID NO: 38843 - protein, 244 aa, Homo sapiens; identical to SEQ ID NO: 38725

SEQ ID NO: 38844 - protein, 185 aa, Homo sapiens; identical to SEQ ID NO: 38747
  VARIANT 1: note = MOD_RES - Any amino acid

SEQ ID NO: 38845 - protein, 259 aa, Homo sapiens; identical to SEQ ID NO: 38754

SEQ ID NO: 38846 - protein, 158 aa, Homo sapiens; identical to SEQ ID NO: 38734

SEQ ID NO: 38847 - protein, 206 aa, Homo sapiens; identical to SEQ ID NO: 38727

SEQ ID NO: 38848 - protein, 1132 aa, Homo sapiens; identical to SEQ ID NO: 38756

SEQ ID NO: 38849 - protein, 238 aa, Homo sapiens; identical to SEQ ID NO: 38731

SEQ ID NO: 38850 - protein, 206 aa, Homo sapiens; identical to SEQ ID NO: 38727

SEQ ID NO: 38851 - protein, 185 aa, Homo sapiens; identical to SEQ ID NO: 38747
  VARIANT 1: note = MOD_RES - Any amino acid

SEQ ID NO: 38852 - protein, 215 aa, Homo sapiens; identical to SEQ ID NO: 38718

SEQ ID NO: 38853 - protein, 262 aa, Homo sapiens; identical to SEQ ID NO: 38715

SEQ ID NO: 38854 - protein, 197 aa, Homo sapiens; identical to SEQ ID NO: 38726

SEQ ID NO: 38855 - protein, 244 aa, Homo sapiens; identical to SEQ ID NO: 38725

SEQ ID NO: 38856 - protein, 226 aa, Homo sapiens; identical to SEQ ID NO: 38735
  VARIANT 1: note = MOD_RES - Any amino acid

SEQ ID NO: 38857 - protein, 245 aa, Homo sapiens; identical to SEQ ID NO: 38713

SEQ ID NO: 38858 - protein, 226 aa, Homo sapiens; identical to SEQ ID NO: 38735
  VARIANT 1: note = MOD_RES - Any amino acid

SEQ ID NO: 38859 - protein, 226 aa, Homo sapiens; identical to SEQ ID NO: 38735
  VARIANT 1: note = MOD_RES - Any amino acid

SEQ ID NO: 38860 - protein, 258 aa, Homo sapiens; identical to SEQ ID NO: 38740

SEQ ID NO: 38861 - protein, 136 aa, Homo sapiens; identical to SEQ ID NO: 38723
  VARIANT 1: note = MOD_RES - Any amino acid

SEQ ID NO: 38862 - protein, 1162 aa, Homo sapiens [sequence omitted]

SEQ ID NO: 38863 - protein, 903 aa, Homo sapiens; identical to SEQ ID NO: 38805

SEQ ID NO: 38864 - protein, 903 aa, Homo sapiens; identical to SEQ ID NO: 38805

SEQ ID NO: 38865 - protein, 1077 aa, Homo sapiens; identical to SEQ ID NO: 38707

SEQ ID NO: 38866 - protein, 1077 aa, Homo sapiens
MEPNDSTSTAVEEPDSLEVLVKTLDSQTRTFIVGAQMNVKEFKEHIAASVSIPSEKQRLIYQGRVLQDDKKLQEYNVGGKVIHLVERAPPQTHLPSGASSGTGSASATHGGGSPPGTRGPGASVHDRNANSYVMVGTFNLPSDGSAVDVHINMEQAPIQSEPRVRLVMAQHMIRDIQTLLSRMECRGGPQPQHSQPPPQPPAVTPEPVALSSQTSEPVESEAPPREPMEAEEVEERAPAQNPELTPGPAPAGPTPAPETNAPNHPSPAEYVEVLQELQRLESRLQPFLQRYYEVLGAAATTDYNNNHEGREEDQRLINLVGESLRLLGNTFVALSDLRCNLACTPPRHLHVVRPMSHYTTPMVLQQAAIPIQINVGTTVTMTGNGTRPPPTPNAEAPPPGPGQASSVAPSSTNVESSAEGAPPPGPAPPPATSHPRVIRISHQSVEPVVMMHMNIQDSGTQPGGVPSAPTGPLGPPGHGQTLGQQVPGFPTAPTRVVIARPTPPQARPSHPGGPPVSGTLQGAGLGTNASLAQMVSGLVGQLLMQPVLVAQGTPGMAPPPAPATASASAGTTNTATTAGPAPGGPAQPPPTPQPSMADLQFSQLLGNLLGPAGPGAGGPGVASPTITVAMPGVPAFLQGMTDFLQATQTAPPPPPPPPPPPPAPEQQTMPPPGSPSGGAGSPGGLGLESLSPEFFTSVVQGVLSSLLGSLGARAGSSESIAAFIQRLSGSSNIFEPGADGALGFFGALLSLLCQNFSMVDVVMLLHGHFQPLQRLQPQLRSFFHQHYLGGQEPTPSNIRMATHTLITGLEEYVRESFSLVQVQPGVDIIRTNLEFLQEQFNSIAAHVLHCTDSGFGARLLELCNQGLFECLALNLHCLGGQQMELAAVINGRIRRMSRGVNPSLVSWLTTMMGLRLQVVLEHMPVGPDAILRYVRRVGDPPQPLPEEPMEVQGAERASPEPQRENASPAPGTTAEEAMSRGPPPAPEGGSRDEQDGASAETEPWAAAVPPEWVPIIQQDIQSQRKVKPQPPLSDAYLSGMPAKRRKLRSDIQKRLQEDPNYSPQRFPNAQRAFADDP

SEQ ID NO: 38867 - protein, 1162 aa, Homo sapiens [sequence omitted]

SEQ ID NO: 38868 - protein, 1077 aa, Homo sapiens; identical to SEQ ID NO: 38707

SEQ ID NO: 38869 - protein, 903 aa, Homo sapiens; identical to SEQ ID NO: 38805

SEQ ID NO: 38870 - protein, 1162 aa, Homo sapiens; identical to SEQ ID NO: 38712

SEQ ID NO: 38871 - protein, 1077 aa, Homo sapiens; identical to SEQ ID NO: 38866

SEQ ID NO: 38872 - protein, 903 aa, Homo sapiens; identical to SEQ ID NO: 38805

SEQ ID NO: 38873 - protein, 903 aa, Homo sapiens; identical to SEQ ID NO: 38805

SEQ ID NO: 38874 - protein, 1162 aa, Homo sapiens; identical to SEQ ID NO: 38712

SEQ ID NO: 38875 - protein, 1162 aa, Homo sapiens [sequence omitted]

SEQ ID NO: 38876 - protein, 1162 aa, Homo sapiens; identical to SEQ ID NO: 38712

SEQ ID NO: 38877 - protein, 1077 aa, Homo sapiens; identical to SEQ ID NO: 38866

SEQ ID NO: 38878 - protein, 1077 aa, Homo sapiens; identical to SEQ ID NO: 38707

SEQ ID NO: 38879 - protein, 903 aa, Homo sapiens; identical to SEQ ID NO: 38805

SEQ ID NO: 38880 - protein, 138 aa, Homo sapiens
MKEYSGFAGVSRPRGTFFRIRGRGRARGVFAGTNTGPNNSNTTFQKRPKEEEWDPEYTPKSKKYFLHDDRDDGVDYWAKRGRGRGTFQRGRGRFNFKKSGSSPKWTHDKYQGDGIVEDEEETMENNEEKKDRRKEEKE

SEQ ID NO: 38881 - protein, 869 aa, Homo sapiens
MGRSNSRSHSSRSKSRSQSSSRSRSRSHSRKKRYRSRSRTYSRSRSRDRMYSRDYRRDYRNNRGMRRPYGYRGRGRGYYQGGGGRYHRGGYRPVWNRRHSRSPRRGRSRSRSPKRRSVSSQRSRSRSRRSYRSSRSPRSSSSRSSSPYSKSPVSKRRGSQEKQTKKAEGEPQEESPLKSKSQEEPKDTFEHDPSESIDEFNKSSATSGDIWPGLSAYDNSPRSPHSPSPIATPPSQSSSCSDAPMLSTVHSAKNTPSQHSHSIQHSPERSGSGSVGNGSSRYSPSQNSPIHHIPSRRSPAKTIAPQNAPRDESRGRSSFYPDGGDQETAKTGKFLKRFTDEESRVFLLDRGNTRDKEASKEKGSEKGRAEGEWEDQEALDYFSDKESGKQKFNDSEGDDTEETEDYRQFRKSVLADQGKSFATASHRNTEEEGLKYKSKVSLKGNRESDGFREEKNYKLKETGYVVERPSTTKDKHKEEDKNSERITVKKETQSPEQVKSEKLKDLFDYSPPLHKNLDAREKSTFREESPLRIKMIASDSHRPEVKLKMAPVPLDDSNRPASLTKDRLLASTLVHSVKKEQEFRSIFDHIKLPQASKSTSESFIQHIVSLVHHVKEQYFKSAAMTLNERFTSYQKATEEHSTRQKSPEIHRRIDISPSTLRKHTRLAGEERVFKEENQKGDKKLRCDSADLRHDIDRRRKERSKERGDSKGSRESSGSRKQEKTPKDYKEYKSYKDDSKHKREQDHSRSSSSSASPSSPSSREEKESKKEREEEFKTHHEMKEYSGFAGVSRPRGTFHDDRDDGVDYWAKRGRGRGTFQRGRGRFNFKKSGSSPKWTHDKYQGDGIVEDEEETMENNEEKKDRRKEEKE

SEQ ID NO: 38882 - protein, 869 aa, Homo sapiens; identical to SEQ ID NO: 38881

SEQ ID NO: 38883 - protein, 918 aa, Homo sapiens
MGRSNSRSHSSRSKSRSQSSSRSRSRSHSRKKRYRSRSRTYSRSRSRDRMYSRDYRRDYRNNRGMRRPYGYRGRGRGYYQGGGGRYHRGGYRPVWNRRHSRSPRRGRSRSRSPKRRSVSSQRSRSRSRRSYRSSRSPRSSSSRSSSPYSKSPVSKRRGSQEKQTKKAEGEPQEESPLKSKSQEEPKDTFEHDPSESIDEFNKSSATSGDIWPGLSAYDNSPRSPHSPSPIATPPSQSSSCSDAPMLSTVHSAKNTPSQHSHSIQHSPERSGSGSVGNGSSRYSPSQNSPIHHIPSRRSPAKTIAPQNAPRDESRGRSSFYPDGGDQETAKTGKFLKRFTDEESRVFLLDRGNTRDKEASKEKGSEKGRAEGEWEDQEALDYFSDKESGKQKFNDSEGDDTEETEDYRQFRKSVLADQGKSFATASHRNTEEEGLKYKSKVSLKGNRESDGFREEKNYKLKETGYVVERPSTTKDKHKEEDKNSERITVKKETQSPEQVKSEKLKDLFDYSPPLHKNLDAREKSTFREESPLRIKMIASDSHRPEVKLKMAPVPLDDSNRPASLTKDRLLASTLVHSVKKEQEFRSIFDHIKLPQASKSTSESFIQHIVSLVHHVKEQYFKSAAMTLNERFTSYQKATEEHSTRQKSPEIHRRIDISPSTLRKHTRLAGEERVFKEENQKGDKKLRCDSADLRHDIDRRRKERSKERGDSKGSRESSGSRKQEKTPKDYKEYKSYKDDSKHKREQDHSRSSSSSASPSSPSSREEKESKKEREEEFKTHHEMKEYSGFAGVSRPRGTFFRIRGRGRARGVFAGTNTGPNNSNTTFQKRPKEEEWDPEYTPKSKKYFLHDDRDDGVDYWAKRGRGRGTFQRGRGRFNFKKSGSSPKWTHDKYQGDGIVEDEEETMENNEEKKDRRKEEKE

SEQ ID NO: 38884 - protein, 747 aa, Homo sapiens
MGRSNSRSHSSRSKSRSQSSSRSRSRSHSRKKRYSSRSRSRTYSRSRSRDRMYSRDYRRDYRNNRGMRRPYGYRGRGRGYYQGGGGRYHRGGYRPVWNRRHSRSPRRGRSRSRSPKRRSVSSQRSRSRSRRSYRSSRSPRSSSSRSSSPYSKSPVSKRRGSQEKQTKKAEGEPQEESPLKSKSQEEPKDTFEHDPSESIDEFNKSSATSGDIWPGLSAYDNSPRSPHSPSPIATPPSQSSSCSDAPMLSTVHSAKNTPSQHSHSIQHSPERSGSGSVGNGSSRYSPSQNSPIHHIPSRRSPAKTIAPQNAPRDESRGRSSFYPDGGDQETAKTGKFLKSPPLHKNLDAREKSTFREESPLRIKMIASDSHRPEVKLKMAPVPLDDSNRPASLTKDRLLASTLVHSVKKEQEFRSIFDHIKLPQASKSTSESFIQHIVSLVHHVKEQYFKSAAMTLNERFTSYQKATEEHSTRQKSPEIHRRIDISPSTLRKHTRLAGEERVFKEENQKGDKKLRCDSADLRHDIDRRRKERSKERGDSKGSRESSGSRKQEKTPKDYKEYKSYKDDSKHKREQDHSRSSSSSASPSSPSSREEKESKKEREEEFKTHHEMKEYSGFAGVSRPRGTFFRIRGRGRARGVFAGTNTGPNNSNTTFQKRPKEEEWDPEYTPKSKKYFLHDDRDDGVDYWAKRGRGRGTFQRGRGRFNFKKSGSSPKWTHDKYQGDGIVEDEEETMENNEEKKDRRKEEKE

SEQ ID NO: 38885 - protein, 920 aa, Homo sapiens
MGRSNSRSHSSRSKSRSQSSSRSRSRSHSRKKRYSSRSRSRTYSRSRSRDRMYSRDYRRDYRNNRGMRRPYGYRGRGRGYYQGGGGRYHRGGYRPVWNRRHSRSPRRGRSRSRSPKRRSVSSQRSRSRSRRSYRSSRSPRSSSSRSSSPYSKSPVSKRRGSQEKQTKKAEGEPQEESPLKSKSQEEPKDTFEHDPSESIDEFNKSSATSGDIWPGLSAYDNSPRSPHSPSPIATPPSQSSSCSDAPMLSTVHSAKNTPSQHSHSIQHSPERSGSGSVGNGSSRYSPSQNSPIHHIPSRRSPAKTIAPQNAPRDESRGRSSFYPDGGDQETAKTGKFLKRFTDEESRVFLLDRGNTRDKEASKEKGSEKGRAEGEWEDQEALDYFSDKESGKQKFNDSEGDDTEETEDYRQFRKSVLADQGKSFATASHRNTEEEGLKYKSKVSLKGNRESDGFREEKNYKLKETGYVVERPSTTKDKHKEEDKNSERITVKKETQSPEQVKSEKLKDLFDYSPPLHKNLDAREKSTFREESPLRIKMIASDSHRPEVKLKMAPVPLDDSNRPASLTKDRLLASTLVHSVKKEQEFRSIFDHIKLPQASKSTSESFIQHIVSLVHHVKEQYFKSAAMTLNERFTSYQKATEEHSTRQKSPEIHRRIDISPSTLRKHTRLAGEERVFKEENQKGDKKLRCDSADLRHDIDRRRKERSKERGDSKGSRESSGSRKQEKTPKDYKEYKSYKDDSKHKREQDHSRSSSSSASPSSPSSREEKESKKEREEEFKTHHEMKEYSGFAGVSRPRGTFFRIRGRGRARGVFAGTNTGPNNSNTTFQKRPKEEEWDPEYTPKSKKYFLHDDRDDGVDYWAKRGRGRGTFQRGRGRFNFKKSGSSPKWTHDKYQGDGIVEDEEETMENNEEKKDRRKEEKE

SEQ ID NO: 38886 - protein, 176 aa, Homo sapiens
MGRPAGLFPPLCPFLGFRPEACWERHMQIERAPSVPPFLRWAGYRPGPVRRRGKVELIKFVRVQWRRPQVEWRRRRWGPGPGASMAGSEELGLREDTLRVLAAFLRRGEAAGSPVPTPPRPSYSRLLCFGGPAAGTAGPRAAEISAQPRITGSPIDREGSHTAEAGGPAGGGGRSH

SEQ ID NO: 38887 - protein, 334 aa, Homo sapiens
MGRPAGLFPPLCPFLGFRPEACWERHMQIERAPSVPPFLRWAGYRPGPVRRRGKVELIKFVRVQWRRPQVEWRRRRWGPGPGASMAGSEELGLREDTLRVLAAFLRRGEAAGSPVPTPPRSPAQEEPTDFLSRLRRCLPCSLGRGAAPSESPRPCSLPIRPCYGLEPGPATPDFYALVAQRLEQLVQEQLKSPPSPELQGPPSTEKEAILRRLVALLEEEAEVINQKLASDPALRSKLVRLSSDSFARLVELFCSRDDSSRPSRACPGPPPPSPEPLARLALAMELSRRVAGLGGTLAGLSVEHVHSFTPWIQAHGGWEGILAVSPVDLNLPLD

SEQ ID NO: 38888 - protein, 333 aa, Homo sapiens
MGRPAGLFPPLCPFLGFRPEACWERHMQIERAPSVPPFLRWAGYRPGPVRRRGKVELIKFVRVQWRRPQVEWRRRRWGPGPGASMAGSEELGLREDTLRVLAAFLRRGEAAGSPVPTPPSPAQEEPTDFLSRLRRCLPCSLGRGAAPSESPRPCSLPIRPCYGLEPGPATPDFYALVAQRLEQLVQEQLKSPPSPELQGPPSTEKEAILRRLVALLEEEAEVINQKLASDPALRSKLVRLSSDSFARLVELFCSRDDSSRPSRACPGPPPPSPEPLARLALAMELSRRVAGLGGTLAGLSVEHVHSFTPWIQAHGGWEGILAVSPVDLNLPLD

SEQ ID NO: 38889 - protein, 1721 aa, Homo sapiens
MLSATPLYGNVHSWMNSERVRMCGASEDRKILVNDGDASKARLELREENPLNHNVVDASTAHRIDGLAALSMDRTGLIREGLRVPGNIVYSSLCGLGSEKGREAATSTLGGLGFSSERNPEMQFKPNTPETVEASAVSGKPPNGFSAIYKTPPGIQKSAVATAEALGLDRPASDKQSPLNINGASYLRLPWVNPYMEGATPAIYPFLDSPNKYSLNMYKALLPQQSYSLAQPLYSPVCTNGERFLYLPPPHYVGPHIPSSLASPMRLSTPSASPAIPPLVHCADKSLPWKMGVSPGNPVDSHAYPHIQNSKQPRVPSAKAVTSGLPGDTALLLPPSPRPSPRVHLPTQPAADTYSEFHKHYARISTSPSVALSKPYMTVSSEFPAARLSNGKYPKAPEGGEGAQPVPGHARKTAVQDRKDGSSPPLLEKQTVTKDVTDKPLDLSSKVVDVDASKADHMKKMAPTVLVHSRAGSGLVLSGSEIPKETLSPPGNGCAIYRSEIISTAPSSWVVPGPSPNEENNGKSMSLKNKALDWAIPQQRSSSCPRMGGTDAVITNVSGSVSSAGRPASASPAPNANADGTKTSRSSVETTPSVIQHVGQPPATPAKHSSSTSSKGAKASNPEPSFKANENGLPPSSIFLSPNEAFRSPPIPYPRSYLPYPAPEGIAVSPLSLHGKGPVYPHPVLLPNGSLFPGHLAPKPGLPYGLPTGRPEFVTYQDALGLGMVHPMLIPHTPIEITKEEKPERRSRSHERARYEDPTLRNRFSEILETSSTKLHPDVPTDKNLKPNPNWNQGKTVVKSDKLVYVDLLREEPDAKTDTNVSKPSFAAESVGQSAEPPKPSVEPALQQHRDFIALREELGRISDFHETYTFKQPVFTVSKDSVLAGTNKENLGLPVSTPFLEPPLGSDGPAVTFGKTQEDPKPFCVGSAPPSVDVTPTYTKDGADEAESNDGKVLKPKPSKLAKRIANSAGYVGDRFKCVTTELYADSSQLSREQRALQMEGLQEDSILCLPAAYCERAMMRFSELEMKEREGGHPATKDSEMCKFSPADWERLKGNQDKKPKSVTLEEAIAEQNESERCEYSVGNKHRDPFEAPEDKDLPVEKYFVERQPVSEPPADQVASDMPHSPTLRVDRKRKVSGDSSHTETTAEEVPEDPLLKAKRRRVSKGLHPKKQRHLLHLRERWEQQVSAADGKPGRQSRKEVTQATQPEAIPQGTNITEEKPGRKRAEAKGNRSWSEESLKPSDNEQGLPVFSGSPPMKSLSSTSAGGKKQAQPSCAPASRPPAKQQKIKENQKTDVLCADEEEDCQAASLLQKYTDNSEKPSGKRLCKTKHLIPQESRRGLPLTGEYYVENADGKVTVRRFRKRPEPSSDYDLSPAKQEPKPFDRLQQLLPASQSTQLPCSSSPQETTQSRPMPPEARRLIVNKNAGETLLQRAARLGYEEVVLYCLENKICDVNHRDNAGYCALHEACARGWLNIVRHLLEYGADVNCSAQDGTRPLHDAVENDHLEIVRLLLSYGADPTLATYSGRTIMKMTHSELMEKFLTDYLNDLQGRNDDDASGTWDFYGSSVCEPDDESGYDVLANPPGPEDQDDDDDAYSDVFEFEFSETPLLPCYNIQVSVAQGPRNWLLLSDVLKKLKMSSRIFRCNFPNVEIVTIAEAEFYRQVSASLLFSCSKDLEAFNPESKELLDLVEFTNEIQTLLGSSVEWLHPSDLASDNYW

SEQ ID NO: 38890 - protein, 1755 aa, Homo sapiens
MLSATPLYGNVHSWMNSERVRMCGASEDRKILVNDGDASKARLELREENPLNHNVVDASTAHRIDGLAALSMDRTGLIREGLRVPGNIVYSSLCGLGSEKGREAATSTLGGLGFSSERNPEMQFKPNTPETVEASAVSGKPPNGFSAIYKTPPGIQKSAVATAEALGLDRPASDKQSPLNINGASYLRLPWVNPYMEGATPAIYPFLDSPNKYSLNMYKALLPQQSYSLAQPLYSPVCTNGERFLYLPPPHYVGPHIPSSLASPMRLSTPSASPAIPPLVHCADKSLPWKMGVSPGNPVDSHAYPHIQNSKQPRVPSAKAVTSGLPGDTALLLPPSPRPSPRVHLPTQPAADTYSEFHKHYARISTSPSVALSKPYMTVSSEFPAARLSNGKYPKAPEGGEGAQPVPGHARKTAVQDRKDGSSPPLLEKQTVTKDVTDKPLDLSSKVVDVDASKADHMKKMAPTVLVHSRAGSGLVLSGSEIPKETLSPPGNGCAIYRSEIISTAPSSWVVPGPSPNEENNGKSMSLKNKALDWAIPQQRSSSCPRMGGTDAVITNVSGSVSSAGRPASASPAPNANADGTKTSRSSVETTPSVIQHVGQPPATPAKHSSSTSSKGAKASNPEPSFKANENGLPPSSIFLSPNEAFRSPPIPYPRSYLPYPAPEGIAVSPLSLHGKGPVYPHPVLLPNGSLFPGHLAPKPGLPYGLPTGRPEFVTYQDALGLGMVHPMLIPHTPIEITKEEKPERRSRSHERARYEDPTLRNRFSEILETSSTKLHPDVPTDKNLKPNPNWNQGKTVVKSDKLVYVDLLREEPDAKTDTNVSKPSFAAESVGQSAEPPKPSVEPALQQHRDFIALREELGRISDFHETYTFKQPVFTVSKDSVLAGTNKENLGLPVSTPFLEPPLGSDGPAVTFGKTQEDPKPFCVGSAPPSVDVTPTYTKDGADEAESNDGKVLKPKPSKLAKRIANSAGYVGDRFKCVTTELYADSSQLSREQRALQMEGLQEDSILCLPAAYCERAMMRFSELEMKEREGGHPATKDSEMCKFSPADWERLKGNQDKKPKSVTLEEAIAEQNESERCEYSVGNKHRDPFEAPEDKDLPVEKYFVERQPVSEPPADQVASDMPHSPTLRVDRKRKVSGDSSHTETTAEEVPEDPLLKAKRRRVSKDDWPEREMTNSSSNHLEDPHYSELTNLKVCIELTGLHPKKQRHLLHLRERWEQQVSAADGKPGRQSRKEVTQATQPEAIPQGTNITEEKPGRKRAEAKGNRSWSEESLKPSDNEQGLPVFSGSPPMKSLSSTSAGGKKQAQPSCAPASRPPAKQQKIKENQKTDVLCADEEEDCQAASLLQKYTDNSEKPSGKRLCKTKHLIPQESRRGLPLTGEYYVENADGKVTVRRFRKRPEPSSDYDLSPAKQEPKPFDRLQQLLPASQSTQLPCSSSPQETTQSRPMPPEARRLIVNKNAGETLLQRAARLGYEEVVLYCLENKICDVNHRDNAGYCALHEACARGWLNIVRHLLEYGADVNCSAQDGTRPLHDAVENDHLEIVRLLLSYGADPTLATYSGRTIMKMTHSELMEKFLTDYLNDLQGRNDDDASGTWDFYGSSVCEPDDESGYDVLANPPGPEDQDDDDDAYSDVFEFEFSETPLLPCYNIQVSVAQGPRNWLLLSDVLKKLKMSSRIFRCNFPNVEIVTIAEAEFYRQVSASLLFSCSKDLEAFNPESKELLDLVEFTNEIQTLLGSSVEWLHPSDLASDNYW

SEQ ID NO: 38891 - protein, 1703 aa, Homo sapiens
MLSATPLYGNVHSWMNSERVRMCGASEDRKILVNDGDASKARLELREENPLNHNVVDASTAHRIDGLAALSMDRTGLIREGLRVPGNIVYSSLCGLGSEKGREAATSTLGGLGFSSERNPEMQFKPNTPETVEASAVSGKPPNGFSAIYKTPPGIQKSAVATAEALGLDRPASDKQSPLNINGASYLRLPWVNPYMEGATPAIYPFLDSPNKYSLNMYKALLPQQSYSLAQPLYSPVCTNGERFLYLPPPHYVGPHIPSSLASPMRLSTPSASPAIPPLVHCADKSLPWKMGVSPGNPVDSHAYPHIQNSKQPRVPSAKAVTSGLPGDTALLLPPSPRPSPRVHLPTQPAADTYSEFHKHYARISTSPSVALSKPYMTVSSEFPAARLSNGKYPKAPEGGEGAQPVPGHARKTAVQDRKDGSSPPLLEKQTVTKDVTDKPLDLSSKVVDVDASKADHMKKMAPTVLVHSRAGSGLVLSGSEIPKETLSPPGNGCAIYRSEIISTAPSSWVVPGPSPNEENNGKSMSLKNKALDWAIPQQRSSSCPRMGGTDAVITNVSGSVSSAGRPASASPAPNANADGTKTSRSSVETTPSVIQHVGQPPATPAKHSSSTSSKGAKASNPEPSFKANENGLPPSSIFLSPNEAFRSPPIPYPRSYLPYPAPEGIAVSPLSLHGKGPVYPHPVLLPNGSLFPGHLAPKPGLPYGLPTGRPEFVTYQDALGLGMVHPMLIPHTPIEITKEEKPERRSRSHERARYEDPTLRNRFSEILETSSTKLHPDVPTDKNLKPNPNWNQGKTVVKSDKLVYVDLLREEPDAKTDTNVSKPSFAAESVGQSAEPPKPSVEPALQQHRDFIALREELGRISDFHETYTFKQPVFTVSKDSVLAGTNKENLGLPVSTPFLEPPLGSDGPAVTFGKTQEDPKPFCVGSAPPSVDVTPTYTKDGADEAESNDGKVLKPKPSKLAKRIANSAGYVGDRFKCVTTELYADSSQLSREQRALQRAMMRFSELEMKEREGGHPATKDSEMCKFSPADWERLKGNQDKKPKSVTLEEAIAEQNESERCEYSVGNKHRDPFEAPEDKDLPVEKYFVERQPVSEPPADQVASDMPHSPTLRVDRKRKVSGDSSHTETTAEEVPEDPLLKAKRRRVSKGLHPKKQRHLLHLRERWEQQVSAADGKPGRQSRKEVTQATQPEAIPQGTNITEEKPGRKRAEAKGNRSWSEESLKPSDNEQGLPVFSGSPPMKSLSSTSAGGKKQAQPSCAPASRPPAKQQKIKENQKTDVLCADEEEDCQAASLLQKYTDNSEKPSGKRLCKTKHLIPQESRRGLPLTGEYYVENADGKVTVRRFRKRPEPSSDYDLSPAKQEPKPFDRLQQLLPASQSTQLPCSSSPQETTQSRPMPPEARRLIVNKNAGETLLQRAARLGYEEVVLYCLENKICDVNHRDNAGYCALHEACARGWLNIVRHLLEYGADVNCSAQDGTRPLHDAVENDHLEIVRLLLSYGADPTLATYSGRTIMKMTHSELMEKFLTDYLNDLQGRNDDDASGTWDFYGSSVCEPDDESGYDVLANPPGPEDQDDDDDAYSDVFEFEFSETPLLPCYNIQVSVAQGPRNWLLLSDVLKKLKMSSRIFRCNFPNVEIVTIAEAEFYRQVSASLLFSCSKDLEAFNPESKELLDLVEFTNEIQTLLGSSVEWLHPSDLASDNYW

SEQ ID NO: 38892 - protein, 622 aa, Homo sapiens
MPHSPTLRVDRKRKVSGDSSHTETTAEEVPEDPLLKAKRRRVSKGLHPKKQRHLLHLRERWEQQVSAADGKPGRQSRKEVTQATQPEAIPQGTNITEEKPGRKRAEAKGNRSWSEESLKPSDNEQGLPVFSGSPPMKSLSSTSAGGKKQAQPSCAPASRPPAKQQKIKENQKTDVLCADEEEDCQAASLLQKYTDNSEKPSGKRLCKTKHLIPQESRRGLPLTGEYYVENADGKVTVRRFRKRPEPSSDYDLSPAKQEPKPFDRLQQLLPASQSTQLPCSSSPQETTQSRPMPPEARRLIVNKNAGETLLQRAARLGYEEVVLYCLENKICDVNHRDNAGYCALHEACARGWLNIVRHLLEYGADVNCSAQDGTRPLHDAVENDHLEIVRLLLSYGADPTLATYSGRTIMKMTHSELMEKFLTDYLNDLQGRNDDDASGTWDFYGSSVCEPDDESGYDVLANPPGPEDQDDDDDAYSDVFEFEFSETPLLPCYNIQVSVAQGPRNWLLLSDVLKKLKMSSRIFRCNFPNVEIVTIAEAEFYRQVSASLLFSCSKDLEAFNPESKELLDLVEFTNEIQTLLGSSVEWLHPSDLASDNYWKSPQIARGSVEGKKTDDKTSKTDL

SEQ ID NO: 38893 - protein, 1721 aa, Homo sapiens; identical to SEQ ID NO: 38889

SEQ ID NO: 38894 - protein, 28 aa, Homo sapiens
MLSATPLYGNVHSWMNSERVRMCGASED

SEQ ID NO: 38895 - protein, 411 aa, Homo sapiens
MTRPAFQPPATPAKHSSSTSSKGAKASNPEPSFKANENGLPPSSIFLSPNEAFRSPPIPYPRSYLPYPAPEGIAVSPLSLHGKGPVYPHPVLLPNGSLFPGHLAPKPGLPYGLPTGRPEFVTYQDALGLGMVHPMLIPHTPIEITKEEKPERRSRSHERARYEDPTLRNRFSEILETSSTKLHPDVPTDKNLKPNPNWNQGKTVVKSDKLVYVDLLREEPDAKTDTNVSKPSFAAESVGQSAEPPKPSVEPALQQHRDFIALREELGRISDFHETYTFKQPVFTVSKDSVLAGTNKENLGLPVSTPFLEPPLGSDGPAVTFGKTQEDPKPFCVGSAPPSVDVTPTYTKDGADEAESNDGKVLKPKPSKLAKRIANSAGYVGDRFKCVTTELYADSSQLSREQRALQVSPPT

SEQ ID NO: 38896 - protein, 1711 aa, Homo sapiens
MISTAPLYSGVHNWTSSDRIRMCGINEERRAPLSDEESTTGDCQHFGSQEFCVSSSFSKVELTAVGSGSNARGADPDGSATEKLGHKSEDKPDDPQPKMDYAGNVAEAEGFLVPLSSPGDGLKLPASDSAEASNSRADCSWTPLNTQMSKQVDCSPAGVKALDSRQGVGEKNTFILATLGTGVPVEGTLPLVTTNFSPLPAPICPPAPGSASVPHSVPDAFQVPLSVPAPVPHSGLVPVQVATSVPAPSPPLAPVPALAPAPPSVPTLISDSNPLSVSASVLVPVPASAPPSGPVPLSAPAPAPLSVPVSAPPLALIQAPVPPSAPTLVLAPVPTPVLAPMPASTPPAAPAPPSVPMPTPTPSSGPPSTPTLIPAFAPTPVPAPTPAPIFTPAPTPMPAATPAAIPTSAPIPASFSLSRVCFPAAQAPAMQKVPLSFQPGTVLTPSQPLVYIPPPSCGQPLSVATLPTTLGVSSTLTLPVLPSYLQDRCLPGVLASPELRSYPYAFSVARPLTSDSKLVSLEVNRLPCTSPSGSTTTQPAPDGVPGPLADTSLVTASAKVLPTPQPLLPAPSGSSAPPHPAKMPSGTEQQTEGTSVTFSPLKSPPQLEREMASPPECSEMPLDLSSKSNRQKLPLPNQRKTPPMPVLTPVHTSSKALLSTVLSRSQRTTQAAGGNVTSCLGSTSSPFVIFPEIVRNGDPSTWVKNSTALISTIPGTYVGVANPVPASLLLNKDPNLGLNRDPRHLPKQEPISIIDQGEPKGTGATCGKKGSQAGAEGQPSTVKRYTPARIAPGLPGCQTKELSLWKPTGPANIYPRCSVNGKPTSTQVLPVGWSPYHQASLLSIGISSAGQLTPSQGAPIRPTSVVSEFSGVPSLSSSEAVHGLPEGQPRPGGSFVPEQDPVTKNKTCRIAAKPYEEQVNPVLLTLSPQTGTLALSVQPSGGDIRMNQGPEESESHLCSDSTPKMEGPQGACGLKLAGDTKPKNQVLATYMSHELVLATPQNLPKMPELPLLPHDSHPKELILDVVPSSRRGSSTERPQLGSQVDLGRVKMEKVDGDVVFNLATCFRADGLPVAPQRGQAEVRAKAGQARVKQESVGVFACKNKWQPDDVTESLPPKKMKCGKEKDSEEQQLQPQAKAVVRSSHRPKCRKLPSDPQESTKKSPRGASDSGKEHNGVRGKHKHRKPTKPESQSPGKRADSHEEGSLEKKAKSSFRDFIPVVLSTRTRSQSGSICSSFAGMADSDMGSQEVFPTEEEEEVTPTPAKRRKVRKTQRDTQYRSHHAQDKSLLSQGRRHLWRAREMPWRTEAARQMWDTNEEEEEEEEEGLLKRKKRRRQKSRKYQTGEYLTEQEDEQRRKGRADLKARKQKTSSSQSLEHRLRNRNLLLPNKVQGISDSPNGFLPNNLEEPACLENSEKPSGKRKCKTKHMATVSEEAKDVVLYCLQKDSEDVNHRDNAGYTALHEACSRGWTDILNILLEHGANVNCSAQDGTRPVHDAVVNDNLETIWLLLSYGADPTLATYSGQTAMKLASSDTMKRFLSDHLSDLQGRAEGDPGVSWDFYSSSVLEEKDGFACDLLHNPPGSSDQEGDDPMEEDDFMFELSDKPLLPCYNLQVSVSRGPCNWFLFSDVLKRLKLSSRIFQARFPHFEITTMPKAEFYRQVASSQLLTPAERPGGLDDRSPPGSSETVELVRYEPDLLRLLGSEVEFQSCNS

SEQ ID NO: 38897 - protein, 1785 aa, Homo sapiens
MISTAPLYSGVHNWTSSDRIRMCGINEERRAPLSDEESTTGDCQHFGSQEFCVSSSFSKVELTAVGSGSNARGADPDGSATEKLGHKSEDKPDDPQPKMDYAGNVAEAEGFLVPLSSPGDGLKLPASDSAEASNSRADCSWTPLNTQMSKQVDCSPAGVKALDSRQGVGEKNTFILATLGTGVPVEGTLPLVTTNFSPLPAPICPPAPGSASVPHSVPDAFQVPLSVPAPVPHSGLVPVQVATSVPAPSPPLAPVPALAPAPPSVPTLISDSNPLSVSASVLVPVPASAPPSGPVPLSAPAPAPLSVPVSAPPLALIQAPVPPSAPTLVLAPVPTPVLAPMPASTPPAAPAPPSVPMPTPTPSSGPPSTPTLIPAFAPTPVPAPTPAPIFTPAPTPMPAATPAAIPTSAPIPASFSLSRVCFPAAQAPAMQKVPLSFQPGTVLTPSQPLVYIPPPSCGQPLSVATLPTTLGVSSTLTLPVLPSYLQDRCLPGVLASPELRSYPYAFSVARPLTSDSKLVSLEVNRLPCTSPSGSTTTQPAPDGVPGPLADTSLVTASAKVLPTPQPLLPAPSGSSAPPHPAKMPSGTEQQTEGTSVTFSPLKSPPQLEREMASPPECSEMPLDLSSKSNRQKLPLPNQRKTPPMPVLTPVHTSSKALLSTVLSRSQRTTQAAGGNVTSCLGSTSSPFVIFPEIVRNGDPSTWVKNSTALISTIPGTYVGVANPVPASLLLNKDPNLGLNRDPRHLPKQEPISIIDQGEPKGTGATCGKKGSQAGAEGQPSTVKRYTPARIAPGLPGCQTKELSLWKPTGPANIYPRCSVNGKPTSTQVLPVGWSPYHQASLLSIGISSAGQLTPSQGAPIRPTSVVSEFSGVPSLSSSEAVHGLPEGQPRPGGSFVPEQDPVTKNKTCRIAAKPYEEQVNPVLLTLSPQTGTLALSVQPSGGDIRMNQGPEESESHLCSDSTPKMEGPQGACGLKLAGDTKPKNQVLATYMSHELVLATPQNLPKMPELPLLPHDSHPKELILDVVPSSRRGSSTERPQLGSQVDLGRVKMEKVDGDVVFNLATCFRADGLPVAPQRGQAEVRAKAGQARVKQESVGVFACKNKWQPDDVTESLPPKKMKCGKEKDSEEQQLQPQAKAVVRSSHRPKCRKLPSDPQESTKKSPRGASDSGKEHNGVRGKHKHRKPTKPESQSPGKRADSHEEGSLEKKAKSSFRDFIPVVLSTRTRSQSGSICSSFAGMADSDMGSQEVFPTEEEEEVTPTPAKRRKVRKTQRDTQYRSHHAQDKSLLSQGRRHLWRAREMPWRTEAARQMWDTNEEEEEEEEEGLLKRKKRRRQKSRKYQTGEYLTEQEDEQRRKGRADLKARKQKTSSSQSLEHRLRNRNLLLPNKVQGISDSPNGFLPNNLEEPACLENSEKPSGKRKCKTKHMATVSEEAKGKGRWSQQKTRSPKSPTPVKPTEPCTPSKSRSASSEEASESPTARQIPPEARRLIVNKNAGETLLQRAARLGYKDVVLYCLQKDSEDVNHRDNAGYTALHEACSRGWTDILNILLEHGANVNCSAQDGTRPVHDAVVNDNLETIWLLLSYGADPTLATYSGQTAMKLASSDTMKRFLSDHLSDLQGRAEGDPGVSWDFYSSSVLEEKDGFACDLLHNPPGSSDQEGDDPMEEDDFMFELSDKPLLPCYNLQVSVSRGPCNWFLFSDVLKRLKLSSRIFQARFPHFEITTMPKAEFYRQVASSQLLTPAERPGGLDDRSPPGSSETVELVRYEPDLLRLLGSEVEFQSCNS

SEQ ID NO: 38898 - protein, 1581 aa, Homo sapiens
MISTAPLYSGVHNWTSSDRIRMCGINEERRAPLSDEESTTGDCQHFGSQEFCVSSSFSKVELTAVGSGSNARGADPDGSATEKLGHKSEDKPDDPQPKMDYAGNVAEAEGFLVPLSSPGDGLKLPASDSAEASNSRADCSWTPLNTQMSKQVDCSPAGVKALDSRQGVGEKNTFILATLGTGVPVEGTLPLVTTNFSPLPAPICPPAPGSASVPHSVPDAFQVPLSVPAPVPHSGLVPVQVATSVPAPSPPLAPVPALAPAPPSVPTLISDSNPLSVSASVLVPVPASAPPSGPVPLSAPAPAPLSVPVSAPPLALIQAPVPPSAPTLVLAPVPTPVLAPMPASTPPAAPAPPSVPMPTPTPSSGPPSTPTLIPAFAPTPVPAPTPAPIFTPAPTPMPAATPAAIPTSAPIPASFSLSRVCFPAAQAPAMQKVPLSFQPGTVLTPSQPLVYIPPPSCGQPLSVATLPTTLGVSSTLTLPVLPSYLQDRCLPGVLASPELRSYPYAFSVARPLTSDSKLVSLEVNRLPCTSPSGSTTTQPAPDGVPGPLADTSLVTASAKVLPTPQPLLPAPSGSSAPPHPAKMPSGTEQQTEGTSVTFSPLKSPPQLEREMASPPECSEMPLDLSSKSNRQKLPLPNQRKTPPMPVLTPVHTSSKALLSTVLSRSQRTTQAAGGNVTSCLGSTSSPFVIFPEIVRNGDPSTWVKNSTALISTIPGTYVGVANPVPASLLLNKDPNLGLNRDPRHLPKQEPISIIDQGEPKGTGATCGKKGSQAGAEGQPSTVKRYTPARIAPGLPGCQTKELSLWKPTGPANIYPRCSVNGKPTSTQVLPVGWSPYHQASLLSIGISSAGQLTPSQGAPIRPTSVVSEFSGVPSLSSSEAVHGLPEGQPRPGGSFVPEQDPVTKNKTCRIAAKPYEEQVNPVLLTLSPQTGTLALSVQPSGGDIRMNQGPEESESHLCSDSTPKMEGPQGACGLKLAGDTKPKNQVLATYMSHELVLATPQNLPKMPELPLLPHDSHPKELILDVVPSSRRGSSTERPQLGSQVDLGRVKMEKVDGDVVFNLATCFRADGLPVAPQRGQAEVRAKAGQARVKQESVGVFACKNKWQPDDVTESLPPKKMKCGKEKDSEEQQLQPQAKAVVRSSHRPKCRKLPSDPQESTKKSPRGASDSGKEHNGVRGKHKHRKPTKPESQSPGKRADSHEEGSLEKKAKSSFRDFIPVVLSTRTRSQSDLKARKQKTSSSQSLEHRLRNRNLLLPNKVQGISDSPNGFLPNNLEEPACLENSEKPSGKRKCKTKHMATVSEEAKDVVLYCLQKDSEDVNHRDNAGYTALHEACSRGWTDILNILLEHGANVNCSAQDGTRPVHDAVVNDNLETIWLLLSYGADPTLATYSGQTAMKLASSDTMKRFLSDHLSDLQGRAEGDPGVSWDFYSSSVLEEKDGFACDLLHNPPGSSDQEGDDPMEEDDFMFELSDKPLLPCYNLQVSVSRGPCNWFLFSDVLKRLKLSSRIFQARFPHFEITTMPKAEFYRQVASSQLLTPAERPGGLDDRSPPGSSETVELVRYEPDLLRLLGSEVEFQSCNS

SEQ ID NO: 38899 - protein, 741 aa, Homo sapiens
  VARIANT 1: note = MOD_RES - Any amino acid
XPLLPAPSGSSAPPHPAKMPSGTEQQTEGTSVTFSPLKSPPQLEREMASPPECSEMPLDLSSKSNRQKLPLPNQRKTPPMPVLTPVHTSSKALLSTVLSRSQRTTQAAGGNVTSCLGSTSSPFVIFPEIVRNGDPSTWVKNSTALISTIPGTYVGVANPVPASLLLNKDPNLGLNRDPRHLPKQEPISIIDQGEPKGTGATCGKKGSQAGAEGQPSTVKRYTPARIAPGLPGCQTKELSLWKPTGPANIYPRCSVNGKPTSTQVLPVGWSPYHQASLLSIGISSAGQLTPSQGAPIRPTSVVSEFSGVPSLSSSEAVHGLPEGQPRPGGSFVPEQDPVTKNKTCRIAAKPYEEQVNPVLLTLSPQTGTLALSVQPSGGDIRMNQGPEESESHLCSDSTPKMEGPQGACGLKLAGDTKPKNQVLATYMSHELVLATPQNLPKMPELPLLPHDSHPKELILDVVPSSRRGSSTERPQLGSQVDLGRVKMEKVDGDVVFNLATCFRADGLPVAPQRGQAEVRAKAGQARVKQESVGVFACKNKWQPDDVTESLPPKKMKCGKEKDSEEQQLQPQAKAVVRSSHRPKCRKLPSDPQESTKKSPRGASDSGKEHNGVRGKHKHRKPTKPESQSPGKRADSHEEGSLEKKAKSSFRDFIPVVLSTRTRSQSDLKARKQKTSSSQSLEHRLRNRNLLLPNKVQGISDSPNGFLPNNLEEPACLENSEKPSGKRKCKTKHMATVSEEAK

SEQ ID NO: 38900 - protein, 1385 aa, Homo sapiens
TPAAIPTSAPIPASFSLSRVCFPAAQAPAMQKVPLSFQPGTVLTPSQPLVYIPPPSCGQPLSVATLPTTLGVSSTLTLPVLPSYLQDRCLPGVLASPELRSYPYAFSVARPLTSDSKLVSLEVNRLPCTSPSGSTTTQPAPDGVPGPLADTSLVTASAKVLPTPQPLLPAPSGSSAPPHPAKMPSGTEQQTEGTSVTFSPLKSPPQLEREMASPPECSEMPLDLSSKSNRQKLPLPNQRKTPPMPVLTPVHTSSKALLSTVLSRSQRTTQAAGGNVTSCLGSTSSPFVIFPEIVRNGDPSTWVKNSTALISTIPGTYVGVANPVPASLLLNKDPNLGLNRDPRHLPKQEPISIIDQGEPKGTGATCGKKGSQAGAEGQPSTVKRYTPARIAPGLPGCQTKELSLWKPTGPANIYPRCSVNGKPTSTQVLPVGWSPYHQASLLSIGISSAGQLTPSQGAPIRPTSVVSEFSGVPSLSSSEAVHGLPEGQPRPGGSFVPEQDPVTKNKTCRIAAKPYEEQVNPVLLTLSPQTGTLALSVQPSGGDIRMNQGPEESESHLCSDSTPKMEGPQGACGLKLAGDTKPKNQVLATYMSHELVLATPQNLPKMPELPLLPHDSHPKELILDVVPSSRRGSSTERPQLGSQVDLGRVKMEKVDGDVVFNLATCFRADGLPVAPQRGQAEVRAKAGQARVKQESVGVFACKNKWQPDDVTESLPPKKMKCGKEKDSEEQQLQPQAKAVVRSSHRPKCRKLPSDPQESTKKSPRGASDSGKEHNGVRGKHKHRKPTKPESQSPGKRADSHEEGSLEKKAKSSFRDFIPVVLSTRTRSQSGSICSSFAGMADSDMGSQEVFPTEEEEEVTPTPAKRRKVRKTQRDTQYRSHHAQDKSLLSQGRRHLWRAREMPWRTEAARQMWDTNEEEEEEEEEGLLKRKKRRRQKSRKYQTGEYLTEQEDEQRRKGRADLKARKQKTSSSQSLEHRLRNRNLLLPNKVQGISDSPNGFLPNNLEEPACLENSEKPSGKRKCKTKHMATVSEEAKGKGRWSQQKTRSPKSPTPVKPTEPCTPSKSRSASSEEASESPTARQIPPEARRLIVNKNAGETLLQRAARLGYKDVVLYCLQKDSEDVNHRDNAGYTALHEACSRGWTDILNILLEHGANVNCSAQDGTRPVHDAVVNDNLETIWLLLSYGADPTLATYSGQTAMKLASSDTMKRFLSDHLSDLQGRAEGDPGVSWDFYSSSVLEEKDGFACDLLHNPPGSSDQEGDDPMEEDDFMFELSDKPLLPCYNLQVSVSRGPCNWFLFSDVLKRLKLSSRIFQARFPHFEITTMPKAEFYRQVASSQLLTPAERPGGLDDRSPPGSSETVELVRYEPDLLRLLGSEVEFQSCNS

SEQ ID NO: 38901 - protein, 1711 aa, Homo sapiens; identical to SEQ ID NO: 38896

SEQ ID NO: 38902 - protein, 419 aa, Homo sapiens
MPLSDFILALKDNPYFGAGFGLVGVGTALALARKGVQLGLVAFRRHYMITLEVPARDRSYAWLLSWLTRHSTRTQHLSVETSYLQHESGRISTKFEFVPSPGNHFIWYRGKWIRVERSREMQMIDLQTGTPWESVTFTALGTDRKVFFNILEEARELALQQEEGKTVMYTAVGSEWRPFGYPRRRRPLNSVVLQQGLADRIVRDVQEFIDNPKWYTDRGIPYRRGYLLYGPPGCGKSSFITALAGELEHSICLLSLTDSSLSDDRLNHLLSVAPQQSLVLLEDVDAAFLSRDLAVENPVKYQGLGRLTFSGLLNALDGVASTEARIVFMTTNHVDRLDPALIRPGRVDLKEYVGYCSHWQLTQMFQRFYPGQAPSLAENFAEHVLRATNQISPAQVQGYFMLYKNDPVGAIHNAESLRR

SEQ ID NO: 38903 - protein, 419 aa, Homo sapiens; identical to SEQ ID NO: 38902

SEQ ID NO: 38904 - protein, 419 aa, Homo sapiens; identical to SEQ ID NO: 38902

SEQ ID NO: 38905 - protein, 419 aa, Homo sapiens; identical to SEQ ID NO: 38902

SEQ ID NO: 38906 - protein, 419 aa, Homo sapiens; identical to SEQ ID NO: 38902

SEQ ID NO: 38907 - protein, 110 aa, Homo sapiens
MPLSDFILALKDNPYFGAGFGLVGVGTALALARKGVQLGLVAFRRHYMITLEVPARDRSYAWLLSWLTRHSTRTQHLSVETSYLQHESGRISTKFEFVPSPGNHFIWYRG

SEQ ID NO: 38908 - protein, 77 aa, Homo sapiens
MPLSDFILALKDNPYFGAGFGLVGVGTALALARKGVQLGLVAFRRHYMITLEVPARDRSYAWLLSWLTRHSTRTQHL

SEQ ID NO: 38909 - protein, 206 aa, Homo sapiens
MPLSDFILALKDNPYFGAGFGLVGVGTALALARKGVQLGLVAFRRHYMITLEVPARDRSYAWLLSWLTRHSTRTQHLSVETSYLQHESGRISTKFEFVPSPGNHFIWYRGKWIRVERSREMQMIDLQTGTPWESVTFTALGTDRKVFFNILEEARELALQQEEGKTVMYTAVGSEWRPFGYPRRRRPLNSVVLQQGLADRIVRDVQ

SEQ ID NO: 38910 - protein, 419 aa, Homo sapiens; identical to SEQ ID NO: 38902

SEQ ID NO: 38911 - protein, 419 aa, Homo sapiens; identical to SEQ ID NO: 38902

SEQ ID NO: 38912 - protein, 206 aa, Homo sapiens; identical to SEQ ID NO: 38909

SEQ ID NO: 38913 - protein, 540 aa, Homo sapiens
MYENECECQLLLKEMLERLNKEADEALLHNLRLQLEAQFLQDDISAAKDRHKKNLLEVQTYISILQQIIHTTPPASIVTSGMREEKLLTEREVAALRSQLEEGREVLSHLQAQRVELQAQTTTLEQAIKSAHECYDDEIQLYNEQIETLRKEIEETERVLEKSSYDCRQLAVAQQTLKNELDRYHRIIEIEGNRLTSAFIETPIPLFTQSHGVSLSTGSGGKDLTRALQDITAAKPRQKALPKNVPRRKEIITKDKTNGALEDAPLKGLEDTKLVQVVLKEESESKFESESKEVSPLTQEGAPEDVPDGGQISKGFGKLYRKVKEKVRSPKEPETPTELYTKERHVLVTGDANYVDPRFYVSSITAKGGVAVSVAEDSVLYDGQVEPSPESPKPPLENGQVGLQEKEDGQPIDQQPIDKEIEPDGAELEGPEEKREGEERDEESRRPCAMVTPGAEEPSIPEPPKPAADQDGAEVLGTRSRSLPEKGPPKALAYKTVEVVESIEKISTESIQTYEETAVIVETMIGKTKSDKKKSGEKSS

SEQ ID NO: 38914 - protein, 665 aa, Homo sapiens
MYRRSYVFQTRKEQYEHADEASRAAEPERPADEGWAGATSLAALQGLGERVAAHVQRARALEQRHAGLRRQLDAFQRLGELAGPEDALARQVESNRQRVRDLEAERARLERQGTEAQRALDEFRSKYENECECQLLLKEMLERLNKEADEALLHNLRLQLEAQFLQDDISAAKDRHKKNLLEVQTYISILQQIIHTTPPASIVTSGMREEKLLTEREVAALRSQLEEGREVLSHLQAQRVELQAQTTTLEQAIKSAHECYDDEIQLYNEQIETLRKEIEETERVLEKSSYDCRQLAVAQQTLKNELDRYHRIIEIEGNRLTSAFIETPIPLFTQSHGVSLSTGSGGKDLTRALQDITAAKPRQKALPKNVPRRKEIITKDKTNGALEDAPLKGLEDTKLVQVVLKEESESKFESESKEVSPLTQEGAPEDVPDGGQISKGFGKLYRKVKEKVRSPKEPETPTELYTKERHVLVTGDANYVDPRFYVSSITAKGGVAVSVAEDSVLYDGQVEPSPESPKPPLENGQVGLQEKEDGQPIDQQPIDKEIEPDGAELEGPEEKREGEERDEESRRPCAMVTPGAEEPSIPEPPKPAADQDGAEVLGTRSRSLPEKGPPKALAYKTVEVVESIEKISTESIQTYEETAVIVETMIGKTKSDKKKSGEKSS

SEQ ID NO: 38915 - protein, 526 aa, Homo sapiens
MLERLNKEADEALLHNLRLQLEAQFLQDDISAAKDRHKKNLLEVQTYISILQQIIHTTPPASIVTSGMREEKLLTEREVAALRSQLEEGREVLSHLQAQRVELQAQTTTLEQAIKSAHECYDDEIQLYNEQIETLRKEIEETERVLEKSSYDCRQLAVAQQTLKNELDRYHRIIEIEGNRLTSAFIETPIPLFTQSHGVSLSTGSGGKDLTRALQDITAAKPRQKALPKNVPRRKEIITKDKTNGALEDAPLKGLEDTKLVQVVLKEESESKFESESKEVSPLTQEGAPEDVPDGGQISKGFGKLYRKVKEKVRSPKEPETPTELYTKERHVLVTGDANYVDPRFYVSSITAKGGVAVSVAEDSVLYDGQVEPSPESPKPPLENGQVGLQEKEDGQPIDQQPIDKEIEPDGAELEGPEEKREGEERDEESRRPCAMVTPGAEEPSIPEPPKPAADQDGAEVLGTRSRSLPEKGPPKALAYKTVEVVESIEKISTESIQTYEETAVIVETMIGKTKSDKKKSGEKSS

SEQ ID NO: 38916 - protein, 526 aa, Homo sapiens; identical to SEQ ID NO: 38915

SEQ ID NO: 38917 - protein, 415 aa, Homo sapiens
MSERRVVVDLPTSASSSMPLQRRRASFRGPRSSSSLESPPASRTNAMSGLVRAPGVYVGTAPSGCIGGLGARVTRRALGISSVFLQGLRSSGLATVPAPGLERDHGAVEDLGGCLVEYMAKVHALEQVSQELETQLRMHLESKATRSGNWGALRASWASSCQQVGEAVLENARLMLQTETIQAGADDFKERYENEQPFRKAAEEEINSLYKVIDEANLTKMDLESQIESLKEELGSLSRNYEEDVKLLHKQLAGCELEQMDAPIGTGLDDILETIRIQWERDVEKNRVEAGALLQAKQQAEVAHMSQTQEEKLAAALRVELHNTSCQVQSLQAETESLRALKRGLENTLHDAKHWHDMELQNLGAVVGRLEAELREIRAEAEQQQQERAHLLARKCQLQKDVASYHALLDREESG

SEQ ID NO: 38918 - protein, 450 aa, Homo sapiens
MEGSKTSNNSTMQVSFVCQRCSQPLKLDTSFKILDRVTIQELTAPLLTTAQAKPGETQEEETNSGEEPFIETPRQDGVSRRFIPPARMMSTESANSFTLIGEASDGGTMENLSRRLKVTGDLFDIMSGQTDVDHPLCEECTDTLLDQLDTQLNVTENECQNYKRCLEILEQMNEDDSEQLQMELKELALEEERLIQELEDVEKNRKIVAENLEKVQAEAERLDQEEAQYQREYSEFKRQQLELDDELKSVENQMRYAQTQLDKLKKTNVFNATFHIWHSGQFGTINNFRLGRLPSVPVEWNEINAAWGQTVLLLHALANKMGLKFQRYRLVPYGNHSYLESLTDKSKELPLYCSGGLRFFWDNKFDHAMVAFLDCVQQFKEEVEKGETRFCLPYRMDVEKGKIEDTGGSGGSYSIKTQFNSEEQWTKALKFMLTNLKWGLAWVSSQFYNK

SEQ ID NO: 38919 - protein, 279 aa, Homo sapiens
MEGSKTSNNSTMQVSFVCQRCSQPLKLDTSFKILDRVTIQELTAPLLTTAQAKPGETQEEETNSGEEPFIETPRQDGVSRRFIPPARRCLEILEQMNEDDSEQLQMELKELALEEERLIQELEDVEKNRKIVAENLEKVQAEAERLDQEEAQYQREYSEFKRQQLELDDELKSVENQMRYAQTQLDKLKKTNVFNATFHIWHSGQFGTINNFRLGRLPSVPVEWNEINAAWGQTVLLLHALANKMGLKFQRYRLVPYGNHSYLESLTDKSKDGCGERQD

SEQ ID NO: 38920 - protein, 363 aa, Homo sapiens
MMSTESANSFTLIGEASDGGTMENLSRRLKVTGDLFDIMSGQTDVDHPLCEECTDTLLDQLDTQLNVTENECQNYKRCLEILEQMNEDDSEQLQMELKELALEEERLIQELEDVEKNRKIVAENLEKVQAEAERLDQEEAQYQREYSEFKRQQLELDDELKSVENQMRYAQTQLDKLKKTNVFNATFHIWHSGQFGTINNFRLGRLPSVPVEWNEINAAWGQTVLLLHALANKMGLKFQRYRLVPYGNHSYLESLTDKSKELPLYCSGGLRFFWDNKFDHAMVAFLDCVQQFKEEVEKGETRFCLPYRMDVEKGKIEDTGGSGGSYSIKTQFNSEEQWTKALKFMLTNLKWGLAWVSSQFYNK

SEQ ID NO: 38921 - protein, 1797 aa, Homo sapiens
MEQLTTLPRPGDPGAMEPWALPTWHSWTPGRGGEPSSAAPSIADTPPAALQLQELRSEESSKPKGDGSSRPVGGTDPEGAEACLPSLGQQASSSGPACQRPEDEEVEAFLKAKLNMSFGDRPNLELLRALGELRQRCAILKEENQMLRKSSFPETEEKVRRLKRKNAELAVIAKRLEERARKLQETNLRVEGPQWLHVRDFDRLLRESQREVLRLQRQIALRNQRETLPLPPSWPPGPALQARAGAPAPGAPGEATPQEDADNLPVILGEPEKEQRVQQLESELSKKRKKCESLEQEARKKQRRCEELELQLRQAQNENARLVEENSRLSGRATEKEQVEWENAELRGQLLGVTQERDSALRKSQGLQSKLESLEQVLKHMREVAQRRQQLEVEHEQARLSLREKQEEVRRLQQAQAEAQREHEGAVQLLESTLDSMQARVRELEEQCRSQTEQFSLLAQELQAFRLHPGPLDLLTSALDCGSLGDCPPPPCCCSIPQPCRGSGPKDLDLPPGSPGRCTPKSSEPAPATLTGVPRRTAKKAESLSNSSHSESIHNSPKSCPTPEVDTASEVEELEADSVSLLPAAPEGSRGGARIQVFLARYSYNPFEGPNENPEAELPLTAGEYIYIYGNMDEDGFFEGELMDGRRGLVPSNFVERVSDDDLLTSLPPELADLSHSSGPELSFLSVGGGGSSSGGQSSVGRSQPRPEEEDAGDELSLSPSPEGLGEPPAVPYPRRLVVLKQLAHSVVLAWEPPPEQVELHGFHICVNGELRQALGPGAPPKAVLENLDLWAGPLHISVQALTSRGSSDPLRCCLAVGARAGVVPSQLRVHRLTATSAEITWVPGNSNLAHAIYLNGEECPPASPSTYWATFCHLRPGTPYQAQVEAQLPPQGPWEPGWERLEQRAATLQFTTLPAGPPDAPLDVQIEPGPSPGILIISWLPVTIDAAGTSNGVRVTGYAIYADGQKIMEVASPTAGSVLVELSQLQLLQVCREVVVRTMSPHGESADSIPAPITPALAPASLPARVSCPSPHPSPEARAPLASASPGPGDPSSPLQHPAPLGTQEPPGAPPASPSREMAKGSHEDPPAPCSQEEAGAAVLGTSEERTASTSTLGEKDPGPAAPSLAKQEAEWTAGEACPASSSTQGARAQQAPNTEMCQGGDPGSGLRPRAEKEDTAELGVHLVNSLVDHGRNSDLSDIQEEEEEEEEEEEEELGSRTCSFQKQVAGNSIRENGAKSQPDPFCETDSDEEILEQILELPLQQFCSKKLFSIPEEEEEEEEDEEEEKSGAGCSSRDPGPPEPALLGLGCDSGQPRRPGQCPLSPESSRAGDCLEDMPGLVGGSSRRRGGGSPEKPPSRRRPPDPREHCSRLLSNNGPQASGRLGPTRERGGLPVIEGPRTGLEASGRGRLGPSRRCSRGRALEPGLASCLSPKCLEISIEYDSEDEQEAGSGGISITSSCYPGDGEAWGTATVGRPRGPPKANSGPKPYPRLPAWEKGEPERRGRSATGRAKEPLSRATETGEARGQDGSGRRGPQKRGVRVLRPSTAELVPARSPSETLAYQHLPVRIFVALFDYDPVSMSPNPDAGEEELPFREGQILKVFGDKDADGFYQGEGGGRTGYIPCNMVAEVAVDSPAGRQQLLQRGYLSPDILLEGSGNGPFVYSTAHTTGPPPKPRRSKKAESEGPAQPCPGPPKLVPSADLKAPHSMVAAFDYNPQESSPNMDVEAELPFRAGDVITVFGGMDDDGFYYGELNGQRGLVPSNFLEGPGPEAGGLDREPRTPQAESQRTRRRRVQC

SEQ ID NO: 38922 - protein, 1857 aa, Homo sapiens
MEQLTTLPRPGDPGAMEPWALPTWHSWTPGRGGEPSSAAPSIADTPPAALQLQELRSEESSKPKGDGSSRPVGGTDPEGAEACLPSLGQQASSSGPACQRPEDEEVEAFLKAKLNMSFGDRPNLELLRALGELRQRCAILKEENQMLRKSSFPETEEKVRRLKRKNAELAVIAKRLEERARKLQETNLRVVSAPLPRPGTSLELCRKALARQRARDLSETASALLAKDKQIAALQRECRELQARLTLVGKEGPQWLHVRDFDRLLRESQREVLRLQRQIALRNQRETLPLPPSWPPGPALQARAGAPAPGAPGEATPQEDADNLPVILGEPEKEQRVQQLESELSKKRKKCESLEQEARKKQRRCEELELQLRQAQNENARLVEENSRLSGRATEKEQVEWENAELRGQLLGVTQERDSALRKSQGLQSKLESLEQVLKHMREVAQRRQQLEVEHEQARLSLREKQEEVRRLQQAQAEAQREHEGAVQLLESTLDSMQARVRELEEQCRSQTEQFSLLAQELQAFRLHPGPLDLLTSALDCGSLGDCPPPPCCCSIPQPCRGSGPKDLDLPPGSPGRCTPKSSEPAPATLTGVPRRTAKKAESLSNSSHSESIHNSPKSCPTPEVDTASEVEELEADSVSLLPAAPEGSRGGARIQVFLARYSYNPFEGPNENPEAELPLTAGEYIYIYGNMDEDGFFEGELMDGRRGLVPSNFVERVSDDDLLTSLPPELADLSHSSGPELSFLSVGGGGSSSGGQSSVGRSQPRPEEEDAGDELSLSPSPEGLGEPPAVPYPRRLVVLKQLAHSVVLAWEPPPEQVELHGFHICVNGELRQALGPGAPPKAVLENLDLWAGPLHISVQALTSRGSSDPLRCCLAVGARAGVVPSQLRVHRLTATSAEITWVPGNSNLAHAIYLNGEECPPASPSTYWATFCHLRPGTPYQAQVEAQLPPQGPWEPGWERLEQRAATLQFTTLPAGPPDAPLDVQIEPGPSPGILIISWLPVTIDAAGTSNGVRVTGYAIYADGQKIMEVASPTAGSVLVELSQLQLLQVCREVVVRTMSPHGESADSIPAPITPALAPASLPARVSCPSPHPSPEARAPLASASPGPGDPSSPLQHPAPLGTQEPPGAPPASPSREMAKGSHEDPPAPCSQEEAGAAVLGTSEERTASTSTLGEKDPGPAAPSLAKQEAEWTAGEACPASSSTQGARAQQAPNTEMCQGGDPGSGLRPRAEKEDTAELGVHLVNSLVDHGRNSDLSDIQEEEEEEEEEEEEELGSRTCSFQKQVAGNSIRENGAKSQPDPFCETDSDEEILEQILELPLQQFCSKKLFSIPEEEEEEEEDEEEEKSGAGCSSRDPGPPEPALLGLGCDSGQPRRPGQCPLSPESSRAGDCLEDMPGLVGGSSRRRGGGSPEKPPSRRRPPDPREHCSRLLSNNGPQASGRLGPTRERGGLPVIEGPRTGLEASGRGRLGPSRRCSRGRALEPGLASCLSPKCLEISIEYDSEDEQEAGSGGISITSSCYPGDGEAWGTATVGRPRGPPKANSGPKPYPRLPAWEKGEPERRGRSATGRAKEPLSRATETGEARGQDGSGRRGPQKRGVRVLRPSTAELVPARSPSETLAYQHLPVRIFVALFDYDPVSMSPNPDAGEEELPFREGQILKVFGDKDADGFYQGEGGGRTGYIPCNMVAEVAVDSPAGRQQLLQRGYLSPDILLEGSGNGPFVYSTAHTTGPPPKPRRSKKAESEGPAQPCPGPPKLVPSADLKAPHSMVAAFDYNPQESSPNMDVEAELPFRAGDVITVFGGMDDDGFYYGELNGQRGLVPSNFLEGPGPEAGGLDREPRTPQAESQRTRRRRVQC

SEQ ID NO: 38923 - protein, 1907 aa, Homo sapiens
MEQLTTLPRPGDPGAMEPWALPTWHSWTPGRGGEPSSAAPSIADTPPAALQLQELRSEESSKPKGDGSSRPVGGTDPEGAEACLPSLGQQASSSGPACQRPEDEEVEAFLKAKLNMSFGDRPNLELLRALGELRQRCAILKEENQMLRKSSFPETEEKVRRLKRKNAELAVIAKRLEERARKLQETNLRVVSAPLPRPGTSLELCRKALARQRARDLSETASALLAKDKQIAALQRECRELQARLTLVGKEGPQWLHVRDFDRLLRESQREVLRLQRQIALRNQRETLPLPPSWPPGPALQARAGAPAPGAPGEATPQEDADNLPVILGEPEKEQRVQQLESELSKKRKKCESLEQEARKKQRRCEELELQLRQAQNENARLVEENSRLSGRATEKEQVEWENAELRGQLLGVTQERDSALRKSQGLQSKLESLEQVLKHMREVAQRRQQLEVEHEQARLSLREKQEEVRRLQQAQAEAQREHEGAVQLLESTLDSMQARVRELEEQCRSQTEQFSLLAQELQAFRLHPGPLDLLTSALDCGSLGDCPPPPCCCSIPQPCRGSGPKDLDLPPGSPGRCTPKSSEPAPATLTGVPRRTAKKAESLSNSSHSESIHNSPKSCPTPEVDTASEVEELEADSVSLLPAAPEGSRGGARIQVFLARYSYNPFEGPNENPEAELPLTAGEYIYIYGNMDEDGFFEGELMDGRRGLVPSNFVERVSDDDLLTSLPPELADLSHSSGPELSFLSVGGGGSSSGGQSSVGRSQPRPEEEDAGDELSLSPSPEGLGEPPAVPYPRRLVVLKQLAHSVVLAWEPPPEQVELHGFHICVNGELRQALGPGAPPKAVLENLDLWAGPLHISVQALTSRGSSDPLRCCLAVGARAGVVPSQLRVHRLTATSAEITWVPGNSNLAHAIYLNGEECPPASPSTYWATFCHLRPGTPYQAQVEAQLPPQGPWEPGWERLEQRAATLQFTTLPAGPPDAPLDVQIEPGPSPGILIISWLPVTIDAAGTSNGVRVTGYAIYADGQKIMEVASPTAGSVLVELSQLQLLQVCREVVVRTMSPHGESADSIPAPITPALAPASLPARVSCPSPHPSPEARAPLASASPGPGDPSSPLQHPAPLGTQEPPGAPPASPSREMAKGSHEDPPAPCSQEEAGAAVLGTSEERTASTSTLGEKDPGPAAPSLAKQEAEWTAGEACPASSSTQGARAQQAPNTEMCQGGDPGSGLRPRAEKEDTAELGVHLVNSLVDHGRNSDLSDIQEEEEEEEEEEEEELGSRTCSFQKQVAGNSIRENGAKSQPDPFCETDSDEEILEQILELPLQQFCSKKLFSIPEEEEEEEEDEEEEKSGAGCSSRDPGPPEPALLGLGCDSGQPRRPGQCPLSPESSRAGDCLEDMPGLVGGSSRRRGGGSPEKPPSRRRPPDPREHCSRLLSNNGPQASGRLGPTRERGGLPVIEGPRTGLEASGRGRLGPSRRCSRGRALEPGLASCLSPKCLEISIEYDSEDEQEAGSGGISITSSCYPGDGEAWGTATVGRPRGPPKANSGPKPYPRLPAWEKGEPERRGRSATGRAKEPLSRATETGEARGQDGSGRRGPQKRGVRVLRPSTAELVPARSPSETLAYQHLPVRIFVALFDYDPVSMSPNPDAGEEELPFREGQILKVFGDKDADGFYQGEGGGRTGYIPCNMVAEVAVDSPAGRQQLLQRGYLSPDILLEGSGNGPFVYSTAHTTGPPPKPRRSKKAESEGPAQPCPGPPKLVPSADLKAPHSMVAAFDYNPQESSPNMDVEAELPFRAGDVITVFGGMDDDGFYYGELNGQRGLVPSNFLEGPGPEAGGLDREPRTPQAESQDWGCTTQGSPGPPGGPCTPSSGSAPRIERGEPQGRSEKVWGFFSKGKQLLRRLGSGKKE

SEQ ID NO: 38924 - protein, 287 aa, Homo sapiens
MVNDPPVPALLWAQEVGQVLAGRARRLLLQFGVLFCTILLLLWVSVFLYGSFYYSYMPTVSHLSPVHFYYRTDCDSSTTSLCSFPVANVSLTKGGRDRVLMYGQPYRVTLELELPESPVNQDLGMFLVTISCYTRGGRIISTSSRSVMLHYRSDLLQMLDTLVFSSLLLFGFAEQKQLLEVELYADYRENSYVPTTGAIIEIHSKRIQLYGAYLRIHAHFTGLRLTSEKETIPGRKSNEGSLLISQGLKARRSQLRNQMLQRMVRALKIPQGQRVSCPRRRNQISSP

SEQ ID NO: 38925 - protein, 462 aa, Homo sapiens
MSTEKVDQKEEAGEKEVCGDQIKGPDKEEEPPAAASHGQGWRPGGRAARNARPEPGARHPALPAMVNDPPVPALLWAQEVGQVLAGRARRLLLQFGVLFCTILLLLWVSVFLYGSFYYSYMPTVSHLSPVHFYYRTDCDSSTTSLCSFPVANVSLTKGGRDRVLMYGQPYRVTLELELPESPVNQDLGMFLVTISCYTRGGRIISTSSRSVMLHYRSDLLQMLDTLVFSSLLLFGFAEQKQLLEVELYADYRENSYVPTTGAIIEIHSKRIQLYGAYLRIHAHFTGLRYLLYNFPMTCAFIGVASNFTFLSVIVLFSYMQWVWGGIWPRHRFSLQVNIRKRDNSRKEVQRRISAHQPGPEGQEESTPQSDVTEDGESPEDPSGTEGQLSEEEKPDQQPLSGEEELEPEASDGSGSWEDAALLTEANLPAPAPASASAPVLETLGSSEPAGGALRQRPTCSSS

SEQ ID NO: 38926 - protein, 398 aa, Homo sapiens
MVNDPPVPALLWAQEVGQVLAGRARRLLLQFGVLFCTILLLLWVSVFLYGSFYYSYMPTVSHLSPVHFYYRTDCDSSTTSLCSFPVANVSLTKGGRDRVLMYGQPYRVTLELELPESPVNQDLGMFLVTISCYTRGGRIISTSSRSVMLHYRSDLLQMLDTLVFSSLLLFGFAEQKQLLEVELYADYRENSYVPTTGAIIEIHSKRIQLYGAYLRIHAHFTGLRYLLYNFPMTCAFIGVASNFTFLSVIVLFSYMQWVWGGIWPRHRFSLQVNIRKRDNSRKEVQRRISAHQPGPEGQEESTPQSDVTEDGESPEDPSGTEGQLSEEEKPDQQPLSGEEELEPEASDGSGSWEDAALLTEANLPAPAPASASAPVLETLGSSEPAGGALRQRPTCSSS

SEQ ID NO: 38927 - protein, 398 aa, Homo sapiens; identical to SEQ ID NO: 38926

SEQ ID NO: 38928 - protein, 398 aa, Homo sapiens; identical to SEQ ID NO: 38926

SEQ ID NO: 38929 - protein, 462 aa, Homo sapiens; identical to SEQ ID NO: 38925

SEQ ID NO: 38930 - protein, 223 aa, Homo sapiens
MVNDPPVPALLWAQEVGQVLAGRARRLLLQFGVLFCTILLLLWVSVFLYGSFYYSYMPTVSHLSPVHFYYRTDCDSSTTSLCSFPVANVSLTKGGRDRVLMYGQPYRVTLELELPESPVNQDLGMFLVTISCYTRGGRIISTSSRSVMLHYRSDLLQMLDTLVFSSLLLFGFAEQKQLLEVELYADYRENSYVPTTGAIIEIHSKRIQLYGAYLRIHAHFTGL

SEQ ID NO: 38931 - protein, 93 aa, Homo sapiens
MSTEKVDQKEEAGEKEVCGDQIKGPDKEEEPPAAASHGQGWRPGGRAARNARPEPGARHPALPAMVNDPPVPALLWAQEVGQVLAGRARRLLL

SEQ ID NO: 38932 - protein, 226 aa, Homo sapiens
MSTEKVDQKEEAGEKEVCGDQIKGPDKEEEPPAAASHGQGWRPGGRAARNARPEPGARHPALPAMVNDPPVPALLWAQEVGQVLAGRARRLLLQFGVLFCTILLLLWVSVFLYGSFYYSYMPTVSHLSPVHFYYRTDCDSSTTSLCSFPVANVSLTKGGRDRVLMYGQPYRVTLELELPESPVNQDLGMFLVTISCYTRGGRIISTSSRSVMLHYRSDLLQMLDTL

SEQ ID NO: 38933 - protein, 23 aa, Homo sapiens
MSTEKVDQKEEAGEKEVCGDQIK

SEQ ID NO: 38934 - protein, 28 aa, Homo sapiens
MSTEKVDQKEEAGEKEVCGDQIKGPDKE

SEQ ID NO: 38935 - protein, 123 aa, Homo sapiens
MSTEKVDQKEEAGEKEVCGDQIKGPDKEEEPPAAASHGQGWRPGGRAARNARPEPGARHPALPAMVNDPPVPALLWAQEVGQVLAGRARRLLLQFGVLFCTILLLLWVSVFLYGSFYYSYMPT

SEQ ID NO: 38936 - protein, 99 aa, Homo sapiens
MVNDPPVPALLWAQEVGQVLAGRARRLLLQFGVLFCTILLLLWVSVFLYGSFYYSYMPTVSHLSPVHFYYRTDCDSSTTSLCSFPVANVSLTKGGRDRV

SEQ ID NO: 38937 - protein, 292 aa, Homo sapiens [sequence omitted]

SEQ ID NO: 38938 - protein, 498 aa, Homo sapiens
MFEKLTLYCDSYIQLIPISFVLGFYVTLVVTRWWNQYENLPWPDRLMSLVSGFVEGKDEQGRLLRRTLIRYANLGNVLILRSVSTAVYKRFPSAQHLVQAGFMTPAEHKQLEKLSLPHNMFWVPWVWFANLSMKAWLGGRIRDPILLQSLLNEMNTLRTQCGHLYAYDWISIPLVYTQVVTVAVYSFFLTCLVGRQFLNPAKAYPGHELDLVVPVFTFLQFFFYVGWLKVSLLAVDEMHQDLPRMEPDMYWNKPEPQPPYTAASAQFRRASFMGSTFNISLNKEEMEFQPNQEDEEDAHAGIIGRFLGLQSHDHHPPRANSRTKLLWPKRESLLHEGLPKNHKAAKQNVRGQEDNKAWKLKAVDAFKSAPLYQRPGYYSAPQTPLSPTPMFFPLEPSAPSKLHSVTGIDTKDKSLKTVSSGAKKSFELLSESDGALMEHPEVSQVRRKTVEFNLTDMPEIPENHLKEPLEQSPTNIHTTLKDHMDPYWALENRDEAHS

SEQ ID NO: 38939 - protein, 585 aa, Homo sapiens
MTITYTSQVANARLGSFSRLLLCWRGSIYKLLYGEFLIFLLCYYIIRFIYRLALTEEQQLMFEKLTLYCDSYIQLIPISFVLGFYVTLVVTRWWNQYENLPWPDRLMSLVSGFVEGKDEQGRLLRRTLIRYANLGNVLILRSVSTAVYKRFPSAQHLVQAGFMTPAEHKQLEKLSLPHNMFWVPWVWFANLSMKAWLGGRIRDPILLQSLLNEMNTLRTQCGHLYAYDWISIPLVYTQVVTVAVYSFFLTCLVGRQFLNPAKAYPGHELDLVVPVFTFLQFFFYVGWLKVAEQLINPFGEDDDDFETNWIVDRNLQVSLLAVDEMHQDLPRMEPDMYWNKPEPQPPYTAASAQFRRASFMGSTFNISLNKEEMEFQPNQEDEEDAHAGIIGRFLGLQSHDHHPPRANSRTKLLWPKRESLLHEGLPKNHKAAKQNVRGQEDNKAWKLKAVDAFKSAPLYQRPGYYSAPQTPLSPTPMFFPLEPSAPSKLHSVTGIDTKDKSLKTVSSGAKKSFELLSESDGALMEHPEVSQVRRKTVEFNLTDMPEIPENHLKEPLEQSPTNIHTTLKDHMDPYWALENRDEAHS

SEQ ID NO: 38940 - protein, 270 aa, Homo sapiens
MTITYTSQVANARLGSFSRLLLCWRGSIYKLLYGEFLIFLLCYYIIRFIYRLALTEEQQLMFEKLTLYCDSYIQLIPISFVLGFYVTLVVTRWWNQYENLPWPDRLMSLVSGFVEGKDEQGRLLRRTLIRYANLGNVLILRSVSTAVYKRFPSAQHLVQAGFMTPAEHKQLEKLSLPHNMFWVPWVWFANLSMKAWLGGRIRDPILLQSLLNEMNTLRTQCGHLYAYDWISIPLVYTQPEQRGDGVPAQSGGRGGCSRWHHWPLPRPAVP

SEQ ID NO: 38941 - protein, 604 aa, Homo sapiens
MFEKLTLYCDSYIQLIPISFVLGFYVTLVVTRWWNQYENLPWPDRLMSLVSGFVEGKDEQGRLLRRTLIRYANLGNVLILRSVSTAVYKRFPSAQHLVQAGFMTPAEHKQLEKLSLPHNMFWVPWVWFANLSMKAWLGGRIRDPILLQSLLNEMNTLRTQCGHLYAYDWISIPLVYTQVVTVAVYSFFLTCLVGRQFLNPAKAYPGHELDLVVPVFTFLQFFFYVGWLKVAEQLINPFGEDDDDFETNWIVDRNLQVSLLAVDEMHQDLPRMEPDMYWNKPEPQPPYTAASAQFRRASFMGSTFNISLNKEEMEFQPNQEDEEDAHAGIIGRFLGLQSHDHHPPRANSRTKLLWPKRESLLHEGLPKNHKAAKQNVRGQEDNKAWKLKAVDAFKSAPLYQRPGYYSAPQTPLSPTPMFFPLEPSAPSKLHSVTGIDTKDKSLKTVSSGAKKSFELLSESDGALMEHPEVSQVRRKTVEFNLTDMPEIPENHLKEPLEQSPTNIHTTLKDHMDPYWALENRSVLHLNQGHCIALCPTPASLALSLPFLHNFLGFHHCQSTLDLRPALAWGIYLATFTGILGKCSGPFLTSPWYHPEDFLGPGEGR

SEQ ID NO: 38942 - protein, 509 aa, Homo sapiens
MTVTYTARVANARFGGFSQLLLLWRGSIYKLLWRELLCFLGFYMALSAAYRFVLTEGQKRYFEKLVIYCDQYASLIPVSFVLGFYVTLVVNRWWSQYLCMPLPDALMCVVAGTVHGRDDRGRLYRRTLMRYAGLSAVLILRSVSTAVFKRFPTIDHVVEAGFMTREERKKFENLNSSYNKYWVPCVWFSNLAAQARREGRIRDNSALKLLLEELNVFRGKCGMLFHYDWISVPLVYTQVVTIALYSYFLACLIGRQFLDPAQGYKDHDLDLCVPIFTLLQFFFYAGWLKVAEQLINPFGEDDDDFETNFLIDRNFQVSMLAVDEMYDDLAVLEKDLYWDAAEARAPYTAATVFQLRQPSFQGSTFDITLAKEDMQFQRLDGLDGPMGEAPGDFLQRLLPAGAGMVAGGPLGRRLSFLLRKNSCVSEASTGASCSCAVVPEGAAPECSCGDPLLDPGLPEPEAPPPAGPEPLTLIPGPVEPFSIVTMPGPRGPAPPWLPSPIGEEEENLA

SEQ ID NO: 38943 - protein, 509 aa, Homo sapiens; identical to SEQ ID NO: 38942

SEQ ID NO: 38944 - protein, 509 aa, Homo sapiens; identical to SEQ ID NO: 38942

SEQ ID NO: 38945 - protein, 72 aa, Homo sapiens
MFLISSSVHGSDEHGRLLRRTLMRYVNLTSLLIFRSVSTAVYKRFPTMDHVVEAERTGMKPILPSSFEMQSF

SEQ ID NO: 38946 - protein, 668 aa, Homo sapiens
MTVTYSSKVANATFFGFHRLLLKWRGSIYKLLYREFIVFAVLYTAISLVYRLLLTGVQKRYFEKLSIYCDRYAEQIPVTFVLGFYVTLVVNRWWNQFVNLPWPDRLMFLISSSVHGSDEHGRLLRRTLMRYVNLTSLLIFRSVSTAVYKRFPTMDHVVEAGFMTTDERKLFNHLKSPHLKYWVPFIWFGNLATKARNEGRIRDSVDLQSLMTEMNRYRSWCSLLFGYDWVGIPLVYTQVVTLAVYTFFFACLIGRQFLDPTKGYAGHDLDLYIPIFTLLQFFFYAGWLKVAEQLINPFGEDDDDFETNWCIDRNLQVSLLAVDEMHMSLPKMKKDIYWDDSAARPPYTLAAADYCIPSFLGSTVQMGLSGSDFPDEEWLWDYEKHGHRHSMIRRVKRFLSAHEHPSSPRRRSYRRQTSDSSMFLPRDDLSPARDLLDVPSRNPPRASPTWKKSCFPEGSPTLHFSMGELSTIRETSQTSTLQSLTPQSSVRTSPIKMPLVPEVLITAAEAPVPTSGGYHHDSATSILSSEFTGVQPSKTEQQQGPMGSILSPSEKETPPGGPSPQTVSASAEENIFNCEEDPGDTFLKRWSLPGFLGSSHTSLGNLSPDPMSSQPALLIDTETSSEISGINIVAGSRVSSDMLYLMENLDTKETDIIELNKETEESPK

SEQ ID NO: 38947 - protein, 398 aa, Homo sapiens
MTVTYSSKVANATFFGFHRLLLKWRGSIYKLLYREFIVFAVLYTAISLVYRLLLTGVQKRYFEKLSIYCDRYAEQIPVTFVLGFYVTLVVNRWWNQFVNLPWPDRLMFLISSSVHGSDEHGRLLRRTLMRYVNLTSLLIFRSVSTAVYKRFPTMDHVVEAGFMTTDERKLFNHLKSPHLKYWVPFIWFGNLATKARNEGRIRDSVDLQSLMTEMNRYRSWCSLLFGYDWVGIPLVYTQVVTLAVYTFFFACLIGRQFLDPTKGYAGHDLDLYIPIFTLLQFFFYAGWLKVAEQLINPFGEDDDDFETNWCIDRNLQVSLLAVDEMHMSLPKMKKDIYWDDSAARPPYTLAAADYCIPSFLGSTVQMGKQMPKNEWKMEDIKIPLPQPQFQCAKSDPGG

SEQ ID NO: 38948 - protein, 72 aa, Homo sapiens; identical to SEQ ID NO: 38945

SEQ ID NO: 38949 - protein, 455 aa, Homo sapiens
MTTDERKLFNHLKSPHLKYWVPFIWFGNLATKARNEGRIRDSVDLQSLMTEMNRYRSWCSLLFGYDWVGIPLVYTQVAEQLINPFGEDDDDFETNWCIDRNLQVSLLAVDEMHMSLPKMKKDIYWDDSAARPPYTLAAADYCIPSFLGSTVQMGLSGSDFPDEEWLWDYEKHGHRHSMIRRVKRFLSAHEHPSSPRRRSYRRQTSDSSMFLPRDDLSPARDLLDVPSRNPPRASPTWKKSCFPEGSPTLHFSMGELSTIRETSQTSTLQSLTPQSSVRTSPIKMPLVPEVLITAAEAPVPTSGGYHHDSATSILSSEFTGVQPSKTEQQQGPMGSILSPSEKETPPGGPSPQTVSASAEENIFNCEEDPGDTFLKRWSLPGFLGSSHTSLGNLSPDPMSSQPALLIDTETSSEISGINIVAGSRVSSDMLYLMENLDTKETDIIELNKETEESPK

SEQ ID NO: 38950 - protein, 72 aa, Homo sapiens; identical to SEQ ID NO: 38945

SEQ ID NO: 38951 - protein, 473 aa, Homo sapiens
MTVSYTLKVAEARFGGFSGLLLRWRGSIYKLLYKEFLLFGALYAVLSITYRLLLTQEQRYVYAQVARYCNRSADLIPLSFVLGFYVTLVVNRWWSQYTSIPLPDQLMCVISASVHGVDQRGRLLRRTLIRYANLASVLVLRSVSTRVLKRFPTMEHVVDAGFMSQEERKKFESLKSDFNKYWVPCVWFTNLAAQARRDGRIRDDIALCLLLEELNKYRAKCSMLFHYDWISIPLVYTQVVTIAVYSFFALSLVGRQFVEPEAGAAKPQKLLKPGQEPAPALGDPDMYVPLTTLLQFFFYAGWLKVAEQIINPFGEDDDDFETNQLIDRNLQVSLLSVDEMYQNLPPAEKDQYWDEDQPQPPYTVATAAESLRPSFLGSTFNLRMSDDPEQSLQVEASPGSGRPAPAAQTPLLGRFLGVGAPSPAISLRNFGRVRGTPRPPHLLRFRAEEGGDPEAAARIEEESAESGDEALEP

SEQ ID NO: 38952 - protein, 97 aa, Homo sapiens
MYLGITPSVTCNNSSKNEFSLILEKNPLVEFVEELPAGRSSLCYCNLLCGIIRGALEMVHLAADVTFLQDRLKGDSVTEIGITFLKKRDEKKYRGKK

SEQ ID NO: 38953 - protein, 181 aa, Homo sapiens
MSRPAHRRPEYHKINKDLFVLTYGALVAQLCKDYEKDEDVNQYLDKMGYGIGTRLVEDFLARSCVGRCHSYSEIIDIIAQVAFKMYLGITPSVTCNNSSKNEFSLILEKNPLVEFVEELPAGRSSLCYCNLLCGIIRGALEMVHLAADVTFLQDRLKGDSVTEIGITFLKKRDEKKYRGKK

SEQ ID NO: 38954 - protein, 167 aa, Homo sapiens
NKDLFVLTYGALVAQLCKDYEKDEDVNQYLDKMGYGIGTRLVEDFLARSCVGRCHSYSEIIDIIAQVAFKMYLGITPSVTCNNSSKNEFSLILEKNPLVEFVEELPAGRSSLCYCNLLCGIIRGALEMVHLAADVTFLQDRLKGDSVTEIGITFLKKRDEKKYRGKK

SEQ ID NO: 38955 - protein, 498 aa, Homo sapiens
MRPPACWWLLAPPALLALLTCSLAFGLASEDTKKEVKQSQDLEKSGISRKNDIDLKGIVFVIQSQSNSFHAKRAEQLKKSILKQAADLTQELPSVLLLHQLAKQEGAWTILPLLPHFSVTYSRNSSWIFFCEEETRIQIPKLLETLRRYDPSKEWFLGKALHDEEATIIHHYAFSENPTVFKYPDFAAGWALSIPLVNKLTKRLKSESLKSDFTIDLKHEIALYIWDKGGGPPLTPVPEFCTNDVDFYCATTFHSFLPLCRKPVKKKDIFVAVKTCKKFHGDRIPIVKQTWESQASLIEYYSDYTENSIPTVDLGIPNTDRGHCGKTFAILERFLNRSQDKTAWLVIVDDDTLISISRLQHLLSCYDSGEPVFLGERYGYGLGTGGYSYITGGGGMVFSREAVRRLLASKCRCYSNDAPDDMVLGMCFSGLGIPVTHSPLFHQARPVDYPKDYLSHQVPISFHKHWNIDPVKVYFTWLAPSDEDKARQETQKGFREEL

SEQ ID NO: 38956 - protein, 334 aa, Homo sapiens
MPKRRDILAIVLIVLPWTLLITVWHQSTLAPLLAVHKDEGSDPRRETPPGADPREYCTSDRDIVEVVRTEYVYTRPPPWSDTLPTIHVVTPTYSRPVQKAELTRMANTLLHVPNLHWLVVEDAPRRTPLTARLLRDTGLNYTHLHVETPRNYKLRGDARDPRIPRGTMQRNLALRWLRETFPRNSSQPGVVYFADDDNTYSLELFEEMRSTRRVSVWPVAFVGGLRYEAPRVNGAGKVVGWKTVFDPHRPFAIDMAGFAVNLRLILQRSQAYFKLRGVKGGYQESSLLRELVTLNDLEPKAANCTKILVWHTRTEKPVLVNEGKKGFTDPSVEI

SEQ ID NO: 38957 - protein, 334 aa, Homo sapiens; identical to SEQ ID NO: 38956

SEQ ID NO: 38958 - protein, 334 aa, Homo sapiens; identical to SEQ ID NO: 38956

SEQ ID NO: 38959 - protein, 347 aa, Homo sapiens
MGNEEPWVQPALEMPKRRDILAIVLIVLPWTLLITVWHQSTLAPLLAVHKDEGSDPRRETPPGADPREYCTSDRDIVEVVRTEYVYTRPPPWSDTLPTIHVVTPTYSRPVQKAELTRMANTLLHVPNLHWLVVEDAPRRTPLTARLLRDTGLNYTHLHVETPRNYKLRGDARDPRIPRGTMQRNLALRWLRETFPRNSSQPGVVYFADDDNTYSLELFEEMRSTRRVSVWPVAFVGGLRYEAPRVNGAGKVVGWKTVFDPHRPFAIDMAGFAVNLRLILQRSQAYFKLRGVKGGYQESSLLRELVTLNDLEPKAANCTKILVWHTRTEKPVLVNEGKKGFTDPSVEI

SEQ ID NO: 38960 - protein, 335 aa, Homo sapiens
MKLKLKNVFLAYFLVSIAGLLYALVQLGQPCDCLPPLRAAAEQLRQKDLRISQLQAELRRPPPAPAQPPEPEALPTIYVVTPTYARLVQKAELVRLSQTLSLVPRLHWLLVEDAEGPTPLVSGLLAASGLLFTHLVVLTPKAQRLREGEPGWVHPRGVEQRNKALDWLRGRGGAVGGEKDPPPPGTQGVVYFADDDNTYSRELFEEMRWTRGVSVWPVGLVGGLRFEGPQVQDGRVVGFHTAWEPSRPFPVDMAGFAVALPLLLDKPNAQFDSTAPRGHLESSLLSHLVDPKDLEPRAANCTRVLVWHTRTEKPKMKQEEQLQRQGRGSDPAIEV

SEQ ID NO: 38961 - protein, 315 aa, Homo sapiens
MKLKLKNVFLAYFLVSIAGLLYALVQLGQPCDCLPPLRAAAEQLRQKDLRISQLQAELRRPPPAPAQPPEPEALPTIYVVTPTYARLVQKAELVRLSQTLSLVPRLHWLLVEDAEGPTPLVSGLLAASGLLFTHLVVLTPKAQRLREGEPGWVHPRGVEQRNKALDWLRGRGGAVGGEKDPPPPGTQGVVYFADDDNTYSRELFEEMRWTRGVSVWPVGLVGGLRFEGPQVQDGRVVGFHTAWEPSRPFPVDMAGFAVALPLLLDKPNAQFDSTAPRGHLESSLLSHLVDPKDLEPRAANCTRTESRCVTQAGVQ

SEQ ID NO: 38962 - protein, 998 aa, Homo sapiens [sequence omitted]

SEQ ID NO: 38963 - protein, 101 aa, Homo sapiens
MSRSVALAVLALLSLSGLEAIQRTPKIQVYSRHPAENGKSNFLNCYVSGFHPSDIEVDLLKNGERIEKVEHSDLSFSKDWSFYLLYYTEFTPTEKMSMPAV

SEQ ID NO: 38964 - protein, 122 aa, Homo sapiens
MSRSVALAVLALLSLSGLEAIQRTPKIQVYSRHPAENGKSNFLNCYVSGFHPSDIEVDLLKNGERIEKVEHSDLSFSKDWSFYLLYYTEFTPTEKDEYACRVNHVTLSQPKIVKWGKSYILL

SEQ ID NO: 38965 - protein, 119 aa, Homo sapiens
MSRSVALAVLALLSLSGLEAIQRTPKIQVYSRHPAENGKSNFLNCYVSGFHPSDIEVDLLKNGERIEKVEHSDLSFSKDWSFYLLYYTEFTPTEKDEYACRVNHVTLSQPKIVKWDRDM

SEQ ID NO: 38966 - protein, 122 aa, Homo sapiens; identical to SEQ ID NO: 38964

SEQ ID NO: 38967 - protein, 119 aa, Homo sapiens; identical to SEQ ID NO: 38965

SEQ ID NO: 38968 - protein, 119 aa, Homo sapiens; identical to SEQ ID NO: 38965

SEQ ID NO: 38969 - protein, 547 aa, Homo sapiens
MDIIFGRNRKEQLEPVRAKVTGKIPAWLQGTLLRNGPGMHTVGESRYNHWFDGLALLHSFTIRDGEVYYRSKYLRSDTYNTNIEANRIVVSEFGTMAYPDPCKNIFSKAFSYLSHTIPDFTDNCLINIMKCGEDFYATSETNYIRKINPQTLETLEKVDYRKYVAVNLATSHPHYDEAGNVLNMGTSIVEKGKTKYVIFKIPATVPEGKKQGKSPWKHTEVFCSIPSRSLLSPSYYHSFGVTENYVIFLEQPFRLDILKMATAYIRRMSWASCLAFHREEKTYIHIIDQRTRQPVQTKFYTDAMVVFHHVNAYEEDGCIVFDVIAYEDNSLYQLFYLANLNQDFKENSRLTSVPTLRRFAVPLHVDKNAEVGTNLIKVASTTATALKEEDGQVYCQPEFLYEGLELPRVNYAHNGKQYRYVFATGVQWSPIPTKIIKYDILTKSSLKWREDDCWPAEPLFVPAPGAKDEDDGVILSAIVSTDPQKLPFLLILDAKSFTELARASVDVDMHMDLHGLFITDMDWDTKKQAASEEQRDRASDCHGAPLT

SEQ ID NO: 38970 - protein, 478 aa, Homo sapiens
MAAGNPAPQWAWDAHSWGVQIQPLVRRPCPAPQLHHQRRAFSYLSHTIPDFTDNCLINIMKCGEDFYATSETNYIRKINPQTLETLEKVDYRKYVAVNLATSHPHYDEAGNVLNMGTSIVEKGKTKYVIFKIPATVPEGKKQGKSPWKHTEVFCSIPSRSLLSPSYYHSFGVTENYVIFLEQPFRLDILKMATAYIRRMSWASCLAFHREEKTYIHIIDQRTRQPVQTKFYTDAMVVFHHVNAYEEDGCIVFDVIAYEDNSLYQLFYLANLNQDFKENSRLTSVPTLRRFAVPLHVDKNAEVGTNLIKVASTTATALKEEDGQVYCQPEFLYEGLELPRVNYAHNGKQYRYVFATGVQWSPIPTKIIKYDILTKSSLKWREDDCWPAEPLFVPAPGAKDEDDGVILSAIVSTDPQKLPFLLILDAKSFTELARASVDVDMHMDLHGLFITDMDWDTKKQAASEEQRDRASDCHGAPLT

SEQ ID NO: 38971 - protein, 579 aa, Homo sapiens
MFFRVFLHFIRSHSATAVDFLPVMVHRLPVFKRYMGNTPQKKAVFGQCRGLPCVAPLLTTVEEAPRGISARVWGHFPKWLNGSLLRIGPGKFEFGKDKYNHWFDGMALLHQFRMAKGTVTYRSKFLQSDTYKANSAKNRIVISEFGTLALPDPCKNVFERFMSRFELPGKAAAMTDNTNVNYVRYKGDYYLCTETNFMNKVDIETLEKTEKVDWSKFIAVNGATAHPHYDLDGTAYNMGNSFGPYGFSYKVIRVPPEKVDLGETIHGVQVICSIASTEKGKPSYYHSFGMTRNYIIFIEQPLKMNLWKIATSKIRGKAFSDGISWEPQCNTRFHVVEKRTGQLLPGRYYSKPFVTFHQINAFEDQGCVIIDLCCQDNGRTLEVYQLQNLRKAGEGLDQVHNSAAKSFPRRFVLPLNVSLNAPEGDNLSPLSYTSASAVKQADGTIWCSHENLHQEDLEKEGGIEFPQIYYDRFSGKKYHFFYGCGFRHLVGDSLIKVDVVNKTLKVWREDGFYPSEPVFVPAPGTNEEDGGVILSVVITPNQNESNFILVLDAKNFEELGRAEVPVQMPYGFHGTFIPI

SEQ ID NO: 38972 - protein, 545 aa, Homo sapiens
MGNTPQKKAVFGQCRGLPCVAPLLTTVEEAPRGISARVWGHFPKWLNGSLLRIGPGKFEFGKDKYNHWFDGMALLHQFRMAKGTVTYRSKFLQSDTYKANSAKNRIVISEFGTLALPDPCKNVFERFMSRFELPGKAAAMTDNTNVNYVRYKGDYYLCTETNFMNKVDIETLEKTEKVDWSKFIAVNGATAHPHYDLDGTAYNMGNSFGPYGFSYKVIRVPPEKVDLGETIHGVQVICSIASTEKGKPSYYHSFGMTRNYIIFIEQPLKMNLWKIATSKIRGKAFSDGISWEPQCNTRFHVVEKRTGQLLPGRYYSKPFVTFHQINAFEDQGCVIIDLCCQDNGRTLEVYQLQNLRKAGEGLDQVHNSAAKSFPRRFVLPLNVSLNAPEGDNLSPLSYTSASAVKQADGTIWCSHENLHQEDLEKEGGIEFPQIYYDRFSGKKYHFFYGCGFRHLVGDSLIKVDVVNKTLKVWREDGFYPSEPVFVPAPGTNEEDGGVILSVVITPNQNESNFILVLDAKNFEELGRAEVPVQMPYGFHGTFIPI

SEQ ID NO: 38973 - protein, 545 aa, Homo sapiens; identical to SEQ ID NO: 38972

SEQ ID NO: 38974 - protein, 539 aa, Homo sapiens
MGNTPQKKAVFGQCRGLPCVAPLLTTVEEAPRGISARVWGHFPKWLNGSLLRIGPGKFEFGKDKYNHWFDGMALLHQFRMAKGTVTYRSKFLQSDTYKANSAKNRIVISEFGTLALPDPCKNVFERFMSRFELPGKAAAMTDNTNVNYVRYKGDYYLCTETNFMNKVDIETLEKTEKVDWSKFIAVNGATAHPHYDLDGTAYNMGNSFGPYGFSYKVIRVPPEKVDLGETIHGVQVICSIASTEKGKPSYYHSFGMTRNYIIFIEQPLKMNLWKIATSKIRGKAFSDGISWEPQCNTRFHVVEKRTGQLLPGRYYSKPFVTFHQINAFEDQGCVIIDLCCQDNGRTLEVYQLQNLRKAGEGLDQVHNSAAKSFPRRFVLPLNVSLNAPEGDNLSPLSYTSASAVKQADGTIWCSHENLHQEDLEKEGGIEFPQIYYDRFSGKKYHFFYGCGFRHLVGDSLIKVDVVWREDGFYPSEPVFVPAPGTNEEDGGVILSVVITPNQNESNFILVLDAKNFEELGRAEVPVQMPYGFHGTFIPI

SEQ ID NO: 38975 - protein, 545 aa, Homo sapiens; identical to SEQ ID NO: 38972

SEQ ID NO: 38976 - protein, 406 aa, Homo sapiens
MPPVGGKKAKKGILERLNAGEIVIGDGGFVFALEKRGYVKAGPWTPEAAVEHPEAVRQLHREFLRAGSNVMQTFTFYASEDKLENRGNYVLEKISGQEVNEAACDIARQVADEGDALVAGGVSQTPSYLSCKSETEVKKVFLQQLEVFMKKNVDFLIAEYFEHVEEAVWAVETLIASGKPVAATMCIGPEGDLHGVPPGECAVRLVKAGASIIGVNCHFDPTISLKTVKLMKEGLEAARLKAHLMSQPLAYHTPDCNKQGFIDLPEFPFGLEPRVATRWDIQKYAREAYNLGVRYIGGCCGFEPYHIRAIAEELAPERGFLPPASEKHGSWGSGLDMHTKPWVRARARKEYWENLRIASGRPYNPSMSKPDGWGVTKGTAELMQQKEATTEQQLKELFEKQKFKSQ

SEQ ID NO: 38977 - protein, 203 aa, Homo sapiens
MPPVGGKKAKKGILERLNAGEIVIGDGGFVFALEKRGYVKAGPWTPEAAVEHPEAGASIIGVNCHFDPTISLKTVKLMKEGLEAARLKAHLMSQPLAYHTPDCNKQGFIDLPEFPFGLEPELPPDGIFKNTPERPTTWGSGTLAGAVDLSPTTSGQLQRSWPQKGAFCHQLQKNMAAGEVVWTCTPNPGLEQGPGRNTGRIFG

SEQ ID NO: 38978 - protein, 363 aa, Homo sapiens
MAPAGRPGAKKGILERLESGEVVIGDGSFLITLEKRGYVKAGLWTPEAVIEHPDAVRQLHMEFLRAGSNVMQTFTFSASEDNMESKWEDVNAAACDLAREVAGKGDALVAGGICQTSIYKYQKDEARIKKLFRQQLEVFAWKNVDFLIAEYFEHVEEAVWAVEVLKESDRPVAVTMCIGPEGDMHDITPGECAVRLVKAGASIVGVNCRFGPDTSLKTMELMKEGLEWAGLKAHLMVQPLGFHAPDCGKEGFVDLPEYPFGLESRVATRWDIQKYAREAYNLGVRYIGGCCGFEPYHIRAIAEELAPERGFLPPASEKHGSWGSGLDMHTKPWIRARARREYWENLLPASGRPFCPSLSKPDF

SEQ ID NO: 38979 - protein, 299 aa, Homo sapiens
MAPAGRPGAKKGILERLESGEVVIGDGSFLITLEKRGYVKAGLWTPEAVIEHPDAVRQLHMEFLRAGSNVMQTFTFSASEDNMESKYFEHVEEAVWAVEVLKESDRPVAVTMCIGPEGDMHDITPGECAVRLVKAGASIVGVNCRFGPDTSLKTMELMKEGLEWAGLKAHLMVQPLGFHAPDCGKEGFVDLPEYPFGLESRVATRWDIQKYAREAYNLGVRYIGGCCGFEPYHIRAIAEELAPERGFLPPASEKHGSWGSGLDMHTKPWIRARARREYWENLLPASGRPFCPSLSKPDF

SEQ ID NO: 38980 - protein, 212 aa, Homo sapiens
MIIGGIDHSLYTGSLWYTPIRREWYYEVIIVRVEINGQDLKMDCKEYNYDKSIVDSGTTNLRLPKKVFEAAVKSIKAASSTEKFPDGFWLGEQLVCWQAGTTPWNIFPVISLYLMGEVTNQSFRITILPQQYLRWKMWPRPKTTVTCHLTVIHGHCYGSCYHGGLLLSLIGPENELALLSALAMCTMSSGRQRWKACHLGHGRLWLQHSTDR

SEQ ID NO: 38981 - protein, 501 aa, Homo sapiens [sequence omitted]

SEQ ID NO: 38982 - protein, 432 aa, Homo sapiens
MAQALPWLLLWMGAGVLPAHGTQHGIRLPLRSGLGGAPLGLRLPRETDEEPEEPGRRGSFVEMVDNLRGKSGQGYYVEMTVGSPPQTLNILVDTGSSNFAVGAAPHPFLHRYYQRQLSSTYRDLRKGVYVPYTQGKWEGELGTDLLCGAGFPLNQSEVLASVGGSMIIGGIDHSLYTGSLWYTPIRREWYYEVIIVRVEINGQDLKMDCKEYNYDKSIVDSGTTNLRLPKKVFEAAVKSIKAASSTEKFPDGFWLGEQLVCWQAGTTPWNIFPVISLYLMGEVTNQSFRITILPQQYLRPVEDVATSQDDCYKFAISQSSTGTVMGAVIMEGFYVVFDRARKRIGFAVSACHVHDEFRTAAVEGPFVTLDMEDCGYNIPQTDESTLMTIAYVMAAICALFMLPLCLMVCQWCCLRCLRQQHDDFADDISLLK

SEQ ID NO: 38983 - protein, 457 aa, Homo sapiens
MAQALPWLLLWMGAGVLPAHGTQHGIRLPLRSGLGGAPLGLRLPRETDEEPEEPGRRGSFVEMVDNLRGKSGQGYYVEMTVGSPPQTLNILVDTGSSNFAVGAAPHPFLHRYYQRQLSSTYRDLRKGVYVPYTQGKWEGELGTDLPDDSLEPFFDSLVKQTHVPNLFSLQLCGAGFPLNQSEVLASVGGSMIIGGIDHSLYTGSLWYTPIRREWYYEVIIVRVEINGQDLKMDCKEYNYDKSIVDSGTTNLRLPKKVFEAAVKSIKAASSTEKFPDGFWLGEQLVCWQAGTTPWNIFPVISLYLMGEVTNQSFRITILPQQYLRPVEDVATSQDDCYKFAISQSSTGTVMGAVIMEGFYVVFDRARKRIGFAVSACHVHDEFRTAAVEGPFVTLDMEDCGYNIPQTDESTLMTIAYVMAAICALFMLPLCLMVCQWCCLRCLRQQHDDFADDISLLK

SEQ ID NO: 38984 - protein, 476 aa, Homo sapiens
MAQALPWLLLWMGAGVLPAHGTQHGIRLPLRSGLGGAPLGLRLPRETDEEPEEPGRRGSFVEMVDNLRGKSGQGYYVEMTVGSPPQTLNILVDTGSSNFAVGAAPHPFLHRYYQRQLSSTYRDLRKGVYVPYTQGKWEGELGTDLVSIPHGPNVTVRANIAAITESDKFFINGSNWEGILGLAYAEIARLCGAGFPLNQSEVLASVGGSMIIGGIDHSLYTGSLWYTPIRREWYYEVIIVRVEINGQDLKMDCKEYNYDKSIVDSGTTNLRLPKKVFEAAVKSIKAASSTEKFPDGFWLGEQLVCWQAGTTPWNIFPVISLYLMGEVTNQSFRITILPQQYLRPVEDVATSQDDCYKFAISQSSTGTVMGAVIMEGFYVVFDRARKRIGFAVSACHVHDEFRTAAVEGPFVTLDMEDCGYNIPQTDESTLMTIAYVMAAICALFMLPLCLMVCQWCCLRCLRQQHDDFADDISLLK

SEQ ID NO: 38985 - protein, 376 aa, Homo sapiens
MVPFIYLQAHFTLCSGWSSTYRDLRKGVYVPYTQGKWEGELGTDLVSIPHGPNVTVRANIAAITESDKFFINGSNWEGILGLAYAEIARLCGAGFPLNQSEVLASVGGSMIIGGIDHSLYTGSLWYTPIRREWYYEVIIVRVEINGQDLKMDCKEYNYDKSIVDSGTTNLRLPKKVFEAAVKSIKAASSTEKFPDGFWLGEQLVCWQAGTTPWNIFPVISLYLMGEVTNQSFRITILPQQYLRPVEDVATSQDDCYKFAISQSSTGTVMGAVIMEGFYVVFDRARKRIGFAVSACHVHDEFRTAAVEGPFVTLDMEDCGYNIPQTDESTLMTIAYVMAAICALFMLPLCLMVCQWCCLRCLRQQHDDFADDISLLK

SEQ ID NO: 38986 - protein, 396 aa, Homo sapiens
MGALARALLLPLLAQWLLRAAPELAPAPFTLPLRVAAATNRVVAPTPGPGTPAERHADGLALALEPALASPAGAANFLAMVDNLQGDSGRGYYLEMLIGTPPQKLQILVDTGSSNFAVAGTPHSYIDTYFDTERSSTYRSKGFDVTVKYTQGSWTGFVGEDLVTIPKGFNTSFLVNIATIFESENFFLPGIKWNGILGLAYATLAKPSSSLETFFDSLVTQANIPNVFSMQMCGAGLPVAGSGTNGGSLVLGGIEPSLYKGDIWYTPIKEEWYYQIEILKLEIGGQSLNLDCREYNADKAIVDSGTTLLRLPQKVFDAVVEAVARASLIPEFSDGFWTGSQLACWTNSETPWSYFPKISIYLRDENSSRSFRITILPQKLQVLQCLKFPGLSQQRM

SEQ ID NO: 38987 - protein, 518 aa, Homo sapiens
MGALARALLLPLLAQWLLRAAPELAPAPFTLPLRVAAATNRVVAPTPGPGTPAERHADGLALALEPALASPAGAANFLAMVDNLQGDSGRGYYLEMLIGTPPQKLQILVDTGSSNFAVAGTPHSYIDTYFDTERSSTYRSKGFDVTVKYTQGSWTGFVGEDLVTIPKGFNTSFLVNIATIFESENFFLPGIKWNGILGLAYATLAKPSSSLETFFDSLVTQANIPNVFSMQMCGAGLPVAGSGTNGGSLVLGGIEPSLYKGDIWYTPIKEEWYYQIEILKLEIGGQSLNLDCREYNADKAIVDSGTTLLRLPQKVFDAVVEAVARASLIPEFSDGFWTGSQLACWTNSETPWSYFPKISIYLRDENSSRSFRITILPQLYIQPMMGAGLNYECYRFGISPSTNALVIGATVMEGFYVIFDRAQKRVGFAASPCAEIAGAAVSEISGPFSTEDVASNCVPAQSLSEPILWIVSYALMSVCGAILLVLIVLLLLPFRCQRRPRDPEVVNDESSLVRHRWK

SEQ ID NO: 38988 - protein, 468 aa, Homo sapiens
MGALARALLLPLLAQWLLRAAPELAPAPFTLPLRVAAATNRVVAPTPGPGTPAERHADGLALALEPALASPAGAANFLAMVDNLQGDSGRGYYLEMLIGTPPQKLQILVDTGSSNFAVAGTPHSYIDTYFDTERSSTYRSKGFDVTVKYTQGSWTGFVGEDLVTIPKGFNTSFLVNIATIFESENFFLPGIKWNGILGLAYATLAKPSSSLETFFDSLVTQANIPNVFSMQMCGAGLPVAGSGTNGGSLVLGGIEPSLYKGDIWYTPIKEEWYYQIEILKLEIGGQSLNLDCREYNADKAIVDSGTTLLRLPQKVFDAVVEAVARASLLYIQPMMGAGLNYECYRFGISPSTNALVIGATVMEGFYVIFDRAQKRVGFAASPCAEIAGAAVSEISGPFSTEDVASNCVPAQSLSEPILWIVSYALMSVCGAILLVLIVLLLLPFRCQRRPRDPEVVNDESSLVRHRWK

SEQ ID NO: 38989 - protein, 423 aa, Homo sapiens
MLIGTPPQKLQILVDTGSSNFAVAGTPHSYIDTYFDTERSSTYRSKGFDVTVKYTQGSWTGFVGEDLVTIPKGFNTSFLVNIATIFESENFFLPGIKWNGILGLAYATLAKPSSSLETFFDSLVTQANIPNVFSMQMCGAGLPVAGSGTNGGSLVLGGIEPSLYKGDIWYTPIKEEWYYQIEILKLEIGGQSLNLDCREYNADKAIVDSGTTLLRLPQKVFDAVVEAVARASLIPEFSDGFWTGSQLACWTNSETPWSYFPKISIYLRDENSSRSFRITILPQLYIQPMMGAGLNYECYRFGISPSTNALVIGATVMEGFYVIFDRAQKRVGFAASPCAEIAGAAVSEISGPFSTEDVASNCVPAQSLSEPILWIVSYALMSVCGAILLVLIVLLLLPFRCQRRPRDPEVVNDESSLVRHRWK

SEQ ID NO: 38990 - protein, 191 aa, Homo sapiens
MPRSLWLGCSSLADSMPSLRCLYNPGTGALTAFQNSSEREDCNNGEPPRKIIPEKNSLRQTYNSCARLCLNQETVCLASTAMKTENCVAKTKLANGTSSMIVPKQRKLSASYEKEKELCVKYFEQWSESDQVEFVEHLISQMCHYQHGHINSYLKPMLQRDFITALPARGLDHIAENILSYLDAKSLCAAE

SEQ ID NO: 38991 - protein, 605 aa, Homo sapiens
MDPAEAVLQEKALKFMCSMPRSLWLGCSSLADSMPSLRCLYNPGTGALTAFQNSSEREDCNNGEPPRKIIPEKNSLRQTYNSCARLCLNQETVCLASTAMKTENCVAKTKLANGTSSMIVPKQRKLSASYEKEKELCVKYFEQWSESDQVEFVEHLISQMCHYQHGHINSYLKPMLQRDFITALPARGLDHIAENILSYLDAKSLCAAELVCKEWYRVTSDGMLWKKLIERMVRTDSLWRGLAERRGWGQYLFKNKPPDGNAPPNSFYRALYPKIIQDIETIESNWRCGRHSLQRIHCRSETSKGVYCLQYDDQKIVSGLRDNTIKIWDKNTLECKRILTGHTGSVLCLQYDERVIITGSSDSTVRVWDVNTGEMLNTLIHHCEAVLHLRFNNGMMVTCSKDRSIAVWDMASPTDITLRRVLVGHRAAVNVVDFDDKYIVSASGDRTIKVWNTSTCEFVRTLNGHKRGIACLQYRDRLVVSGSSDNTIRLWDIECGACLRVLEGHEELVRCIRFDNKRIVSGAYDGKIKVWDLVAALDPRAPAGTLCLRTLVEHSGRVFRLQFDEFQIVSSSHDDTILIWDFLNDPAAQAEPPRSPSRTYTYISR

SEQ ID NO: 38992 - protein, 564 aa, Homo sapiens
MCSMPRSLWLGCSSLADSMPSLRCLYNPGTGALTAFQTYNSCARLCLNQETVCLASTAMKTENCVAKTKLANGTSSMIVPKQRKLSASYEKEKELCVKYFEQWSESDQVEFVEHLISQMCHYQHGHINSYLKPMLQRDFITALPARGLDHIAENILSYLDAKSLCAAELVCKEWYRVTSDGMLWKKLIERMVRTDSLWRGLAERRGWGQYLFKNKPPDGNAPPNSFYRALYPKIIQDIETIESNWRCGRHSLQRIHCRSETSKGVYCLQYDDQKIVSGLRDNTIKIWDKNTLECKRILTGHTGSVLCLQYDERVIITGSSDSTVRVWDVNTGEMLNTLIHHCEAVLHLRFNNGMMVTCSKDRSIAVWDMASPTDITLRRVLVGHRAAVNVVDFDDKYIVSASGDRTIKVWNTSTCEFVRTLNGHKRGIACLQYRDRLVVSGSSDNTIRLWDIECGACLRVLEGHEELVRCIRFDNKRIVSGAYDGKIKVWDLVAALDPRAPAGTLCLRTLVEHSGRVFRLQFDEFQIVSSSHDDTILIWDFLNDPAAQAEPPRSPSRTYTYISR

SEQ ID NO: 38993 - protein, 569 aa, Homo sapiens
MDPAEAVLQEKALKFMNSSEREDCNNGEPPRKIIPEKNSLRQTYNSCARLCLNQETVCLASTAMKTENCVAKTKLANGTSSMIVPKQRKLSASYEKEKELCVKYFEQWSESDQVEFVEHLISQMCHYQHGHINSYLKPMLQRDFITALPARGLDHIAENILSYLDAKSLCAAELVCKEWYRVTSDGMLWKKLIERMVRTDSLWRGLAERRGWGQYLFKNKPPDGNAPPNSFYRALYPKIIQDIETIESNWRCGRHSLQRIHCRSETSKGVYCLQYDDQKIVSGLRDNTIKIWDKNTLECKRILTGHTGSVLCLQYDERVIITGSSDSTVRVWDVNTGEMLNTLIHHCEAVLHLRFNNGMMVTCSKDRSIAVWDMASPTDITLRRVLVGHRAAVNVVDFDDKYIVSASGDRTIKVWNTSTCEFVRTLNGHKRGIACLQYRDRLVVSGSSDNTIRLWDIECGACLRVLEGHEELVRCIRFDNKRIVSGAYDGKIKVWDLVAALDPRAPAGTLCLRTLVEHSGRVFRLQFDEFQIVSSSHDDTILIWDFLNDPAAQAEPPRSPSRTYTYISR

SEQ ID NO: 38994 - protein, 41 aa, Homo sapiens
MDPAEAVLQEKALKFMTYNSCARLCLNQETVCLASTAMKTE

SEQ ID NO: 38995 - protein, 108 aa, Homo sapiens
MVTLLPIEGQEIHFFEILESECVLYTGWIERASGSSIYPEAKARLPLEALLGSNKEPMLPKETVLSLKRYNLGSSAMKRNVPGHVLQRPSYLTRIQVTLLCNSSAEAL

SEQ ID NO: 38996 - protein, 506 aa, Homo sapiens
MEQLDVFISIKPKPKQPSKSVIVKSVERNALNMYEARKCLLGLESSGVTIATSPSPASCPAGLACPSLDILASAGLGLTGLGLLGPTTLSLNTSTTPNSLLNALNSSVSPLQSPSSGTPSPTLWAPPLANTSSATGFSAIPHLMIPSTAQATLTNILLSGVPTYGHTAPSPPPGLTPVDVHINSMQTEGKKISAALNGHAQSPDIKYGAISTSSLGEKVLSANHGDPSIQTSGSEQTSPKSSPTEGCNDAFVEVGMPRSPSHSGNAGDLKQMMCPSKVSCAKRQTVELLQGTKNSHLHSTDRLLSDPELSATESPLADKKAPGSERAAERAAAAQQNSERAHLAPRSSYVNMQAFDYEQKKLLATKAMLKKPVVTEVRTPTNTWSGLGFSKSMPAETIKELRRANHVSYKPTMTTTYEGSSMSLSRSNSREHLGGGSESDNWRDRNGIGPGSHSEFAASIGSPKRKQNKSSERCVLCTLLGIPRLECVYLGWSITDCGLSDFKCLV

SEQ ID NO: 38997 - protein, 974 aa, Homo sapiens
MAAQGEPGYLAAQSDPGSNSERSTDSPVPGSEDDLVAGATLHSPEWSEERFRVDRKKLEAMLQAAAEGKGRSGEDFFQKIMEETNTQIAWPSKLKIGAKSKKDPHIKVSGKKEDVKEAKEMIMSVLDTKSNRVTLKMDVSHTEHSHVIGKGGNNIKKVMEETGCHIHFPDSNRNNQAEKSNQVSIAGQPAGVESARVRIRELLPLVLMFELPIAGILQPVPDPNSPSIQHISQTYNISVSFKQRSRMYGATVIVRGSQNNTSAVKEGTAMLLEHLAGSLASAIPVSTQLDIAAQHHLFMMGRNGSNIKHIMQRTGAQIHFPDPSNPQKKSTVYLQGTIESVCLARQYLMGCLPLVLMFDMKEEIEVDPQFIAQLMEQLDVFISIKPKPKQPSKSVIVKSVERNALNMYEARKCLLGLESSGVTIATSPSPASCPAGLACPSLDILASAGLGLTGLGLLGPTTLSLNTSTTPNSLLNALNSSVSPLQSPSSGTPSPTLWAPPLANTSSATGFSAIPHLMIPSTAQATLTNILLSGVPTYGHTAPSPPPGLTPVDVHINSMQTEGKKISAALNGHAQSPDIKYGAISTSSLGEKVLSANHGDPSIQTSGSEQTSPKSSPTEGCNDAFVEVGMPRSPSHSGNAGDLKQMMCPSKVSCAKRQTVELLQGTKNSHLHSTDRLLSDPELSATESPLADKKAPGSERAAERAAAAQQNSERAHLAPRSSYVNMQAFDYEQKKLLATKAMLKKPVVTEVRTPTNTWSGLGFSKSMPAETIKELRRANHVSYKPTMTTTYEGSSMSLSRSNSREHLGGGSESDNWRDRNGIGPGSHSEFAASIGSPKRKQNKSTEHYLSSSNYMDCISSLTGSNGCNLNSSFKGSDLPELFSKLGLGKYTDVFQQQEIDLQTFLTLTDQDLKELGITTFGARRKMLLAISELNKNRRKLFESPNARTSFLEGGASGRLPRQYHSDIASVSGRW

SEQ ID NO: 38998 - protein, 975 aa, Homo sapiens
MAAEEVLQTVDHYKTEIERLTKELTETTHEKIQAAEYGLVVLEEKLTLKQQYDELEAEYDSLKQELEQLKEAFGQSFSIHRKVAEDGETREETLLQESASKEAYYLGKILEMQNELKQSRAVVTNVQAENERLTAVVQDLKENNEMVELQRIRMKDEIREYKFREARLLQDYTELEEENITLQKLVSTLKQNQVEYEGLKHEIKRFEEETVLLNSQLEDAIRLKEIAEHQLEEALETLKNEREQKNNLRKELSQYISLNDNHISISVDGLKFAEDGSEPNNDDKMNGHIHGPLVKLNGDYRTPTLRKGESLNPVSDLFSELNISEIQKLKQQLMQVEREKAILLANLQESQTQLEHTKGALTEQHERVHRLTEHVNAMRGLQSSKELKAELDGEKGRDSGEEAHDYEVDINGLEILECKYRVAVTEVIDLKAEIKALKEKYNKSVENYTDEKAKYESKIQMYDEQVTSLEKTTKESGEKMAHMEKELQKMTSIANENHSTLNTAQDELVTFSEELAQLYHHVCLCNNETPNRVMLDYYRQSRVTRSGSLKGPDDPRGLLSPRLARRGVSSPVETRTSSEPVAKESTEASKEPSPTKTPTISPVITAPPSSPVLDTSDIRKEPMNIYNLNAIIRDQIKHLQKAVDRSLQLSRQRAAARELAPMIDKDKEALMEEILKLKSLLSTKREQIATLRAVLKANKQTAEVALANLKNKYENEKAMVTETMTKLRNELKALKEDAATFSSLRAMFATRCDEYVTQLDEMQRQLAAAEDEKKTLNTLLRMAIQQKLALTQRLEDLEFDHEQSRRSKGKLGKSKIGSPKVSGEASVTVPTIDTYLLHSQGPQTPNIRVSSGTQRKRQFSPSLCDQSRPRTSGASYLQNLLRVPPDPTSTESFLLKGPPSMSEFIQGHRLSKEKRLTVAPPDCQQPAASVPPQCSQLAGRQDCPTVSPDTALPEEQPHSSSQCAPLHCLSKPPHP

SEQ ID NO: 38999 - protein, 827 aa, Homo sapiens
MAAEEVLQTVDHYKTEIERLTKELTETTHEKIQAAEYGLVVLEEKLTLKQQYDELEAEYDSLKQELEQLKEAFGQSFSIHRKVAEDGETREETLLQESASKEAYYLGKILEMQNELKQSRAVVTNVQAENERLTAVVQDLKENNEMVELQRIRMKDEIREYKFREARLLQDYTELEEENITLQKLVSTLKQNQVEYEGLKHEIKRFEEETVLLNSQLEDAIRLKEIAEHQLEEALETLKNEREQKNNLRKELSQYISLNDNHISISVDGLKFAEDGSEPNNDDKMNGHIHGPLVKLNGDYRTPTLRKGESLNPVSDLFSELNISEIQKLKQQLMQVEREKAILLANLQESQTQLEHTKGALTEQHERVHRLTEHVNAMRGLQSSKELKAELDGEKGRDSGEEAHDYEVDINGLEILECKYRVAVTEVIDLKAEIKALKEKYNKSVENYTDEKAKYESKIQMYDEQVTSLEKTTKESGEKMAHMEKELQKMTSIANENHSTLNTAQDELVTFSEELAQLYHHVCLCNNETPNRVMLDYYRQSRVTRSGSLKGPDDPRGLLSPRLARRGVSSPVETRTSSEPVAKESTEASKEPSPTKTPTISPVITAPPSSPVLDTSDIRKEPMNIYNLNAIIRDQIKHLQKAVDRSLQLSRQRAAARELAPMIDKDKEALMEEILKLKSLLSTKREQIATLRAVLKANKQTAEVALANLKNKYENEKAMVTETMTKLRNELKALKEDAATFSSLRAMFATRCDEYVTQLDEMQRQLAAAEDEKKTLNTLLRMAIQQKLALTQRLEDLEFDHEQSRRSKGKLGKSKIGSPKTIFTFPL

SEQ ID NO: 39000 - protein, 835 aa, Homo sapiens
MAAEEVLQTVDHYKTEIERLTKELTETTHEKIQAAEYGLVVLEEKLTLKQQYDELEAEYDSLKQELEQLKEAFGQSFSIHRKVAEDGETREETLLQESASKEAYYLGKILEMQNELKQSRAVVTNVQAENERLTAVVQDLKENNEMVELQRIRMKDEIREYKFREARLLQDYTELEEENITLQKLVSTLKQNQVEYEGLKHEIKRFEEETVLLNSQLEDAIRLKEIAEHQLEEALETLKNEREQKNNLRKELSQYISLNDNHISISVDGLKFAEDGSEPNNDDKMNGHIHGPLVKLNGDYRTPTLRKGESLNPVSDLFSELNISEIQKLKQQLMQVEREKAILLANLQESQTQLEHTKGALTEQHERVHRLTEHVNAMRGLQSSKELKAELDGEKGRDSGEEAHDYEVDINGLEILECKYRVAVTEVIDLKAEIKALKEKYNKSVENYTDEKAKYESKIQMYDEQVTSLEKTTKESGEKMAHMEKELQKMTSIANENHSTLNTAQDELVTFSEELAQLYHHVCLCNNETPNRVMLDYYRQSRVTRSGSLKGPDDPRGLLSPRLARRGVSSPVETRTSSEPVAKESTEASKEPSPTKTPTISPVITAPPSSPVLDTSDIRKEPMNIYNLNAIIRDQIKHLQKAVDRSLQLSRQRAAARELAPMIDKDKEALMEEILKLKSLLSTKREQIATLRAVLKANKQTAEVALANLKNKYENEKAMVTETMTKLRNELKALKEDAATFSSLRAMFATRCDEYVTQLDEMQRQLAAAEDEKKTLNTLLRMAIQQKLALTQRLEDLEFDHEQSRRSKGKLGKSKIGSPKIVSSLLPPYRHSAHN

SEQ ID NO: 39001 - protein, 855 aa, Homo sapiens
MSAPSEEEEYARLVMEAQPEWLRAEVKRLSHELAETTREKIQAAEYGLAVLEEKHQLKLQFEELEVDYEAIRSEMEQLKEAFGQAHTNHKKVAADGESREESLIQESASKEQYYVRKVLELQTELKQLRNVLTNTQSENERLASVAQELKEINQNVEIQRGRLRDDIKEYKFREARLLQDYSELEEENISLQKQVSVLRQNQVEFEGLKHEIKRLEEETEYLNSQLEDAIRLKEISERQLEEALETLKTEREQKNSLRKELSHYMSINDSFYTSHLHVSLDGLKFSDDAAEPNNDAEALVNGFEHGGLAKLPLDNKTSTPKKEGLAPPSPSLVSDLLSELNISEIQKLKQQLMQMEREKAGLLATLQDTQKQLEHTRGSLSEQQEKVTRLTENLSALRRLQASKERQTALDNEKDRDSHEDGDYYEVDINGPEILACKYHVAVAEAGELREQLKALRSTHEAREAQHAEEKGRYEAEGQALTEKVSLLEKASRQDRELLARLEKELKKVSDVAGETQGSLSVAQDELVTFSEELANLYHHVCMCNNETPNRVMLDYYREGQGGAGRTSPGGRTSPEARGRRSPILLPKGLLAPEAGRADGGTGDSSPSPGSSLPSPLSDPRREPMNIYNLIAIIRDQIKHLQAAVDRTTELSRQRIASQELGPAVDKDKEALMEEILKLKSLLSTKREQITTLRTVLKANKQTAEVALANLKSKYENEKAMVTETMMKLRNELKALKEDAATFSSLRAMFATRCDEYITQLDEMQRQLAAAEDEKKTLNSLLRMAIQQKLALTQRLELLELDHEQTRRGRAKAAPKTKPATPSVSHTCACASDRAEGTGLANQVFCSEKHSIYCD

SEQ ID NO: 39002 - protein, 824 aa, Homo sapiens
MSAPSEEEEYARLVMEAQPEWLRAEVKRLSHELAETTREKIQAAEYGLAVLEEKHQLKLQFEELEVDYEAIRSEMEQLKEAFGQAHTNHKKVAADGESREESLIQESASKEQYYVRKVLELQTELKQLRNVLTNTQSENERLASVAQELKEINQNVEIQRGRLRDDIKEYKFREARLLQDYSELEEENISLQKQVSVLRQNQVEFEGLKHEIKRLEEETEYLNSQLEDAIRLKEISERQLEEALETLKTEREQKNSLRKELSHYMSINDSFYTSHLHVSLDGLKFSDDAAEPNNDAEALVNGFEHGGLAKLPLDNKTSTPKKEGLAPPSPSLVSDLLSELNISEIQKLKQQLMQMEREKAGLLATLQDTQKQLEHTRGSLSEQQEKVTRLTENLSALRRLQASKERQTALDNEKDRDSHEDGDYYEVDINGPEILACKYHVAVAEAGELREQLKALRSTHEAREAQHAEEKGRYEAEGQALTEKVSLLEKASRQDRELLARLEKELKKVSDVAGETQGSLSVAQDELVTFSEELANLYHHVCMCNNETPNRVMLDYYREGQGGAGRTSPGGRTSPEARGRRSPILLPKGLLAPEAGRADGGTGDSSPSPGSSLPSPLSDPRREPMNIYNLIAIIRDQIKHLQAAVDRTTELSRQRIASQELGPAVDKDKEALMEEILKLKSLLSTKREQITTLRTVLKANKQTAEVALANLKSKYENEKAMVTETMMKLRNELKALKEDAATFSSLRAMFATRCDEYITQLDEMQRQLAAAEDEKKTLNSLLRMAIQQKLALTQRLELLELDHEQTRRGRAKAAPKTKPATPSL

SEQ ID NO: 39003 - protein, 368 aa, Homo sapiens
MWPLWRLVSLLALSQALPFEQRGFWDFTLDDGPFMMNDEEASGADTSGVLDPDSVTPTYSAMCPFGCHCHLRVVQCSDLGLKSVPKEISPDTTLLDLQNNDISELRKDDFKGLQHLYALVLVNNKISKIHEKAFSPLRKLQKLYISKNHLVEIPPNLPSSLVELRIHDNRIRKVPKGVFSGLRNMNCIEMGGNPLENSGFEPGAFDGLKLNYLRISEAKLTGIPKDLPETLNELHLDHNKIQAIELEDLLRYSKLYRLGLGHNQIRMIENGSLSFLPTLRELHLDNNKLARVPSGLPDLKLLQVVYLHSNNITKVGVNDFCPMGFGVKRAYYNGISLFNNPVPYWEVQPATFRCVTDRLAIQFGNYKK

SEQ ID NO: 39004 - protein, 307 aa, Homo sapiens
MCPFGCHCHLRVVQCSDLGLKSVPKEISPDTTLLDLQNNDISELRKDDFKGLQHLYALVLVNNKISKIHEKAFSPLRKLQKLYISKNHLVEIPPNLPSSLVELRIHDNRIRKVPKGVFSGLRNMNCIEMGGNPLENSGFEPGAFDGLKLNYLRISEAKLTGIPKDLPETLNELHLDHNKIQAIELEDLLRYSKLYRLGLGHNQIRMIENGSLSFLPTLRELHLDNNKLARVPSGLPDLKLLQVVYLHSNNITKVGVNDFCPMGFGVKRAYYNGISLFNNPVPYWEVQPATFRCVTDRLAIQFGNYKK

SEQ ID NO: 39005 - protein, 307 aa, Homo sapiens; identical to SEQ ID NO: 39004

SEQ ID NO: 39006 - protein, 238 aa, Homo sapiens
MWPLWRLVSLLALSQALPFEQRGFWDFTLDDGPFMMNDEEASGADTSGVLDPDSVTPTYSAMCPFGCHCHLRVVQCSDLGLKSVPKEISPDTTLLDLQNNDISELRKDDFKGLQHLYVRSWEEPAGLQQRAGVRALVLVNNKISKIHEKAFSPLRKLQKLYISKNHLVEIPPNLPSSLVELRIHDNRIRKVPKGVFSGLRNMNCIEMGGNPLENSGFEPGAFDGLKLNYLRISEAKLT

SEQ ID NO: 39007 - protein, 418 aa, Homo sapiens
MIQLTATPVSALVDEPVHIRATGLIPFQMVSFQASLEDENGDMFYSQAHYRANEFGEVDLNHASSLGGDYMGVHPMGLFWSLKPEKLLTRLLKRDVMNRPFQVQVKLYDLELIVNNKVASAPKASLTLERWYVAPGVTRIKVREGRLRGALFLPPGEGLFPGVIDLFGGLGGLLEFRASLLASRGFASLALAYHNYEDLPRKPEVTDLEYFEEAANFLLRHPKVFGSGVGVVSVCQGVQIGLSMAIYLKQVTATVLINGTNFPFGIPQVYHGQIHQPLPHSAQLISTNALGLLELYRTFETTQVGASQYLFPIEEAQGQFLFIVGEGDKTINSKAHAEQAIGQLKRHGKNNWTLLSYPGAGHLIEPPYSPLCCASTTHDLRLHWGGEVIPHAAAQEHAWKEIQRFLRKHLIPDVTSQL

SEQ ID NO: 39008 - protein, 418 aa, Homo sapiens; identical to SEQ ID NO: 39007

SEQ ID NO: 39009 - protein, 296 aa, Homo sapiens
MNAEPERKFGVVVVGVGRAGSVRMRDLRNPHPSSAFLNLIGFVSRRELGSIDGVQQISLEDALSSQEVEVAYICSESSSHEDYIRQFLNAGKHVLVEYPMTLSLAAAQELWELAEQKGKVLHEEHVELLMEEFAFLKKEVVGKDLLKGSLLFTAGPLEEERFGFPAFSGISRLTWLVSLFGELSLVSATLEERKEDQYMKMTVCLETEKKSPLSWIEEKGPGLKRNRYLSFHFKSGSLENVPNVGVNKNIFLKDQNIFVQKLLGQFSEKELAAEKKRILHCLGLAEEIQKYCCSRK

SEQ ID NO: 39010 - protein, 296 aa, Homo sapiens; identical to SEQ ID NO: 39009

SEQ ID NO: 39011 - protein, 102 aa, Homo sapiens
MNAEPERKFGVVVVGVGRAGSVRMRDLRNPHPSSAFLNLIGFVSRRELGSIDGVQQISLEDALSSQEVEVAYICSESSSHEDYIRQFLNAGKHVLVEYPMTL

SEQ ID NO: 39012 - protein, 206 aa, Homo sapiens
MAVKKIAIFGATGQTGLTTLAQAVQAGYEVTVLVRDSSRLPSEGPRPAHVVVGDVLQAADVDKTVAGQDAVIVLLGTRNDLSPTTVMSEGARNIVAAMKAHGVDKVVACTSAFLLWDPTKVPPRLQAVTDDHIRMHKVLRESGLKYVAVMPPHIGDQPLTGAYTVTLDGRGPSRVISKHDLGHFMLRCLTTDEYDGHSTYPSHQYQ

SEQ ID NO: 39013 - protein, 132 aa, Homo sapiens
MGSLMLLFVETTRNSSACIFPVILNELSSTVETITHFPEVTDGECVFPFHYKNGTYYDCIKSKARHKWCSLNKTYEGYWKFCSAEDFANCVFPFWYRRLIYWECTDDGEAFGKKWCSLTKNFNKDRIWKYCE

SEQ ID NO: 39014 - protein, 142 aa, Homo sapiens
MAAAAEGVLATRSDEPARDDAAVETAEEAKEPAEADITELCRDMFSKMATYLTGELTATSEDYKLLENMNKLTSLKYLEMKDIAINISRNLKDLNQKYAGLQPYLDQINVIEEQVAALEQAAYKLDAYSKKLEAKYKKLEKR

SEQ ID NO: 39015 - protein, 74 aa, Homo sapiens
MNKLTSLKYLEMKDIAINISRNLKDLNQKYAGLQPYLDQINVIEEQVAALEQAAYKLDAYSKKLEAKYKKLEKR

SEQ ID NO: 39016 - protein, 74 aa, Homo sapiens; identical to SEQ ID NO: 39015

SEQ ID NO: 39017 - protein, 99 aa, Homo sapiens
MFSKMATYLTGELTATSEDYKLLENMNKLTSLKYLEMKDIAINISRNLKDLNQKYAGLQPYLDQINVIEEQVAALEQAAYKLDAYSKKLEAKYKKLEKR

SEQ ID NO: 39018 - protein, 202 aa, Homo sapiens
MASQGRRRRPLRRPETVVPGEATETDSERSASSSEEEELYLGPSGPTRGRPTGLRVAGEAAETDSEPEPEPEPTAAPRDLPPLVVQRESAEEAWGTEEAPAPAPARSLLQLRLAESQARLDHDVAAAVSGVYRRAGRDVAALASRLAAAQAAGLAAAHSVRLARGDLCALAERLDIVAGCRLLPDIRGVPGTEPEKDPGPRA

SEQ ID NO: 39019 - protein, 543 aa, Homo sapiens
MAHAHIQGGRRAKSRFVVCIMSGARSKLALFLCGCYVVALGAHTGEESVADHHEAEYYVAAVYEHPSILSLNPLALISRQEALELMNQNLDIYEQQVMTAAQKDVQIIVFPEDGIHGFNFTRTSIYPFLDFMPSPQVVRWNPCLEPHRFNDTEVLQRLSCMAIRGDMFLVANLGTKEPCHSSDPRCPKDGRYQFNTNVVFSNNGTLVDRYRKHNLYFEAAFDVPLKVDLITFDTPFAGRFGIFTCFDILFFDPAIRVLRDYKVKHVVYPTAWMNQLPLLAAIEIQKAFAVAFGINVLAANVHHPVLGMTGSGIHTPLESFWYHDMENPKSHLIIAQVAKNPVGLIGAENATGETDPSHSKFLKILSGDPYCEKDAQEVHCDEATKWNVNAPPTFHSEMMYDNFTLVPVWGKEGYLHVCSNGLCCYLLYERPTLSKELYALGVFDGLHTVHGTYYIQVCALVRCGGLGFDTCGQEITEATGIFEFHLWGNFSTSYIFPLFLTSGMTLEVPDQLGWENDHYFLRKSRLSSGLVTAALYGRLYERD

SEQ ID NO: 39020 - protein, 523 aa, Homo sapiens
MSGARSKLALFLCGCYVVALGAHTGEESVADHHEAEYYVAAVYEHPSILSLNPLALISRQEALELMNQNLDIYEQQVMTAAQKDVQIIVFPEDGIHGFNFTRTSIYPFLDFMPSPQVVRWNPCLEPHRFNDTEVLQRLSCMAIRGDMFLVANLGTKEPCHSSDPRCPKDGRYQFNTNVVFSNNGTLVDRYRKHNLYFEAAFDVPLKVDLITFDTPFAGRFGIFTCFDILFFDPAIRVLRDYKVKHVVYPTAWMNQLPLLAAIEIQKAFAVAFGINVLAANVHHPVLGMTGSGIHTPLESFWYHDMENPKSHLIIAQVAKNPVGLIGAENATGETDPSHSKFLKILSGDPYCEKDAQEVHCDEATKWNVNAPPTFHSEMMYDNFTLVPVWGKEGYLHVCSNGLCCYLLYERPTLSKELYALGVFDGLHTVHGTYYIQVCALVRCGGLGFDTCGQEITEATGIFEFHLWGNFSTSYIFPLFLTSGMTLEVPDQLGWENDHYFLRKSRLSSGLVTAALYGRLYERD

SEQ ID NO: 39021 - protein, 545 aa, Homo sapiens
MARKETQLIIKMNHLARFVVCIMSGARSKLALFLCGCYVVALGAHTGEESVADHHEAEYYVAAVYEHPSILSLNPLALISRQEALELMNQNLDIYEQQVMTAAQKDVQIIVFPEDGIHGFNFTRTSIYPFLDFMPSPQVVRWNPCLEPHRFNDTEVLQRLSCMAIRGDMFLVANLGTKEPCHSSDPRCPKDGRYQFNTNVVFSNNGTLVDRYRKHNLYFEAAFDVPLKVDLITFDTPFAGRFGIFTCFDILFFDPAIRVLRDYKVKHVVYPTAWMNQLPLLAAIEIQKAFAVAFGINVLAANVHHPVLGMTGSGIHTPLESFWYHDMENPKSHLIIAQVAKNPVGLIGAENATGETDPSHSKFLKILSGDPYCEKDAQEVHCDEATKWNVNAPPTFHSEMMYDNFTLVPVWGKEGYLHVCSNGLCCYLLYERPTLSKELYALGVFDGLHTVHGTYYIQVCALVRCGGLGFDTCGQEITEATGIFEFHLWGNFSTSYIFPLFLTSGMTLEVPDQLGWENDHYFLRKSRLSSGLVTAALYGRLYERD

SEQ ID NO: 39022 - protein, 545 aa, Homo sapiens
MPEGGGTSRRLLPMQSRFVVCIMSGARSKLALFLCGCYVVALGAHTGEESVADHHEAEYYVAAVYEHPSILSLNPLALISRQEALELMNQNLDIYEQQVMTAAQKDVQIIVFPEDGIHGFNFTRTSIYPFLDFMPSPQVVRWNPCLEPHRFNDTEVLQRLSCMAIRGDMFLVANLGTKEPCHSSDPRCPKDGRYQFNTNVVFSNNGTLVDRYRKHNLYFEAAFDVPLKVDLITFDTPFAGRFGIFTCFDILFFDPAIRVLRDYKVKHVVYPTAWMNQLPLLAAIEIQKAFAVAFGINVLAANVHHPVLGMTGSGIHTPLESFWYHDMENPKSHLIIAQVAKNPVGLIGAENATGETDPSHSKFLKILSGDPYCEKDAQEVHCDEATKWNVNAPPTFHSEMMYDNFTLVPVWGKEGYLHVCSNGLCCYLLYERPTLSKELYALGVFDGLHTVHGTYYIQVCALVRCGGLGFDTCGQEITEATGIFEFHLWGNFSTSYIFPLFLTSGMTLEVPDQLGWENDHYFLRKSRLSSGLVTAALYGRLYERD

SEQ ID NO: 39023 - protein, 194 aa, Homo sapiens
MPRNLLYSLLSSHLSPHFSTSVTSAKVAVNGVQLHYQQTGEGDHAVLLLPGMLGSGETDFGPQLKNLNKKLFTVVAWDPRGYGHSRPPDRDFPADFFERDAKDAVDLMKALKFKKVSLLGWSDGGITALIAAAKYPSYIHKMVIWGANAYVTDEDSMIYEGIRDVSKWSERTRKPLEALYGWSLTLSPGWNAMA

SEQ ID NO: 39024 - protein, 274 aa, Homo sapiens
MPRNLLYSLLSSHLSPHFSTSVTSAKVAVNGVQLHYQQTGEGDHAVLLLPGMLGSGETDFGPQLKNLNKKLFTVVAWDPRGYGHSRPPDRDFPADFFERDAKDAVDLMKALKFKKVSLLGWSDGGITALIAAAKYPSYIHKMVIWGANAYVTDEDSMIYEGIRDVSKWSERTRKPLEALYGYDYFARTCEKWVDGIRQFKHLPDGNICRHLLPRVQCPALIVHGEKDPLVPRFHADFIHKHVKGSRLHLMPEGKHNLHLRFADEFNKLAEDFLQ

SEQ ID NO: 39025 - protein, 291 aa, Homo sapiens
MVAVLGGRGVLRLRLLLSALKPGIHVPRAGPAAAFGTSVTSAKVAVNGVQLHYQQTGEGDHAVLLLPGMLGSGETDFGPQLKNLNKKLFTVVAWDPRGYGHSRPPDRDFPADFFERDAKDAVDLMKALKFKKVSLLGWSDGGITALIAAAKYPSYIHKMVIWGANAYVTDEDSMIYEGIRDVSKWSERTRKPLEALYGYDYFARTCEKWVDGIRQFKHLPDGNICRHLLPRVQCPALIVHGEKDPLVPRFHADFIHKHVKGSRLHLMPEGKHNLHLRFADEFNKLAEDFLQ

SEQ ID NO: 39026 - protein, 87 aa, Homo sapiens
MYCLQWLLPVLLIPKPLNPALWFSHSMFMGFYLLSFLLERKPCTICALVFLAALFLICYSCWGNCFLYHCSDSPLPESAHDPGVVGT

SEQ ID NO: 39027 - protein, 87 aa, Homo sapiens; identical to SEQ ID NO: 39026

SEQ ID NO: 39028 - protein, 87 aa, Homo sapiens; identical to SEQ ID NO: 39026

SEQ ID NO: 39029 - protein, 87 aa, Homo sapiens; identical to SEQ ID NO: 39026

SEQ ID NO: 39030 - protein, 87 aa, Homo sapiens; identical to SEQ ID NO: 39026

SEQ ID NO: 39031 - protein, 62 aa, Homo sapiens
MYCLQWLLPVLLIPKPLNPALWFSHSMFMGFYLLSFLLERKPCTICALVFLAALFLICYSCW

SEQ ID NO: 39032 - protein, 87 aa, Homo sapiens; identical to SEQ ID NO: 39026

SEQ ID NO: 39033 - protein, 87 aa, Homo sapiens; identical to SEQ ID NO: 39026

SEQ ID NO: 39034 - protein, 78 aa, Homo sapiens
MYCLQWLLPVLLIPKPLNPALWFSHSMFMGFYLLSFLLERKPCTICALVFLAALFLICYSCWGNCFLYHCSDSPLPES

SEQ ID NO: 39035 - protein, 7 aa, Homo sapiens
MYCLQWL

SEQ ID NO: 39036 - protein, 455 aa, Homo sapiens
MSSSGLNSEKVAALIQKLNSDPQFVLAQNVGTTHDLLDICLKRATVQRAQHVFQHAVPQEGKPITNQKSSGRCWIFSCLNVMRLPFMKKLNIEEFEFSQSYLFFWDKVERCYFFLSAFVDTAQRKEPEDGRLVQFLLMNPANDGGQWDMLVNIVEKYGVIPKKCFPESYTTEATRRMNDILNHKMREFCIRLRNLVHSGATKGEISATQDVMMEEIFRVVCICLGNPPETFTWEYRDKDKNYQKIGPITPLEFYREHVKPLFNMEDKICLVNDPRPQHKYNKLYTVEYLSNMVGGRKTLYNNQPIDFLKKMVAASIKDGEAVWFGCDVGKHFNSKLGLSDMNLYDHELVFGVSLKNMNKAERLTFGESLMTHAMTFTAVSEKDDQDGAFTKWRVENSWGEDHGHKGYLCMTDEWFSEYVYEVVVDRKHVPEEVLAVLEQEPIILPAWDPMGALAE

SEQ ID NO: 39037 - protein, 368 aa, Homo sapiens
MCSSTPCPRRASQSPTRRAQVERCYFFLSAFVDTAQRKEPEDGRLVQFLLMNPANDGGQWDMLVNIVEKYGVIPKKCFPESYTTEATRRMNDILNHKMREFCIRLRNLVHSGATKGEISATQDVMMEEIFRVVCICLGNPPETFTWEYRDKDKNYQKIGPITPLEFYREHVKPLFNMEDKICLVNDPRPQHKYNKLYTVEYLSNMVGGRKTLYNNQPIDFLKKMVAASIKDGEAVWFGCDVGKHFNSKLGLSDMNLYDHELVFGVSLKNMNKAERLTFGESLMTHAMTFTAVSEKDDQDGAFTKWRVENSWGEDHGHKGYLCMTDEWFSEYVYEVVVDRKHVPEEVLAVLEQEPIILPAWDPMGALAE

SEQ ID NO: 39038 - protein, 746 aa, Homo sapiens
MAGSRGAGRTAAPSVRPEKRRSEPELEPEPEPEPPLLCTSPLSHSTGSDSGVSDSEESVFSGLEDSGSDSSEDDDEGDEEGEDGALDDEGHSGIKKTTEEQVQASTPCPRTEMASARIGDEYAEDSSDEEDIRNTVGNVPLEWYDDFPHVGYDLDGRRIYKPLRTRDELDQFLDKMDDPDYWRTVQDPMTGRDLRLTDEQVALVRRLQSGQFGDVGFNPYEPAVDFFSGDVMIHPVTNRPADKRSFIPSLVEKEKVSRMVHAIKMGWIQPRRPRDPTPSFYDLWAQEDPNAVLGRHKMHVPAPKLALPGHAESYNPPPEYLLSEEERLAWEQQEPGERKLSFLPRKFPSLRAVPAYGRFIQERFERCLDLYLCPRQRKMRVNVDPEDLIPKLPRPRDLQPFPTCQALVYRGHSDLVRCLSVSPGGQWLVSGSDDGSLRLWEVATARCVRTVPVGGVVKSVAWNPSPAVCLVAAAVEDSVLLLNPALGDRLVAGSTDQLLSAFVPPEEPPLQPARWLEASEEERQVGLRLRICHGKPVTQVTWHGRGDYLAVVLATQGHTQVLIHQLSRRRSQSPFRRSHGQVQRVAFHPARPFLLVASQRSVRLYHLLRQELTKKLMPNCKWVSSLAVHPAGDNVICGSYDSKLVWFDLDLSTKPYRMLRHHKKALRAVAFHPRYPLFASGSDDGSVIVCHGMVYNDLLQNPLLVPVKVLKGHVLTRDLGVLDVIFHPTQPWVFSSGADGTVRLFT

SEQ ID NO: 39039 - protein, 360 aa, Homo sapiens
MNYTESSPLRESTAIGFTPELESIIPVPSNKTTCENWREIHHLVFHVANICFAVGLVIPTTLHLHMIFLRGMLTLGCTLYIVWATLYRCALDIMIWNSVFLGVNILHLSYLLYKKRPVKIEKELSGMYRRLFEPLRVPPDLFRRLTGQFCMIQTLKKGQTYAAEDKTSVDDRLSILLKGKMKVSYRGHFLHNIYPCAFIDSPEFRSTQMHKGEKFQVTIIADDNCRFLCWSRERLTYFLESEPFLYEIFRYLIGKDITNKLYSLNDPTLNDKKAKKLEHQLSLCTQISMLEMRNSIASSSDSDDGLHQFLRGTSSMSSLHVSSPHQRASAKMKPIEEGAEDDDDVFEPASPNTLKVHQLP

SEQ ID NO: 39040 - protein, 360 aa, Homo sapiens; identical to SEQ ID NO: 39039

SEQ ID NO: 39041 - protein, 360 aa, Homo sapiens; identical to SEQ ID NO: 39039

SEQ ID NO: 39042 - protein, 260 aa, Homo sapiens
MDRHSSYIFIWLQLELCAMAVLLTKGEIRCYCDAAHCVATGYMCKSELSACFSRLLDPQNSNSPLTHGCLDSLASTTDICQAKQARNHSGTTIPTLECCHEDMCNYRGLHDVLSPPRGEASGQGNRYQHDGSRNLITKVQELTSSKELWFRAAVIAVPIAGGLILVLLIMLALRMLRSENKRLQDQRQQMLSRLHYSFHGHHSKKGQVAKLDLECMVPVSGHENCCLTCDKMRQADLSNDKILSLVHWGMYSGHGKLEFV

SEQ ID NO: 39043 - protein, 247 aa, Homo sapiens
MDRHSSYIFIWLQLELCAMAVLLTKGEIRCYCDAAHCVATGYMCKSELSACFSRLLDPQNSNSPHICQAKQARNHSGTTIPTLECCHEDMCNYRGLHDVLSPPRGEASGQGNRYQHDGSRNLITKVQELTSSKELWFRAAVIAVPIAGGLILVLLIMLALRMLRSENKRLQDQRQQMLSRLHYSFHGHHSKKGQVAKLDLECMVPVSGHENCCLTCDKMRQADLSNDKILSLVHWGMYSGHGKLEFV

SEQ ID NO: 39044 - protein, 685 aa, Homo sapiens
MLWFSGVGALAERYCRRSPGITCCVLLLLNCSGVPMSLASSFLTGSVAKCENEGEVLQIPFITDNPCIMCVCLNKEVTCKREKCPVLSRDCALAIKQRGACCEQCKGCTYEGNTYNSSFKWQSPAEPCVLRQCQEGVVTESGVRCVVHCKNPLEHLGMCCPTCPGCVFEGVQYQEGEEFQPEGSKCTKCSCTGGRTQCVREVCPILSCPQHLSHIPPGQCCPKCLGQRKVFDLPFGSCLFRSDVYDNGSSFLYDNCTACTCRDSTVVCKRKCSHPGGCDQGQEGCCEECLLRVPPEDIKVCKFGNKIFQDGEMWSSINCTICACVKGRTECRNKQCIPISSCPQGKILNRKGCCPICTEKPGVCTVFGDPHYNTFDGRTFNFQGTCQYVLTKDCSSPASPFQVLVKNDARRTRSFSWTKSVELVLGESRVSLQQHLTVRWNGSRIALPCRAPHFHIDLDGYLLKVTTKAGLEISWDGDSFVEVMAAPHLKGKLCGLCGNYNGHKRDDLIGGDGNFKFDVDDFAESWRVESNEFCNRPQRKPVPELCQGTVKVKLRAHRECQKLKSWEFQTCHSTVDYATFYRSCVTDMCECPVHKNCYCESFLAYTRACQREGIKVHWEPQQNCAATQCKHGAVYDTCGPGCIKTCDNWNEIGPCNKPCVAGCHCPANLVLHKGRCIKPVLCPQR

SEQ ID NO: 39045 - protein, 685 aa, Homo sapiens; identical to SEQ ID NO: 39044

SEQ ID NO: 39046 - protein, 675 aa, Homo sapiens
MDTKSILEELLLKRSQQKKKMSPNNYKERLFVLTKTNLSYYEYDKMKRGSRKGSIEIKKIRCVEKVNLEEQTPVERQYPFQIVYKDGLLYVYASNEESRSQWLKALQKEIRGNPHLLVKYHSGFFVDGKFLCCQQSCKAAPGCTLWEAYANLHTAVNEEKHRVPTFPDRVLKIPRAVPVLKMDAPSSSTTLAQYDNESKKNYGSQPPSSSTSLAQYDSNSKKIYGSQPNFNMQYIPREDFPDWWQVRKLKSSSSSEDVASSNQKERNVNHTTSKISWEFPESSSSEEEENLDDYDWFAGNISRSQSEQLLRQKGKEGAFMVRNSSQVGMYTVSLFSKAVNDKKGTVKHYHVHTNAENKLYLAENYCFDSIPKLIHYHQHNSAGMITRLRHPVSTKANKVPDSVSLGNGIWELKREEITLLKELGSGQFGVVQLGKWKGQYDVAVKMIKEGSMSEDEFFQEAQTMMKLSHPKLVKFYGVCSKEYPIYIVTEYISNGCLLNYLRSHGKGLEPSQLLEMCYDVCEGMAFLESHQFIHRDLAARNCLVDRDLCVKVSDFGMTRYVLDDQYVSSVGTKFPVKWSAPEVFHYFKYSSKSDVWAFGILMWEVFSLGKQPYDLYDNSQVVLKVSQGHRLYRPHLASDTIYQIMYSCWHELPEKRPTFQQLLSSIEPLREKDKH

SEQ ID NO: 39047 - protein, 675 aa, Homo sapiens; identical to SEQ ID NO: 39046

SEQ ID NO: 39048 - protein, 675 aa, Homo sapiens; identical to SEQ ID NO: 39046

SEQ ID NO: 39049 - protein, 174 aa, Homo sapiens
MTELEYPKGSSIMPAAGTMYLTTSTGYPYTYHNGVAYFHTPEVTSVPPPWPSRSVCSSPVMVAQPIYQQPAYHYQATTQYLPGQWQWSVPQPSASSAPFLYLQPSEVIYQPVEIAQDGGCVPPPLSLMETSVPEPYSDHGVQATYHQVYAPSAITMPAPVMQPEPIKTVWSIHY

SEQ ID NO: 39050 - protein, 295 aa, Homo sapiens
METESGPQTSNQMQTDSLSPSPNPVSPVPLNNPTSAPRYGTVIPNRIFVGGIDFKTNESDLRKFFSQYGSVKEVKIVNDRAGVSKGYGFVTFETQEDAQKILQEAEKLNYKDKKLNIGPAIRKQQVGIPRSSIMPAAGTMYLTTSTGYPYTYHNGVAYFHTPEVTSVPPPWPSRSVCSSPVMVAQPIYQQPAYHYQATTQYLPGQWQWSVPQPSASSAPFLYLQPSEVIYQPVEIAQDGGCVPPPLSLMETSVPEPYSDHGVQATYHQVYAPSAITMPAPVMQPEPIKTVWSIHY

SEQ ID NO: 39051 - protein, 283 aa, Homo sapiens
MQTDSLSPSPNPVSPVPLNNPTSAPRYGTVIPNRIFVGGIDFKTNESDLRKFFSQYGSVKEVKIVNDRAGVSKGYGFVTFETQEDAQKILQEAEKLNYKDKKLNIGPAIRKQQVGIPRSSIMPAAGTMYLTTSTGYPYTYHNGVAYFHTPEVTSVPPPWPSRSVCSSPVMVAQPIYQQPAYHYQATTQYLPGQWQWSVPQPSASSAPFLYLQPSEVIYQPVEIAQDGGCVPPPLSLMETSVPEPYSDHGVQATYHQVYAPSAITMPAPVMQPEPIKTVWSIHY

SEQ ID NO: 39052 - protein, 283 aa, Homo sapiens; identical to SEQ ID NO: 39051

SEQ ID NO: 39053 - protein, 137 aa, Homo sapiens
MLSGRLVLGLVSMAGRVCLCQGSAGSGAIGPVEAAIRTKLEEALSPEVLELRNESGGHAVPPGSETHFRVAVVSSRFEGLSPLQRHRLVHAALAEELGGPVHALAIQARTPAQWRENSQLDTSPPCLGGNKKTLGTP

SEQ ID NO: 39054 - protein, 137 aa, Homo sapiens; identical to SEQ ID NO: 39053

SEQ ID NO: 39055 - protein, 137 aa, Homo sapiens; identical to SEQ ID NO: 39053

SEQ ID NO: 39056 - protein, 152 aa, Homo sapiens
MASAKSLDRWKARLLEGGSTALTYALVRAEVSFPAEVAPVRQQGSVAGARAGVVSLLGCRSSWTAAMELSAEYLREKLQRDLEAEHVEVEDTTLNRCSCSFRVLVVSAKFEGKPLLQRHRLVNACLAEELPHIHAFEQKTLTPDQWARERQK

SEQ ID NO: 39057 - protein, 101 aa, Homo sapiens
MAAWSPAAAAPLLRGIRGLPLHHRMFATQTEGELRVTQILKEKFPRATAIKVTDISGTKRRNQRDAWIADIYLCPQTLTTPWLHRCCCLRPWMNFTDIILP

SEQ ID NO: 39058 - protein, 107 aa, Homo sapiens
MAAWSPAAAAPLLRGIRGLPLHHRMFATQTEGELRVTQILKEKFPRATAIKVTDISGGCGAMYEIKIESEEFKEKRTVQQHQMVNQALKEEIKEMHGLRIFTSVPKR

SEQ ID NO: 39059 - protein, 399 aa, Homo sapiens
MAQRQPHSPNQTLISITNDTESSSSVVSNDNTNKGWSGDNSPGIEALCAIYITYAVIISVGILGNAILIKVFFKTKSMQTVPNIFITSLAFGDLLLLLTCVPVDATHYLAEGWLFGRIGCKVLSFIRLTSVGVSVFTLTILSADRYKAVVKPLERQPSNAILKTCVKAGCVWIVSMIFALPEAIFSNVYTFRDPNKNMTFESCTSYPVSKKLLQEIHSLLCFLVFYIIPLSIISVYYSLIARTLYKSTLNIPTEEQSHARKQIESRKRIARTVLVLVALFALCWLPNHLLYLYHSFTSQTYVDPSAMHFIFTIFSRVLAFSNSCVNPFALYWLSKSFQKHFKAQLFCCKAERPEPPVADTSLTTLAVMGTVPGTGSIQMSEISVTSFTGCSVKQAEDRF

SEQ ID NO: 39060 - protein, 100 aa, Homo sapiens
MRALTLLALLALAALCIAGQAGAKPSGAESSKGAAFVSKQEGSEVVKRPRRYLYQWLGAPVPYPDPLEPRREVCELNPDCDELADHIGFQEAYRRFYGPV

SEQ ID NO: 39061 - protein, 318 aa, Homo sapiens
MAAQGCAASRLLQLLLQLLLLLLLLAAGGARARWRGEGTSAHLRDIFLGRCAEYRALLSPEQRNKNCTAIWEAFKVALDKDPCSVLPSDYDLFINLSRHSIPRDKSLFWENSHLLVNSFADNTRRFMPLSDVLYGRVADFLSWCRQKNDSGLDYQSCPTSEDCENNPVDSFWKRASIQYSKDSSGVIHVMLNGSEPTGAYPIKGFFADYEIPNLQKEKITRIEIWVMHEIGGPNVESCGEGSMKVLEKRLKDMGFQYSCINDYRPVKLLQCVDHSTHPDCALKSAAAATQRKAPSLYTEQRAGLIIPLFLVLASRTQL

SEQ ID NO: 39062 - protein, 180 aa, Homo sapiens
MASTSYDYCRVPMEDGDKRCKLLLGIGILVLLIIVILGVPLIIFTIKANSEACRDGLRAVMECRNVTHLLQQELTEAQKGFQDVEAQAATCNHTVMALMASLDAEKAQGQKKVEELEGEITTLNHKLQDASAEVERLRRENQVLSVRIADKKYYPSSQDSSSAAAPQLLIVLLGLSALLQ

SEQ ID NO: 39063 - protein, 216 aa, Homo sapiens
MASTSYDYCRVPMEDGDKRCKLLLGIGILVLLIIVILGVPLIIFTIKANSEACRDGLRAVMECRNVTHLLQQELTEAQKGFQDVEAQAATCNHTVMALMASLDAEKAQGQKKVEELEGEITTLNHKLQDASAEVERLRRENQVLSVRIADKKYYPSSHFPSTPQSRLQTQLTTLKIEMDEAKAQGTQMGAENGALTGALGCKGVGRDRSGRSLGES

SEQ ID NO: 39064 - protein, 392 aa, Homo sapiens
MVLLSILRILFLCELVLFMEHRAQMAEGGQSSIALLAEAPTLPLIEELLEESPGEQPRKPRLLGHSLRYMLELYRRSADSHGHPRENRTIGATMVRLVKPLTNVARPHRGTWHIQILGFPLRPNRGLYQLVRATVVYRHHLQLTRFNLSCHVEPWVQKNPTNHFPSSEGDSSKPSLMSNAWKEMDITQLVQQRFWNNKGHRILRLRFMCQQQKDSGGLELWHGTSSLDIAFLLLYFNDTHKSIRKAKFLPRGMEEFMERESLLRRTRQADGISAEVTASSSKHSGPENNQCSLHPFQISFRQLGWDHWIIAPPFYTPNYCKGTCLRVLRDGLNSPNHAIIQNLINQLVDQSVPRPSCVPYKYVPISVLMIEANGSILYKEYEGMIAESCTCR

SEQ ID NO: 39065 - protein, 472 aa, Homo sapiens
MAGASRLLFLWLGCFCVSLAQGERPKPPFPELRKAVPGDRTAGGGPDSELQPQDKVSEHMLRLYDRYSTVQAARTPGSLEGGSQPWRPRLLREGNTVRSFRAAAAETLERKGLYIFNLTSLTKSENILSATLYFCIGELGNISLSCPVSGGCSHHAQRKHIQIDLSAWTLKFSRNQSQLLGHLSVDMAKSHRDIMSWLSKDITQLLRKAKENEEFLIGFNITSKGRQLPKRRLPFPEPYILVYANDAAISEPESVVSSLQGHRNFPTGTVPKWDSHIRAALSIERRKKRSTGVLLPLQNNELPGAEYQYKKDEVWEERKPYKTLQAQAPEKSKNKKKQRKGPHRKSQTLQFDEQTLKKARRKQWIEPRNCARRYLKVDFADIGWSEWIISPKSFDAYYCSGACQFPMPKSLKPSNHATIQSIVRAVGVVPGIPEPCCVPEKMSSLSILFFDENKNVVLKVYPNMTVESCACR

SEQ ID NO: 39066 - protein, 70 aa, Homo sapiens
CFFYYLKSLKPSNHATIQSIVRAVGVVPGIPEPCCVPEKMSSLSILFFDENKNVVLKVYPNMTVESCACR

SEQ ID NO: 39067 - protein, 408 aa, Homo sapiens
MIPGNRMLMVVLLCQVLLGGASHASLIPETGKKKVAEIQGHAGGRRSGQSHELLRDFEATLLQMFGLRRRPQPSKSAVIPDYMRDLYRLQSGEEEEEQIHSTGLEYPERPASRANTVRSFHHEEHLENIPGTSENSAFRFLFNLSSIPENEVISSAELRLFREQVDQGPDWERGFHRINIYEVMKPPAEVVPGHLITRLLDTRLVHHNVTRWETFDVSPAVLRWTREKQPNYGLAIEVTHLHQTRTHQGQHVRISRSLPQGSGNWAQLRPLLVTFGHDGRGHALTRRRRAKRSPKHHSQRARKKNKNCRRHSLYVDFSDVGWNDWIVAPPGYQAFYCHGDCPFPLADHLNSTNHAIVQTLVNSVNSSIPKACCVPTELSAISMLYLDEYDKVVLKNYQEMVVEGCGCR

SEQ ID NO: 39068 - protein, 408 aa, Homo sapiens; identical to SEQ ID NO: 39067

SEQ ID NO: 39069 - protein, 408 aa, Homo sapiens; identical to SEQ ID NO: 39067

SEQ ID NO: 39070 - protein, 408 aa, Homo sapiens; identical to SEQ ID NO: 39067

SEQ ID NO: 39071 - protein, 110 aa, Homo sapiens
MIPGNRMLMVVLLCQVLLGGASHASLIPETGKKKVAEIQGHAGGRRSGQSHELLRDFEATLLQMFGLRRRPQPSKSAVIPDYMRDLYRLQSGEEEEEQIHSTGLEYPERP

SEQ ID NO: 39072 - protein, 454 aa, Homo sapiens
MHLTVFLLKGIVGFLWSCWVLVGYAKGGLGDNHVHSSFIYRRLRNHERREIQREILSILGLPHRPRPFSPGKQASSAPLFMLDLYNAMTNEENPEESEYSVRASLAEETRGARKGYPASPNGYPRRIQLSRTTPLTTQSPPLASLHDTNFLNDADMVMSFVNLVERDKDFSHQRRHYKEFRFDLTQIPHGEAVTAAEFRIYKDRSNNRFENETIKISIYQIIKEYTNRDADLFLLDTRKAQALDVGWLVFDITVTSNHWVINPQNNLGLQLCAETGDGRSINVKSAGLVGRQGPQSKQPFMVAFFKASEVLLRSVRAANKRKNQNRNKSSSHQDSSRMSSVGDYNTSEQKQACKKHELYVSFRDLGWQDWIIAPEGYAAFYCDGECSFPLNAHMNATNHAIVQTLVHLMFPDHVPKPCCAPTKLNAISVLYFDDSSNVILKKYRNMVVRSCGCH

SEQ ID NO: 39073 - protein, 417 aa, Homo sapiens
MHLTVFLLKGIVGFLWSCWVLVGYAKGGLGDNHVHSSFIYRRLRNHERREIQREILSILGLPHRPRPFSPGKQASSAPLFMLDLYNAMTNEENPEESEYSVRASLAEETRGARKGYPASPNGYPRRIQLSRTTPLTTQSPPLASLHDTNFLNDADMVMSFVNLVERDKDFSHQRRHYKEFRFDLTQIPHGEAVTAAEFRIYKDRSNNRFENETIKISIYQIIKEYTNRDADLFLLDTRKAQALDVGWLVFDITVTSNHWVINPQNNLGLQLCAETGDGRSINVKSAGLVGRQGPQSKQPFMVAFFKASEVLLRSVRAANKRKNQNRNKSSSHQDSSRMSSVGDYNTSEQKQACKKHELYVSFRDLGWQVHLMFPDHVPKPCCAPTKLNAISVLYFDDSSNVILKKYRNMVVRSCGCH

SEQ ID NO: 39074 - protein, 513 aa, Homo sapiens
MPGLGRRAQWLCWWWGLLCSCCGPPPLRPPLPAAAAAAAGGQLLGDGGSPGRTEQPPPSPQSSSGFLYRRLKTQEKREMQKEILSVLGLPHRPRPLHGLQQPQPPALRQQEEQQQQQQLPRGEPPPGRLKSAPLFMLDLYNALSADNDEDGASEGERQQSWPHEAASSSQRRQPPPGAAHPLNRKSLLAPGSGSGGASPLTSAQDSAFLNDADMVMSFVNLVEYDKEFSPRQRHHKEFKFNLSQIPEGEVVTAAEFRIYKDCVMGSFKNQTFLISIYQVLQEHQHRDSDLFLLDTRVVWASEEGWLEFDITATSNLWVVTPQHNMGLQLSVVTRDGVHVHPRAAGLVGRDGPYDKQPFMVAFFKVSEVHVRTTRSASSRRRQQSRNRSTQSQDVARVSSASDYNSSELKTACRKHELYVSFQDLGWQDWIIAPKGYAANYCDGECSFPLNAHMNATNHAIVQTLVHLMNPEYVPKPCCAPTKLNAISVLYFDDNSNVILKKYRNMVVRACGCH

SEQ ID NO: 39075 - protein, 435 aa, Homo sapiens
MQKEILSVLGLPHRPRPLHGLQQPQPPALRQQEEQQQQQQLPRGEPPPGRLKSAPLFMLDLYNALSADNDEDGASEGERQQSWPHEAASSSQRRQPPPGAAHPLNRKSLLAPGSGSGGASPLTSAQDSAFLNDADMVMSFVNLVEYDKEFSPRQRHHKEFKFNLSQIPEGEVVTAAEFRIYKDCVMGSFKNQTFLISIYQVLQEHQHRDSDLFLLDTRVVWASEEGWLEFDITATSNLWVVTPQHNMGLQLSVVTRDGVHVHPRAAGLVGRDGPYDKQPFMVAFFKVSEVHVRTTRSASSRRRQQSRNRSTQSQDVARVSSASDYNSSELKTACRKHELYVSFQDLGWQDWIIAPKGYAANYCDGECSFPLNAHMNATNHAIVQTLVHLMNPEYVPKPCCAPTKLNAISVLYFDDNSNVILKKYRNMVVRACGCH

SEQ ID NO: 39076 - protein, 476 aa, Homo sapiens
AAGGQLLGDGGSPGRTEQPPPSPQSSSGFLYRRLKTQEKREMQKEILSVLGLPHRPRPLHGLQQPQPPALRQQEEQQQQQQLPRGEPPPGRLKSAPLFMLDLYNALSADNDEDGASEGERQQSWPHEAASSSQRRQPPPGAAHPLNRKSLLAPGSGSGGASPLTSAQDSAFLNDADMVMSFVNLVEYDKEFSPRQRHHKEFKFNLSQIPEGEVVTAAEFRIYKDCVMGSFKNQTFLISIYQVLQEHQHRDSDLFLLDTRVVWASEEGWLEFDITATSNLWVVTPQHNMGLQLSVVTRDGVHVHPRAAGLVGRDGPYDKQPFMVAFFKVSEVHVRTTRSASSRRRQQSRNRSTQSQDVARVSSASDYNSSELKTACRKHELYVSFQDLGWQDWIIAPKGYAANYCDGECSFPLNAHMNATNHAIVQTLVHLMNPEYVPKPCCAPTKLNAISVLYFDDNSNVILKKYRNMVVRACGCH

SEQ ID NO: 39077 - protein, 532 aa, Homo sapiens
MPQLYIYIRLLGAYLFIISRVQGQNLDSMLHGTGMKSDSDQKKSENGVTLAPEDTLPFLKCYCSGHCPDDAINNTCITNGHCFAIIEEDDQGETTLASGCMKYEGSDFQCKDSPKAQLRRTIECCRTNLCNQYLQPTLPPVVIGPFFDGSIRWLVLLISMAVCIIAMIIFSSCFCYKHYCKSISSRRRYNRDLEQDEAFIPVGESLKDLIDQSQSSGSGSGLPLLVQRTIAKQIQMVRQVGKGRYGEVWMGKWRGEKVAVKVFFTTEEASWFRETEIYQTVLMRHENILGFIAADIKGTGSWTQLYLITDYHENGSLYDFLKCATLDTRALLKLAYSAACGLCHLHTEIYGTQGKPAIAHRDLKSKNILIKKNGSCCIADLGLAVKFNSDTNEVDVPLNTRVGTKRYMAPEVLDESLNKNHFQPYIMADIYSFGLIIWEMARRCITGGIVEEYQLPYYNMVPSDPSYEDMREVVCVKRLRPIVSNRWNSDECLRAVLKLMSECWAHNPASRLTALRIKKTLAKMVESQDVKI

SEQ ID NO: 39078 - protein, 532 aa, Homo sapiens; identical to SEQ ID NO: 39077

SEQ ID NO: 39079 - protein, 1038 aa, Homo sapiens
MTSSLQRPWRVPWLPWTILLVSTAAASQNQERLCAFKDPYQQDLGIGESRISHENGTILCSKGSTCYGLWEKSKGDINLVKQGCWSHIGDPQECHYEECVVTTTPPSIQNGTYRFCCCSTDLCNVNFTENFPPPDTTPLSPPHSFNRDETIIIALASVSVLAVLIVALCFGYRMLTGDRKQGLHSMNMMEAAASEPSLDLDNLKLLELIGRGRYGAVYKGSLDERPVAVKVFSFANRQNFINEKNIYRVPLMEHDNIARFIVGDERVTADGRMEYLLVMEYYPNGSLCKYLSLHTSDWVSSCRLAHSVTRGLAYLHTELPRGDHYKPAISHRDLNSRNVLVKNDGTCVISDFGLSMRLTGNRLVRPGEEDNAAISEVGTIRYMAPEVLEGAVNLRDCESALKQVDMYALGLIYWEIFMRCTDLFPGESVPEYQMAFQTEVGNHPTFEDMQVLVSREKQRPKFPEAWKENSLAVRSLKETIEDCWDQDAEARLTAQCAEERMAELMMIWERNKSVSPTVNPMSTAMQNERNLSHNRRVPKIGPYPDYSSSSYIEDSIHHTDSIVKNISSEHSMSSTPLTIGEKNRNSINYERQQAQARIPSPETSVTSLSTNTTTTNTTGLTPSTGMTTISEMPYPDETNLHTTNVAQSIGPTPVCLQLTEEDLETNKLDPKEVDKNLKESSDENLMEHSLKQFSGPDPLSSTSSSLLYPLIKLAVEATGQQDFTQTANGQACLIPDVLPTQIYPLPKQQNLPKRPTSLPLNTKNSTKEPRLKFGSKHKSNLKQVETGVAKMNTINAAEPHVVTVTMNGVAGRNHSVNSHAATTQYANGTVLSGQTTNIVTHRAQEMLQNQFIGEDTRLNINSSPDEHEPLLRREQQAGHDEGVLDRLVDRRERPLEGGRTNSNNNNSNPCSEQDVLAQGVPSTAADPGPSKPRRAQRPNSLDLSATNVLDGSSIQIGESTQDGKSGSGEKIKKRVKTPYSLKRWRPSTWVISTESLDCEVNNNGSNRAVHSKSSTAVYLAEGGTATTMVSKDIGMNCL

SEQ ID NO: 39080 - protein, 778 aa, Homo sapiens
MSSGAKEGGGGSPAYHLPHPHPHPPQHAQYVGPYRLEKTLGKGQTGLVKLGVHCITGQKVAIKIVNREKLSESVLMKVEREIAILKLIEHPHVLKLHDVYENKKYLYLVLEHVSGGELFDYLVKKGRLTPKEARKFFRQIVSALDFCHSYSICHRDLKPENLLLDEKNNIRIADFGMASLQVGDSLLETSCGSPHYACPEVIKGEKYDGRRADMWSCGVILFALLVGALPFDDDNLRQLLEKVKRGVFHMPHFIPPDCQSLLRGMIEVEPEKRLSLEQIQKHPWYLGGKHEPDPCLEPAPGRRVAMRSLPSNGELDPDVLESMASLGCFRDRERLHRELRSEEENQEKMIYYLLLDRKERYPSCEDQDLPPRNDVDPPRKRVDSPMLSRHGKRRPERKSMEVLSITDAGGGGSPVPTRRALEMAQHSQRSRSVSGASTGLSSSPLSSPRSPVFSFSPEPGAGDEARGGGSPTSKTQTLPSRGPRGGGAGEQPPPPSARSTPLPGPPGSPRSSGGTPLHSPLHTPRASPTGTPGTTPPPSPGGGVGGAAWRSRLNSIRNSFLGSPRFHRRKMQVPTAEEMSSLTPESSPELAKRSWFGNFISLDKEEQIFLVLKDKPLSSIKADIVHAFLSIPSLSHSVLSQTSFRAEYKASGGPSVFQKPVRFQVDISSSEGPEPSPRRDGSGGGGIYSVTFTLISGPSRRFKRVVETIQAQLLSTHDQPSVQALADEKNGAQTRPAGAPPRSLQPPPGRPDPELSSSPRRGPPKDKKLLATNGTPLP

SEQ ID NO: 39081 - protein, 473 aa, Homo sapiens
MRSLPSNGELDPDVLESMASLGCFRDRERLHRELRSEEENQEKMIYYLLLDRKERYPSCEDQDLPPRNDVDPPRKRVDSPMLSRHGKRRPERKSMEVLSITDAGGGGSPVPTRRALEMAQHSQRSRSVSGASTGLSSSPLSSPRSPVFSFSPEPGAGDEARGGGSPTSKTQTLPSRGPRGGGAGEQPPPPSARSTPLPGPPGSPRSSGGTPLHSPLHTPRASPTGTPGTTPPPSPGGGVGGAAWRSRLNSIRNSFLGSPRFHRRKMQVPTAEEMSSLTPESSPELAKRSWFGNFISLDKEEQIFLVLKDKPLSSIKADIVHAFLSIPSLSHSVLSQTSFRAEYKASGGPSVFQKPVRFQVDISSSEGPEPSPRRDGSGGGGIYSVTFTLISGPSRRFKRVVETIQAQLLSTHDQPSVQALADEKNGAQTRPAGAPPRSLQPPPGRPDPELSSSPRRGPPKDKKLLATNGTPLP

SEQ ID NO: 39082 - protein, 473 aa, Homo sapiens; identical to SEQ ID NO: 39081

SEQ ID NO: 39083 - protein, 353 aa, Homo sapiens
MASSWPPLELQSSNQSQLFPQNATACDNAPEAWDLLHRVLPTFIISICFFGLLGNLFVLLVFLLPRRQLNVAEIYLANLAASDLVFVLGLPFWAENIWNQFNWPFGALLCRVINGVIKANLFISIFLVVAISQDRYRVLVHPMASRRQQRRRQARVTCVLIWVVGGLLSIPTFLLRSIQAVPDLNITACILLLPHEAWHFARIVELNILGFLLPLAAIVFFNYHILASLRTREEVSRTRCGGRKDSKTTALILTLVVAFLVCWAPYHFFAFLEFLFQVQAVRGCFWEDFIDLGLQLANFFAFTNSSLNPVIYVFVGRLFRTKVWELYKQCTPKSLAPISSSHRKEIFQLFWRN

SEQ ID NO: 39084 - protein, 391 aa, Homo sapiens
MFSPWKISMFLSVREDSVPTTASFSADMLNVTLQGPTLNGTFAQSKCPQVEWLGWLNTIQPPFLWVLFVLATLENIFVLSVFCLHKSSCTVAEIYLGNLAAADLILACGLPFWAITISNNFDWLFGETLCRVVNAIISMNLYSSICFLMLVSIDRYLALVKTMSMGRMRGVRWAKLYSLVIWGCTLLLSSPMLVFRTMKEYSDEGHNVTACVISYPSLIWEVFTNMLLNVVGFLLPLSVITFCTMQIMQVLRNNEMQKFKEIQTERRATVLVLVVLLLFIICWLPFQISTFLDTLHRLGILSSCQDERIIDVITQIASFMAYSNSCLNPLVYVIVGKRFRKKSWEVYQGVCQKGGCRSEPIQMENSMGTLRTSISVERQIHKLQDWAGSRQ

SEQ ID NO: 39085 - protein, 364 aa, Homo sapiens
MLNVTLQGPTLNGTFAQSKCPQVEWLGWLNTIQPPFLWVLFVLATLENIFVLSVFCLHKSSCTVAEIYLGNLAAADLILACGLPFWAITISNNFDWLFGETLCRVVNAIISMNLYSSICFLMLVSIDRYLALVKTMSMGRMRGVRWAKLYSLVIWGCTLLLSSPMLVFRTMKEYSDEGHNVTACVISYPSLIWEVFTNMLLNVVGFLLPLSVITFCTMQIMQVLRNNEMQKFKEIQTERRATVLVLVVLLLFIICWLPFQISTFLDTLHRLGILSSCQDERIIDVITQIASFMAYSNSCLNPLVYVIVGKRFRKKSWEVYQGVCQKGGCRSEPIQMENSMGTLRTSISVERQIHKLQDWAGSRQ

SEQ ID NO: 39086 - protein, 364 aa, Homo sapiens; identical to SEQ ID NO: 39085

SEQ ID NO: 39087 - protein, 391 aa, Homo sapiens; identical to SEQ ID NO: 39084

SEQ ID NO: 39088 - protein, 227 aa, Homo sapiens
MGGKLSKKKKGYNVNDEKAKEKDKKAEGAATEEEGTPKESEPQAAAEPAEAKEGKEKPDQDAEGKAEEKEGEKDAAAAKEEAPKAEPEKTEGAAEAKAEPPKAPEQEQAAPGPAAGGEAPKAAEAAAAPAESAAPAAGEEPSKEEGEPKKTEAPAAPAAQETKSDGAPASDSKPGSSEAAPSSKETPAATEAPSSTPKAQGPAASAEEPKPVEAPAANSDQTVTVKE

SEQ ID NO: 39089 - protein, 173 aa, Homo sapiens
MGGKLSKKKKGYNVNDEKAKEKDKKAEGAATEEEGTPKESEPQAAAEPAEAKEGKEKPDQDAEGKAEEKEGEKDAAAAKEEAPKAEPDKEEGEPKKTEAPAAPAAQETKSDGAPASDSKPGSSEAAPSSKETPAATEAPSSTPKAQGPAASAEEPKPVEAPAANSDQTVTVKE

SEQ ID NO: 39090 - protein, 180 aa, Homo sapiens
MGCGGSRADAIEPRYYESWTRETESTWLTYTDSDAPPSAAAPDSGPEAGGLHSVLEAEKSKIKAPTDSVSDEGLFSASKMAPLAVFSHGMLEDGLPSNGVPRSTAPGGIPNPEKKTNCETQCPNPQSLSSGPLTQKQNGLQTTEAKRDAKRMPAKEVTINVTDSIQQMDRSRRITKNCVN

SEQ ID NO: 39091 - protein, 145 aa, Homo sapiens
MGCGGSRADAIEPRYYESWTRETESTWLTYTDSDAPPSAAAPDSGPEAGGLHSGMLEDGLPSNGVPRSTAPGGIPNPEKKTNCETQCPNPQSLSSGPLTQKQNGLQTTEAKRDAKRMPAKEVTINVTDSIQQMDRSRRITKNCVN

SEQ ID NO: 39092 - protein, 54 aa, Homo sapiens
MGCGGSRADAIEPRYYESWTRETESTWLTYTDSDAPPSAAAPDSGPEAGGLHSG

SEQ ID NO: 39093 - protein, 128 aa, Homo sapiens
MESKEERALNNLIVENVNQENDEKDEKEQVANKGEPLALPLNVSEYCVPRGNRRRFRVRQPILQYRWDIMHRLGEPQARMREENMERIGEEVRQLMEKLREKQLSHSLRAVSTDPPHHDHHDEFCLMP

SEQ ID NO: 39094 - protein, 128 aa, Homo sapiens; identical to SEQ ID NO: 39093

SEQ ID NO: 39095 - protein, 101 aa, Homo sapiens
MESKEERALNNLIVENVNQENDEKDEKEQVANKGEPLALPLNVSEYCVPRGNRRRFRVRQPILQYRWDIMHRLGEPQARMREENMERIGEEVRQLMEKLRE

SEQ ID NO: 39096 - protein, 160 aa, Homo sapiens
MQKMVVCGAKCCGDAPHVENREEETARIGPGVMESKEERALNNLIVENVNQENDEKDEKEQVANKGEPLALPLNVSEYCVPRGNRRRFRVRQPILQYRWDIMHRLGEPQARMREENMERIGEEVRQLMEKLREKQLSHSLRAVSTDPPHHDHHDEFCLMP

SEQ ID NO: 39097 - protein, 125 aa, Homo sapiens
MESKEKRAVNSLSMENANQENEEKEQVANKGEPLALPLDAGEYCVPRGNRRRFRVRQPILQYRWDMMHRLGEPQARMREENMERIGEEVRQLMEKLREKQLSHSLRAVSTDPPHHDHHDEFCLMP

SEQ ID NO: 39098 - protein, 120 aa, Homo sapiens
MESKEELAANNLNGENAQQENEGGEQAPTQNEEESRHLGGGEGQKPGGNIRRGRVRRLVPNFRWAIPNRHIEHNEARDDVERFVGQMMEIKRKTREQQMRHYMRFQTPEPDNHYDFCLIP

SEQ ID NO: 39099 - protein, 120 aa, Homo sapiens; identical to SEQ ID NO: 39098

SEQ ID NO: 39100 - protein, 111 aa, Homo sapiens
MENVPKENKVVEKAPVQNEAPALGGGEYQEPGGNVKGVWAPPAPGFGEDVPNRLVDNIDMIDGDGDDMERFMEEMRELRRKIRELQLRYSLRILIGDPPHHDHHDEFCLMP

SEQ ID NO: 39101 - protein, 111 aa, Homo sapiens; identical to SEQ ID NO: 39100

SEQ ID NO: 39102 - protein, 125 aa, Homo sapiens
MDHKPLLQERPPAYNLEAGQGDYACGPHGYGAIPAAPPPPPYPYLVTGIPTHHPRVYNIHSRTVTRYPANSIVVVGGCPVCRVGVLEDCFTFLGIFLAIILFPFGFICCFALRKRRCPNCGATFA

SEQ ID NO: 39103 - protein, 98 aa, Homo sapiens
MDHKPLLQERPPAYNLEAGQGDYACGPHGYGAIPAAPPPPPYPYLVTGIPTHHPRVYNIHSRTVTRYPANSIVVVGGCPVCRHQRSSWLYTYPLRVCT

SEQ ID NO: 39104 - protein, 511 aa, Homo sapiens
MSRGPEEVNRLTESTYRNVMEQFNPGLRNLINLGKNYEKAVNAMILAGKAYYDGVAKIGEIATGSPVSTELGHVLIEISSTHKKLNESLDENFKKFHKEIIHELEKKIELDVKYMNATLKRYQTEHKNKLESLEKSQAELKKIRRKSQGSRNALKYEHKEIEYVETVTSRQSEIQKFIADGCKEALLEEKRRFCFLVDKHCGFANHIHYYHLQSAELLNSKLPRWQETCVDAIKVPEKIMNMIEEIKTPASTPVSGTPQASPMIERSNVVRKDYDTLSKCSPKMPPAPSGRAYTSPLIDMFNNPATAAPNSQRVNNSTGTSEDPSLQRSVSVATGLNMMKKQKVKTIFPHTAGSNKTLLSFAQGDVITLLIPEEKDGWLYGEHDVSKARGWFPSSYTKLLEENETEAVTVPTPSPTPVRSISTVNLSENSSVVIPPPDYLECLSMGAAADRRADSARTTSTFKAPASKPETAAPNDANGTAKPPFLSGENPFATVKLRPTVTNDRSAPIIR

SEQ ID NO: 39105 - protein, 1551 aa, Homo sapiens
MENTGWMGKGHRMTPACPLLLSVILSLRLATAFDPAPSACSALASGVLYGAFSLQDLFPTIASGCSWTLENPDPTKYSLYLRFNRQEQVCAHFAPRLLPLDHYLVNFTCLRPSPEEAVAQAESEVGRPEEEEAEAAAGLELCSGSGPFTFLHFDKNFVQLCLSAEPSEAPRLLAPAALAFRFVEVLLINNNNSSQFTCGVLCRWSEECGRAAGRACGFAQPGCSCPGEAGAGSTTTTSPGPPAAHTLSNALVPGGPAPPAEADLHSGSSNDLFTTEMRYGEEPEEEPKVKTQWPRSADEPGLYMAQTGDPAAEEWSPWSVCSLTCGQGLQVRTRSCVSSPYGTLCSGPLRETRPCNNSATCPVHGVWEEWGSWSLCSRSCGRGSRSRMRTCVPPQHGGKACEGPELQTKLCSMAACPVEGQWLEWGPWGPCSTSCANGTQQRSRKCSVAGPAWATCTGALTDTRECSNLECPATDSKWGPWNAWSLCSKTCDTGWQRRFRMCQATGTQGYPCEGTGEEVKPCSEKRCPAFHEMCRDEYVMLMTWKKAAAGEIIYNKCPPNASGSASRRCLLSAQGVAYWGLPSFARCISHEYRYLYLSLREHLAKGQRMLAGEGMSQVVRSLQELLARRTYYSGDLLFSVDILRNVTDTFKRATYVPSADDVQRFFQVVSFMVDAENKEKWDDAQQVSPGSVHLLRVVEDFIHLVGDALKAFQSSLIVTDNLVISIQREPVSAVSSDITFPMRGRRGMKDWVRHSEDRLFLPKEVLSLSSPGKPATSGAAGSPGRGRGPGTVPPGPGHSHQRLLPADPDESSYFVIGAVLYRTLGLILPPPRPPLAVTSRVMTVTVRPPTQPPAEPLITVELSYIINGTTDPHCASWDYSRADASSGDWDTENCQTLETQAAHTRCQCQHLSTFAVLAQPPKDLTLELAGSPSVPLVIGCAVSCMALLTLLAIYAAFWRFIKSERSIILLNFCLSILASNILILVGQSRVLSKGVCTMTAAFLHFFFLSSFCWVLTEAWQSYLAVIGRMRTRLVRKRFLCLGWGLPALVVAVSVGFTRTKGYGTSSYCWLSLEGGLLYAFVGPAAVIVLVNMLIGIIVFNKLMARDGISDKSKKQRAGASLWSSCVVLPLLALTWMSAVLAMTDRRSVLFQALFAVFNSAQGFVITAVHCFLRREVQDVVKCQMGVCRADESEDSPDSCKNGQLQILSDFEKDVDLACQTVLFKEVNTCNPSTITGTLSRLSLDEDEEPKSCLVGPEGSLSFSPLPGNILVPMAASPGLGEPPPPQEANPVYMCGEGGLRQLDLTWLRPTEPGSEGDYMVLPRRTLSLQPGGGGGGGEDAPRARPEGTPRRAAKTVAHTEGYPSFLSVDHSGLGLGPAYGSLQNPYGMTFQPPPPTPSARQVPEPGERSRTMPRTVPGSTMKMGSLERKKLRYSDLDFEVMHTRKRHSELYHELNQKFHTFDRYRSQSTAKREKRWSVSSGGAAERSVCTDKPSPGERPSLSQHRRHQSWSTFKSMTLGSLPPKPRERLTLHRAAAWEPTEPPDGDFQTEV

SEQ ID NO: 39106 - protein, 1584 aa, Homo sapiens
MENTGWMGKGHRMTPACPLLLSVILSLRLATAFDPAPSACSALASGVLYGAFSLQDLFPTIASGCSWTLENPDPTKYSLYLRFNRQEQVCAHFAPRLLPLDHYLVNFTCLRPSPEEAVAQAESEVGRPEEEEAEAAAGLELCSGSGPFTFLHFDKNFVQLCLSAEPSEAPRLLAPAALAFRFVEVLLINNNNSSQFTCGVLCRWSEECGRAAGRACGFAQPGCSCPGEAGAGSTTTTSPGPPAAHTLSNALVPGGPAPPAEADLHSGSSNDLFTTEMRYGEEPEEEPKVKTQWPRSADEPGLYMAQTGDPAAEEWSPWSVCSLTCGQGLQVRTRSCVSSPYGTLCSGPLRETRPCNNSATCPVHGVWEEWGSWSLCSRSCGRGSRSRMRTCVPPQHGGKACEGPELQTKLCSMAACPVEGQWLEWGPWGPCSTSCANGTQQRSRKCSVAGPAWATCTGALTDTRECSNLECPATDSKWGPWNAWSLCSKTCDTGWQRRFRMCQATGTQGYPCEGTGEEVKPCSEKRCPAFHEMCRDEYVMLMTWKKAAAGEIIYNKCPPNASGSASRRCLLSAQGVAYWGLPSFARCISHEYRYLYLSLREHLAKGQRMLAGEGMSQVVRSLQELLARRTYYSGDLLFSVDILRNVTDTFKRATYVPSADDVQRFFQVVSFMVDAENKEKWDDAQQVSPGSVHLLRVVEDFIHLVGDALKAFQSSLIVTDNLVISIQREPVSAVSSDITFPMRGRRGMKDWVRHSEDRLFLPKEVLSLSSPGKPATSGAAGSPGRGRGPGTVPPGPGHSHQRLLPADPDESSYFVIGAVLYRTLGLILPPPRPPLAVTSRVMTVTVRPPTQPPAEPLITVELSYIINGTTDPHCASWDYSRADASSGDWDTENCQTLETQAAHTRCQCQHLSTFAVLAQPPKDLTLELAGSPSVPLVIGCAVSCMALLTLLAIYAAFWRFIKSERSIILLNFCLSILASNILILVGQSRVLSKGVCTMTAAFLHFFFLSSFCWVLTEAWQSYLAVIGRMRTRLVRKRFLCLGWGLPALVVAVSVGFTRTKGYGTSSYCWLSLEGGLLYAFVGPAAVIVLVNMLIGIIVFNKLMARDGISDKSKKQRAGSERCPWASLLLPCSACGAVPSPLLSSASARNAMASLWSSCVVLPLLALTWMSAVLAMTDRRSVLFQALFAVFNSAQGFVITAVHCFLRREVQDVVKCQMGVCRADESEDSPDSCKNGQLQILSDFEKDVDLACQTVLFKEVNTCNPSTITGTLSRLSLDEDEEPKSCLVGPEGSLSFSPLPGNILVPMAASPGLGEPPPPQEANPVYMCGEGGLRQLDLTWLRPTEPGSEGDYMVLPRRTLSLQPGGGGGGGEDAPRARPEGTPRRAAKTVAHTEGYPSFLSVDHSGLGLGPAYGSLQNPYGMTFQPPPPTPSARQVPEPGERSRTMPRTVPGSTMKMGSLERKKLRYSDLDFEVMHTRKRHSELYHELNQKFHTFDRYRSQSTAKREKRWSVSSGGAAERSVCTDKPSPGERPSLSQHRRHQSWSTFKSMTLGSLPPKPRERLTLHRAAAWEPTEPPDGDFQTEV

SEQ ID NO: 39107 - protein, 1585 aa, Homo sapiens
MENTGWMGKGHRMTPACPLLLSVILSLRLATAFDPAPSACSALASGVLYGAFSLQDLFPTIASGCSWTLENPDPTKYSLYLRFNRQEQVCAHFAPRLLPLDHYLVNFTCLRPSPEEAVAQAESEVGRPEEEEAEAAAGLELCSGSGPFTFLHFDKNFVQLCLSAEPSEAPRLLAPAALAFRFVEVLLINNNNSSQFTCGVLCRWSEECGRAAGRACGFAQPGCSCPGEAGAGSTTTTSPGPPAAHTLSNALVPGGPAPPAEADLHSGSSNDLFTTEMRYGEEPEEEPKVKTQWPRSADEPGLYMAQTGDPAAEEWSPWSVCSLTCGQGLQVRTRSCVSSPYGTLCSGPLRETRPCNNSATCPVHGVWEEWGSWSLCSRSCGRGSRSRMRTCVPPQHGGKACEGPELQTKLCSMAACPVEGQWLEWGPWGPCSTSCANGTQQRSRKCSVAGPAWATCTGALTDTRECSNLECPATDSKWGPWNAWSLCSKTCDTGWQRRFRMCQATGTQGYPCEGTGEEVKPCSEKRCPAFHEMCRDEYVMLMTWKKAAAGEIIYNKCPPNASGSASRRCLLSAQGVAYWGLPSFARCISHEYRYLYLSLREHLAKGQRMLAGEGMSQVVRSLQELLARRTYYSGDLLFSVDILRNVTDTFKRATYVPSADDVQRFFQVVSFMVDAENKEKWDDAQQVSPGSVHLLRVVEDFIHLVGDALKAFQSSLIVTDNLVISIQREPVSAVSSDITFPMRGRRGMKDWVRHSEDRLFLPKEVLSLSSPGKPATSGAAGSPGRGRGPGTVPPGPGHSHQRLLPADPDESSYFVIGAVLYRTLGLILPPPRPPLAVTSRVMTVTVRPPTQPPAEPLITVELSYIINGTTDPHCASWDYSRADASSGDWDTENCQTLETQAAHTRCQCQHLSTFAVLAQPPKDLTLELAGSPSVPLVIGCAVSCMALLTLLAIYAAFWRFIKSERSIILLNFCLSILASNILILVGQSRVLSKGVCTMTAAFLHFFFLSSFCWVLTEAWQSYLAVIGRMRTRLVRKRFLCLGWGLPALVVAVSVGFTRTKGYGTSSYCWLSLEGGLLYAFVGPAAVIVLVNMLIGIIVFNKLMARDGISDKSKKQRAGSERCPWASLLLPCSACGAVPSPLLSSASARNAMASLWSSCVVLPLLALTWMSAVLAMTDRRSVLFQALFAVFNSAQGFVITAVHCFLRREVQDVVKCQMGVCRADESEDSPDSCKNGQLQILSDFEKDVDLACQTVLFKEVNTCNPSTITGTLSRLSLDEDEEPKSCLVGPEGSLSFSPLPGNILVPMAASPGLGEPPPPQEANPVYMCGEGGLRQLDLTWLRPTEPGSEGDYMVLPRRTLSLQPGGGGGGGEDAPRARPEGTPRRAAKTVAHTEGYPSFLSVDHSGLGLGPAYGSLQNPYGMTFQPPPPTPSARQVPEPGERSRTMPRTVPGSTMKMGSLERKKLRYSDLDFEKVMHTRKRHSELYHELNQKFHTFDRYRSQSTAKREKRWSVSSGGAAERSVCTDKPSPGERPSLSQHRRHQSWSTFKSMTLGSLPPKPRERLTLHRAAAWEPTEPPDGDFQTEV

SEQ ID NO: 39108 - protein, 1554 aa, Homo sapiens
MTPACPLLLSVILSLRLATAFDPAPSACSALASGVLYGAFSLQDLFPTIASGCSWTLENPDPTKYSLYLRFNRQEQVCAHFAPRLLPLDHYLVNFTCLRPSPEEAVAQAESEVGRPEEEEAEAAAGLELCSGSGPFTFLHFDKNFVQLCLSAEPSEAPRLLAPAALAFRFVEVLLINNNNSSQFTCGVLCRWSEECGRAAGRACGFAQPGCSCPGEAGAGSTTTTSPGPPAAHTLSNALVPGGPAPPAEADLHSGSSNDLFTTEMRYGEEPEEEPKVKTQWPRSADEPGLYMAQTGDPAAEEWSPWSVCSLTCGQGLQVRTRSCVSSPYGTLCSGPLRETRPCNNSATCPVHGVWEEWGSWSLCSRSCGRGSRSRMRTCVPPQHGGKACEGPELQTKLCSMAACPVEGQWLEWGPWGPCSTSCANGTQQRSRKCSVAGPAWATCTGALTDTRECSNLECPATDSKWGPWNAWSLCSKTCDTGWQRRFRMCQATGTQGYPCEGTGEEVKPCSEKRCPAFHEMCRDEYVMLMTWKKAAAGEIIYNKCPPNASGSASRRCLLSAQGVAYWGLPSFARCISHEYRYLYLSLREHLAKGQRMLAGEGMSQVVRSLQELLARRTYYSGDLLFSVDILRNVTDTFKRATYVPSADDVQRFFQVVSFMVDAENKEKWDDAQQVSPGSVHLLRVVEDFIHLVGDALKAFQSSLIVTDNLVISIQREPVSAVSSDITFPMRGRRGMKDWVRHSEDRLFLPKEVLSLSSPGKPATSGAAGSPGRGRGPGTVPPGPGHSHQRLLPADPDESSYFVIGAVLYRTLGLILPPPRPPLAVTSRVMTVTVRPPTQPPAEPLITVELSYIINGTTDPHCASWDYSRADASSGDWDTENCQTLETQAAHTRCQCQHLSTFAVLAQPPKDLTLELAGSPSVPLVIGCAVSCMALLTLLAIYAAFWRFIKSERSIILLNFCLSILASNILILVGQSRVLSKGVCTMTAAFLHFFFLSSFCWVLTEAWQSYLAVIGRMRTRLVRKRFLCLGWGLPALVVAVSVGFTRTKGYGTSSYCWLSLEGGLLYAFVGPAAVIVLVNMLIGIIVFNKLMARDGISDKSKKQRAGSERCPWASLLLPCSACGAVPSPLLSSASARNAMASLWSSCVVLPLLALTWMSAVLAMTDRRSVLFQALFAVFNSAQGFVITAVHCFLRREVQDVVKCQMGVCRADESEDSPDSCKNGQLQILSDFEKDVDLACQTVLFKEVNTCNPSTITGTLSRLSLDEDEEPKSCLVGPEGSLSFSPLPGNILVPMAASPGLGEPPPPQEANPVYMCGEGGLRQLDLTWLRPTEPGSEGDYMVLPRRTLSLQPGGGGGGGEDAPRARPEGTPRRAAKTVAHTEGYPSFLSVDHSGLGLGPAYGSLQNPYGMTFQPPPPTPSARQVPEPGERSRTMPRTVPGSTMKMGSLERKKLRYSDLDFEKVMHTRKRHSELYHELNQKFHTFDRYRSQSTAKDKPSPGERPSLSQHRRHQSWSTFKSMTLGSLPPKPRERLTLHRAAAWEPTEPPDGDFQTEV

SEQ ID NO: 39109 - protein, 1466 aa, Homo sapiens
MTPACPLLLSVILSLRLATAFDPAPSACSALASGVLYGAFSLQDLFPTIASGCSWTLENPDPTKYSLYLRFNRQEQVCAHFAPRLLPLDHYLVNFTCLRPSPEEAVAQAESEVGRPEEEEAEAAAGLELCSGSGPFTFLHFDKNFVQLCLSAEPSEAPRLLAPAALAFRFVEVLLINNNNSSQFTCGVLCRWSEECGRAAGRACGFAQPGCSCPGEAGAGSTTTTSPGPPAAHTLSNALVPGGPAPPAEADLHSGSSNDLFTTEMRYGEEPEEEPKVKTQWPRSADEPGLYMAQTGDPAAEEWSPWSVCSLTCGQGLQVRTRSCVSSPYGTLCSGPLRETRPCNNSATCPVEGQWLEWGPWGPCSTSCANGTQQRSRKCSVAGPAWATCTGALTDTRECSNLECPATDSKWGPWNAWSLCSKTCDTGWQRRFRMCQATGTQGYPCEGTGEEVKPCSEKRCPAFHEMCRDEYVMLMTWKKAAAGEIIYNKCPPNASGSASRRCLLSAQGVAYWGLPSFARCISHEYRYLYLSLREHLAKGQRMLAGEGMSQVVRSLQELLARRTYYSGDLLFSVDILRNVTDTFKRATYVPSADDVQRFFQVVSFMVDAENKEKWDDAQQVSPGSVHLLRVVEDFIHLVGDALKAFQSSLIVTDNLVISIQREPVSAVSSDITFPMRGRRGMKDWVRHSEDRLFLPKEVLSLSSPGKPATSGAAGSPGRGRGPGTVPPGPGHSHQRLLPADPDESSYFVIGAVLYRTLGLILPPPRPPLAVTSRVMTVTVRPPTQPPAEPLITVELSYIINGTTDPHCASWDYSRADASSGDWDTENCQTLETQAAHTRCQCQHLSTFAVLAQPPKDLTLELAGSPSVPLVIGCAVSCMALLTLLAIYAAFWRFIKSERSIILLNFCLSILASNILILVGQSRVLSKGVCTMTAAFLHFFFLSSFCWVLTEAWQSYLAVIGRMRTRLVRKRFLCLGWGLPALVVAVSVGFTRTKGYGTSSYCWLSLEGGLLYAFVGPAAVIVLVNMLIGIIVFNKLMARDGISDKSKKQRAGASLWSSCVVLPLLALTWMSAVLAMTDRRSVLFQALFAVFNSAQGFVITAVHCFLRREVQDVVKCQMGVCRADESEDSPDSCKNGQLQILSDFEKDVDLACQTVLFKEVNTCNPSTITGTLSRLSLDEDEEPKSCLVGPEGSLSFSPLPGNILVPMAASPGLGEPPPPQEANPVYMCGEGGLRQLDLTWLRPTEPGSEGDYMVLPRRTLSLQPGGGGGGGEDAPRARPEGTPRRAAKTVAHTEGYPSFLSVDHSGLGLGPAYGSLQNPYGMTFQPPPPTPSARQVPEPGERSRTMPRTVPGSTMKMGSLERKKLRYSDLDFEKVMHTRKRHSELYHELNQKFHTFDRYRSQSTAKDKPSPGERPSLSQHRRHQSWSTFKSMTLGSLPPKPRERLTLHRAAAWEPTEPPDGDFQTEV

SEQ ID NO: 39110 - protein, 1499 aa, Homo sapiens
MTPACPLLLSVILSLRLATAFDPAPSACSALASGVLYGAFSLQDLFPTIASGCSWTLENPDPTKYSLYLRFNRQEQVCAHFAPRLLPLDHYLVNFTCLRPSPEEAVAQAESEVGRPEEEEAEAAAGLELCSGSGPFTFLHFDKNFVQLCLSAEPSEAPRLLAPAALAFRFVEVLLINNNNSSQFTCGVLCRWSEECGRAAGRACGFAQPGCSCPGEAGAGSTTTTSPGPPAAHTLSNALVPGGPAPPAEADLHSGSSNDLFTTEMRYGEEPEEEPKVKTQWPRSADEPGLYMAQTVHGVWEEWGSWSLCSRSCGRGSRSRMRTCVPPQHGGKACEGPELQTKLCSMAACPVEGQWLEWGPWGPCSTSCANGTQQRSRKCSVAGPAWATCTGALTDTRECSNLECPATDSKWGPWNAWSLCSKTCDTGWQRRFRMCQATGTQGYPCEGTGEEVKPCSEKRCPAFHEMCRDEYVMLMTWKKAAAGEIIYNKCPPNASGSASRRCLLSAQGVAYWGLPSFARCISHEYRYLYLSLREHLAKGQRMLAGEGMSQVVRSLQELLARRTYYSGDLLFSVDILRNVTDTFKRATYVPSADDVQRFFQVVSFMVDAENKEKWDDAQQVSPGSVHLLRVVEDFIHLVGDALKAFQSSLIVTDNLVISIQREPVSAVSSDITFPMRGRRGMKDWVRHSEDRLFLPKEVLSLSSPGKPATSGAAGSPGRGRGPGTVPPGPGHSHQRLLPADPDESSYFVIGAVLYRTLGLILPPPRPPLAVTSRVMTVTVRPPTQPPAEPLITVELSYIINGTTDPHCASWDYSRADASSGDWDTENCQTLETQAAHTRCQCQHLSTFAVLAQPPKDLTLELAGSPSVPLVIGCAVSCMALLTLLAIYAAFWRFIKSERSIILLNFCLSILASNILILVGQSRVLSKGVCTMTAAFLHFFFLSSFCWVLTEAWQSYLAVIGRMRTRLVRKRFLCLGWGLPALVVAVSVGFTRTKGYGTSSYCWLSLEGGLLYAFVGPAAVIVLVNMLIGIIVFNKLMARDGISDKSKKQRAGSERCPWASLLLPCSACGAVPSPLLSSASARNAMASLWSSCVVLPLLALTWMSAVLAMTDRRSVLFQALFAVFNSAQGFVITAVHCFLRREVQDVVKCQMGVCRADESEDSPDSCKNGQLQILSDFEKDVDLACQTVLFKEVNTCNPSTITGTLSRLSLDEDEEPKSCLVGPEGSLSFSPLPGNILVPMAASPGLGEPPPPQEANPVYMCGEGGLRQLDLTWLRPTEPGSEGDYMVLPRRTLSLQPGGGGGGGEDAPRARPEGTPRRAAKTVAHTEGYPSFLSVDHSGLGLGPAYGSLQNPYGMTFQPPPPTPSARQVPEPGERSRTMPRTVPGSTMKMGSLERKKLRYSDLDFEKVMHTRKRHSELYHELNQKFHTFDRYRSQSTAKDKPSPGERPSLSQHRRHQSWSTFKSMTLGSLPPKPRERLTLHRAAAWEPTEPPDGDFQTEV

SEQ ID NO: 39111 - protein, 1500 aa, Homo sapiens
MLSLRGPDTHGKGHRMTPACPLLLSVILSLRLATAFDPAPSACSALASGVLYGAFSLQDLFPTIASGCSWTLENPDPTKYSLYLRFNRQEQVCAHFAPRLLPLDHYLVNFTCLRPSPEEAVAQAESEVGRPEEEEAEAAAGLELCSGSGPFTFLHFDKNFVQLCLSAEPSEAPRLLAPAALAFRFVEVLLINNNNSSQFTCGVLCRWSEECGRAAGRACGFAQPGCSCPGEAGAGSTTTTSPGPPAAHTLSNALVPGGPAPPAEADLHSGSSNDLFTTEMRYGEEPEEEPKVKTQWPRSADEPGLYMAQTVHGVWEEWGSWSLCSRSCGRGSRSRMRTCVPPQHGGKACEGPELQTKLCSMAACPVEGQWLEWGPWGPCSTSCANGTQQRSRKCSVAGPAWATCTGALTDTRECSNLECPATDSKWGPWNAWSLCSKTCDTGWQRRFRMCQATGTQGYPCEGTGEEVKPCSEKRCPAFHEMCRDEYVMLMTWKKAAAGEIIYNKCPPNASGSASRRCLLSAQGVAYWGLPSFARCISHEYRYLYLSLREHLAKGQRMLAGEGMSQVVRSLQELLARRTYYSGDLLFSVDILRNVTDTFKRATYVPSADDVQRFFQVVSFMVDAENKEKWDDAQQVSPGSVHLLRVVEDFIHLVGDALKAFQSSLIVTDNLVISIQREPVSAVSSDITFPMRGRRGMKDWVRHSEDRLFLPKEVLSLSSPGKPATSGAAGSPGRGRGPGTVPPGPGHSHQRLLPADPDESSYFVIGAVLYRTLGLILPPPRPPLAVTSRVMTVTVRPPTQPPAEPLITVELSYIINGTTDPHCASWDYSRADASSGDWDTENCQTLETQAAHTRCQCQHLSTFAVLAQPPKDLTLELAGSPSVPLVIGCAVSCMALLTLLAIYAAFWRFIKSERSIILLNFCLSILASNILILVGQSRVLSKGVCTMTAAFLHFFFLSSFCWVLTEAWQSYLAVIGRMRTRLVRKRFLCLGWGLPALVVAVSVGFTRTKGYGTSSYCWLSLEGGLLYAFVGPAAVIVLVNMLIGIIVFNKLMARDGISDKSKKQRAGASLWSSCVVLPLLALTWMSAVLAMTDRRSVLFQALFAVFNSAQGFVITAVHCFLRREVQDVVKCQMGVCRADESEDSPDSCKNGQLQILSDFEKDVDLACQTVLFKEVNTCNPSTITGTLSRLSLDEDEEPKSCLVGPEGSLSFSPLPGNILVPMAASPGLGEPPPPQEANPVYMCGEGGLRQLDLTWLRPTEPGSEGDYMVLPRRTLSLQPGGGGGGGEDAPRARPEGTPRRAAKTVAHTEGYPSFLSVDHSGLGLGPAYGSLQNPYGMTFQPPPPTPSARQVPEPGERSRTMPRTVPGSTMKMGSLERKKLRYSDLDFEKVMHTRKRHSELYHELNQKFHTFDRYRSQSTAKREKRWSVSSGGAAERSVCTDKPSPGERPSLSQHRRHQSWSTFKSMTLGSLPPKPRERLTLHRAAAWEPTEPPDGDFQTEV

SEQ ID NO: 39112 - protein, 847 aa, Homo sapiens
GKGHRMTPACPLLLSVILSLRLATAFDPAPSACSALASGVLYGAFSLQDLFPTIASGCSWTLENPDPTKYSLYLRFNRQEQVCAHFAPRLLPLDHYLVNFTCLRPSPEEAVAQAESEVGRPEEEEAEAAAGLELCSGSGPFTFLHFDKNFVQLCLSAEPSEAPRLLAPAALAFRFVEVLLINNNNSSQFTCGVLCRWSEECGRAAGRACGFAQPGCSCPGEAGAGSTTTTSPGPPAAHTLSNALVPGGPAPPAEADLHSGSSNDLFTTEMRYGEEPEEEPKVKTQWPRSADEPGLYMAQTGDPAAEEWSPWSVCSLTCGQGLQVRTRSCVSSPYGTLCSGPLRETRPCNNSATCPVEGQWLEWGPWGPCSTSCANGTQQRSRKCSVAGPAWATCTGALTDTRECSNLECPATDSKWGPWNAWSLCSKTCDTGWQRRFRMCQATGTQGYPCEGTGEEVKPCSEKRCPAFHEMCRDEYVMLMTWKKAAAGEIIYNKCPPNASGSASRRCLLSAQGVAYWGLPSFARCISHEYRYLYLSLREHLAKGQRMLAGEGMSQVVRSLQELLARRTYYSGDLLFSVDILRNVTDTFKRATYVPSADDVQRFFQVVSFMVDAENKEKWDDAQQVSPGSVHLLRVVEDFIHLVGDALKAFQSSLIVTDNLVISIQREPVSAVSSDITFPMRGRRGMKDWVRHSEDRLFLPKEVLSLSSPGKPATSGAAGSPGRGRGPGTVPPGPGHSHQRLLPADPDESSYFVIGAVLYRTLGLILPPPRPPLAVTSRVMTVTVRPPTQPPAEPLITVELSYIINGTTDPHCASWDYSRADASSGDWDTENCQTLETQAAHTRCQCQ

SEQ ID NO: 39113 - skipped

SEQ ID NO: 39114 - protein, 1175 aa, Homo sapiens
MAQTVHGVWEEWGSWSLCSRSCGRGSRSRMRTCVPPQHGGKACEGPELQTKLCSMAACPVEGQWLEWGPWGPCSTSCANGTQQRSRKCSVAGPAWATCTGALTDTRECSNLECPATDSKWGPWNAWSLCSKTCDTGWQRRFRMCQATGTQGYPCEGTGEEVKPCSEKRCPAFHEMCRDEYVMLMTWKKAAAGEIIYNKCPPNASGSASRRCLLSAQGVAYWGLPSFARCISHEYRYLYLSLREHLAKGQRMLAGEGMSQVVRSLQELLARRTYYSGDLLFSVDILRNVTDTFKRATYVPSADDVQRFFQVVSFMVDAENKEKWDDAQQVSPGSVHLLRVVEDFIHLVGDALKAFQSSLIVTDNLVISIQREPVSAVSSDITFPMRGRRGMKDWVRHSEDRLFLPKEVLSLSSPGKPATSGAAGSPGRGRGPGTVPPGPGHSHQRLLPADPDESSYFVIGAVLYRTLGLILPPPRPPLAVTSRVMTVTVRPPTQPPAEPLITVELSYIINGTTDPHCASWDYSRADASSGDWDTENCQTLETQAAHTRCQCQHLSTFAVLAQPPKDLTLELAGSPSVPLVIGCAVSCMALLTLLAIYAAFWRFIKSERSIILLNFCLSILASNILILVGQSRVLSKGVCTMTAAFLHFFFLSSFCWVLTEAWQSYLAVIGRMRTRLVRKRFLCLGWGLPALVVAVSVGFTRTKGYGTSSYCWLSLEGGLLYAFVGPAAVIVLVNMLIGIIVFNKLMARDGISDKSKKQRAGASLWSSCVVLPLLALTWMSAVLAMTDRRSVLFQALFAVFNSAQGFVITAVHCFLRREVQDVVKCQMGVCRADESEDSPDSCKNGQLQILSDFEKDVDLACQTVLFKEVNTCNPSTITGTLSRLSLDEDEEPKSCLVGPEGSLSFSPLPGNILVPMAASPGLGEPPPPQEANPVYMCGEGGLRQLDLTWLRPTEPGSEGDYMVLPRRTLSLQPGGGGGGGEDAPRARPEGTPRRAAKTVAHTEGYPSFLSVDHSGLGLGPAYGSLQNPYGMTFQPPPPTPSARQVPEPGERSRTMPRTVPGSTMKMGSLERKKLRYSDLDFEKVMHTRKRHSELYHELNQKFHTFDRYRSQSTAKDKPSPGERPSLSQHRRHQSWSTFKSMTLGSLPPKPRERLTLHRAAAWEPTEPPDGDFQTEV

SEQ ID NO: 39115 - protein, 1551 aa, Homo sapiens; identical to SEQ ID NO: 39105

SEQ ID NO: 39116 - protein, 728 aa, Homo sapiens
MLLPQGKEAVEGKKCQGRQRRAGLSEVWSRKLRNESLGTWSTQGCKTVLTDASHTKCLCDRLSTFAILAQQPREIIMESSGTPSVTLIVGSGLSCLALITLAVVYAALWRYIRSERSIILINFCLSIISSNILILVGQTQTHNKSICTTTTAFLHFFFLASFCWVLTEAWQSYMAVTGKIRTRLIRKRFLCLGWGLPALVVATSVGFTRTKGYGTDHYCWLSLEGGLLYAFVGPAAAVVLVNMVIGILVFNKLVSRDGILDKKLKHRAGQMSEPHSGLTLKCAKCGVVSTTALSATTASNAMASLWSSCVVLPLLALTWMSAVLAMTDKRSILFQILFAVFDSLQGFVIVMVHCILRREVQDAFRCRLRNCQDPINADSSSSFPNGHAQIMTDFEKDVDIACRSVLHKDIGPCRAATITGTLSRISLNDDEEEKGTNPEGLSYSTLPGNVISKVIIQQPTGLHMPMSMNELSNPCLKKENSELRRTVYLCTDDNLRGADMDIVHPQERMMESDYIVMPRSSVNNQPSMKEESKMNIGMETLPHERLLHYKVNPEFNMNPPVMDQFNMNLEQHLAPQEHMQNLPFEPRTAVKNFMASELDDNAGLSRSETGSTISMSSLERRKSRYSDLDFEKVMHTRKRHMELFQELNQKFQTLDRFRDIPNTSSMENPAPNKNPWDTFKNPSEYPHYTTINVLDTEAKDALELRPAEWEKCLNLPLDVQEGDFQTEV

SEQ ID NO: 39117 - protein, 1522 aa, Homo sapiens
MKAVRNLLIYIFSTYLLVMFGFNAAQDFWCSTLVKGVIYGSYSVSEMFPKNFTNCTWTLENPDPTKYSIYLKFSKKDLSCSNFSLLAYQFDHFSHEKIKDLLRKNHSIMQLCNSKNAFVFLQYDKNFIQIRRVFPTNFPGLQKKGEEDQKSFFEFLVLNKVSPSQFGCHVLCTWLESCLKSENGRTESCGIMYTKCTCPQHLGEWGIDDQSLILLNNVVLPLNEQTEGCLTQELQTTQVCNLTREAKRPPKEEFGMMGDHTIKSQRPRSVHEKRVPQEQADAAKFMAQTGESGVEEWSQWSTCSVTCGQGSQVRTRTCVSPYGTHCSGPLRESRVCNNTALCPVHGVWEEWSPWSLCSFTCGRGQRTRTRSCTPPQYGGRPCEGPETHHKPCNIALCPVDGQWQEWSSWSQCSVTCSNGTQQRSRQCTAAAHGGSECRGPWAESRECYNPECTANGQWNQWGHWSGCSKSCDGGWERRIRTCQGAVITGQQCEGTGEEVRRCNEQRCPAPYEICPEDYLMSMVWKRTPAGDLAFNQCPLNATGTTSRRCSLSLHGVAFWEQPSFARCISNEYRHLQHSIKEHLAKGQRMLAGDGMSQVTKTLLDLTQRKNFYAGDLLMSVEILRNVTDTFKRASYIPASDGVQNFFQIVSNLLDEENKEKWEDAQQIYPGSIELMQVIEDFIHIVGMGMMDFQNSYLMTGNVVASIQKLPAASVLTDINFPMKGRKGMVDWARNSEDRVVIPKSIFTPVSSKELDESSVFVLGAVLYKNLDLILPTLRNYTVINSKIIVVTIRPEPKTTDSFLEIELAHLANGTLNPYCVLWDDSKTNESLGTWSTQGCKTVLTDASHTKCLCDRLSTFAILAQQPREIIMESSGTPSVTLIVGSGLSCLALITLAVVYAALWRYIRSERSIILINFCLSIISSNILILVGQTQTHNKSICTTTTAFLHFFFLASFCWVLTEAWQSYMAVTGKIRTRLIRKRFLCLGWGLPALVVATSVGFTRTKGYGTDHYCWLSLEGGLLYAFVGPAAAVVLVNMVIGILVFNKLVSRDGILDKKLKHRAGQMSEPHSGLTLKCAKCGVVSTTALSATTASNAMASLWSSCVVLPLLALTWMSAVLAMTDKRSILFQILFAVFDSLQGFVIVMVHCILRREVQDAFRCRLRNCQDPINADSSSSFPNGHAQIMTDFEKDVDIACRSVLHKDIGPCRAATITGTLSRISLNDDEEEKGTNPEGLSYSTLPGNVISKVIIQQPTGLHMPMSMNELSNPCLKKENSELRRTVYLCTDDNLRGADMDIVHPQERMMESDYIVMPRSSVNNQPSMKEESKMNIGMETLPHERLLHYKVNPEFNMNPPVMDQFNMNLEQHLAPQEHMQNLPFEPRTAVKNFMASELDDNAGLSRSETGSTISMSSLERRKSRYSDLDFEKVMHTRKRHMELFQELNQKFQTLDRFRDIPNTSSMENPAPNKNPWDTFKNPSEYPHYTTINVLDTEAKDALELRPAEWEKCLNLPLDVQEGDFQTEV

SEQ ID NO: 39118 - protein, 486 aa, Homo sapiens
MVIGILVFNKLVSRDGILDKKLKHRAGQMSEPHSGLTLKCAKCGVVSTTALSATTASNAMASLWSSCVVLPLLALTWMSAVLAMTDKRSILFQILFAVFDSLQGFVIVMVHCILRREVQDAFRCRLRNCQDPINADSSSSFPNGHAQIMTDFEKDVDIACRSVLHKDIGPCRAATITGTLSRISLNDDEEEKGTNPEGLSYSTLPGNVISKVIIQQPTGLHMPMSMNELSNPCLKKENSELRRTVYLCTDDNLRGADMDIVHPQERMMESDYIVMPRSSVNNQPSMKEESKMNIGMETLPHERLLHYKVNPEFNMNPPVMDQFNMNLEQHLAPQEHMQNLPFEPRTAVKNFMASELDDNAGLSRSETGSTISMSSLERRKSRYSDLDFEKVMHTRKRHMELFQELNQKFQTLDRFRDIPNTSSMENPAPNKNPWDTFKNPSEYPHYTTINVLDTEAKDALELRPAEWEKCLNLPLDVQEGDFQTEV

SEQ ID NO: 39119 - protein, 325 aa, Homo sapiens
MKAKDLIVTPATILKEKPDPNNLVFGTVFTDHMLTVEWSSEFGWEKPHIKPLQNLSLHPGSSALHYAVEVFDKEELLECIQQLVKLDQEWVPYSTSASLYIRPTFIGTEPSLGVKKPTKALLFVLLSPVGPYFSSGTFNPVSLWANPKYVRAWKGGTGDCKMGGNYGSSLFAQCEAVDNGCQQVLWLYGEDHQITEVGTMNLFLYWINEDGEEELATPPLDGIILPGVTRRCILDLAHQWGEFKVSERYLTMDDLTTALEGNRVREMFGSGTACVVCPVSDILYKGETIHIPTMENGPKLASRILSKLTDIQYGREESDWTIVLS

SEQ ID NO: 39120 - protein, 385 aa, Homo sapiens
MDCSNGCSAECTGEGGSKEVVGTFKAKDLIVTPATILKEKPDPNNLVFGTVFTDHMLTVEWSSEFGWEKPHIKPLQNLSLHPGSSALHYAVELFEGLKAFRGVDNKIRLFQPNLNMDRMYRSAVRATLPVFDKEELLECIQQLVKLDQEWVPYSTSASLYIRPTFIGTEPSLGVKKPTKALLFVLLSPVGPYFSSGTFNPVSLWANPKYVRAWKGGTGDCKMGGNYGSSLFAQCEAVDNGCQQVLWLYGEDHQITEVGTMNLFLYWINEDGEEELATPPLDGIILPGVTRRCILDLAHQWGEFKVSERYLTMDDLTTALEGNRVREMFGSGTACVVCPVSDILYKGETIHIPTMENGPKLASRILSKLTDIQYGREESDWTIVLS

SEQ ID NO: 39121 - protein, 398 aa, Homo sapiens
MASPLRSAAALARQDCSNGCSAECTGEGGSKEVVGTFKAKDLIVTPATILKEKPDPNNLVFGTVFTDHMLTVEWSSEFGWEKPHIKPLQNLSLHPGSSALHYAVELFEGLKAFRGVDNKIRLFQPNLNMDRMYRSAVRATLPVFDKEELLECIQQLVKLDQEWVPYSTSASLYIRPTFIGTEPSLGVKKPTKALLFVLLSPVGPYFSSGTFNPVSLWANPKYVRAWKGGTGDCKMGGNYGSSLFAQCEAVDNGCQQVLWLYGEDHQITEVGTMNLFLYWINEDGEEELATPPLDGIILPGVTRRCILDLAHQWGEFKVSERYLTMDDLTTALEGNRVREMFGSGTACVVCPVSDILYKGETIHIPTMENGPKLASRILSKLTDIQYGREESDWTIVLS

SEQ ID NO: 39122 - protein, 349 aa, Homo sapiens
MKDCSNGCSAECTGEGGSKEVVGTFKAKDLIVTPATILKEKPDPNNLVFGTVFTDHMLTVEWSSEFGWEKPHIKPLQNLSLHPGSSALHYAVEVFDKEELLECIQQLVKLDQEWVPYSTSASLYIRPTFIGTEPSLGVKKPTKALLFVLLSPVGPYFSSGTFNPVSLWANPKYVRAWKGGTGDCKMGGNYGSSLFAQCEAVDNGCQQVLWLYGEDHQITEVGTMNLFLYWINEDGEEELATPPLDGIILPGVTRRCILDLAHQWGEFKVSERYLTMDDLTTALEGNRVREMFGSGTACVVCPVSDILYKGETIHIPTMENGPKLASRILSKLTDIQYGREESDWTIVLS

SEQ ID NO: 39123 - protein, 386 aa, Homo sapiens
MKDCSNGCSAECTGEGGSKEVVGTFKAKDLIVTPATILKEKPDPNNLVFGTVFTDHMLTVEWSSEFGWEKPHIKPLQNLSLHPGSSALHYAVELFEGLKAFRGVDNKIRLFQPNLNMDRMYRSAVRATLPVFDKEELLECIQQLVKLDQEWVPYSTSASLYIRPTFIGTEPSLGVKKPTKALLFVLLSPVGPYFSSGTFNPVSLWANPKYVRAWKGGTGDCKMGGNYGSSLFAQCEAVDNGCQQVLWLYGEDHQITEVGTMNLFLYWINEDGEEELATPPLDGIILPGVTRRCILDLAHQWGEFKVSERYLTMDDLTTALEGNRVREMFGSGTACVVCPVSDILYKGETIHIPTMENGPKLASRILSKLTDIQYGREESDWTIVLS

SEQ ID NO: 39124 - protein, 392 aa, Homo sapiens
MAAAALGQIWARKLLSVPWLLCGPRRYASSSFKAADLQLEMTQKPHKKPGPGEPLVFGKTFTDHMLMVEWNDKGWGQPRIQPFQNLTLHPASSSLHYSLQLFEGMKAFKGKDQQVRLFRPWLNMDRMLRSAMRLCLPSFDKLELLECIRRLIEVDKDWVPDAAGTSLYVRPVLIGNEPSLGVSQPTRALLFVILCPVGAYFPGGSVTPVSLLADPAFIRAWVGGVGNYKLGGNYGPTVLVQQEALKRGCEQVLWLYGPDHQLTEVGTMNIFVYWTHEDGVLELVTPPLNGVILPGVVRQSLLDMAQTWGEFRVVERTITMKQLLRALEEGRVREVFGSGTACQVCPVHRILYKDRNLHIPTMENGPELILRFQKELKEIQYGIRAHEWMFPV

SEQ ID NO: 39125 - protein, 352 aa, Homo sapiens
MTQKPHKKPGPGEPLVFGKTFTDHMLMVEWNDKGWGQPRIQPFQNLTLHPASSSLHYSLQLFEGMKAFKGKDQQVRLFRPWLNMDRMLRSAMRLCLPSFDKLELLECIRRLIEVDKDWVPDAAGTSLYVRPVLIGNEPSLGVSQPTRALLFVILCPVGAYFPGGSVTPVSLLADPAFIRAWVGGVGNYKLGGNYGPTVLVQQEALKRGCEQVLWLYGPDHQLTEVGTMNIFVYWTHEDGVLELVTPPLNGVILPGVVRQSLLDMAQTWGEFRVVERTITMKQLLRALEEGRVREVFGSGTACQVCPVHRILYKDRNLHIPTMENGPELILRFQKELKEIQYGIRAHEWMFPV

SEQ ID NO: 39126 - protein, 300 aa, Homo sapiens
MAAAALGQLFEGMKAFKGKDQQVRLFRPWLNMDRMLRSAMRLCLPSFDKLELLECIRRLIEVDKDWVPDAAGTSLYVRPVLIGNEPSLGVSQPTRALLFVILCPVGAYFPGGSVTPVSLLADPAFIRAWVGGVGNYKLGGNYGPTVLVQQEALKRGCEQVLWLYGPDHQLTEVGTMNIFVYWTHEDGVLELVTPPLNGVILPGVVRQSLLDMAQTWGEFRVVERTITMKQLLRALEEGRVREVFGSGTACQVCPVHRILYKDRNLHIPTMENGPELILRFQKELKEIQYGIRAHEWMFPV

SEQ ID NO: 39127 - protein, 445 aa, Homo sapiens
MAVAIAAARVWRLNRGLSQAALLLLRQPGARGLARSHPPRQQQQFSSLDDKPQFPGASAEFIDKLEFIQPNVISGIPIYRVMDRQGQIINPSEDPHLPKEKVLKLYKSMTLLNTMDRILYESQRQGRISFYMTNYGEEGTHVGSAAALDNTDLVFGQYREAGVLMYRDYPLELFMAQCYGNISDLGKGRQMPVHYGCKERHFVTISSPLATQIPQAVGAAYAAKRANANRVVICYFGEGAASEGDAHAGFNFAATLECPIIFFCRNNGYAISTPTSEQYRGDGIAARGPGYGIMSIRVDGNDVFAVYNATKEARRRAVAENQPFLIEAMTYRIGHHSTSDDSSAYRSVDEVNYWDKQDHPISRLRHYLLSQGWWDEEQEKAWRKQSRRKVMEAFEQAERKPKPNPNLLFSDVYQEMPAQLRKQQESLARHLQTYGEHYPLDHFDK

SEQ ID NO: 39128 - protein, 403 aa, Homo sapiens
MAVAIAAARVWRLNRGLSQAALLLLRQPGARGLARSHPPRQQQQFSSLDDKPQFPGASAEFIDKLEFIQPNVISGIPIYRVMDRQGQIINPSEDPHLPKEKVLKLYKSMTLLNTMDRILYESQRQGRISFYMTNYGEEGTHVGSAAALDNTDLVFGQYREAGVLMYRDYPLELFMAQCYGNISDLGKGRQMPVHYGCKERHFVTISSPLATQIPQAVGAAYAAKRANANRVVICYFGEGAASEGDAHAGFNFAATLECPIIFFCRNNGYAISTPTSEQYRGDGIAARGPGYGIMSIRVDGNDVFAVYTATGGPKARASVGPSSPSTTGTCGIMMPLHAMGLWHPVSHQQELSAAPKPKGTTKPILESYLKSHLLGHSRYQLYIHQDAVRREKPQSNLNRESLI

SEQ ID NO: 39129 - protein, 392 aa, Homo sapiens
MAVVAAAAGWLLRLRAAGAEGHWRRLPGAGLARGFLHPAATVEDAAQRRQVAHFTFQPDPEPREYGQTQKMNLFQSVTSALDNSLAKDPTAVIFGEDVAFGGVFRCTVGLRDKYGKDRVFNTPLCEQGIVGFGIGIAVTGATAIAEIQFADYIFPAFDQIVNEAAKYRYRSGDLFNCGSLTIRSPWGCVGHGALYHSQSPEAFFAHCPGIKVVIPRSPFQAKGLLLSCIEDKNPCIFFEPKILYRAAAEEVPIEPYNIPLSQAEVIQEGSDVTLVAWGTQVHVIREVASMAKEKLGVSCEVIDLRTIIPWDVDTICKSVIKTGRLLISHEAPLTGGFASEISSTVQEECFLNLEAPISRVCGYDTPFPHIFEPFYIPDKWKCYDALRKMINY

SEQ ID NO: 39130 - protein, 392 aa, Homo sapiens; identical to SEQ ID NO: 39129

SEQ ID NO: 39131 - protein, 218 aa, Homo sapiens
MAVVAAAAGWLLRLRAAGAEGHWRRLPGAGLARGFLHPAATVEDAAQRRQVAHFTFQPDPEPREYGQTQKMNLFQSVTSALDNSLAKDPTAVIFGEDVAFGGVFRCTVGLRDKYGKDRVFNTPLCEQGIVGFGIGIAVTGATAIAEIQFADYIFPAFDQIVNEAAKYRYRSGDLFNCGSLTIRSPWGCVGHGALYHSQSPEAFFAHCPGIKIKVISLS

SEQ ID NO: 39132 - protein, 322 aa, Homo sapiens
MNLFQSVTSALDNSLAKDPTAVIFGEDVAFGGVFRCTVGLRDKYGKDRVFNTPLCEQGIVGFGIGIAVTGATAIAEIQFADYIFPAFDQIVNEAAKYRYRSGDLFNCGSLTIRSPWGCVGHGALYHSQSPEAFFAHCPGIKVVIPRSPFQAKGLLLSCIEDKNPCIFFEPKILYRAAAEEVPIEPYNIPLSQAEVIQEGSDVTLVAWGTQVHVIREVASMAKEKLGVSCEVIDLRTIIPWDVDTICKSVIKTGRLLISHEAPLTGGFASEISSTVQEECFLNLEAPISRVCGYDTPFPHIFEPFYIPDKWKCYDALRKMINY

SEQ ID NO: 39133 - protein, 218 aa, Homo sapiens; identical to SEQ ID NO: 39131

SEQ ID NO: 39134 - protein, 592 aa, Homo sapiens
MSVSLVVIRLELAEHSPVPAGFGFSAAAGEMSDEEIKKTTLASAVACLEGKSPGEKVAIIHQHLGRREMTDVIIETMKSNPDELKTTVEERKSSEASPTAQRSKDHSKECINAAPDSPSKQLPDQISFFSGNPSVEIVHGIMHLYKTNKMTSLKEDVRRSAMLCILTVPAAMTSHDLMKFVAPFNEVIEQMKIIRDSTPNQYMVLIKFRAQADADSFYMTCNGRQFNSIEDDVCQLVYVERAEVLKSEDGASLPVMDLTELPKCTVCLERMDESVNGILTTLCNHSFHSQCLQRWDDTTCPVCRYCQTPEPVEENKCFECGVQENLWICLICGHIGCGRYVSRHAYKHFEETQHTYAMQLTNHRVWDYAGDNYVHRLVASKTDGKIVQYECEGDTCQEEKIDALQLEYSYLLTSQLESQRIYWENKIVRIEKDTAEEINNMKTKFKETIEKCDNLEHKLNDLLKEKQSVERKCTQLNTKVAKLTNELKEEQEMNKCLRANQVLLQNKLKEEERVLKETCDQKDLQITEIQEQLRDVMFYLETQQKINHLPAETRQEIQEGQINIAMASASSPASSGGSGKLPSRKGRSKRGK

SEQ ID NO: 39135 - protein, 413 aa, Homo sapiens
MHLYKTNKMTSLKEDVRRSAMLCILTVPAAMTSHDLMKFVAPFNEVIEQMKIIRDSTPNQYMVLIKFRAQGASLPVMDLTELPKCTVCLERMDESVNGILTTLCNHSFHSQCLQRWDDTTCPVCRYCQTPEPVEENKCFECGVQENLWICLICGHIGCGRYVSRHAYKHFEETQHTYAMQLTNHRVWDYAGDNYVHRLVASKTDGKIVQYECEGDTCQEEKIDALQLEYSYLLTSQLESQRIYWENKIVRIEKDTAEEINNMKTKFKETIEKCDNLEHKLNDLLKEKQSVERKCTQLNTKVAKLTNELKEEQEMNKCLRANQVLLQNKLKEEERVLKETCDQKDLQITEIQEQLRDVMFYLETQQKINHLPAETRQEIQEGQINIAMASASSPASSGGSGKLPSRKGRSKRGK

SEQ ID NO: 39136 - protein, 711 aa, Homo sapiens
MNKGWLELESDPGLFTLLVEDFGVKGVQVEEIYDLQSKCQGPVYGFIFLFKWIEERRSRRKVSTLVDDTSVIDDDIVNNMFFAHQLIPNSCATHALLSVLLNCSSVDLGPTLSRMKDFTKGFSPESKGYAIGNAPELAKAHNSHARPEPRHLPEKQNGLSAVRTMEAFHFVSYVPITGRLFELDGLKVYPIDHGPWGEDEEWTDKARRVIMERIGLATAGIKYEARLHVLKVNRQTVLEALQQLIRVTQPELIQTHKSQESQLPEESKSASNKSPLVLEANRAPAASEGNHTDGAEEAAGSCAQAPSHSPPNKPKLVVKPPGSSLNGVHPNPTPIVQRLPAFLDNHNYAKSPMQEEEDLAAGVGRSRVPVRPPQQYSDDEDDYEDDEEDDVQNTNSALRYKGKGTGKPGALSGSADGQLSVLQPNTINVLAEKLKESQKDLSIPLSIKTSSGAGSPAVAVPTHSQPSPTPSNESTDTASEIGSAFNSPLRSPIRSANPTRPSSPVTSHISKVLFGEDDSLLRVDCIRYNRAVRDLGPVISTGLLHLAEDGVLSPLALTEGGKGSSPSIRPIQGSQGSSSPVEKEVVEATDSREKTGMVRPGEPLSGEKYSPKELLALLKCVEAEIANYEACLKEEVEKRKKFKIDDQRRTHNYDEFICTFISMLAQEGMLANLVEQNISVRRRQGVSIGRLHKQRKPDRRKRSRPYKAKRQ

SEQ ID NO: 39137 - protein, 729 aa, Homo sapiens
MNKGWLELESDPGLFTLLVEDFGVKGVQVEEIYDLQSKCQGPVYGFIFLFKWIEERRSRRKVSTLVDDTSVIDDDIVNNMFFAHQLIPNSCATHALLSVLLNCSSVDLGPTLSRMKDFTKGFSPESKGYAIGNAPELAKAHNSHARPEPRHLPEKQNGLSAVRTMEAFHFVSYVPITGRLFELDGLKVYPIDHGPWGEDEEWTDKARRVIMERIGLATAGEPYHDIRFNLMAVVPDRRIKYEARLHVLKVNRQTVLEALQQLIRVTQPELIQTHKSQESQLPEESKSASNKSPLVLEANRAPAASEGNHTDGAEEAAGSCAQAPSHSPPNKPKLVVKPPGSSLNGVHPNPTPIVQRLPAFLDNHNYAKSPMQEEEDLAAGVGRSRVPVRPPQQYSDDEDDYEDDEEDDVQNTNSALRYKGKGTGKPGALSGSADGQLSVLQPNTINVLAEKLKESQKDLSIPLSIKTSSGAGSPAVAVPTHSQPSPTPSNESTDTASEIGSAFNSPLRSPIRSANPTRPSSPVTSHISKVLFGEDDSLLRVDCIRYNRAVRDLGPVISTGLLHLAEDGVLSPLALTEGGKGSSPSIRPIQGSQGSSSPVEKEVVEATDSREKTGMVRPGEPLSGEKYSPKELLALLKCVEAEIANYEACLKEEVEKRKKFKIDDQRRTHNYDEFICTFISMLAQEGMLANLVEQNISVRRRQGVSIGRLHKQRKPDRRKRSRPYKAKRQ

SEQ ID NO: 39138 - protein, 292 aa, Homo sapiens
MAVQVVQAVQAVHLESDAFLVCLNHALSTEKEEVMGLCIGELNDDTSRSDSKFAYTGTEMRTVAEKVDAVRIVHIHSVIILRRSDKRKDRVEISPEQLSAASTEAERLAELTGRPMRVVGWYHSHPHITVWPSHVDVRTQAMYQMMDQGFVGLIFSCFIEDKNTKTGRVLYTCFQSIQAQKSSEYERIEIPIHIVPHVTIGKVCLESAVELPKILCQEEQDAYRRIHSLTHLDSVTKIHNGSVFTKNLCSQMSAVSGPLLQWLEDRLEQNQQHLQELQQEKEELMQELSSLE

SEQ ID NO: 39139 - protein, 291 aa, Homo sapiens
MAVQVVQAVQAVHLESDAFLVCLNHALSTEKEEVMGLCIGELNDDTRSDSKFAYTGTEMRTVAEKVDAVRIVHIHSVIILRRSDKRKDRVEISPEQLSAASTEAERLAELTGRPMRVVGWYHSHPHITVWPSHVDVRTQAMYQMMDQGFVGLIFSCFIEDKNTKTGRVLYTCFQSIQAQKSSEYERIEIPIHIVPHVTIGKVCLESAVELPKILCQEEQDAYRRIHSLTHLDSVTKIHNGSVFTKNLCSQMSAVSGPLLQWLEDRLEQNQQHLQELQQEKEELMQELSSLE

SEQ ID NO: 39140 - protein, 316 aa, Homo sapiens
MAVQVVQAVQAVHLESDAFLVCLNHALSTEKEEVMGLCIGELNDDTRSDSKFAYTGTEMRTVAEKVDAVRIVHIHSVIILRRSDKRKDRVEISPEQLSAASTEAERLAELTGRPMRVVGWYHSHPHITVWPSHVDVRTQAMYQMMDQGFVGLIFSCFIEDKNTKTGRVLYTCFQSIQAQKSSESLHGPRDFWSSSQHISIEGQKEEERYERIEIPIHIVPHVTIGKVCLESAVELPKILCQEEQDAYRRIHSLTHLDSVTKIHNGSVFTKNLCSQMSAVSGPLLQWLEDRLEQNQQHLQELQQEKEELMQELSSLE

SEQ ID NO: 39141 - protein, 317 aa, Homo sapiens [sequence omitted]

SEQ ID NO: 39142 - protein, 248 aa, Homo sapiens
MAVQVVQAVQAVHLESDAFLVCLNHALSTEKEEVMGLCIGEVSSPSRSDSKFAYTGTEMRTVAEKVDAVRIVHIHSVIILRRSDKRKDRVEISPEQLSAASTETHRLAELTGRPMRVVGWYHSHPHITVWPSHVDVRTQAMYQMMDQGFVGLIFSCFIEDKNTKTGRVLYTCFQSIQAQKSSDLTHLDSVTKIHNGSEVFTKNLCSQMSAVSGPLLQWLEDRLEQNQQHLQELQQEKEELMQELSSLE

SEQ ID NO: 39143 - protein, 614 aa, Homo sapiens
MGNQMSVPQRVEDQENEPEAETYQDNASALNGVPVVVSTHTVQHLEEVDLGISVKTDNVATSSPETTEISAVADANGKNLGKEAKPEAPAAKSRFFLMLSRPVPGRTGDQAADSSLGSVKLDVSSNKAPANKDPSESWTLPVAAGPGQDTDKTPGHAPAQDKVLSAARDPTLLPPETGGAGGEAPSKPKDSSFFDKFFKLDKGQEKVPGDSQQEAKRAEHQDKVDEVPGLSGQSDDVPAGKDIVDGKEKEGQELGTADCSVPGDPEGLETAKDDSQAAAIAENNNSIMSFFKTLVSPNKAETKKDPEDTASKAESVCDGQAGQKTSEIQARGTKKKHLDSPRLGLAFRKFFRHKGAEKSPTTSADLKSDKANFTSQETQGAGKNSKGCNPSGHTQSVTTPEPAKEGTKEKSGPTSLPLGKLFWKKVVCESPVEIIKSKEVESALQTVDLNEGDAAPEPTEAKLKREESKPRTSLMAFLRQMTSDSTEKTITPPEPEPTGAPQKGKEGSSKDKKSAAEMNKQKSNKQEAKEPAQCTEQATVDTNSLQNGDKLQKRPEKRQQSLGGFFKGLGPKRMLDAQVQTDPVSIGPVGKSKYTGKCVFSHVKKKWPFQEWSY

SEQ ID NO: 39144 - protein, 584 aa, Homo sapiens
MGNQMSVPQRVEDQENEPEAETYQDNASALNGVPVVVSTHTVQHLEEVDLGISVKTDNVATSSPETTEISAVADANGKNLGKEAKPEAPAAKSRFFLMLSRPVPGRTGDQAADSSLGSVKLDVSSNKAPANKDPSESWTLPVAAGPGQDTDKTPGHAPAQDKVLSAARDPTLLPPETGGAGGEAPSKPKDSSFFDKFFKLDKGQEKVPGDSQQEAKRAEHQDKVDEVPGLSGQSDDVPAGKDIVDGKEKEGQELGTADCSVPGDPEGLETAKDDSQAAAIAENNNSIMSFFKTLVSPNKAETKKDPEDTGAEKSPTTSADLKSDKANFTSQETQGAGKNSKGCNPSGHTQSVTTPEPAKEGTKEKSGPTSLPLGKLFWKKSVKEDSVPTGAEENVVCESPVEIIKSKEVESALQTVDLNEGDAAPEPTEAKLKREESKPRTSLMAFLRQMSVKGDGGITHSEEINGKDSSCQTSDSTEKTITPPEPEPTGAPQKGKEGSSKDKKSAAEMNKQKSNKQEAKEPAQCTEQATVDTNSLQNGDKLQKRPEKRQQSLGGFFKGLGPKRMLDAQVQTDPVSIGPVGKSK

SEQ ID NO: 39145 - protein, 164 aa, Homo sapiens
MLSRPVPGRTGDQAADSSLGSVKLDVSSNKAPANKDPSESWTLPVAAGPGQDTDKTPGHAPAQDKVLSAARDPTLLPPETGGAGGEAPSKPKDSSFFDKFFKLDKGQEKVPGDSQQEAKRAEHQDKVDEVPGLSGQSDDVPAGKVSVPRCIHLVLNACSGALMG

SEQ ID NO: 39146 - protein, 250 aa, Homo sapiens
MSFFKTLVSPNKAETKKDPEDTASKAESVCDGQAGQKTSEIQARGTKKKHLDSPRLGLAFRKFFRHKGAEKSPTTSADLKSDKANFTSQETQGAGKNSKGCNPSGHTQSVTTPEPAKEGTKEKSGPTSLPLGKLFWKKTSDSTEKTITPPEPEPTGAPQKGKEGSSKDKKSAAEMNKQKSNKQEAKEPAQCTEQATVDTNSLQNGDKLQKRPEKRQQSLGGFFKGLGPKRMLDAQVQTDPVSIGPVGKSK

SEQ ID NO: 39147 - protein, 384 aa, Homo sapiens
MSAPIKLQRTKTQVRAGHFRWQLDRGRTQIKPQGTPRPKTRSSLPPGIPRFSHLRQGEQEEKLPPSPRTPFFDKFFKLDKGQEKVPGDSQQEAKRAEHQDKVDEVPGLSGQSDDVPAGKDIVDGKEKEGQELGTADCSVPGDPEGLETAKDDSQAAAIAENNNSIMSFFKTLVSPNKAETKKDPEDTGAEKSPTTSADLKSDKANFTSQETQGAGKNSKGCNPSGHTQSVTTPEPAKEGTKEKSGPTSLPLGKLFWKKSVKEDSVPTGAEENTSDSTEKTITPPEPEPTGAPQKGKEGSSKDKKSAAEMNKQKSNKQEAKEPAQCTEQATVDTNSLQNGDKLQKRPEKRQQSLGGFFKGLGPKRMLDAQVQTDPVSIGPVGKSK

SEQ ID NO: 39148 - protein, 225 aa, Homo sapiens
MAGTGLVAGEVVVDALPYFDQGYEAPGVREAAAALVEEETRRYRPTKNYLSYLTAPDYSAFETDIMRNEFERLAARQPIELLSMKRYELPAPSSGQKNDITAWQECVNNSMAQLEHQAVRIENLELMSQHGCNAWKVYNENLVHMIEHAQKELQKLRKHIQDLNWQRKNMQLTAGSKLREMESNWVSLVSKNYEIERTIVQLENEIYQIKQQHGEANKENIRQDF

SEQ ID NO: 39149 - protein, 158 aa, Homo sapiens
MQRTGGGAPRPGRNHGLPGSLRQPDPVALLMLLVDADQPEPMRSGARELALFLTPEPGAEAKEVEETIEGMLLRLEEFCSLADLIRSDTSQILEENIPVLKAKLTEMRGIYAKVDRLEKSPAPVPVTYELPTLYRTEDYFPVDAGEAQHHPRTCPRPL

SEQ ID NO: 39150 - protein, 189 aa, Homo sapiens
MQRTGGGAPRPGRNHGLPGSLRQPDPVALLMLLVDADQPEPMRSGARELALFLTPEPGAEAKEVEETIEGMLLRLEEFCSLADLIRSDTSQILEENIPVLKAKLTEMRGIYAKVDRLEAFVKMVGHHVAFLEADVLQAERDHGAFPQALRRWLGSAGLPSFRNLECSGAILAHCNLRLSGSSDSPASAS

SEQ ID NO: 39151 - protein, 211 aa, Homo sapiens
MQRTGGGAPRPGRNHGLPGSLRQPDPVALLMLLVDADQPEPMRSGARELALFLTPEPGAEAKEVEETIEGMLLRLEEFCSLADLIRSDTSQILEENIPVLKAKLTEMRGIYAKVDRLEAFVKMVGHHVAFLEADVLQAERDHGAFPQALRRWLGSAGLPSFRNVECSGTIPARCNLRLPGSSDSPASASQVAGITEVTCTGARDVRAAHTV

SEQ ID NO: 39152 - protein, 203 aa, Homo sapiens
MQRTGGGAPRPGRNHGLPGSLRQPDPVALLMLLVDADQPEPMRSGARELALFLTPEPGAEAKEVEETIEGMLLRLEEFCSLADLIRSDTSQILEENIPVLKAKLTEMRGIYAKVDRLEAFVKMVGHHVAFLEADVLQAERDHGAFPQALRRWLGSAGLPSFRNKSPAPVPVTYELPTLYRTEDYFPVDAGEAQHHPRTCPRPL

SEQ ID NO: 39153 - protein, 208 aa, Homo sapiens
MTGRVCRGCGGTDIELDAARGDAVCTACGSVLEDNIIVSEVQFVESSGGGSSAVGQFVSLDGAGKTPTLGGGFHVNLGKESRAQTLQNGRRHIHHLGNQLQLNQHCLDTAFNFFKMAVSRHLTRGRKMAHVIAACLYLVCRTEGTPHMLLDLSDLLQVDSLRPASFPTWGCDLGVVTRVVTGVYPRCLHASQWPVCAACPVRKFWSVG

SEQ ID NO: 39154 - protein, 562 aa, Homo sapiens
MAVSRHLTRGRKMAHVIAACLYLVCRTEGTPHMLLDLSDLLQVNVYVLGKTFLLLARELCINAPAIDPCLYIPRFAHLLEFGEKNHEVSMTALRLLQRMKRDWMHTGRRPSGLCGAALLVAARMHDFRRTVKEVISVVKVCESTLRKRLTEFEDTPTSQLTIDEFMKIDLEEECDPPSYTAGQRKLRMKQLEQVLSKKLEEVEGEISSYQDAIEIELENSRPKAKGGLASLAKDGSTEDTASSLCGEEDTEDEELEAAASHLNKDLYRELLGGAPGSSEAAGSPEWGGRPPALGSLLDPLPTAASLGISDSIRECISSQSSDPKDASGDGELDLSGIDDLEIDRYILNESEARVKAELWMRENAEYLREQREKEARIAKEKELGIYKEHKPKKSCKRREPIQASTAREAIEKMLEQKKISSKINYSVLRGLSSAGGGSPHREDAQPEHSASARKLSRRRTPASRSGADPVTSVGKRLRPLVSTQPAKKVATGEALLPSSPTLGAEPARPQAVLVESGPVSYHADEEADEEEPDEEDGEPCVSALQMMGSNDYGCDGDEDDGY

SEQ ID NO: 39155 - protein, 135 aa, Homo sapiens
MTALRLLQRMKRDWMHTGRRPSGLCGAALLVAARMHDFRRTVKEVISVVKVCESTLRKRLTEFEDTPTSQLTIDEFMKIDLEEECDPPPIEEGGQTEAREPPQASSWEGPSTTRRRSQLWHGCPGCGRGGFTLCP

SEQ ID NO: 39156 - protein, 240 aa, Homo sapiens
MTGRVCRGCGGTDIELDAARGDAVCTACGSVLEDNIIVSEVQFVESSGGGSSAVGQFVSLDGAGKTPTLGGGFHVNLGKESRAQTLQNGRRHIHHLGNQLQLNQHCLDTAFNFFKMAVSRHLTRGRKMAHVIAACLYLVCRTEGTPHMLLDLSDLLQVDSLRPASFPTWGCDLGVVTRVVTGVYPRCPRISVAGLCCLPSQEVLVCRMRGLHDMGVTVRDLWECGSPWQEHLPMLGTVGC

SEQ ID NO: 39157 - protein, 184 aa, Homo sapiens
MTALRLLQRMKRDWMHTGRRPSGLCGAALLVAARMHDFRRTVKEVISVVKVCESTLRKRLTEFEDTPTSQLTIDEFMKIDLEEECDPPSYTAGQRKLRMKQLEQVLSKKLEEVEGEISSYQDAIEIELENSPPSRREGRRRPESLPRPLRGKAPVPLVGGLSSGMAAPDVAEGASPCVLRRGWP

SEQ ID NO: 39158 - protein, 650 aa, Homo sapiens
MTGRVCRGCGGTDIELDAARGDAVCTACGSVLEDNIIVSEVQFVESSGGGSSAVGQFVSLDGRRHIHHLGNQLQLNQHCLDTAFNFFKMAVSRHLTRGRKMAHVIAACLYLVCRTEGTPHMLLDLSDLLQVNVYVLGKTFLLLARELCINAPAIDPCLYIPRFAHLLEFGEKNHEVSMTALRLLQRMKRDWMHTGRRPSGLCGAALLVAARMHDFRRTVKEVISVVKVCESTLRKRLTEFEDTPTSQLTIDEFMKIDLEEECDPPSYTAGQRKLRMKQLEQVLSKKLEEVEGEISSYQDAIEIELENSRPKAKGGLASLAKDGSTEDTASSLCGEEDTEDEELEAAASHLNKDLYRELLGGAPGSSEAAGSPEWGGRPPALGSLLDPLPTAASLGISDSIRECISSQSSDPKDASGDGELDLSGIDDLEIDRYILNESEARVKAELWMRENAEYLREQREKEARIAKEKELGIYKEHKPKKSCKRREPIQASTAREAIEKMLEQKKISSKINYSVLRGLSSAGGGSPHREDAQPEHSASARKLSRRRTPASRSGADPVTSVGKRLRPLVSTQPAKKVATGEALLPSSPTLGAEPARPQAVLVESGPVSYHADEEADEEEPDEEDGEPCVSALQMMGSNDYGCDGDEDDGY

SEQ ID NO: 39159 - protein, 473 aa, Homo sapiens
MTALRLLQRMKRDWMHTGRRPSGLCGAALLVAARMHDFRRTVKEVISVVKVCESTLRKRLTEFEDTPTSQLTIDEFMKIDLEEECDPPSYTAGQRKLRMKQLEQVLSKKLEEVEGEISSYQDAIEIELENSRPKAKGGLASLAKDGSTEDTASSLCGEEDTEDEELEAAASHLNKDLYRELLGGAPGSSEAAGSPEWGGRPPALGSLLDPLPTAASLGISDSIRECISSQSSDPKDASGDGELDLSGIDDLEIDRYILNESEARVKAELWMRENAEYLREQREKEARIAKEKELGIYKEHKPKKSCKRREPIQASTAREAIEKMLEQKKISSKINYSVLRGLSSAGGGSPHREDAQPEHSASARKLSRRRTPASRSGADPVTSVGKRLRPLVSTQPAKKVATGEALLPSSPTLGAEPARPQAVLVESGPVSYHADEEADEEEPDEEDGEPCVSALQMMGSNDYGCDGDEDDGY

SEQ ID NO: 39160 - protein, 584 aa, Homo sapiens
MAVSRHLTRGRKMAHVIAACLYLVCRTEGTPHMLLDLSDLLQVNVYVLGKTFLLLARELCINAPAIDPCLYIPRFAHLLEFGEKNHEVSMTALRLLQRMKRDWMHTGRRPSGLCGAALLVAARMHDFRRTVKEVISVVKVCESTLRKRLTEFEDTPTSQLTIDEFMKIDLEEECDPPSYTAGQRKLRMKQLEQVLSKKLEEVEGEISSYQDAIEIELENSRPKAKGGLASLAKDGSTEDTASSLCGEEDTEDEELEAAASHLNKDLYRELLGGAPGSSEAAGSPEWGGRPPALGSLLDPLPTAASLGISDSIRECISSQSSDPKDASGDGELDLSGIDDLEIDRRDLSMPRCAKAKSQPHFPVLAQYILNESEARVKAELWMRENAEYLREQREKEARIAKEKELGIYKEHKPKKSCKRREPIQASTAREAIEKMLEQKKISSKINYSVLRGLSSAGGGSPHREDAQPEHSASARKLSRRRTPASRSGADPVTSVGKRLRPLVSTQPAKKVATGEALLPSSPTLGAEPARPQAVLVESGPVSYHADEEADEEEPDEEDGEPCVSALQMMGSNDYGCDGDEDDGY

SEQ ID NO: 39161 - protein, 439 aa, Homo sapiens
MHDFRRTVKEVISVVKVCESTLRKRLTEFEDTPTSQLTIDEFMKIDLEEECDPPSYTAGQRKLRMKQLEQVLSKKLEEVEGEISSYQDAIEIELENSRPKAKGGLASLAKDGSTEDTASSLCGEEDTEDEELEAAASHLNKDLYRELLGGAPGSSEAAGSPEWGGRPPALGSLLDPLPTAASLGISDSIRECISSQSSDPKDASGDGELDLSGIDDLEIDRYILNESEARVKAELWMRENAEYLREQREKEARIAKEKELGIYKEHKPKKSCKRREPIQASTAREAIEKMLEQKKISSKINYSVLRGLSSAGGGSPHREDAQPEHSASARKLSRRRTPASRSGADPVTSVGKRLRPLVSTQPAKKVATGEALLPSSPTLGAEPARPQAVLVESGPVSYHADEEADEEEPDEEDGEPCVSALQMMGSNDYGCDGDEDDGY

SEQ ID NO: 39162 - protein, 677 aa, Homo sapiens
MTGRVCRGCGGTDIELDAARGDAVCTACGSVLEDNIIVSEVQFVESSGGGSSAVGQFVSLDGAGKTPTLGGGFHVNLGKESRAQTLQNGRRHIHHLGNQLQLNQHCLDTAFNFFKMAVSRHLTRGRKMAHVIAACLYLVCRTEGTPHMLLDLSDLLQVNVYVLGKTFLLLARELCINAPAIDPCLYIPRFAHLLEFGEKNHEVSMTALRLLQRMKRDWMHTGRRPSGLCGAALLVAARMHDFRRTVKEVISVVKVCESTLRKRLTEFEDTPTSQLTIDEFMKIDLEEECDPPSYTAGQRKLRMKQLEQVLSKKLEEVEGEISSYQDAIEIELENSRPKAKGGLASLAKDGSTEDTASSLCGEEDTEDEELEAAASHLNKDLYRELLGGAPGSSEAAGSPEWGGRPPALGSLLDPLPTAASLGISDSIRECISSQSSDPKDASGDGELDLSGIDDLEIDRYILNESEARVKAELWMRENAEYLREQREKEARIAKEKELGIYKEHKPKKSCKRREPIQASTAREAIEKMLEQKKISSKINYSVLRGLSSAGGGSPHREDAQPEHSASARKLSRRRTPASRSGADPVTSVGKRLRPLVSTQPAKKVATGEALLPSSPTLGAEPARPQAVLVESGPVSYHADEEADEEEPDEEDGEPCVSALQMMGSNDYGCDGDEDDGY

SEQ ID NO: 39163 - protein, 203 aa, Homo sapiens
MRENAEYLREQREKEARIAKEKELGIYKEHKPKKSCKRREPIQASTAREAIEKMLEQKKISSKINYSVLRGLSSAGGGSPHREDAQPEHSASARKLSRRRTPASRSGADPVTSVGKRLRPLVSTQPAKKVATGEALLPSSPTLGAEPARPQAVLVESGPVSYHADEEADEEEPDEEDGEPCVSALQMMGSNDYGCDGDEDDGY

SEQ ID NO: 39164 - protein, 237 aa, Homo sapiens
MTALRLLQRMKRDWMHTGRRPSGLCGAALLVAARMHDFRRTVKEVISVVKVCESTLRKRLTEFEDTPTSQLTIDEFMKIDLEEECDPPSYTAGQRKLRMKQLEQVLSKKLEEVEGEISSYQDAIEIELENSRPKAKGGLASLAKDGSTEDTASSLCGEEDTEDEELEAAASHLNKDLYRELLGGAPGSSEAAGSPEWGGRPPALGSLLDPLPTAASLGISDSIRECISSQSSDPSEF

SEQ ID NO: 39165 - protein, 45 aa, Homo sapiens
MTALRLLQRMKRDWMHTGRRPSGLCGAALLVAARMHDFRRTVKEV

SEQ ID NO: 39166 - protein, 14 aa, Homo sapiens
MTALRLLQRMKRDW

SEQ ID NO: 39167 - protein, 155 aa, Homo sapiens
MTALRLLQRMKRDWMHTGRRPSGLCGAALLVAARMHDFRRTVKEVISVVKVCESTLRKRLTEFEDTPTSQLTIDEFMKIDLEEECDPPSYTAGQRKLRMKQLEQVLSKKLEEVEGEISSYQDAIEIELENSRPKAKGGLASLAKDGSTEDTASSL

SEQ ID NO: 39168 - protein, 419 aa, Homo sapiens
MPGRGRCPDCGSTELVEDSHYSQSQLVCSDCGCVVTEGVLTTTFSDEGNLREVTYSRSTGENEQVSRSQQRGLRRVRDLCRVLQLPPTFEDTAVAYYQQAYRHSGIRAARLQKKEVLVGCCVLITCRQHNWPLTMGAICTLLYADLDVFSSTYMQIVKLLGLDVPSLCLAELVKTYCSSFKLFQASPSVPAKYVEDKEKMLSRTMQLVELANETWLVTGRHPLPVITAATFLAWQSLQPADRLSCSLARFCKLANVDLPYPASSRLQELLAVLLRMAEQLAWLRVLRLDKRSVVKHIGDLLQHRQSLVRSAFRDGTAEVETREKEPPGWGQGQGEGEVGNNSLGLPQGKRPASPALLLPPCMLKSPKRICPVPPVSTVTGDENISDSEIEQYLRTPQEVRDFQRAQAARQAATSVPNPP

SEQ ID NO: 39169 - protein, 396 aa, Homo sapiens
MPGRGRCPDCVVTEGVLTTTFSDEGNLREVTYSRSTGENEQVSRSQQRGLRRVRDLCRVLQLPPTFEDTAVAYYQQAYRHSGIRAARLQKKEVLVGCCVLITCRQHNWPLTMGAICTLLYADLDVFSSTYMQIVKLLGLDVPSLCLAELVKTYCSSFKLFQASPSVPAKYVEDKEKMLSRTMQLVELANETWLVTGRHPLPVITAATFLAWQSLQPADRLSCSLARFCKLANVDLPYPASSRLQELLAVLLRMAEQLAWLRVLRLDKRSVVKHIGDLLQHRQSLVRSAFRDGTAEVETREKEPPGWGQGQGEGEVGNNSLGLPQGKRPASPALLLPPCMLKSPKRICPVPPVSTVTGDENISDSEIEQYLRTPQEVRDFQRAQAARQAATSVPNPP

SEQ ID NO: 39170 - protein, 565 aa, Homo sapiens
MAEGKAGGAAGLFAKQVQKKFSRAQEKVLQKLGKAVETKDERFEQSASNFYQQQAEGHKLYKDLKNFLSAVKVMHESSKRVSETLQEIYSSEWDGHEELKAIVWNNDLLWEDYEEKLADQAVRTMEIYVAQFSEIKERIAKRGRKLVDYDSARHHLEAVQNAKKKDEAKTAKAEEEFNKAQTVFEDLNQELLEELPILYNSRIGCYVTIFQNISNLRDVFYREMSKLNHNLYEVMSKLEKQHSNKVFVVKGLSSSSRRSLVISPPVRTATVSSPLTSPTSPSTLSLKSESESVSATEDLAPDAAQGEDNSEIKELLEEEEIEKEGSEASSSEEDEPLPACNGPAQAQPSPTTERAKSQEEVLPSSTTPSPGGALSPSGQPSSSATEVVLRTRTASEGSEQPKKRASIQRTSAPPSRPPPPRATASPRPSSGNIPSSPTASGGGSPTSPRASLGTGTASPRTSLEVSPNPEPPEKPVRTPEAKENENIHNQNPEELCTSPTLMTSQVASEPGEAKKMEDKEKDNKLISANSSEGQDQLQVSMVPENNNLTAPEPQEEVSTSENPQL

SEQ ID NO: 39171 - protein, 533 aa, Homo sapiens
MAEGKAGGAAGLFAKQVQKKFSRAQEKVLQKLGKAVETKDERFEQSASNFYQQQAEGHKLYKDLKNFLSAVKVMHESSKRVSETLQEIYSSEWDGHEELKAIVWERIAKRGRKLVDYDSARHHLEAVQNAKKKDEAKTAKAEEEFNKAQTVFEDLNQELLEELPILYNSRIGCYVTIFQNISNLRDVFYREMSKLNHNLYEVMSKLEKQHSNKVFVVKGLSSSSRRSLVISPPVRTATVSSPLTSPTSPSTLSLKSESESVSATEDLAPDAAQGEDNSEIKELLEEEEIEKEGSEASSSEEDEPLPACNGPAQAQPSPTTERAKSQEEVLPSSTTPSPGGALSPSGQPSSSATEVVLRTRTASEGSEQPKKRASIQRTSAPPSRPPPPRATASPRPSSGNIPSSPTASGGGSPTSPRASLGTGTASPRTSLEVSPNPEPPEKPVRTPEAKENENIHNQNPEELCTSPTLMTSQVASEPGEAKKMEDKEKDNKLISANSSEGQDQLQVSMVPENNNLTAPEPQEEVSTSENPQL

SEQ ID NO: 39172 - protein, 539 aa, Homo sapiens
MVLQKLGKAVETKDERFEQSASNFYQQQAEGHKLYKDLKNFLSAVKVMHESSKRVSETLQEIYSSEWDGHEELKAIVWNNDLLWEDYEEKLADQAVRTMEIYVAQFSEIKERIAKRGRKLVDYDSARHHLEAVQNAKKKDEAKTAKAEEEFNKAQTVFEDLNQELLEELPILYNSRIGCYVTIFQNISNLRDVFYREMSKLNHNLYEVMSKLEKQHSNKVFVVKGLSSSSRRSLVISPPVRTATVSSPLTSPTSPSTLSLKSESESVSATEDLAPDAAQGEDNSEIKELLEEEEIEKEGSEASSSEEDEPLPACNGPAQAQPSPTTERAKSQEEVLPSSTTPSPGGALSPSGQPSSSATEVVLRTRTASEGSEQPKKRASIQRTSAPPSRPPPPRATASPRPSSGNIPSSPTASGGGSPTSPRASLGTGTASPRTSLEVSPNPEPPEKPVRTPEAKENENIHNQNPEELCTSPTLMTSQVASEPGEAKKMEDKEKDNKLISANSSEGQDQLQVSMVPENNNLTAPEPQEEVSTSENPQL

SEQ ID NO: 39173 - protein, 253 aa, Homo sapiens
MSWIPFKIGQPKKQIVPKTVERDFEREYGKLQQLEEQTRRLQKDMKKSTDADLAMSKSAVKISLDLLSNPLCEQDQDLLNMVTALDTAMKRMDAFNQEKVNQIQKTVIEPLKKFGSVFPSLNMAVKRREQALQDYRRLQAKVEKYEEKEKTGPVLAKLHQAREELRPVREDFEAKNRQLLEEMPRFYGSRLDYFQPSFESLIRAQVVYYSEMHKIFGDLSHQLDQPGHSDEQRERENEAKLSELRALSIVADD

SEQ ID NO: 39174 - protein, 199 aa, Homo sapiens
MSKSAVKISLDLLSNPLCEQDQDLLNMVTALDTAMKRMDAFNQEKVNQIQKTVIEPLKKFGSVFPSLNMAVKRREQALQDYRRLQAKVEKYEEKEKTGPVLAKLHQAREELRPVREDFEAKNRQLLEEMPRFYGSRLDYFQPSFESLIRAQVVYYSEMHKIFGDLSHQLDQPGHSDEQRERENEAKLSELRALSIVADD

SEQ ID NO: 39175 - protein, 780 aa, Homo sapiens
MTHTRRKSLPMLSSGLTGRREPLQMEDSNMEQGVEGVEPGMPESPGHLTGRRKNYPLRKRPLVPEKPKACKVLLTRLENVAGPRSADEADELPPDLPKPPSPAPSSEDPGLAQPRKRRLASLNAEALNNLLLEREDTSSLAGTRRSRAGDPHRSRDRDRATGGWSSSKKRPRLGDLGGGSRDLSPEPAPDEGPRRDGDPAPKRLASLNAAAFLKLSQERELPLRLPRAHAEVDGRSTEPPAPKAPRPKWPKVNGKNYPKAWQGASSGEAAGPPGWQGCPDEPWPSATPCGPSVQPSHQPLSKALESPLGLRPHLPLLMGGQAALKPEPGRPGEESPAPKQELHQPSFPTPQLSPLPMPGNPADYNGLCVGPELTALGSFYLYCGQEGLQCGGYSPCPMLPEGKLSPVAAPHEEGLLLAPSSVPSGTPFQHPPWGSSRYCSSEDTGVNGYSICGVLPLSVTHAGTTCGGCPYKMPFAAEGCRSLGQLEFPLPEAGHPASPAHPLLGCPVPSVPPAAEPVPHLQTPTSEPQTVARACPQSAKPPSGSKSGLRTGSSCRHTARSKAARRPSHPKQPRVQRPRPRRRRRRRTNGWVPVGAACEKAVYVLDEPEPAIRKSYQAVERHGETIRVRDTVLLKSGPRKTSTPYVAKISALWENPESGELMMSLLWYYRPEHLQGGRSPSMHEPLQNEVFASRHQDQNSVACIEEKCYVLTFAEYCRFCAMAKRRGEGLPSRKTALVPPSADYSTPPHRTVPEDTDPELVFLCRHVYDFRHGRILKNPQ

SEQ ID NO: 39176 - protein, 779 aa, Homo sapiens
MTHTRRKSLPMLSSGLTGRREPLQMEDSNMEQGVEGVEPGMPESPGHLTGRRKNYPLRKRPLVPEKPKACKVLLTRLENVAGPRSADEADELPPDLPKPPSPAPSSEDPGLAQPRKRRLASLNAEALNNLLLEREDTSSLAGTRRSRAGDPHRSRDRDRATGGWSSSKKRPRLGDLGGGSRDLSPEPAPDEGPRRDGDPAPKRLASLNAAAFLKLSQERELPLRLPRAHAEVDGRSTEPPAPKAPRPKWPKVNGKNYPKAWQGASSGEAAGPPGWQGCPDEPWPSATPCGPSVQPSHQPLSKALESPLGLRPHLPLLMGGQAALKPEPGRPGEESPAPKQELHQPSFPTPQLSPLPMPGNPADYNGLCVGPELTALGSFYLYCGQEGLQCGGYSPCPMLPEGKLSPVAAPHEEGLLLAPSSVPSGTPFQHPPWGSSRYCSSEDTGVNGYSICGVLPLSVTHAGTTCGGCPYKMPFAAGCRSLGQLEFPLPEAGHPASPAHPLLGCPVPSVPPAAEPVPHLQTPTSEPQTVARACPQSAKPPSGSKSGLRTGSSCRHTARSKAARRPSHPKQPRVQRPRPRRRRRRRTNGWVPVGAACEKAVYVLDEPEPAIRKSYQAVERHGETIRVRDTVLLKSGPRKTSTPYVAKISALWENPESGELMMSLLWYYRPEHLQGGRSPSMHEPLQNEVFASRHQDQNSVACIEEKCYVLTFAEYCRFCAMAKRRGEGLPSRKTALVPPSADYSTPPHRTVPEDTDPELVFLCRHVYDFRHGRILKNPQ

SEQ ID NO: 39177 - protein, 1524 aa, Homo sapiens
MPLLHRKPFVRQKPPADLRPDEEVFYCKVTNEIFRHYDDFFERTILCNSLVWSCAVTGRPGLTYQEALESEKKARQNLQSFPEPLIIPVLYLTSLTHRSRLHEICDDIFAYVKDRYFVEETVEVIRNNGARLQCRILEVLPPSHQNGFANGHVNSVDGETIIISDSDDSETQSCSFQNGKKKDAIDPLLFKYKVQPTKKELHESAIVKATQISRRKHLFSRDKLKLFLKQHCEPQDGVIKIKASSLSTYKIAEQDFSYFFPDDPPTFIFSPANRRRGRPPKRIHISQEDNVANKQTLASYRSKATKERDKLLKQEEMKSLAFEKAKLKREKADALEAKKKEKEDKEKKREELKKIVEEERLKKKEEKERLKVEREKEREKLREEKRKYVEYLKQWSKPREDMECDDLKELPEPTPVKTRLPPEIFGDALMVLEFLNAFGELFDLQDEFPDGVTLEVLEEALVGNDSEGPLCELLFFFLTAIFQAIAEEEEEVAKEQLTDADTKGCSLKSLDLDSCTLSEILRLHILASGADVTSANAKYRYQKRGGFDATDDACMELRLSNPSLVKKLSSTSVYDLTPGEKMKILHALCGKLLTLVSTRDFIEDYVDILRQAKQEFRELKAEQHRKEREEAAARIRKRKEEKLKEQEQKMKEKQEKLKEDEQRNSTADISIGEEEREDFDTSIESKDTEQKELDQDMVTEDEDDPGSHKRGRRGKRGQNGFKEFTRQEQINCVTREPLTADEEEALKQEHQRKEKELLEKIQSAIACTNIFPLGRDRMYRRYWIFPSIPGLFIEEDYSGLTEDMLLPRPSSFQNNVQSQDPQVSTKTGEPLMSESTSNIDQGPRDHSVQLPKPVHKPNRWCFYSSCEQLDQLIEALNSRGHRESALKETLLQEKSRICAQLARFSEEKFHFSDKPQPDSKPTYSRGRSSNAYDPSQMCAEKQLELRLRDFLLDIEDRIYQGTLGAIKVTDRHIWRSALESGRYELLSEENKENGIIKTVNEDVEEMEIDEQTKVIVKDRLLGIKTETPSTVSTNASTPQSVSSVVHYLAMALFQIEQGIERRFLKAPLDASDSGRSYKTVLDRWRESLLSSASLSQVFLHLSTLDRSVIWSKSILNARCKICRKKGDAENMVLCDGCDRGHHTYCVRPKLKTVPEGDWFCPECRPKQRSRRLSSRQRPSLESDEDVEDSMGGEDDEVDGDEEEGQSEEEEYEVEQDEDDSQEEEEVSLPKRGRPQVRLPVKTRGKLSSSFSSRGQQQEPGRYPSRSQQSTPKTTVSSKTGRSLRKINSAPPTETKSLRIASRSTRHSHGPLQADVFVELLSPRRKRRGRKSANNTPENSPNFPNFRVIATKSSEQSRSVNIASKLSLQESESKRRCRKRQSPEPSPVTLGRRSSGRQGGVHELSAFEQLVVELVRHDDSWPFLKLVSKIQVPDYYDIIKKPIALNIIREKVNKCEYKLASEFIDDIELMFSNCFEYNPRNTSEAKAGTRLQAFFHIQAQKLGLHVTPSNVDQVSTPPAAKKSRI

SEQ ID NO: 39178 - protein, 1556 aa, Homo sapiens
MPLLHRKPFVRQKPPADLRPDEEVFYCKVTNEIFRHYDDFFERTILCNSLVWSCAVTGRPGLTYQEALESEKKARQNLQSFPEPLIIPVLYLTSLTHRSRLHEICDDIFAYVKDRYFVEETVEVIRNNGARLQCRILEVLPPSHQNGFANGHVNSVDGETIIISDSDDSETQSCSFQNGKKKDAIDPLLFKYKVQPTKKELHESAIVKATQISRRKHLFSRDKLKLFLKQHCEPQDGVIKIKASSLSTYKIAEQDFSYFFPDDPPTFIFSPANRRRGRPPKRIHISQEDNVANKQTLASYRSKATKERDKLLKQEEMKSLAFEKAKLKREKADALEAKKKEKEDKEKKREELKKIVEEERLKKKEEKERLKVEREKEREKLREEKRKYVEYLKQWSKPREDMECDDLKELPEPTPVKTRLPPEIFGDALMVLEFLNAFGELFDLQDEFPDGVTLEVLEEALVGNDSEGPLCELLFFFLTAIFQAIAEEEEEVAKEQLTDADTKDLTEALDEDADPTKSALSAVASLAAAWPQLHQGCSLKSLDLDSCTLSEILRLHILASGADVTSANAKYRYQKRGGFDATDDACMELRLSNPSLVKKLSSTSVYDLTPGEKMKILHALCGKLLTLVSTRDFIEDYVDILRQAKQEFRELKAEQHRKEREEAAARIRKRKEEKLKEQEQKMKEKQEKLKEDEQRNSTADISIGEEEREDFDTSIESKDTEQKELDQDMVTEDEDDPGSHKRGRRGKRGQNGFKEFTRQEQINCVTREPLTADEEEALKQEHQRKEKELLEKIQSAIACTNIFPLGRDRMYRRYWIFPSIPGLFIEEDYSGLTEDMLLPRPSSFQNNVQSQDPQVSTKTGEPLMSESTSNIDQGPRDHSVQLPKPVHKPNRWCFYSSCEQLDQLIEALNSRGHRESALKETLLQEKSRICAQLARFSEEKFHFSDKPQPDSKPTYSRGRSSNAYDPSQMCAEKQLELRLRDFLLDIEDRIYQGTLGAIKVTDRHIWRSALESGRYELLSEENKENGIIKTVNEDVEEMEIDEQTKVIVKDRLLGIKTETPSTVSTNASTPQSVSSVVHYLAMALFQIEQGIERRFLKAPLDASDSGRSYKTVLDRWRESLLSSASLSQVFLHLSTLDRSVIWSKSILNARCKICRKKGDAENMVLCDGCDRGHHTYCVRPKLKTVPEGDWFCPECRPKQRSRRLSSRQRPSLESDEDVEDSMGGEDDEVDGDEEEGQSEEEEYEVEQDEDDSQEEEEVSLPKRGRPQVRLPVKTRGKLSSSFSSRGQQQEPGRYPSRSQQSTPKTTVSSKTGRSLRKINSAPPTETKSLRIASRSTRHSHGPLQADVFVELLSPRRKRRGRKSANNTPENSPNFPNFRVIATKSSEQSRSVNIASKLSLQESESKRRCRKRQSPEPSPVTLGRRSSGRQGGVHELSAFEQLVVELVRHDDSWPFLKLVSKIQVPDYYDIIKKPIALNIIREKVNKCEYKLASEFIDDIELMFSNCFEYNPRNTSEAKAGTRLQAFFHIQAQKLGLHVTPSNVDQVSTPPAAKKSRI

SEQ ID NO: 39179 - protein, 1556 aa, Homo sapiens; identical to SEQ ID NO: 39178

SEQ ID NO: 39180 - protein, 1233 aa, Homo sapiens
MKSLAFEKAKLKREKADALEAKKKEKEDKEKKREELKKIVEEERLKKKEEKERLKVEREKEREKLREEKRKYVEYLKQWSKPREDMECDDLKELPEPTPVKTRLPPEIFGDALMVLEFLNAFGELFDLQDEFPDGVTLEVLEEALVGNDSEGPLCELLFFFLTAIFQAIAEEEEEVAKEQLTDADTKGCSLKSLDLDSCTLSEILRLHILASGADVTSANAKYRYQKRGGFDATDDACMELRLSNPSLVKKLSSTSVYDLTPGEKMKILHALCGKLLTLVSTRDFIEDYVDILRQAKQEFRELKAEQHRKEREEAAARIRKRKEEKLKEQEQKMKEKQEKLKEDEQRNSTADISIGEEEREDFDTSIESKDTEQKELDQDMVTEDEDDPGSHKRGRRGKRGQNGFKEFTRQEQINCVTREPLTADEEEALKQEHQRKEKELLEKIQSAIACTNIFPLGRDRMYRRYWIFPSIPGLFIEEDYSGLTEDMLLPRPSSFQNNVQSQDPQVSTKTGEPLMSESTSNIDQGPRDHSVQLPKPVHKPNRWCFYSSCEQLDQLIEALNSRGHRESALKETLLQEKSRICAQLARFSEEKFHFSDKPQPDSKPTYSRGRSSNAYDPSQMCAEKQLELRLRDFLLDIEDRIYQGTLGAIKVTDRHIWRSALESGRYELLSEENKENGIIKTVNEDVEEMEIDEQTKVIVKDRLLGIKTETPSTVSTNASTPQSVSSVVHYLAMALFQIEQGIERRFLKAPLDASDSGRSYKTVLDRWRESLLSSASLSQVFLHLSTLDRSVIWSKSILNARCKICRKKGDAENMVLCDGCDRGHHTYCVRPKLKTVPEGDWFCPECRPKQRSRRLSSRQRPSLESDEDVEDSMGGEDDEVDGDEEEGQSEEEEYEVEQDEDDSQEEEEVSLPKRGRPQVRLPVKTRGKLSSSFSSRGQQQEPGRYPSRSQQSTPKTTVSSKTGRSLRKINSAPPTETKSLRIASRSTRHSHGPLQADVFVELLSPRRKRRGRKSANNTPENSPNFPNFRVIATKSSEQSRSVNIASKLSLQESESKRRCRKRQSPEPSPVTLGRRSSGRQGGVHELSAFEQLVVELVRHDDSWPFLKLVSKIQVPDYYDIIKKPIALNIIREKVNKCEYKLASEFIDDIELMFSNCFEYNPRNTSEAKAGTRLQAFFIFRLKSLDSTSHPVMWTKLAHHRLRKSHESDFVLLKDIFEEKQIVHENGTLNHAV

SEQ ID NO: 39181 - protein, 1483 aa, Homo sapiens
MAPLLGRKPFPLVKPLPGEEPLFTIPHTQEAFRTREEYEARLERYSERIWTCKSTGSSQLTHKEAWEEEQEVAELLKEEFPAWYEKLVLEMVHHNTASLEKLVDTAWLEIMTKYAVGEECDFEVGKEKMLKVKIVKIHPLEKVDEEATEKKSDGACDSPSSDKENSSQIAQDHQKKETVVKEDEGRRESINDRARRSPRKLPTSLKKGERKWAPPKFLPHKYDVKLQNEDKIISNVPADSLIRTERPPNKEIVRYFIRHNALRAGTGENAPWVVEDELVKKYSLPSKFSDFLLDPYKYMTLNPSTKRKNTGSPDRKPSKKSKTDNSSLSSPLNPKLWCHVHLKKSLSGSPLKVKNSKNSKSPEEHLEEMMKMMSPNKLHTNFHIPKKGPPAKKPGKHSDKPLKAKGRSKGILNGQKSTGNSKSPKKGLKTPKTKMKQMTLLDMAKGTQKMTRAPRNSGGTPRTSSKPHKHLPPAALHLIAYYKENKDREDKRSALSCVISKTARLLSSEDRARLPEELRSLVQKRYELLEHKKRWASMSEEQRKEYLKKKREELKKKLKEKAKERREKEMLERLEKQKRYEDQELTGKNLPAFRLVDTPEGLPNTLFGDVAMVVEFLSCYSGLLLPDAQYPITAVSLMEALSADKGGFLYLNRVLVILLQTLLQDEIAEDYGELGMKLSEIPLTLHSVSELVRLCLRRSDVQEESEGSDTDDNKDSAAFEDNEVQDEFLEKLETSEFFELTSEEKLQILTALCHRILMTYSVQDHMETRQQMSAELWKERLAVLKEENDKKRAEKQKRKEMEAKNKENGKVENGLGKTDRKKEIVKFEPQVDTEAEDMISAVKSRRLLAIQAKKEREIQEREMKVKLERQAEEERIRKHKAAAEKAFQEGIAKAKLVMRRTPIGTDRNHNRYWLFSDEVPGLFIEKGWVHDSIDYRFNHHCKDHTVSGDEDYCPRSKKANLGKNASMNTQHGTATEVAVETTTPKQGQNLWFLCDSQKELDELLNCLHPQGIRESQLKERLEKRYQDIIHSIHLARKPNLGLKSCDGNQELLNFLRSDLIEVATRLQKGGLGYVEETSEFEARVISLEKLKDFGECVIALQASVIKKFLQGFMAPKQKRRKLQSEDSAKTEEVDEEKKMVEEAKVASALEKWKTAIREAQTFSRMHVLLGMLDACIKWDMSAENARCKVCRKKGEDDKLILCDECNKAFHLFCLRPALYEVPDGEWQCPACQPATARRNSRGRNYTEESASEDSEDDESDEEEEEEEEEEEEEDYEVAGLRLRPRKTIRGKHSVIPPAARSGRRPGKKPHSTRRSQPKAPPVDDAEVDELVLQTKRSSRRQSLELQKCEEILHKIVKYRFSWPFREPVTRDEAEDYYDVITHPMDFQTVQNKCSCGSYRSVQEFLTDMKQVFTNAEVYNCRGSHVLSCMVKTEQCLVALLHKHLPGHPYVRRKRKKFPDRLAEDEGDSEPEAVGQSRGRRQKK

SEQ ID NO: 39182 - protein, 1483 aa, Homo sapiens; identical to SEQ ID NO: 39181

SEQ ID NO: 39183 - protein, 1873 aa, Homo sapiens
MEANDHFNFTGLPPAPAASGLKPSPSSGEGLYTNGSPMNFPQQGKSLNGDVNVNGLSTVSHTTTSGILNSAPHSSSTSHLHHPSVAYDCLWNYSQYPSANPGSNLKDPPLLSQFSGGQYPLNGILGGSRQPSSPSHNTNLRAGSQEFWANGTQSPMGLNFDSQELYDSFPDQNFEEVGSGIHPDEAAEKEMTSVVAENGTGLVGSLELEEEQPELKMCGYNGSVPSVESLHQEVSVLVPDPTVSCLDDPSHLPDQLEDTPILSEDSLEPFNSLAPEPVSGGLYGIDDTELMGAEDKLPLEDSPVISALDCPSLNNATAFSLLADDSQTSTSIFASPTSPPVLGESVLQDNSFDLNNGSDAEQEEMETQSSDFPPSLTQPAPDQSSTIQLHPATSPAVSPTTSPAVSLVVSPAASPEISPEVCPAASTVVSPAVFSVVSPASSAVLPAVSLEVPLTASVTSPKASPVTSPAAAFPTASPANKDVSSFLETTADVEEITGEGLTASGSGDVMRRRIATPEEVRLPLQHGWRREVRIKKGSHRWQGETWYYGPCGKRMKQFPEVIKYLSRNVVHSVRREHFSFSPRMPVGDFFEERDTPEGLQWVQLSAEEIPSRIQAITGKRGRPRNTEKAKTKEVPKVKRGRGRPPKVKITELLNKTDNRPLKKLEAQETLNEEDKAKIAKSKKKMRQKVQRGECQTTIQGQARNKRKQETKSLKQKEAKKKSKAEKEKGKTKQEKLKEKVKREKKEKVKMKEKEEVTKAKPACKADKTLATQRRLEERQRQQMILEEMKKPTEDMCLTDHQPLPDFSRVPGLTLPSGAFSDCLTIVEFLHSFGKVLGFDPAKDVPSLGVLQEGLLCQGDSLGEVQDLLVRLLKAALHDPGFPSYCQSLKILGEKVSEIPLTRDNVSEILRCFLMAYGVEPALCDRLRTQPFQAQPPQQKAAVLAFLVHELNGSTLIINEIDKTLESMSSYRKNKWIVEGRLRRLKTVLAKRTGRSEVEMEGPEECLGRRRSSRIMEETSGMEEEEEEESIAAVPGRRGRRDGEVDATASSIPELERQIEKLSKRQLFFRKKLLHSSQMLRAVSLGQDRYRRRYWVLPYLAGIFVEGTEGNLVPEEVIKKETDSLKVAAHASLNPALFSMKMELAGSNTTASSPARARGRPRKTKPGSMQPRHLKSPVRGQDSEQPQAQLQPEAQLHAPAQPQPQLQLQLQSHKGFLEQEGSPLSLGQSQHDLSQSAFLSWLSQTQSHSSLLSSSVLTPDSSPGKLDPAPSQPPEEPEPDEAESSPDPQALWFNISAQMPCNAAPTPPPAVSEDQPTPSPQQLASSKPMNRPSAANPCSPVQFSSTPLAGLAPKRRAGDPGEMPQSPTGLGQPKRRGRPPSKFFKQMEQRYLTQLTAQPVPPEMCSGWWWIRDPEMLDAMLKALHPRGIREKALHKHLNKHRDFLQEVCLRPSADPIFEPRQLPAFQEGIMSWSPKEKTYETDLAVLQWVEELEQRVIMSDLQIRGWTCPSPDSTREDLAYCEHLSDSQEDITWRGRGREGLAPQRKTTNPLDLAVMRLAALEQNVERRYLREPLWPTHEVVLEKALLSTPNGAPEGTTTEISYEITPRIRVWRQTLERCRSAAQVCLCLGQLERSIAWEKSVNKVTCLVCRKGDNDEFLLLCDGCDRGCHIYCHRPKMEAVPEGDWFCTVCLAQQVEGEFTQKPGFPKRGQKRKSGYSLNFSEGDGRRRRVLLRGRESPAAGPRYSEEGLSPSKRRRLSMRNHHSDLTFCEIILMEMESHDAAWPFLEPVNPRLVSGYRRIIKNPMDFSTMRERLLRGGYTSSEEFAADALLVFDNCQTFNEDDSEVGKAGHIMRRFFESRWEEFYQGKQANL

SEQ ID NO: 39184 - protein, 837 aa, Homo sapiens
VPGRRGRRDGEVDATASSIPELERQIEKLSKRQLFFRKKLLHSSQMLRAVSLGQDRYRRRYWVLPYLAGIFVEGTEGNLVPEEVIKKETDSLKVAAHASLNPALFSMKMELAGSNTTASSPARARGRPRKTKPGSMQPRHLKSPVRGQDSEQPQAQLQPEAQLHAPAQPQPQLQLQLQSHKGFLEQEGSPLSLGQSQHDLSQSAFLSWLSQTQSHSSLLSSSVLTPDSSPGKLDPAPSQPPEEPEPDEAESSPDPQALWFNISAQMPCNAAPTPPPAVSEDQPTPSPQQLASSKPMNRPSAANPCSPVQFSSTPLAGLAPKRRAGDPGEMPQSPTGLGQPKRRGRPPSKFFKQMEQRYLTQLTAQPVPPGWWWIRDPEMLDAMLKALHPRGIREKALHKHLNKHRDFLQEVCLRPSADPIFEPRQLPAFQEGIMSWSPKEKTYETDLAVLQWVEELEQRVIMSDLQIRGWTCPSPDSTREDLAYCEHLSDSQEDITWRGRGREGLAPQRKTTNPLDLAVMRLAALEQNVERRYLREPLWPTHEVVLEKALLSTPNGAPEGTTTEISYEITPRIRVWRQTLERCRSAAQVCLCLGQLERSIAWEKSVNKVTCLVCRKGDNDEFLLLCDGCDRGCHIYCHRPKMEAVPEGDWFCTVCLAQQVEGEFTQKPGFPKRGQKRKSGYSLNFSEGDGRRRRVLLRGRESPAAGPRYSEEGLSPSKRRRLSMRNHHSDLTFCEIILMEMESHDAAWPFLEPVNPRLVSGYRRIIKNPMDFSTMRERLLRGGYTSSEEFAADALLVFDNCQTFNEDDSEVGKAGHIMRRFFESRWEEFYQGKQANL

SEQ ID NO: 39185 - protein, 1905 aa, Homo sapiens
MEMEANDHFNFTGLPPAPAASGLKPSPSSGEGLYTNGSPMNFPQQGKSLNGDVNVNGLSTVSHTTTSGILNSAPHSSSTSHLHHPSVAYDCLWNYSQYPSANPGSNLKDPPLLSQFSGGQYPLNGILGGSRQPSSPSHNTNLRAGSQEFWANGTQSPMGLNFDSQELYDSFPDQNFEVMPNGPPSFFTSPQTSPMLGSSIQTFAPSQEVGSGIHPDEAAEKEMTSVVAENGTGLVGSLELEEEQPELKMCGYNGSVPSVESLHQEVSVLVPDPTVSCLDDPSHLPDQLEDTPILSEDSLEPFNSLAPEPVSGGLYGIDDTELMGAEDKLPLEDSPVISALDCPSLNNATAFSLLADDSQTSTSIFASPTSPPVLGESVLQDNSFDLNNGSDAEQEEMETQSSDFPPSLTQPAPDQSSTIQLHPATSPAVSPTTSPAVSLVVSPAASPEISPEVCPAASTVVSPAVFSVVSPASSAVLPAVSLEVPLTASVTSPKASPVTSPAAAFPTASPANKDVSSFLETTADVEEITGEGLTASGSGDVMRRRIATPEEVRLPLQHGWRREVRIKKGSHRWQGETWYYGPCGKRMKQFPEVIKYLSRNVVHSVRREHFSFSPRMPVGDFFEERDTPEGLQWVQLSAEEIPSRIQAITGKRGRPRNTEKAKTKEVPKVKRGRGRPPKVKITELLNKTDNRPLKKLEAQETLNEEDKAKIAKSKKKMRQKVQRGECQTTIQGQARNKRKQETKSLKQKEAKKKSKAEKEKGKTKQEKLKEKVKREKKEKVKMKEKEEVTKAKPACKADKTLATQRRLEERQRQQMILEEMKKPTEDMCLTDHQPLPDFSRVPGLTLPSGAFSDCLTIVEFLHSFGKVLGFDPAKDVPSLGVLQEGLLCQGDSLGEVQDLLVRLLKAALHDPGFPSYCQSLKILGEKVSEIPLTRDNVSEILRCFLMAYGVEPALCDRLRTQPFQAQPPQQKAAVLAFLVHELNGSTLIINEIDKTLESMSSYRKNKWIVEGRLRRLKTVLAKRTGRSEVEMEGPEECLGRRRSSRIMEETSGMEEEEEEESIAAVPGRRGRRDGEVDATASSIPELERQIEKLSKRQLFFRKKLLHSSQMLRAVSLGQDRYRRRYWVLPYLAGIFVEGTEGNLVPEEVIKKETDSLKVAAHASLNPALFSMKMELAGSNTTASSPARARGRPRKTKPGSMQPRHLKSPVRGQDSEQPQAQLQPEAQLHAPAQPQPQLQLQLQSHKGFLEQEGSPLSLGQSQHDLSQSAFLSWLSQTQSHSSLLSSSVLTPDSSPGKLDPAPSQPPEEPEPDEAESSPDPQALWFNISAQMPCNAAPTPPPAVSEDQPTPSPQQLASSKPMNRPSAANPCSPVQFSSTPLAGLAPKRRAGDPGEMPQSPTGLGQPKRRGRPPSKFFKQMEQRYLTQLTAQPVPPEMCSGWWWIRDPEMLDAMLKALHPRGIREKALHKHLNKHRDFLQEVCLRPSADPIFEPRQLPAFQEGIMSWSPKEKTYETDLAVLQWVEELEQRVIMSDLQIRGWTCPSPDSTREDLAYCEHLSDSQEDITWRGRGREGLAPQRKTTNPLDLAVMRLAALEQNVERRYLREPLWPTHEVVLEKALLSTPNGAPEGTTTEISYEITPRIRVWRQTLERCRSAAQVCLCLGQLERSIAWEKSVNKVTCLVCRKGDNDEFLLLCDGCDRGCHIYCHRPKMEAVPEGDWFCTVCLAQQVEGEFTQKPGFPKRGQKRKSGYSLNFSEGDGRRRRVLLRGRESPAAGPRYSEEGLSPSKRRRLSMRNHHSDLTFCEIILMEMESHDAAWPFLEPVNPRLVSGYRRIIKNPMDFSTMRERLLRGGYTSSEEFAADALLVFDNCQTFNEDDSEVGKAGHIMRRFFESRWEEFYQGKQANL

SEQ ID NO: 39186 - protein, 2068 aa, Homo sapiens
MESGERLPSSAASSTTPTSSSTPSVASVVSKGGLSTGVASLSSTINPCGHLFRTAGDQPFNLSTVSSAFPMVSHPVFGLHSASSGHSEFGGLGTLGTPTALAAHPQLASFPEWWRTTDAHTRTGATFFPPLLGIPPLFAPPAQNHDSSSFHSRTSGKSNRNGPEKGVNGSINGSNTSSVIGINTSVLSTTASSSMGQTKSTSSGGGNRKCNQEQSKNQPLDARVDKIKDKKPRKKAMESSSNSDSDSGTSSDTSSEGISSSDSDDLEEDEEEEDQSIEESEDDDSDSESEAQHKSNNQVLLHGISDPKADGQKATEKAQEKRIHQPLPLASESQTHSFQSQQKQPQVLSQQLPFIFQSSQAKEESVNKHTSVIQSTGLVSNVKPLSLVNQAKKETYMKLIVPSPDVLKAGNKNTSEESSLLTSELRSKREQYKQAFPSQLKKQESSKSLKKVIAALSNPKATSSSPAHPKQTLENNHPNPFLTNALLGNHQPNGVIQSVIQEAPLALTTKTKMQSKINENIAAASSTPFSSPVNLSTSGRRTPGNQTPVMPSASPILHSQGKEKAVSNNVNPVKTQHHSHPAKSLVEQFRGTDSDIPSSKDSEDSNEDEEEDDEEEDEEDDEDDESDDSQSGTSKRRRVTDERELRIPLEYGWQRETRIRNFGGRLQGEVAYYAPCGKKLRQYPEVIKYLSRNGIMDISRDNFSFSAKIRVGDFYEARDGPQGMQWCLLKEEDVIPRIRAMEGRRGRPPNPDRQRAREESRMRRRKGRPPNVGNAEFLDNADAKLLRKLQAQEIARQAAQIKLLRKLQKQEQARVAKEAKKQQAIMAAEEKRKQKEQIKIMKQQEKIKRIQQIRMEKELRAQQILEAKKKKKEEAANAKLLEAEKRIKEKEMRRQQAVLLKHQERERRRQHMMLMKAMEARKKAEEKERLKQEKRDEKRLNKERKLEQRRLELEMAKELKKPNEDMCLADQKPLPELPRIPGLVLSGSTFSDCLMVVQFLRNFGKVLGFDVNIDVPNLSVLQEGLLNIGDSMGEVQDLLVRLLSAAVCDPGLITGYKAKTALGEHLLNVGVNRDNVSEILQIFMEAHCGQTELTESLKTKAFQAHTPAQKASVLAFLINELACSKSVVSEIDKNIDYMSNLRRDKWVVEGKLRKLRIIHAKKTGKRDTSGGIDLGEEQHPLGTPTPGRKRRRKGGDSDYDDDDDDDSDDQGDEDDEDEEDKEDKKGKKTDICEDEDEGDQAASVEELEKQIEKLSKQQSQYRRKLFDASHSLRSVMFGQDRYRRRYWILPQCGGIFVEGMESGEGLEEIAKEREKLKKAESVQIKEEMFETSGDSLNCSNTDHCEQKEDLKEKDNTNLFLQKPGSFSKLSKLLEVAKMPPESEVMTPKPNAGANGCTLSYQNSGKHSLGSVQSTATQSNVEKADSNNLFNTGSSGPGKFYSPLPNDQLLKTLTEKNRQWFSLLPRTPCDDTSLTHADMSTASLVTPQSQPPSKSPSPTPAPLGSSAQNPVGLNPFALSPLQVKGGVSMMGLQFCGWPTGVVTSNIPFTSSVPSLGSGLGLSEGNGNSFLTSNVASSKSESPVPQNEKATSAQPAAVEVAKPVDFPSPKPIPEEMQFGWWRIIDPEDLKALLKVLHLRGIREKALQKQIQKHLDYITQACLKNKDVAIIELNENEENQVTRDIVENWSVEEQAMEMDLSVLQQVEDLERRVASASLQVKGWMCPEPASEREDLVYFEHKSFTKLCKEHDGEFTGEDESSAHALERKSDNPLDIAVTRLADLERNIERRIEEDIAPGLRVWRRALSEARSAAQVALCIQQLQKSIAWEKSIMKVYCQICRKGDNEELLLLCDGCDKGCHTYCHRPKITTIPDGDWFCPACIAKASGQTLKIKKLHVKGKKTNESKKGKKVTLTGDTEDEDSASTSSSLKRGNKDLKKRKMEENTSINLSKQESFTSVKKPKRDDSKDLALCSMILTEMETHEDAWPFLLPVNLKLVPGYKKVIKKPMDFSTIREKLSSGQYPNLETFALDVRLVFDNCETFNEDDSDIGRAGHNMRKYFEKKWTDTFKVS

SEQ ID NO: 39187 - protein, 2134 aa, Homo sapiens
MESGERLPSSAASSTTPTSSSTPSVASVVSKGGLSTGVASLSSTINPCGHLFRTAGDQPFNLSTVSSAFPMVSHPVFGLHSASSGHSEFGGLGTLGTPTALAAHPQLASFPGAEWWRTTDAHTRTGATFFPPLLGIPPLFAPPAQNHDSSSFHSRTSGKSNRNGPEKGVNGSINGSNTSSVIGINTSVLSTTASSSMGQTKSTSSGGGNRKCNQEQSKNQPLDARVDKIKDKKPRKKAMESSSNSDSDSGTSSDTSSEGISSSDSDDLEEDEEEEDQSIEESEDDDSDSESEAQHKSNNQVLLHGISDPKADGQKATEKAQEKRIHQPLPLASESQTHSFQSQQKQPQVLSQQLPFIFQSSQAKEESVNKHTSVIQSTGLVSNVKPLSLVNQAKKETYMKLIVPSPDVLKAGNKNTSEESSLLTSELRSKREQYKQAFPSQLKKQESSKSLKKVIAALSNPKATSSSPAHPKQTLENNHPNPFLTNALLGNHQPNGVIQSVIQEAPLALTTKTKMQSKINENIAAASSTPFSSPVNLSTSGRRTPGNQTPVMPSASPILHSQGKEKAVSNNVNPVKTQHHSHPAKSLVEQFRGTDSDIPSSKDSEDSNEDEEEDDEEEDEEDDEDDESDDSQSESDSNSESDTEGSEEEDDDDKDQDESDSDTEGEKTSMKLNKTTSSVKSPSMSLTGHSTPRNLHIAKAPGSAPAALCSESQSPAFLGTSSSTLTSSPHSGTSKRRRVTDERELRIPLEYGWQRETRIRNFGGRLQGEVAYYAPCGKKLRQYPEVIKGMQWCLLKEEDVIPRIRAMEGRRGRPPNPDRQRAREESRMRRRKGRPPNVGNAEFLDNADAKLLRKLQAQEIARQAAQIKLLRKLQKQEQARVAKEAKKQQAIMAAEEKRKQKEQIKIMKQQEKIKRIQQIRMEKELRAQQILEAKKKKKEEAANAKLLEAEKRIKEKEMRRQQAVLLKHQERERRRQHMMLMKAMEARKKAEEKERLKQEKRDEKRLNKERKLEQRRLELEMAKELKKPNEDMCLADQKPLPELPRIPGLVLSGSTFSDCLMVVQFLRNFGKVLGFDVNIDVPNLSVLQEGLLNIGDSMGEVQDLLVRLLSAAVCDPGLITGYKAKTALGEHLLNVGVNRDNVSEILQIFMEAHCGQTELTESLKTKAFQAHTPAQKASVLAFLINELACSKSVVSEIDKNIDYMSNLRRDKWVVEGKLRKLRIIHAKKTGKRDTSGGIDLGEEQHPLGTPTPGRKRRRKGGDSDYDDDDDDDSDDQGDEDDEDEEDKEDKKGKKTDICEDEDEGDQAASVEELEKQIEKLSKQQSQYRRKLFDASHSLRSVMFGQDRYRRRYWILPQCGGIFVEGMESGEGLEEIAKEREKLKKAESVQIKEEMFETSGDSLNCSNTDHCEQKEDLKEKDNTNLFLQKPGSFSKLSKLLEVAKMPPESEVMTPKPNAGANGCTLSYQNSGKHSLGSVQSTATQSNVEKADSNNLFNTGSSGPGKFYSPLPNDQLLKTLTEKNRQWFSLLPRTPCDDTSLTHADMSTASLVTPQSQPPSKSPSPTPAPLGSSAQNPVGLNPFALSPLQVKGGVSMMGLQFCGWPTGVVTSNIPFTSSVPSLGSGLGLSEGNGNSFLTSNVASSKSESPVPQNEKATSAQPAAVEVAKPVDFPSPKPIPEEMQFGWWRIIDPEDLKALLKVLHLRGIREKALQKQIQKHLDYITQACLKNKDVAIIELNENEENQVTRDIVENWSVEEQAMEMDLSVLQQVEDLERRVASASLQVKGWMCPEPASEREDLVYFEHKSFTKLCKEHDGEFTGEDESSAHALERKSDNPLDIAVTRLADLERNIERRIEEDIAPGLRVWRRALSEARSAAQVALCIQQLQKSIAWEKSIMKVYCQICRKGDNEELLLLCDGCDKGCHTYCHRPKITTIPDGDWFCPACIAKASGQTLKIKKLHVKGKKTNESKKGKKVTLTGDTEDEDSASTSSSLKRGNKDLKKRKMEENTSINLSKQESFTSVKKPKRDDSKDLALCSMILTEMETHEDAWPFLLPVNLKLVPGYKKVIKKPMDFSTIREKLSSGQYPNLETFALDVRLVFDNCETFNEDDSDIGRAGHNMRKYFEKKWTDTFKVS

SEQ ID NO: 39188 - protein, 2132 aa, Homo sapiens
MESGERLPSSAASSTTPTSSSTPSVASVVSKGGLSTGVASLSSTINPCGHLFRTAGDQPFNLSTVSSAFPMVSHPVFGLHSASSGHSEFGGLGTLGTPTALAAHPQLASFPEWWRTTDAHTRTGATFFPPLLGIPPLFAPPAQNHDSSSFHSRTSGKSNRNGPEKGVNGSINGSNTSSVIGINTSVLSTTASSSMGQTKSTSSGGGNRKCNQEQSKNQPLDARVDKIKDKKPRKKAMESSSNSDSDSGTSSDTSSEGISSSDSDDLEEDEEEEDQSIEESEDDDSDSESEAQHKSNNQVLLHGISDPKADGQKATEKAQEKRIHQPLPLASESQTHSFQSQQKQPQVLSQQLPFIFQSSQAKEESVNKHTSVIQSTGLVSNVKPLSLVNQAKKETYMKLIVPSPDVLKAGNKNTSEESSLLTSELRSKREQYKQAFPSQLKKQESSKSLKKVIAALSNPKATSSSPAHPKQTLENNHPNPFLTNALLGNHQPNGVIQSVIQEAPLALTTKTKMQSKINENIAAASSTPFSSPVNLSTSGRRTPGNQTPVMPSASPILHSQGKEKAVSNNVNPVKTQHHSHPAKSLVEQFRGTDSDIPSSKDSEDSNEDEEEDDEEEDEEDDEDDESDDSQSESDSNSESDTEGSEEEDDDDKDQDESDSDTEGEKTSMKLNKTTSSVKSPSMSLTGHSTPRNLHIAKAPGSAPAALCSESQSPAFLGTSSSTLTSSPHSGTSKRRRVTDERELRIPLEYGWQRETRIRNFGGRLQGEVAYYAPCGKKLRQYPEVIKGMQWCLLKEEDVIPRIRAMEGRRGRPPNPDRQRAREESRMRRRKGRPPNVGNAEFLDNADAKLLRKLQAQEIARQAAQIKLLRKLQKQEQARVAKEAKKQQAIMAAEEKRKQKEQIKIMKQQEKIKRIQQIRMEKELRAQQILEAKKKKKEEAANAKLLEAEKRIKEKEMRRQQAVLLKHQERERRRQHMMLMKAMEARKKAEEKERLKQEKRDEKRLNKERKLEQRRLELEMAKELKKPNEDMCLADQKPLPELPRIPGLVLSGSTFSDCLMVVQFLRNFGKVLGFDVNIDVPNLSVLQEGLLNIGDSMGEVQDLLVRLLSAAVCDPGLITGYKAKTALGEHLLNVGVNRDNVSEILQIFMEAHCGQTELTESLKTKAFQAHTPAQKASVLAFLINELACSKSVVSEIDKNIDYMSNLRRDKWVVEGKLRKLRIIHAKKTGKRDTSGGIDLGEEQHPLGTPTPGRKRRRKGGDSDYDDDDDDDSDDQGDEDDEDEEDKEDKKGKKTDICEDEDEGDQAASVEELEKQIEKLSKQQSQYRRKLFDASHSLRSVMFGQDRYRRRYWILPQCGGIFVEGMESGEGLEEIAKEREKLKKAESVQIKEEMFETSGDSLNCSNTDHCEQKEDLKEKDNTNLFLQKPGSFSKLSKLLEVAKMPPESEVMTPKPNAGANGCTLSYQNSGKHSLGSVQSTATQSNVEKADSNNLFNTGSSGPGKFYSPLPNDQLLKTLTEKNRQWFSLLPRTPCDDTSLTHADMSTASLVTPQSQPPSKSPSPTPAPLGSSAQNPVGLNPFALSPLQVKGGVSMMGLQFCGWPTGVVTSNIPFTSSVPSLGSGLGLSEGNGNSFLTSNVASSKSESPVPQNEKATSAQPAAVEVAKPVDFPSPKPIPEEMQFGWWRIIDPEDLKALLKVLHLRGIREKALQKQIQKHLDYITQACLKNKDVAIIELNENEENQVTRDIVENWSVEEQAMEMDLSVLQQVEDLERRVASASLQVKGWMCPEPASEREDLVYFEHKSFTKLCKEHDGEFTGEDESSAHALERKSDNPLDIAVTRLADLERNIERRIEEDIAPGLRVWRRALSEARSAAQVALCIQQLQKSIAWEKSIMKVYCQICRKGDNEELLLLCDGCDKGCHTYCHRPKITTIPDGDWFCPACIAKASGQTLKIKKLHVKGKKTNESKKGKKVTLTGDTEDEDSASTSSSLKRGNKDLKKRKMEENTSINLSKQESFTSVKKPKRDDSKDLALCSMILTEMETHEDAWPFLLPVNLKLVPGYKKVIKKPMDFSTIREKLSSGQYPNLETFALDVRLVFDNCETFNEDDSDIGRAGHNMRKYFEKKWTDTFKVS

SEQ ID NO: 39189 - protein, 2168 aa, Homo sapiens
MESGERLPSSAASSTTPTSSSTPSVASVVSKGGLSTGVASLSSTINPCGHLFRTAGDQPFNLSTVSSAFPMVSHPVFGLHSASSGHSEFGGLGTLGTPTALAAHPQLASFPGAEWWRTTDAHTRTGATFFPPLLGIPPLFAPPAQNHDSSSFHSRTSGKSNRNGPEKGVNGSINGSNTSSVIGINTSVLSTTASSSMGQTKSTSSGGGNRKCNQEQSKNQPLDARVDKIKDKKPRKKAMESSSNSDSDSGTSSDTSSEGISSSDSDDLEEDEEEEDQSIEESEDDDSDSESEAQHKSNNQVLLHGISDPKADGQKATEKAQEKRIHQPLPLASESQTHSFQSQQKQPQVLSQQLPFIFQSSQAKEESVNKHTSVIQSTGLVSNVKPLSLVNQAKKETYMKLIVPSPDVLKAGNKNTSEESSLLTSELRSKREQYKQAFPSQLKKQESSKSLKKVIAALSNPKATSSSPAHPKQTLENNHPNPFLTNALLGNHQPNGVIQSVIQEAPLALTTKTKMQSKINENIAAASSTPFSSPVNLSTSGRRTPGNQTPVMPSASPILHSQGKEKAVSNNVNPVKTQHHSHPAKSLVEQFRGTDSDIPSSKDSEDSNEDEEEDDEEEDEEDDEDDESDDSQSESDSNSESDTEGSEEEDDDDKDQDESDSDTEGEKTSMKLNKTTSSVKSPSMSLTGHSTPRNLHIAKAPGSAPAALCSESQSPAFLGTSSSTLTSSPHSGTSKRRRVTDERELRIPLEYGWQRETRIRNFGGRLQGEVAYYAPCGKKLRQYPEVIKYLSRNGIMDISRDNFSFSAKIRVGDFYEARDGPQGMQWCLLKEEDVIPRIRAMEGRRGRPPNPDRQRAREESRMRRRKGRPPNVGNAEFLDNADAKLLRKLQAQEIARQAAQIKLLRKLQKQEQARVAKEAKKQQAIMAAEEKRKQKEQIKIMKQQEKIKRIQQIRMEKELRAQQILEAKKKKKEEAANAKLLEAEKRIKEKEMRRQQAVLLKHQERERRRQHMMLMKAMEARKKAEEKERLKQEKRDEKRLNKERKLEQRRLELEMAKELKKPNEDMCLADQKPLPELPRIPGLVLSGSTFSDCLMVVQFLRNFGKVLGFDVNIDVPNLSVLQEGLLNIGDSMGEVQDLLVRLLSAAVCDPGLITGYKAKTALGEHLLNVGVNRDNVSEILQIFMEAHCGQTELTESLKTKAFQAHTPAQKASVLAFLINELACSKSVVSEIDKNIDYMSNLRRDKWVVEGKLRKLRIIHAKKTGKRDTSGGIDLGEEQHPLGTPTPGRKRRRKGGDSDYDDDDDDDSDDQGDEDDEDEEDKEDKKGKKTDICEDEDEGDQAASVEELEKQIEKLSKQQSQYRRKLFDASHSLRSVMFGQDRYRRRYWILPQCGGIFVEGMESGEGLEEIAKEREKLKKAESVQIKEEMFETSGDSLNCSNTDHCEQKEDLKEKDNTNLFLQKPGSFSKLSKLLEVAKMPPESEVMTPKPNAGANGCTLSYQNSGKHSLGSVQSTATQSNVEKADSNNLFNTGSSGPGKFYSPLPNDQLLKTLTEKNRQWFSLLPRTPCDDTSLTHADMSTASLVTPQSQPPSKSPSPTPAPLGSSAQNPVGLNPFALSPLQVKGGVSMMGLQFCGWPTGVVTSNIPFTSSVPSLGSGLGLSEGNGNSFLTSNVASSKSESPVPQNEKATSAQPAAVEVAKPVDFPSPKPIPEEMQFGWWRIIDPEDLKALLKVLHLRGIREKALQKQIQKHLDYITQACLKNKDVAIIELNENEENQVTRDIVENWSVEEQAMEMDLSVLQQVEDLERRVASASLQVKGWMCPEPASEREDLVYFEHKSFTKLCKEHDGEFTGEDESSAHALERKSDNPLDIAVTRLADLERNIERRIEEDIAPGLRVWRRALSEARSAAQVALCIQQLQKSIAWEKSIMKVYCQICRKGDNEELLLLCDGCDKGCHTYCHRPKITTIPDGDWFCPACIAKASGQTLKIKKLHVKGKKTNESKKGKKVTLTGDTEDEDSASTSSSLKRGNKDLKKRKMEENTSINLSKQESFTSVKKPKRDDSKDLALCSMILTEMETHEDAWPFLLPVNLKLVPGYKKVIKKPMDFSTIREKLSSGQYPNLETFALDVRLVFDNCETFNEDDSDIGRAGHNMRKYFEKKWTDTFKVS

SEQ ID NO: 39190 - protein, 143 aa, Homo sapiens
MESGERLPSSAASSTTPTSSSTPSVASVVSKGGLSTGVASLSSTINPCGHLFRTAGDQPFNLSTVSSAFPMVSHPVFGLHSASSGHSEFGGLGTLGTPTALAAHPQLASFPGAEWWRTTDAHTRTGATFFPPLLGIPPLFAPP

SEQ ID NO: 39191 - protein, 520 aa, Homo sapiens
MESGERLPSSAASSTTPTSSSTPSVASVVSKGGLSTGVASLSSTINPCGAEWWRTTDAHTRTGATFFPPLLGIPPLFAPPAQNHDSSSFHSRTSGKSNRNGPEKGVNGSINGSNTSSVIGINTSVLSTTASSSMGQTKSTSSGGGNRKCNQEQSKNQPLDARVDKIKDKKPRKKAMESSSNSDSDSGTSSDTSSEGISSSDSDDLEEDEEEEDQSIEESEDDDSDSESEAQHKSNNQVLLHGISDPKADGQKATEKAQEKRIHQPLPLASESQTHSFQSQQKQPQVLSQQLPFIFQSSQAKEESVNKHTSVIQSTGLVSNVKPLSLVNQAKKETYMKLIVPSPDVLKAGNKNTSEESSLLTSELRSKREQYKQAFPSQLKKQESSKSLKKVIAALSNPKATSSSPAHPKQTLENNHPNPFLTNALLGNHQPNGVIQSVIQEAPLALTTKTKMQSKINENIAAASSTPFSSPVNLSTSGRRTPGNQTPVMPSASPILHSQGKEKAVSNNVNPRKMMKKKMR

SEQ ID NO: 39192 - protein, 1214 aa, Homo sapiens
MGVDFDVKTFCHNLRATKPPYECPVETCRKVYKSYSGIEYHLYHYDHDNPPPPQQTPLRKHKKKGRQSRPANKQSPSPSEVSQSPGREVMSYAQAQRMVEVDLHGRVHRISIFDNLDVVSEDEEAPEEAPENGSNKENTETPAATPKSGKHKNKEKRKDSNHHHHHNVSASTTPKLPEVVYRELEQDTPDAPPRPTSYYRYIEKSAEELDEEVEYDMDEEDYIWLDIMNERRKTEGVSPIPQEIFEYLMDRLEKESYFESHNKGDPNALVDEDAVCCICNDGECQNSNVILFCDMCNLAVHQECYGVPYIPEGQWLCRRCLQSPSRAVDCALCPNKGGAFKQTDDGRWAHVVCALWIPEVCFANTVFLEPIDSIEHIPPARWKLTCYICKQRGSGACIQCHKANCYTAFHVTCAQQAGLYMKMEPVRETGANGTSFSVRKTAYCDIHTPPGSARRLPALSHSEGEEDEDEEEDEGKGWSSEKVKKAKAKSRIKMKKARKILAEKRAAAPVVSVPCIPPHRLSKITNRLTIQRKSQFMQRLHSYWTLKRQSRNGVPLLRRLQTHLQSQRNCDQVGRDSEDKNWALKEQLKSWQRLRHDLERARLLVELIRKREKLKRETIKVQQIAMEMQLTPFLILLRKTLEQLQEKDTGNIFSEPVPLSEVPDYLDHIKKPMDFFTMKQNLEAYRYLNFDDFEEDFNLIVSNCLKYNAKDTIFYRAAVRLREQGGAVLRQARRQAEKMGIDFETGMHIPHSLAGDEATHHTEDAAEEERLVLLENQKHLPVEEQLKLLLERLDEVNASKQSVGRSRRAKMIKKEMTALRRKLAHQRETGRDGPERHGPSSRGSLTPHPAACDKDGQTDSAAEESSSQETSKGLGPNMSSTPAHEVGRRTSVLFSKKNPKTAGPPKRPGRPPKNRESQMTPSHGGSPVGPPQLPIMSSLRQRKRGRSPRPSSSSDSDSDKSTEDPPMDLPANGFSGGNQPVKKSFLVYRNDCSLPRSSSDSESSSSSSSSAASDRTSTTPSKQGRGKPSFSRGTFPEDSSEDTSGTENEAYSVGTGRGVGHSMVRKSLGRGAGWLSEDEDSPLDALDLVWAKCRGYPSYPALIIDPKMPREGMFHHGVPIPVPPLEVLKLGEQMTQEAREHLYLVLFFDNKRTWQWLPRTKLVPLGVNQDLDKEKMLEGRKSNIRKSVQIAYHRALQHRSKVQGEQSSETSDSD

SEQ ID NO: 39193 - protein, 1220 aa, Homo sapiens
MGVDFDVKTFCHNLRATKPPYECPVETCRKVYKSYSGIEYHLYHYDHDNPPPPQQTPLRKHKKKGRQSRPANKQSPSPSEVSQSPGREVMSYAQAQRMVEVDLHGRVHRISIFDNLDVVSEDEEAPEEAPENGSNKENTETPAATPKSGKHKNKEKRKDSNHHHHHNVSASTTPKLPEVVYRELEQDTPDAPPRPTSYYRYIEKSAEELDEEVEYDMDEEDYIWLDIMNERRKTEGVSPIPQEIFEYLMDRLEKESYFESHNKGDPNALVDEDAVCCICNDGECQNSNVILFCDMCNLAVHQECYGVPYIPEGQWLCRRCLQSPSRAVDCALCPNKGGAFKQTDDGRWAHVVCALWIPEVCFANTVFLEPIDSIEHIPPARWKLTCYICKQRGSGACIQCHKANCYTAFHVTCAQQAGLYMKMEPVRETGANGTSFSVRKTAYCDIHTPPGSARRLPALSHSEGEEDEDEEEDEGKGWSSEKVKKAKAKSRIKMKKARKILAEKRAAAPVVSVPCIPPHRLSKITNRLTIQRKSQFMQRLHSYWTLKRQSRNGVPLLRRLQTHLQSQRNCDQVGRDSEDKNWALKEQLKSWQRLRHDLERARLLVELIRKREKLKRETIKVQQIAMEMQLTPFLILLRKTLEQLQEKDTGNIFSEPVPLSEVTELDEVPDYLDHIKKPMDFFTMKQNLEAYRYLNFDDFEEDFNLIVSNCLKYNAKDTIFYRAAVRLREQGGAVLRQARRQAEKMGIDFETGMHIPHSLAGDEATHHTEDAAEEERLVLLENQKHLPVEEQLKLLLERLDEVNASKQSVGRSRRAKMIKKEMTALRRKLAHQRETGRDGPERHGPSSRGSLTPHPAACDKDGQTDSAAEESSSQETSKGLGPNMSSTPAHEVGRRTSVLFSKKNPKTAGPPKRPGRPPKNRESQMTPSHGGSPVGPPQLPIMSSLRQRKRGRSPRPSSSSDSDSDKSTEDPPMDLPANGFSGGNQPVKKSFLVYRNDCSLPRSSSDSESSSSSSSSAASDRTSTTPSKQGRGKPSFSRGTFPEDSSEDTSGTENEAYSVGTGRGVGHSMVRKSLGRGAGWLSEDEDSPLDALDLVWAKCRGYPSYPALIIDPKMPREGMFHHGVPIPVPPLEVLKLGEQMTQEAREHLYLVLFFDNKRTWQWLPRTKLVPLGVNQDLDKEKMLEGRKSNIRKSVQIAYHRALQHRSKVQGEQSSETSDSD

SEQ ID NO: 39194 - protein, 100 aa, Homo sapiens
MGVDFDVKTFCHNLRATKPPYECPVETCRKVYKSYSGIEYHLYHYDHDNPPPPQQTPLRKHKKKGRQSRPANKQSPSPSEVSQSPGREVMSYAQAQRMVE

SEQ ID NO: 39195 - protein, 105 aa, Homo sapiens
MGVDFDVKTFCHNLRATKPPYECPVETCRKVYKSYSGIEYHLYHYDHDNPPPPQQTPLRKHKKKGRQSRPANKQSPSPSEVSQSPGREVMSYAQAQRMVEVDLHG

SEQ ID NO: 39196 - protein, 1214 aa, Homo sapiens; identical to SEQ ID NO: 39192

SEQ ID NO: 39197 - protein, 1802 aa, Homo sapiens
MAAAPTQIEAELYYLIARFLQSGPCNKSAQVLVQELEEHQLIPRRLDWEGKEHRRSFEDLVAANAHIPPDYLLKICERIGPLLDKEIPQSVPGVQTLLGVGRQSLLRDAKDCKSTLWNGSAFAALHRGRPPELPVNYVKPPNVVNITSARQLTGCSRFGHIFPSSAYQHIKMHKRILGHLSSVYCVAFDRSGRRIFTGSDDCLVKIWATDDGRLLATLRGHSAEISDMAVNYENTLIAAGSCDKVVRVWCLRTCAPVAVLQGHSASITSIQFCPSTKGTNRYLTSTGADGTICFWQWHVKTMKFRDRPVKFTERSRPGVQISCSSFSSGGMFITTGSTDHVIRIYYLGSEVPEKIAELESHTDKVVAVQFCNNGDSLRFVSGSRDGTARIWQYQQQEWKSIVLDMATKMTGNNLPSGEDKITKLKVTMVAWDRYDTTVITAVNNFLLKVWNSITGQLLHTLSGHDDEVFVLEAHPFDQRIILSAGHDGNIFIWDLDRGTKIRNYFNMIEGQGHGAVFDCKFSPDGNHFACTDSHGHLLLFGFGCSKYYEKIPDQMFFHTDYRPLIRDANNYVLDEQTQQAPHLMPPPFLVDVDGNPHPTKFQRLVPGRENCKDEQLIPQLGYVANGDGEVVEQVIGQQTNDQDESILDGIIRELQREQDLRLINEGDVPHLPVNRAYSVNGALRSPNMDISSSPNIRLRRHSSQIEGVRQMHNNAPRSQMATERDLMAWSRRVVVNELNNGVSRVQEECRTAKGDIEISLYTVEKKKKPSYTTQRNDYEPSCGRSLRRTQRKRQHTYQTRSNIEHNSQASCQNSGVQEDSDSSSEEDETVGTSDASVEDPVVEWQSESSSSDSSSEYSDWTADAGINLQPPKRQTRQTTRKICSSSDEENLKSLEERQKKPKQTRKKKGGLVSIAGEPNEEWFAPQWILDTIPRRSPFVPQMGDELIYFRQGHEAYVRAVRKSKIYSVNLQKQPWNKMDLREQEFVKIVGIKYEVGPPTLCCLKLAFLDPISGKMTGESFSIKYHDMPDVIDFLVLHQFYNEAKERNWQIGDRFRSIIDDAWWFGTVESQQPFQPEYPDSSFQCYSVHWDNNEREKMSPWDMEPIPEGTAFPDEVGAGVPVSQEELTALLYKPQEGEWGAHSRDEECERVIQGINHLLSLDFASPFAVPVDLSAYPLYCTVVAYPTDLNTIRRRLENRFYRRISALMWEVRYIEHNARTFNEPDSPIVKAAKIVTDVLLRFIGDQSCTDILDTYNKIKAEERNSTDAEEDTEIVDLDSDGPGTSSGRKVKCRGRRQSLKCNPDAWKKQCKELLSLIYEREDSEPFRQPADLLSYPGHQEQEGESSESVVPERQQDSSLSEDYQDVIDTPVDFSTVKETLEAGNYGSPLEFYKDVRQIFNNSKAYTSNKKSRIYSMMLRLSALFESHIKNIISEYKSAIQSQKRRRPRYRKRLRSSSSSLSSSGAPSPKGKQKQMKLQPKNDQNTSVSHARTSSPFSSPVSDAAEGLSLYLLDDEPDGPFSSSSFGGYSRSGNSHDPGKAKSFRNRVLPVKQDHSLDGPLTNGDGREPRTGIKRKLLSASEEDENMGGEDKEKKETKEKSHLSTSESGELGSSLSSESTCGSDSDSESTSRTDQDYVDGDHDYSKFIQTRPKRKLRKQHGNGKRNWKTRGTGGRGRWGRWGRWSRGGRGRGGRGRGSRGRGGGGTRGRGRGRGGRGASRGATRAKRARIADDEFDTMFSGRFSRLPRIKTRNQGRRTVLYNDDSDNDNFVSTEDPLNLGTSRSGRVRKMTEKARVSHLMGWNY

SEQ ID NO: 39198 - protein, 801 aa, Homo sapiens
MLQNVTPHNKLPGEGNAGLLGLGPEAAAPGKRIRKPSLLYEGFESPTMASVPALQLTPANPPPPEVSNPKKPGRVTNQLQYLHKVVMKALWKHQFAWPFRQPVDAVKLGLPDYHKIIKQPMDMGTIKRRLENNYYWAASECMQDFNTMFTNCYIYNKPTDDIVLMAQTLEKIFLQKVASMPQEEQELVVTIPKNSHKKGAKLAALQGSVTSAHQVPAVSSVSHTALYTPPPEIPTTVLNIPHPSVISSPLLKSLHSAGPPLLAVTAAPPAQPLAKKKGVKRKADTTTPTPTAILAPGSPASPPGSLEPKAARLPPMRRESGRPIKPPRKDLPDSQQQHQSSKKGKLSEQLKHCNGILKELLSKKHAAYAWPFYKPVDASALGLHDYHDIIKHPMDLSTVKRKMENRDYRDAQEFAADVRLMFSNCYKYNPPDHDVVAMARKLQDVFEFRYAKMPDEPLEPGPLPVSTAMPPGLAKSSSESSSEESSSESSSEEEEEEDEEDEEEEESESSDSEEERAHRLAELQEQLRAVHEQLAALSQGPISKPKRKREKKEKKKKRKAEKHRGRAGADEDDKGPRAPRPPQPKKSKKASGSGGGSAALGPSGFGPSGGSGTKLPKKATKTAPPALPTGYDSEEEEESRPMSYDEKRQLSLDINKLPGEKLGRVVHIIQAREPSLRDSNPEEIEIDFETLKPSTLRELERYVLSCLRKKPRKPYTIKKPVGKTKEELALEKKRELEKRLQDVSGQLNSTKKPPKKANEKTESSSAQQVAVSRLSASSSSSDSSSSSSSSSSSDTSDSDSG

SEQ ID NO: 39199 - protein, 801 aa, Homo sapiens; identical to SEQ ID NO: 39198

SEQ ID NO: 39200 - protein, 801 aa, Homo sapiens; identical to SEQ ID NO: 39198

SEQ ID NO: 39201 - protein, 836 aa, Homo sapiens
MLQNVTPHNKLPGEGNAGLLGLGPEAAAPGKRIRKPSLLYEGFESPTMASVPALQLTPANPPPPEVSNPKKPGRVTNQLQYLHKVVMKALWKHQFAWPFRQPVDAVKLGLPDYHKIIKQPMDMGTIKRRLENNYYWAASECMQDFNTMFTNCYIYNKPTDDIVLMAQTLEKIFLQKVASMPQEEQELVVTIPKNSHKKGAKLAALQGSVTSAHQVPAVSSVSHTALYTPPPEIPTTVLNIPHPSVISSPLLKSLHSAGPPLLAVTAAPPAQPLAKKKGVKRKADTTTPTPTAILAPGSPASPPGSLEPKAARLPPMRRESGRPIKPPRKDLPDSQQQHQSSKKGKLSEQLKHCNGILKELLSKKHAAYAWPFYKPVDASALGLHDYHDIIKHPMDLSTVKRKMENRDYRDAQEFAADVRLMFSNCYKYNPPDHDVVAMARKLQDVFEFRYAKMPDEPLEPGPLPVSTAMPPGLAKSSSESSSEESSSESSSEEEEEEDEEDEEEEESESSDSEEERAHRLAELQEQLRAVHEQLAALSQGPISKPKRKREKKEKKKKRKAEKHRGRAGADEDDKGPRAPRPPQPKKSKKASGSGGGSAALGPSGFGPSGGSGTKLQAGVQWRDLGLLQPPLLGFKRFSCLSLPSSQDYRLPKKATKTAPPALPTGYDSEEEEESRPMSYDEKRQLSLDINKLPGEKLGRVVHIIQAREPSLRDSNPEEIEIDFETLKPSTLRELERYVLSCLRKKPRKPYTIKKPVGKTKEELALEKKRELEKRLQDVSGQLNSTKKPPKKANEKTESSSAQQVAVSRLSASSSSSDSSSSSSSSSSSDTSDSDSG

SEQ ID NO: 39202 - protein, 836 aa, Homo sapiens; identical to SEQ ID NO: 39201

SEQ ID NO: 39203 - protein, 836 aa, Homo sapiens; identical to SEQ ID NO: 39201

SEQ ID NO: 39204 - protein, 801 aa, Homo sapiens; identical to SEQ ID NO: 39198

SEQ ID NO: 39205 - protein, 801 aa, Homo sapiens; identical to SEQ ID NO: 39198

SEQ ID NO: 39206 - protein, 296 aa, Homo sapiens
  VARIANT 1: note = MOD_RES - Any amino acid
XRPLGVQQPGARLPGEGNAGLLGLGPEAAAPGKRIRKPSLLYEGFESPTMASVPALQLTPANPPPPEVSNPKKPGRVTNQLQYLHKVVMKALWKHQFAWPFRQPVDAVKLGLPDYHKIIKQPMDMGTIKRRLENNYYWAASECMQDFNTMFTNCYIYNKPTDDIVLMAQTLEKIFLQKVASMPQEEQELVVTIPKNSHKKGAKLAALQGSVTSAHQVPAVSSVSHTALYTPPPEIPTTVLNIPHPSVISSPLLKSLHSAGPPLLAVTAAPPAQPLAKKKGVKRKADTTTPTPTAIL

SEQ ID NO: 39207 - protein, 801 aa, Homo sapiens [sequence omitted]

SEQ ID NO: 39208 - protein, 613 aa, Homo sapiens
MLQNVTPHNKLPGEGNAGLLGLGPEAAAPGKRIRKPSLLYEGFESPTMASVPALQLTPANPPPPEVSNPKKPGRVTNQLQYLHKVVMKALWKHQFAWPFRQPVDAVKLGLPDYHKIIKQPMDMGTIKRRLENNYYWAASECMQDFNTMFTNCYIYNKPTDDIVLMAQTLEKIFLQKVASMPQEEQELVVTIPKNSHKKGAKLAALQGSVTSAHQVPAVSSVSHTALYTPPPEIPTTVLNIPHPSVISSPLLKSLHSAGPPLLAVTAAPPAQPLAKKKGVKRKADTTTPTPTAILAPGSPASPPGSLEPKAARLPPMRRESGRPIKPPRKDLPDSQQQHQSSKKGKLSEQLKHCNGILKELLSKKHAAYAWPFYKPVDASALGLHDYHDIIKHPMDLSTVKRKMENRDYRDAQEFAADVRLMFSNCYKYNPPDHDVVAMARKLQDVFEFRYAKMPDEPLEPGPLPVSTAMPPGLAKSSSESSSEESSSESSSEEEEEEDEEDEEEEESESSDSEEERAHRLAELQEQLRAVHEQLAALSQGPISKPKRKREKKEKKKKRKAEKHRGRAGADEDDKGPRAPRPPQPKKSKKASGSGGGSAALGPSGFGPSGGSGT

SEQ ID NO: 39209 - protein, 613 aa, Homo sapiens; identical to SEQ ID NO: 39208

SEQ ID NO: 39210 - protein, 328 aa, Homo sapiens
  VARIANT 1: note = MOD_RES - Any amino acid
XAKSSSESSSEESSSESSSEEEEEEDEDEEEEESESSDSEEERAHRLAELQEQLRAVHEQLAALSQGPISKPKRKREKKEKKKKRKAEKHRGRAGADEDDKGPRAPRPPQPKKSKKASGSGGGSAALGPSGFGPSGGSGTKLPKKATKTAPPALPTGYDSEEEEESRPMSYDEKRQLSLDINKLPGEKLGRVVHIIQAREPSLRDSNPEEIEIDFETLKPSTLRELERYVLSCLRKKPRKPYTIKKPVGKTKEELALEKKRELEKRLQDVSGQLNSTKKPPKKANEKTESSSAQQVAVSRLSASSSSSDSSSSSSSSSSSDTSDSDSG

SEQ ID NO: 39211 - protein, 648 aa, Homo sapiens
MLQNVTPHNKLPGEGNAGLLGLGPEAAAPGKRIRKPSLLYEGFESPTMASVPALQLTPANPPPPEVSNPKKPGRVTNQLQYLHKVVMKALWKHQFAWPFRQPVDAVKLGLPDYHKIIKQPMDMGTIKRRLENNYYWAASECMQDFNTMFTNCYIYNKPTDDIVLMAQTLEKIFLQKVASMPQEEQELVVTIPKNSHKKGAKLAALQGSVTSAHQVPAVSSVSHTALYTPPPEIPTTVLNIPHPSVISSPLLKSLHSAGPPLLAVTAAPPAQPLAKKKGVKRKADTTTPTPTAILAPGSPASPPGSLEPKAARLPPMRRESGRPIKPPRKDLPDSQQQHQSSKKGKLSEQLKHCNGILKELLSKKHAAYAWPFYKPVDASALGLHDYHDIIKHPMDLSTVKRKMENRDYRDAQEFAADVRLMFSNCYKYNPPDHDVVAMARKLQDVFEFRYAKMPDEPLEPGPLPVSTAMPPGLAKSSSESSSEESSSESSSEEEEEEDEEDEEEEESESSDSEEERAHRLAELQEQLRAVHEQLAALSQGPISKPKRKREKKEKKKKRKAEKHRGRAGADEDDKGPRAPRPPQPKKSKKASGSGGGSAALGPSGFGPSGGSGTKLQAGVQWRDLGLLQPPLLGFKRFSCLSLPSSQDY

SEQ ID NO: 39212 - protein, 807 aa, Homo sapiens
  VARIANT 1: note = MOD_RES - Any amino acid
XNGGGGSATARGGEYRLPGEGNAGLLGLGPEAAAPGKRIRKPSLLYEGFESPTMASVPALQLTPANPPPPEVSNPKKPGRVTNQLQYLHKVVMKALWKHQFAWPFRQPVDAVKLGLPDYHKIIKQPMDMGTIKRRLENNYYWAASECMQDFNTMFTNCYIYNKPTDDIVLMAQTLEKIFLQKVASMPQEEQELVVTIPKNSHKKGAKLAALQGSVTSAHQVPAVSSVSHTALYTPPPEIPTTVFNIPHPSVISSPLLKSLHSAGPPLLAVTAAPPAQPLAKKKGVKRKADTTTPTPTAILAPGSPASPPGSLEPKAARLPPMRRESGRPIKPPRKDLPDSQQQHQSSKKGKLSEQLKHCNGILKELLSKKHAAYAWPFYKPVDASALGLHDYHDIIKHPMDLSTVKRKMENRDYRDAQEFAADVRLMFSNCYKYNPPDHDVVAMARKLQDVFEFRYAKMPDEPLEPGPLPVSTAMPPGLAKSSSESSSEESSSESSSEEEEEEDEEDEEEEESESSDSEEERAHRLAELQEQLRAVHEQLAALSQGPISKPKRKREKKEKKKKRKAEKHRGRAGADEDDKGPRAPRPPQPKKSKKASGSGGGSAALGPSGFGPSGGSGTKLPKKATKTAPPALPTGYDSEEEEESRPMSYDEKRQLSLDINKLPGEKLGRVVHIIQAREPSLRDSNPEEIEIDFETLKPSTLRELERYVLSCLRKKPRKPYTIKKPVGKTKEELALEKKRELEKRLQDVSGQLNSTKKPPKKANEKTESSSAQQVAVSRLSASSSSSDSSSSSSSSSSSDTSDSDSG

SEQ ID NO: 39213 - protein, 296 aa, Homo sapiens
  VARIANT 1: note = MOD_RES - Any amino acid
XRPLGVQQPGARLPGEGNAGLLGLGPEAAAPGKRIRKPSLLYEGFESPTMASVPALQLTPANPPPPEVSNPKKPGRVTNQLQYLHKVVMKALWKHQFAWPFRQPVDAVKLGLPDYHKIIKQPMDMGTIKRRLENNYYWAASECMQDFNTMFTNCYIYNKPTDDIVLMAQTLEKIFLQKVASMPQEEQELVVTIPKNSHKKGAKLAALQGSVTSAHQVPAVSSVSHTALYTPPPEIPTTVFNIPHPSVISSPLLKSLHSAGPPLLAVTAAPPAQPLAKKKGVKRKADTTTPTPTAIL

SEQ ID NO: 39214 - protein, 754 aa, Homo sapiens
MASVPALQLTPANPPPPEVSNPKKPGRVTNQLQYLHKVVMKALWKHQFAWPFRQPVDAVKLGLPDYHKIIKQPMDMGTIKRRLENNYYWAASECMQDFNTMFTNCYIYNKPTDDIVLMAQTLEKIFLQKVASMPQEEQELVVTIPKNSHKKGAKLAALQGSVTSAHQVPAVSSVSHTALYTPPPEIPTTVLNIPHPSVISSPLLKSLHSAGPPLLAVTAAPPAQPLAKKKGVKRKADTTTPTPTAILAPGSPASPPGSLEPKAARLPPMRRESGRPIKPPRKDLPDSQQQHQSSKKGKLSEQLKHCNGILKELLSKKHAAYAWPFYKPVDASALGLHDYHDIIKHPMDLSTVKRKMENRDYRDAQEFAADVRLMFSNCYKYNPPDHDVVAMARKLQDVFEFRYAKMPDEPLEPGPLPVSTAMPPGLAKSSSESSSEESSSESSSEEEEEEDEEDEEEEESESSDSEEERAHRLAELQEQLRAVHEQLAALSQGPISKPKRKREKKEKKKKRKAEKHRGRAGADEDDKGPRAPRPPQPKKSKKASGSGGGSAALGPSGFGPSGGSGTKLPKKATKTAPPALPTGYDSEEEEESRPMSYDEKRQLSLDINKLPGEKLGRVVHIIQAREPSLRDSNPEEIEIDFETLKPSTLRELERYVLSCLRKKPRKPYTIKKPVGKTKEELALEKKRELEKRLQDVSGQLNSTKKPPKKANEKTESSSAQQVAVSRLSASSSSSDSSSSSSSSSSSDTSDSDSG

SEQ ID NO: 39215 - protein, 801 aa, Homo sapiens; identical to SEQ ID NO: 39198

SEQ ID NO: 39216 - protein, 807 aa, Homo sapiens
  VARIANT 1: note = MOD_RES - Any amino acid
XNGGGGSATARGGEYRLPGEGNAGLLGLGPEAAAPGKRIRKPSLLYEGFESPTMASVPALQLTPANPPPPEVSNPKKPGRVTNQLQYLHKVVMKALWKHQFAWPFRQPVDAVKLGLPDYHKIIKQPMDMGTIKRRLENNYYWAASECMQDFNTMFTNCYIYNKPTDDIVLMAQTLEKIFLQKVASMPQEEQELVVTIPKNSHKKGAKLAALQGSVTSAHQVPAVSSVSHTALYTPPPEIPTTVLNIPHPSVISSPLLKSLHSAGPPLLAVTAAPPAQPLAKKKGVKRKADTTTPTPTAILAPGSPASPPGSLEPKAARLPPMRRESGRPIKPPRKDLPDSQQQHQSSKKGKLSEQLKHCNGILKELLSKKHAAYAWPFYKPVDASALGLHDYHDIIKHPMDLSTVKRKMENRDYRDAQEFAADVRLMFSNCYKYNPPDHDVVAMARKLQDVFEFRYAKMPDEPLEPGPLPVSTAMPPGLAKSSSESSSEESSSESSSEEEEEEDEEDEEEEESESSDSEEERAHRLAELQEQLRAVHEQLAALSQGPISKPKRKREKKEKKKKRKAEKHRGRAGADEDDKGPRAPRPPQPKKSKKASGSGGGSAALGPSGFGPSGGSGTKLPKKATKTAPPALPTGYDSEEEEESRPMSYDEKRQLSLDINKLPGEKLGRVVHIIQAREPSLRDSNPEEIEIDFETLKPSTLRELERYVLSCLRKKPRKPYTIKKPVGKTKEELALEKKRELEKRLQDVSGQLNSTKKPPKKANEKTESSSAQQVAVSRLSASSSSSDSSSSSSSSSSSDTSDSDSG

SEQ ID NO: 39217 - protein, 363 aa, Homo sapiens
  VARIANT 1: note = MOD_RES - Any amino acid
XAKSSSESSSEESSSESSSEEEEEEDEDEEEEESESSDSEEERAHRLAELQEQLRAVHEQLAALSQGPISKPKRKREKKEKKKKRKAEKHRGRAGADEDDKGPRAPRPPQPKKSKKASGSGGGSAALGPSGFGPSGGSGTKLQAGVQWRDLGLLQPPLLGFKRFSCLSLPSSQDYRLPKKATKTAPPALPTGYDSEEEEESRPMSYDEKRQLSLDINKLPGEKLGRVVHIIQAREPSLRDSNPEEIEIDFETLKPSTLRELERYVLSCLRKKPRKPYTIKKPVGKTKEELALEKKRELEKRLQDVSGQLNSTKKPPKKANEKTESSSAQQVAVSRLSASSSSSDSSSSSSSSSSSDTSDSDSG

SEQ ID NO: 39218 - protein, 836 aa, Homo sapiens; identical to SEQ ID NO: 39201

SEQ ID NO: 39219 - protein, 681 aa, Homo sapiens
MDMGTIKRRLENNYYWAASECMQDFNTMFTNCYIYNKPTDDIVLMAQTLEKIFLQKVASMPQEEQELVVTIPKNSHKKGAKLAALQGSVTSAHQVPAVSSVSHTALYTPPPEIPTTVLNIPHPSVISSPLLKSLHSAGPPLLAVTAAPPAQPLAKKKGVKRKADTTTPTPTAILAPGSPASPPGSLEPKAARLPPMRRESGRPIKPPRKDLPDSQQQHQSSKKGKLSEQLKHCNGILKELLSKKHAAYAWPFYKPVDASALGLHDYHDIIKHPMDLSTVKRKMENRDYRDAQEFAADVRLMFSNCYKYNPPDHDVVAMARKLQDVFEFRYAKMPDEPLEPGPLPVSTAMPPGLAKSSSESSSEESSSESSSEEEEEEDEEDEEEEESESSDSEEERAHRLAELQEQLRAVHEQLAALSQGPISKPKRKREKKEKKKKRKAEKHRGRAGADEDDKGPRAPRPPQPKKSKKASGSGGGSAALGPSGFGPSGGSGTKLPKKATKTAPPALPTGYDSEEEEESRPMSYDEKRQLSLDINKLPGEKLGRVVHIIQAREPSLRDSNPEEIEIDFETLKPSTLRELERYVLSCLRKKPRKPYTIKKPVGKTKEELALEKKRELEKRLQDVSGQLNSTKKPPKKANEKTESSSAQQVAVSRLSASSSSSDSSSSSSSSSSSDTSDSDSG

SEQ ID NO: 39220 - protein, 807 aa, Homo sapiens; identical to SEQ ID NO: 39216
  VARIANT 1: note = MOD_RES - Any amino acid

SEQ ID NO: 39221 - protein, 328 aa, Homo sapiens; identical to SEQ ID NO: 39210
  VARIANT 1: note = MOD_RES - Any amino acid

SEQ ID NO: 39222 - protein, 836 aa, Homo sapiens; identical to SEQ ID NO: 39201

SEQ ID NO: 39223 - protein, 807 aa, Homo sapiens; identical to SEQ ID NO: 39216
  VARIANT 1: note = MOD_RES - Any amino acid

SEQ ID NO: 39224 - protein, 754 aa, Homo sapiens; identical to SEQ ID NO: 39214

SEQ ID NO: 39225 - protein, 801 aa, Homo sapiens [sequence omitted]

SEQ ID NO: 39226 - protein, 296 aa, Homo sapiens; identical to SEQ ID NO: 39206
  VARIANT 1: note = MOD_RES - Any amino acid

SEQ ID NO: 39227 - protein, 836 aa, Homo sapiens
MLQNVTPHNKLPGEGNAGLLGLGPEAAAPGKRIRKPSLLYEGFESPTMASVPALQLTPANPPPPEVSNPKKPGRVTNQLQYLHKVVMKALWKHQFAWPFRQPVDAVKLGLPDYHKIIKQPMDMGTIKRRLENNYYWAASECMQDFNTMFTNCYIYNKPTDDIVLMAQTLEKIFLQKVASMPQEEQELVVTIPKNSHKKGAKLAALQGSVTSAHQVPAVSSVSHTALYTPPPEIPTTVFNIPHPSVISSPLLKSLHSAGPPLLAVTAAPPAQPLAKKKGVKRKADTTTPTPTAILAPGSPASPPGSLEPKAARLPPMRRESGRPIKPPRKDLPDSQQQHQSSKKGKLSEQLKHCNGILKELLSKKHAAYAWPFYKPVDASALGLHDYHDIIKHPMDLSTVKRKMENRDYRDAQEFAADVRLMFSNCYKYNPPDHDVVAMARKLQDVFEFRYAKMPDEPLEPGPLPVSTAMPPGLAKSSSESSSEESSSESSSEEEEEEDEEDEEEEESESSDSEEERAHRLAELQEQLRAVHEQLAALSQGPISKPKRKREKKEKKKKRKAEKHRGRAGADEDDKGPRAPRPPQPKKSKKASGSGGGSAALGPSGFGPSGGSGTKLQAGVQWRDLGLLQPPLLGFKRFSCLSLPSSQNYRLPKKATKTAPPALPTGYDSEEEEESRPMSYDEKRQLSLDINKLPGEKLGRVVHIIQAREPSLRDSNPEEIEIDFETLKPSTLRELERYVLSCLRKKPRKPYTIKKPVGKTKEELALEKKRELEKRLQDVSGQLNSTKKPPKKANEKTESSSAQQVAVSRLSASSSSSDSSSSSSSSSSSDTSDSDSG

SEQ ID NO: 39228 - protein, 328 aa, Homo sapiens; identical to SEQ ID NO: 39210
  VARIANT 1: note = MOD_RES - Any amino acid

SEQ ID NO: 39229 - protein, 296 aa, Homo sapiens; identical to SEQ ID NO: 39206
  VARIANT 1: note = MOD_RES - Any amino acid

SEQ ID NO: 39230 - protein, 296 aa, Homo sapiens; identical to SEQ ID NO: 39206
  VARIANT 1: note = MOD_RES - Any amino acid

SEQ ID NO: 39231 - protein, 619 aa, Homo sapiens
  VARIANT 1: note = MOD_RES - Any amino acid
XNGGGGSATARGGEYRLPGEGNAGLLGLGPEAAAPGKRIRKPSLLYEGFESPTMASVPALQLTPANPPPPEVSNPKKPGRVTNQLQYLHKVVMKALWKHQFAWPFRQPVDAVKLGLPDYHKIIKQPMDMGTIKRRLENNYYWAASECMQDFNTMFTNCYIYNKPTDDIVLMAQTLEKIFLQKVASMPQEEQELVVTIPKNSHKKGAKLAALQGSVTSAHQVPAVSSVSHTALYTPPPEIPTTVLNIPHPSVISSPLLKSLHSAGPPLLAVTAAPPAQPLAKKKGVKRKADTTTPTPTAILAPGSPASPPGSLEPKAARLPPMRRESGRPIKPPRKDLPDSQQQHQSSKKGKLSEQLKHCNGILKELLSKKHAAYAWPFYKPVDASALGLHDYHDIIKHPMDLSTVKRKMENRDYRDAQEFAADVRLMFSNCYKYNPPDHDVVAMARKLQDVFEFRYAKMPDEPLEPGPLPVSTAMPPGLAKSSSESSSEESSSESSSEEEEEEDEEDEEEEESESSDSEEERAHRLAELQEQLRAVHEQLAALSQGPISKPKRKREKKEKKKKRKAEKHRGRAGADEDDKGPRAPRPPQPKKSKKASGSGGGSAALGPSGFGPSGGSGT

SEQ ID NO: 39232 - protein, 328 aa, Homo sapiens; identical to SEQ ID NO: 39210
  VARIANT 1: note = MOD_RES - Any amino acid

SEQ ID NO: 39233 - protein, 681 aa, Homo sapiens [sequence omitted]

SEQ ID NO: 39234 - protein, 754 aa, Homo sapiens [sequence omitted]

SEQ ID NO: 39235 - protein, 836 aa, Homo sapiens; identical to SEQ ID NO: 39201

SEQ ID NO: 39236 - protein, 681 aa, Homo sapiens; identical to SEQ ID NO: 39219

SEQ ID NO: 39237 - protein, 836 aa, Homo sapiens; identical to SEQ ID NO: 39201

SEQ ID NO: 39238 - protein, 754 aa, Homo sapiens; identical to SEQ ID NO: 39214

SEQ ID NO: 39239 - protein, 681 aa, Homo sapiens; identical to SEQ ID NO: 39219

SEQ ID NO: 39240 - protein, 836 aa, Homo sapiens; identical to SEQ ID NO: 39201

SEQ ID NO: 39241 - protein, 836 aa, Homo sapiens; identical to SEQ ID NO: 39227

SEQ ID NO: 39242 - protein, 754 aa, Homo sapiens; identical to SEQ ID NO: 39214

SEQ ID NO: 39243 - protein, 801 aa, Homo sapiens; identical to SEQ ID NO: 39198

SEQ ID NO: 39244 - protein, 681 aa, Homo sapiens; identical to SEQ ID NO: 39219

SEQ ID NO: 39245 - protein, 1362 aa, Homo sapiens
MSAESGPGTRLRNLPVMGDGLETSQMSTTQAQAQPQPANAASTNPPPPETSNPNKPKRQTNQLQYLLRVVLKTLWKHQFAWPFQQPVDAVKLNLPDYYKIIKTPMDMGTIKKRLENNYYWNAQECIQDFNTMFTNCYIYNKPGDDIVLMAEALEKLFLQKINELPTEETEIMIVQAKGRGRGRKETGTAKPGVSTVPNTTQASTPPQTQTPQPNPPPVQATPHPFPAVTPDLIVQTPVMTVVPPQPLQTPPPVPPQPQPPPAPAPQPVQSHPPIIAATPQPVKTKKGVKRKADTTTPTTIDPIHEPPSLPPEPKTTKLGQRRESSRPVKPPKKDVPDSQQHPAPEKSSKVSEQLKCCSGILKEMFAKKHAAYAWPFYKPVDVEALGLHDYCDIIKHPMDMSTIKSKLEAREYRDAQEFGADVRLMFSNCYKYNPPDHEVVAMARKLQDVFEMRFAKMPDEPEEPVVAVSSPAVPPPTKVVAPPSSSDSSSDSSSDSDSSTDDSEEERAQRLAELQEQLKAVHEQLAALSQPQQNKPKKKEKDKKEKKKEKHKRKEEVEENKKSKAKEPPPKKTKKNNSSNSNVSKKEPAPMKSKPPPTYESEEEDKCKPMSYEEKRQLSLDINKLPGEKLGRVVHIIQSREPSLKNSNPDEIEIDFETLKPSTLRELERYVTSCLRKKRKPQAEKVDVIAGSSKMKGFSSSESESSSESSSSDSEDSETEMAPKSKKKGHPGREQKKHHHHHHQQMQQAPAPVPQQPPPPPQQPPPPPPPQQQQQPPPPPPPPSMPQQAAPAMKSSPPPFIATQVPVLEPQLPGSVFDPIGHFTQPILHLPQPELPPHLPQPPEHSTPPHLNQHAVVSPPALHNALPQQPSRPSNRAAALPPKPARPPAVSPALTQTPLLPQPPMAQPPQVLLEDEEPPAPPLTSMQMQLYLQQLQKVQPPTPLLPSVKVQSQPPPPLPPPPHPSVQQQLQQQPPPPPPPQPQPPPQQQHQPPPRPVHLQPMQFSTHIQQPPPPQGQQPPHPPPGQQPPPPQPAKPQQVIQHHHSPRHHKSDPYSTGHLREAPSPLMIHSPQMSQFQSLTHQSPPQQNVQPKKQELRAASVVQPQPLVVVKEEKIHSPIIRSEPFSPSLRPEPPKHPESIKAPVHLPQRPEMKPVDVGRPVIRPPEQNAPPPGAPDKDKQKQEPKTPVAPKKDLKIKNMGSWASLVQKHPTTPSSTAKSSSDSFEQFRRAAREKEEREKALKAQAEHAEKEKERLRQERMRSREDEDALEQARRAHEEARRRQEQQQQQRQEQQQQQQQQAAAVAAAATPQAQSSQPQSMLDQQRELARKREQERRRREAMAATIDMNFQSDLLSIFEENLF

SEQ ID NO: 39246 - protein, 794 aa, Homo sapiens
MSAESGPGTRLRNLPVMGDGLETSQMSTTQAQAQPQPANAASTNPPPPETSNPNKPKRQTNQLQYLLRVVLKTLWKHQFAWPFQQPVDAVKLNLPDYYKIIKTPMDMGTIKKRLENNYYWNAQECIQDFNTMFTNCYIYNKPGDDIVLMAEALEKLFLQKINELPTEETEIMIVQAKGRGRGRKETGTAKPGVSTVPNTTQASTPPQTQTPQPNPPPVQATPHPFPAVTPDLIVQTPVMTVVPPQPLQTPPPVPPQPQPPPAPAPQPVQSHPPIIAATPQPVKTKKGVKRKADTTTPTTIDPIHEPPSLPPEPKTTKLGQRRESSRPVKPPKKDVPDSQQHPAPEKSSKVSEQLKCCSGILKEMFAKKHAAYAWPFYKPVDVEALGLHDYCDIIKHPMDMSTIKSKLEAREYRDAQEFGADVRLMFSNCYKYNPPDHEVVAMARKLQDVFEMRFAKMPDEPEEPVVAVSSPAVPPPTKVVAPPSSSDSSSDSSSDSDSSTDDSEEERAQRLAELQEQLKAVHEQLAALSQPQQNKPKKKEKDKKEKKKEKHKRKEEVEENKKSKAKEPPPKKTKKNNSSNSNVSKKEPAPMKSKPPPTYESEEEDKCKPMSYEEKRQLSLDINKLPGEKLGRVVHIIQSREPSLKNSNPDEIEIDFETLKPSTLRELERYVTSCLRKKRKPQAEKVDVIAGSSKMKGFSSSESESSSESSSSDSEDSETAFCTSGDFVSPGPSPYHSHVQCGRFREMLRWFLVDVEQTAAGQPHRQSAAGPAITWAPAIAYPSPECARCCVGCS

SEQ ID NO: 39247 - protein, 722 aa, Homo sapiens
MSAESGPGTRLRNLPVMGDGLETSQMSTTQAQAQPQPANAASTNPPPPETSNPNKPKRQTNQLQYLLRVVLKTLWKHQFAWPFQQPVDAVKLNLPDYYKIIKTPMDMGTIKKRLENNYYWNAQECIQDFNTMFTNCYIYNKPGDDIVLMAEALEKLFLQKINELPTEETEIMIVQAKGRGRGRKETGTAKPGVSTVPNTTQASTPPQTQTPQPNPPPVQATPHPFPAVTPDLIVQTPVMTVVPPQPLQTPPPVPPQPQPPPAPAPQPVQSHPPIIAATPQPVKTKKGVKRKADTTTPTTIDPIHEPPSLPPEPKTTKLGQRRESSRPVKPPKKDVPDSQQHPAPEKSSKVSEQLKCCSGILKEMFAKKHAAYAWPFYKPVDVEALGLHDYCDIIKHPMDMSTIKSKLEAREYRDAQEFGADVRLMFSNCYKYNPPDHEVVAMARKLQDVFEMRFAKMPDEPEEPVVAVSSPAVPPPTKVVAPPSSSDSSSDSSSDSDSSTDDSEEERAQRLAELQEQLKAVHEQLAALSQPQQNKPKKKEKDKKEKKKEKHKRKEEVEENKKSKAKEPPPKKTKKNNSSNSNVSKKEPAPMKSKPPPTYESEEEDKCKPMSYEEKRQLSLDINKLPGEKLGRVVHIIQSREPSLKNSNPDEIEIDFETLKPSTLRELERYVTSCLRKKRKPQAEKVDVIAGSSKMKGFSSSESESSSESSSSDSEDSETGPA

SEQ ID NO: 39248 - protein, 874 aa, Homo sapiens
MDLNTIKKRLENKYYAKASECIEDFNTMFSNCYLYNKPGDDIVLMAQALEKLFMQKLSQMPQEEQVVGVKERIKKGTQQNIAVSSAKEKSSPSATEKVFKQQEIPSVFPKTSISPLNVVQGASVNSSSQTAAQVTKGVKRKADTTTPATSAVKASSEFSPTFTEKSVALPPIKENMPKNVLPDSQQQYNVVKTVKVTEQLRHCSEILKEMLAKKHFSYAWPFYNPVDVNALGLHNYYDVVKNPMDLGTIKEKMDNQEYKDAYKFAADVRLMFMNCYKYNPPDHEVVTMARMLQDVFETHFSKIPIEPVESMPLCYIKTDITETTGRENTNEASSEGNSSDDSEDERVKRLAKLQEQLKAVHQQLQVLSQVPFRKLNKKKEKSKKEKKKEKVNNSNENPRKMCEQMRLKEKSKRNQPKKRKQQFIGLKSEDEDNAKPMNYDEKRQLSLNINKLPGDKLGRVVHIIQSREPSLSNSNPDEIEIDFETLKASTLRELEKYVSACLRKRPLKPPAKKIMMSKEELHSQKKQELEKRLLDVNNQLNSRKRQTKSDKTQPSKAVENVSRLSESSSSSSSSSESESSSSDLSSSDSSDSESEMFPKFTEVKPNDSPSKENVKKMKNECIPPEGRTGVTQIGYCVQDTTSANTTLVHQTTPSHVMPPNHHQLAFNYQELEHLQTVKNISPLQILPPSGDSEQLSNGITVMHPSGDSDTTMLESECQAPVQKDIKIKNADSWKSLGKPVKPSGVMKSSDELFNQFRKAAIEKEVKARTQELIRKHLEQNTKELKASQENQRDLGNGLTVESFSNKIQNKCSGEEQKEHQQSSEAQDKSKLWLLKDRDLARQKEQERRRREAMVGTIDMTLQSDIMTMFENNFD

SEQ ID NO: 39249 - protein, 14 aa, Homo sapiens
MSLPSRQTAIIVNP

SEQ ID NO: 39250 - protein, 947 aa, Homo sapiens
MSLPSRQTAIIVNPPPPEYINTKKNGRLTNQLQYLQKVVLKDLWKHSFSWPFQRPVDAVKLQLPDYYTIIKNPMDLNTIKKRLENKYYAKASECIEDFNTMFSNCYLYNKPGDDIVLMAQALEKLFMQKLSQMPQEEQVVGVKERIKKGTQQNIAVSSAKEKSSPSATEKVFKQQEIPSVFPKTSISPLNVVQGASVNSSSQTAAQVTKGVKRKADTTTPATSAVKASSEFSPTFTEKSVALPPIKENMPKNVLPDSQQQYNVVKTVKVTEQLRHCSEILKEMLAKKHFSYAWPFYNPVDVNALGLHNYYDVVKNPMDLGTIKEKMDNQEYKDAYKFAADVRLMFMNCYKYNPPDHEVVTMARMLQDVFETHFSKIPIEPVESMPLCYIKTDITETTGRENTNEASSEGNSSDDSEDERVKRLAKLQEQLKAVHQQLQVLSQVPFRKLNKKKEKSKKEKKKEKVNNSNENPRKMCEQMRLKEKSKRNQPKKRKQQFIGLKSEDEDNAKPMNYDEKRQLSLNINKLPGDKLGRVVHIIQSREPSLSNSNPDEIEIDFETLKASTLRELEKYVSACLRKRPLKPPAKKIMMSKEELHSQKKQELEKRLLDVNNQLNSRKRQTKSDKTQPSKAVENVSRLSESSSSSSSSSESESSSSDLSSSDSSDSESEMFPKFTEVKPNDSPSKENVKKMKNECIPPEGRTGVTQIGYCVQDTTSANTTLVHQTTPSHVMPPNHHQLAFNYQELEHLQTVKNISPLQILPPSGDSEQLSNGITVMHPSGDSDTTMLESECQAPVQKDIKIKNADSWKSLGKPVKPSGVMKSSDELFNQFRKAAIEKEVKARTQELIRKHLEQNTKELKASQENQRDLGNGLTVESFSNKIQNKCSGEEQKEHQQSSEAQDKSKLWLLKDRDLARQKEQERRRREAMVGTIDMTLQSDIMTMFENNFD

SEQ ID NO: 39251 - protein, 901 aa, Homo sapiens
MSLPSRQTAIIVNPPPPEYINTKKNGRLTNQLQYLQKVVLKDLWKHSFSWPFQRPVDAVKLQLPPGDDIVLMAQALEKLFMQKLSQMPQEEQVVGVKERIKKGTQQNIAVSSAKEKSSPSATEKVFKQQEIPSVFPKTSISPLNVVQGASVNSSSQTAAQVTKGVKRKADTTTPATSAVKASSEFSPTFTEKSVALPPIKENMPKNVLPDSQQQYNVVKTVKVTEQLRHCSEILKEMLAKKHFSYAWPFYNPVDVNALGLHNYYDVVKNPMDLGTIKEKMDNQEYKDAYKFAADVRLMFMNCYKYNPPDHEVVTMARMLQDVFETHFSKIPIEPVESMPLCYIKTDITETTGRENTNEASSEGNSSDDSEDERVKRLAKLQEQLKAVHQQLQVLSQVPFRKLNKKKEKSKKEKKKEKVNNSNENPRKMCEQMRLKEKSKRNQPKKRKQQFIGLKSEDEDNAKPMNYDEKRQLSLNINKLPGDKLGRVVHIIQSREPSLSNSNPDEIEIDFETLKASTLRELEKYVSACLRKRPLKPPAKKIMMSKEELHSQKKQELEKRLLDVNNQLNSRKRQTKSDKTQPSKAVENVSRLSESSSSSSSSSESESSSSDLSSSDSSDSESEMFPKFTEVKPNDSPSKENVKKMKNECIPPEGRTGVTQIGYCVQDTTSANTTLVHQTTPSHVMPPNHHQLAFNYQELEHLQTVKNISPLQILPPSGDSEQLSNGITVMHPSGDSDTTMLESECQAPVQKDIKIKNADSWKSLGKPVKPSGVMKSSDELFNQFRKAAIEKEVKARTQELIRKHLEQNTKELKASQENQRDLGNGLTVESFSNKIQNKCSGEEQKEHQQSSEAQDKSKLWLLKDRDLARQKEQERRRREAMVGTIDMTLQSDIMTMFENNFD

SEQ ID NO: 39252 - protein, 947 aa, Homo sapiens; identical to SEQ ID NO: 39250

SEQ ID NO: 39253 - protein, 947 aa, Homo sapiens; identical to SEQ ID NO: 39250

SEQ ID NO: 39254 - protein, 176 aa, Homo sapiens
MSLPSRQTAIIVNPPPPEYINTKKNGRLTNQLQYLQKVVLKDLWKHSFSWPFQRPVDAVKLQLPDYYTIIKNPMDLNTIKKRLENKYYAKASECIEDFNTMFSNCYLYNKPGDDIVLMAQALEKLFMQKLSQMPQEEQVVGVKERIKKGTQQNIAVSSAKEKSSPSATEKVFKQQE

SEQ ID NO: 39255 - protein, 462 aa, Homo sapiens
MSLPSRQTAIIVNPPPPEYINTKKNGRLTNQLQYLQKVVLKDLWKHSFSWPFQRPVDAVKLQLPDYYTIIKNPMDLNTIKKRLENKYYAKASECIEDFNTMFSNCYLYNKPGDDIVLMAQALEKLFMQKLSQMPQEEQVVGVKERIKKGTQQNIAVSSAKEKSSPSATEKVFKQQEIPSVFPKTSISPLNVVQGASVNSSSQTAAQVTKGVKRKADTTTPATSAVKASSEFSPTFTEKSVALPPIKENMPKNVLPDSQQQYNVVKTVKVTEQLRHCSEILKEMLAKKHFSYAWPFYNPVDVNALGLHNYYDVVKNPMDLGTIKEKMDNQEYKDAYKFAADVRLMFMNCYKYNPPDHEVVTMARMLQDVFETHFSKIPIEPVESMPLCYIKTDITETTGRENTNEASSEGNSSDDSEDERVKRLAKLQEQLKAVHQQLQVLSQVPFRKLNKKKEKSKKEKKKE

SEQ ID NO: 39256 - protein, 155 aa, Homo sapiens
MSLPSRQTAIIVNPPPPEYINTKKNGRLTNQLQYLQKVVLKDLWKHSFSWPFQRPVDAVKLQLPDYYTIIKNPMDLNTIKKRLENKYYAKASECIEDFNTMFSNCYLYNKPGDDIVLMAQALEKLFMQKLSQMPQEEQVVGVKERIKKGTQQNIA

SEQ ID NO: 39257 - protein, 200 aa, Homo sapiens
MSLPSRQTAIIVNPPPPEYINTKKNGRLTNQLQYLQKVVLKDLWKHSFSWPFQRPVDAVKLQLPDYYTIIKNPMDLNTIKKRLENKYYAKASECIEDFNTMFSNCYLYNKPGDDIVLMAQALEKLFMQKLSQMPQEEQVVGVKERIKKGTQQNIAVSSAKEKSSPSATEKVFKQQEIPSVFPKTSISPLNVVQGASVNSS

SEQ ID NO: 39258 - protein, 155 aa, Homo sapiens; identical to SEQ ID NO: 39256

SEQ ID NO: 39259 - protein, 52 aa, Homo sapiens
MSLPSRQTAIIVNPPPPEYINTKKNGRLTNQLQYLQKVVLKDLWKHSFSWPF

SEQ ID NO: 39260 - protein, 96 aa, Homo sapiens
MSLPSRQTAIIVNPPPPEYINTKKNGRLTNQLQYLQKVVLKDLWKHSFSWPFQRPVDAVKLQLPDYYTIIKNPMDLNTIKKRLENKYYAKASECIE

SEQ ID NO: 39261 - protein, 32 aa, Homo sapiens
MSLPSRQTAIIVNPPPPEYINTKKNGRLTNQL

SEQ ID NO: 39262 - protein, 465 aa, Homo sapiens
MSLPSRQTAIIVNPPPPEYINTKKNGRLTNQLQYLQKVVLKDLWKHSFSWPFQRPVDAVKLQLPDYYTIIKNPMDLNTIKKRLENKYYAKASECIEDFNTMFSNCYLYNKPGDDIVLMAQALEKLFMQKLSQMPQEEQVVGVKERIKKGTQQNIAVSSAKEKSSPSATEKVFKQQEIPSVFPKTSISPLNVVQGASVNSSSQTAAQVTKGVKRKADTTTPATSAVKASSEFSPTFTEKSVALPPIKENMPKNVLPDSQQQYNVVKTVKVTEQLRHCSEILKEMLAKKHFSYAWPFYNPVDVNALGLHNYYDVVKNPMDLGTIKEKMDNQEYKDAYKFAADVRLMFMNCYKYNPPDHEVVTMARMLQDVFETHFSKIPIEPVESMPLCYIKTDITETTGRENTNEASSEGNSSDDSEDERVKRLAKLQEQLKAVHQQLQVLSQVPFRKLNKKKEKSKKEKKKEKKK

SEQ ID NO: 39263 - protein, 100 aa, Homo sapiens
MSLPSRQTAIIVNPPPPEYINTKKNGRLTNQLQYLQKVVLKDLWKHSFSWPFQRPVDAVKLQLPDYYTIIKNPMDLNTIKKRLENKYYAKASECIEDFNT

SEQ ID NO: 39264 - protein, 1849 aa, Homo sapiens
MAVSRLDRLFILLDTGTTPVTRKAAAQQLGEVVKLHPHELNNLLSKVLIYLRSANWDTRIAAGQAVEAIVKNVPEWNPVPRTRQEPTSESSMEDSPTTERLNFDRFDICRLLQHGASLLGSAGAEFEVQDEKSGEVDPKERIARQRKLLQKKLGLNMGEAIGMSTEELFNDEDLDYTPTSASFVNKQPTLQAAELIDSEFRAGMSNRQKNKAKRMAKLFAKQRSRDAVETNEKSNDSTDGEPEEKRRKIANVVINQSANDSKVLIDNIPDSSSLIEETNEWPLESFCEELCNDLFNPSWEVRHGAGTGLREILKAHGKSGGKMGDSTLEEMIQQHQEWLEDLVIRLLCVFALDRFGDFVSDEVVAPVRETCAQTLGVVLKHMNETGVHKTVDVLLKLLTQEQWEVRHGGLLGIKYALAVRQDVINTLLPKVLTRIIEGLQDLDDDVRAVAAASLVPVVESLVYLQTQKVPFIINTLWDALLELDDLTASTNSIMTLLSSLLTYPQVQQCSIQQSLTVLVPRVWPFLHHTISSVRRAALETLFTLLSTQDQNSSSWLIPILPDMLRHIFQFCVLESSQEILDLIHKVWMELLSKASVQYVVAAACPWMGAWLCLMMQPSHLPIDLNMLLEVKARAKEKTGGKVRQGQSQNKEVLQEYIAGADTIMEDPATRDFVVMRARMMAAKLLGALCCCICDPGVNVVTQEIKPAESLGQLLLFHLNSKSALQRISVALVICEWAALQKECKAVTLAVQPRLLDILSEHLYYDEIAVPFTRMQNECKQLISSLADVHIEVGNRVNNNVLTIDQASDLVTTVFNEATSSFDLNPQVLQQLDSKRQQVQMTVTETNQEWQVLQLRVHTFAACAVVSLQQLPEKLNPIIKPLMETIKKEENTLVQNYAAQCIAKLLQQCTTRTPCPNSKIIKNLCSSLCVDPYLTPCVTCPVPTQSGQENSKGSTSEKDGMHHTVTKHRGIITLYRHQKAAFAITSRRGPTPKAVKAQIADLPAGSSGNILVELDEAQKPYLVQRRGAEFALTTIVKHFGGEMAVKLPHLWDAMVGPLRNTIDINNFDGKSLLDKGDSPAQELVNSLQVFETAAASMDSELHPLLVQHLPHLYMCLQYPSTAVRHMAARCVGVMSKIATMETMNIFLEKVLPWLGAIDDSVKQEGAIEALACVMEQLDVGIVPYIVLLVVPVLGRMSDQTDSVRFMATQCFATLIRLMPLEAGIPDPPNMSAELIQLKAKERHFLEQLLDGKKLENYKIPVPINAELRKYQQDGVNWLAFLNKYKLHGILCDDMGLGKTLQSICILAGDHCHRAQEYARSKLAECMPLPSLVVCPPTLTGHWVDEVGKFCSREYLNPLHYTGPPTERIRLQHQVKRHNLIVASYDVVRNDIDFFRNIKFNYCILDEGHVIKNGKTKLSKAVKQLTANYRIILSGTPIQNNVLELWSLFDFLMPGFLGTERQFAARYGKPILASRDARSSSREQEAGVLAMDALHRQVLPFLLRRMKEDVLQDLPPKIIQDYYCTLSPLQVQLYEDFAKSRAKCDVDETVSSATLSEETEKPKLKATGHVFQALQYLRKLCNHPALVLTPQHPEFKTTAEKLAVQNSSLHDIQHAPKLSALKQLLLDCGLGNGSTSESGTESVVAQHRILIFCQLKSMLDIVEHDLLKPHLPSVTYLRLDGSIPPGQRHSIVSRFNNDPSIDVLLLTTHVGGLGLNLTGADTVVFVEHDWNPMRDLQAMDRAHRIGQKRVVNVYRLITRGTLEEKIMGLQKFKMNIANTVISQENSSLQSMGTDQLLDLFTLDKDGKAEKADTSTSGKASMKSILENLSDLWDQEQYDSEYSLENFMHSLK

SEQ ID NO: 39265 - protein, 699 aa, Homo sapiens
KLWFKNTEDYRRTALTRLTSGVMEQLDVGIVPYIVLLVVPVLGRMSDQTDSVRFMATQCFATLIRLMPLEAGIPDPPNMSAELIQLKAKERHFLEQLLDGKKLENYKIPVPINAELRKYQQDGVNWLAFLNKYKLHGILCDDMGLGKTLQSICILAGDHCHRAQEYARSKLAECMPLPSLVVCPPTLTGHWVDEVGKFCSREYLNPLHYTGPPTERIRLQHQVKRHNLIVASYDVVRNDIDFFRNIKFNYCILDEGHVIKNGKTKLSKAVKQLTANYRIILSGTPIQNNVLELWSLFDFLMPGFLGTERQFAARYGKPILASRDARSSSREQEAGVLAMDALHRQVLPFLLRRMKEDVLQDLPPKIIQDYYCTLSPLQVQLYEDFAKSRAKCDVDETVSSATLSEETEKPKLKATGHVFQALQYLRKLCNHPALVLTPQHPEFKTTAEKLAVQNSSLHDIQHAPKLSALKQLLLDCGLGNGSTSESGTESVVAQHRILIFCQLKSMLDIVEHDLLKPHLPSVTYLRLDGSIPPGQRHSIVSRFNNDPSIDVLLLTTHVGGLGLNLTGADTVVFVEHDWNPMRDLQAMDRAHRIGQKRVVNVYRLITRGTLEEKIMGLQKFKMNIANTVISQENSSLQSMGTDQLLDLFTLDKDGKAEKADTSTSGKASMKSILENLSDLWDQEQYDSEYSLENFMHSLK

SEQ ID NO: 39266 - protein, 677 aa, Homo sapiens
MEQLDVGIVPYIVLLVVPVLGRMSDQTDSVRFMATQCFATLIRLMPLEAGIPDPPNMSAELIQLKAKERHFLEQLLDGKKLENYKIPVPINAELRKYQQDGVNWLAFLNKYKLHGILCDDMGLGKTLQSICILAGDHCHRAQEYARSKLAECMPLPSLVVCPPTLTGHWVDEVGKFCSREYLNPLHYTGPPTERIRLQHQVKRHNLIVASYDVVRNDIDFFRNIKFNYCILDEGHVIKNGKTKLSKAVKQLTANYRIILSGTPIQNNVLELWSLFDFLMPGFLGTERQFAARYGKPILASRDARSSSREQEAGVLAMDALHRQVLPFLLRRMKEDVLQDLPPKIIQDYYCTLSPLQVQLYEDFAKSRAKCDVDETVSSATLSEETEKPKLKATGHVFQALQYLRKLCNHPALVLTPQHPEFKTTAEKLAVQNSSLHDIQHAPKLSALKQLLLDCGLGNGSTSESGTESVVAQHRILIFCQLKSMLDIVEHDLLKPHLPSVTYLRLDGSIPPGQRHSIVSRFNNDPSIDVLLLTTHVGGLGLNLTGADTVVFVEHDWNPMRDLQAMDRAHRIGQKRVVNVYRLITRGTLEEKIMGLQKFKMNIANTVISQENSSLQSMGTDQLLDLFTLDKDGKAEKADTSTSGKASMKSILENLSDLWDQEQYDSEYSLENFMHSLK

SEQ ID NO: 39267 - protein, 410 aa, Homo sapiens
MGANASNYPHSCSPRVGGNSQAQQTFIGTSSYSQQGYGCESKLYSLDHGHEKPQDKKKRTSGLATLKKKFIKRRKSNRSADHAKQMRELLSGWDVRDVNALVEEYEGTSALKELSLQASLARPEARTLQKDMADLYEYKYCTDVDLIFQETCFPVHRAILAARCPFFKTLLSSSPEYGAEIIMDINTAGIDMPMFSALLHYLYTGEFGMEDSRFQNVDILVQLSEEFGTPNSLDVDMRGLFDYMCYYDVVLSFSSDSELVEAFGGNQNCLDEELKAHKAVISARSPFFRNLLQRRIRTGEEITDRTLRTPTRIILDESIIPKKYATVILHCMYTDVVDLSVLHCSPSVGSLSEVQALVAGKPNMTRAEEAMELYHIALFLEFNMLAQEETTVIRPACAAELSNSCLLPQS

SEQ ID NO: 39268 - protein, 1132 aa, Homo sapiens
MGANASNYPHSCSPRVGGNSQAQQTFIGTSSYSQQGYGCESKLYSLDHGHEKPQDKKKRTSGLATLKKKFIKRRKSNRSADHAKQMRELLSGWDVRDVNALVEEYEGTSALKELSLQASLARPEARTLQKDMADLYEYKYCTDVDLIFQETCFPVHRAILAARCPFFKTLLSSSPEYGAEIIMDINTAGIDMPMFSALLHYLYTGEFGMEDSRFQNVDILVQLSEEFGTPNSLDVDMRGLFDYMCYYDVVLSFSSDSELVEAFGGNQNCLDEELKAHKAVISARSPFFRNLLQRRIRTGEEITDRTLRTPTRIILDESIIPKKYATVILHCMYTDVVDLSVLHCSPSVGSLSEVQALVAGKPNMTRAEEAMELYHIALFLEFNMLAQGCEDIIAESISLDTLIAILKWSSHPYGSKWVHRQALHFLCEEFSQVMTSDVFYELSKDHLLTAIQSDYLQASEQDILKYLIKWGEHQLMKRIADREPNLLSGTAHSVNKRGVKRRDLDMEELREILSSLLPFVRIEHILPINSEVLSDAMKRGLISTPPSDMLPTTEGGKSNAWLRQKNAGIYVRPRLFSPYVEEAKSVLDEMMVEQTDLVRLRMVRMSNVPDTLYMVNNAVPQCCHMISHQQISSNQSSPPSVVANEIPVPRLLIMKDMVRRLQELRHTEQVQRAYALNCGEGATVSYEIQIRVLREFGLADAAAELLQNPHKFFPDERFGDESPLLTMRQPGRCRVNSTPPAETMFTDLDSFVAFHPPLPPPPPPYHPPATPIHNQLKAGWKQRPPSQHPSRSFSYPCNHSLFHSRTAPKAGPPPVYLPSVKAAPPDCTSTAGLGRQTVAAAAATTTSTATAAAAAASEKQVRTQPVLNDLMPDIAVGVSTLSLKDRRLPELAVDTELSQSVSEAGPGPPQHLSCIPQRHTHTSRKKHTLEQKTDTRENPQEYPDFYDFSNAACRPSTPALSRRTPSPSQGGYFGPDLYSHNKASPSGLKSAYLPGQTSPKKQEEARREYPLSPDGHLHRQKNEPIHLDVVEQPPQRSDFPLAAPENASTGPAHVRGRTAVETDLTFGLTPNRPSLSACSSEAPEERSGRRLADSESLGHGAQRNTDLEREDSISRGRRSPSKPDFLYKKSAL

SEQ ID NO: 39269 - protein, 706 aa, Homo sapiens
MYTDVVDLSVLHCSPSVGSLSEVQALVAGKPNMTRAEEAMELYHIALFLEFNMLAQEPNLLSGTAHSVNKRGVKRRDLDMEELREILSSLLPFVRIEHILPINSEVLSDAMKRGLISTPPSDMLPTTEGGKSNAWLRQKNAGIYVRPRLFSPYVEEAKSVLDEMMVEQTDLVRLRMVRMSNVPDTLYMVNNAVPQCCHMISHQQISSNQSSPPSVVANEIPVPRLLIMKDMVRRLQELRHTEQVQRAYALNCGEGATVSYEIQIRVLREFGLADAAAELLQNPHKFFPDERFGDESPLLTMRQPGRCRVNSTPPAETMFTDLDSFVAFHPPLPPPPPPYHPPATPIHNQLKAGWKQRPPSQHPSRSFSYPCNHSLFHSRTAPKAGPPPVYLPSVKAAPPDCTSTAGLGRQTVAAAAATTTSTATAAAAAASEKQVRTQPVLNDLMPDIAVGVSTLSLKDRRLPELAVDTELSQSVSEAGPGPPQHLSCIPQRHTHTSRKKHTLEQKTDTRENPQEYPDFYDFSNAACRPSTPALSRRTPSPSQGGYFGPDLYSHNKASPSGLKSAYLPGQTSPKKQEEARREYPLSPDGHLHRQKNEPIHLDVVEQPPQRSDFPLAAPENASTGPAHVRGRTAVETDLTFGLTPNRPSLSACSSEAPEERSGRRLADSESLGHGAQRNTDLEREDSISRGRRSPSKPDFLYKKSAL

SEQ ID NO: 39270 - protein, 781 aa, Homo sapiens
MAGGAGAGADGGAGGGGGGGDGSGPSGSSSGGRSLRGCEDIIAESISLDTLIAILKWSSHPYGSKWVHRQALHFLCEEFSQVMTSDVFYELSKDHLLTAIQSDYLQASEQDILKYLIKWGEHQLMKRIADREPNLLSGTAHSVNKRGVKRRDLDMEELREILSSLLPFVRIEHILPINSEVLSDAMKRGLISTPPSDMLPTTEGGKSNAWLRQKNAGIYVRPRLFSPYVEEAKSVLDEMMVEQTDLVRLRMVRMSNVPDTLYMVNNAVPQCCHMISHQQISSNQSSPPSVVANEIPVPRLLIMKDMVRRLQELRHTEQVQRAYALNCGEGATVSYEIQIRVLREFGLADAAAELLQNPHKFFPDERFGDESPLLTMRQPGRCRVNSTPPAETMFTDLDSFVAFHPPLPPPPPPYHPPATPIHNQLKAGWKQRPPSQHPSRSFSYPCNHSLFHSRTAPKAGPPPVYLPSVKAAPPDCTSTAGLGRQTVAAAAATTTSTATAAAAAASEKQVRTQPVLNDLMPDIAVGVSTLSLKDRRLPELAVDTELSQSVSEAGPGPPQHLSCIPQRHTHTSRKKHTLEQKTDTRENPQEYPDFYDFSNAACRPSTPALSRRTPSPSQGGYFGPDLYSHNKASPSGLKSAYLPGQTSPKKQEEARREYPLSPDGHLHRQKNEPIHLDVVEQPPQRSDFPLAAPENASTGPAHVRGRTAVETDLTFGLTPNRPSLSACSSEAPEERSGRRLADSESLGHGAQRNTDLEREDSISRGRRSPSKPDFLYKKSAL

SEQ ID NO: 39271 - protein, 55 aa, Homo sapiens
MGANASNYPHSCSPRVGGNSQAQQTFIGTSSYSQQGYGCESKLYSLDHGHEKPQD

SEQ ID NO: 39272 - protein, 544 aa, Homo sapiens
MRESQPEAEIPLQDTTAEAFTMLLKYIYTGRATLTDEKEEVLLDFLSLAHKYGFPELEDSTSEYLCTILNIQNVCMTFDVASLYSLPKLTCMCCMFMDRNAQEVLSSEGFLSLSKTALLNIVLRDSFAAPEKDIFLALLNWCKHNSKENHAEIMQAVRLPLMSLTELLNVVRPSGLLSPDAILDAIKVRSESRDMDLNYRGMLIPEENIATMKYGAQVVKGELKSALLDGDTQNYDLDHGFSRHPIDDDCRSGIEIKLGQPSIINHIRILLWDRDSRSYSYFIEVSMDELDWVRVIDHSQYLCRSWQKLYFPARVCRYIRIVGTHNTVNKIFHIVAFECMFTNKTFTLEKGLIVPMENVATIADCASVIEGVSRSRNALLNGDTKNYDWDSGYTCHQLGSGAIVVQLAQPYMIGSIRLLLWDCDDRSYSYYVEVSTNQQQWTMVADRTKVSCKSWQSVTFERQPASFIRIVGTHNTANEVFHCVHFECPEQQSSQKEENSEESGTGDTSLAGQQLDSHALRAPSGSSLPSSPGSNSRSPNRQHQ

SEQ ID NO: 39273 - protein, 612 aa, Homo sapiens
MSNSHPLRPFTAVGEIDHVHILSEHIGALLIGEEYGDVTFVVEKKRFPAHRVILAARCQYFRALLYGGMRESQPEAEIPLQDTTAEAFTMLLKYIYTGRATLTDEKEEVLLDFLSLAHKYGFPELEDSTSEYLCTILNIQNVCMTFDVASLYSLPKLTCMCCMFMDRNAQEVLSSEGFLSLSKTALLNIVLRDSFAAPEKDIFLALLNWCKHNSKENHAEIMQAVRLPLMSLTELLNVVRPSGLLSPDAILDAIKVRSESRDMDLNYRGMLIPEENIATMKYGAQVVKGELKSALLDGDTQNYDLDHGFSRHPIDDDCRSGIEIKLGQPSIINHIRILLWDRDSRSYSYFIEVSMDELDWVRVIDHSQYLCRSWQKLYFPARVCRYIRIVGTHNTVNKIFHIVAFECMFTNKTFTLEKGLIVPMENVATIADCASVIEGVSRSRNALLNGDTKNYDWDSGYTCHQLGSGAIVVQLAQPYMIGSIRLLLWDCDDRSYSYYVEVSTNQQQWTMVADRTKVSCKSWQSVTFERQPASFIRIVGTHNTANEVFHCVHFECPEQQSSQKEENSEESGTGDTSLAGQQLDSHALRAPSGSSLPSSPGSNSRSPNRQHQ

SEQ ID NO: 39274 - protein, 544 aa, Homo sapiens; identical to SEQ ID NO: 39272

SEQ ID NO: 39275 - protein, 612 aa, Homo sapiens; identical to SEQ ID NO: 39273

SEQ ID NO: 39276 - protein, 92 aa, Homo sapiens
MSNSHPLRPFTAVGEIDHVHILSEHIGALLIGEEYGDVTFVVEKKRFPAHRVILAARCQYFRALLYGGMRESQPEAEIPLQDTTAEAFTMLL

SEQ ID NO: 39277 - protein, 582 aa, Homo sapiens
MCRALLYGGMRESQPEAEIPLQDTTAEAFTMLLKYIYTGRATLTDEKEEVLLDFLSLAHKYGFPELEDSTSEYLCTILNIQNVCMTFDVASLYSLPKLTCMCCMFMDRNAQEVLSSEGFLSLSKTALLNIVLRDSFAAPEKDIFLALLNWCKHNSKENHAEIMQAVRLPLMSLTELLNVVRPSGLLSPDAILDAIKVRSESRDMDLNYRGMLIPEENIATMKYGAQVVKGELKSALLDGDTQNYDLDHGFSRHPIDDDCRSGIEIKLGQPSIINHIRILLWDRDSRSYSYFIEVSMDELDWVRVIDHSQYLCRSWQKLYFPARVCSGDGVSLWCPLWSRTPELKQSSLLGLPKCRYIRIVGTHNTVNKIFHIVAFECMFTNKTFTLEKGLIVPMENVATIADCASVIEGVSRSRNALLNGDTKNYDWDSGYTCHQLGSGAIVVQLAQPYMIGSIRLLLWDCDDRSYSYYVEVSTNQQQWTMVADRTKVSCKSWQSVTFERQPASFIRIVGTHNTANEVFHCVHFECPEQQSSQKEENSEESGTGDTSLAGQQLDSHALRAPSGSSLPSSPGSNSRSPNRQHQ

SEQ ID NO: 39278 - protein, 736 aa, Homo sapiens
MSLSENSVFAYESSVHSTNVLLSLNDQRKKDVLCDVTIFVEGQRFRAHRSVLAACSSYFHSRIVGQADGELNITLPEEVTVKGFEPLIQFAYTAKLILSKENVDEVCKCVEFLSVHNIEESCFQFLKFKFLDSTADQQECPRKKCFSSHCQKTDLKLSLLDQRDLETDEVEEFLENKNVQTPQCKLRRYQGNAKASPPLQDSASQTYESMCLEKDAALALPSLCPKYRKFQKAFGTDRVRTGESSVKDIHASVQPNERSENECLGGVPECRDLQVMLKCDESKLAMEPEETKKDPASQCPTEKSEVTPFPHNSSIDPHGLYSLSLLHTYDQYGDLNFAGMQNTTVLTEKPLSGTDVQEKTFGESQDLPLKSDLGTREDSSVASSDRSSVEREVAEHLAKGFWSDICSTDTPCQMQLSPAVAKDGSEQISQKRSECPWLGIRISESPEPGQRTFTTLSSVNCPFISTLSTEGCSSNLEIGNDDYVSEPQQEPCPYACVISLGDDSETDTEGDSESCSAREQECEVKLPFNAQRIISLSRNDFQSLLKMHKLTPEQLDCIHDIRRRSKNRIAAQRCRKRKLDCIQNLESEIEKLQSEKESLLKERDHILSTLGETKQNLTGLCQKVCKEAALSQEQIQILAKYSAADCPLSFLISEKDKSTPDGELALPSIFSLSDRPPAVLPPCARGNSEPGYARGQESQQMSTATSEQAGPAEQCRQSGGISDFCQQMTDKCTTDE

SEQ ID NO: 39279 - protein, 736 aa, Homo sapiens; identical to SEQ ID NO: 39278

SEQ ID NO: 39280 - protein, 170 aa, Homo sapiens
MSLSENSVFAYESSVHSTNVLLSLNDQRKKDVLCDVTIFVEGQRFRAHRSVLAACSSYFHSRIVGQADGELNITLPEEVTVKGFEPLIQFAYTAKLILSKENVDEVCKCVEFLSVHNIEESCFQFLKFKFLDSTADQQECPRKKCFSSHCQKTDLKLSLLDQRDLETDEV

SEQ ID NO: 39281 - protein, 220 aa, Homo sapiens
MSLSENSVFAYESSVHSTNVLLSLNDQRKKDVLCDVTIFVEGQRFRAHRSVLAACSSYFHSRIVGQADGELNITLPEEVTVKGFEPLIQFAYTAKLILSKENVDEVCKCVEFLSVHNIEESCFQFLKFKFLDSTADQQECPRKKCFSSHCQKTDLKLSLLDQRDLETDEVEEFLENKNVQTPQCKLRRYQGNAKASPPLQDSASQTYESMCLEKDAALAL

SEQ ID NO: 39282 - protein, 225 aa, Homo sapiens
MSLSENSVFAYESSVHSTNVLLSLNDQRKKDVLCDVTIFVEGQRFRAHRSVLAACSSYFHSRIVGQADGELNITLPEEVTVKGFEPLIQFAYTAKLILSKENVDEVCKCVEFLSVHNIEESCFQFLKFKFLDSTADQQECPRKKCFSSHCQKTDLKLSLLDQRDLETDEVEEFLENKNVQTPQCKLRRYQGNAKASPPLQDSASQTYESMCLEKDAALALPSLCP

SEQ ID NO: 39283 - protein, 25 aa, Homo sapiens
MSLSENSVFAYESSVHSTNVLLSLN

SEQ ID NO: 39284 - protein, 25 aa, Homo sapiens
MSLSENSVFAYESSVHSTNVLLSLN

SEQ ID NO: 39285 - protein, 25 aa, Homo sapiens
MSLSENSVFAYESSVHSTNVLLSLN

SEQ ID NO: 39286 - protein, 25 aa, Homo sapiens
MSLSENSVFAYESSVHSTNVLLSLN

SEQ ID NO: 39287 - protein, 25 aa, Homo sapiens
MSLSENSVFAYESSVHSTNVLLSLN

SEQ ID NO: 39288 - protein, 841 aa, Homo sapiens
MSVDEKPDSPMYVYESTVHCTNILLGLNDQRKKDILCDVTLIVERKEFRAHRAVLAACSEYFWQALVGQTKNDLVVSLPEEVTARGFGPLLQFAYTAKLLLSRENIREVIRCAEFLRMHNLEDSCFSFLQTQLLNSEDGLFVCRKDAACQRPHEDCENSAGEEEDEEEETMDSETAKMACPRDQMLPEPISFEAAAIPVAEKEEALLPEPDVPTDTKESSEKDALTQYPRYKKYQLACTKNVYNASSHSTSGFASTFREDNSSNSLKPGLARGQIKSEPPSEENEEESITLCLSGDEPDAKDRAGDVEMDRKQPSPAPTPTAPAGAACLERSRSVASPSCLRSLFSITKSVELSGLPSTSQQHFARSPACPFDKGITQGDLKTDYTPFTGNYGQPHVGQKEVSNFTMGSPLRGPGLEALCKQEGELDRRSVIFSSSACDQVSTSVHSYSGVSSLDKDLSEPVPKGLWVGAGQSLPSSQAYSHGGLMADHLPGRMRPNTSCPVPIKVCPRSPPLETRTRTSSSCSSYSYAEDGSGGSPCSLPLCEFSSSPCSQGARFLATEHQEPGLMGDGMYNQVRPQIKCEQSYGTNSSDESGSFSEADSESCPVQDRGQEVKLPFPVDQITDLPRNDFQMMIKMHKLTSEQLEFIHDVRRRSKNRIAAQRCRKRKLDCIQNLECEIRKLVCEKEKLLSERNQLKACMGELLDNFSCLSQEVCRDIQSPEQIQALHRYCPVLRPMDLPTASSINPAPLGAEQNIAASQCAVGENVPCCLEPGAAPPGPPWAPSNTSENCTSGRRLEGTDPGTFSERGPPLEPRSQTVTVDFCQEMTDKCTTDEQPRKDYT

SEQ ID NO: 39289 - protein, 841 aa, Homo sapiens; identical to SEQ ID NO: 39288

SEQ ID NO: 39290 - protein, 81 aa, Homo sapiens
MSVDEKPDSPMYVYESTVHCTNILLGLNDQRKKDILCDVTLIVERKEFRAHRAVLAACSEYFWQALVGQTKNDLVVSLPEE

SEQ ID NO: 39291 - protein, 81 aa, Homo sapiens; identical to SEQ ID NO: 39290

SEQ ID NO: 39292 - protein, 841 aa, Homo sapiens; identical to SEQ ID NO: 39288

SEQ ID NO: 39293 - protein, 158 aa, Homo sapiens
MSHGKGTDMLPEIAAAVGFLSSLLRTRGCVSEQRLKVFSGALQEALTEHYKHHWFPEKPSKGSGYRCIRINHKMDPIISRVASQIGLSQPQLHQLLPSELTLWVDPYEVSYRIGEDGSICVLYEEAPLAASCGLLTCKNQVLLGRSSPSKNYVMAVSS

SEQ ID NO: 39294 - protein, 1085 aa, Homo sapiens
MDTPENVLQMLEAHMQSYKGNDPLGEWERYIQWVEENFPENKEYLITLLEHLMKEFLDKKKYHNDPRFISYCLKFAEYNSDLHQFFEFLYNHGIGTLSSPLYIAWAGHLEAQGELQHASAVLQRGIQNQAEPREFLQQQYRLFQTRLTETHLPAQARTSEPLHNVQVLNQMITSKSNPGNNMACISKNQGSELSGVISSACDKESNMERRVITISKSEYSVHSSLASKVDVEQVVMYCKEKLIRGESEFSFEELRAQKYNQRRKHEQWVNEDRHYMKRKEANAFEEQLLKQKMDELHKKLHQVVETSHEDLPASQERSEVNPARMGPSVGSQQELRAPCLPVTYQQTPVNMEKNPREAPPVVPPLANAISAALVSPATSQSIAPPVPLKAQTVTDSMFAVASKDAGCVNKSTHEFKPQSGAEIKEGCETHKVANTSSFHTTPNTSLGMVQATPSKVQPSPTVHTKEALGFIMNMFQAPTLPDISDDKDEWQSLDQNEDAFEAQFQKNVRSSGAWGVNKIISSLSSAFHVFEDGNKENYGLPQPKNKPTGARTFGERSVSRLPSKPKEEVPHAEEFLDDSTVWGIRCNKTLAPSPKSPGDFTSAAQLASTPFHKLPVESVHILEDKENVVAKQCTQATLDSCEENMVVPSRDGKFSPIQEKSPKQALSSHMYSASLLRLSQPAAGGVLTCEAELGVEACRLTDTDAAIAEDPPDAIAGLQAEWMQMSSLGTVDAPNFIVGNPWDDKLIFKLLSGLSKPVSSYPNTFEWQCKLPAIKPKTEFQLGSKLVYVHHLLGEGAFAQVYEATQGDLNDAKNKQKFVLKVQKPANPWEFYIGTQLMERLKPSMQHMFMKFYSAHLFQNGSVLVGELYSYGTLLNAINLYKNTPEKVMPQGLVISFAMRMLYMIEQVHDCEIIHGDIKPDNFILGNGFLEQDDEDDLSAGLALIDLGQSIDMKLFPKGTIFTAKCETSGFQCVEMLSNKPWNYQIDYFGVAATVYCMLFGTYMKVKNEGGECKPEGLFRRLPHLDMWNEFFHVMLNIPDCHHLPSLDLLRQKLKKVFQQHYTNKIRALRNRLIVLLLECKRSRK

SEQ ID NO: 39295 - protein, 1028 aa, Homo sapiens
MDTPENVLQMLEAHMQSYKGNDPLGEWERYIQWVEENFPENKEYLITLLEHLMKEFLDKKKYHNDPRFISYCLKFAEYNSDLHQFFEFLYNHGIGTLSSPLYIAWAGHLEAQGELQHASAVLQRGIQNQAEPREFLQQQYRLFQTRLTETHLPAQARTSEPLHNVQVLNQMITSKSNPGNNMACISKNQGSELSGVISSACDKESNMERRVITISKSEYSVHSSLASKVDVEQVVMYCKEKLIRGESEFSFEELRAQKYNQRRKHEQWVNEDRHYMKRKEANAFEEQLLKQKMDELHKKLHQVVETSHEDLPASQERSEVNPARMGPSVGSQQELRAPCLPVTYQQTPVNMEKNPREAPPVVPPLANAISAALVSPATSQSIAPPVPLKAQTVTDSMFAVASKDAGCVNKSTHEFKPQSGAEIKEGCETHKVANTSSFHTTPNTSLGMVQATPSKVQPSPTVHTKEALGFIMNMFQAPTLPDISDDKDEWQSLDQNEDAFEAQFQKNVRSSGAWGVNKIISSLSSAFHVFEDGNKENYGLPQPKNKPTGARTFGERSVSRLPSKPKEEVPHAEEFLDDSTVWGIRCNKTLAPSPKSPGDFTSAAQLASTPFHKLPVESVHILEDKENVVAKQCTQATLDSCEENMVVPSRDGKFSPIQEKSPKQALSSHMYSASLLRLSQPAAGGVLTCEAELGVEACRLTDTDAAIAEDPPDAIAGLQAEWMQMSSLGTVDAPNFIVGNPWDDKLIFKLLSGLSKPVSSYPNTFEWQCKLPAIKPKTEFQLGSKLVYVHHLLGEGAFAQVYEATQGDLNDAKNKQKFVLKVQKPANPWEFYIGTQLMERLKPSMQHMFMKFYSAHLFQNGSVLVGELYSYGTLLDDEDDLSAGLALIDLGQSIDMKLFPKGTIFTAKCETSGFQCVEMLSNKPWNYQIDYFGVAATVYCMLFGTYMKVKNEGGECKPEGLFRRLPHLDMWNEFFHVMLNIPDCHHLPSLDLLRQKLKKVFQQHYTNKIRALRNRLIVLLLECKRSRK

SEQ ID NO: 39296 - protein, 1065 aa, Homo sapiens
MDTPENVLQYIQWVEENFPENKEYLITLLEHLMKEFLDKKKYHNDPRFISYCLKFAEYNSDLHQFFEFLYNHGIGTLSSPLYIAWAGHLEAQGELQHASAVLQRGIQNQAEPREFLQQQYRLFQTRLTETHLPAQARTSEPLHNVQVLNQMITSKSNPGNNMACISKNQGSELSGVISSACDKESNMERRVITISKSEYSVHSSLASKVDVEQVVMYCKEKLIRGESEFSFEELRAQKYNQRRKHEQWVNEDRHYMKRKEANAFEEQLLKQKMDELHKKLHQVVETSHEDLPASQERSEVNPARMGPSVGSQQELRAPCLPVTYQQTPVNMEKNPREAPPVVPPLANAISAALVSPATSQSIAPPVPLKAQTVTDSMFAVASKDAGCVNKSTHEFKPQSGAEIKEGCETHKVANTSSFHTTPNTSLGMVQATPSKVQPSPTVHTKEALGFIMNMFQAPTLPDISDDKDEWQSLDQNEDAFEAQFQKNVRSSGAWGVNKIISSLSSAFHVFEDGNKENYGLPQPKNKPTGARTFGERSVSRLPSKPKEEVPHAEEFLDDSTVWGIRCNKTLAPSPKSPGDFTSAAQLASTPFHKLPVESVHILEDKENVVAKQCTQATLDSCEENMVVPSRDGKFSPIQEKSPKQALSSHMYSASLLRLSQPAAGGVLTCEAELGVEACRLTDTDAAIAEDPPDAIAGLQAEWMQMSSLGTVDAPNFIVGNPWDDKLIFKLLSGLSKPVSSYPNTFEWQCKLPAIKPKTEFQLGSKLVYVHHLLGEGAFAQVYEATQGDLNDAKNKQKFVLKVQKPANPWEFYIGTQLMERLKPSMQHMFMKFYSAHLFQNGSVLVGELYSYGTLLNAINLYKNTPEKVMPQGLVISFAMRMLYMIEQVHDCEIIHGDIKPDNFILGNGFLEQDDEDDLSAGLALIDLGQSIDMKLFPKGTIFTAKCETSGFQCVEMLSNKPWNYQIDYFGVAATVYCMLFGTYMKVKNEGGECKPEGLFRRLPHLDMWNEFFHVMLNIPDCHHLPSLDLLRQKLKKVFQQHYTNKIRALRNRLIVLLLECKRSRK

SEQ ID NO: 39297 - protein, 824 aa, Homo sapiens
MDTPENVLQMLEAHMQSYKGNDPLGEWERYIQWVEENFPENKEYLITLLEHLMKEFLDKKKYHNDPRFISYCLKFAEYNSDLHQFFEFLYNHGIGTLSSPLYIAWAGHLEAQGELQHASAVLQRGIQNQAEPREFLQQQYRLFQTRLTETHLPAQARTSEPLHNVQVLNQMITSKSNPGNNMACISKNQGSELSGVISSACDKESNMERRVITISKSEYSVHSSLASKVDVEQVVMYCKEKLIRGESEFSFEELRAQKYNQRRKHEQWVNEDRHYMKRKEANAFEEQLLKQKMDELHKKLHQVVETSHEDLPASQERSEVNPARMGPSVGSQQELRAPCLPVTYQQTPVNMEKNPREAPPVVPPLANAISAALVSPATSQSIAPPVPLKAQTVTDSMFAVASKDAGCVNKSTHEFKPQSGAEIKEGCETHKVANTSSFHTTPNTSLGMVQATPSKVQPSPTVHTKEALGFIMNMFQAPTLPDISDDKDEWQSLDQNEDAFEAQFQKNVRSSGAWGVNKIISSLSSAFHVFEDGNKENYGLPQPKNKPTGARTFGERSVSRLPSKPKEEVPHAEEFLDDSTVWGIRCNKTLAPSPKSPGDFTSAAQLASTPFHKLPVESVHILEDKENVVAKQCTQATLDSCEENMVVPSRDGKFSPIQEKSPKQALSSHMYSASLLRLSQPAAGGVLTCEAELGVEACRLTDTDAAIAEDPPDAIAGLQAEWMQMSSLGTVDAPNFIVGNPWDDKLIFKLLSGLSKPVSSYPNTFEWQCKLPAIKPKTEFQLGSKLVYVHHLLGEGAFAQVYEATQGDLNDAKNKQKFVLKVKS

SEQ ID NO: 39298 - protein, 326 aa, Homo sapiens
MTGSNEFKLNQPPEDGISSVKFSPNTSQFLLVSSWDTSVRLYDVPANSMRLKYQHTGAVLDCAFYDPTHAWSGGLDHQLKMHDLNTDQENLVGTHDAPIRCVEYCPEVNVMVTGSWDQTVKLWDPRTPCNAGTFSQPEKVYTLSVSGDRLIVGTAGRRVLVWDLRNMGYVQQRRESSLKYQTRCIRAFPNKQGYVLSSIEGRVAVEYLDPSPEVQKKKYAFKCHRLKENNIEQIYPVNAISFHNIHNTFATGGSDGFVNIWDPFNKKRLCQFHRYPTSIASLAFSNDGTTLAIASSYMYEMDDTEHPEDGIFIRQVTDAETKPKST

SEQ ID NO: 39299 - protein, 328 aa, Homo sapiens
MTGSNEFKLNQPPEDGISSVKFSPNTSQFLLVSSWDTSVRLYDVPANSMRLKYQHTGAVLDCAFYDPTHAWSGGLDHQLKMHDLNTDQENLVGTHDAPIRCVEYCPEVNVMVTGSWDQTVKLWDPRTPCNAGTFSQPEKVYTLSVSGDRLIVGTAGRRVLVWDLRNMGYVQQRRESSLKYQTRCIRAFPNKQGYVLSSIEGRVAVEYLDPSPEVQKKKYAFKCHRLKENNIEQIYPVNAISFHNIHNTFATGGSDGFVNIWDPFNKKRLCQFHRYPTSIASLAFSNDGTTLAIASSYMYEMDDTEHPEDGIFIRQVTDAETKPKSPCT

SEQ ID NO: 39300 - protein, 248 aa, Homo sapiens
MHDLNTDQENLVGTHDAPIRCVEYCPEVNVMVTGSWDQTVKLWDPRTPCNAGTFSQPEKVYTLSVSGDRLIVGTAGRRVLVWDLRNMGYVQQRRESSLKYQTRCIRAFPNKQGYVLSSIEGRVAVEYLDPSPEVQKKKYAFKCHRLKENNIEQIYPVNAISFHNIHNTFATGGSDGFVNIWDPFNKKRLCQFHRYPTSIASLAFSNDGTTLAIASSYMYEMDDTEHPEDGIFIRQVTDAETKPKSPCT

SEQ ID NO: 39301 - protein, 387 aa, Homo sapiens
MACTIQKAEALDGAHLMQILWYDEEESLYPAVWLRDNCPCSDCYLDSAKARKLLVEALDVNIGIKGLIFDRKKVYITWPDEHYSEFQADWLKKRCFSKQARAKLQRELFFPECQYWGSELQLPTLDFEDVLRYDEHAYKWLSTLKKVGIVRLTGASDKPGEVSKLGKRMGFLYLTFYGHTWQVQDKIDANNVAYTTGKLSFHTDYPALHHPPGVQLLHCIKQTVTGGDSEIVDGFNVCQKLKKNNPQAFQILSSTFVDFTDIGVDYCDFSVQSKHKIIELDDKGQVVRINFNNATRDTIFDVPVERVQPFYAALKEFVDLMNSKESKFTFKMNPGDVITFDNWRLLHGRRSYEAGTEISRHLEGAYADWDVVMSRLRILRQRVENGN

SEQ ID NO: 39302 - protein, 387 aa, Homo sapiens; identical to SEQ ID NO: 39301

SEQ ID NO: 39303 - protein, 387 aa, Homo sapiens; identical to SEQ ID NO: 39301

SEQ ID NO: 39304 - protein, 387 aa, Homo sapiens; identical to SEQ ID NO: 39301

SEQ ID NO: 39305 - protein, 68 aa, Homo sapiens
MACTIQKAEALDGAHLMQILWYDEEESLYPAVWLRDNCPCSDCYLDSAKARKLLVEALDVNIGIKGLI

SEQ ID NO: 39306 - protein, 256 aa, Homo sapiens
MEPAAALHFSLPASLLLLLLLLLLSLCALVSAQFTVVGPANPILAMVGENTTLRCHLSPEKNAEDMEVRWFRSQFSPAVFVYKGGRERTEEQMEEYRGRITFVSKDINRGSVALVIHNVTAQENGIYRCYFQEGRSYDEAILRLVVAESFMPSASPWMVALAVILTASPWMVSMTVILAVFIIFMAVSICCIKKLQREKKILSGEKKVEQEEKEIAQQLQEELRWRRTFLHAGYELPGIRGPSWKRPLHGEPPSAF

SEQ ID NO: 39307 - protein, 313 aa, Homo sapiens
MEPAAALHFSLPASLLLLLLLLLLSLCALVSESFMPSASPWMVALAVILTASPWMVSMTVILAVFIIFMAVSICCIKKLQREKKILSGEKKVEQEEKEIAQQLQEELRWRRTFLHAADVVLDPDTAHPELFLSEDRRSVRRGPYRQRVPDNPERFDSQPCVLGWESFASGKHYWEVEVENVMVWTVGVCRHSVERKGEVLLIPQNGFWTLEMFGNQYRALSSPERILPLKESLCRVGVFLDYEAGDVSFYNMRDRSHIYTCPRSAFTVPVRPFFRLGSDDSPIFICPALTGASGVMVPEEGLKLHRVGTHQSL

SEQ ID NO: 39308 - protein, 535 aa, Homo sapiens
MVGEDADLPCHLFPTMSAETMELRWVSSSLRQVVNVYADGKEVEDRQSAPYRGRTSILRDGITAGKAALRIHNVTASDSGKYLCYFQDGDFYEKALVELKVAALGSDLHIEVKGYEDGGIHLECRSTGWYPQPQIKWSDTKGENIPAVEAPVVADGVGLYAVAASVIMRGSSGGGVSCIIRNSLLGLEKTASISIADPFFRSAQPWIAALAGTLPISLLLLAGASYFLWRQQKEKIALSRETEREREMKEMGYAATEQEISLREWRKIQYMARGEKSLAYHEWKMALFKPADVILDPDTANAILLVSEDQRSVQRAEEPRDLPDNPERFEWRYCVLGCENFTSGRHYWEVEVGDRKEWHIGVCSKNVERKKGWVKMTPENGYWTMGLTDGNKYRALTEPRTNLKLPEPPRKVGIFLDYETGEISFYNATDGSHIYTFPHASFSEPLYPVFRILTLEPTALTICPIPKEVESSPDPDLVPDHSLETPLTPGLANESGEPQAEVTSLLLPAHPGAEVSPSATTNQNHKLQARTEALY

SEQ ID NO: 39309 - protein, 526 aa, Homo sapiens
MAVFPSSGLPRCLLTLILLQLPKLDSAPFDVIGPPEPILAVVGEDAELPCRLSPNASAEHLELRWFRKKVSPAVLVHRDGREQEAEQMPEYRGRATLVQDGIAKGRVALRIRGVRVSDDGEYTCFFREDGSYEEALVHLKVAALGSDPHISMQVQENGEICLECTSVGWYPEPQVQWRTSKGEKFPSTSESRNPDEEGLFTVAASVIIRDTSAKNVSCYIQNLLLGQEKKVEISIPASSLPRLTPWIVAVAVILMVLGLLTIGSIFFTWRLYNERPRERRNEFSSKERLLEELKWKKATLHAVDVTLDPDTAHPHLFLYEDSKSVRLEDSRQKLPEKTERFDSWPCVLGRETFTSGRHYWEVEVGDRTDWAIGVCRENVMKKGFDPMTPENGFWAVELYGNGYWALTPLRTPLPLAGPPRRVGIFLDYESGDISFYNMNDGSDIYTFSNVTFSGPLRPFFCLWSSGKKPLTICPIADGPERVTVIANAQDLSKEIPLSPMGEDSAPRDADTLHSKLIPTQPSQGAP

SEQ ID NO: 39310 - protein, 494 aa, Homo sapiens
MAVFPSSGLPRCLLTLILLQLPKLDSAPFDVIGPPEPILAVVGEDAELPCRLSPNASAEHLELRWFRKKVSPAVLVHRDGREQEAEQMPEYRGRATLVQDGIAKGRVALRIRGVRVSDDGEYTCFFREDGSYEEALVHLKVAALGSDPHISMQVQENGEICLECTSVGWYPEPQVQWRTSKGEKFPSTSESRNPDEEGLFTVAASVIIRDTSAKNVSCYIQNLLLGQEKKVEISIPASSLPRLTPWIVAVAVILMVLGLLTIGSIFFTWRLYNERPRERRNEFSSKERLLEELKWKKATLHAVDVTLDPDTAHPHLFLYEDSKSVRLEDSRQKLPEKTERFDSWPCVLGRETFTSGRHYWEVEVGDRTDWAIGVCRENVMKKGFDPMTPENGFWAVELYGNGYWALTPLRTPLPLAGPPRRVGIFLDYESGDISFYNMNDGSDIYTFSNVTVIANAQDLSKEIPLSPMGEDSAPRDADTLHSKLIPTQPSQGAP

SEQ ID NO: 39311 - protein, 529 aa, Homo sapiens
MESAAALHFSRPASLLLLLLSLCALVSAQFIVVGPTDPILATVGENTTLRCHLSPEKNAEDMEVRWFRSQFSPAVFVYKGGRERTEEQMEEYRGRTTFVSKDISRGSVALVIHNITAQENGTYRCYFQEGRSYDEAILHLVVAGLGSKPLISMRGHEDGGIRLECISRGWYPKPLTVWRDPYGGVAPALKEVSMPDADGLFMVTTAVIIRDKSVRNMSCSINNTLLGQKKESVIFIPESFMPSVSPPIAVCIYWINKLQKEKKILSGEKEFERETREIALKELEKERVQKEEELQVKEKLQEELRWRRTFLHAVDVVLDPDTAHPDLFLSEDRRSVRRCPFRHLGESVPDNPERFDSQPCVLGRESFASGKHYWEVEVENVIEWTVGVCRDSVERKGEVLLIPQNGFWTLEMHKGQYRAVSSPDRILPLKESLCRVGVFLDYEAGDVSFYNMRDRSHIYTCPRSAFSGPDTSQSGDPPEPIESIPWSHSHVDKPWSSQQPPHNTHLPAASFTPTTDLSPSFLLLTRLCF

SEQ ID NO: 39312 - protein, 527 aa, Homo sapiens
MESAAALHFSRPASLLLLLLSLCALVSAQFIVVGPTDPILATVGENTTLRCHLSPEKNAEDMEVRWFRSQFSPAVFVYKGGRERTEEQMEEYRGRTTFVSKDISRGSVALVIHNITAQENGTYRCYFQEGRSYDEAILHLVVAGLGSKPLISMRGHEDGGIRLECISRGWYPKPLTVWRDPYGGVAPALKEVSMPDADGLFMVTTAVIIRDKSVRNMSCSINNTLLGQKKESVIFIPESFMPSVSPCAVALPIIVVILMIPIAVCIYWINKLQKEKKILSGEKEFERETREIALKELEKERVQKEEELQVKEKLQEELRWRRTFLHAVDVVLDPDTAHPDLFLSEDRRSVRRCPFRHLGESVPDNPERFDSQPCVLGRESFASGKHYWEVEVENVIEWTVGVCRDSVERKGEVLLIPQNGFWTLEMHKGQYRAVSSPDRILPLKESLCRVGVFLDYEAGDVSFYNMRDRSHIYTCPRSAFSVPVRPFFRLGCEDSPIFICPALTGANGVTVPEEGLTLHRVGTHQSL

SEQ ID NO: 39313 - protein, 334 aa, Homo sapiens
MESAAALHFSRPASLLLLLLSLCALVSAQFIVVGPTDPILATVGENTTLRCHLSPEKNAEDMEVRWFRSQFSPAVFVYKGGRERTEEQMEEYRGRTTFVSKDISRGSVALVIHNITAQENGTYRCYFQEGRSYDEAILHLVVAGLGSKPLISMRGHEDGGIRLECISRGWYPKPLTVWRDPYGGVAPALKEVSMPDADGLFMVTTAVIIRDKSVRNMSCSINNTLLGQKKESVIFIPESFMPSVSPCAVALPIIVVILMIPIAVCIYWINKLQKEKKILSGEKEFERETREIALKELEKERVQKEEELQVKEKLQEELRWRRTFLHAELQFFSN

SEQ ID NO: 39314 - protein, 330 aa, Homo sapiens
MESAAALHFSRPASLLLLLLSLCALVSAQFIVVGPTDPILATVGENTTLRCHLSPEKNAEDMEVRWFRSQFSPAVFVYKGGRERTEEQMEEYRGRTTFVSKDISRGSVALVIHNITAQENGTYRCYFQEGRSYDEAILHLVVAGLGSKPLISMRGHEDGGIRLECISRGWYPKPLTVWRDPYGGVAPALKEVSMPDADGLFMVTTAVIIRDKSVRNMSCSINNTLLGQKKESVIFIPESFMPSVSPCAVALPIIVVILMIPIAVCIYWINKLQKEKKILSGEKEFERETREIALKELEKERVQKEEELQVKEKLQEELRWRRTFLHAGPV

SEQ ID NO: 39315 - protein, 466 aa, Homo sapiens
MEVRWFRSQFSPAVFVYKGGRERTEEQMEEYRGRTTFVSKDISRGSVALVIHNITAQENGTYRCYFQEGRSYDEAILHLVVAGLGSKPLISMRGHEDGGIRLECISRGWYPKPLTVWRDPYGGVAPALKEVSMPDADGLFMVTTAVIIRDKSVRNMSCSINNTLLGQKKESVIFIPESFMPSVSPCAVALPIIVVILMIPIAVCIYWINKLQKEKKILSGEKEFERETREIALKELEKERVQKEEELQVKEKLQEELRWRRTFLHAVDVVLDPDTAHPDLFLSEDRRSVRRCPFRHLGESVPDNPERFDSQPCVLGRESFASGKHYWEVEVENVIEWTVGVCRDSVERKGEVLLIPQNGFWTLEMHKGQYRAVSSPDRILPLKESLCRVGVFLDYEAGDVSFYNMRDRSHIYTCPRSAFSVPVRPFFRLGCEDSPIFICPALTGANGVTVPEEGLTLHRVGTHQSL

SEQ ID NO: 39316 - protein, 407 aa, Homo sapiens
MEPAAALHFSLPASLLLLLLLLLLSLCALVSGLGSKPLIEIKAQEDGSIWLECISGGWYPEPLTVWRDPYGEVVPALKEVSIADADGLFMVTTAVIIRDKYVRNVSCSVNNTLLGQEKETVIFIPESFMPSASPWMVALAVILTASPWMVSMTVILAVFIIFMAVSICCIKKLQREKKILSGEKKVEQEEKEIAQQLQEELRWRRTFLHAADVVLDPDTAHPELFLSEDRRSVRRGPYRQRVPDNPERFDSQPCVLGWESFASGKHYWEVEVENVMVWTVGVCRHSVERKGEVLLIPQNGFWTLEMFGNQYRALSSPERILPLKESLCRVGVFLDYEAGDVSFYNMRDRSHIYTCPRSAFTVPVRPFFRLGSDDSPIFICPALTGASGVMVPEEGLKLHRVGTHQSL

SEQ ID NO: 39317 - protein, 523 aa, Homo sapiens
MEPAAALHFSLPASLLLLLLLLLLSLCALVSAQFTVVGPANPILAMVGENTTLRCHLSPEKNAEDMEVRWFRSQFSPAVFVYKGGRERTEEQMEEYRGRITFVSKDINRGSVALVIHNVTAQENGIYRCYFQEGRSYDEAILRLVVAGLGSKPLIEIKAQEDGSIWLECISGGWYPEPLTVWRDPYGEVVPALKEVSIADADGLFMVTTAVIIRDKYVRNVSCSVNNTLLGQEKETVIFIPESFMPSASPWMVALAVILTASPWMVSMTVILAVFIIFMAVSICCIKKLQREKKILSGEKKVEQEEKEIAQQLQEELRWRRTFLHAADVVLDPDTAHPELFLSEDRRSVRRGPYRQRVPDNPERFDSQPCVLGWESFASGKHYWEVEVENVMVWTVGVCRHSVERKGEVLLIPQNGFWTLEMFGNQYRALSSPERILPLKESLCRVGVFLDYEAGDVSFYNMRDRSHIYTCPRSAFTVPVRPFFRLGSDDSPIFICPALTGASGVMVPEEGLKLHRVGTHQSL

SEQ ID NO: 39318 - protein, 523 aa, Homo sapiens; identical to SEQ ID NO: 39317

SEQ ID NO: 39319 - protein, 336 aa, Homo sapiens
MEPAAALHFSLPASLLLLLLLLLLSLCALVSAQFTVVGPANPILAMVGENTTLRCHLSPEKNAEDMEVRWFRSQFSPAVFVYKGGRERTEEQMEEYRGRITFVSKDINRGSVALVIHNVTAQENGIYRCYFQEGRSYDEAILRLVVAGLGSKPLIEIKAQEDGSIWLECISGGWYPEPLTVWRDPYGEVVPALKEVSIADADGLFMVTTAVIIRDKYVRNVSCSVNNTLLGQEKETVIFIPESFMPSASPWMVALAVILTASPWMVSMTVILAVFIIFMAVSICCIKKLQREKKILSGEKKVEQEEKEIAQQLQEELRWRRTFLHADVNLTGLRNT

SEQ ID NO: 39320 - protein, 110 aa, Homo sapiens
MEPAAALHFSLPASLLLLLLLLLLSLCALVSGLGSKPLIEIKAQEDGSIWLECISGGWYPEPLTVWRDPYGEVVPALKEVSIADADGLFMVTTAVIIRDKYVRNVSCSVN

SEQ ID NO: 39321 - protein, 184 aa, Homo sapiens
MEPAAALHFSLPASLLLLLLLLLLSLCALVSGLGSKPLIEIKAQEDGSIWLECISGGWYPEPLTVWRDPYGEVVPALKEVSIADADGLFMVTTAVIIRDKYVRNVSCSVNNTLLGQEKETVIFIPESFMPSASPWMVALAVILTASPWMVSMTVILAVFIIFMAVSICCIKKLQREKKILSGEK

SEQ ID NO: 39322 - protein, 239 aa, Homo sapiens
MEPAAALHFSLPASLLLLLLLLLLSLCALVSAQFTVVGPANPILAMVGENTTLRCHLSPEKNAEDMEVRWFRSQFSPAVFVYKGGRERTEEQMEEYRGRITFVSKDINRGSVALVIHNVTAQENGIYRCYFQEGRSYDEAILRLVVAGLGSKPLIEIKAQEDGSIWLECISGGWYPEPLTVWRDPYGEVVPALKEVSIADADGLFMVTTAVIIRDKYVRNVSCSVNNTLLGQEKETVIF

SEQ ID NO: 39323 - protein, 96 aa, Homo sapiens
MEPAAALHFSLPASLLLLLLLLLLSLCALVSAQFTVVGPANPILAMVGENTTLRCHLSPEKNAEDMEVRWFRSQFSPAVFVYKGGRERTEEQMEEY

SEQ ID NO: 39324 - protein, 513 aa, Homo sapiens
MKMASFLAFLLLNFRVCLLLLQLLMPHSAQFSVLGPSGPILAMVGEDADLPCHLFPTMSAETMELKWVSSSLRQVVNVYADGKEVEDRQSAPYRGRTSILRDGITAGKAALRIHNVTASDSGKYLCYFQDGDFYEKALVELKVAALGSDLHVDVKGYKDGGIHLECRSTGWYPQPQIQWSNNKGENIPTVEAPVVADGVGLYAVAASVIMRGSSGEGVSCTIRSSLLGLEKTASISIADPFFRSAQRWIAALAGTLPVLLLLLGGAGYFLWQQQEEKKTQFRKKKREQELREMAWSTMKQEQSTRVKLLEELRWRSIQYASRGERHSAYNEWKKALFKPADVILDPKTANPILLVSEDQRSVQRAKEPQDLPDNPERFNWHYCVLGCESFISGRHYWEVEVGDRKEWHIGVCSKNVQRKGWVKMTPENGFWTMGLTDGNKYRTLTEPRTNLKLPKPPKKVGVFLDYETGDISFYNAVDGSHIHTFLDVSFSEALYPVFRILTLEPTALTICPA

SEQ ID NO: 39325 - protein, 461 aa, Homo sapiens
MKMASFLAFLLLNFRVCLLLLQLLMPHSAQFSVLGPSGPILAMVGEDADLPCHLFPTMSAETMELKWVSSSLRQVVNVYADGKEVEDRQSAPYRGRTSILRDGITAGKAALRIHNVTASDSGKYLCYFQDGDFYEKALVELKVADGVGLYAVAASVIMRGSSGEGVSCTIRSSLLGLEKTASISIADPFFRSAQRWIAALAGTLPVLLLLLGGAGYFLWQQQEEKKTQFRKKKREQELREMAWSTMKQEQSTRVKLLEELRWRSIQYASRGERHSAYNEWKKALFKPADVILDPKTANPILLVSEDQRSVQRAKEPQDLPDNPERFNWHYCVLGCESFISGRHYWEVEVGDRKEWHIGVCSKNVQRKGWVKMTPENGFWTMGLTDGNKYRTLTEPRTNLKLPKPPKKVGVFLDYETGDISFYNAVDGSHIHTFLDVSFSEALYPVFRILTLEPTALTICPA

SEQ ID NO: 39326 - protein, 378 aa, Homo sapiens
MKMASFLAFLLLNFRVCLLLLQLLMPHSAQFSVLGPSGPILAMVGEDADLPCHLFPTMSAETMELKWVSSSLRQVVNVYADGKEVEDRQSAPYRGRTSILRDGITAGKAALRIHNVTASDSGKYLCYFQDGDFYEKALVELKVAALGSDLHVDVKGYKDGGIHLECRSTGWYPQPQIQWSNNKGENIPTVEAPVVADGVGLYAVAASVIMRGSSGEGVSCTIRSSLLGLEKTASISIADPFFRSAQRWIAALAGTLPVLLLLLGGAGYFLWQQQEEKKTQFRKKKREQELREMAWSTMKQEQSTRVKLLEELRWRSIQYASRGERHSAYNEWKKALFKPGPPIGQTQQQTRGQGSPVALSQESAQRTDSWGPEEGGES

SEQ ID NO: 39327 - protein, 43 aa, Homo sapiens
MKMASFLAFLLLNFRVCLLLLQLLMPHSAQFSVLGPSGPILAM

SEQ ID NO: 39328 - protein, 119 aa, Homo sapiens
MKMASFLAFLLLNFRVCLLLLQLLMPHSAQFSVLGPSGPILAMVGEDADLPCHLFPTMSAETMELKWVSSSLRQVVNVYADGKEVEDRQSAPYRGRTSILRDGITAGKAALRIHNVTAS

SEQ ID NO: 39329 - protein, 352 aa, Homo sapiens
MKMASFLAFLLLNFRVCLLLLQLLMPHSAQFSVLGPSGPILAMVGEDADLPCHLFPTMSAETMELKWVSSSLRQVVNVYADGKEVEDRQSAPYRGRTSILRDGITAGKAALRIHNVTASDSGKYLCYFQDGDFYEKALVELKVAALGSDLHVDVKGYKDGGIHLECRSTGWYPQPQIQWSNNKGENIPTVEAPVVADGVGLYAVAASVIMRGSSGEGVSCTIRSSLLGLEKTASISIADPFFRSAQRWIAALAGTLPVLLLLLGGAGYFLWQQQEEKKTQFRKKKREQELREMAWSTMKQEQSTRVKLLEELRWRSIQYASRGERHSAYNEWKKALFKPGEEMLQMRLHFVK

SEQ ID NO: 39330 - protein, 92 aa, Homo sapiens
MKMASFLAFLLLNFRVCLLLLQLLMPHSAQFSVLGPSGPILAMVGEDADLPCHLFPTMSAETMELKWVSSSLRQVVNVYADGKEVEDRQSAP

SEQ ID NO: 39331 - protein, 334 aa, Homo sapiens
MKMASSLAFLLLNFHVSLLLVQLLTPCSAQFSVLGPSGPILAMVGEDADLPCHLFPTMSAETMELKWVSSSLRQVVNVYADGKEVEDRQSAPYRGRTSILRDGITAGKAALRIHNVTASDSGKYLCYFQDGDFYEKALVELKVAALGSNLHVEVKGYEDGGIHLECRSTGWYPQPQIQWSNAKGENIPAVEAPVVADGVGLYEVAASVIMRGGSGEGVSCIIRNSLLGLEKTASISIADPFFRSAQPWIAALAGTLPILLLLLAGASYFLWRQQKEITALSSEIESEQEMKEMGYAATEREISLRESLQEELKRKKIQYLTRGEESSSDTNKSA

SEQ ID NO: 39332 - protein, 334 aa, Homo sapiens; identical to SEQ ID NO: 39331

SEQ ID NO: 39333 - protein, 311 aa, Homo sapiens
MGIPRAQFSVLGPSGPILAMVGEDADLPCHLFPTMSAETMELKWVSSSLRQVVNVYADGKEVEDRQSAPYRGRTSILRDGITAGKAALRIHNVTASDSGKYLCYFQDGDFYEKALVELKVAALGSNLHVEVKGYEDGGIHLECRSTGWYPQPQIQWSNAKGENIPAVEAPVVADGVGLYEVAASVIMRGGSGEGVSCIIRNSLLGLEKTASISIADPFFRSAQPWIAALAGTLPILLLLLAGASYFLWRQQKEITALSSEIESEQEMKEMGYAATEREISLRESLQEELKRKKIQYLTRGEESSSDTNKSA

SEQ ID NO: 39334 - protein, 334 aa, Homo sapiens; identical to SEQ ID NO: 39331

SEQ ID NO: 39335 - protein, 292 aa, Homo sapiens
MVGEDADLPCHLFPTMSAETMELKWVSSSLRQVVNVYADGKEVEDRQSAPYRGRTSILRDGITAGKAALRIHNVTASDSGKYLCYFQDGDFYEKALVELKVAALGSNLHVEVKGYEDGGIHLECRSTGWYPQPQIQWSNAKGENIPAVEAPVVADGVGLYEVAASVIMRGGSGEGVSCIIRNSLLGLEKTASISIADPFFRSAQPWIAALAGTLPILLLLLAGASYFLWRQQKEITALSSEIESEQEMKEMGYAATEREISLRESLQEELKRKKIQYLTRGEESSSDTNKSA

SEQ ID NO: 39336 - protein, 334 aa, Homo sapiens; identical to SEQ ID NO: 39331

SEQ ID NO: 39337 - protein, 319 aa, Homo sapiens
MKMASSLAFLLLNFHVSLLLVQLLTPCSAQFSVLGPSGPILAMVGEDADLPCHLFPTMSAETMELKWVSSSLRQVVNVYADGKEVEDRQSAPYRGRTSILRDGITAGKAALRIHNVTASDSGKYLCYFQDGDFYEKALVELKVAALGSNLHVEVKGYEDGGIHLECRSTGWYPQPQIQWSNAKGENIPAVEAPVVADGVGLYEVAASVIMRGGSGEGVSCIIRNSLLGLEKTASISIADPFFRSAQPWIAALAGTLPILLLLLAGASYFLWRQQKEITALSSEIESEQEMKEMGYAATEREISLRESLQEELKRKKSST

SEQ ID NO: 39338 - protein, 584 aa, Homo sapiens
MKMASSLAFLLLNFHVSLFLVQLLTPCSAQFSVLGPSGPILAMVGEDADLPCHLFPTMSAETMELRWVSSSLRQVVNVYADGKEVEDRQSAPYRGRTSILRDGITAGKAALRIHNVTASDSGKYLCYFQDGDFYEKALVELKVAALGSDLHIEVKGYEDGGIHLECRSTGWYPQPQIKWSDTKGENIPAVEAPVVADGVGLYAVAASVIMRGSSGGGVSCIIRNSLLGLEKTASISIADPFFRSAQPWIAALAGTLPISLLLLAGASYFLWRQQKEKIALSRETEREREMKEMGYAATEQEISLREKLQEELKWRKIQYMARGEKSLAYHEWKMALFKPADVILDPDTANAILLVSEDQRSVQRAEEPRDLPDNPERFEWRYCVLGCENFTSGRHYWEVEVGDRKEWHIGVCSKNVERKKGWVKMTPENGYWTMGLTDGNKYRALTEPRTNLKLPEPPRKVGIFLDYETGEISFYNATDGSHIYTFPHASFSEPLYPVFRILTLEPTALTICPIPKEVESSPDPDLVPDHSLETPLTPGLANESGEPQAEVTSLLLPAHPGAEVSPSATTNQNHKLQARTEALY

SEQ ID NO: 39339 - protein, 542 aa, Homo sapiens
MVGEDADLPCHLFPTMSAETMELRWVSSSLRQVVNVYADGKEVEDRQSAPYRGRTSILRDGITAGKAALRIHNVTASDSGKYLCYFQDGDFYEKALVELKVAALGSDLHIEVKGYEDGGIHLECRSTGWYPQPQIKWSDTKGENIPAVEAPVVADGVGLYAVAASVIMRGSSGGGVSCIIRNSLLGLEKTASISIADPFFRSAQPWIAALAGTLPISLLLLAGASYFLWRQQKEKIALSRETEREREMKEMGYAATEQEISLREKLQEELKWRKIQYMARGEKSLAYHEWKMALFKPADVILDPDTANAILLVSEDQRSVQRAEEPRDLPDNPERFEWRYCVLGCENFTSGRHYWEVEVGDRKEWHIGVCSKNVERKKGWVKMTPENGYWTMGLTDGNKYRALTEPRTNLKLPEPPRKVGIFLDYETGEISFYNATDGSHIYTFPHASFSEPLYPVFRILTLEPTALTICPIPKEVESSPDPDLVPDHSLETPLTPGLANESGEPQAEVTSLLLPAHPGAEVSPSATTNQNHKLQARTEALY

SEQ ID NO: 39340 - protein, 138 aa, Homo sapiens
MKMASSLAFLLLNFHVSLFLVQLLTPCSAQFSVLGPSGPILAMVGEDADLPCHLFPTMSAETMELRWVSSSLRQVVNVYADGKEVEDRQSAPYRGRTSILRDGITAGKAALRIHNVTASDSGKYLCYFQDGDFYEKAL

SEQ ID NO: 39341 - protein, 238 aa, Homo sapiens
MKMASSLAFLLLNFHVSLFLVQLLTPCSAQFSVLGPSGPILAMVGEDADLPCHLFPTMSAETMELRWVSSSLRQVVNVYADGKEVEDRQSAPYRGRTSILRDGITAGKAALRIHNVTASDSGKYLCYFQDGDFYEKALVELKVAALGSDLHIEVKGYEDGGIHLECRSTGWYPQPQIKWSDTKGENIPAVEAPVVADGVGLYAVAASVIMRGSSGGGVSCIIRNSLLGLEKTASISIA

SEQ ID NO: 39342 - protein, 455 aa, Homo sapiens
MVDFPGYNLSGAVASFLFILLTMKQSEDFRVIGPAHPILAGVGEDALLTCQLLPKRTTMHVEVRWYRSEPSTPVFVHRDGVEVTEMQMEEYRGWVEWIENGIAKGNVALKIHNIQPSDNGQYWCHFQDGNYCGETSLLLKVAGLGSAPSIHMEGPGESGVQLVCTARGWFPEPQVYWEDIRGEKLLAVSEHRIQDKDGLFYAEATLVVRNASAESVSCLVHNPVLTEEKGSVISLPEKLQTELASLKVNGPSQPILVRVGEDIQLTCYLSPKANAQSMEVRWDRSHRYPAVHVYMDGDHVAGEQMAEYRGRTVLVSDAIDEGRLTLQILSARPSDDGQYRCLFEKDDVYQEASLDLKVVSLGSSPLITVEGQEDGEMQPMCSSDGWFPQPHVPWRDMEGKTIPSSSQALTQGSHGLFHVQTLLRVTNISAVDVTCSISIPFLGEEKIATFSLSGW

SEQ ID NO: 39343 - protein, 388 aa, Homo sapiens
MVDFPGYNLSGAVASFLFILLTMKQSEDFRVIGPAHPILAGVGEDALLTCQLLPKRTTMHVEVRWYRSEPSTPVFVHRDGVEVTEMQMEEYRGWVEWIENGIAKGNVALKIHNIQPSDNGQYWCHFQDGNYCGETSLLLKVAEKLLAVLSSLKVNGPSQPILVRVGEDIQLTCYLSPKANAQSMEVRWDRSHRYPAVHVYMDGDHVAGEQMAEYRGRTVLVSDAIDEGRLTLQILSARPSDDGQYRCLFEKDDVYQEASLDLKVVSLGSSPLITVEGQEDGEMQPMCSSDGWFPQPHVPWRDMEGKTIPSSSQALTQGSHGLFHVQTLLRVTNISAVDVTCSISIPFLGEEKIATFSLSESRMTFLWKTLLVWGLLLAVAVGLPRKRS

SEQ ID NO: 39344 - protein, 245 aa, Homo sapiens
MVDFPGYNLSGAVASFLFILLTMKQSEKLQTELASLKVNGPSQPILVRVGEDIQLTCYLSPKANAQSMEVRWDRSHRYPAVHVYMDGDHVAGEQMAEYRGRTVLVSDAIDEGRLTLQILSARPSDDGQYRCLFEKDDVYQEASLDLKVVSLGSSPLITVEGQEDGEMQPMCSSDGWFPQPHVPWRDMEGKTIPSSSQALTQGSHGLFHVQTLLRVTNISAVDVTCSISIPFLGEEKIATFSLSGW

SEQ ID NO: 39345 - protein, 108 aa, Homo sapiens
MVDFPGYNLSGAVASFLFILLTMKQSDFRVIGPAHPILAGVGEDALLTCQLLPKRTTMHVEVRWYRSEPSTPVFVHRDGVEVTEMQMEEYRGWVEWIENGIAKGNVAL

SEQ ID NO: 39346 - protein, 259 aa, Homo sapiens
MVDFPGYNLSGAVASFLFILLTMKQSEDFRVIGPAHPILAGVGEDALLTCQLLPKRTTMHVEVRWYRSEPSTPVFVHRDGVEVTEMQMEEYRGWVEWIENGIAKGNVALKIHNIQPSDNGQYWCHFQDGNYCGETSLLLKVAGLGSAPSIHMEGPGESGVQLVCTARGWFPEPQVYWEDIRGEKLLAVSEHRIQDEDGLFYAEATLVVRNASAESVSCLVHNPVLTEEKGSVISLPEKLQTELGKYEVLAHTCGGSLCP

SEQ ID NO: 39347 - protein, 259 aa, Homo sapiens
MVDFPGYNLSGAVASFLFILLTMKQSEDFRVIGPAHPILAGVGEDALLTCQLLPKRTTMHVEVRWYRSEPSTPVFVHRDGVEVTEMQMEEYRGWVEWIENGIAKGNVALKIHNIQPSDNGQYWCHFQDGNYCGETSLLLKVAGLGSAPSIHMEGPGESGVQLVCTARGWFPEPQVYWEDIRGEKLLAVSEHRIQDKDGLFYAEATLVVRNASAESVSCLVHNPVLTEEKGSVISLPEKLQTELGKYEVLAHTCGGSLCP

SEQ ID NO: 39348 - protein, 211 aa, Homo sapiens
KANAQSMEVRWDRSHRYPAVHVYMDGDHVAGEQMAEYRGRTVLVSDAIDEGRLTLQILSARPSDDGQYRCLFEKDDVYQEASLDLKVVSLGSSPLITVEGQEDGEMQPMCSSDGWFPQPHVPWRDMEGKTIPSSSQALTQGSHGLFHVQTLLRVTNISAVDVTCSISIPFLGEEKIATFSLSESRMTFLWKTLLVWGLLLAVAVGLPRKRS

SEQ ID NO: 39349 - protein, 259 aa, Homo sapiens; identical to SEQ ID NO: 39347

SEQ ID NO: 39350 - protein, 108 aa, Homo sapiens; identical to SEQ ID NO: 39345

SEQ ID NO: 39351 - protein, 108 aa, Homo sapiens; identical to SEQ ID NO: 39345

SEQ ID NO: 39352 - protein, 211 aa, Homo sapiens
KANAQSMEVRWDRSHRYPAVHVYMDGDHVAGEQMAEYRGRTVLVSDAIDEGRLTLQILSARPSDDGQYRCLFEKDDVYQEASLDLKVVGLGSSPLITVEGQEDGEMQPMCSSDGWFPQPHVPWRDMEGKTIPSSSQALTQGSHGLFHVQTLLRVTNISAVDVTCSISIPFLGEEKIATFSLSESRMTFLWKTLLVWGLLLAVAVGLPRKRS

SEQ ID NO: 39353 - protein, 271 aa, Homo sapiens
MVDFPGYNLSGAVASFLFILLTMKQSEDFRVIGPAHPILAGVGEDALLTCQLLPKRTTMHVEVRWYRSEPSTPVFVHRDGVEVTEMQMEEYRGWVEWIENGIAKGNVALKIHNIQPSDNGQYWCHFQDGNYCGETSLLLKVAAVLRDDIIASLKVNGPSQPILVRVGEDIQLTCYLSPKANAQSMEVRWDRSHRYPAVHVYMDGDHVAGEQMAEYRGRTVLVSDAIDEGRLTLQILSARPSDDGQYRCLFEKDDVYQEASLDLKVVWVLPH

SEQ ID NO: 39354 - protein, 108 aa, Homo sapiens; identical to SEQ ID NO: 39345

SEQ ID NO: 39355 - protein, 259 aa, Homo sapiens; identical to SEQ ID NO: 39346

SEQ ID NO: 39356 - protein, 108 aa, Homo sapiens; identical to SEQ ID NO: 39345

SEQ ID NO: 39357 - protein, 211 aa, Homo sapiens; identical to SEQ ID NO: 39352

SEQ ID NO: 39358 - protein, 259 aa, Homo sapiens; identical to SEQ ID NO: 39346

SEQ ID NO: 39359 - protein, 259 aa, Homo sapiens; identical to SEQ ID NO: 39347

SEQ ID NO: 39360 - protein, 108 aa, Homo sapiens; identical to SEQ ID NO: 39345

SEQ ID NO: 39361 - protein, 259 aa, Homo sapiens; identical to SEQ ID NO: 39347

SEQ ID NO: 39362 - protein, 211 aa, Homo sapiens; identical to SEQ ID NO: 39352

SEQ ID NO: 39363 - protein, 211 aa, Homo sapiens; identical to SEQ ID NO: 39348

SEQ ID NO: 39364 - protein, 211 aa, Homo sapiens; identical to SEQ ID NO: 39348

SEQ ID NO: 39365 - protein, 108 aa, Homo sapiens; identical to SEQ ID NO: 39345

SEQ ID NO: 39366 - protein, 211 aa, Homo sapiens; identical to SEQ ID NO: 39348

SEQ ID NO: 39367 - protein, 482 aa, Homo sapiens
MVDFPGYNLSGAVASFLFILLTMKQSEDFRVIGPAHPILAGVGEDALLTCQLLPKRTTMHVEVRWYRSEPSTPVFVHRDGVEVTEMQMEEYRGWVEWIENGIAKGNVALKIHNIQPSDNGQYWCHFQDGNYCGETSLLLKVAGLGSAPSIHMEGPGESGVQLVCTARGWFPEPQVYWEDIRGEKLLAVSEHRIQDKDGLFYAEATLVVRNASAESVSCLVHNPVLTEEKGSVISLPEKLQTELASLKVNGPSQPILVRVGEDIQLTCYLSPKANAQSMEVRWDRSHRYPAVHVYMDGDHVAGEQMAEYRGRTVLVSDAIDEGRLTLQILSARPSDDGQYRCLFEKDDVYQEASLDLKVVSLGSSPLITVEGQEDGEMQPMCSSDGWFPQPHVPWRDMEGKTIPSSSQALTQGSHGLFHVQTLLRVTNISAVDVTCSISIPFLGEEKIATFSLSESRMTFLWKTLLVWGLLLAVAVGLPRKRS

SEQ ID NO: 39368 - protein, 245 aa, Homo sapiens
MVDFPGYNLSGAVASFLFILLTMKQSDRLDTPKASLKVNGPSQPILVRVGEDIQLTCYLSPKANAQSMEVRWDRSHRYPAVHVYMDGDHVAGEQMAEYRGRTVLVSDAIDEGRLTLQILSARPSDDGQYRCLFEKDDVYQEASLDLKVVSLGSSPLITVEGQEDGEMQPMCSSDGWFPQPHVPWRDMEGKTIPSSSQALTQGSHGLFHVQTLLRVTNISAVDVTCSISIPFLGEEKIATFSLSGW

SEQ ID NO: 39369 - protein, 178 aa, Homo sapiens
MEVRWDRSHRYPAVHVYMDGDHVAGEQMAEYRGRTVLVSDAIDEGRLTLQILSARPSDDGQYRCLFEKDDVYQEASLDLKVVSLGSSPLITVEGQEDGEMQPMCSSDGWFPQPHVPWRDMEGKTIPSSSQALTQGSHGLFHVQTLLRVTNISAVDVTCSISIPFLGEEKIATFSLSGW

SEQ ID NO: 39370 - protein, 388 aa, Homo sapiens; identical to SEQ ID NO: 39343

SEQ ID NO: 39371 - protein, 388 aa, Homo sapiens
MVDFPGYNLSGAVASFLFILLTMKQSEDFRVIGPAHPILAGVGEDALLTCQLLPKRTTMHVEVRWYRSEPSTPVFVHRDGVEVTEMQMEEYRGWVEWIENGIAKGNVALKIHNIQPSDNGQYWCHFQDGNYCGETSLLLKVAEKLLAVLSSLKVNGPSQPILVRVGEDIQLTCYLSPKANAQSMEVRWDRSHRYPAVHVYMDGDHVAGEQMAEYRGRTVLVSDAIDEGRLTLQILSARPSDDGQYRCLFEKDDVYQEASLDLKVVGLGSSPLITVEGQEDGEMQPMCSSDGWFPQPHVPWRDMEGKTIPSSSQALTQGSHGLFHVQTLLRVTNISAVDVTCSISIPFLGEEKIATFSLSESRMTFLWKTLLVWGLLLAVAVGLPRKRS

SEQ ID NO: 39372 - protein, 388 aa, Homo sapiens; identical to SEQ ID NO: 39343

SEQ ID NO: 39373 - protein, 245 aa, Homo sapiens
MVDFPGYNLSGAVASFLFILLTMKQSDRLDTPKASLKVNGPSQPILVRVGEDIQLTCYLSPKANAQSMEVRWDRSHRYPAVHVYMDGDHVAGEQMAEYRGRTVLVSDAIDEGRLTLQILSARPSDDGQYRCLFEKDDVYQEASLDLKVVGLGSSPLITVEGQEDGEMQPMCSSDGWFPQPHVPWRDMEGKTIPSSSQALTQGSHGLFHVQTLLRVTNISAVDVTCSISIPFLGEEKIATFSLSGW

SEQ ID NO: 39374 - protein, 245 aa, Homo sapiens; identical to SEQ ID NO: 39368

SEQ ID NO: 39375 - protein, 388 aa, Homo sapiens; identical to SEQ ID NO: 39343

SEQ ID NO: 39376 - protein, 271 aa, Homo sapiens; identical to SEQ ID NO: 39353

SEQ ID NO: 39377 - protein, 245 aa, Homo sapiens
MVDFPGYNLSGAVASFLFILLTMKQSEKLQTELASLKVNGPSQPILVRVGEDIQLTCYLSPKANAQSMEVRWDRSHRYPAVHVYMDGDHVAGEQMAEYRGRTVLVSDAIDEGRLTLQILSARPSDDGQYRCLFEKDDVYQEASLDLKVVGLGSSPLITVEGQEDGEMQPMCSSDGWFPQPHVPWRDMEGKTIPSSSQALTQGSHGLFHVQTLLRVTNISAVDVTCSISIPFLGEEKIATFSLSGW

SEQ ID NO: 39378 - protein, 178 aa, Homo sapiens
MEVRWDRSHRYPAVHVYMDGDHVAGEQMAEYRGRTVLVSDAIDEGRLTLQILSARPSDDGQYRCLFEKDDVYQEASLDLKVVGLGSSPLITVEGQEDGEMQPMCSSDGWFPQPHVPWRDMEGKTIPSSSQALTQGSHGLFHVQTLLRVTNISAVDVTCSISIPFLGEEKIATFSLSGW

SEQ ID NO: 39379 - protein, 245 aa, Homo sapiens; identical to SEQ ID NO: 39368

SEQ ID NO: 39380 - protein, 455 aa, Homo sapiens
MVDFPGYNLSGAVASFLFILLTMKQSEDFRVIGPAHPILAGVGEDALLTCQLLPKRTTMHVEVRWYRSEPSTPVFVHRDGVEVTEMQMEEYRGWVEWIENGIAKGNVALKIHNIQPSDNGQYWCHFQDGNYCGETSLLLKVAGLGSAPSIHMEGPGESGVQLVCTARGWFPEPQVYWEDIRGEKLLAVSEHRIQDEDGLFYAEATLVVRNASAESVSCLVHNPVLTEEKGSVISLPEKLQTELASLKVNGPSQPILVRVGEDIQLTCYLSPKANAQSMEVRWDRSHRYPAVHVYMDGDHVAGEQMAEYRGRTVLVSDAIDEGRLTLQILSARPSDDGQYRCLFEKDDVYQEASLDLKVVGLGSSPLITVEGQEDGEMQPMCSSDGWFPQPHVPWRDMEGKTIPSSSQALTQGSHGLFHVQTLLRVTNISAVDVTCSISIPFLGEEKIATFSLSGW

SEQ ID NO: 39381 - protein, 271 aa, Homo sapiens; identical to SEQ ID NO: 39353

SEQ ID NO: 39382 - protein, 271 aa, Homo sapiens; identical to SEQ ID NO: 39353

SEQ ID NO: 39383 - protein, 245 aa, Homo sapiens; identical to SEQ ID NO: 39368

SEQ ID NO: 39384 - protein, 271 aa, Homo sapiens; identical to SEQ ID NO: 39353

SEQ ID NO: 39385 - protein, 245 aa, Homo sapiens; identical to SEQ ID NO: 39373

SEQ ID NO: 39386 - protein, 245 aa, Homo sapiens; identical to SEQ ID NO: 39368

SEQ ID NO: 39387 - protein, 455 aa, Homo sapiens; identical to SEQ ID NO: 39342

SEQ ID NO: 39388 - protein, 455 aa, Homo sapiens; identical to SEQ ID NO: 39342

SEQ ID NO: 39389 - protein, 178 aa, Homo sapiens; identical to SEQ ID NO: 39369

SEQ ID NO: 39390 - protein, 455 aa, Homo sapiens; identical to SEQ ID NO: 39342

SEQ ID NO: 39391 - protein, 271 aa, Homo sapiens; identical to SEQ ID NO: 39353

SEQ ID NO: 39392 - protein, 455 aa, Homo sapiens; identical to SEQ ID NO: 39380

SEQ ID NO: 39393 - protein, 455 aa, Homo sapiens; identical to SEQ ID NO: 39380

SEQ ID NO: 39394 - protein, 271 aa, Homo sapiens; identical to SEQ ID NO: 39353

SEQ ID NO: 39395 - protein, 178 aa, Homo sapiens; identical to SEQ ID NO: 39378

SEQ ID NO: 39396 - protein, 245 aa, Homo sapiens; identical to SEQ ID NO: 39377

SEQ ID NO: 39397 - protein, 245 aa, Homo sapiens; identical to SEQ ID NO: 39344

SEQ ID NO: 39398 - protein, 388 aa, Homo sapiens; identical to SEQ ID NO: 39343

SEQ ID NO: 39399 - protein, 455 aa, Homo sapiens; identical to SEQ ID NO: 39342

SEQ ID NO: 39400 - protein, 388 aa, Homo sapiens; identical to SEQ ID NO: 39371

SEQ ID NO: 39401 - protein, 245 aa, Homo sapiens; identical to SEQ ID NO: 39373

SEQ ID NO: 39402 - protein, 271 aa, Homo sapiens; identical to SEQ ID NO: 39353

SEQ ID NO: 39403 - protein, 388 aa, Homo sapiens; identical to SEQ ID NO: 39371

SEQ ID NO: 39404 - protein, 466 aa, Homo sapiens
MAFVLILVLSFYELVSGQWQVTGPGKFVQALVGEDAVFSCSLFPETSAEAMEVRFFRNQFHAVVHLYRDGEDWESKQMPQYRGRTEFVKDSIAGGRVSLRLKNITPSDIGLYGCWFSSQIYDEEATWELRVAALGSLPLISIVGYVDGGIQLLCLSSGWFPQPTAKWKGPQGQDLSSDSRANADGYSLYDVEISIIVQENAGSILCSIHLAEQSHEVESKVLIGETFFQPSPWRLASILLGLLCGALCGVVMGMIIVFFKSKGKIQAELDWRRKHGQAELRDARKHAVEVTLDPETAHPKLCVSDLKTVTHRKAPQEVPHSEKRFTRKSVVASQGFQAGKHYWEVDVGQNVGWYVGVCRDDVDRGKNNVTLSPNNGYWVLRLTTEHLYFTFNPHFISLPPSTPPTRVGVFLDYEGGTISFFNTNDQSLIYTLLTCQFEGLLRPYIQHAMYDEEKGTPIFICPVSWG

SEQ ID NO: 39405 - protein, 432 aa, Homo sapiens
MAFVLILVLSFYELVSGQWQVTGPGKFVQALVGEDAVFSCSLFPETSAEAMEVRFFRNQFHAVVHLYRDGEDWESKQMPQYRGRTEFVKDSIAGGRVSLRLKNITPSDIGLYGCWFSSQIYDEEATWELRVAALGSLPLISIVGYVDGGIQLLCLSSVQPSPWRLASILLGLLCGALCGVVMGMIIVFFKSKGKIQAELGMCHVLSLPHMVLPGPSLIHSLSLWTTLAAGWTGSTDWRRKHGQAELRDARKHAVEVTLDPETAHPKLCVSDLKTVTHRKAPQEVPHSEKRFTRKSVVASQGFQAGKHYWEVDVGQNVGWYVGVCRDDVDRGKNNVTLSPNNGYWVLRLTTEHLYFTFNPHFISLPPSTPPTRVGVFLDYEGGTISFFNTNDQSLIYTLLTCQFEGLLRPYIQHAMYDEEKGTPIFICPVSWG

SEQ ID NO: 39406 - protein, 602 aa, Homo sapiens
MHSKVTIICIRFLFWFLLLCMLIGKSHTEDDIIIATKNGKVRGMNLTVFGGTVTAFLGIPYAQPPLGRLRFKKPQSLTKWSDIWNATKYANSCCQNIDQSFPGFHGSEMWNPNTDLSEDCLYLNVWIPAPKPKNATVLIWIYGGGFQTGTSSLHVYDGKFLARVERVIVVSMNYRVGALGFLALPGNPEAPGNMGLFDQQLALQWVQKNIAAFGGNPKSVTLFGESAGAASVSLHLLSPGSHSLFTRAILQSGSFNAPWAVTSLYEARNRTLNLAKLTGCSRENETEIIKCLRNKDPQEILLNEAFVVPYGTPLSVNFGPTVDGDFLTDMPDILLELGQFKKTQILVGVNKDEGTAFLVYGAPGFSKDNNSIITRKEFQEGLKIFFPGVSEFGKESILFHYTDWVDDQRPENYREALGDVVGDYNFICPALEFTKKFSEWGNNAFFYYFEHRSSKLPWPEWMGVMHGYEIEFVFGLPLERRDNYTKAEEILSRSIVKRWANFAKYGNPNETQNNSTSWPVFKSTEQKYLTLNTESTRIMTKLRAQQCRFWTSFFPKVLEMTGNIDEAEWEWKAGFHRWNNYMMDWKNQFNDYTSKKESCVGL

SEQ ID NO: 39407 - protein, 132 aa, Homo sapiens
AVQFTGWSSSCILHFPEVLHDFHSLQTLPSLLQRIGNPNETQNNSTSWPVFKSTEQKYLTLNTESTRIMTKLRAQQCRFWTSFFPKVLEMTGNIDEAEWEWKAGFHRWNNYMMDWKNQFNDYTSKKESCVGL

SEQ ID NO: 39408 - protein, 64 aa, Homo sapiens
MTKLRAQQCRFWTSFFPKVLEMTGNIDEAEWEWKAGFHRWNNYMMDWKNQFNDYTSKKESCVGL

SEQ ID NO: 39409 - protein, 437 aa, Homo sapiens
MPKFKAARGVGGQEKHAPLADQILAGNAVRAGVREKRRGRGTGEAEEEYVGPRLSRRILQQARQQQEELEAEHGTGDKPAAPRERTTRLGPRMPQDGSDDEDEEWPTLEKAATMTAAGHHAEVVVDPEDERAIEMFMNKNPPARRTLADIIMEKLTEKQTEVETVMSEVSGFPMPQLDPRVLEVYRGVREVLSKYRSGKLPKAFKIIPALSNWEQILYVTEPEAWTAAAMYQATRIFASNLKERMAQRFYNLVLLPRVRDDVAEYKRLNFHLYMALKKALFKPGAWFKGILIPLCESGTCTLREAIIVGSIITKCSIPVLHSSAAMLKIAEMEYSGANSIFLRLLLDKKYALPYRVLDALVFHFLGFRTEKRELPVLWHQCLLTLVQRYKADLATDQKEALLELLRLQPHPQLSPEIRRELQSAVPRDVEDVPITVE

SEQ ID NO: 39410 - protein, 141 aa, Homo sapiens
MAGEEINEDYPVEIHEYLSAFENSIGAVDEMLKTMMSVSRNELLQKLDPLEQAKVDLVSAYTLNSMFWVYLATQGVNPKEHPVKQELERIRVYMNRVKEITDKKKAGKLDRGAASRFVKNALWEPKSKNASKVANKGKSKS

SEQ ID NO: 39411 - protein, 180 aa, Homo sapiens
MPSPSVSTSAASVLEGVCGRARSTYRTPEEGEEQSWSAIMAGEEINEDYPVEIHEYLSAFENSIGAVDEMLKTMMSVSRNELLQKLDPLEQAKVDLVSAYTLNSMFWVYLATQGVNPKEHPVKQELERIRVYMNRVKEITDKKKAGKLDRGAASRFVKNALWEPKSKNASKVANKGKSKS

SEQ ID NO: 39412 - protein, 141 aa, Homo sapiens; identical to SEQ ID NO: 39410

SEQ ID NO: 39413 - protein, 141 aa, Homo sapiens; identical to SEQ ID NO: 39410

SEQ ID NO: 39414 - protein, 318 aa, Homo sapiens
MLSESSSFLKGVMLGSIFCALITMLGHIRIGHGNRMHHHEHHHLQAPNKEDILKISEDERMELSKSFRVYCIILVKPKDVSLWAAVKETWTKHCDKAEFFSSENVKVFESINMDTNDMWLMMRKAYKYAFDKYRDQYNWFFLARPTTFAIIENLKYFLLKKDPSQPFYLGHTIKSGDLEYVGMEGGIVLSVESMKRLNSLLNIPEKCPEQGGMIWKISEDKQLAVCLKYAGVFAENAEDADGKDVFNTKSVGLSIKEAMTYHPNQVVEGCCSDMAVTFNGLTPNQMHVMMYGVYRLRAFGHIFNDALVFLPPNGSDND

SEQ ID NO: 39415 - protein, 318 aa, Homo sapiens; identical to SEQ ID NO: 39414

SEQ ID NO: 39416 - protein, 243 aa, Homo sapiens
MRPLLVLLLLGLAAGSPPLDDNKIPSLCPGHPGLPGTPGHHGSQGLPGRDGRDGRDGAPGAPGEKGEGGRPGLPGPRGDPGPRGEAGPAGPTGPAGECSVPPRSAFSAKRSESRVPPPSDAPLPFDRVLVNEQGHYDAVTGKFTCQVPGVYYFAVHATVYRASLQFDLVKNGESIASFFQFFGGWPKPASLSGGAMVRLEPEDQVWVQVGVGDYIGIYASIKTDSTFSGFLVYSDWHSSPVFA

SEQ ID NO: 39417 - protein, 243 aa, Homo sapiens; identical to SEQ ID NO: 39416

SEQ ID NO: 39418 - protein, 252 aa, Homo sapiens
MAAPALLLLALLLPVGAWPGLPRRPCVHCCRPAWPPGPYARVSDRDLWRGDLWRGLPRVRPTIDIEILKGEKGEAGVRGRAGRSGKEGPPGARGLQGRRGQKGQVGPPGAACRRAYAAFSVGRREGLHSSDHFQAVPFDTELVNLDGAFDLAAGRFLCTVPGVYFLSLNVHTWNYKETYLHIMLNRRPAAVLYAQPSERSVMQAQSLMLLLAAGDAVWVRMFQRDRDNAIYGEHGDLYITFSGHLVKPAAEL

SEQ ID NO: 39419 - protein, 333 aa, Homo sapiens
MRIWWLLLAIEICTGNINSQDTCRQGHPGIPGNPGHNGLPGRDGRDGAKGDKGDAGEPGRPGSPGKDGTSGEKGERGADGKVEAKGIKGDQGSRGSPGKHGPKGLAGPMGEKGLRGETGPQGQKGNKGDVGPTGPEGPRGNIGPLGPTGLPGPMGPIGKPGPKGEAGPTGPQGEPGVRGIRGWKGDRGEKGKIGETLVLPKSAFTVGLTVLSKFPSSDMPIKFDKILYNEFNHYDTAAGKFTCHIAGVYYFTYHITVFSRNVQVSLVKNGVKILHTKDAYMSSEDQASGGIVLQLKLGDEVWLQVTGGERFNGLFADEDDDTTFTGFLLFSSP

SEQ ID NO: 39420 - protein, 333 aa, Homo sapiens; identical to SEQ ID NO: 39419

SEQ ID NO: 39421 - protein, 99 aa, Homo sapiens
MRIWWLLLAIEICTGNINSQDTCRQGHPGIPGNPGHNGLPGRDGRDGAKGDKGDAGEPGCPGSPGKDGTSGEKGERGADGKVEAKGIKGMFRCLWSKTE

SEQ ID NO: 39422 - protein, 333 aa, Homo sapiens
MRIWWLLLAIEICTGNINSQDTCRQGHPGIPGNPGHNGLPGRDGRDGAKGDKGDAGEPGCPGSPGKDGTSGEKGERGADGKVEAKGIKGDQGSRGSPGKHGPKGLAGPMGEKGLRGETGPQGQKGNKGDVGPTGPEGPRGNIGPLGPTGLPGPMGPIGKPGPKGEAGPTGPQGEPGVRGIRGWKGDRGEKGKIGETLVLPKSAFTVGLTVLSKFPSSDVPIKFDKILYNEFNHYDTAVGKFTCHIAGVYYFTYHITVFSRNVQVSLVKNGVKILHTRDAYVSSEDQASGSIVLQLKLGDEMWLQVTGGERFNGLFADEDDDTTFTGFLLFSSQ

SEQ ID NO: 39423 - protein, 333 aa, Homo sapiens; identical to SEQ ID NO: 39422

SEQ ID NO: 39424 - protein, 49 aa, Homo sapiens
VGPTGPEGPRGNIGPLGPTGLPGPMGPIGKPGPKGEAGPTGPQVFPFCI

SEQ ID NO: 39425 - protein, 369 aa, Homo sapiens
MWCLERLRLGPECLRRSGDWLLPGRARGAKSRTTAACANVLTPDRIPEFCIPPRLMPRLALAALRNSWVEEAGMDEGAGRTDWDPRSQAALSLPHLPRVRTAYGFCALLESPHTRRKESLLLGGPPAPRPRAHTYGGGGGPDALLGTLRVPRAPGPATPAAPGCPRPPQDALARRPRGCRLLRVPDGLLSRALRAGRSRRLTRVRSVSSGNEDKERRAGSQSPARAPSTSPPSSRVPFPERLEAEGTVALGRAGDALRLAAEYCPGTGRLRLRLLRAESPAGGAPGPRAVSCRLSLVLRPPGTALRQCSTVVGRSRKASFDQDFCFDGLSEDEVRRLAVRVKARDEGRGRERGRLLGQGELSLGALLLL

SEQ ID NO: 39426 - protein, 364 aa, Homo sapiens
MRLLEKLCSSAAGSSAPKPAFAKVLTPNRIPEFCIPPRLPAPCTLESPIRAAAVPRRCAAESDLWPRAADEDAGRTDWDPRSQAALSLPHLPRVRTTYGFCALLESPHTRRKESLLLGGPPAPRPRAHSCGGGGGPDAPLGTLCGPRGPGPATPAAPGGPRLPQDALAAGPRRCRLLRVPDGLLSRALRAGRSRRLARVRSVSSGNEDEERRAGSESPARAPSSSPLSSRAPLPERLEAKGTVALGRAGDALRLAAEYCPGTRRLRLRLLRAESLFGGAPGPRAVRCRLSLVLRPPGTARWQCSAVVGRSRKASFDQDFCFDGLSEDEVRRLAVRVKARDEGRGRDRGRLLGQGELSLGALLLL

SEQ ID NO: 39427 - protein, 421 aa, Homo sapiens
MRKTNMWFLERLRGSGENGAARGVGSEAGDKASKGPLYSNVLTPDKIPDFFIPPKLPSGPAEGEGQAALGPSTSEQNLASAAPRQTPRSPRLPAKLAAESKSLLKAATRHVIQIESAEDWLSEEATDADPQAQGAMSLPSVPKAQTSYGFAMLAESPHTRRKESLFHSEHGALAQVGSPGAGRRRAAAKANGGDGGPREAGGALMSPGRYFSGGESDTGSSAESSPFGSPLLSRSVSLLKGFAQDSQAKVSQLRHSVGRHGSLSADDSTPDASPGSRRRLTRRAPPEPGPESGQARGEHTVHVGPRGSVRLLAEYEAGQARLRVHLLAAEGLYDRLCDARSINCCVGLCLVPGKLQKQRSTIVKNSRRPVFNEDFFFDGLGPASVRKLALRIKVVNKGSSLKRDTLLGEKELPLTSLLPFL

SEQ ID NO: 39428 - protein, 1314 aa, Homo sapiens
MLDPSSSEEESDEIVEEESGKEVLGSAPSGARLSPSRTSEGSAGSAGLGGGGAGAGAGVGAGGGGGSGASSGGGAGGLQPSSRAGGGRPSSPSPSVVSEKEKEELERLQKEEEERKKRLQLYVFVMRCIAYPFNAKQPTDMARRQQKISKQQLQTVKDRFQAFLNGETQIMADEAFMNAVQSYYEVFLKSDRVARMVQSGGCSANDSREVFKKHIEKRVRSLPEIDGLSKETVLSSWMAKFDAIYRGEEDPRKQQARMTASAASELILSKEQLYEMFQNILGIKKFEHQLLYNACQLDNPDEQAAQIRRELDGRLQMADQIARERKFPKFVSKEMENMYIEELKSSVNLLMANLESMPVSKGGEFKLQKLKRSHNASIIDMGEESENQLSKSDVVLSFSLEVVIMEVQGLKSLAPNRIVYCTMEVEGGEKLQTDQAEASKPTWGTQGDFSTTHALPAVKVKLFTESTGVLALEDKELGRVILHPTPNSPKQSEWHKMTVSKNCPDQDLKIKLAVRMDKPQNMKHSGYLWAIGKNVWKRWKKRFFVLVQVSQYTFAMCSYREKKAEPQELLQLDGYTVDYTDPQPGLEGGRAFFNAVKEGDTVIFASDDEQDRILWVQAMYRATGQSHKPVPPTQVQKLNAKGGNVPQLDAPISQFYADRAQKHGMDEFISSNPCNFDHASLFEMVQRLTLDHRLNDSYSCLGWFSPGQVFVLDEYCARNGVRGCHRHLCYLRDLLERAENGAMIDPTLLHYSFAFCASHVHGNRPDGIGTVTVEEKERFEEIKERLRVLLENQITHFRYCFPFGRPEGALKATLSLLERVLMKDIVTPVPQEEVKTVIRKCLEQAALVNYSRLSEYAKIEGKKREMYEHPVFCLASQVMDLTIQNVGRLITPAKKLEDTIRLAELVIEVLQQNEEHHAEAFAWWSDLMVEHAETFLSLFAVDMDAALEVQPPDTWDSFPLFQLLNDFLRTDYNLCNGKFHKHLQDLFAPLVVRYVDLMESSIAQSIHRGFERESWEPVNNGSGTSEDLFWKLDALQTFIRDLHWPEEEFGKHLEQRLKLMASDMIESCVKRTRIAFEVKLQKTSRSTDFRVPQSICTMFNVMVDAKAQSTKLCSMEMGQEHQYHSKIDELIEETVKEMITLLVAKFVTILEGVLAKLSRYDEGTLFSSFLSFTVKAASKYVDVPKPGMDVADAYVTFVRHSQDVLRDKVNEEMYIERLFDQWYNSSMNVICTWLTDRMDLQLHIYQLKTLIRMVKKTYRDFRLQGVLDSTLNSKTYETIRNRLTVEEATASVSEGGGLQGISMKDSDEEDEEDD

SEQ ID NO: 39429 - protein, 1274 aa, Homo sapiens
MLDPSSSEEESDEIVEEESGKEVLGSAPSGARLSPSRTSEGSAGSAGLGGGGAGAGAGVGAGGGGGSGASSGGGAGGLQPSSRAGGGRPSSPSPSVVSEKEKEELERLQKEEEERKKRLQLYVFVMRCIAYPFNAKQPTDMARRQQKISKQQLQTVKDRFQAFLNGETQIMADEAFMNAVQSYYEVFLKSDRVARMVQSGGCSANDSREVFKKHIEKRVRSLPEIDGLSKETVLSSWMAKFDAIYRGEEDPRKQQARMTASAASELILSKEQLYEMFQNILGIKKFEHQLLYNACQLDNPDEQAAQIRRELDGRLQMADQIARERKFPKFVSKEMENMYIEELKSSVNLLMANLESMPVSKGGEFKLQKLKRSHNASIIDMGEESENQLSKSDVVLSFSLEVVIMEVQGLKSLAPNRIVYCTMEVEGGEKLQTDQAEASKPTWGTQGDFSTTHALPAVKVKLFTESTGVLALEDKELGRVILHPTPNSPKQSEWHKMTVSKNCPDQDLKIKLAVRMDKPQNMKHSGYLWAIGKNVWKRWKKRFFVLVQVSQYTFAMCSYREKKAEPQELLQLDGYTVDYTDPQPGLEGGRAFFNAVKEGDTVIFASDDEQDRILWVQAMYRATGQSHKPVPPTQVQKLNAKGGNVPQLDAPISQFYADRAQKHGMDEFISSNPCNFDHASLFEMGWFSPGQVFVLDEYCARNGVRGCHRHLCYLRDLLERAENGAMIDPTLLHYSFAFCASHVHGNRPDGIGTVTVEEKERFEEIKERLRVLLENQITHFRYCFPFGRPEGALKATLSLLERVLMKDIVTPVPQEEVKTVIRKCLEQAALVNYSRLSEYAKIEENVGRLITPAKKLEDTIRLAELVIEVLQQNEEHHAEAFAWWSDLMVEHAETFLSLFAVDMDAALEVQPPDTWDSFPLFQLLNDFLRTDYNLCNGKFHKHLQDLFAPLVVRYVDLMESSIAQSIHRGFERESWEPVNNGSGTSEDLFWKLDALQTFIRDLHWPEEEFGKHLEQRLKLMASDMIESCVKRTRIAFEVKLQKTSRSTDFRVPQSICTMFNVMVDAKAQSTKLCSMEMGQEHQYHSKIDELIEETVKEMITLLVAKFVTILEGVLAKLSRYDEGTLFSSFLSFTVKAASKYVDVPKPGMDVADAYVTFVRHSQDVLRDKVNEEMYIERLFDQWYNSSMNVICTWLTDRMDLQLHIYQLKTLIRMVKKTYRDFRLQGVLDSTLNSKTYETIRNRLTVEEATASVSEGGGLQGISMKDSDEEDEEDD

SEQ ID NO: 39430 - protein, 1359 aa, Homo sapiens
MLDPSSSEEESDEIVEEESGKEVLGSAPSGARLSPSRTSEGSAGSAGLGGGGAGAGAGVGAGGGGGSGASSGGGAGGLQPSSRAGGGRPSSPSPSVVSEKEKEELERLQKEEEERKKRLQLYVFVMRCIAYPFNAKQPTDMARRQQKISKQQLQTVKDRFQAFLNGETQIMADEAFMNAVQSYYEVFLKSDRVARMVQSGGCSANDSREVFKKHIEKRVRSLPEIDGLSKETVLSSWMAKFDAIYRGEEDPRKQQARMTASAASELILSKEQLYEMFQNILGIKKFEHQLLYNACQLDNPDEQAAQIRRELDGRLQMADQIARERKFPKFVSKEMENMYIEELKSSVNLLMANLESMPVSKGGEFKLQKLKRSHNASIIDMGEESENQLSKSDVVLSFSLEVVIMEVQGLKSLAPNRIVYCTMEVEGGEKLQTDQAEASKPTWGTQGDFSTTHALPAVKVKLFTESTGVLALEDKELGRVILHPTPNSPKQSEWHKMTVSKNCPDQDLKIKLAVRMDKPQNMKHSGYLWAIGKNVWKRWKKRFFVLVQVSQYTFAMCSYREKKAEPQELLQLDGYTVDYTDPQPGLEGGRAFFNAVKEGDTVIFASDDEQDRILWVQAMYRATGQSHKPVPPTQVQKLNAKGGNVPQLDAPISQFYADRAQKHGMDEFISSNPCNFDHASLFEMVQRLTLDHRLNDSYSCLGWFSPGQVFVLDEYCARNGVRGCHRHLCYLRDLLERAENGAMIDPTLLHYSFAFCASHVHGNRPDGIGTVTVEEKERFEEIKERLRVLLENQITHFRYCFPFGRPEGALKATLSLLERVLMKDIVTPVPQEEVKTVIRKCLEQAALVNYSRLSEYAKIEANSCTTENVGRLITPAKKLEDTIRLAELVIEVLQQNEEHHAEPHVDKGEAFAWWSDLMVEHAETFLSLFAVDMDAALEVQPPDTWDSFPLFQLLNDFLRTDYNLCNGKFHKHLQDLFAPLVVRYVDLMESSIAQSIHRGFERESWEPVKSLTSNLPNVNLPNVNLPKVPNLPVNIPLGIPQMPTFSAPSWMAAIYDADNGSGTSEDLFWKLDALQTFIRDLHWPEEEFGKHLEQRLKLMASDMIESCVKRTRIAFEVKLQKTSRSTDFRVPQSICTMFNVMVDAKAQSTKLCSMEMGQEKYKKMRHQYHSKIDELIEETVKEMITLLVAKFVTILEGVLAKLSRYDEGTLFSSFLSFTVKAASKYVDVPKPGMDVADAYVTFVRHSQDVLRDKVNEEMYIERLFDQWYNSSMNVICTWLTDRMDLQLHIYQLKTLIRMVKKTYRDFRLQGVLDSTLNSKTYETIRNRLTVEEATASVSEGGGLQGISMKDSDEEDEEDD

SEQ ID NO: 39431 - protein, 1353 aa, Homo sapiens
MLDPSSSEEESDEIVEEESGKEVLGSAPSGARLSPSRTSEGSAGSAGLGGGGAGAGAGVGAGGGGGSGASSGGGAGGLQPSSRAGGGRPSSPSPSVVSEKEKEELERLQKEEEERKKRLQLYVFVMRCIAYPFNAKQPTDMARRQQKISKQQLQTVKDRFQAFLNGETQIMADEAFMNAVQSYYEVFLKSDRVARMVQSGGCSANDSREVFKKHIEKRVRSLPEIDGLSKETVLSSWMAKFDAIYRGEEDPRKQQARMTASAASELILSKEQLYEMFQNILGIKKFEHQLLYNACQLDNPDEQAAQIRRELDGRLQMADQIARERKFPKFVSKEMENMYIEELKSSVNLLMANLESMPVSKGGEFKLQKLKRSHNASIIDMGEESENQLSKSDVVLSFSLEVVIMEVQGLKSLAPNRIVYCTMEVEGGEKLQTDQAEASKPTWGTQGDFSTTHALPAVKVKLFTESTGVLALEDKELGRVILHPTPNSPKQSEWHKMTVSKNCPDQDLKIKLAVRMDKPQNMKHSGYLWAIGKNVWKRWKKRFFVLVQVSQYTFAMCSYREKKAEPQELLQLDGYTVDYTDPQPGLEGGRAFFNAVKEGDTVIFASDDEQDRILWVQAMYRATGQSHKPVPPTQVQKLNAKGGNVPQLDAPISQFYADRAQKHGMDEFISSNPCNFDHASLFEMVQRLTLDHRLNDSYSCLGWFSPGQVFVLDEYCARNGVRGCHRHLCYLRDLLERAENGAMIDPTLLHYSFAFCASHVHGNRPDGIGTVTVEEKERFEEIKERLRVLLENQITHFRYCFPFGRPEGALKATLSLLERVLMKDIVTPVPQEEVKTVIRKCLEQAALVNYSRLSEYAKIEENQKDAENVGRLITPAKKLEDTIRLAELVIEVLQQNEEHHAEPHVDKGEAFAWWSDLMVEHAETFLSLFAVDMDAALEVQPPDTWDSFPLFQLLNDFLRTDYNLCNGKFHKHLQDLFAPLVVRYVDLMESSIAQSIHRGFERESWEPVKSLTSNLPNVNLPNVNLPKVPNLPVNIPLGIPQMPTFSAPSWMAAIYDADNGSGTSEDLFWKLDALQTFIRDLHWPEEEFGKHLEQRLKLMASDMIESCVKRTRIAFEVKLQKTSRSTDFRVPQSICTMFNVMVDAKAQSTKLCSMEMGQEHQYHSKIDELIEETVKEMITLLVAKFVTILEGVLAKLSRYDEGTLFSSFLSFTVKAASKYVDVPKPGMDVADAYVTFVRHSQDVLRDKVNEEMYIERLFDQWYNSSMNVICTWLTDRMDLQLHIYQLKTLIRMVKKTYRDFRLQGVLDSTLNSKTYETIRNRLTVEEATASVSEGGGLQGISMKDSDEEDEEDD

SEQ ID NO: 39432 - protein, 345 aa, Homo sapiens
  VARIANT 1: note = MOD_RES - Any amino acid
XLPNVNLPNVNLPKVPNLPVNIPLGIPQMPTFSAPSWMAAIYDADNGSGTSEDLFWKLDALQTFIRDLHWPEEEFGKHLEQRLKLMASDMIESCVKRTRIAFEVKLQKTSRSTDFRVPQSICTMFNVMVDAKAQSTKLCSMEMGQEFAKMWHQYHSKIDELIEETVKEMITLLVAKFVTILEGVLAKLSRYDEGTLFSSFLSFTVKAASKYVDVPKPGMDVADAYVTFVRHSQDVLRDKVNEEMYIERLFDQWYNSSMNVICTWLTDRMDLQLHIYQLKTLIRMVKKTYRDFRLQGVLDSTLNSKTYETIRNRLTVEEATASVSEGGGLQGISMKDSDEEDEEDD

SEQ ID NO: 39433 - protein, 1255 aa, Homo sapiens
MLDPSSSEEESDEGLEEESRDVLVAAGSSQRAPPAPTREGRRDAPGRAGGGGAARSVSPSPSVLSEGRDEPQRQLDDEQERRIRLQLYVFVVRCIAYPFNAKQPTDMARRQQKLNKQQLQLLKERFQAFLNGETQIVADEAFCNAVRSYYEVFLKSDRVARMVQSGGCSANDFREVFKKNIEKRVRSLPEIDGLSKETVLSSWIAKYDAIYRGEEDLCKQPNRMALSAVSELILSKEQLYEMFQQILGIKKLEHQLLYNACQLDNADEQAAQIRRELDGRLQLADKMAKERKFPKFIAKDMENMYIEELRSSVNLLMANLESLPVSKGGPEFKLQKLKRSQNSAFLDIGDENEIQLSKSDVVLSFTLEIVIMEVQGLKSVAPNRIVYCTMEVEGEKLQTDQAEASRPQWGTQGDFTTTHPRPVVKVKLFTESTGVLALEDKELGRVILYPTSNSSKSAELHRMVVPKNSQDSDLKIKLAVRMDKPAHMKHSGYLYALGQKVWKRWKKRYFVLVQVSQYTFAMCSYREKKSEPQELMQLEGYTVDYTDPHPGLQGGCMFFNAVKEGDTVIFASDDEQDRILWVQAMYRATGQSYKPVPAIQTQKLNPKGGTLHADAQLYADRFQKHGMDEFISANPCKLDHAFLFRILQRQTLDHRLNDSYSCLGWFSPGQVFVLDEYCARYGVRGCHRHLCYLAELMEHSENGAVIDPTLLHYSFAFCASHVHGNRPDGIGTVSVEEKERFEEIKERLSSLLENQISHFRYCFPFGRPEGALKATLSLLERVLMKDIATPIPAEEVKKVVRKCLEKAALINYTRLTEYAKIEETMNQASPARKLEEILHLAELCIEVLQQNEEHHAEAFAWWPDLLAEHAEKFWALFTVDMDTALEAQPQDSWDSFPLFQLLNNFLRNDTLLCNGKFHKHLQEIFVPLVVRYVDLMESSIAQSIHRGFEQETWQPVNNGSATSEDLFWKLDALQMFVFDLHWPEQEFAHHLEQRLKLMASDMLEACVKRTRTAFELKLQKASKTTDLRIPASVCTMFNVLVDAKKQSTKLCALDGGQEVCRIFQQYHSKIDDLIDNSVKEIISLLVSKFVSVLEGVLSKLSRYDEGTFFSSILSFTVKAAAKYVDVPKPGMDLADTYIMFVRQNQDILREKVNEEMYIEKLFDQWYSSSMKVICVWLTDRLDLQLHIYQLKTLIKIVKKTYRDFRLQGVLEGTLNSKTYDTVHRRLTVEEATASVSEGGGLQGITMKDSDEEEEG

SEQ ID NO: 39434 - protein, 1294 aa, Homo sapiens [sequence omitted]

SEQ ID NO: 39435 - protein, 469 aa, Homo sapiens
MNQASPARKLEEILHLAELCIEVLQQNEEHHAELRHAFAWWPDLLAEHAEKFWALFTVDMDTALEAQPQDSWDSFPLFQLLNNFLRNDTLLCNGKFHKHLQEIFVPLVVRYVDLMESSIAQSIHRGFEQETWQPVKNIANSLPNVALPKVPSLPLNLPQIPNISTASWMPSLYESTNGSATSEDLFWKLDALQMFVFDLHWPEQEFAHHLEQRLKLMASDMLEACVKRTRTAFELKLQKASKTTDLRIPASVCTMFNVLVDAKKQSTKLCALDGGQEQQYHSKIDDLIDNSVKEIISLLVSKFVSVLEGVLSKLSRYDEGTFFSSILSFTVKAAAKYVDVPKPGMDLADTYIMFVRQNQDILREKVNEEMYIEKLFDQWYSSSMKVICVWLTDRLDLQLHIYQLKTLIKIVKKTYRDFRLQGVLEGTLNSKTYDTVHRRLTVEEATASVSEGGGLQGITMKDSDEEEEG

SEQ ID NO: 39436 - protein, 899 aa, Homo sapiens
  VARIANT 1: note = MOD_RES - Any amino acid
XEIQLSKSDVVLSFTLEIVIMEVQGLKSVAPNRIVYCTMEVEGEKLQTDQAEASRPQWGTQGDFTTTHPRPVVKVKLFTESTGVLALEDKELGRVILYPTSNSSKSAELHRMVVPKNSQDSDLKIKLAVRMDKPAHMKHSGYLYALGQKVWKRWKKRYFVLVQVSQYTFAMCSYREKKSEPQELMQLEGYTVDYTDPHPGLQGGCMFFNAVKEGDTVIFASDDEQDRILWVQAMYRATGQSYKPVPAIQTQKLNPKGGTLHADAQLYADRFQKHGMDEFISANPCKLDHAFLFRILQRQTLDHRLNDSYSCLGWFSPGQVFVLDEYCARYGVRGCHRHLCYLAELMEHSENGAVIDPTLLHYSFAFCASHVHGNRPDGIGTVSVEEKERFEEIKERLSSLLENQISHFRYCFPFGRPEGALKATLSLLERVLMKDIATPIPAEEVKKVVRKCLEKAALINYTRLTEYAKIEETMNQASPARKLEEILHLAELCIEVLQQNEEHHAEAFAWWPDLLAEHAEKFWALFTVDMDTALEAQPQDSWDSFPLFQLLNNFLRNDTLLCNGKFHKHLQEIFVPLVVRYVDLMESSIAQSIHRGFEQETWQPVNNGSATSEDLFWKLDALQMFVFDLHWPEQEFAHHLEQRLKLMASDMLEACVKRTRTAFELKLQKASKTTDLRIPASVCTMFNVLVDAKKQSTKLCALDGGQEQQYHSKIDDLIDNSVKEIISLLVSKFVSVLEGVLSKLSRYDEGTFFSSILSFTVKAAAKYVDVPKPGMDLADTYIMFVRQNQDILREKVNEEMYIEKLFDQWYSSSMKVICVWLTDRLDLQLHIYQLKTLIKIVKKTYRDFRLQGVLEGTLNSKTYDTVHRRLTVEEATASVSEGGGLQGITMKDSDEEEEG

SEQ ID NO: 39437 - protein, 1255 aa, Homo sapiens
MLDPSSSEEESDEGLEEESRDVLVAAGSSQRAPPAPTREGRRDAPGRAGGGGAARSVSPSPSVLSEGRDEPQRQLDDEQERRIRLQLYVFVVRCIAYPFNAKQPTDMARRQQKLNKQQLQLLKERFQAFLNGETQIVADEAFCNAVRSYYEVFLKSDRVARMVQSGGCSANDFREVFKKNIEKRVRSLPEIDGLSKETVLSSWIAKYDAIYRGEEDLCKQPNRMALSAVSELILSKEQLYEMFQQILGIKKLEHQLLYNACQLDNADEQAAQIRRELDGRLQLADKMAKERKFPKFIAKDMENMYIEELRSSVNLLMANLESLPVSKGGPEFKLQKLKRSQNSAFLDIGDENEIQLSKSDVVLSFTLEIVIMEVQGLKSVAPNRIVYCTMEVEGEKLQTDQAEASRPQWGTQGDFTTTHPRPVVKVKLFTESTGVLALEDKELGRVILYPTSNSSKSAELHRMVVPKNSQDSDLKIKLAVRMDKPAHMKHSGYLYALGQKVWKRWKKRYFVLVQVSQYTFAMCSYREKKSEPQELMQLEGYTVDYTDPHPGLQGGCMFFNAVKEGDTVIFASDDEQDRILWVQAMYRATGQSYKPVPAIQTQKLNPKGGTLHADAQLYADRFQKHGMDEFISANPCKLDHAFLFRILQRQTLDHRLNDSYSCLGWFSPGQVFVLDEYCARYGVRGCHRHLCYLAELMEHSENGAVIDPTLLHYSFAFCASHVHGNRPDGIGTVSVEEKERFEEIKERLSSLLENQISHFRYCFPFGRPEGALKATLSLLERVLMKDIATPIPAEEVKKVVRKCLEKAALINYTRLTEYAKIEETMNQASPARKLEEILHLAELCIEVLQQNEEHHAEAFAWWPDLLAEHAEKFWALFTVDMDTALEAQPQDSWDSFPLFQLLNNFLRNDTLLCNGKFHKHLQEIFVPLVVRYVDLMESSIAQSIHRGFEQETWQPVNNGSATSEDLFWKLDALQMFVFDLHWPEQEFAHHLEQRLKLMASDMLEACVKRTRTAFELKLQKASKTTDLRIPASVCTMFNVLVDAKKQSTKLCALDGGQEFGSQWQQYHSKIDDLIDNSVKEIISLLVSKFVSVLEGVLSKLSRYDEGTFFSSILSFTVKAAAKYVDVPKPGMDLADTYIMFVRQNQDILREKVNEEMYIEKLFDQWYSSSMKVICVWLTDRLDLQLHIYQLKTLIKIVKKTYRDFRLQGVLEGTLNSKTYDTVHRRLTVEEATASVSEGGGLQGITMKDSDEEEEG

SEQ ID NO: 39438 - protein, 1301 aa, Homo sapiens [sequence omitted]

SEQ ID NO: 39439 - protein, 1296 aa, Homo sapiens
MLDPSSSEEESDEGLEEESRDVLVAAGSSQRAPPAPTREGRRDAPGRAGGGGAARSVSPSPSVLSEGRDEPQRQLDDEQERRIRLQLYVFVVRCIAYPFNAKQPTDMARRQQKLNKQQLQLLKERFQAFLNGETQIVADEAFCNAVRSYYEVFLKSDRVARMVQSGGCSANDFREVFKKNIEKRVRSLPEIDGLSKETVLSSWIAKYDAIYRGEEDLCKQPNRMALSAVSELILSKEQLYEMFQQILGIKKLEHQLLYNACQLDNADEQAAQIRRELDGRLQLADKMAKERKFPKFIAKDMENMYIEELRSSVNLLMANLESLPVSKGGPEFKLQKLKRSQNSAFLDIGDENEIQLSKSDVVLSFTLEIVIMEVQGLKSVAPNRIVYCTMEVEGEKLQTDQAEASRPQWGTQGDFTTTHPRPVVKVKLFTESTGVLALEDKELGRVILYPTSNSSKSAELHRMVVPKNSQDSDLKIKLAVRMDKPAHMKHSGYLYALGQKVWKRWKKRYFVLVQVSQYTFAMCSYREKKSEPQELMQLEGYTVDYTDPHPGLQGGCMFFNAVKEGDTVIFASDDEQDRILWVQAMYRATGQSYKPVPAIQTQKLNPKGGTLHADAQLSGKDADRFQKHGMDEFISANPCKLDHAFLFRILQRQTLDHRLNDSYSCLGWFSPGQVFVLDEYCARYGVRGCHRHLCYLAELMEHSENGAVIDPTLLHYSFAFCASHVHGNRPDGIGTVSVEEKERFEEIKERLSSLLENQISHFRYCFPFGRPEGALKATLSLLERVLMKDIATPIPAEEVKKVVRKCLEKAALINYTRLTEYAKIEETMNQASPARKLEEILHLAELCIEVLQQNEEHHAEGREAFAWWPDLLAEHAEKFWALFTVDMDTALEAQPQDSWDSFPLFQLLNNFLRNDTLLCNGKFHKHLQEIFVPLVVRYVDLMESSIAQSIHRGFEQETWQPVKNIANSLPNVALPKVPSLPLNLPQIPNISTASWMPSLYESTNGSATSEDLFWKLDALQMFVFDLHWPEQEFAHHLEQRLKLMASDMLEACVKRTRTAFELKLQKASKTTDLRIPASVCTMFNVLVDAKKQSTKLCALDGGQEQQYHSKIDDLIDNSVKEIISLLVSKFVSVLEGVLSKLSRYDEGTFFSSILSFTVKAAAKYVDVPKPGMDLADTYIMFVRQNQDILREKVNEEMYIEKLFDQWYSSSMKVICVWLTDRLDLQLHIYQLKTLIKIVKKTYRDFRLQGVLEGTLNSKTYDTVHRRLTVEEATASVSEGGGLQGITMKDSDEEEEG

SEQ ID NO: 39440 - protein, 490 aa, Homo sapiens
  VARIANT 1: note = MOD_RES - Any amino acid
XYTRLTEYAKIEGPAEKETETMNQASPARKLEEILHLAELCIEVLQQNEEHHAEGREAFAWWPDLLAEHAEKFWALFTVDMDTALEAQPQDSWDSFPLFQLLNNFLRNDTLLCNGKFHKHLQEIFVPLVVRYVDLMESSIAQSIHRGFEQETWQPVKNIANSLPNVALPKVPSLPLNLPQIPNISTASWMPSLYESTNGSATSEDLFWKLDALQMFVFDLHWPEQEFAHHLEQRLKLMASDMLEACVKRTRTAFELKLQKASKTTDLRIPASVCTMFNVLVDAKKQSTKLCALDGGQEQQYHSKIDDLIDNSVKEIISLLVSKFVSVLEGVLSKLSRYDEGTFFSSILSFTVKAAAKYVDVPKPGMDLADTYIMFVRQNQDILREKVNEEMYIEKLFDQWYSSSMKVICVWLTDRLDLQLHIYQLKTLIKIVKKTYRDFRLQGVLEGTLNSKTYDTVHRRLTVEEATASVSEGGGLQGITMKDSDEEEEG

SEQ ID NO: 39441 - protein, 1222 aa, Homo sapiens
MLDPSSSEEESDEGLEEESRDVLVAAGSSQRAPPAPTREGQLDDEQERRIRLQLYVFVVRCIAYPFNAKQPTDMARRQQKLNKQQLQLLKERFQAFLNGETQIVADEAFCNAVRSYYEVFLKSDRVARMVQSGGCSANDFREVFKKNIEKRVRSLPEIDGLSKETVLSSWIAKYDAIYRGEEDLCKQPNRMALSAVSELILSKEQLYEMFQQILGIKKLEHQLLYNACQLDNADEQAAQIRRELDGRLQLADKMAKERKFPKFIAKDMENMYIEELRSSVNLLMANLESLPVSKGGPEFKLQKLKRSQNSAFLDIGDENEIQLSKSDVVLSFTLEIVIMEVQGLKSVAPNRIVYCTMEVEGEKLQTDQAEASRPQWGTQGDFTTTHPRPVVKVKLFTESTGVLALEDKELGRVILYPTSNSSKSAELHRMVVPKNSQDSDLKIKLAVRMDKPAHMKHSGYLYALGQKVWKRWKKRYFVLVQVSQYTFAMCSYREKKSEPQELMQLEGYTVDYTDPHPGLQGGCMFFNAVKEGDTVIFASDDEQDRILWVQAMYRATGQSYKPVPAIQTQKLNPKGGTLHADAQLYADRFQKHGMDEFISANPCKLDHAFLFRILQRQTLDHRLNDSYSCLGWFSPGQVFVLDEYCARYGVRGCHRHLCYLAELMEHSENGAVIDPTLLHYSFAFCASHVHGNRPDGIGTVSVEEKERFEEIKERLSSLLENQISHFRYCFPFGRPEGALKATLSLLERVLMKDIATPIPAEEVKKVVRKCLEKAALINYTRLTEYAKIEETMNQASPARKLEEILHLAELCIEVLQQNEEHHAEAFAWWPDLLAEHAEKFWALFTVDMDTALEAQPQDSWDSFPLFQLLNNFLRNDTLLCNGKFHKHLQEIFVPLVVRYVDLMESSIAQSIHRGFEQETWQPVNNGSATSEDLFWKLDALQMFVFDLHWPEQEFAHHLEQRLKLMASDMLEACVKRTRTAFELKLQKASKTTDLRIPASVCTMFNVLVDAKKQSTKLCALDGGQEFGSQWQQYHSKIDDLIDNSVKEIISLLVSKFVSVLEGVLSKLSRYDEGTFFSSILSFTVKAAAKYVDVPKPGMDLADTYIMFVRQNQDILREKVNEEMYIEKLFDQWYSSSMKVICVWLTDRLDLQLHIYQLKTLIKIVKKTYRDFRLQGVLEGTLNSKTYDTVHRRLTVEEATASVSEGGGLQGITMKDSDEEEEG

SEQ ID NO: 39442 - protein, 788 aa, Homo sapiens
MTIHQFLLLFLFWVCLPHFCSPEIMFRRTPVPQQRILSSRVPRSDGKILHRQKRGWMWNQFFLLEEYTGSDYQYVGKLHSDQDKGDGSLKYILSGDGAGTLFIIDEKTGDIHATRRIDREEKAFYTLRAQAINRRTLRPVEPESEFVIKIHDINDNEPTFPEEIYTASVPEMSVVGTSVVQVTATDADDPSYGNSARVIYSILQGQPYFSVEPETGIIRTALPNMNRENREQYQVVIQAKDMGGQMGGLSGTTTVNITLTDVNDNPPRFPQNTIHLRVLESSPVGTAIGSVKATDADTGKNAEVEYRIIDGDGTDMFDIVTEKDTQEGIITVKKPLDYESRRLYTLKVEAENTHVDPRFYYLGPFKDTTIVKISIEDVDEPPVFSRSSYLFEVHEDIEVGTIIGTVMARDPDSISSPIRFSLDRHTDLDRIFNIHSGNGSLYTSKPLDRELSQWHNLTVIAAEINNPKETTRVAVFVRILDVNDNAPQFAVFYDTFVCENARPGQLIQTISAVDKDDPLGGQKFFFSLAAVNPNFTVQDNEDNTARILTRKNGFNRHEISTYLLPVVISDNDYPIQSSTGTLTIRVCACDSQGNMQSCSAEALLLPAGLSTGALIAILLCIIILLVIVVLFAALKRQRKKEPLILSKEDIRDNIVSYNDEGGGEEDTQAFDIGTLRNPAAIEEKKLRRDIIPETLFIPRRTPTAPDNTDVRDFINERLKEHDLDPTAPPYDSLATYAYEGNDSIAESLSSLESGTTEGDQNYDYLREWGPRFNKLAEMYGGGESDKDS

SEQ ID NO: 39443 - protein, 794 aa, Homo sapiens
MLTRNCLSLLLWVLFDGGLLTPLQPQPQQTLATEPRENVIHLPGQRSHFQRVKRGWVWNQFFVLEEYVGSEPQYVGKLHSDLDKGEGTVKYTLSGDGAGTVFTIDETTGDIHAIRSLDREEKPFYTLRAQAVDIETRKPLEPESEFIIKVQDINDNEPKFLDGPYVATVPEMSPVGAYVLQVKATDADDPTYGNSARVVYSILQGQPYFSIDPKTGVIRTALPNMDREVKEQYQVLIQAKDMGGQLGGLAGTTIVNITLTDVNDNPPRFPKSIFHLKVPESSPIGSAIGRIRAVDPDFGQNAEIEYNIVPGDGGNLFDIVTDEDTQEGVIKLKKPLDFETKKAYTFKVEASNLHLDHRFHSAGPFKDTATVKISVLDVDEPPVFSKPLYTMEVYEDTPVGTIIGAVTAQDLDVGSSAVRYFIDWKSDGDSYFTIDGNEGTIATNELLDRESTAQYNFSIIASKVSNPLLTSKVNILINVLDVNEFPPEISVPYETAVCENAKPGQIIQIVSAADRDLSPAGQQFSFRLSPEAAIKPNFTVRDFRNNTAGIETRRNGYSRRQQELYFLPVVIEDSSYPVQSSTNTMTIRVCRCDSDGTILSCNVEAIFLPVGLSTGALIAILLCIVILLAIVVLYVALRRQKKKDTLMTSKEDIRDNVIHYDDEGGGEEDTQAFDIGALRNPKVIEENKIRRDIKPDSLCLPRQRPPMEDNTDIRDFIHQRLQENDVDPTAPPYDSLATYAYEGSGSVAESLSSIDSLTTEADQDYDYLTDWGPRFKVLADMFGEEESYNPDKVT

SEQ ID NO: 39444 - protein, 794 aa, Homo sapiens; identical to SEQ ID NO: 39443

SEQ ID NO: 39445 - protein, 754 aa, Homo sapiens
MLTRNCLSLLLWVLFDGGLLTPLQPQPQQTLATEPRENVIHLPGQRSHFQRVKRGWVWNQFFVLEEYVGSEPQYVGKLHSDLDKGEGTVKYTLSGDGAGTVFTIDETTGDIHAIRSLDREEKPFYTLRAQAVDIETRKPLEPESEFIIKVQDINDNEPKFLDGPYVATVPEMSPVGVIRTALPNMDREVKEQYQVLIQAKDMGGQLGGLAGTTIVNITLTDVNDNPPRFPKSIFHLKVPESSPIGSAIGRIRAVDPDFGQNAEIEYNIVPGDGGNLFDIVTDEDTQEGVIKLKKPLDFETKKAYTFKVEASNLHLDHRFHSAGPFKDTATVKISVLDVDEPPVFSKPLYTMEVYEDTPVGTIIGAVTAQDLDVGSSAVRYFIDWKSDGDSYFTIDGNEGTIATNELLDRESTAQYNFSIIASKVSNPLLTSKVNILINVLDVNEFPPEISVPYETAVCENAKPGQIIQIVSAADRDLSPAGQQFSFRLSPEAAIKPNFTVRDFRNNTAGIETRRNGYSRRQQELYFLPVVIEDSSYPVQSSTNTMTIRVCRCDSDGTILSCNVEAIFLPVGLSTGALIAILLCIVILLAIVVLYVALRRQKKKDTLMTSKEDIRDNVIHYDDEGGGEEDTQAFDIGALRNPKVIEENKIRRDIKPDSLCLPRQRPPMEDNTDIRDFIHQRLQENDVDPTAPPYDSLATYAYEGSGSVAESLSSIDSLTTEADQDYDYLTDWGPRFKVLADMFGEEESYNPDKVT

SEQ ID NO: 39446 - protein, 814 aa, Homo sapiens
MDAAFLLVLGLLAQSLCLSLGVPGWRRPTTLYPWRRAPALSRVRRAWVIPPISVSENHKRLPYPLVQIKSDKQQLGSVIYSIQGPGVDEEPRGVFSIDKFTGKVFLNAMLDREKTDRFRLRAFALDLGGSTLEDPTDLEIVVVDQNDNRPAFLQEAFTGRVLEGAVPGTYVTRAEATDADDPETDNAALRFSILQQGSPELFSIDELTGEIRTVQVGLDREVVAVYNLTLQVADMSGDGLTATASAIITLDDINDNAPEFTRDEFFMEAIEAVSGVDVGRLEVEDRDLPGSPNWVARFTILEGDPDGQFTIRTDPKTNEGVLSIVKALDYESCEHYELKVSVQNEAPLQAAALRAERGQAKVRVHVQDTNEPPVFQENPLRTSLAEGAPPGTLVATFSARDPDTEQLQRLSYSKDYDPEDWLQVDAATGRIQTQHVLSPASPFLKGGWYRAIVLAQDDASQPRTATGTLSIEILEVNDHAPVLAPPPPGSLCSEPHQGPGLLLGATDEDLPPHGAPFHFQLSPRLPELGRNWSLSQVNVSHARLRPRHQVPEGLHRLSLLLRDSGQPPQQREQPLNVTVCRCGKDGVCLPGAAALLAGGTGLSLGALVIVLASALLLLVLVLLVALRARFWKQSRGKGLLHGPQDDLRDNVLNYDEQGGGEEDQDAYDISQLRHPTALSLPLGPPPLRRDAPQGRLHPQPPRVLPTSPLDIADFINDGLEAADSDPSVPPYDTALIYDYEGDGSVAGTLSSILSSQGDEDQDYDYLRDWGPRFARLADMYGHPCGLEYGARWDHQAREGLSPGALLPRHRGRTA

SEQ ID NO: 39447 - protein, 790 aa, Homo sapiens
MVPAWLWLLCVSVPQALPKAQPAELSVEVPENYGGNFPLYLTKLPLPREGAEGQIVLSGDSGKATEGPFAMDPDSGFLLVTRALDREEQAEYQLQVTLEMQDGHVLWGPQPVLVHVKDENDQVPHFSQAIYRARLSRGTRPGIPFLFLEASDRDEPGTANSDLRFHILSQAPAQPSPDMFQLEPRLGALALSPKGSTSLDHALERTYQLLVQVKDMGDQASGHQATATVEVSIIESTWVSLEPIHLAENLKVLYPHHMAQVHWSGGDVHYHLESHPPGPFEVNAEGNLYVTRELDREAQAEYLLQVRAQNSHGEDYAAPLELHVLVMDENDNVPICPPRDPTVSIPELSPPGTEVTRLSAEDADAPGSPNSHVVYQLLSPEPEDGVEGRAFQVDPTSGSVTLGVLPLRAGQNILLLVLAMDLAGAEGGFSSTCEVEVAVTDINDHAPEFITSQIGPISLPEDVEPGTLVAMLTAIDADLEPAFRLMDFAIERGDTEGTFGLDWEPDSGHVRLRLCKNLSYEAAPSHEVVVVVQSVAKLVGPGPGPGATATVTVLVERVMPPPKLDQESYEASVPISAPAGSFLLTIQPSDPISRTLRFSLVNDSEGWLCIEKFSGEVHTAQSLQGAQPGDTYTVLVEAQDTDHGLIVSGPSKDPDLASGHGPYSFTLGPNPTVQRDWRLQTLNGSHAYLTLALHWVEPREHIIPVVVSHNAQMWQLLVRVIVCRCNVEGQCMRKVGRMKGMPTKLSAVGILVGTLVAIGIFLILIFTHWTMSRKKDPDQPADSVPLKATV

SEQ ID NO: 39448 - protein, 732 aa, Homo sapiens
MVPAWLWLLCVSVPQALPKAQPAELSVEVPENYGGNFPLYLTKLPLPREGAEGQIVLSGDSGKATEGPFAMDPDSGFLLVTRALDREEQAEYQLQVTLEMQDGHVLWGPQPVLVHVKDENDQASGHQATATVEVSIIESTWVSLEPIHLAENLKVLYPHHMAQVHWSGGDVHYHLESHPPGPFEVNAEGNLYVTRELDREAQAEYLLQVRAQNSHGEDYAAPLELHVLVMDENDNVPICPPRDPTVSIPELSPPGTEVTRLSAEDADAPGSPNSHVVYQLLSPEPEDGVEGRAFQVDPTSGSVTLGVLPLRAGQNILLLVLAMDLAGAEGGFSSTCEVEVAVTDINDHAPEFITSQIGPISLPEDVEPGTLVAMLTAIDADLEPAFRLMDFAIERGDTEGTFGLDWEPDSGHVRLRLCKNLSYEAAPSHEVVVVVQSVAKLVGPGPGPGATATVTVLVERVMPPPKLDQESYEASVPISAPAGSFLLTIQPSDPISRTLRFSLVNDSEGWLCIEKFSGEVHTAQSLQGAQPGDTYTVLVEAQDTDEPRLSASAPLVIHFLKAPPAPALTLAPVPSQYLCTPRQDHGLIVSGPSKDPDLASGHGPYSFTLGPNPTVQRDWRLQTLNGSHAYLTLALHWVEPREHIIPVVVSHNAQMWQLLVRVIVCRCNVEGQCMRKVGRMKGMPTKLSAVGILVGTLVAIGIFLILIFTHWTMSRKKDPDQPADSVPLKATV

SEQ ID NO: 39449 - protein, 829 aa, Homo sapiens
MVPAWLWLLCVSVPQALPKAQPAELSVEVPENYGGNFPLYLTKLPLPREGAEGQIVLSGDSGKATEGPFAMDPDSGFLLVTRALDREEQAEYQLQVTLEMQDGHVLWGPQPVLVHVKDENDQVPHFSQAIYRARLSRGTRPGIPFLFLEASDRDEPGTANSDLRFHILSQAPAQPSPDMFQLEPRLGALALSPKGSTSLDHALERTYQLLVQVKDMGDQASGHQATATVEVSIIESTWVSLEPIHLAENLKVLYPHHMAQVHWSGGDVHYHLESHPPGPFEVNAEGNLYVTRELDREAQAEYLLQVRAQNSHGEDYAAPLELHVLVMDENDNVPICPPRDPTVSIPELSPPGTEVTRLSAEDADAPGSPNSHVVYQLLSPEPEDGVEGRAFQVDPTSGSVTLGVLPLRAGQNILLLVLAMDLAGAEGGFSSTCEVEVAVTDINDHAPEFITSQIGPISLPEDVEPGTLVAMLTAIDADLEPAFRLMDFAIERGDTEGTFGLDWEPDSGHVRLRLCKNLSYEAAPSHEVVVVVQSVAKLVGPGPGPGATATVTVLVERVMPPPKLDQESYEASVPISAPAGSFLLTIQPSDPISRTLRFSLVNDSEGWLCIEKFSGEVHTAQSLQGAQPGDTYTVLVEAQDTDEPRLSASAPLVIHFLKAPPAPALTLAPVPSQYLCTPRQDHGLIVSGPSKDPDLASGHGPYSFTLGPNPTVQRDWRLQTLNGSHAYLTLALHWVEPREHIIPVVVSHNAQMWQLLVRVIVCRCNVEGQCMRKVGRMKGMPTKLSAVGILVGTLVAIGIFLILIFTHWTMSRKKDPDQPADSVPLKATV

SEQ ID NO: 39450 - protein, 807 aa, Homo sapiens
MVPAWLWLLCVSVPQALPKAQPAELSVEVPENYGGNFPLYLTKLPLPREGAEGQIVLSGDSGKATEGPFAMDPDSGFLLVTRALDREEQAEYQLQVTLEMQDGHVLWGPQPVLVHVKDENDQVPHFSQAIYRARLSRGTRPGIPFLFLEASDRDEPGTANSDLRFHILSQAPAQPSPDMFQLEPRLGALALSPKGSTSLDHALERTYQLLVQVKDMGDQASGHQATATVEVSIIESTWVSLEPIHLAENLKVLYPHHMAQVHWSGGDVHYHLESHPPGPFEVNAEGNLYVTRELDREAQAEYLLQVRAQNSHGEDYAAPLELHVLVMDENDNVPICPPRDPTVSIPELSPPGTEVTRLSAEDADAPGSPNSHVVYQLLSPEPEDGVEGRAFQVDPTSGSVTLGVLPLRAGQNILLLVLAMDLAGAEGGFSSTCEVEVAVTDINDHAPEFITSQIGPISLPEDVEPGTLVAMLTAIDADLEPAFRLMDFAIERGDTEGTFGLDWEPDSGHVRLRLCKNLSYEAAPSHEVVVVVQSVAKLVGPGPGPGATATVTVLVERVMPPPKLDQESYEASVPISAPAGSFLLTIQPSDPISRTLRFSLVNDSEGWLCIEKFSGEVHTAQSLQGAQPGDTYTVLVEAQDTALTLAPVPSQYLCTPRQDHGLIVSGPSKDPDLASGHGPYSFTLGPNPTVQRDWRLQTLNGSHAYLTLALHWVEPREHIIPVVVSHNAQMWQLLVRVIVCRCNVEGQCMRKVGRMKGMPTKLSAVGILVGTLVAIGIFLILIFTHWTMSRKKDPDQPADSVPLKATV

SEQ ID NO: 39451 - protein, 793 aa, Homo sapiens
MVPAWLWLLCVSVPQALPKAQPAELSVEVPENYGGNFPLYLTKLPLPREGAEGQIVLSGEQAEMQDGHVLWGPQPVLVHVKDENDQVPHFSQAIYRARLSRGTRPGIPFLFLEASDRDEPGTANSDLRFHILSQAPAQPSPDMFQLEPRLGALALSPKGSTSLDHALERTYQLLVQVKDMGDQASGHQATATVEVSIIESTWVSLEPIHLAENLKVLYPHHMAQVHWSGGDVHYHLESHPPGPFEVNAEGNLYVTRELDREAQAEYLLQVRAQNSHGEDYAAPLELHVLVMDENDNVPICPPRDPTVSIPELSPPGTEVTRLSAEDADAPGSPNSHVVYQLLSPEPEDGVEGRAFQVDPTSGSVTLGVLPLRAGQNILLLVLAMDLAGAEGGFSSTCEVEVAVTDINDHAPEFITSQIGPISLPEDVEPGTLVAMLTAIDADLEPAFRLMDFAIERGDTEGTFGLDWEPDSGHVRLRLCKNLSYEAAPSHEVVVVVQSVAKLVGPGPGPGATATVTVLVERVMPPPKLDQESYEASVPISAPAGSFLLTIQPSDPISRTLRFSLVNDSEGWLCIEKFSGEVHTAQSLQGAQPGDTYTVLVEAQDTDEPRLSASAPLVIHFLKAPPAPALTLAPVPSQYLCTPRQDHGLIVSGPSKDPDLASGHGPYSFTLGPNPTVQRDWRLQTLNGSHAYLTLALHWVEPREHIIPVVVSHNAQMWQLLVRVIVCRCNVEGQCMRKVGRMKGMPTKLSAVGILVGTLVAIGIFLILIFTHWTMSRKKDPDQPADSVPLKATV

SEQ ID NO: 39452 - protein, 832 aa, Homo sapiens
MILQAHLHSLCLLMLYLATGYGQEGKFSGPLKPMTFSIYEGQEPSQIIFQFKANPPAVTFELTGETDNIFVIEREGLLYYNRALDRETRSTHNLQVAALDANGIIVEGPVPITIKVKDINDNRPTFLQSKYEGSVRQNSRPGKPFLYVNATDLDDPATPNGQLYYQIVIQLPMINNVMYFQINNKTGAISLTREGSQELNPAKNPSYNLVISVKDMGGQSENSFSDTTSVDIIVTENIWKAPKPVEMVENSTDPHPIKITQVRWNDPGAQYSLVDKEKLPRFPFSIDQEGDIYVTQPLDREEKDAYVFYAVAKDEYGKPLSYPLEIHVKVKDINDNPPTCPSPVTVFEVQENERLGNSIGTLTAHDRDEENTANSFLNYRIVEQTPKLPMDGLFLIQTYAGMLQLAKQSLKKQDTPQYNLTIEVSDKDFKTLCFVQINVIDINDQIPIFEKSDYGNLTLAEDTNIGSTILTIQATDADEPFTGSSKILYHIIKGDSEGRLGVDTDPHTNTGYVIIKKPLDFETAAVSNIVFKAENPEPLVFGVKYNASSFAKFTLIVTDVNEAPQFSQHVFQAKVSEDVAIGTKVGNVTAKDPEGLDISYSLRGDTRGWLKIDHVTGEIFSVAPLDREAGSPYRVQVVATEVGGSSLSSVSEFHLILMDVNDNPPRLAKDYTGLFFCHPLSAPGSLIFEATDDDQHLFRGPHFTFSLGSGSLQNDWEVSKINGTHARLSTRHTEFEEREYVVLIRINDGGRPPLEGIVSLPVTFCSCVEGSCFRPAGHQTGIPTVGMAVGILLTTLLVIGIILAVVFIRIKKDKGKDNVESAQASEVKPLRS

SEQ ID NO: 39453 - protein, 832 aa, Homo sapiens; identical to SEQ ID NO: 39452

SEQ ID NO: 39454 - protein, 147 aa, Homo sapiens
MILQAHLHSLCLLMLYLATGYGQEGKFSGPLKPMTFSIYEGQEPSQIIFQFKANPPAVTFELTGETDNIFVIEREGLLYYNRALDRETRSTHNLQVAALDANGIIVEGPVPITIKVKDINDNRPTFLQSKYEGSVRQNSRPGKPFLY

SEQ ID NO: 39455 - protein, 790 aa, Homo sapiens
MKITSTSCICPVLVCLCFVQRCYGTAHHSSIKVMRNQTKHIEGETEVHHRPKRGWVWNQFFVLEEHMGPDPQYVGKLHSNSDKGDGSVKYILTGEGAGTIFIIDDTTGDIHSTKSLDREQKTHYVLHAQAIDRRTNKPLEPESEFIIKVQDINDNAPKFTDGPYIVTVPEMSDMGTSVLQVTATDADDPTYGNSARVVYSILQGQPYFSVDPKTGVIRTALHNMDREAREHYSVVIQAKDMAGQVGGLSGSTTVNITLTDVNDNPPRFPQKHYQLYVPESAQVGSAVGKIKANDADTGSNADMTYSIINGDGMGIFSISTDKETREGILSLKKPLNYEKKKSYTLNIEGANTHLDFRFSHLGPFKDATMLKIIVGDVDEPPLFSMPSYLMEVYENAKIGTVVGTVLAQDPDSTNSLVRYFINYNVEDDRFFNIDANTGTIRTTKVLDREETPWYNITVTASEIDNPDLLSHVTVGIRVLDVNDNPPELAREYDIIVCENSKPGQVIHTISATDKDDFANGPRFNFFLDERLPVNPNFTLKDNEDNTASILTRRRRFSRTVQDVYYLPIMISDGGIPSLSSSSTLTIRVCACERDGRVRTCHAEAFLSSAGLSTGALIAILLCVLILLAIVVLFITLRRSKKEPLIISEEDVRENVVTYDDEGGGEEDTEAFDITALRNPSAAEELKYRRDIRPEVKLTPRHQTSSTLESIDVQEFIKQRLAEADLDPSVPPYDSLQTYAYEGQRSEAGSISSLDSATTQSDQDYHYLGDWGPEFKKLAELYGEIESERTT

SEQ ID NO: 39456 - protein, 790 aa, Homo sapiens; identical to SEQ ID NO: 39455

SEQ ID NO: 39457 - protein, 574 aa, Homo sapiens
MKITSTSCICPVLVCLCFVQRCYGTAHHSSIKVMRNQTKHIEGETEVHHRPKRGWVWNQFFVLEEHMGPDPQYVGKLHSNSDKGDGSVKYILTGEGAGTIFIIDDTTGDIHSTKSLDREQKTHYVLHAQAIDRRTNKPLEPESEFIIKVQDINDNAPKFTDGPYIVTVPEMSDMGTSVLQVTATDADDPTYGNSARVVYSILQGQPYFSVDPKTGVIRTALHNMDREAREHYSVVIQAKDMAGQVGGLSGSTTVNITLTDVNDNPPRFPQKHYQLYVPESAQVGSAVGKIKANDADTGSNADMTYSIINGDGMGIFSISTDKETREGILSLKKPLNYEKKKSYTLNIEGANTHLDFRFSHLGPFKDATMLKIIVGDVDEPPLFSMPSYLMEVYENAKIGTVVGTVLAQDPDSTNSLVRYFINYNVEDDRFFNIDANTGTIRTTKVLDREETPWYNITVTASEIDNPDLLSHVTVGIRVLDVNDNPPELAREYDIIVCENSKPGQVIHTISATDKDDFANGPRFNFFLDERLPVNPNFTLKDNEAAAPSPSGFVHAREMGVCGPAMQKPSCPRLV

SEQ ID NO: 39458 - protein, 790 aa, Homo sapiens; identical to SEQ ID NO: 39455

SEQ ID NO: 39459 - protein, 790 aa, Homo sapiens; identical to SEQ ID NO: 39455

SEQ ID NO: 39460 - protein, 772 aa, Homo sapiens
MNCYLLLRFMLGIPLLWPCLGATENSQTKKVKQPVRSHLRVKRGWVWNQFFVPEEMNTTSHHIGQLRSDLDNGNNSFQYKLLGAGAGSTFIIDERTGDIYAIQKLDREERSLYILRAQVIDIATGRAVEPESEFVIKVSDINDNEPKFLDEPYEAIVPEMSPEGTLVIQVTASDADDPSSGNNARLLYSLLQGQPYFSVEPTTGVIRISSKMDRELQDEYWVIIQAKDMIGQPGALSGTTSVLIKLSDVNDNKPIFKESLYRLTVSESAPTGTSIGTIMAYDNDIGENAEMDYSIEEDDSQTFDIITNHETQEGIVILKKKVDFEHQNHYGIRAKVKNHHVPEQLMKYHTEASTTFIKIQVEDVDEPPLFLLPYYVFEVFEETPQGSFVGVVSATDPDNRKSPIRYSITRSKVFNINDNGTITTSNSLDREISAWYNLSITATEKYNIEQISSIPLYVQVLNINDHAPEFSQYYETYVCENAGSGQVIQTISAVDRDESIEEHHFYFNLSVEDTNNSSFTIIDNQDNTAVILTNRTGFNLQEEPVFYISILIADNGIPSLTSTNTLTIHVCDCGDSGSTQTCQYQELVLSMGFKTEVIIAILICIMIIFGFIFLTLGLKQRRKQILFPEKSEDFRENIFQYDDEGGGEEDTEAFDIAELRSSTIMRERKTRKTTSAEIRSLYRQSLQVGPDSAIFRKFILEKLEEANTDPCAPPFDSLQTYAFEGTGSLAGSLSSLESAVSDQDESYDYLNELGPRFKRLACMFGSAVQSNN

SEQ ID NO: 39461 - protein, 390 aa, Homo sapiens
MNTTSHHIGQLRSDLDNGNNSFQYKLLGAGAGSTFIIDERTGDIYAIQKLDREERSLYILRAQVIDIATGRAVEPESEFVIKVSDINDNEPKFLDEPYEAIVPEMSPEGTLVIQVTASDADDPSSGNNARLLYSLLQGQPYFSVEPTTGVIRISSKMDRELQDEYWVIIQAKDMIGQPGALSGTTSVLIKLSDVNDNKPIFKESLYRLTVSESAPTGTSIGTIMAYDNDIGENAEMDYSIEEDDSQTFDIITNHETQEGIVILKKKVDFEHQNHYGIRAKVKNHHVPEQLMKYHTEASTTFIKIQVEDVDEPPLFLLPYYVFEVFEETPQGSFVGVVSATDPDNRKSPIRYSITRSKVFNINDNGTITTSNSLDREISAWYNLSITATEK

SEQ ID NO: 39462 - protein, 490 aa, Homo sapiens
MNCYLLLRFMLGIPLLWPCLGATENSQTKKVKQPVRSHLRVKRGWVWNQFFVPEEMNTTSHHIGQLRSDLDNGNNSFQYKLLGAGAGSTFIIDERTGDIYAIQKLDREERSLYILRAQVIDIATGRAVEPESEFVIKVSDINDNEPKFLDEPYEAIVPEMSPEGTLVIQVTASDADDPSSGNNARLLYSLLQGQPYFSVEPTTGVIRISSKMDRELQDEYWVIIQAKDMIGQPGALSGTTSVLIKLSDVNDNKPIFKESLYRLTVSESAPTGTSIGTIMAYDNDIGENAEMDYSIEEDDSQTFDIITNHETQEGIVILKKKVDFEHQNHYGIRAKVKNHHVPEQLMKYHTEASTTFIKIQVEDVDEPPLFLLPYYVFEVFEETPQGSFVGVVSATDPDNRKSPIRYSITRSKVFNINDNGTITTSNSLDREISAWYNLSITATEKYNIEQISSIPLYVQVLNINDHAPEFSQYYETYVCENAGSGQGLFF

SEQ ID NO: 39463 - protein, 801 aa, Homo sapiens
MWTSGRMSNAKNWLGLGMSLYFWGLMDLTTTVLSDTPTPQGELEALLSDKPQSHQRTKRSWVWNQFFVLEEYTGTDPLYVGKLHSDMDRGDGSIKYILSGEGAGIVFTIDDTTGDIHAIQRLDREERAQYTLRAQALDRRTGRPMEPESEFIIKIQDINDNEPKFLDGPYVATVPEMSPVGTSVIQVTATDADDPTYGNSARVVYSILQGQPYFSVDSKTGVIRTALMNMDREAKEYYEVIIQAKDMGGQLGGLAGTTTVNITLSDVNDNPPRFPQKHYQMSVLESAPISSTVGRVFAKDLDEGINAEMKYTIVDGDGADAFDISTDPNFQVGIITVKKPLSFESKKSYTLKVEGANPHLEMRFLNLGPFQDTTTVHISVEDVDEPPVFEPGFYFVEVPEDVAIGTTIQIISAKDPDVTNNSIRYSIDRSSDPGRFFYVDITTGALMTARPLDREEFSWHNITVLAMEMNNPSQVGSVPVTIKVLDVNDNAPEFPRFYEAFVCENAKAGQLIQTVSAVDQDDPRNGQHFYYSLAPEAANNPNFTIRDNQDNTARILTRRSGFRQQEQSVFHLPILIADSGQPVLSSTGTLTIQVCSCDDDGHVMSCSPEAYMLPVSLSRGALIAILACIFVLLVLVLLILSMRRHRKQPYIIDDEENIHENIVRYDDEGGGEEDTEAFDIAAMWNPREAQAGAAPKTRQDMLPEIESLSRYVPQTCAVNSTVHSYVLAKLYEADMDLWAPPFDSLQTYMFEGDGSVAGSLSSLQSATSDSEQSFDFLTDWGPRFRKLAELYGASEGPAPLW

SEQ ID NO: 39464 - protein, 801 aa, Homo sapiens; identical to SEQ ID NO: 39463

SEQ ID NO: 39465 - protein, 801 aa, Homo sapiens; identical to SEQ ID NO: 39463

SEQ ID NO: 39466 - protein, 828 aa, Homo sapiens
MRPRPEGRGLRAGVALSPALLLLLLLPPPPTLLGRLWAAGTPSPSAPGARQDGALGAGRVKRGWVWNQFFVVEEYTGTEPLYVGKIHSDSDEGDGAIKYTISGEGAGTIFLIDELTGDIHAMERLDREQKTFYTLRAQARDRATNRLLEPESEFIIKVQDINDSEPRFLHGPYIGSVAELSPTGTSVMQVMASDADDPTYGSSARLVYSVLDGEHHFTVDPKTGVIRTAVPDLDRESQERYEVVIQATDMAGQLGGLSGSTTVTIVVTDVNDNPPRFPQKMYQFSIQESAPIGTAVGRVKAEDSDVGENTDMTYHLKDESSSGGDVFKVTTDSDTQEAIIVVQKRLDFESQPVHTVILEALNKFVDPRFADLGTFRDQAIVRVAVTDVDEPPEFRPPSGLLEVQEDAQVGSLVGVVTARDPDAANRPVRYAIDRESDLDQIFDIDADTGAIVTGKGLDRETAGWHNITVLAMEADNHAQLSRASLRIRILDVNDNPPELATPYEAAVCEDAKPGQLIQTISVVDRDEPQGGHRFYFRLVPEAPSNPHFSLLDIQDNTAAVHTQHVGFNRQEQDVFFLPILVVDSGPPTLSSTGTLTIRICGCDSSGTIQSCNTTAFVMAASLSPGALIALLVCVLILVVLVLLILTLRRHHKSHLSSDEDEDMRDNVIKYNDEGGGEQDTEAYDMSALRSLYDFGELKGGDGGGSAGGGAGGGSGGGAGSPPQAHLPSERHSLPQGPPSPEPDFSVFRDFISRKVALADGDLSVPPYDAFQTYAFEGADSPAASLSSLHSGSSGSEQDFAYLSSWGPRFRPLAALYAGHRGDDEAQAS

SEQ ID NO: 39467 - protein, 828 aa, Homo sapiens; identical to SEQ ID NO: 39466

SEQ ID NO: 39468 - protein, 829 aa, Homo sapiens
MGLPRGPLASLLLLQVCWLQCAASEPCRAVFREAEVTLEAGGAEQEPGQALGKVFMGCPGQEPALFSTDNDDFTVRNGETVQERRSLKERNPLKIFPSKRILRRHKRDWVVAPISVPENGKGPFPQRLNQLKSNKDRDTKIFYSITGPGADSPPEGVFAVEKETGWLLLNKPLDREEIAKYELFGHAVSENGASVEDPMNISIIVTDQNDHKPKFTQDTFRGSVLEGVLPGTSVMQVTATDEDDAIYTYNGVVAYSIHSQEPKDPHDLMFTIHRSTGTISVISSGLDREKVPEYTLTIQATDMDGDGSTTTAVAVVEILDANDNAPMFDPQKYEAHVPENAVGHEVQRLTVTDLDAPNSPAWRATYLIMGGDDGDHFTITTHPESNQGILTTRKGLDFEAKNQHTLYVEVTNEAPFVLKLPTSTATIVVHVEDVNEAPVFVPPSKVVEVQEGIPTGEPVCVYTAEDPDKENQKISYRILRDPAGWLAMDPDSGQVTAVGTLDREDEQFVRNNIYEVMVLAMDNGSPPTTGTGTLLLTLIDVNDHGPVPEPRQITICNQSPVRQVLNITDKDLSPHTSPFQAQLTDDSDIYWTAEVNEEGDTVVLSLKKFLKQDTYDVHLSLSDHGNKEQLTVIRATVCDCHGHVETCPGPWKGGFILPVLGAVLALLFLLLVLLLLVRKKRKIKEPLLLPEDDTRDNVFYYGEEGGGEEDQDYDITQLHRGLEARPEVVLRNDVAPTIIPTPMYRPRPANPDEIGNFIIENLKAANTDPTAPPYDTLLVFDYEGSGSDAASLSSLTSSASDQDQDYDYLNEWGSRFKKLADMYGGGEDD

SEQ ID NO: 39469 - protein, 784 aa, Homo sapiens
MGLPRGPLASLLLLQVCWLQCAASEPCRAVFREAEVTLEAGGAEQEPGQALGKVFMGCPGQEPALFSTDNDDFTVRNGETVQERRSLKERNPLKIFPSKRILRRHKRDWVVAPISVPENGKGPFPQRLNQLKSNKDRDTKIFYSITGPGADSPPEGVFAVEKETGWLLLNKPLDREEIAKYELFGHAVSENGASVEDPMNISIIVTDQNDHKPKFTQDTFRGSVLEGVLPGTSVMQVTATDEDDAIYTYNGVVAYSIHSQEPKDPHDLMFTIHRSTGTISVISSGLDREKVPEYTLTIQATDMDGDGSTTTAVAVVEILDANDNAPMFDPQKYEAHVPENAVGHEVQRLTVTDLDAPNSPAWRATYLIMGGDDGDHFTITTHPESNQGILTTRKGLDFEAKNQHTLYVEVTNEAPFVLKLPTSTATIVVHVEDVNEAPVFVPPSKVVEVQEGIPTGEPVCVYTAEDPDKENQKISYRILRDPAGWLAMDPDSGQVTAVGTLDREDEQFVRNNIYEVMVLAMDNGSPPTTGTGTLLLTLIDVNDHGPVPEPRQITICNQSPVRQVLNITDKDLSPHTSPFQAQLTDDSDIYWTAEVNEEGDTVVLSLKKFLKQDTYDVHLSLSDHGNKEQLTVIRATVCDCHGHVETCPGPWKGGFILPVLGAVLALLFLLLVLLLLVRKKRKIKEPLLLPEDDTRDNVFYYGEEGGGEEDQDYDITQLHRGLEARPEVVLRNDVAPTIIPTPMYRPRPANPDEIGNFIIEGRGERGSQRGNGGLQLARGRTRRS

SEQ ID NO: 39470 - protein, 774 aa, Homo sapiens
MGCPGQEPALFSTDNDDFTVRNGETVQERRSLKERNPLKIFPSKRILRRHKRDWVVAPISVPENGKGPFPQRLNQLKSNKDRDTKIFYSITGPGADSPPEGVFAVEKETGWLLLNKPLDREEIAKYELFGHAVSENGASVEDPMNISIIVTDQNDHKPKFTQDTFRGSVLEGVLPGTSVMQVTATDEDDAIYTYNGVVAYSIHSQEPKDPHDLMFTIHRSTGTISVISSGLDREKVPEYTLTIQATDMDGDGSTTTAVAVVEILDANDNAPMFDPQKYEAHVPENAVGHEVQRLTVTDLDAPNSPAWRATYLIMGGDDGDHFTITTHPESNQGILTTRKGLDFEAKNQHTLYVEVTNEAPFVLKLPTSTATIVVHVEDVNEAPVFVPPSKVVEVQEGIPTGEPVCVYTAEDPDKENQKISYRILRDPAGWLAMDPDSGQVTAVGTLDREDEQFVRNNIYEVMVLAMDNGSPPTTGTGTLLLTLIDVNDHGPVPEPRQITICNQSPVRQVLNITDKDLSPHTSPFQAQLTDDSDIYWTAEVNEEGDTVVLSLKKFLKQDTYDVHLSLSDHGNKEQLTVIRATVCDCHGHVETCPGPWKGGFILPVLGAVLALLFLLLVLLLLVRKKRKIKEPLLLPEDDTRDNVFYYGEEGGGEEDQDYDITQLHRGLEARPEVVLRNDVAPTIIPTPMYRPRPANPDEIGNFIIENLKAANTDPTAPPYDTLLVFDYEGSGSDAASLSSLTSSASDQDQDYDYLNEWGSRFKKLADMYGGGEDD

SEQ ID NO: 39471 - protein, 916 aa, Homo sapiens
MTAGAGVLLLLLSLSGALRAHNEDLTTRETCKAGFSEDDYTALISQNILEGEKLLQVKFSSCVGTKGTQYETNSMDFKVGADGTVFATRELQVPSEQVAFTVTAWDSQTAEKWDAVVRLLVAQTSSPHSGHKPQKGKKVVALDPSPPPKDTLLPWPQHQNANGLRRRKRDWVIPPINVPENSRGPFPQQLVRIRSDKDNDIPIRYSITGVGADQPPMEVFSIDSMSGRMYVTRPMDREEHASYHLRAHAVDMNGNKVENPIDLYIYVIDMNDNRPEFINQVYNGSVDEGSKPGTYVMTVTANDADDSTTANGMVRYRIVTQTPQSPSQNMFTINSETGDIVTVAAGLDREKVQQYTVIVQATDMEGNLNYGLSNTATAIITVTDVNDNPPEFTASTFAGEVPENRVETVVANLTVMDRDQPHSPNWNAVYRIISGDPSGHFSVRTDPVTNEGMVTVVKAVDYELNRAFMLTVMVSNQAPLASGIQMSFQSTAGVTISIMDINEAPYFPSNHKLIRLEEGVPPGTVLTTFSAVDPDRFMQQAVRYSKLSDPASWLHINATNGQITTAAVLDRESLYTKNNVYEATFLAADNGIPPASGTGTLQIYLIDINDNAPELLPKEAQICEKPNLNAINITAADADVDPNIGPYVFELPFVPAAVRKNWTITRLNGDYAQLSLRILYLEAGMYDVPIIVTDSGNPPLSNTSIIKVKVCPCDDNGDCTTIGAVAAAGLGTGAIVAILICILILLTMVLLFVMWMKRREKERHTKQLLIDPEDDVRDNILKYDEEGGGEEDQDYDLSQLQQPEAMGHVPSKAPGVRRVDERPVGAEPQYPIRPMVPHPGDIGDFINEGLRAADNDPTAPPYDSLLVFDYEGSGSTAGSVSSLNSSSSGDQDYDYLNDWGPRFKKLADMYGGGEED

SEQ ID NO: 39472 - protein, 824 aa, Homo sapiens
MPKSTGMLHGGRENAGVKFSSCVGTKGTQYETSSPHSGHKPQKGKKVVALDPSPPPKDTLLPWPQHQNANGLRRRKRDWVIPPINVPENSRGPFPQQLVRIRSDKDNDIPIRYSITGVGADQPPMEVFSIDSMSGRMYVTRPMDREEHASYHLRAHAVDMNGNKVENPIDLYIYVIDMNDNRPEFINQVYNGSVDEGSKPGTYVMTVTANDADDSTTANGMVRYRIVTQTPQSPSQNMFTINSETGDIVTVAAGLDREKVQQYTVIVQATDMEGNLNYGLSNTATAIITVTDVNDNPPEFTASTFAGEVPENRVETVVANLTVMDRDQPHSPNWNAVYRIISGDPSGHFSVRTDPVTNEGMVTVVKAVDYELNRAFMLTVMVSNQAPLASGIQMSFQSTAGVTISIMDINEAPYFPSNHKLIRLEEGVPPGTVLTTFSAVDPDRFMQQAVRYSKLSDPASWLHINATNGQITTAAVLDRESLYTKNNVYEATFLAADNGIPPASGTGTLQIYLIDINDNAPELLPKEAQICEKPNLNAINITAADADVDPNIGPYVFELPFVPAAVRKNWTITRLNGDYAQLSLRILYLEAGMYDVPIIVTDSGNPPLSNTSIIKVKVCPCDDNGDCTTIGAVAAAGLGTGAIVAILICILILLTMVLLFVMWMKRREKERHTKQLLIDPEDDVRDNILKYDEEGGGEEDQDYDLSQLQQPEAMGHVPSKAPGVRRVDERPVGAEPQYPIRPMVPHPGDIGDFINEGLRAADNDPTAPPYDSLLVFDYEGSGSTAGSVSSLNSSSSGDQDYDYLNDWGPRFKKLADMYGGGEED

SEQ ID NO: 39473 - protein, 842 aa, Homo sapiens
MDFKVGADGTVFATRELQVPSEQVAFTVTAWDSQTAEKWDAVVRLLVAQTSSPHSGHKPQKGKKVVALDPSPPPKDTLLPWPQHQNANGLRRRKRDWVIPPINVPENSRGPFPQQLVRIRSDKDNDIPIRYSITGVGADQPPMEVFSIDSMSGRMYVTRPMDREEHASYHLRAHAVDMNGNKVENPIDLYIYVIDMNDNRPEFINQVYNGSVDEGSKPGTYVMTVTANDADDSTTANGMVRYRIVTQTPQSPSQNMFTINSETGDIVTVAAGLDREKVQQYTVIVQATDMEGNLNYGLSNTATAIITVTDVNDNPPEFTASTFAGEVPENRVETVVANLTVMDRDQPHSPNWNAVYRIISGDPSGHFSVRTDPVTNEGMVTVVKAVDYELNRAFMLTVMVSNQAPLASGIQMSFQSTAGVTISIMDINEAPYFPSNHKLIRLEEGVPPGTVLTTFSAVDPDRFMQQAVRYSKLSDPASWLHINATNGQITTAAVLDRESLYTKNNVYEATFLAADNGIPPASGTGTLQIYLIDINDNAPELLPKEAQICEKPNLNAINITAADADVDPNIGPYVFELPFVPAAVRKNWTITRLNGDYAQLSLRILYLEAGMYDVPIIVTDSGNPPLSNTSIIKVKVCPCDDNGDCTTIGAVAAAGLGTGAIVAILICILILLTMVLLFVMWMKRREKERHTKQLLIDPEDDVRDNILKYDEEGGGEEDQDYDLSQLQQPEAMGHVPSKAPGVRRVDERPVGAEPQYPIRPMVPHPGDIGDFINEGLRAADNDPTAPPYDSLLVFDYEGSGSTAGSVSSLNSSSSGDQDYDYLNDWGPRFKKLADMYGGGEED

SEQ ID NO: 39474 - protein, 785 aa, Homo sapiens
MKLGKVEFCHFLQLIALFLCFSGMSQAELSRSRSKPYFQSGRSRTKRSWVWNQFFVLEEYMGSDPLYVGKLHSDVDKGDGSIKYILSGEGASSIFIIDENTGDIHATKRLDREEQAYYTLRAQALDRLTNKPVEPESEFVIKIQDINDNEPKFLDGPYTAGVPEMSPVGTSVVQVTATDADDPTYGNSARVVYSILQGQPYFSVEPKTGVIKTALPNMDREAKDQYLLVIQAKDMVGQNGGLSGTTSVTVTLTDVNDNPPRFPRRSYQYNVPESLPVASVVARIKAADADIGANAEMEYKIVDGDGLGIFKISVDKETQEGIITIQKELDFEAKTSYTLRIEAANKDADPRFLSLGPFSDTTTVKIIVEDVDEPPVFSSPLYPMEVSEATQVGNIIGTVAAHDPDSSNSPVRYSIDRNTDLERYFNIDANSGVITTAKSLDRETNAIHNITVLAMESQNPSQVGRGYVAITILDINDNAPEFAMDYETTVCENAQPGQVIQKISAVDKDEPSNGHQFYFSLTTDATNNHNFSLKDNKDNTASILTRRNGFRRQEQSVYYLPIFIVDSGSPSLSSTNTLTIRVCDCDADGVAQTCNAEAYVLPAGLSTGALIAILACVLTLLVLILLIVTMRRRKKEPLIFDEERDIRENIVRYDDEGGGEEDTEAFDMAALRNLNVIRDTKTRRDVTPEIQFLSRPAFKSIPDNVIFREFIWERLKEADVDPGAPPYDSLQTYAFEGNGSVAESLSSLDSISSNSDQNYDYLSDWGPRFKRLADMYGTGQESLYS

SEQ ID NO: 39475 - protein, 785 aa, Homo sapiens; identical to SEQ ID NO: 39474

SEQ ID NO: 39476 - protein, 785 aa, Homo sapiens; identical to SEQ ID NO: 39474

SEQ ID NO: 39477 - protein, 630 aa, Homo sapiens
MKLGKVEFCHFLQLIALFLCFSGMSQAELSRSRSKPYFQSGRSRTKRSWVWNQFFVLEEYMGSDPLYVGKLHSDVDKGDGSIKYILSGEGASSIFIIDENTGDIHATKRLDREEQAYYTLRAQALDRLTNKPVEPESEFVIKIQDINDNEPKFLDGPYTAGVPEMSPVGTSVVQVTATDADDPTYGNSARVVYSILQGQPYFSVEPKTGVIKTALPNMDREAKDQYLLVIQAKDMVGQNGGLSGTTSVTVTLTDVNDNPPRFPRRSYQYNVPESLPVASVVARIKAADADIGANAEMEYKIVDGDGLGIFKISVDKETQEGIITIQKELDFEAKTSYTLRIEAANKDADPRFLSLGPFSDTTTVKIIVEDVDEPPVFSSPLYPMEVSEATQVGNIIGTVAAHDPDSSNSPVRYSIDRNTDLERYFNIDANSGVITTAKSLDRETNAIHNITVLAMESQNPSQVGRGYVAITILDINDNAPEFAMDYETTVCENAQPGQVIQKISAVDKDEPSNGHQFYFSLTTDATNNHNFSLKDNKDNTASILTRRNGFRRQEQSVYYLPIFIVDSGSPSLSSTNTLTIRVCDCDADGVAQTCNAEAYVLPAGLSTGALIAILACVLTLLGRYCFQGLL

SEQ ID NO: 39478 - protein, 799 aa, Homo sapiens
MPERLAEMLLDLWTPLIILWITLPPCIYMAPMNQSQVLMSGSPLELNSLGEEQRILNRSKRGWVWNQMFVLEEFSGPEPILVGRLHTDLDPGSKKIKYILSGDGAGTIFQINDVTGDIHAIKRLDREEKAEYTLTAQAVDWETSKPLEPPSEFIIKVQDINDNAPEFLNGPYHATVPEMSILGTSVTNVTATDADDPVYGNSAKLVYSILEGQPYFSIEPETAIIKTALPNMDREAKEEYLVVIQAKDMGGHSGGLSGTTTLTVTLTDVNDNPPKFAQSLYHFSVPEDVVLGTAIGRVKANDQDIGENAQSSYDIIDGDGTALFEITSDAQAQDGIIRLRKPLDFETKKSYTLKVEAANVHIDPRFSGRGPFKDTATVKIVVEDADEPPVFSSPTYLLEVHENAALNSVIGQVTARDPDITSSPIRFSIDRHTDLERQFNINADDGKITLATPLDRELSVWHNITIIATEIRNHSQISRVPVAIKVLDVNDNAPEFASEYEAFLCENGKPGQVIQTVSAMDKDDPKNGHYFLYSLLPEMVNNPNFTIKKNEDNSLSILAKHNGFNRQKQEVYLLPIIISDSGNPPLSSTSTLTIRVCGCSNDGVVQSCNVEAYVLPIGLSMGALIAILACIILLLVIVVLFVTLRRHKNEPLIIKDDEDVRENIIRYDDEGGGEEDTEAFDIATLQNPDGINGFLPRKDIKPDLQFMPRQGLAPVPNGVDVDEFINVRLHEADNDPTAPPYDSIQIYGYEGRGSVAGSLSSLESTTSDSDQNFDYLSDWGPRFKRLGELYSVGESDKET

SEQ ID NO: 39479 - protein, 799 aa, Homo sapiens; identical to SEQ ID NO: 39478

SEQ ID NO: 39480 - protein, 789 aa, Homo sapiens
MRTYHYIPLFIWTYMFHTVDTILLQEKPNSYLSSKKIAGLTKDDGKMLRRTKRGWMWNQFFLLEEYTGTDTQYVGKLHTDQDKGDGNLKYILTGDGAGSLFVIDENTGDIHAAKKLDREEKSLYILRAKAIDRKTGRQVEPESEFIIKIHDINDNEPKFTKDLYTASVPEMSGVGTSVIQVTATDADDANYGNSAKVVYSILQGQPYFSVDPESGIIKTALPDMSRENREQYQVVIQAKDMGGQMGGLSGTTTVNITLTDVNNNPPRFPQSTYQFNSPESVPLGTHLGRIKANDPDVGENAEMEYSIAEGDGADMFDVITDKDTQEGIITVKQNLDFENQMLYTLRVDASNTHPDPRFLHLGPFKDTAVVKISVEDIDEPPVFTKVSYLIEVDEDVKEGSIIGQVTAYDPDARNNLIKYSVDRHTDMDRIFGIHSENGSIFTLKALDRESSPWHNITVTATEINNPKQSSHIPVFIRILDINDHAPEFAMYYETFVCENAKPGQLIQTVSVMDKDDPPRGHKFFFEPVPEFTLNPNFTIVDNKDNTAGIMTRKDGYSRNKMSTYLLPILIFDNDYPIQSSTGTLTIRVCACDNQGNMQSCTAEALILSAGLSTGALVAILLCVLILLILVVLFAALKRQRKKEPLIISKDDVRDNIVTYNDEGGGEEDTQAFDIGTLRNPEAREDSKLRRDVMPETIFQIRRTVPLWENIDVQDFIHRRLKENDADPSAPPYDSLATYAYEGNDSIADSLSSLESLTADCNQDYDYLSDWGPRFKKLADMYGGDDSDRD

SEQ ID NO: 39481 - protein, 81 aa, Homo sapiens
MRTYHYIPLFIWTYMFHTVDTILLQEKPNSYLSSKKIAGLTKDDGKMLRRTKRGWMWNQFFLLEEYTGTDTQYVGKLHTDQ

SEQ ID NO: 39482 - protein, 132 aa, Homo sapiens
MRTYHYIPLFIWTYMFHTVDTILLQEKPNSYLSSKKIAGLTKDDGKMLRRTKRGWMWNQFFLLEEYTGTDTQYVGKLHTDQDKGDGNLKYILTGDGAGSLFVIDENTGDIHAAKKLDREEKSLYILRAKAID

SEQ ID NO: 39483 - protein, 3014 aa, Homo sapiens
MAPPPPPVLPVLLLLAAAAALPAMGLRAAAWEPRVPGGTRAFALRPGCTYAVGAACTPRAPRELLDVGRDGRLAGRRRVSGAGRPLPLQVRLVARSAPTALSRRLRARTHLPGCGARARLCGTGARLCGALCFPVPGGCAAAQHSALAAPTTLPACRCPPRPRPRCPGRPICLPPGGSVRLRLLCALRRAAGAVRVGLALEAATAGTPSASPSPSPPLPPNLPEARAGPARRARRGTSGRGSLKFPMPNYQVALFENEPAGTLILQLHAHYTIEGEEERVSYYMEGLFDERSRGYFRIDSATGAVSTDSVLDRETKETHVLRVKAVDYSTPPRSATTYITVLVKDTNDHSPVFEQSEYRERVRENLEVGYEVLTIRASDRDSPINANLRYRVLGGAWDVFQLNESSGVVSTRAVLDREEAAEYQLLVEANDQGRNPGPLSATATVYIEVEDENDNYPQFSEQNYVVQVPEDVGLNTAVLRVQATDRDQGQNAAIHYSILSGNVAGQFYLHSLSGILDVINPLDFEDVQKYSLSIKAQDGGRPPLINSSGVVSVQVLDVNDNEPIFVSSPFQATVLENVPLGYPVVHIQAVDADSGENARLHYRLVDTASTFLGGGSAGPKNPAPTPDFPFQIHNSSGWITVCAELDREEVEHYSFGVEAVDHGSPPMSSSTSVSITVLDVNDNDPVFTQPTYELRLNEDAAVGSSVLTLQARDRDANSVITYQLTGGNTRNRFALSSQRGGGLITLALPLDYKQEQQYVLAVTASDGTRSHTAHVLINVTDANTHRPVFQSSHYTVSVSEDRPVGTSIATLSANDEDTGENARITYVIQDPVPQFRIDPDSGTMYTMMELDYENQVAYTLTIMAQDNGIPQKSDTTTLEILILDANDNAPQFLWDFYQGSIFEDAPPSTSILQVSATDRDSGPNGRLLYTFQGGDDGDGDFYIEPTSGVIRTQRRLDRENVAVYNLWALAVDRGSPTPLSASVEIQVTILDINDNAPMFEKDELELFVEENNPVGSVVAKIRANDPDEGPNAQIMYQIVEGDMRHFFQLDLLNGDLRAMVELDFEVRREYVLVVQATSAPLVSRATVHILLVDQNDNPPVLPDFQILFNNYVTNKSNSFPTGVIGCIPAHDPDVSDSLNYTFVQGNELRLLLLDPATGELQLSRDLDNNRPLEALMEVSVSDGIHSVTAFCTLRVTIITDDMLTNSITVRLENMSQEKFLSPLLALFVEGVAAVLSTTKDDVFVFNVQNDTDVSSNILNVTFSALLPGGVRGQFFPSEDLQEQIYLNRTLLTTISTQRVLPFDDNICLREPCENYMKCVSVLRFDSSAPFLSSTTVLFRPIHPINGLRCRCPPGFTGDYCETEIDLCYSDPCGANGRCRSREGGYTCECFEDFTGEHCEVDARSGRCANGVCKNGGTCVNLLIGGFHCVCPPGEYERPYCEVTTRSFPPQSFVTFRGLRQRFHFTISLTFATQERNGLLLYNGRFNEKHDFIALEIVDEQVQLTFSAGETTTTVAPKVPSGVSDGRWHSVQVQYYNKPNIGHLGLPHGPSGEKMAVVTVDDCDTTMAVRFGKDIGNYSCAAQGTQTGSKKSLDLTGPLLLGGVPNLPEDFPVHNRQFVGCMRNLSVDGKNVDMAGFIANNGTREGCAARRNFCDGRRCQNGGTCVNRWNMYLCECPLRFGGKNCEQAMPHPQLFSGESVVSWSDLNIIISVPWYLGLMFRTRKEDSVLMEATSGGPTSFRLQILNNYLQFEVSHGPSDVESVMLSGLRVTDGEWHHLLIELKNVKEDSEMKHLVTMTLDYGMDQNKADIGGMLPGLTVRSVVVGGASEDKVSVRRGFRGCMQGVRMGGTPTNVATLNMNNALKVRVKDGCDVDDPCTSSPCPPNSRCHDAWEDYSCVCDKGYLGINCVDACHLNPCENMGACVRSPGSPQGYVCECGPSHYGPYCENKLDLPCPRGWWGNPVCGPCHCAVSKGFDPDCNKTNGQCQCKENYYKLLAQDTCLPCDCFPHGSHSRTCDMATGQCACKPGVIGRQCNRCDNPFAEVTTLGCEVIYNGCPKAFEAGIWWPQTKFGQPAAVPCPKGSVGNAVRHCSGEKGWLPPELFNCTTISFVDLRAMNEKLSRNETQVDGARALQLVRALRSATQHTGTLFGNDVRTAYQLLGHVLQHESWQQGFDLAATQDADFHEDVIHSGSALLAPATRAAWEQIQRSEGGTAQLLRRLEGYFSNVARNVRRTYLRPFVIVTANMILAVDIFDKFNFTGARVPRFDTIHEEFPRELESSVSFPADFFRPPEEKEGPLLRPAGRRTTPQTTRPGPGTEREAPISRRRRHPDDAGQFAVALVIIYRTLGQLLPERYDPDRRSLRLPHRPIINTPMVSTLVYSEGAPLPRPLERPVLVEFALLEVEERTKPVCVFWNHSLAVGGTGGWSARGCELLSRNRTHVACQCSHTASFAVLMDISRRENGEVLPLKIVTYAAVSLSLAALLVAFVLLSLVRMLRSNLHSIHKHLAVALFLSQLVFVIGINQTENPFLCTVVAILLHYIYMSTFAWTLVESLHVYRMLTEVRNIDTGPMRFYYVVGWGIPAIVTGLAVGLDPQGYGNPDFCWLSLQDTLIWSFAGPIGAVIIINTVTSVLSAKVSCQRKHHYYGKKGIVSLLRTAFLLLLLISATWLLGLLAVNRDALSFHYLFAIFSGLQGPFVLLFHCVLNQEVRKHLKGVLGGRKLHLEDSATTRATLLTRSLNCNTTFGDGPDMLRTDLGESTASLDSIVRDEGIQKLGVSSGLVRGSHGEPDASLMPRSCKDPPGHDSDSDSELSLDEQSSSYASSHSSDSEDDGVGAEEKWDPARGAVHSTPKGDAVANHVPAGWPDQSLAESDSEDPSGKPRLKVETKVSVELHREEQGSHRGEYPPDQESGGAARLASSQPPEQRKGILKNKVTYPPPLTLTEQTLKGRLREKLADCEQSPTSSRTSSLGSGGPDCAITVKSPGREPGRDHLNGVAMNVRTGSAQADGSDSEKP

SEQ ID NO: 39484 - protein, 1397 aa, Homo sapiens
MAPPPPPVLPVLLLLAAAAALPAMGLRAAAWEPRVPGGTRAFALRPGCTYAVGAACTPRAPRELLDVGRDGRLAGRRRVSGAGRPLPLQVRLVARSAPTALSRRLRARTHLPGCGARARLCGTGARLCGALCFPVPGGCAAAQHSALAAPTTLPACRCPPRPRPRCPGRPICLPPGGSVRLRLLCALRRAAGAVRVGLALEAATAGTPSASPSPSPPLPPNLPEARAGPARRARRGTSGRGSLKFPMPNYQVALFENEPAGTLILQLHAHYTIEGEEERVSYYMEGLFDERSRGYFRIDSATGAVSTDSVLDRETKETHVLRVKAVDYSTPPRSATTYITVLVKDTNDHSPVFEQSEYRERVRENLEVGYEVLTIRASDRDSPINANLRYRVLGGAWDVFQLNESSGVVSTRAVLDREEAAEYQLLVEANDQGRNPGPLSATATVYIEVEDENDNYPQFSEQNYVVQVPEDVGLNTAVLRVQATDRDQGQNAAIHYSILSGNVAGQFYLHSLSGILDVINPLDFEDVQKYSLSIKAQDGGRPPLINSSGVVSVQVLDVNDNEPIFVSSPFQATVLENVPLGYPVVHIQAVDADSGENARLHYRLVDTASTFLGGGSAGPKNPAPTPDFPFQIHNSSGWITVCAELDREEVEHYSFGVEAVDHGSPPMSSSTSVSITVLDVNDNDPVFTQPTYELRLNEDAAVGSSVLTLQARDRDANSVITYQLTGGNTRNRFALSSQRGGGLITLALPLDYKQEQQYVLAVTASDGTRSHTAHVLINVTDANTHRPVFQSSHYTVSVSEDRPVGTSIATLSANDEDTGENARITYVIQDPVPQFRIDPDSGTMYTMMELDYENQVAYTLTIMAQDNGIPQKSDTTTLEILILDANDNAPQFLWDFYQGSIFEDAPPSTSILQVSATDRDSGPNGRLLYTFQGGDDGDGDFYIEPTSGVIRTQRRLDRENVAVYNLWALAVDRGSPTPLSASVEIQVTILDINDNAPMFEKDELELFVEENNPVGSVVAKIRANDPDEGPNAQIMYQIVEGDMRHFFQLDLLNGDLRAMVELDFEVRREYVLVVQATSAPLVSRATVHILLVDQNDNPPVLPDFQILFNNYVTNKSNSFPTGVIGCIPAHDPDVSDSLNYTFVQGNELRLLLLDPATGELQLSRDLDNNRPLEALMEVSVSDGIHSVTAFCTLRVTIITDDMLTNSITVRLENMSQEKFLSPLLALFVEGVAAVLSTTKDDVFVFNVQNDTDVSSNILNVTFSALLPGGVRGQFFPSEDLQEQIYLNRTLLTTISTQRVLPFDDNICLREPCENYMKCVSVLRFDSSAPFLSSTTVLFRPIHPINGLRCRCPPGFTGDYCETEIDLCYSDPCGANGRCRSREGGYTCECFEDFTAVS

SEQ ID NO: 39485 - protein, 772 aa, Homo sapiens
  VARIANT 1: note = MOD_RES - Any amino acid
XDFPFQIHNSSGWITVCAELDREEVEHYSFGVEAVDHGSPPMSSSTSVSITVLDVNDNDPVFTQPTYELRLNEDAAVGSSVLTLQARDRDANSVITYQLTGGNTRNRFALSSQRGGGLITLALPLDYKQEQQYVLAVTASDGTRSHTAHVLINVTDANTHRPVFQSSHYTVSVSEDRPVGTSIATLSANDEDTGENARITYVIQDPVPQFRIDPDSGTMYTMMELDYENQVAYTLTIMAQDNGIPQKSDTTTLEILILDANDNAPQFLWDFYQGSIFEDAPPSTSILQVSATDRDSGPNGRLLYTFQGGDDGDGDFYIEPTSGVIRTQRRLDRENVAVYNLWALAVDRGSPTPLSASVEIQVTILDINDNAPMFEKDELELFVEENNPVGSVVAKIRANDPDEGPNAQIMYQIVEGDMRHFFQLDLLNGDLRAMVELDFEVRREYVLVVQATSAPLVSRATVHILLVDQNDNPPVLPDFQILFNNYVTNKSNSFPTGVIGCIPAHDPDVSDSLNYTFVQGNELRLLLLDPATGELQLSRDLDNNRPLEALMEVSVSDGIHSVTAFCTLRVTIITDDMLTNSITVRLENMSQEKFLSPLLALFVEGVAAVLSTTKDDVFVFNVQNDTDVSSNILNVTFSALLPGGVRGQFFPSEDLQEQIYLNRTLLTTISTQRVLPFDDNICLREPCENYMKCVSVLRFDSSAPFLSSTTVLFRPIHPINGLRCRCPPGFTGDYCETEIDLCYSDPCGANGRCRSREGGYTCECFEDFTEIS

SEQ ID NO: 39486 - protein, 2923 aa, Homo sapiens
MRSPATGVPLPTPPPPLLLLLLLLLPPPLLGDQVGPCRSLGSRGRGSSGACAPMGWLCPSSASNLWLYTSRCRDAGTELTGHLVPHHDGLRVWCPESEAHIPLPPAPEGCPWSCRLLGIGGHLSPQGKLTLPEEHPCLKAPRLRCQSCKLAQAPGLRAGERSPEESLGGRRKRNVNTAPQFQPPSYQATVPENQPAGTPVASLRAIDPDEGEAGRLEYTMDALFDSRSNQFFSLDPVTGAVTTAEELDRETKSTHVFRVTAQDHGMPRRSALATLTILVTDTNDHDPVFEQQEYKESLRENLEVGYEVLTVRATDGDAPPNANILYRLLEGSGGSPSEVFEIDPRSGVIRTRGPVDREEVESYQLTVEASDQGRDPGPRSTTAAVFLSVEDDNDNAPQFSEKRYVVQVREDVTPGAPVLRVTASDRDKGSNAVVHYSIMSGNARGQFYLDAQTGALDVVSPLDYETTKEYTLRVRAQDGGRPPLSNVSGLVTVQVLDINDNAPIFVSTPFQATVLESVPLGYLVLHVQAIDADAGDNARLEYRLAGVGHDFPFTINNGTGWISVAAELDREEVDFYSFGVEARDHGTPALTASASVSVTVLDVNDNNPTFTQPEYTVRLNEDAAVGTSVVTVSAVDRDAHSVITYQITSGNTRNRFSITSQSGGGLVSLALPLDYKLERQYVLAVTASDGTRQDTAQIVVNVTDANTHRPVFQSSHYTVNVNEDRPAGTTVVLISATDEDTGENARITYFMEDSIPQFRIDADTGAVTTQAELDYEDQVSYTLAITARDNGIPQKSDTTYLEILVNDVNDNAPQFLRDSYQGSVYEDVPPFTSVLQISATDRDSGLNGRVFYTFQGGDDGDGDFIVESTSGIVRTLRRLDRENVAQYVLRAYAVDKGMPPARTPMEVTVTVLDVNDNPPVFEQDEFDVFVEENSPIGLAVARVTATDPDEGTNAQIMYQIVEGNIPEVFQLDIFSGELTALVDLDYEDRPEYVLVIQATSAPLVSRATVHVRLLDRNDNPPVLGNFEILFNNYVTNRSSSFPGGAIGRVPAHDPDISDSLTYSFERGNELSLVLLNASTGELKLSRALDNNRPLEAIMSVLVSDGVHSVTAQCALRVTIITDEMLTHSITLRLEDMSPERFLSPLLGLFIQAVAATLATPPDHVVVFNVQRDTDAPGGHILNVSLSVGQPPGPGGGPPFLPSEDLQERLYLNRSLLTAISAQRVLPFDDNICLREPCENYMRCVSVLRFDSSAPFIASSSVLFRPIHPVGGLRCRCPPGFTGDYCETEVDLCYSRPCGPHGRCRSREGGYTCLCRDGYTGEHCEVSARSGRCTPGVCKNGGTCVNLLVGGFKCDCPSGDFEKPYCQVTTRSFPAHSFITFRGLRQRFHFTLALSFATKERDGLLLYNGRFNEKHDFVALEVIQEQVQLTFSAGESTTTVSPFVPGGVSDGQWHTVQLKYYNKPLLGQTGLPQGPSEQKVAVVTVDGCDTGVALRFGSVLGNYSCAAQGTQGGSKKSLDLTGPLLLGGVPDLPESFPVRMRQFVGCMRNLQVDSRHIDMADFIANNGTVPGCPAKKNVCDSNTCHNGGTCVNQWDAFSCECPLGFGGKSCAQEMANPQHFLGSSLVAWHGLSLPISQPWYLSLMFRTRQADGVLLQAITRGRSTITLQLREGHVMLSVEGTGLQASSLRLEPGRANDGDWHHAQLALGASGGPGHAILSFDYGQQRAEGNLGPRLHGLHLSNITVGGIPGPAGGVARGFRGCLQGVRVSDTPEGVNSLDPSHGESINVEQGCSLPDPCDSNPCPANSYCSNDWDSYSCSCDPGYYGDNCTNVCDLNPCEHQSVCTRKPSAPHGYTCECPPNYLGPYCETRIDQPCPRGWWGHPTCGPCNCDVSKGFDPDCNKTSGECHCKENHYRPPGSPTCLLCDCYPTGSLSRVCDPEDGQCPCKPGVIGRQCDRCDNPFAEVTTNGCEVNYDSCPRAIEAGIWWPRTRFGLPAAAPCPKGSFGTAVRHCDEHRGWLPPNLFNCTSITFSELKGFAERLQRNESGLDSGRSQQLALLLRNATQHTAGYFGSDVKVAYQLATRLLAHESTQRGFGLSATQDVHFTENLLRVGSALLDTANKRHWELIQQTEGGTAWLLQHYEAYASALAQNMRHTYLSPFTIVTPNIVISVVRLDKGNFAGAKLPRYEALRGEQPPDLETTVILPESVFRETPPVVRPAGPGEAQEPEELARRQRRHPELSQGEAVASVIIYRTLAGLLPHNYDPDKRSLRVPKRPIINTPVVSISVHDDEELLPRALDKPVTVQFRLLETEERTKPICVFWNHSILVSGTGGWSARGCEVVFRNESHVSCQCNHMTSFAVLMDVSRRENGEILPLKTLTYVALGVTLAALLLTFFFLTLLRILRSNQHGIRRNLTAALGLAQLVFLLGINQADLPFACTVIAILLHFLYLCTFSWALLEALHLYRALTEVRDVNTGPMRFYYMLGWGVPAFITGLAVGLDPEGYGNPDFCWLSIYDTLIWSFAGPVAFAVSMSVFLYILAARASCAAQRQGFEKKGPVSGLQPSFAVLLLLSATWLLALLSVNSDTLLFHYLFATCNCIQGPFIFLSYVVLSKEVRKALKLACSRKPSPDPALTTKSTLTSSYNCPSPYADGRLYQPYGDSAGSLHSTSRSGKSQPSYIPFLLREESALNPGQGPPGLGDPGSLFLEGQDQQHDPDTDSDSDLSLEDDQSGSYASTHSSDSEEEEEEEEEEAAFPGEQGWDSLLGPGAERLPLHSTPKDGGPGPGKAPWPGDFGTTAKESSGNGAPEERLRENGDALSREGSLGPLPGSSAQPHKGILKKKCLPTISEKSSLLRLPLEQCTGSSRGSSASEGSRGGPPPRPPPRQSLQEQLNGVMPIAMSIKAGTVDEDSSGSEFLFFNFLH

SEQ ID NO: 39487 - protein, 3312 aa, Homo sapiens
MMARRPPWRGLGGRSTPILLLLLLSLFPLSQEELGGGGHQGWDPGLAATTGPRAHIGGGALALCPESSGVREDGGPGLGVREPIFVGLRGRRQSARNSRGPPEQPNEELGIEHGVQPLGSRERETGQGPGSVLYWRPEVSSCGRTGPLQRGSLSPGALSSGVPGSGNSSPLPSDFLIRHHGPKPVSSQRNAGTGSRKRVGTARCCGELWATGSKGQGERATTSGAERTAPRRNCLPGASGSGPELDSAPRTARTAPASGSAPRESRTAPEPAPKRMRSRGLFRCRFLPQRPGPRPPGLPARPEARKVTSANRARFRRAANRHPQFPQYNYQTLVPENEAAGTAVLRVVAQDPDAGEAGRLVYSLAALMNSRSLELFSIDPQSGLIRTAAALDRESMERHYLRVTAQDHGSPRLSATTMVAVTVADRNDHSPVFEQAQYRETLRENVEEGYPILQLRATDGDAPPNANLRYRFVGPPAARAAAAAAFEIDPRSGLISTSGRVDREHMESYELVVEASDQGQEPGPRSATVRVHITVLDENDNAPQFSEKRYVAQVREDVRPHTVVLRVTATDRDKDANGLVHYNIISGNSRGHFAIDSLTGEIQVVAPLDFEAEREYALRIRAQDAGRPPLSNNTGLASIQVVDINDHIPIFVSTPFQVSVLENAPLGHSVIHIQAVDADHGENARLEYSLTGVAPDTPFVINSATGWVSVSGPLDRESVEHYFFGVEARDHGSPPLSASASVTVTVLDVNDNRPEFTMKEYHLRLNEDAAVGTSVVSVTAVDRDANSAISYQITGGNTRNRFAISTQGGVGLVTLALPLDYKQERYFKLVLTASDRALHDHCYVHINITDANTHRPVFQSAHYSVSVNEDRPMGSTIVVISASDDDVGENARITYLLEDNLPQFRIDADSGAITLQAPLDYEDQVTYTLAITARDNGIPQKADTTYVEVMVNDVNDNAPQFVASHYTGLVSEDAPPFTSVLQISATDRDAHANGRVQYTFQNGEDGDGDFTIEPTSGIVRTVRRLDREAVSVYELTAYAVDRGVPPLRTPVSIQVMVQDVNDNAPVFPAEEFEVRVKENSIVGSVVAQITAVDPDEGPNAHIMYQIVEGNIPELFQMDIFSGELTALIDLDYEARQEYVIVVQATSAPLVSRATVHVRLVDQNDNSPVLNNFQILFNNYVSNRSDTFPSGIIGRIPAYDPDVSDHLFYSFERGNELQLLVVNQTSGELRLSRKLDNNRPLVASMLVTVTDGLHSVTAQCVLRVVIITEELLANSLTVRLENMWQERFLSPLLGRFLEGVAAVLATPAEDVFIFNIQNDTDVGGTVLNVSFSALAPRGAGAGAAGPWFSSEELQEQLYVRRAALAARSLLDVLPFDDNVCLREPCENYMKCVSVLRFDSSAPFLASASTLFRPIQPIAGLRCRCPPGFTGDFCETELDLCYSNPCRNGGACARREGGYTCVCRPRFTGEDCELDTEAGRCVPGVCRNGGTCTDAPNGGFRCQCPAGGAFEGPRCEVAARSFPPSSFVMFRGLRQRFHLTLSLSFATVQQSGLLFYNGRLNEKHDFLALELVAGQVRLTYSTGESNTVVSPTVPGGLSDGQWHTVHLRYYNKPRTDALGGAQGPSKDKVAVLSVDDCDVAVALQFGAEIGNYSCAAAGVQTSSKKSLDLTGPLLLGGVPNLPENFPVSHKDFIGCMRDLHIDGRRVDMAAFVANNGTMAGCQAKLHFCDSGPCKNSGFCSERWGSFSCDCPVGFGGKDCQLTMAHPHHFRGNGTLSWNFGSDMAVSVPWYLGLAFRTRATQGVLMQVQAGPHSTLLCQLDRGLLSVTVTRGSGRASHLLLDQVTVSDGRWHDLRLELQEEPGGRRGHHVLMVSLDFSLFQDTMAVGSELQGLKVKQLHVGGLPPGSAEEAPQGLVGCIQGVWLGSTPSGSPALLPPSHRVNAEPGCVVTNACASGPCPPHADCRDLWQTFSCTCQPGYYGPGCVDACLLNPCQNQGSCRHLPGAPHGYTCDCVGGYFGHHCEHRMDQQCPRGWWGSPTCGPCNCDVHKGFDPNCNKTNGQCHCKEFHYRPRGSDSCLPCDCYPVGSTSRSCAPHSGQCPCRPGALGRQCNSCDSPFAEVTASGCRVLYDACPKSLRSGVWWPQTKFGVLATVPCPRGALGAAVRLCDEAQGWLEPDLFNCTSPAFRELSLLLDGLELNKTALDTMEAKKLAQRLREVTGHTDHYFSQDVRVTARLLAHLLAFESHQQGFGLTATQDAHFNENLLWAGSALLAPETGDLWAALGQRAPGGSPGSAGLVRHLEEYAATLARNMELTYLNPMGLVTPNIMLSIDRMEHPSSPRGARRYPRYHSNLFRGQDAWDPHTHVLLPSQSPRPSPSEVLPTSSSIENSTTSSVVPPPAPPEPEPGISIIILLVYRTLGGLLPAQFQAERRGARLPQNPVMNSPVVSVAVFHGRNFLRGILESPISLEFRLLQTANRSKAICVQWDPPGLAEQHGVWTARDCELVHRNGSHARCRCSRTGTFGVLMDASPRERLEGDLELLAVFTHVVVAVSVAALVLTAAILLSLRSLKSNVRGIHANVAAALGVAELLFLLGIHRTHNQLVCTAVAILLHYFFLSTFAWLFVQGLHLYRMQVEPRNVDRGAMRFYHALGWGVPAVLLGLAVGLDPEGYGNPDFCWISVHEPLIWSFAGPVVLVIVMNGTMFLLAARTSCSTGQREAKKTSALTLRSSFLLLLLVSASWLFGLLAVNHSILAFHYLHAGLCGLQGLAVLLLFCVLNADARAAWMPACLGRKAAPEEARPAPGLGPGAYNNTALFEESGLIRITLGASTVSSVSSARSGRTQDQDSQRGRSYLRDNVLVRHGSAADHTDHSLQAHAGPTDLDVAMFHRDAGADSDSDSDLSLEEERSLSIPSSESEDNGRTRGRFQRPLCRAAQSERLLTHPKDVDGNDLLSYWPALGECEAAPCALQTWGSERRLGLDTSKDAANNNQPDPALTSGDETSLGRAQRQRKGILKNRLQYPLVPQTRGAPELSWCRAATLGHRAVPAASYGRIYAGGGTGSLSQPASRYSSREQLDLLLRRQLSRERLEEAPAPVLRPLSRPGSQECMDAAPGRLEPKDRGSTLPRRQPPRDYPGAMAGRFGSRDALDLGAPREWLSTLPPPRRTRDLDPQPPPLPLSPQRQLSRDPLLPSRPLDSLSRSSNSREQLDQVPSRHPSREALGPLPQLLRAREDSVSGPSHGPSTEQLDILSSILASFNSSALSSVQSSSTPLGPHTTATPSATASVLGPSTPRSATSHSISELSPDSEVPRSEGHS

SEQ ID NO: 39488 - protein, 3317 aa, Homo sapiens
MMARRPPWRGLGGRSTPILLLLLLSLFPLSQEELGGGGHQGWDPGLAATTGPRAHIGGGALALCPESSGVREDGGPGLGVREPIFVGLRGRRQSARNSRGPPEQPNEELGIEHGVQPLGSRERETGQGPGSVLYWRPEVSSCGRTGPLQRGSLSPGALSSGVPGSGNSSPLPSDFLIRHHGPKPVSSQRNAGTGSRKRVGTARCCGELWATGSKGQGERATTSGAERTAPRRNCLPGASGSGPELDSAPRTARTAPASGSAPRESRTAPEPAPKRMRSRGLFRCRFLPQRPGPRPPGLPARPEARKVTSANRARFRRAANRHPQFPQYNYQTLVPENEAAGTAVLRVVAQDPDAGEAGRLVYSLAALMNSRSLELFSIDPQSGLIRTAAALDRESMERHYLRVTAQDHGSPRLSATTMVAVTVADRNDHSPVFEQAQYRETLRENVEEGYPILQLRATDGDAPPNANLRYRFVGPPAARAAAAAAFEIDPRSGLISTSGRVDREHMESYELVVEASDQGQEPGPRSATVRVHITVLDENDNAPQFSEKRYVAQVREDVRPHTVVLRVTATDRDKDANGLVHYNIISGNSRGHFAIDSLTGEIQVVAPLDFEAEREYALRIRAQDAGRPPLSNNTGLASIQVVDINDHIPIFVSTPFQVSVLENAPLGHSVIHIQAVDADHGENARLEYSLTGVAPDTPFVINSATGWVSVSGPLDRESVEHYFFGVEARDHGSPPLSASASVTVTVLDVNDNRPEFTMKEYHLRLNEDAAVGTSVVSVTAVDRDANSAISYQITGGNTRNRFAISTQGGVGLVTLALPLDYKQERYFKLVLTASDRALHDHCYVHINITDANTHRPVFQSAHYSVSVNEDRPMGSTIVVISASDDDVGENARITYLLEDNLPQFRIDADSGAITLQAPLDYEDQVTYTLAITARDNGIPQKADTTYVEVMVNDVNDNAPQFVASHYTGLVSEDAPPFTSVLQISATDRDAHANGRVQYTFQNGEDGDGDFTIEPTSGIVRTVRRLDREAVSVYELTAYAVDRGVPPLRTPVSIQVMVQDVNDNAPVFPAEEFEVRVKENSIVGSVVAQITAVDPDEGPNAHIMYQIVEGNIPELFQMDIFSGELTALIDLDYEARQEYVIVVQATSAPLVSRATVHVRLVDQNDNSPVLNNFQILFNNYVSNRSDTFPSGIIGRIPAYDPDVSDHLFYSFERGNELQLLVVNQTSGELRLSRKLDNNRPLVASMLVTVTDGLHSVTAQCVLRVVIITEELLANSLTVRLENMWQERFLSPLLGRFLEGVAAVLATPAEDVFIFNIQNDTDVGGTVLNVSFSALAPRGAGAGAAGPWFSSEELQEQLYVRRAALAARSLLDVLPFDDNVCLREPCENYMKCVSVLRFDSSAPFLASASTLFRPIQPIAGLRCRCPPGFTGDFCETELDLCYSNPCRNGGACARREGGYTCVCRPRFTGEDCELDTEAGRCVPGVCRNGGTCTDAPNGGFRCQCPAGGAFEGPRCEVAARSFPPSSFVMFRGLRQRFHLTLSLSFATVQQSGLLFYNGRLNEKHDFLALELVAGQVRLTYSTGESNTVVSPTVPGGLSDGQWHTVHLRYYNKPRTDALGGAQGPSKDKVAVLSVDDCDVAVALQFGAEIGNYSCAAAGVQTSSKKSLDLTGPLLLGGVPNLPENFPVSHKDFIGCMRDLHIDGRRVDMAAFVANNGTMAGCQAKLHFCDSGPCKNSGFCSERWGSFSCDCPVGFGGKDCQLTMAHPHHFRGNGTLSWNFGSDMAVSVPWYLGLAFRTRATQGVLMQVQAGPHSTLLCQLDRGLLSVTVTRGSGRASHLLLDQVTVSDGRWHDLRLELQEEPGGRRGHHVLMVSLDFSLFQDTMAVGSELQGLKVKQLHVGGLPPGSAEEAPQGLVGCIQGVWLGSTPSGSPALLPPSHRVNAEPGCVVTNACASGPCPPHADCRDLWQTFSCTCQPGYYGPGCVDACLLNPCQNQGSCRHLPGAPHGYTCDCVGGYFGHHCEHRMDQQCPRGWWGSPTCGPCNCDVHKGFDPNCNKTNGQCHCKEFHYRPRGSDSCLPCDCYPVGSTSRSCAPHSGQCPCRPGALGRQCNSCDSPFAEVTASGCRVLYDACPKSLRSGVWWPQTKFGVLATVPCPRGALGLRGAGAAVRLCDEAQGWLEPDLFNCTSPAFRELSLLLDGLELNKTALDTMEAKKLAQRLREVTGHTDHYFSQDVRVTARLLAHLLAFESHQQGFGLTATQDAHFNENLLWAGSALLAPETGDLWAALGQRAPGGSPGSAGLVRHLEEYAATLARNMELTYLNPMGLVTPNIMLSIDRMEHPSSPRGARRYPRYHSNLFRGQDAWDPHTHVLLPSQSPRPSPSEVLPTSSSIENSTTSSVVPPPAPPEPEPGISIIILLVYRTLGGLLPAQFQAERRGARLPQNPVMNSPVVSVAVFHGRNFLRGILESPISLEFRLLQTANRSKAICVQWDPPGLAEQHGVWTARDCELVHRNGSHARCRCSRTGTFGVLMDASPRERLEGDLELLAVFTHVVVAVSVAALVLTAAILLSLRSLKSNVRGIHANVAAALGVAELLFLLGIHRTHNQLVCTAVAILLHYFFLSTFAWLFVQGLHLYRMQVEPRNVDRGAMRFYHALGWGVPAVLLGLAVGLDPEGYGNPDFCWISVHEPLIWSFAGPVVLVIVMNGTMFLLAARTSCSTGQREAKKTSALTLRSSFLLLLLVSASWLFGLLAVNHSILAFHYLHAGLCGLQGLAVLLLFCVLNADARAAWMPACLGRKAAPEEARPAPGLGPGAYNNTALFEESGLIRITLGASTVSSVSSARSGRTQDQDSQRGRSYLRDNVLVRHGSAADHTDHSLQAHAGPTDLDVAMFHRDAGADSDSDSDLSLEEERSLSIPSSESEDNGRTRGRFQRPLCRAAQSERLLTHPKDVDGNDLLSYWPALGECEAAPCALQTWGSERRLGLDTSKDAANNNQPDPALTSGDETSLGRAQRQRKGILKNRLQYPLVPQTRGAPELSWCRAATLGHRAVPAASYGRIYAGGGTGSLSQPASRYSSREQLDLLLRRQLSRERLEEAPAPVLRPLSRPGSQECMDAAPGRLEPKDRGSTLPRRQPPRDYPGAMAGRFGSRDALDLGAPREWLSTLPPPRRTRDLDPQPPPLPLSPQRQLSRDPLLPSRPLDSLSRSSNSREQLDQVPSRHPSREALGPLPQLLRAREDSVSGPSHGPSTEQLDILSSILASFNSSALSSVQSSSTPLGPHTTATPSATASVLGPSTPRSATSHSISELSPDSEVPRSEGHS

SEQ ID NO: 39489 - protein, 3357 aa, Homo sapiens
MGRHVATSCHVAWLLVLISGCWGQVNRLPFFTNHFFDTYLLISEDTPVGSSVTQLLAQDMDNDPLVFGVSGEEASRFFAVEPDTGVVWLRQPLDRETKSEFTVEFSVSDHQGVITRKVNIQVGDVNDNAPTFHNQPYSVRIPEVGATGNTPVGTPIFIVNATDPDLGAGGSVLYSFQPPSQFFAIDSARGIVTVIRELDYETTQAYQLTVNATDQDKTRPLSTLANLAIIITDVQDMDPIFINLPYSTNIYEHSPPGTTVRIITAIDQDKGRPRGIGYTIVSGNTNSIFALDYISGVLTLNGLLDRENPLYSHGFILTVKGTELNDDRTPSDATVTTTFNILVIDINDNAPEFNSSEYSVAITELAQVGFALPLFIQVVDKDEGLNSMFEVYLVGNNSHHFIISPTSVQGKADIRIRVAIPLDYETVDRYDFDLFANESVPDHVGYAKVKITLINENDNRPIFSQPLYNISLYENVTVGTSVLTVLATDNDAGTFGEVSYFFSDDPDRFSLDKDTGLIMLIARLDYELIQRFTLTIIARDGGGEETTGRVRINVLDVNDNVPTFQKDAYVGALRENEPSVTQLVRLRATDEDSPPNNQITYSIVSASAFGSYFDISLYEGYGVISVSRPLDYEQISNGLIYLTVMAMDAGNPPLNSTVPVTIEVFDENDNPPTFSKPAYFVSVVENIMAGATVLFLNATDLDRSREYGQESIIYSLEGSTQFRINARSGEITTTSLLDRETKSEYILIVRAVDGGVGHNQKTGIATVNITLLDINDNHPTWKDAPYYINLVEMTPPDSDVTTVVAVDPDLGENGTLVYSIQPPNKFYSLNSTTGKIRTTHAMLDRENPDPHEAELMRKIVVSVTDCGRPPLKATSSATVFVNLLDLNDNDPTFQNLPFVAEVLEGIPAGVSIYQVVAIDLDEGLNGLVSYRMPVGMPRMDFLINSSSGVVVTTTELDRERIAEYQLRVVASDAGTPTKSSTSTLTIHVLDVNDETPTFFPAVYNVSVSEDVPREFRVVWLNCTDNDVGLNAELSYFITGGNVDGKFSVGYRDAVVRTVVGLDRETTAAYMLILEAIDNGPVGKRHTGTATVFVTVLDVNDNRPIFLQSSYEASVPEDIPEGHSILQLKATDADEGEFGRVWYRILHGNHGNNFRIHVSNGLLMRGPRPLDRERNSSHVLIVEAYNHDLGPMRSSVRVIVYVEDINDEAPVFTQQQYSRLGLRETAGIGTSVIVVQATDRDSGDGGLVNYRILSGAEGKFEIDESTGLIITVNYLDYETKTSYMMNVSATDQAPPFNQGFCSVYITLLNELDEAVQFSNASYEAAILENLALGTEIVRVQAYSIDNLNQITYRFNAYTSTQAKALFKIDAITGVITVQGLVDREKGDFYTLTVVADDGGPKVDSTVKVYITVLDENDNSPRFDFTSDSAVSIPEDCPVGQRVATVKAWDPDAGSNGQVVFSLASGNIAGAFEIVTTNDSIGEVFVARPLDREELDHYILQVVASDRGTPPRKKDHILQVTILDINDNPPVIESPFGYNVSVNENVGGGTAVVQVRATDRDIGINSVLSYYITEGNKDMAFRMDRISGEIATRPAPPDRERQSFYHLVATVEDEGTPTLSATTHVYVTIVDENDNAPMFQQPHYEVLLDEGPDTLNTSLITIQALDLDEGPNGTVTYAIVAGNIVNTFRIDRHMGVITAAKELDYEISHGRYTLIVTATDQCPILSHRLTSTTTVLVNVNDINDNVPTFPRDYEGPFEVTEGQPGPRVWTFLAHDRDSGPNGQVEYSIMDGDPLGEFVISPVEGVLRVRKDVELDRETIAFYNLTICARDRGMPPLSSTMLVGIRVLDINDNDPVLLNLPMNITISENSPVSSFVAHVLASDADSGCNARLTFNITAGNRERAFFINATTGIVTVNRPLDRERIPEYKLTISVKDNPENPRIARRDYDLLLIFLSDENDNHPLFTKSTYQAEVMENSPAGTPLTVLNGPILALDADQDIYAVVTYQLLGAQSGLFDINSSTGVVTVRSGVIIDREAFSPPILELLLLAEDIGLLNSTAHLLITILDDNDNRPTFSPATLTVHLLENCPPGFSVLQVTATDEDSGLNGELVYRIEAGAQDRFLIHLVTGVIRVGNATIDREEQESYRLTVVATDRGTVPLSGTAIVTILIDDINDSRPEFLNPIQTVSVLESAEPGTVIANITAIDHDLNPKLEYHIVGIVAKDDTDRLVPNQEDAFAVNINTGSVMVKSPMNRELVATYEVTLSVIDNASDLPERSVSVPNAKLTVNVLDVNDNTPQFKPFGITYYMERILEGATPGTTLIAVAAVDPDKGLNGLVTYTLLDLVPPGYVQLEDSSAGKVIANRTVDYEEVHWLNFTVRASDNGSPPRAAEIPVYLEIVDINDNNPIFDQPSYQEAVFEDVPVGTIILTVTATDADSGNFALIEYSLGDGESKFAINPTTGDIYVLSSLDREKKDHYILTALAKDNPGDVASNRRENSVQVVIQVLDVNDCRPQFSKPQFSTSVYENEPAGTSVITMMATDQDEGPNGELTYSLEGPGVEAFHVDMDSGLVTTQRPLQSYEKFSLTVVATDGGEPPLWGTTMLLVEVIDVNDNRPVFVRPPNGTILHIREEIPLRSNVYEVYATDKDEGLNGAVRYSFLKTAGNRDWEFFIIDPISGLIQTAQRLDRESQAVYSLILVASDLGQPVPYETMQPLQVALEDIDDNEPLFVRPPKGSPQYQLLTVPEHSPRGTLVGNVTGAVDADEGPNAIVYYFIAAGNEEKNFHLQPDGCLLVLRDLDREREAIFSFIVKASSNRSWTPPRGPSPTLDLVADLTLQEVRVVLEDINDQPPRFTKAEYTAGVATDAKVGSELIQVLALDADIGNNSLVFYSILAIHYFRALANDSEDVGQVFTMGSMDGILRTFDLFMAYSPGYFVVDIVARDLAGHNDTAIIGIYILRDDQRVKIVINEIPDRVRGFEEEFIHLLSNITGAIVNTDNVQFHVDKKGRVNFAQTELLIHVVNRDTNRILDVDRVIQMIDENKEQLRNLFRNYNVLDVQPAISVRLPDDMSALQMAIIVLAILLFLAAMLFVLMNWYYRTVHKRKLKAIVAGSAGNRGFIDIMDMPNTNKYSFDGANPVWLDPFCRNLELAAQAEHEDDLPENLSEIADLWNSPTRTHGTFGREPAAVKPDDDRYLRAAIQEYDNIAKLGQIIREGPIKGSLLKVVLEDYLRLKKLFAQRMVQKASSCHSSISELIQTELDEEPGDHSPGQGSLRFRHKPPVELKGPDGIHVVHGSTGTLLATDLNSLPEEDQKGLGRSLETLTAAEATAFERNARTESAKSTPLHKLRDVIMETPLEITEL

SEQ ID NO: 39490 - protein, 1064 aa, Homo sapiens
MGRHVATSCHVAWLLVLISGCWGQVNRLPFFTNHFFDTYLLISEDTPVGSSVTQLLAQDMDNDPLVFGVSGEEASRFFAVEPDTGVVWLRQPLDRETKSEFTVEFSVSDHQGVITRKVNIQVGDVNDNAPTFHNQPYSVRIPEVGATGNTPVGTPIFIVNATDPDLGAGGSVLYSFQPPSQFFAIDSARGIVTVIRELDYETTQAYQLTVNATDQDKTRPLSTLANLAIIITDVQDMDPIFINLPYSTNIYEHSPPGTTVRIITAIDQDKGRPRGIGYTIVSGNTNSIFALDYISGVLTLNGLLDRENPLYSHGFILTVKGTELNDDRTPSDATVTTTFNILVIDINDNAPEFNSSEYSVAITELAQVGFALPLFIQVVDKDEGLNSMFEVYLVGNNSHHFIISPTSVQGKADIRIRVAIPLDYETVDRYDFDLFANESVPDHVGYAKVKITLINENDNRPIFSQPLYNISLYENVTVGTSVLTVLATDNDAGTFGEVSYFFSDDPDRFSLDKDTGLIMLIARLDYELIQRFTLTIIARDGGGEETTGRVRINVLDVNDNVPTFQKDAYVGALRENEPSVTQLVRLRATDEDSPPNNQITYSIVSASAFGSYFDISLYEGYGVISVSRPLDYEQISNGLIYLTVMAMDAGNPPLNSTVPVTIEVFDENDNPPTFSKPAYFVSVVENIMAGATVLFLNATDLDRSREYGQESIIYSLEGSTQFRINARSGEITTTSLLDRETKSEYILIVRAVDGGVGHNQKTGIATVNITLLDINDNHPTWKDAPYYINLVEMTPPDSDVTTVVAVDPDLGENGTLVYSIQPPNKFYSLNSTTGKIRTTHAMLDRENPDPHEAELMRKIVVSVTDCGRPPLKATSSATVFVNLLDLNDNDPTFQNLPFVAEVLEGIPAGVSIYQVVAIDLDEGLNGLVSYRMPVGMPRMDFLINSSSGVVVTTTELDRERIAEYQLRVVASDAGTPTKSSTSTLTIHVLDVNDETPTFFPAVYNVSVSEDVPREFRVVWLNCTDNDVGLNAELSYFITGAAPASAHLCRPPGALPPPLPDGQPD

SEQ ID NO: 39491 - protein, 1114 aa, Homo sapiens
MVKSPMNRELVATYEVTLSVIDNASDLPERSVSVPNAKLTVNVLDVNDNTPQFKPFGITYYMERILEGATPGTTLIAVAAVDPDKGLNGLVTYTLLDLVPPGYVQLEDSSAGKVIANRTVDYEEVHWLNFTVRASDNGSPPRAAEIPVYLEIVDINDNNPIFDQPSYQEAVFEDVPVGTIILTVTATDADSGNFALIEYSLGDGESKFAINPTTGDIYVLSSLDREKKDHYILTALAKDNPGDVASNRRENSVQVVIQVLDVNDCRPQFSKPQFSTSVYENEPAGTSVITMMATDQDEGPNGELTYSLEGPGVEAFHVDMDSGLVTTQRPLQSYEKFSLTVVATDGGEPPLWGTTMLLVEVIDVNDNRPVFVRPPNGTILHIREEIPLRSNVYEVYATDKDEGLNGAVRYSFLKTAGNRDWEFFIIDPISGLIQTAQRLDRESQAVYSLILVASDLGQPVPYETMQPLQVALEDIDDNEPLFVRPPKGSPQYQLLTVPEHSPRGTLVGNVTGAVDADEGPNAIVYYFIAAGNEEKNFHLQPDGCLLVLRDLDREREAIFSFIVKASSNRSWTPPRGPSPTLDLVADLTLQEVRVVLEDINDQPPRFTKAEYTAGVATDAKVGSELIQVLALDADIGNNSLVFYSILAIHYFRALANDSEDVGQVFTMGSMDGILRTFDLFMAYSPGYFVVDIVARDLAGHNDTAIIGIYILRDDQRVKIVINEIPDRVRGFEEEFIHLLSNITGAIVNTDNVQFHVDKKGRVNFAQTELLIHVVNRDTNRILDVDRVIQMIDENKEQLRNLFRNYNVLDVQPAISVRLPDDMSALQMAIIVLAILLFLAAMLFVLMNWYYRTVHKRKLKAIVAGSAGNRGFIDIMDMPNTNKYSFDGANPVWLDPFCRNLELAAQAEHEDDLPENLSEIADLWNSPTRTHGTFGREPAAVKPDDDRYLRAAIQEYDNIAKLGQIIREGPIKGSLLKVVLEDYLRLKKLFAQRMVQKASSCHSSISELIQTELDEEPGDHSPGQGSLRFRHKPPVELKGPDGIHVVHGSTGTLLATDLNSLPEEDQKGLGRSLETLTAAEATAFERNARTESAKSTPLHKLRDVIMETPLEITEL

SEQ ID NO: 39492 - protein, 455 aa, Homo sapiens
MRASLGVCGTASSMVIVYVEDINDEAPVFTQQQYSRLGLRETAGIGTSVIVVQATDRDSGDGGLVNYRILSGAEGKFEIDESTGLIITVNYLDYETKTSYMMNVSATDQAPPFNQGFCSVYITLLNELDEAVQFSNASYEAAILENLALGTEIVRVQAYSIDNLNQITYRFNAYTSTQAKALFKIDAITGVITVQGLVDREKGDFYTLTVVADDGGPKVDSTVVYITVLDENDNSPRFDFTSDSAVSIPEDCPVGQRVATVKAWDPDAGSNGQVVFSLASGNIAGAFEIVTTNDSIGEVFVARPLDREELDHYILQVVASDRGTPPRKKDHILQVTILDINDNPPVIESPFGYNVSVNENVGGGTAVVQVRATDRDIGINSVLSYYITEGNKDMAFRMDRISGEIATRPAPPDRERQSFYHLVATVEDEGTPTLSVSDGGGHREERVGQGSSASE

SEQ ID NO: 39493 - protein, 530 aa, Homo sapiens
MGRHVATSCHVAWLLVLISGCWGQVNRLPFFTNHFFDTYLLISEDTPVGSSVTQLLAQDMDNDPLVFGVSGEEASRFFAVEPDTGVVWLRQPLDRETKSEFTVEFSVSDHQGVITRKVNIQVGDVNDNAPTFHNQPYSVRIPENTPVGTPIFIVNATDPDLGAGGSVLYSFQPPSQFFAIDSARGIVTVIRELDYETTQAYQLTVNATDQDKTRPLSTLANLAIIITDVQDMDPIFINLPYSTNIYEHSPPGTTVRIITAIDQDKGRPRGIGYTIVSGNTNSIFALDYISGVLTLNGLLDRENPLYSHGFILTVKGTELNDDRTPSDATVTTTFNILVIDINDNAPEFNSSEYSVAITELAQVGFALPLFIQVVDKDENLGLNSMFEVYLVGNNSHHFIISPTSVQGKADIRIRVAIPLDYETVDRYDFDLFANESVPDHVGYAKVKITLINENDNRPIFSQPLYNISLYENVTVGTSVLTVLVSPRFTAGPLSSPGPTVVRHPEGFCPRDLSNQGRRHPQIPELCLLVY

SEQ ID NO: 39494 - protein, 1212 aa, Homo sapiens
MGRHVATSCHVAWLLVLISGCWGQVNRLPFFTNHFFDTYLLISEDTPVGSSVTQLLAQDMDNDPLVFGVSGEEASRFFAVEPDTGVVWLRQPLDRETKSEFTVEFSVSDHQGVITRKVNIQVGDVNDNAPTFHNQPYSVRIPENTPVGTPIFIVNATDPDLGAGGSVLYSFQPPSQFFAIDSARGIVTVIRELDYETTQAYQLTVNATDQDKTRPLSTLANLAIIITDVQDMDPIFINLPYSTNIYEHSPPGTTVRIITAIDQDKGRPRGIGYTIVSGNTNSIFALDYISGVLTLNGLLDRENPLYSHGFILTVKGTELNDDRTPSDATVTTTFNILVIDINDNAPEFNSSEYSVAITELAQVGFALPLFIQVVDKDETQGLNSMFEVYLVGNNSHHFIISPTSVQGKADIRIRVAIPLDYETVDRYDFDLFANESVPDHVGYAKVKITLINENDNRPIFSQPLYNISLYENVTVGTSVLTVLATDNDAGTFGEVSYFFSDDPDRFSLDKDTGLIMLIARLDYELIQRFTLTIIARDGGGEETTGRVRINVLDVNDNVPTFQKDAYVGALRENEPSVTQLVRLRATDEDSPPNNQITYSIVSASAFGSYFDISLYEGYGVISVSRPLDYEQISNGLIYLTVMAMDAGNPPLNSTVPVTIEVFDENDNPPTFSKPAYFVSVVENIMAGATVLFLNATDLDRSREYGQESIIYSLEGSTQFRINARSGEITTTSLLDRETKSEYILIVRAVDGGVGHNQKTGIATVNITLLDINDNHPTWKDAPYYINLVEMTPPDSDVTTVVAVDPDLGENGTLVYSIQPPNKFYSLNSTTGKIRTTHAMLDRENPDPHEAELMRKIVVSVTDCGRPPLKATSSATVFVNLLDLNDNDPTFQNLPFVAEVLEGIPAGVSIYQVVAIDLDEGLNGLVSYRMPVGMPRMDFLINSSSGVVVTTTELDRERIAEYQLRVVASDAGTPTKSSTSTLTIHVLDVNDETPTFFPAVYNVSVSEDVPREFRVVWLNCTDNDVGLNAELSYFITGGNVDGKFSVGYRDAVVRTVVGLDRETTAAYMLILEAIDNGPVGKRHTGTATVFVTVLDVNDNRPIFLQSSYEASVPEDIPEGHSILQEEDLASPCISPAPPRRAFQSSGEKETSQFPGKELRREPGPSKAQNRAAFTEPLAEAPLLGSKQAQEERAPLPREQAQQLQGSEGEKGGP

SEQ ID NO: 39495 - protein, 530 aa, Homo sapiens
MGRHVATSCHVAWLLVLISGCWGQVNRLPFFTNHFFDTYLLISEDTPVGSSVTQLLAQDMDNDPLVFGVSGEEASRFFAVEPDTGVVWLRQPLDRETKSEFTVEFSVSDHQGVITRKVNIQVGDVNDNAPTFHNQPYSVRIPENTPVGTPIFIVNATDPDLGAGGSVLYSFQPPSQFFAIDSARGIVTVIRELDYETTQAYQLTVNATDQDKTRPLSTLANLAIIITDVQDMDPIFINLPYSTNIYEHSPPGTTVRIITAIDQDKGRPRGIGYTIVSGNTNSIFALDYISGVLTLNGLLDRENPLYSHGFILTVKGTELNDDRTPSDATVTTTFNILVIDINDNAPEFNSSEYSVAITELAQVGFALPLFIQVVDKDETWGLNSMFEVYLVGNNSHHFIISPTSVQGKADIRIRVAIPLDYETVDRYDFDLFANESVPDHVGYAKVKITLINENDNRPIFSQPLYNISLYENVTVGTSVLTVLVSPRFTAGPLSSPGPTVVRHPEGFCPRDLSNQGRRHPQIPELCLLVY

SEQ ID NO: 39496 - protein, 3319 aa, Homo sapiens
MGRHVATSCHVAWLLVLISGCWGQVNRLPFFTNHFFDTYLLISEDTPVGSSVTQLLAQDMDNDPLVFGVSGEEASRFFAVEPDTGVVWLRQPLDRETKSEFTVEFSVSDHQGVITRKVNIQVGDVNDNAPTFHNQPYSVRIPENTPVGTPIFIVNATDPDLGAGGSVLYSFQPPSQFFAIDSARGIVTVIRELDYETTQAYQLTVNATDQDKTRPLSTLANLAIIITDVQDMDPIFINLPYSTNIYEHSPPGTTVRIITAIDQDKGRPRGIGYTIVSGNTNSIFALDYISGVLTLNGLLDRENPLYSHGFILTVKGTELNDDRTPSDATVTTTFNILVIDINDNAPEFNSSEYSVAITELAQVGFALPLFIQVVDKDETQGLNSMFEVYLVGNNSHHFIISPTSVQGKADIRIRVAIPLDYETVDRYDFDLFANESVPDHVGYAKVKITLINENDNRPIFSQPLYNISLYENVTVGTSVLTVLATDNDAGTFGEVSYFFSDDPDRFSLDKDTGLIMLIARLDYELIQRFTLTIIARDGGGEETTGRVRINVLDVNDNVPTFQKDAYVGALRENEPSVTQLVRLRATDEDSPPNNQITYSIVSASAFGSYFDISLYEGYGVISVSRPLDYEQISNGLIYLTVMAMDAGNPPLNSTVPVTIEVFDENDNPPTFSKPAYFVSVVENIMAGATVLFLNATDLDRSREYGQESIIYSLEGSTQFRINARSGEITTTSLLDRETKSEYILIVRAVDGGVGHNQKTGIATVNITLLDINDNHPTWKDAPYYINLVEMTPPDSDVTTVVAVDPDLGENGTLVYSIQPPNKFYSLNSTTGKIRTTHAMLDRENPDPHEAELMRKIVVSVTDCGRPPLKATSSATVFVNLLDLNDNDPTFQNLPFVAEVLEGIPAGVSIYQVVAIDLDEGLNGLVSYRMPVGMPRMDFLINSSSGVVVTTTELDRERIAEYQLRVVASDAGTPTKSSTSTLTIHVLDVNDETPTFFPAVYNVSVSEDVPREFRVVWLNCTDNDVGLNAELSYFITGGNVDGKFSVGYRDAVVRTVVGLDRETTAAYMLILEAIDNGPVGKRHTGTATVFVTVLDVNDNRPIFLQSSYEASVPEDIPEGHSILQLKATDADEGEFGRVWYRILHGNHGNNFRIHVSNGLLMRGPRPLDRERNSSHVLIVEAYNHDLGPMRSSVRVIVYVEDINDEAPVFTQQQYSRLGLRETAGIGTSVIVVQATDRDSGDGGLVNYRILSGAEGKFEIDESTGLIITVNYLDYETKTSYMMNVSATDQAPPFNQGFCSVYITLLNELDEAVQFSNASYEAAILENLALGTEIVRVQAYSIDNLNQITYRFNAYTSTQAKALFKIDAITGVITVQGLVDREKGDFYTLTVVADDGGPKVDSTVQVYITVLDENDNSPRFDFTSDSAVSIPEDCPVGQRVATVKAWDPDAGSNGQVVFSLASGNIAGAFEIVTTNDSIGEVFVARPLDREELDHYILQVVASDRGTPPRKKDHILQVTILDINDNPPVIESPFGYNVSVNENVGGGTAVVQVRATDRDIGINSVLSYYITEGNKDMAFRMDRISGEIATRPAPPDRERQSFYHLVATVEDEGTPTLSATTHVYVTIVDENDNAPMFQQPHYEVLLDEGPDTLNTSLITIQALDLDEGPNGTVTYAIVAGNIVNTFRIDRHMGVITAAKELDYEISHGRYTLIVTATDQCPILSHRLTSTTTVLVNVNDINDNVPTFPRDYEGPFEVTEGQPGPRVWTFLAHDRDSGPNGQVEYSIMDGDPLGEFVISPVEGVLRVRKDVELDRETIAFYNLTICARDRGMPPLSSTMLVGIRVLDINDNDPVLLNLPMNITISENSPVSSFVAHVLASDADSGCNARLTFNITAGNRERAFFINATTGIVTVNRPLDRERIPEYKLTISVKDNPENPRIARRDYDLLLIFLSDENDNHPLFTKSTYQAEVMENSPAGTPLTVLNGPILALDADQDIYAVVTYQLLGAQSGLFDINSSTGVVTVRSGVIIDREAFSPPILELLLLAEDIGLLNSTAHLLITILDDNDNRPTFSPATLTVHLLENCPPGFSVLQVTATDEDSGLNGELVYRIEAGAQDRFLIHLVTGVIRVGNATIDREEQESYRLTVVATDRGTVPLSGTAIVTILIDDINDSRPEFLNPIQTVSVLESAEPGTVIANITAIDHDLNPKLEYHIVGIVAKDDTDRLVPNQEDAFAVNINTGSVMVKSPMNRELVATYEVTLSVIDNASDLPERSVSVPNAKLTVNVLDVNDNTPQFKPFGITYYMERILEGATPGTTLIAVAAVDPDKGLNGLVTYTLLDLVPPGYVQLEDSSAGKVIANRTVDYEEVHWLNFTVRASDNGSPPRAAEIPVYLEIVDINDNNPIFDQPSYQEAVFEDVPVGTIILTVTATDADSGNFALIEYSLGDGESKFAINPTTGDIYVLSSLDREKKDHYILTALAKDNPGDVASNRRENSVQVVIQVLDVNDCRPQFSKPQFSTSVYENEPAGTSVITMMATDQDEGPNGELTYSLEGPGVEAFHVDMDSGLVTTQRPLQSYEKFSLTVVATDGGEPPLWGTTMLLVEVIDVNDNRPVFVRPPNGTILHIREEIPLRSNVYEVYATDKDEGLNGAVRYSFLKTAGNRDWEFFIIDPISGLIQTAQRLDRESQAVYSLILVASDLGQPVPYETMQPLQVALEDIDDNEPLFVRPPKGSPQYQLLTVPEHSPRGTLVGNVTGAVDADEGPNAIVYYFIAAGNEEKNFHLQPDGCLLVLRDLDREREAIFSFIVKASSNRSWTPPRGPSPTLDLVADLTLQEVRVVLEDINDQPPRFTKAEYTAGVATDAKVGSELIQVLALDADIGNNSLVFYSILAIHYFRALANDSEDVGQVFTMGSMDGILRTFDLFMAYSPGYFVVDIVARDLAGHNDTAIIGIYILRDDQRVKIVINEIPDRVRGFEEEFIHLLSNITGAIVNTDNVQFHVDKKGRVNFAQTELLIHVVNRDTNRILDVDRVIQMIDENKEQLRNLFRNYNVLDVQPAISVRLPDDMSALQMAIIVLAILLFLAAMLFVLMNWYYRTVHKRKLKAIVAGSAGNRGFIDIMDMPNTNKYSFDGANPVWLDPFCRNLELAAQAEHEDDLPENLSEIADLWNSPTRTHGTFGREPAAVKPDDDRYLRAAIQEYDNIAKLGQIIREGPIKLIQTELDEEPGDHSPGQGSLRFRHKPPVELKGPDGIHVVHGSTGTLLATDLNSLPEEDQKGLGRSLETLTAAEATAFERNARTESAKSTPLHKLRDVIMETPLEITEL

SEQ ID NO: 39497 - protein, 3359 aa, Homo sapiens
MGRHVATSCHVAWLLVLISGCWGQVNRLPFFTNHFFDTYLLISEDTPVGSSVTQLLAQDMDNDPLVFGVSGEEASRFFAVEPDTGVVWLRQPLDRETKSEFTVEFSVSDHQGVITRKVNIQVGDVNDNAPTFHNQPYSVRIPEVGATGNTPVGTPIFIVNATDPDLGAGGSVLYSFQPPSQFFAIDSARGIVTVIRELDYETTQAYQLTVNATDQDKTRPLSTLANLAIIITDVQDMDPIFINLPYSTNIYEHSPPGTTVRIITAIDQDKGRPRGIGYTIVSVAGNTNSIFALDYISGVLTLNGLLDRENPLYSHGFILTVKGTELNDDRTPSDATVTTTFNILVIDINDNAPEFNSSEYSVAITELAQVGFALPLFIQVVDKDEGLNSMFEVYLVGNNSHHFIISPTSVQGKADIRIRVAIPLDYETVDRYDFDLFANESVPDHVGYAKVKITLINENDNRPIFSQPLYNISLYENVTVGTSVLTVLATDNDAGTFGEVSYFFSDDPDRFSLDKDTGLIMLIARLDYELIQRFTLTIIARDGGGEETTGRVRINVLDVNDNVPTFQKDAYVGALRENEPSVTQLVRLRATDEDSPPNNQITYSIVSASAFGSYFDISLYEGYGVISVSRPLDYEQISNGLIYLTVMAMDAGNPPLNSTVPVTIEVFDENDNPPTFSKPAYFVSVVENIMAGATVLFLNATDLDRSREYGQESIIYSLEGSTQFRINARSGEITTTSLLDRETKSEYILIVRAVDGGVGHNQKTGIATVNITLLDINDNHPTWKDAPYYINLVEMTPPDSDVTTVVAVDPDLGENGTLVYSIQPPNKFYSLNSTTGKIRTTHAMLDRENPDPHEAELMRKIVVSVTDCGRPPLKATSSATVFVNLLDLNDNDPTFQNLPFVAEVLEGIPAGVSIYQVVAIDLDEGLNGLVSYRMPVGMPRMDFLINSSSGVVVTTTELDRERIAEYQLRVVASDAGTPTKSSTSTLTIHVLDVNDETPTFFPAVYNVSVSEDVPREFRVVWLNCTDNDVGLNAELSYFITGGNVDGKFSVGYRDAVVRTVVGLDRETTAAYMLILEAIDNGPVGKRHTGTATVFVTVLDVNDNRPIFLQSSYEASVPEDIPEGHSILQLKATDADEGEFGRVWYRILHGNHGNNFRIHVSNGLLMRGPRPLDRERNSSHVLIVEAYNHDLGPMRSSVRVIVYVEDINDEAPVFTQQQYSRLGLRETAGIGTSVIVVQATDRDSGDGGLVNYRILSGAEGKFEIDESTGLIITVNYLDYETKTSYMMNVSATDQAPPFNQGFCSVYITLLNELDEAVQFSNASYEAAILENLALGTEIVRVQAYSIDNLNQITYRFNAYTSTQAKALFKIDAITGVITVQGLVDREKGDFYTLTVVADDGGPKVDSTVQVYITVLDENDNSPRFDFTSDSAVSIPEDCPVGQRVATVKAWDPDAGSNGQVVFSLASGNIAGAFEIVTTNDSIGEVFVARPLDREELDHYILQVVASDRGTPPRKKDHILQVTILDINDNPPVIESPFGYNVSVNENVGGGTAVVQVRATDRDIGINSVLSYYITEGNKDMAFRMDRISGEIATRPAPPDRERQSFYHLVATVEDEGTPTLSATTHVYVTIVDENDNAPMFQQPHYEVLLDEGPDTLNTSLITIQALDLDEGPNGTVTYAIVAGNIVNTFRIDRHMGVITAAKELDYEISHGRYTLIVTATDQCPILSHRLTSTTTVLVNVNDINDNVPTFPRDYEGPFEVTEGQPGPRVWTFLAHDRDSGPNGQVEYSIMDGDPLGEFVISPVEGVLRVRKDVELDRETIAFYNLTICARDRGMPPLSSTMLVGIRVLDINDNDPVLLNLPMNITISENSPVSSFVAHVLASDADSGCNARLTFNITAGNRERAFFINATTGIVTVNRPLDRERIPEYKLTISVKDNPENPRIARRDYDLLLIFLSDENDNHPLFTKSTYQAEVMENSPAGTPLTVLNGPILALDADQDIYAVVTYQLLGAQSGLFDINSSTGVVTVRSGVIIDREAFSPPILELLLLAEDIGLLNSTAHLLITILDDNDNRPTFSPATLTVHLLENCPPGFSVLQVTATDEDSGLNGELVYRIEAGAQDRFLIHLVTGVIRVGNATIDREEQESYRLTVVATDRGTVPLSGTAIVTILIDDINDSRPEFLNPIQTVSVLESAEPGTVIANITAIDHDLNPKLEYHIVGIVAKDDTDRLVPNQEDAFAVNINTGSVMVKSPMNRELVATYEVTLSVIDNASDLPERSVSVPNAKLTVNVLDVNDNTPQFKPFGITYYMERILEGATPGTTLIAVAAVDPDKGLNGLVTYTLLDLVPPGYVQLEDSSAGKVIANRTVDYEEVHWLNFTVRASDNGSPPRAAEIPVYLEIVDINDNNPIFDQPSYQEAVFEDVPVGTIILTVTATDADSGNFALIEYSLGDGESKFAINPTTGDIYVLSSLDREKKDHYILTALAKDNPGDVASNRRENSVQVVIQVLDVNDCRPQFSKPQFSTSVYENEPAGTSVITMMATDQDEGPNGELTYSLEGPGVEAFHVDMDSGLVTTQRPLQSYEKFSLTVVATDGGEPPLWGTTMLLVEVIDVNDNRPVFVRPPNGTILHIREEIPLRSNVYEVYATDKDEGLNGAVRYSFLKTAGNRDWEFFIIDPISGLIQTAQRLDRESQAVYSLILVASDLGQPVPYETMQPLQVALEDIDDNEPLFVRPPKGSPQYQLLTVPEHSPRGTLVGNVTGAVDADEGPNAIVYYFIAAGNEEKNFHLQPDGCLLVLRDLDREREAIFSFIVKASSNRSWTPPRGPSPTLDLVADLTLQEVRVVLEDINDQPPRFTKAEYTAGVATDAKVGSELIQVLALDADIGNNSLVFYSILAIHYFRALANDSEDVGQVFTMGSMDGILRTFDLFMAYSPGYFVVDIVARDLAGHNDTAIIGIYILRDDQRVKIVINEIPDRVRGFEEEFIHLLSNITGAIVNTDNVQFHVDKKGRVNFAQTELLIHVVNRDTNRILDVDRVIQMIDENKEQLRNLFRNYNVLDVQPAISVRLPDDMSALQMAIIVLAILLFLAAMLFVLMNWYYRTVHKRKLKAIVAGSAGNRGFIDIMDMPNTNKYSFDGANPVWLDPFCRNLELAAQAEHEDDLPENLSEIADLWNSPTRTHGTFGREPAAVKPDDDRYLRAAIQEYDNIAKLGQIIREGPIKGSLLKVVLEDYLRLKKLFAQRMVQKASSCHSSISELIQTELDEEPGDHSPGQGSLRFRHKPPVELKGPDGIHVVHGSTGTLLATDLNSLPEEDQKGLGRSLETLTAAEATAFERNARTESAKSTPLHKLRDVIMETPLEITEL

SEQ ID NO: 39498 - protein, 445 aa, Homo sapiens
MDNDPLVFGVSGEEASRFFAVEPDTGVVWLRQPLDRETKSEFTVEFSVSDHQGVITRKVNIQVGDVNDNAPTFHNQPYSVRIPENTPVGTPIFIVNATDPDLGAGGSVLYSFQPPSQFFAIDSARGIVTVIRELDYETTQAYQLTVNALAIIITNLPYSTNIYEHSPPGTTVRIITAIDQDKGRPRGIGYTIVSGNTNSIFALDYISGVLTLNGLLDRENPLYSHGFILTVKGTELNDDRTPSDATVTTTFNILVIDINDNAPEFNSSEYSVAITELAQVGFALPLFIQVVDKDEGLNSMFEVYLVGNNSHHFIISPTSVQGKADIRIRVAIPLDYETVDRYDFDLFANESVPDHVGYAKVKITLINENDNRPIFSQPLYNISLYENVTVGTSVLTVLVSPRFTAGPLSSPGPTVVRHPEGFCPRDLSNQGRRHPQIPELCLLVY

SEQ ID NO: 39499 - protein, 728 aa, Homo sapiens
ATDNDAGTFGEVSYFFSDDPDRFSLDKDTGLIMLIARLDYELIQRFTLTIIARDGGGEETTGRVRINVLDVNDNVPTFQKDAYVGALRENEPSVTQLVRLRATDEDSPPNNQITYSIVSASAFGSYFDISLYEGYGVISVSRPLDYEQISNGLIYLTVMAMDAGNPPLNSTVPVTIEVFDENDNPPTFSKPAYFVSVVENIMAGATVLFLNATDLDRSREYGQESIIYSLEGSTQFRINARSGEITTTSLLDRETKSEYILIVRAVDGGVGHNQKTGIATVNITLLDINDNHPTWKDAPYYINLVEMTPPDSDVTTVVAVDPDLGENGTLVYSIQPPNKFYSLNSTTGKIRTTHAMLDRENPDPHEAELMRKIVVSVTDCGRPPLKATSSATVFVNLLDLNDNDPTFQNLPFVAEVLEGIPAGVSIYQVVAIDLDEGLNGLVSYRMPVGMPRMDFLINSSSGVVVTTTELDRERIAEYQLRVVASDAGTPTKSSTSTLTIHVLDVNDETPTFFPAVYNVSVSEDVPREFRVVWLNCTDNDVGLNAELSYFITGGNVDGKFSVGYRDAVVRTVVGLDRETTAAYMLILEAIDNGPVGKRHTGTATVFVTVLDVNDNRPIFLQSSYEASVPEDIPEGHSILQEDLASPCISPAPPRRAFQSSGEKETSQFPGKELRREPGPSKAQNRAAFTEPLAEAPLLGSKQAQEERAPLPREQAQQLQGSEGEKGGP

SEQ ID NO: 39500 - protein, 745 aa, Homo sapiens
MRRCRWAALALGLLRLCLAQANFAPHFFDNGVGSTNGNMALFSLPEDTPVGSHVYTLNGTDPEGDPISYHISFDPSTRSVFSVDPTFGNITLVEELDREREDEIEAIISISDGLNLVAEKVVILVTDANDEAPRFIQEPYVALVPEDIPAGSIIFKVHAVDRDTGSGGSVTYFLQNLHSPFAVDRHSGVLRLQAGATLDYERSRTHYITVVAKDGGGRLHGADVVFSATTTVTVNVEDVQDMAPVFVGTPYYGYVYEDTLPGSEVLKVVAMDGDRGKPNRILYSLVNGNDGAFEINETSGAISITQSPAQLQREVYELHVQVTEMSPAGSPAAQATVPVTIRIVDLNNHPPTFYGESGPQNRFELSMNEHPPQGEILRGLKITVNDSDQGANAKFNLQLVGPRGIFRVVPQTVLNEAQVTIIVENSAAIDFEKSKVLTFKLLAVEVNTPEKFSSTADVVIQLLDTNDNVPKFDSLYYVARIPENAPGGSSVVAVTAVDPDTGPWGEVKYSTYGTGADLFLIHPSTGLIYTQPWASLDAEATARYNFYVKAEDMEGKYSVAEVFITLLDVNDHPPQFGKSVQKKTMVLGTPVKIEAIDEDAEEPNNLVDYSITHAEPANVFDINSHTGEIWLKNSIRSLDALHNITPGRDCLWSLEVQAKDRGSPSFSTTALLKIDITDAEVRRLRYMKNSNFPGTTKSVRKPKFKPKKPHSSQGLFLHPHCEIALFNLSNVNLYSRVFQGAAQAS

SEQ ID NO: 39501 - protein, 859 aa, Homo sapiens
MRRCRWAALALGLLRLCLAQANFAPHFFDNGVGSTNGNMALFSLPEDTPVGSHVYTLNGTDPEGDPISYHISFDPSTRSVFSVDPTFGNITLVEELDREREDEIEAIISISDGLNLVAEKVVILVTDANDEAPRFIQEPYVALVPEDIPAGSIIFKVHAVDRDTGSGGSVTYFLQNLHSPFAVDRHSGVLRLQAGATLDYERSRTHYITVVAKDGGGRLHGADVVFSATTTVTVNVEDVQDMAPVFVGTPYYGYVYEDTLPGSEVLKVVAMDGDRGKPNRILYSLVNGNDGAFEINETSGAISITQSPAQLQREVYELHVQVTEMSPAGSPAAQATVPVTIRIVDLNNHPPTFYGESGPQNRFELSMNEHPPQGEILRGLKITVNDSDQGANAKFNLQLVGPRGIFRVVPQTVLNEAQVTIIVENSAAIDFEKSKVLTFKLLAVEVNTPEKFSSTADVVIQLLDTNDNVPKFDSLYYVARIPENAPGGSSVVAVTAVDPDTGPWGEVKYSTYGTGADLFLIHPSTGLIYTQPWASLDAEATARYNFYVKAEDMEGKYSVAEVFITLLDVNDHPPQFGKSVQKKTMVLGTPVKIEAIDEDAEEPNNLVDYSITHAEPANVFDINSHTGEIWLKNSIRSLDALHNITPGRDCLWSLEVQAKDRGSPSFSTTALLKIDITDAETLSRSPMAAFLIQTKDNPMKAVGVLAGTMATVVAITVLISTATFWRNKKSNKVLPMRRVLRKRPSPAPRTIRIEWLKSKSTKAATKFMLKEKPPNENCNNNSPESSLLPRAPALPPPPSVAPSTGAAQWTVPTVSGSLTPQPTQPPPKPKTMGSPVQSTLISELKQKFEKKSVHNKAYF

SEQ ID NO: 39502 - protein, 563 aa, Homo sapiens
MAPVFVGTPYYGYVYEDTLPGSEVLKVVAMDGDRGKPNRILYSLVNGNDGAFEINETSGAISITQSPAQLQREVYELHVQVTEMSPAGSPAAQATVPVTIRIVDLNNHPPTFYGESGPQNRFELSMNEHPPQGEILRGLKITVNDSDQGANAKFNLQLVGPRGIFRVVPQTVLNEAQVTIIVENSAAIDFEKSKVLTFKAVDPDTGPWGEVKYSTYGTGADLFLIHPSTGLIYTQPWASLDAEATARYNFYVKAEDMEGKYSVAEVFITLLDVNDHPPQFGKSVQKKTMVLGTPVKIEAIDEDAEEPNNLVDYSITHAEPANVFDINSHTGEIWLKNSIRSLDALHNITPGRDCLWSLEVQAKDRGSPSFSTTALLKIDITDAETLSRSPMAAFLIQTKDNPMKAVGVLAGTMATVVAITVLISTATFWRNKKSNKVLPMRRVLRKRPSPAPRTIRIEWLKSKSTKAATKFMLKEKPPNENCNNNSPESSLLPRAPALPPPPSVAPSTGAAQWTVPTVSGSLTPQPTQPPPKPKTMGSPVQSTLISELKQKFEKKSVHNKAYF

SEQ ID NO: 39503 - protein, 487 aa, Homo sapiens
MGSWALLWPPLLFTGLLVRPPGTMAQAQYCSVNKDIFEVEENTNVTEPLVDIHVPEGQEVTLGALSTPFAFRIQGNQLFLNVTPDYEEKSLLEAQLLCQSGGTLVTQLRVFVSVLDVNDNAPEFPFKTKEIRVEEDTKVNSTVIPETQLQAEDRDKDDILFYTLQEMTAGASDYFSLVSVNRPALRLDRPLDFYERPNMTFWLLVRDTPGENVEPSHTATATLVLNVVPADLRPPWFLPCTFSDGYVCIQAQYHGAVPTGHILPSPLVLRPGPIYAEDGDRGINQPIIYSIFRGNVNGTFIIHPDSGNLTVARSVPSPMTFLLLVKGQQADLARYSVTQVTVEAVAAAGSPPRFPQRLYRGTVARGAGAGVVVKDAAAPSQPLRIQAQDPEFSDLNSAITYRITNHSHFRMEGEVVLTTTTLAQAGAFYAEPPTCTGDLRHPAHLRPPAPDPTQRLPGEAEEPMQTPKATHLGAGGLKHLPGVLVPF

SEQ ID NO: 39504 - protein, 651 aa, Homo sapiens
MGSWALLWPPLLFTGLLVRPPGTMAQAQYCSVNKDIFEVEENTNVTEPLVDIHVPEGQEVTLGALSTPFAFRIQGNQLFLNVTPDYEEKSLLEAQLLCQSGGTLVTQLRVFVSVLDVNDNAPEFPFKTKEIRVEEDTKVNSTVIPETQLQAEDRDKDDILFYTLQEMTAGASDYFSLVSVNRPALRLDRPLDFYERPNMTFWLLVRDTPGENVEPSHTATATLVLNVVPADLRPPWFLPCTFSDGYVCIQAQYHGAVPTGHILPSPLVLRPGPIYAEDGDRGINQPIIYSIFRGNVNGTFIIHPDSGNLTVARSVPSPMTFLLLVKGQQADLARYSVTQVTVEAVAAAGSPPRFPQRLYRGTVARGAGAGVVVKDAAAPSQPLRIQAQDPEFSDLNSAITYRITNHSHFRMEGEVVLTTTTLAQAGAFYAEVEAHNTVTSGTATTVIEIQVSEQEPPSTGGGPSEDKRFSVVDMAALGGVLGALLLLALLGLAVLVHKHYGPRLKCCCGKAPEPQPQGFDNQAFLPDHKANWAPVPSPTHDPKPAEAPMPAEPAPPGPASPGGAPEPPAAARAGGSPTAVRSILTKERRPEGGYKAVWFGEDIGTEADVVVLNAPTLDVDGASDSGSGDEGEGAGRGGGPYDAPGGDDSYI

SEQ ID NO: 39505 - protein, 845 aa, Homo sapiens
MGSWALLWPPLLFTGLLVRPPGTMAQAQYCSVNKDIFEVEENTNVTEPLVDIHVPEGQEVTLGALSTPFAFRIQGNQLFLNVTPDYEEKSLLEAQLLCQSGGTLVTQLRVFVSVLDVNDNAPEFPFKTKEIRVEEDTKVNSTVIPETQLQAEDRDKDDILFYTLQEMTAGASDYFSLVSVNRPALRLDRPLDFYERPNMTFWLLVRDTPGENVEPSHTATATLVLNVVPADLRPPWFLPCTFSDGYVCIQAQYHGAVPTGHILPSPLVLRPGPIYAEDGDRGINQPIIYSIFRGNVNGTFIIHPDSGNLTVARSVPSPMTFLLLVKGQQADLARYSVTQVTVEAVAAAGSPPRFPQRLYRGTVARGAGAGVVVKDAAAPSQPLRIQAQDPEFSDLNSAITYRITNHSHFRMEGEVVLTTTTLAQAGAFYAEVEAHNTVTSGTATTVIEIQVSEQEPPSTDVPPSPEAGGTTGPWTSTTSEVPRPPEPSQGPSTTSSGGGTGPHPPSGTTLRPPTSSTPGGPPGAENSTSHQPATPGGDTAQTPKPGTSQPMPPGVGTSTSHQPATPSGGTAQTPEPGTSQPMPPSMGTSTSHQPATPGGGTAQTPEAGTSQPMPPGMGTSTSHQPTTPGGGTAQTPEPGTSQPMPLSKSTPSSGGGPSEDKRFSVVDMAALGGVLGALLLLALLGLAVLVHKHYGPRLKCCCGKAPEPQPQGFDNQAFLPDHKANWAPVPSPTHDPKPAEAPMPAEPAPPGPASPGGAPEPPAAARAGGSPTAVRSILTKERRPEGGYKAVWFGEDIGTEADVVVLNAPTLDVDGASDSGSGDEGEGAGRGGGPYDAPGGDDSYI

SEQ ID NO: 39506 - protein, 845 aa, Homo sapiens; identical to SEQ ID NO: 39505

SEQ ID NO: 39507 - protein, 261 aa, Homo sapiens
MAESHLQSSLITASQFFEIWLHFDADGSGYLEGKELQNLIQELQQARKKAGLELSPEMKTFVDQYGQRDDGKIGIVELAHVLPTEENFLLLFRCQQLKSCEEFMKTWRKYDTDHSGFIETEELKNFLKDLLEKANKTVDDTKLAEYTDLMLKLFDSNNDGKLELTEMARLLPVQENFLLKFQGIKMCGKEFNKAFELYDQDGNGYIDENELDALLKDLCEKNKQDLDINNITTYKKNIMALSDGGKLYRTDLALILCAGDN

SEQ ID NO: 39508 - protein, 204 aa, Homo sapiens
MKTFVDQYGQRDDGKIGIVELAHVLPTEENFLLLFRCQQLKSCEEFMKTWRKYDTDHSGFIETEELKNFLKDLLEKANKTVDDTKLAEYTDLMLKLFDSNNDGKLELTEMARLLPVQENFLLKFQGIKMCGKEFNKAFELYDQDGNGYIDENELDALLKDLCEKNKQDLDINNITTYKKNIMALSDGGKLYRTDLALILCAGDN

SEQ ID NO: 39509 - protein, 271 aa, Homo sapiens
MAGPQQQPPYLHLAELTASQFLEIWKHFDADGNGYIEGKELENFFQELEKARKGSGMMSKSDNFGEKMKEFMQKYDKNSDGKIEMAELAQILPTEENFLLCFRQHVGSSAEFMEAWRKYDTDRSGYIEANELKGFLSDLLKKANRPYDEPKLQEYTQTILRMFDLNGDGKLGLSEMSRLLPVQENFLLKFQGMKLTSEEFNAIFTFYDKDRSGYIDEHELDALLKDLYEKNKKEMNIQQLTNYRKSVMSLAEAGKLYRKDLEIVLCSEPPM

SEQ ID NO: 39510 - protein, 192 aa, Homo sapiens
MAGPQQQPPYLHLAELTASQFLEIWKHFDADGNGYIEGKELENFFQELEKARKGSGMMSKSDNFGEKMKEFMQKYDKNSDGKIEMAELAQILPTEENFLLCFRQHVGSSAEFMEAWRKYDTDRSGYIEANELKGFLSDLLKKANRPYDEPKLQEYTQTILRMFDLNGDGKLGLSEMSRIEAATLTSMSWMPF

SEQ ID NO: 39511 - protein, 2220 aa, Homo sapiens
MIRIAALNASSTIEDDHEGSFKSHKTQTKEAQEAEAFALYHKALDLQKHDRFEESAKAYHELLEASLLREAVSSGDEKEGLKHPGLILKYSTYKNLAQLAAQREDLETAMEFYLEAVMLDSTDVNLWYKIGHVALRLIRIPLARHAFEEGLRCNPDHWPCLDNLITVLYTLSDYTTCLYFICKALEKDCRYSKGLVLKEKIFEEQPCLRKDSLRMFLKCDMSIHDVSVSAAETQAIVDEALGLRKKRQALIVREKEPDLKLVQPIPFFTWKCLGESLLAMYNHLTTCEPPRPSLGKRIDLSDYQDPSQPLESSMVVTPVNVIQPSTVSTNPAVAVAEPVVSYTSVATTSFPLHSPGLLETGAPVGDISGGDKSKKGVKRKKISEESGETAKRRSARVRNTKCKKEEKVDFQELLMKFLPSRLRKLDPEEEDDSFNNYEVQSEAKLESFPSIGPQRLSFDSATFMESEKQDVHEFLLENLTNGGILELMMRYLKAMGHKFLVRWPPGLAEVVLSVYHSWRRHSTSLPNPLLRDCSNKHIKDMMLMSLSCMELQLDQWLLTKGRSSAVSPRNCPAGMVNGRFGPDFPGTHCLGDLLQLSFASSQRDLFEDGWLEFVVRVYWLKARFLALQGDMEQALENYDICTEMLQSSTAIQVEAGAERRDIVIRLPNLHNDSVVSLEEIDKNLKSLERCQSLEEIQRLYEAGDYKAVVHLLRPTLCTSGFDRAKHLEFMTSIPERPAQLLLLQDSLLRLKDYRQCFECSDVALNEAVQQMVNSGEAAAKEEWVATVTQLLMGIEQALSADSSGSILKVSSSTTGLVRLTNNLIQVIDCSMAVQEEAKEPHVSSVLPWIILHRIIWQEEDTFHSLCHQQQLQNPAEEGMSETPMLPSSLMLLNTAHEYLGRRSWCCNSDGALLRFYVRVLQKELAASTSEDTHPYKEELETALEQCFYCLYSFPSKKSKARYLEEHSAQQVDLIWEDALFMFEYFKPKTLPEFDSYKTSTVSADLANLLKRIATIVPRTERPALSLDKVSAYIEGTSTEVPCLPEGADPSPPVVNELYYLLADYHFKNKEQSKAIKFYMHDICICPNRFDSWAGMALARASRIQDKLNSNELKSDGPIWKHATPVLNCFRRALEIDSSNLSLWIEYGTMSYALHSFASRQLKQWRGELPPELVQQMEGRRDSMLETAKHCFTSAARCEGDGDEEEWLIHYMLGKVAEKQQQPPTVYLLHYRQAGHYLHEEAARYPKKIHYHNPPELAMEALEVYFRLHASILKLLGKPDSGVGAEVLVNFMKEAAEGPFARGEEKNTPKASEKEKACLVDEDSHSSAGTLPGPGASLPSSSGPGLTSPPYTATPIDHDYVKCKKPHQQATPDDRSQDSTAVALSDSSSTQDFFNEPTSLLEGSRKSYTEKRLPILSSQAGATGKDLQGATEERGKNEESLESTEGFRAAEQGVQKPAAETPASACIPGKPSASTPTLWDGKKRGDLPGEPVAFPQGLPAGAEEQRQFLTEQCIASFRLCLSRFPQHYKSLYRLAFLYTYSKTHRNLQWARDVLLGSSIPWQQLQHMPAQGLFCERNKTNFFNGIWRIPVDEIDRPGSFAWHMNRSIVLLLKVLAQLRDHSTLLKVSSMLQRTPDQGKKYLRDADRQVLAQRAFILTVKVLEDTLSELAEGSERPGPKVCGLPGARMTTDVSHKASPEDGQEGLPQPKKPPLADGSGPGPEPGGKVGLLNHRPVAMDAGDSADQSGERKDKESPRAGPTEPMDTSEATVCHSDLERTPPLLPGRPARDRGPESRPTELSLEELSISARQQPTPLTPAQPAPAPAPATTTGTRAGGHPEEPLSRLSRKRKLLEDTESGKTLLLDAYRVWQQGQKGVAYDLGRVERIMSETYMLIKQVDEEAALEQAVKFCQVHLGAAAQRQASGDTPTTPKHPKDSRENFFPVTVVPTAPDPVPADSVQRPSDAHTKPRPALAAATTIITCPPSASASTLDQSKDPGPPRPHRPEATPSMASLGPEGEELARVAEGTSFPPQEPRHSPQVKMAPTSSPAEPHCWPAEAALGTGAEPTCSQEGKLRPEPRRDGEAQEAASETQPLSSPPTAASSKAPSSGSAQPPEGHPGKPEPSRAKSRPLPNMPKLVIPSAATKFPPEITVTPPTPTLLSPKGSISEETKQKLKSAILSAQSAANVRKESLCQPALEVLETSSQESSLESETDEDDDYMDI

SEQ ID NO: 39512 - protein, 2220 aa, Homo sapiens; identical to SEQ ID NO: 39511

SEQ ID NO: 39513 - protein, 589 aa, Homo sapiens
MPRRSRRGIWRIPVDEIDRPGSFAWHMNRSIVLLLKVLAQLRDHSTLLKVSSMLQRTPDQGKKYLRDADRQVLAQRAFILTVKVLEDTLSELAEGSERPGPKVCGLPGARMTTDVSHKASPEDGQEGLPQPKKPPLADGSGPGPEPGGKVGLLNHRPVAMDAGDSADQSGERKDKESPRAGPTEPMDTSEATVCHSDLERTPPLLPGRPARDRGPESRPTELSLEELSISARQQPTPLTPAQPAPAPAPATTTGTRAGGHPEEPLSRLSRKRKLLEDTESGKTLLLDAYRVWQQGQKGVAYDLGRVERIMSETYMLIKQVDEEAALEQAVKFCQVHLGLPPRDRPRDTPTTPKHPKDSRENFFPVTVVPTAPDPVPADSVQRPSDAHTKPRPALAAATTIITCPPSASASTLDQSKDPGPPRPHRPEATPSMASLGPEGKLRPEPRRDGEAQEAASETQPLSSPPTAASSKAPSSGSAQPPEGHPGKPEPSRAKSRPLPNMPKLVIPSAATKFPPEITVTPPTPTLLSPKGSISEETKQKLKSAILSAQSAANVRKESLCQPALEVLETSSQESSLESETDEDDDYMDI

SEQ ID NO: 39514 - protein, 407 aa, Homo sapiens
MIRIAALNASSTIEDDHEGSFKSHKTQTKEAQEAEAFALYHKALDLQKHDRFEESAKAYHELLEASLLREAVSSGDEKEGLKHPGLILKYSTYKNLAQLAAQREDLETAMEFYLEAVMLDSTDVNLWYKIGHVALRLIRIPLARHAFEEGLRCNPDHWPCLDNLITVLYTLSDYTTCLYFICKALEKDCRYSKGLVLKEKIFEEQPCLRKDSLRMFLKCDMSIHDVSVSAAETQAIVDEALGLRKKRQALIVREKEPDLKLVQPIPFFTWKCLGESLLAMYNHLTTCEPPRPSLGKRIDLSDYQDPSQPLESSMVVTPVNVIQPSTVSTNPAVAVAEPVVSYTSVATTSFPLHSPGLLETGAPVGDISGGDKSKKGVKRKKISEESGETAKRRSARVRNTKCKKEEK

SEQ ID NO: 39515 - protein, 508 aa, Homo sapiens
MQFSGEKISGQRDLQKSKMRFTFTSRCLALFLLLNHPTPILPAFSNQTYPTIEPKPFLYVVGRKKMMDAQYKCYDRMQQLPAYQGEGPYCNRTWDGWLCWDDTPAGVLSYQFCPDYFPDFDPSEKVTKYCDEKGVWFKHPENNRTWSNYTMCNAFTPEKLKNAYVLYYLAIVGHSLSIFTLVISLGIFVFFRKLTTIFPLNWKYRKALSLGCQRVTLHKNMFLTYILNSMIIIIHLVEVVPNGELVRRDPVSCKILHFFHQYMMACNYFWMLCEGIYLHTLIVVAVFTEKQRLRWYYLLGWGFPLVPTTIHAITRAVYFNDNCWLSVETHLLYIIHGPVMAALVVNFFFLLNIVRVLVTKMRETHEAESHMYLKAVKATMILVPLLGIQFVVFPWRPSNKMLGKIYDYVMHSLIHFQGFFVATIYCFCNNEVQTTVKRQWAQFKIQWNQRWGRRPSNRSARAAAAAAEAGDIPIYICHQELRNEPANNQGEESAEIIPLNIIEQESSA

SEQ ID NO: 39516 - protein, 490 aa, Homo sapiens
MRFTFTSRCLALFLLLNHPTPILPAFSNQTYPTIEPKPFLYVVGRKKMMDAQYKCYDRMQQLPAYQGEGPYCNRTWDGWLCWDDTPAGVLSYQFCPDYFPDFDPSEKVTKYCDEKGVWFKHPENNRTWSNYTMCNAFTPEKLKNAYVLYYLAIVGHSLSIFTLVISLGIFVFFRKLTTIFPLNWKYRKALSLGCQRVTLHKNMFLTYILNSMIIIIHLVEVVPNGELVRRDPVSCKILHFFHQYMMACNYFWMLCEGIYLHTLIVVAVFTEKQRLRWYYLLGWGFPLVPTTIHAITRAVYFNDNCWLSVETHLLYIIHGPVMAALVVNFFFLLNIVRVLVTKMRETHEAESHMYLKAVKATMILVPLLGIQFVVFPWRPSNKMLGKIYDYVMHSLIHFQGFFVATIYCFCNNEVQTTVKRQWAQFKIQWNQRWGRRPSNRSARAAAAAAEAGDIPIYICHQELRNEPANNQGEESAEIIPLNIIEQESSA

SEQ ID NO: 39517 - protein, 474 aa, Homo sapiens
MRFTFTSRCLALFLLLNHPTPILPAFSNQTYPTIEPKPFLYVVGRKKMMDAQYKCYDRMQQLPAYQGEGPYCNRTWDGWLCWDDTPAGVLSYQFCPDYFPDFDPSEKVTKYCDEKGVWFKHPENNRTWSNYTMCNAFTPEKLKNAYVLYYLAIVGHSLSIFTLVISLGIFVFFRSLGCQRVTLHKNMFLTYILNSMIIIIHLVEVVPNGELVRRDPVSCKILHFFHQYMMACNYFWMLCEGIYLHTLIVVAVFTEKQRLRWYYLLGWGFPLVPTTIHAITRAVYFNDNCWLSVETHLLYIIHGPVMAALVVNFFFLLNIVRVLVTKMRETHEAESHMYLKAVKATMILVPLLGIQFVVFPWRPSNKMLGKIYDYVMHSLIHFQGFFVATIYCFCNNEVQTTVKRQWAQFKIQWNQRWGRRPSNRSARAAAAAAEAGDIPIYICHQELRNEPANNQGEESAEIIPLNIIEQESSA

SEQ ID NO: 39518 - protein, 274 aa, Homo sapiens
MRFTFTSRCLALFLLLNHPTPILPAFSNQTYPTIEPKPFLYVVGRKKMMDAQYKCYDRMQQLPAYQGEGPYCNRTWDGWLCWDDTPAGVLSYQFCPDYFPDFDPSEKVTKYCDEKGVWFKHPENNRTWSNYTMCNAFTPEKLKNAYVLYYLAIVGHSLSIFTLVISLGIFVFFRSLGCQRVTLHKNMFLTYILNSMIIIIHLVEVVPNGELVRRDPVSCKILHFFHQYMMACNYFWMLCEGIYLHTLIVVAVFTEKQRLRWYYLLGWAPAFHRD

SEQ ID NO: 39519 - protein, 490 aa, Homo sapiens; identical to SEQ ID NO: 39516

SEQ ID NO: 39520 - protein, 290 aa, Homo sapiens
MRFTFTSRCLALFLLLNHPTPILPAFSNQTYPTIEPKPFLYVVGRKKMMDAQYKCYDRMQQLPAYQGEGPYCNRTWDGWLCWDDTPAGVLSYQFCPDYFPDFDPSEKVTKYCDEKGVWFKHPENNRTWSNYTMCNAFTPEKLKNAYVLYYLAIVGHSLSIFTLVISLGIFVFFRKLTTIFPLNWKYRKALSLGCQRVTLHKNMFLTYILNSMIIIIHLVEVVPNGELVRRDPVSCKILHFFHQYMMACNYFWMLCEGIYLHTLIVVAVFTEKQRLRWYYLLGWAPAFHRD

SEQ ID NO: 39521 - protein, 474 aa, Homo sapiens; identical to SEQ ID NO: 39517

SEQ ID NO: 39522 - protein, 162 aa, Homo sapiens
MRFTFTSRCLALFLLLNHPTPILPAFSNQTYPTIEPKPFLYVVGRKKMMDAQYKCYDRMQQLPAYQGEGPYCNRTWDGWLCWDDTPAGVLSYQFCPDYFPDFDPSEKVTKYCDEKGVWFKHPENNRTWSNYTMCNAFTPEKLKNAYVLYYLAIVGHSCQFSP

SEQ ID NO: 39523 - protein, 461 aa, Homo sapiens
MEKKCTLNFLVLLPFFMILVTAELEESPEDSIQLGVTRNKIMTAQYECYQKIMQDPIQQAEGVYCNRTWDGWLCWNDVAAGTESMQLCPDYFQDFDPSEKVTKICDQDGNWFRHPASNRTWTNYTQCNVNTHEKVKTALNLFYLTIIGHGLSIASLLISLGIFFYFKSLSCQRITLHKNLFFSFVCNSVVTIIHLTAVANNQALVATNPVSCKVSQFIHLYLMGCNYFWMLCEGIYLHTLIVVAVFAEKQHLMWYYFLGWGFPLIPACIHAIARSLYYNDNCWISSDTHLLYIIHGPICAALLVNLFFLLNIVRVLITKLKVTHQAESNLYMKAVRATLILVPLLGIEFVLIPWRPEGKIAEEVYDYIMHILMHFQGLLVSTIFCFFNGEVQAILRRNWNQYKIQFGNSFSNSEALRSASYTVSTISDGPGYSHDCPSEHLNGKSIHDIENVLLKPENLYN

SEQ ID NO: 39524 - protein, 461 aa, Homo sapiens; identical to SEQ ID NO: 39523

SEQ ID NO: 39525 - protein, 461 aa, Homo sapiens; identical to SEQ ID NO: 39523

SEQ ID NO: 39526 - protein, 37 aa, Homo sapiens
MEKKCTLNFLVLLPFFMILVTAELEESPEDSIQLGVT

SEQ ID NO: 39527 - protein, 78 aa, Homo sapiens
MEKKCTLNFLVLLPFFMILVTAELEESPEDSIQLGVTRNKIMTAQYECYQKIMQDPIQQAEGVYCNRTWDGWLCWNDV

SEQ ID NO: 39528 - protein, 141 aa, Homo sapiens
MGFQKFSPFLALSILVLLQAGSLHAAPFRSALESSPADPATLSEDEARLLLAALVQNYVQMKASELEQEQEREGSSLDSPRSKRCGNLSTCMLGTYTQDFNKFHTFPQTAIGVGAPGKKRDMSSDLERDHRPHVSMPQNAN

SEQ ID NO: 39529 - protein, 141 aa, Homo sapiens
MGFQKFSPFLALSILVLLQAGSLHAAPFRSALESSPADPATLSEDEARLLLAALVQNYVQMKASELEQEQEREGSSLDSPRSKRCGNLSTCMLGTYTQDFNKFHTFPQTAIGVGAPGKKRDMSSDLERDHRPHNHCPEESL

SEQ ID NO: 39530 - protein, 128 aa, Homo sapiens
MGFQKFSPFLALSILVLLQAGSLHAAPFRSALESSPADPATLSEDEARLLLAALVQNYVQMKASELEQEQEREGSRIIAQKRACDTATCVTHRLAGLLSRSGGVVKNNFVPTNVGSKAFGRRRRDLQA

SEQ ID NO: 39531 - protein, 141 aa, Homo sapiens; identical to SEQ ID NO: 39528

SEQ ID NO: 39532 - protein, 128 aa, Homo sapiens; identical to SEQ ID NO: 39530

SEQ ID NO: 39533 - protein, 127 aa, Homo sapiens
MGFRKFSPFLALSILVLYQAGSLQAAPFRSALESSPDPATLSKEDARLLLAALVQDYVQMKASELKQEQETQGSSSAAQKRACNTATCVTHRLAGLLSRSGGMVKSNFVPTNVGSKAFGRRRRDLQA

SEQ ID NO: 39534 - protein, 138 aa, Homo sapiens
MKKEANLQRGGMGFRKFSPFLALSILVLYQAGSLQAAPFRSALESSPDPATLSKEDARLLLAALVQDYVQMKASELKQEQETQGSSSAAQKRACNTATCVTHRLAGLLSRSGGMVKSNFVPTNVGSKAFGRRRRDLQA

SEQ ID NO: 39535 - protein, 127 aa, Homo sapiens; identical to SEQ ID NO: 39533

SEQ ID NO: 39536 - protein, 401 aa, Homo sapiens
MPVQLSEHPEWNESMHSLRISVGGLPVLASMTKAADPRFRPRWKVILTFFVGAAILWLLCSHRPAPGRPPTHNAHNWRLGQAPANWYNDTYPLSPPQRTPAGIRYRIAVIADLDTESRAQEENTWFSYLKKGYLTLSDSGDKVAVEWDKDHGVLESHLAEKGRGMELSDLIVFNGKLYSVDDRTGVVYQIEGSKAVPWVILSDGDGTVEKGFKAEWLAVKDERLYVGGLGKEWTTTTGDVVNENPEWVKVVGYKGSVDHENWVSNYNALRAAAGIQPPGYLIHESACWSDTLQRWFFLPRRASQERYSEKDDERKGANLLLSASPDFGDIAVSHVGAVVPTHGFSSFKFIPNTDDQIIVALKSEEDSGRVASYIMAFTLDGRFLLPETKIGSVKYEGIEFI

SEQ ID NO: 39537 - protein, 350 aa, Homo sapiens
MPVQLSEHPEWNESMHSLRISVGGLPVLASMTKAADPRFRPRSPPQRTPAGIRYRIAVIADLDTESRAQEENTWFSYLKKGYLTLSDSGDKVAVEWDKDHGVLESHLAEKGRGMELSDLIVFNGKLYSVDDRTGVVYQIEGSKAVPWVILSDGDGTVEKGFKAEWLAVKDERLYVGGLGKEWTTTTGDVVNENPEWVKVVGYKGSVDHENWVSNYNALRAAAGIQPPGYLIHESACWSDTLQRWFFLPRRASQERYSEKDDERKGANLLLSASPDFGDIAVSHVGAVVPTHGFSSFKFIPNTDDQIIVALKSEEDSGRVASYIMAFTLDGRFLLPETKIGSVKYEGIEFI

SEQ ID NO: 39538 - protein, 401 aa, Homo sapiens; identical to SEQ ID NO: 39536

SEQ ID NO: 39539 - protein, 245 aa, Homo sapiens
MPVQLSEHPEWNESMHSLRISVGGLPVLASMTKAADPRFRPRWKVILTFFVGAAILWLLCSHRPAPGRPPTHNAHNWRLGQAPANWYNDTYPLSPPQRTPAGIRYRIAVIADLDTESRAQEENTWFSYLKKGYLTLSDSGDKVAVEWDKDHGVLESHLAEKGRGMELSDLIVFNGKLYSVDDRTGVVYQIEGSKAVPWVILSDGDGTVEKGVGGEWEAVREIVRKRWRLVKQVSHVGVLGQWIQR

SEQ ID NO: 39540 - protein, 220 aa, Homo sapiens
MGNCAKRPWRRGPKDPLQWLGSPPRGSCPSPSSSPKEQGDPAPGVQGYSVLNSLVGPACIFLRPSIAATQLDRELRPEEIEELQVAFQEFDRDRDGYIGCRELGACMRTLGYMPTEMELIEISQQISGGKVDFEDFVELMGPKLLAETADMIGVRELRDAFREFDTNGDGRISVGELRAALKALLGERLSQREVDEILQDVDLNGDGLVDFEEFVRMMSR

SEQ ID NO: 39541 - protein, 341 aa, Homo sapiens
MPFPFGKSHKSPADIVKNLKESMAVLEKQDISDKKAEKATEEVSKNLVAMKEILYGTNEKEPQTEAVAQLAQELYNSGLLSTLVADLQLIDFEGKKDVAQIFNNILRRQIGTRTPTVEYICTQQNILFMLLKGYESPEIALNCGIMLRECIRHEPLAKIILWSEQFYDFFRYVEMSTFDIASDAFATFKDLLTRHKLLSAEFLEQHYDRFFSEYEKLLHSENYVTKRQSLKLLGELLLDRHNFTIMTKYISKPENLKLMMNLLRDKSRNIQFEAFHVFKVFVANPNKTQPILDILLKNQAKLIEFLSKFQNDRTEDEQFNDEKTYLVKQIRDLKRPAQQEA

SEQ ID NO: 39542 - protein, 341 aa, Homo sapiens; identical to SEQ ID NO: 39541

SEQ ID NO: 39543 - protein, 341 aa, Homo sapiens; identical to SEQ ID NO: 39541

SEQ ID NO: 39544 - protein, 337 aa, Homo sapiens
MKKMPLFSKSHKNPAEIVKILKDNLAILEKQDKKTDKASEEVSKSLQAMKEILCGTNEKEPPTEAVAQLAQELYSSGLLVTLIADLQLIDFEGKKDVTQIFNNILRRQIGTRSPTVEYISAHPHILFMLLKGYEAPQIALRCGIMLRECIRHEPLAKIILFSNQFRDFFKYVELSTFDIASDAFATFKDLLTRHKVLVADFLEQNYDTIFEDYEKLLQSENYVTKRQSLKLLGELILDRHNFAIMTKYISKPENLKLMMNLLRDKSPNIQFEAFHVFKVFVASPHKTQPIVEILLKNQPKLIEFLSSFQKERTDDEQFADEKNYLIKQIRDLKKTAP

SEQ ID NO: 39545 - protein, 337 aa, Homo sapiens; identical to SEQ ID NO: 39544

SEQ ID NO: 39546 - protein, 314 aa, Homo sapiens
MPLFSKSHKNPAEIVKILKDNLAILEKQDKKTDKASEEVSKSLQAMKEILCGTNEKEPPTEAVAQLAQELYSSGLLVTLIADLQLIDFEGKKDVTQIFNNILRRQIGTRSPTVEYISAHPHILFMLLKGYEAPQIALRCGIMLRECIRHEPLAKIILFSNQFRDFFKYVELSTFDIASDAFATFKIFEDYEKLLQSENYVTKRQSLKLLGELILDRHNFAIMTKYISKPENLKLMMNLLRDKSPNIQFEAFHVFKVFVASPHKTQPIVEILLKNQPKLIEFLSSFQKERTDDEQFADEKNYLIKQIRDLKKTAP

SEQ ID NO: 39547 - protein, 93 aa, Homo sapiens
MKKMPLFSKSHKNPAEIVKILKDNLAILEKQDKKTDKASEEVSKSLQAMKEILCGTNEKEPPTEAVAQLAQELYSSGLLVTLIADLQLIDFEV

SEQ ID NO: 39548 - protein, 337 aa, Homo sapiens; identical to SEQ ID NO: 39544

SEQ ID NO: 39549 - protein, 337 aa, Homo sapiens; identical to SEQ ID NO: 39544

SEQ ID NO: 39550 - protein, 128 aa, Homo sapiens
MKKMPLFSKSHKNPAEIVKILKDNLAILEKQDKKTDKASEEVSKSLQAMKEILCGTNEKEPPTEAVAQLAQELYSSGLLVTLIADLQLIDFEGKKDVTQIFNNILRRQIGTRSPTVEYISAHPHILFM

SEQ ID NO: 39551 - protein, 188 aa, Homo sapiens
MKKMPLFSKSHKNPAEIVKILKDNLAILEKQDKKTDKASEEVSKSLQAMKEILCGTNEKEPPTEAVAQLAQELYSSGLLVTLIADLQLIDFEGKKDVTQIFNNILRRQIGTRSPTVEYISAHPHILFMLLKGYEAPQIALRCGIMLRECIRHEPLAKIILFSNQFRDFFKYVELSTFDIASDAFATFK

SEQ ID NO: 39552 - protein, 275 aa, Homo sapiens
MTTEQARGQQGPNLAIGRQKPPAGVVTPKSDAEEPPLTRKRSKKERGLRGSRKRTGSSGEQTGPEAPGSSNNPPSTGEGPAGAPPASPGPASSRQSHRHRPDSLHDAAQRTYGPLLNRVFGKDRELGPEELDELQAAFEEFDTDRDGYISHRELGDCMRTLGYMPTEMELLEVSQHIKMRMGGRVDFEEFVELIGPKLREETAHMLGVRELRIAFREFDRDRDGRITVAELREAVPALLGEPLAGPELDEMLREVDLNGDGTVDFDEFVMMLSRH

SEQ ID NO: 39553 - protein, 170 aa, Homo sapiens
MTEPWLALGTSWTLPLQDRELGPEELDELQAAFEEFDTDRDGYISHRELGDCMRTLGYMPTEMELLEVSQHIKMRMGGRVDFEEFVELIGPKLREETAHMLGVRELRIAFREFDRDRDGRITVAELREAVPALLGEPLAGPELDEMLREVDLNGDGTVDFDEFVMMLSRH

SEQ ID NO: 39554 - protein, 173 aa, Homo sapiens
MQFPMGPACIFLRKGIAEKQRERPLGQDEIEELREAFLEFDKDRDGFISCKDLGNLMRTMGYMPTEMELIELGQQIRMNLGGRVDFDDFVELMTPKLLAETAGMIGVQEMRDAFKEFDTNGDGEITLVELQQAMQRLLGERLTPREISEVVREADVNGDGTVDFEEFVKMMSR

SEQ ID NO: 39555 - protein, 281 aa, Homo sapiens
MEKSTDTDEDNVTRTEYSDKTTQFPSVYAVPGTEQTEAVGGLSSKPATPKTTTPPSSPPPTAVSPEFAYVPADPAQLAAQMLAMATSERGQPPPCSNMWTLYCLTDKNQQGHPSPPPAPGPFPQATLYLPNPKDPQFQQHPPKVTFPTYVMGDTKKTSAPPFILVGSNVQEAQGWKPLPGHAVVSQSDVLRYVAMQVPIAVPADEKYQKHTLSPQNANPPSGQDVPRPKSPVFLSVAFPVEDVAKKSSGSGDKCAPFGSYGIAGEVTVTTAHKRRKAETEN

SEQ ID NO: 39556 - protein, 395 aa, Homo sapiens
MEKSTDTDEDNVTRTEYSDKTTQFPSVYAVPGTEQTEAVGGLSSKPATPKTTTPPSSPPPTAVSPEFAYVPADPAQLAAQMLGKVSSIHSDQSDVLMVDVATSMPVVIKEVPSSEAAEDVMVAAPLVCSGKVLEVQVVNQTSVHVDLGSQPKENEAEPSTASSVPLQDEQEPPAYDQAPEVTLQADIEVMSTVHISSVYNDVPVTEGVVYIEQLPEQIVIPFTDQVACLKENEQSKENEQSPRVSPKSVVEKTTSGMSKKSVESVKLAQLEENAKYSSVYMEAEATALLSDTSLKGQPEVPAQLLDAEGAIKIGSEKSLHLEVEITSIVSDNTGQEESGENSVPQEMEGKPVLSGEAAEAVHSGTSVKSSSGPFPPAPEGLTAPEIEPEGESTAE

SEQ ID NO: 39557 - protein, 379 aa, Homo sapiens
MISSKPRLVVPYGLKTLLEGISRAVLKTNPSNINQFAAAYFQELTMYRGNTTMDIKDLVKQFHQIKVEKWSEGTTPQKKLECLKEPGKTSVESKVPTQMEKSTDTDEDNVTRTEYSDKTTQFPSVYAVPGTEQTEAVGGLSSKPATPKTTTPPSSPPPTAVSPEFAYVPADPAQLAAQMLAMATSERGQPPPCSNMWTLYCLTDKNQQGHPSPPPAPGPFPQATLYLPNPKDPQFQQHPPKVTFPTYVMGDTKKTSAPPFILVGSNVQEAQGWKPLPGHAVVSQSDVLRYVAMQVPIAVPADEKYQKHTLSPQNANPPSGQDVPRPKSPVFLSVAFPVEDVAKKSSGSGDKCAPFGSYGIAGEVTVTTAHKRRKAETEN

SEQ ID NO: 39558 - protein, 379 aa, Homo sapiens; identical to SEQ ID NO: 39557

SEQ ID NO: 39559 - protein, 221 aa, Homo sapiens
MISSKPRLVVPYGLKTLLEGISRAVLKTNPSNINQFAAAYFQELTMYRGNTTMDIKDLVKQFHQIKVEKWSEGTTPQKKLECLKEPGKTSVESKVPTQMEKSTDTDEDNVTRTEYSDKTTQFPSVYAVPGTEQTEAVGGLSSKPATPKTTTPPSSPPPTAVSPEFAYVPADPAQLAAQMLEDVAKKSSGSGDKCAPFGSYGIAGEVTVTTAHKRRKAETEN

SEQ ID NO: 39560 - protein, 493 aa, Homo sapiens
MISSKPRLVVPYGLKTLLEGISRAVLKTNPSNINQFAAAYFQELTMYRGNTTMDIKDLVKQFHQIKVEKWSEGTTPQKKLECLKEPGKTSVESKVPTQMEKSTDTDEDNVTRTEYSDKTTQFPSVYAVPGTEQTEAVGGLSSKPATPKTTTPPSSPPPTAVSPEFAYVPADPAQLAAQMLGKVSSIHSDQSDVLMVDVATSMPVVIKEVPSSEAAEDVMVAAPLVCSGKVLEVQVVNQTSVHVDLGSQPKENEAEPSTASSVPLQDEQEPPAYDQAPEVTLQADIEVMSTVHISSVYNDVPVTEGVVYIEQLPEQIVIPFTDQVACLKENEQSKENEQSPRVSPKSVVEKTTSGMSKKSVESVKLAQLEENAKYSSVYMEAEATALLSDTSLKGQPEVPAQLLDAEGAIKIGSEKSLHLEVEITSIVSDNTGQEESGENSVPQEMEGKPVLSGEAAEAVHSGTSVKSSSGPFPPAPEGLTAPEIEPEGESTAE

SEQ ID NO: 39561 - protein, 475 aa, Homo sapiens
MISSKPRLVVPYGLKTLLEGISRAVLKTNPSNINQFAAAYFQELTMYRVEKWSEGTTPQKKLECLKEPGKTSVESKVPTQMEKSTDTDEDNVTRTEYSDKTTQFPSVYAVPGTEQTEAVGGLSSKPATPKTTTPPSSPPPTAVSPEFAYVPADPAQLAAQMLGKVSSIHSDQSDVLMVDVATSMPVVIKEVPSSEAAEDVMVAAPLVCSGKVLEVQVVNQTSVHVDLGSQPKENEAEPSTASSVPLQDEQEPPAYDQAPEVTLQADIEVMSTVHISSVYNDVPVTEGVVYIEQLPEQIVIPFTDQVACLKENEQSKENEQSPRVSPKSVVEKTTSGMSKKSVESVKLAQLEENAKYSSVYMEAEATALLSDTSLKGQPEVPAQLLDAEGAIKIGSEKSLHLEVEITSIVSDNTGQEESGENSVPQEMEGKPVLSGEAAEAVHSGTSVKSSSGPFPPAPEGLTAPEIEPEGESTAE

SEQ ID NO: 39562 - protein, 483 aa, Homo sapiens
MSFSDSSATFLLNEGSADSYTSRPSLDSDVSLEEDRESARREVESQAQQQLERAKHKPVAFAVRTNVSYCGVLDEECPVQGSGVNFEAKDFLHIKEKYSNDWWIGRLVKEGGDIAFIPSPQRLESIRLKQEQKARRSGNPSSLSDIGNRRSPPPSLAKQKQKQAEHVPPYDVVPSMRPVVLVGPSLKGYEVTDMMQKALFDFLKHRFDGRISITRVTADLSLAKRSVLNNPGKRTIIERSSARSSIAEVQSEIERIFELAKSLQLVVLDADTINHPAQLAKTSLAPIIVFVKVSSPKVLQRLIRSRGKSQMKHLTVQMMAYDKLVQCPPESFDVILDENQLEDACEHLAEYLEVYWRATHHPAPGPGLLGPPSAIPGLQNQQLLGERGEEHSPLERDSLMPSDEASESSRQAWTGSSQRSSRHLEEDYADAYQDLYQPHRQHTSGLPSANGHDPQDRLLAQDSEHNHSDRNWQRNRPWPKDSY

SEQ ID NO: 39563 - protein, 471 aa, Homo sapiens
MEGSADSYTSRPSLDSDVSLEEDRESARREVESQAQQQLERAKHKPVAFAVRTNVSYCGVLDEECPVQGSGVNFEAKDFLHIKEKYSNDWWIGRLVKEGGDIAFIPSPQRLESIRLKQEQKARRSGNPSSLSDIGNRRSPPPSLAKQKQKQAEHVPPYDVVPSMRPVVLVGPSLKGYEVTDMMQKALFDFLKHRFDGRISITRVTADLSLAKRSVLNNPGKRTIIERSSARSSIAEVQSEIERIFELAKSLQLVVLDADTINHPAQLAKTSLAPIIVFVKVSSPKVLQRLIRSRGKSQMKHLTVQMMAYDKLVQCPPESFDVILDENQLEDACEHLAEYLEVYWRATHHPAPGPGLLGPPSAIPGLQNQQLLGERGEEHSPLERDSLMPSDEASESSRQAWTGSSQRSSRHLEEDYADAYQDLYQPHRQHTSGLPSANGHDPQDRLLAQDSEHNHSDRNWQRNRPWPKDSY

SEQ ID NO: 39564 - protein, 443 aa, Homo sapiens
MYDDSYVPGFEDSEAGSADSYTSRPSLDSDVSLEEDRESARREVESQAQQQLERAKKYSNDWWIGRLVKEGGDIAFIPSPQRLESIRLKQEQKARRSGNPSSLSDIGNRRSPPPSLAKQKQKQAEHVPPYDVVPSMRPVVLVGPSLKGYEVTDMMQKALFDFLKHRFDGRISITRVTADLSLAKRSVLNNPGKRTIIERSSARSSIAEVQSEIERIFELAKSLQLVVLDADTINHPAQLAKTSLAPIIVFVKVSSPKVLQRLIRSRGKSQMKHLTVQMMAYDKLVQCPPESFDVILDENQLEDACEHLAEYLEVYWRATHHPAPGPGLLGPPSAIPGLQNQQLLGERGEEHSPLERDSLMPSDEASESSRQAWTGSSQRSSRHLEEDYADAYQDLYQPHRQHTSGLPSANGHDPQDRLLAQDSEHNHSDRNWQRNRPWPKDSY

SEQ ID NO: 39565 - protein, 458 aa, Homo sapiens
MSSSSYAKNGTADGPHSPTSQVARGTTTRRSRLKRSDGSTTSTSFILRQGSADSYTSRPSDSDVSLEEDREAIRQEREQQAAIQLERAKSKPVAFAVKTNVSYCGALDEDVPVPSTAISFDAKDFLHIKEKYNNDWWIGRLVKEGCEIGFIPSPLRLENIRIQQEQKRGRFHGGKSSGNSSSSLGEMVSGTFRATPTSTAKQKQKVTEHIPPYDVVPSMRPVVLVGPSLKGYEVTDMMQKALFDFLKHRFDGRISITRVTADISLAKRSVLNNPSKRAIIERSNTRSSLAEVQSEIERIFELARSLQLVVLDADTINHPAQLIKTSLAPIIVHVKVSSPKVLQRLIKSRGKSQSKHLNVQLVAADKLAQCPPSQRMRHSNHSTENSPIERRSLMTSDENYHNERARKSRNRLSSSSQHSRDHYPLVEEDYPDSYQDTYKPHRNRGSPGGYSHDSRHRL

SEQ ID NO: 39566 - protein, 502 aa, Homo sapiens
MDVVARGTTTRRSRLKRSDGSTTSTSFILRQGSADSYTSRPSDSDVSLEEDREAIRQEREQQAAIQLERAKSKPVAFAVKTNVSYCGALDEDVPVPSTAISFDAKDFLHIKEKYNNDWWIGRLVKEGCEIGFIPSPLRLENIRIQQEQKRGRFHGGKSSGNSSSSLGEMVSGTFRATPTSTAKQKQKVTEHIPPYDVVPSMRPVVLVGPSLKGYEVTDMMQKALFDFLKHRFDGRISITRVTADISLAKRSVLNNPSKRAIIERSNTRSSLAEVQSEIERIFELARSLQLVVLDADTINHPAQLIKTSLAPIIVHVKVSSPKVLQRLIKSRGKSQSKHLNVQLVAADKLAQCPPEMFDVILDENQLEDACEHLGEYLEAYWRATHTTSSTPMTPLLGRNLGSTALSPYPTAISGLQSQRMRHSNHSTENSPIERRSLMTSDENYHNERARKSRNRLSSSSQHSRDHYPLVEEDYPDSYQDTYKPHRNRGSPGGYSHDSRHRL

SEQ ID NO: 39567 - protein, 1145 aa, Homo sapiens
MAVPARTCGASRPGPARTARPWPGCGPHPGPGTRRPTSGPPRPLWLLLPLLPLLAAPGASAYSFPQQHTMQHWARRLEQEVDGVMRIFGGVQQLREIYKDNRNLFEVQENEPQKLVEKVAGDIESLLDRKVQALKRLADAAENFQKAHRWQDNIKEEDIVYYDAKADAELDDPESEDVERGSKASTLRLDFIEDPNFKNKVNYSYAAVQIPTDIYKGSTVILNELNWTEALENVFMENRRQDPTLLWQVFGSATGVTRYYPATPWRAPKKIDLYDVRRRPWYIQGASSPKDMVIIVDVSGSVSGLTLKLMKTSVCEMLDTLSDDDYVNVASFNEKAQPVSCFTHLVQANVRNKKVFKEAVQGMVAKGTTGYKAGFEYAFDQLQNSNITRANCNKMIMMFTDGGEDRVQDVFEKYNWPNRTVRVFTFSVGQHNYDVTPLQWMACANKGYYFEIPSIGAIRINTQEYLDVLGRPMVLAGKEAKQVQWTNVYEDALGLGLVVTGTLPVFNLTQDGPGEKKNQLILGVMGIDVALNDIKRLTPNYTLGANGYVFAIDLNGYVLLHPNLKPQTTNFREPVTLDFLDAELEDENKEEIRRSMIDGNKGHKQIRTLVKSLDERYIDEVTRNYTWVPIRSTNYSLGLVLPPYSTFYLQANLSDQILQVKYFEFLLPSSFESEGHVFIAPREYCKDLNASDNNTEFLKNFIELMEKVTPDSKQCNNFLLHNLILDTGITQQLVERVWRDQDLNTYSLLAVFAATDGGITRVFPNKAAEDWTENPEPFNASFYRRSLDNHGYVFKPPHQDALLRPLELENDTVGILVSTAVELSLGRRTLRPAVVGVKLDLEAWAEKFKVLASNRTHQDQPQKCGPNSHCEMDCEVNNEDLLCVLIDDGGFLVLSNQNHQWDQVGRFFSEVDANLMLALYNNSFYTRKESYDYQAACAPQPPGNLGAAPRGVFVPTVADFLNLAWWTSAAAWSLFQQLLYGLIYHSWFQADPAEAEGSPETRESSCVMKQTQYYFGSVNASYNAIIDCGNCSRLFHAQRLTNTNLLFVVAEKPLCSQCEAGRLLQKETHCPADGPEQCELVQRPRYRRGPHICFDYNATEDTSDCGRGASFPPSLGVLVSLQLLLLLGLPPRPQPQVLVHASRRL

SEQ ID NO: 39568 - protein, 1076 aa, Homo sapiens
MQHWARRLEQEVDGVMRIFGGVQQLREIYKDNRNLFEVQENEPQKLVEKVAGDIESLLDRKVQALKRLADAAENFQKAHRWQDNIKEEDIVYYDAKADAELDDPESEDVERGSKASTLRLDFIEDPNFKNKVNYSYAAVQIPTDIYKGSTVILNELNWTEALENVFMENRRQDPTLLWQVFGSATGVTRYYPATPWRAPKKIDLYDVRRRPWYIQGASSPKDMVIIVDVSGSVSGLTLKLMKTSVCEMLDTLSDDDYVNVASFNEKAQPVSCFTHLVQANVRNKKVFKEAVQGMVAKGTTGYKAGFEYAFDQLQNSNITRANCNKMIMMFTDGGEDRVQDVFEKYNWPNRTVRVFTFSVGQHNYDVTPLQWMACANKGYYFEIPSIGAIRINTQEYLDVLGRPMVLAGKEAKQVQWTNVYEDALGLGLVVTGTLPVFNLTQDGPGEKKNQLILGVMGIDVALNDIKRLTPNYTLGANGYVFAIDLNGYVLLHPNLKPQTTNFREPVTLDFLDAELEDENKEEIRRSMIDGNKGHKQIRTLVKSLDERYIDEVTRNYTWVPIRSTNYSLGLVLPPYSTFYLQANLSDQILQVKYFEFLLPSSFESEGHVFIAPREYCKDLNASDNNTEFLKNFIELMEKVTPDSKQCNNFLLHNLILDTGITQQLVERVWRDQDLNTYSLLAVFAATDGGITRVFPNKAAEDWTENPEPFNASFYRRSLDNHGYVFKPPHQDALLRPLELENDTVGILVSTAVELSLGRRTLRPAVVGVKLDLEAWAEKFKVLASNRTHQDQPQKCGPNSHCEMDCEVNNEDLLCVLIDDGGFLVLSNQNHQWDQVGRFFSEVDANLMLALYNNSFYTRKESYDYQAACAPQPPGNLGAAPRGVFVPTVADFLNLAWWTSAAAWSLFQQLLYGLIYHSWFQADPAEAEGSPETRESSCVMKQTQYYFGSVNASYNAIIDCGNCSRLFHAQRLTNTNLLFVVAEKPLCSQCEAGRLLQKETHCPADGPEQCELVQRPRYRRGPHICFDYNATEDTSDCGRGASFPPSLGVLVSLQLLLLLGLPPRPQPQVLVHASRRL

SEQ ID NO: 39569 - protein, 1146 aa, Homo sapiens
MAVPARTCGASRPGPARTARPWPGCGPHPGPGTRRPTSGPPRPLWLLLPLLPLLAAPGASAYSFPQQHTMQHWARRLEQEVDGVMRIFGGVQQLREIYKDNRNLFEVQENEPQKLVEKVAGDIESLLDRKVQALKRLADAAENFQKAHRWQDNIKEEDIVYYDAKADAELDDPESEDVERGSKASTLRLDFIEDPNFKNKVNYSYAAVQIPTDIYKGSTVILNELNWTEALENVFMENRRQDPTLLWQVFGSATGVTRYYPATPWRAPKKIDLYDVRRRPWYIQGASSPKDMVIIVDVSGSVSGLTLKLMKTSVCEMLDTLSDDDYVNVASFNEKAQPVSCFTHLVQANVRNKKVFKEAVQGMVAKGTTGYKAGFEYAFDQLQNSNITRANCNKMIMMFTDGGEDRVQDVFEKYNWPNRTVRVFTFSVGQHNYDVTPLQWMACANKGYYFEIPSIGAIRINTQEYLDVLGRPMVLAGKEAKQVQWTNVYEDALGLGLVVTGTLPVFNLTQDGPGEKKNQLILGVMGIDVALNDIKRLTPNYTLGANGYVFAIDLNGYVLLHPNLKPQTTNFREPVTLDFLDAELEDENKEEIRRSMIDGNKGHKQIRTLVKSLDERYIDEVTRNYTWVPIRSTNYSLGLVLPPYSTFYLQANLSDQILQVKYFEFLLPSSFESEGHVFIAPREYCKDLNASDNNTEFLKNFIELMEKVTPDSKQCNNFLLHNLILDTGITQQLVERVWRDQDLNTYSLLAVFAATDGGITRVFPNKAAEDWTENPEPFNASFYRRSLDNHGYVFKPPHQDALLRPLELENDTVGILVSTAVELSLGRRTLRPAVVGVKLDLEAWAEKFKVLASNRTHQDQPQKCGPNSHCEMDCEVNNEDLLCVLIDDGGFLVLSNQNHQWDQVGRFFSEVDANLMLALYNNSFYTRKESYDYQAACAPQPPGNLGAAPRGVFVPTVADFLNLAWWTSAAAWSLFQQLLYGLIYHSWFQADPAEAEGSPETRESSCVMKQTQYYFGSVNASYNAIIDCGNCSRLFHAQRLTNTNLLFVVAEKPLCSQCEAGRLLQKETHCCPADGPEQCELVQRPRYRRGPHICFDYNATEDTSDCGRGASFPPSLGVLVSLQLLLLLGLPPRPQPQVLVHASRRL

SEQ ID NO: 39570 - protein, 1143 aa, Homo sapiens
MAVPARTCGASRPGPARTARPWPGCGPHPGPGTRRPTSGPPRPLWLLLPLLPLLAAPGASAYSFPQQHTMQHWARRLEQEVDGVMRIFGGVQQLREIYKDNRNLFEVQENEPQKLVEKVAGDIESLLDRKVQALKRLADAAENFQKAHRWQDNIKEEDIVYYDAKADAELDDPESEDVERGSKASTLRLDFIEDPNFKNKVNYSYAAVQIPTDIYKGSTVILNELNWTEALENVFMENRRQDPTLLWQVFGSATGVTRYYPATPWRAPKKIDLYDVRRRPWYIQGASSPKDMVIIVDVSGSVSGLTLKLMKTSVCEMLDTLSDDDYVNVASFNEKAQPVSCFTHLVQANVRNKKVFKEAVQGMVAKGTTGYKAGFEYAFDQLQNSNITRANCNKMIMMFTDGGEDRVQDVFEKYNWPNRTVRVFTFSVGQHNYDVTPLQWMACANKGYYFEIPSIGAIRINTQEYLDVLGRPMVLAGKEAKQVQWTNVYEDALGLGLVVTGTLPVFNLTQDGPGEKKNQLILGVMGIDVALNDIKRLTPNYTLGANGYVFAIDLNGYVLLHPNLKPQTTNFREPVTLDFLDAELEDENKEEIRRSMIDGNKGHKQIRTLVKSLDERYIDEVTRNYTWVPIRSTNYSLGLVLPPYSTFYLQANLSDQILQVKYFEFLLPSSFESEGHVFIAPREYCKDLNASDNNTEFLKNFIELMEKVTPDSKQCNNFLLHNLILDTGITQQLVERVWRDQDLNTYSLLAVFAATDGGITRVFPNKAAEDWTENPEPFNASFYRRSLDNHGYVFKPPHQDALLRPLELENDTVGILVSTAVELSLGRRTLRPAVVGVKLDLEAWAEKFKVLASNRTHQDQPQKCGPNSHCEMDCEVNNEDLLCVLIDDGGFLVLSNQNHQWDQVGRFFSEVDANLMLALYNNSFYTRKESYDYQAACAPQPPGNLGAAPRGVFVPTVADFLNLAWWTSAAAWSLFQQLLYGLIYHSWFQADPAEAEGSPETRESSCVMKQTQYYFGSVNASYNAIIDCGNCSRLFHAQRLTNTNLLFVVAEKPLCSQCEAGRLLQKETHSDGPEQCELVQRPRYRRGPHICFDYNATEDTSDCGRGASFPPSLGVLVSLQLLLLLGLPPRPQPQVLVHASRRL

SEQ ID NO: 39571 - protein, 1153 aa, Homo sapiens
MAVPARTCGASRPGPARTARPWPGCGPHPGPGTRRPTSGPPRPLWLLLPLLPLLAAPGASAYSFPQQHTMQHWARRLEQEVDGVMRIFGGVQQLREIYKDNRNLFEVQENEPQKLVEKVAGDIESLLDRKVQALKRLADAAENFQKAHRWQDNIKEEDIVYYDAKADAELDDPESEDVERGSKASTLRLDFIEDPNFKNKVNYSYAAVQIPTDIYKGSTVILNELNWTEALENVFMENRRQDPTLLWQVFGSATGVTRYYPATPWRAPKKIDLYDVRRRPWYIQGASSPKDMVIIVDVSGSVSGLTLKLMKTSVCEMLDTLSDDDYVNVASFNEKAQPVSCFTHLVQANVRNKKVFKEAVQGMVAKGTTGYKAGFEYAFDQLQNSNITRANCNKMIMMFTDGGEDRVQDVFEKYNWPNRTVRVFTFSVGQHNYDVTPLQWMACANKGYYFEIPSIGAIRINTQEYLDVLGRPMVLAGKEAKQVQWTNVYEDALGLGLVVTGTLPVFNLTQDGPGEKKNQLILGVMGIDVALNDIKRLTPNYTLGANGYVFAIDLNGYVLLHPNLKPQTTNFREPVTLDFLDAELEDENKEEIRRSMIDGNKGHKQIRTLVKSLDERYIDEVTRNYTWVPIRSTNYSLGLVLPPYSTFYLQANLSDQILQVKLPISKLKDFEFLLPSSFESEGHVFIAPREYCKDLNASDNNTEFLKNFIELMEKVTPDSKQCNNFLLHNLILDTGITQQLVERVWRDQDLNTYSLLAVFAATDGGITRVFPNKAAEDWTENPEPFNASFYRRSLDNHGYVFKPPHQDALLRPLELENDTVGILVSTAVELSLGRRTLRPAVVGVKLDLEAWAEKFKVLASNRTHQDQPQKCGPNSHCEMDCEVNNEDLLCVLIDDGGFLVLSNQNHQWDQVGRFFSEVDANLMLALYNNSFYTRKESYDYQAACAPQPPGNLGAAPRGVFVPTVADFLNLAWWTSAAAWSLFQQLLYGLIYHSWFQADPAEAEGSPETRESSCVMKQTQYYFGSVNASYNAIIDCGNCSRLFHAQRLTNTNLLFVVAEKPLCSQCEAGRLLQKETHCCPADGPEQCELVQRPRYRRGPHICFDYNATEDTSDCGRGASFPPSLGVLVSLQLLLLLGLPPRPQPQVLVHASRRL

SEQ ID NO: 39572 - protein, 1150 aa, Homo sapiens
MAVPARTCGASRPGPARTARPWPGCGPHPGPGTRRPTSGPPRPLWLLLPLLPLLAAPGASAYSFPQQHTMQHWARRLEQEVDGVMRIFGGVQQLREIYKDNRNLFEVQENEPQKLVEKVAGDIESLLDRKVQALKRLADAAENFQKAHRWQDNIKEEDIVYYDAKADAELDDPESEDVERGSKASTLRLDFIEDPNFKNKVNYSYAAVQIPTDIYKGSTVILNELNWTEALENVFMENRRQDPTLLWQVFGSATGVTRYYPATPWRAPKKIDLYDVRRRPWYIQGASSPKDMVIIVDVSGSVSGLTLKLMKTSVCEMLDTLSDDDYVNVASFNEKAQPVSCFTHLVQANVRNKKVFKEAVQGMVAKGTTGYKAGFEYAFDQLQNSNITRANCNKMIMMFTDGGEDRVQDVFEKYNWPNRTVRVFTFSVGQHNYDVTPLQWMACANKGYYFEIPSIGAIRINTQEYLDVLGRPMVLAGKEAKQVQWTNVYEDALGLGLVVTGTLPVFNLTQDGPGEKKNQLILGVMGIDVALNDIKRLTPNYTLGANGYVFAIDLNGYVLLHPNLKPQTTNFREPVTLDFLDAELEDENKEEIRRSMIDGNKGHKQIRTLVKSLDERYIDEVTRNYTWVPIRSTNYSLGLVLPPYSTFYLQANLSDQILQVKLPISKLKDFEFLLPSSFESEGHVFIAPREYCKDLNASDNNTEFLKNFIELMEKVTPDSKQCNNFLLHNLILDTGITQQLVERVWRDQDLNTYSLLAVFAATDGGITRVFPNKAAEDWTENPEPFNASFYRRSLDNHGYVFKPPHQDALLRPLELENDTVGILVSTAVELSLGRRTLRPAVVGVKLDLEAWAEKFKVLASNRTHQDQPQKCGPNSHCEMDCEVNNEDLLCVLIDDGGFLVLSNQNHQWDQVGRFFSEVDANLMLALYNNSFYTRKESYDYQAACAPQPPGNLGAAPRGVFVPTVADFLNLAWWTSAAAWSLFQQLLYGLIYHSWFQADPAEAEGSPETRESSCVMKQTQYYFGSVNASYNAIIDCGNCSRLFHAQRLTNTNLLFVVAEKPLCSQCEAGRLLQKETHSDGPEQCELVQRPRYRRGPHICFDYNATEDTSDCGRGASFPPSLGVLVSLQLLLLLGLPPRPQPQVLVHASRRL

SEQ ID NO: 39573 - protein, 1091 aa, Homo sapiens
MAGPGSPRRASRGASALLAAALLYAALGDVVRSEQQIPLSVVKLWASAFGGEIKSIAAKYSGSQLLQKKYKEYEKDVAIEEIDGLQLVKKLAKNMEEMFHKKSEAVRRLVEAAEEAHLKHEFDADLQYEYFNAVLINERDKDGNFLELGKEFILAPNDHFNNLPVNISLSDVQVPTNMYNKDPAIVNGVYWSESLNKVFVDNFDRDPSLIWQYFGSAKGFFRQYPGIKWEPDENGVIAFDCRNRKWYIQAATSPKDVVILVDVSGSMKGLRLTIAKQTVSSILDTLGDDDFFNIIAYNEELHYVEPCLNGTLVQADRTNKEHFREHLDKLFAKGIGMLDIALNEAFNILSDFNHTGQGSICSQAIMLITDGAVDTYDTIFAKYNWPDRKVRIFTYLIGREAAFADNLKWMACANKGFFTQISTLADVQENVMEYLHVLSRPKVIDQEHDVVWTEAYIDSTLPQAQKLTDDQGPVLMTTVAMPVFSKQNETRSKGILLGVVGTDVPVKELLKTIPKYKLGIHGYAFAITNNGYILTHPELRLLYEEGKKRRKPNYSSVDLSEVEWEDRDDVLRNAMVNRKTGKFSMEVKKTVDKGKRVLVMTNDYYYTDIKGTPFSLGVALSRGHGKYFFRGNVTIEEGLHDLEHPDVSLADEWSYCNTDLHPEHRHLSQLEAIKLYLKGKEPLLQCDKELIQEVLFDAVVSAPIEAYWTSLALNKSENSDKGVEVAFLGTRTGLSRINLFVGAEQLTNQDFLKAGDKENIFNADHFPLWYRRAAEQIPGSFVYSIPFSTGPVNKSNVVTASTSIQLLDERKSPVVAAVGIQMKLEFFQRKFWTASRQCASLDGKCSISCDDETVNCYLIDNNGFILVSEDYTQTGDFFGEIEGAVMNKLLTMGSFKRITLYDYQAMCRANKESSDGAHGLLDPYNAFLSAVKWIMTELVLFLVEFNLCSWWHSDMTAKAQKLKQTLEPCDTEYPAFVSERTIKETTGNIACEDCSKSFVIQQIPSSNLFMVVVDSSCLCESVAPITMAPIEIRYNESLKCERLKAQKIRRRPESCHGFHPEENARECGGAPSLQAQTVLLLLPLLLMLFSR

SEQ ID NO: 39574 - protein, 998 aa, Homo sapiens
MGELRQERSTALQRLVEAAEEAHLKHEFDADLQYEYFNAVLINERDKDGNFLELGKEFILAPNDHFNNLPVNISLSDVQVPTNMYNKDPAIVNGVYWSESLNKVFVDNFDRDPSLIWQYFGSAKGFFRQYPGIKWEPDENGVIAFDCRNRKWYIQAATSPKDVVILVDVSGSMKGLRLTIAKQTVSSILDTLGDDDFFNIIAYNEELHYVEPCLNGTLVQADRTNKEHFREHLDKLFAKGIGMLDIALNEAFNILSDFNHTGQGSICSQAIMLITDGAVDTYDTIFAKYNWPDRKVRIFTYLIGREAAFADNLKWMACANKGFFTQISTLADVQENVMEYLHVLSRPKVIDQEHDVVWTEAYIDSTVSQAEQLTDDQGPVLMTTVAMPVFSKQNETRSKGILLGVVGTDVPVKELLKTIPKYKLGIHGYAFAITNNGYILTHPELRLLYEEGKKRRKPNYSSVDLSEVEWEDRDDVLRNAMVNRKTGKFSMEVKKTVDKGKRVLVMTNDYYYTDIKGTPFSLGVALSRGHGKYFFRGNVTIEEGLHDLEHPDVSLADEWSYCNTDLHPEHRHLSQLEAIKLYLKGKEPLLQCDKELIQEVLFDAVVSAPIEAYWTSLALNKSENSDKGVEVAFLGTRTGLSRINLFVGAEQLTNQDFLKAGDKENIFNADHFPLWYRRAAEQIPGSFVYSIPFSTGPVNKSNVVTASTSIQLLDERKSPVVAAVGIQMKLEFFQRKFWTASRQCASLDGKCSISCDDETVNCYLIDNNGFILVSEDYTQTGDFFGEIEGAVMNKLLTMGSFKRITLYDYQAMCRANKESSDGAHGLLDPYNAFLSAVKWIMTELVLFLVEFNLCSWWHSDMTAKAQKLKQTLEPCDTEYPAFVSERTIKETTGNIACEDCSKSFVIQQIPSSNLFMVVVDSSCLCESVAPITMAPIEISQHNESLKCERLKAQKIRRRPESCHGFHPEENARECGGAPSLQAQTVLLLLPLLLMLFSR

SEQ ID NO: 39575 - protein, 1091 aa, Homo sapiens; identical to SEQ ID NO: 39573

SEQ ID NO: 39576 - protein, 518 aa, Homo sapiens
EILFHQMQNQIKRLVEAAEEAHLKHEFDADLQYEYFNAVLINERDKDGNFLELGKEFILAPNDHFNNLPVNISLSDVQVPTNMYNKDPAIVNGVYWSESLNKVFVDNFDRDPSLIWQYFGSAKGFFRQYPGIKWEPDENGVIAFDCRNRKWYIQAATSPKDVVILVDVSGSMKGLRLTIAKQTVSSILDTLGDDDFFNIIAYNEELHYVEPCLNGTLVQADRTNKEHFREHLDKLFAKGIGMLDIALNEAFNILSDFNHTGQGSICSQAIMLITDGAVDTYDTIFAKYNWPDRKVRIFTYLIGREAAFADNLKWMACANKGFFTQISTLADVQENVMEYLHVLSRPKVIDQEHDVVWTEAYIDSTLTDDQGPVLMTTVAMPVFSKQNETRSKGILLGVVGTDVPVKELLKTIPKYKLGIHGYAFAITNNGYILTHPELRLLYEEGKKRRKPNYSSVDLSEVEWEDRDDVLRNAMVNRKTGKFSMEVKKTVDKGFRCGAFQRSWEIFLPRECNHRRRPA

SEQ ID NO: 39577 - protein, 1091 aa, Homo sapiens; identical to SEQ ID NO: 39573

SEQ ID NO: 39578 - protein, 525 aa, Homo sapiens
MEEMFHKKSEAVRRLVEAAEEAHLKHEFDADLQYEYFNAVLINERDKDGNFLELGKEFILAPNDHFNNLPVNISLSDVQVPTNMYNKDPAIVNGVYWSESLNKVFVDNFDRDPSLIWQYFGSAKGFFRQYPGIKWEPDENGVIAFDCRNRKWYIQAATSPKDVVILVDVSGSMKGLRLTIAKQTVSSILDTLGDDDFFNIIAYNEELHYVEPCLNGTLVQADRTNKEHFREHLDKLFAKGIGMLDIALNEAFNILSDFNHTGQGSICSQAIMLITDGAVDTYDTIFAKYNWPDRKVRIFTYLIGREAAFADNLKWMACANKGFFTQISTLADVQENVMEYLHVLSRPKVIDQEHDVVWTEAYIDSTLPQAQKLTDDQGPVLMTTVAMPVFSKQNETRSKGILLGVVGTDVPVKELLKTIPKYKLGIHGYAFAITNNGYILTHPELRLLYEEGKKRRKPNYSSVDLSEVEWEDRDDVLRNAMVNRKTGKFSMEVKKTVDKGFRCGAFQRSWEIFLPRECNHRRRPA

SEQ ID NO: 39579 - protein, 997 aa, Homo sapiens
MEEMFHKKSEAVRRLVEAAEEAHLKHEFDADLQYEYFNAVLINERDKDGNFLELGKEFILAPNDHFNNLPVNISLSDVQVPTNMYNKDPAIVNGVYWSESLNKVFVDNFDRDPSLIWQYFGSAKGFFRQYPGIKWEPDENGVIAFDCRNRKWYIQAATSPKDVVILVDVSGSMKGLRLTIAKQTVSSILDTLGDDDFFNIIAYNEELHYVEPCLNGTLVQADRTNKEHFREHLDKLFAKGIGMLDIALNEAFNILSDFNHTGQGSICSQAIMLITDGAVDTYDTIFAKYNWPDRKVRIFTYLIGREAAFADNLKWMACANKGFFTQISTLADVQENVMEYLHVLSRPKVIDQEHDVVWTEAYIDSTLPQAQKLTDDQGPVLMTTVAMPVFSKQNETRSKGILLGVVGTDVPVKELLKTIPKYKLGIHGYAFAITNNGYILTHPELRLLYEEGKKRRKPNYSSVDLSEVEWEDRDDVLRNAMVNRKTGKFSMEVKKTVDKGKRVLVMTNDYYYTDIKGTPFSLGVALSRGHGKYFFRGNVTIEEGLHDLEHPDVSLADEWSYCNTDLHPEHRHLSQLEAIKLYLKGKEPLLQCDKELIQEVLFDAVVSAPIEAYWTSLALNKSENSDKGVEVAFLGTRTGLSRINLFVGAEQLTNQDFLKAGDKENIFNADHFPLWYRRAAEQIPGSFVYSIPFSTGPVNKSNVVTASTSIQLLDERKSPVVAAVGIQMKLEFFQRKFWTASRQCASLDGKCSISCDDETVNCYLIDNNGFILVSEDYTQTGDFFGEIEGAVMNKLLTMGSFKRITLYDYQAMCRANKESSDGAHGLLDPYNAFLSAVKWIMTELVLFLVEFNLCSWWHSDMTAKAQKLKQTLEPCDTEYPAFVSERTIKETTGNIACEDCSKSFVIQQIPSSNLFMVVVDSSCLCESVAPITMAPIEIRYNESLKCERLKAQKIRRRPESCHGFHPEENARECGGAPSLQAQTVLLLLPLLLMLFSR

SEQ ID NO: 39580 - protein, 126 aa, Homo sapiens
MEEMFHKKSEAVRRLVEAAEEAHLKHEFDADLQYEYFNAVLINERDKDGNFLELGKEFILAPNDHFNNLPVNISLSDVQVPTNMYNKDPAIVNGVYWSESLNKVFVDNFDRDPSLIWQYFGSAKGF

SEQ ID NO: 39581 - protein, 974 aa, Homo sapiens
MVCGCSALLPLPNPRPTMPATPNFLANPSSSSRWIPLQPMPVAWAFVQKTSALLWLLLLGTSLSPAWGQAKIPLETVKLWADTFGGDLYNTVTKYSGSLLLQKKYKDVESSLKIEEVDGLELVRKFSEDMENMLRRKVEAVQNLVEAAEEADLNHEFNESLVFDYYNSVLINERDEKGNFVELGAEFLLESNAHFSNLPVNTSISSVQLPTNVYNKDPDILNGVYMSEALNAVFVENFQRDPTLTWQYFGSATGFFRIYPGIKWTPDENGVITFDCRNRGWYIQAATSPKDIVILVDVSGSMKGLRMTIAKHTITTILDTLGENDFINIIAYNDYVHYIEPCFKGILVQADRDNREHFKLLVEELMVKGVGVVDQALREAFQILKQFQEAKQGSLCNQAIMLISDGAVEDYEPVFEKYNWPDCKVRVFTYLIGREVSFADRMKWIACNNKGYYTQISTLADTQENVMEYLHVLSRPMVINHDHDIIWTEAYMDSKLLSSQAQSLTLLTTVAMPVFSKKNETRSHGILLGVVGSDVALRELMKLAPRYKLGVHGYAFLNTNNGYILSHPDLRPLYREGKKLKPKPNYNSVDLSEVEWEDQAESLRTAMINRETGTLSMDVKVPMDKGKRVLFLTNDYFFTDISDTPFSLGVVLSRGHGEYILLGNTSVEEGLHDLLHPDLALAGDWIYCITDIDPDHRKLSQLEAMIRFLTRKDPDLECDEELVREVLFDAVVTAPMEAYWTALALNMSEESEHVVDMAFLGTRAGLLRSSLFVGSEKVSDRKFLTPEDEASVFTLDRFPLWYRQASEHPAGSFVFNLRWAEGPESAGEPMVVTASTAVAVTVDKRTAIAAAAGVQMKLEFLQRKFWAATRQCSTVDGPCTQSCEDSDLDCFVIDNNGFILISKRSRETGRFLGEVDGAVLTQLLSMGVFSQVTMYDYQAMCKPSSHHHSAAQPLVSPISAFLTATRWLLQELVL

SEQ ID NO: 39582 - protein, 1137 aa, Homo sapiens
MVCGCSALLPLPNPRPTMPATPNFLANPSSSSRWIPLQPMPVAWAFVQKTSALLWLLLLGTSLSPAWGQAKIPLETVKLWADTFGGDLYNTVTKYSGSLLLQKKYKDVESSLKIEEVDGLELVRKFSEDMENMLRRKVEAVQNLVEAAEEADLNHEFNESLVFDYYNSVLINERDEKGNFVELGAEFLLESNAHFSNLPVNTSISSVQLPTNVYNKDPDILNGVYMSEALNAVFVENFQRDPTLTWQYFGSATGFFRIYPGIKWTPDENGVITFDCRNRGWYIQAATSPKDIVILVDVSGSMKGLRMTIAKHTITTILDTLGENDFINIIAYNDYVHYIEPCFKGILVQADRDNREHFKLLVEELMVKGVGVVDQALREAFQILKQFQEAKQGSLCNQAIMLISDGAVEDYEPVFEKYNWPDCKVRVFTYLIGREVSFADRMKWIACNNKGYYTQISTLADTQENVMEYLHVLSRPMVINHDHDIIWTEAYMDSKLLSSQAQSLTLLTTVAMPVFSKKNETRSHGILLGVVGSDVALRELMKLAPRYKLGVHGYAFLNTNNGYILSHPDLRPLYREGKKLKPKPNYNSVDLSEVEWEDQAESLRTAMINRETGTLSMDVKVPMDKGKRVLFLTNDYFFTDISDTPFSLGVVLSRGHGEYILLGNTSVEEGLHDLLHPDLALAGDWIYCITDIDPDHRKLSQLEAMIRFLTRKDPDLECDEELVREVLFDAVVTAPMEAYWTALALNMSEESEHVVDMAFLGTRAGLLRSSLFVGSEKVSDRKFLTPEDEASVFTLDRFPLWYRQASEHPAGSFVFNLRWAEGPESAGEPMVVTASTAVAVTVDKRTAIAAAAGVQMKLEFLQRKFWAATRQCSTVDGPCTQSCEDSDLDCFVIDNNGFILISKRSRETGRFLGEVDGAVLTQLLSMGVFSQVTMYDYQAMCKPSSHHHSAAQPLVSPISAFLTATRWLLQELVLFLLEWSVWGSWYDRGAEAKSVFHHSHKHKKQDPLQPCDTEYPVFVYQPAIREANGIVECGPCQKVFVVQQIPNSNLLLLVTDPTCDCSIFPPVLQEATEVKYNASVKCDRMRSQKLRRRPDSCHAFHPEENAQDCGGASDTSASPPLLLLPVCAWGLLPQLLR

SEQ ID NO: 39583 - protein, 1073 aa, Homo sapiens
MAVALGTRRRDRVKLWADTFGGDLYNTVTKYSGSLLLQKKYKDVESSLKIEEVDGLELVRKFSEDMENMLRRKVEAVQNLVEAAEEADLNHEFNESLVFDYYNSVLINERDEKGNFVELGAEFLLESNAHFSNLPVNTSISSVQLPTNVYNKDPDILNGVYMSEALNAVFVENFQRDPTLTWQYFGSATGFFRIYPGIKWTPDENGVITFDCRNRGWYIQAATSPKDIVILVDVSGSMKGLRMTIAKHTITTILDTLGENDFINIIAYNDYVHYIEPCFKGILVQADRDNREHFKLLVEELMVKGVGVVDQALREAFQILKQFQEAKQGSLCNQAIMLISDGAVEDYEPVFEKYNWPDCKVRVFTYLIGREVSFADRMKWIACNNKGYYTQISTLADTQENVMEYLHVLSRPMVINHDHDIIWTEAYMDSKLLSSQAQSLTLLTTVAMPVFSKKNETRSHGILLGVVGSDVALRELMKLAPRYKLGVHGYAFLNTNNGYILSHPDLRPLYREGKKLKPKPNYNSVDLSEVEWEDQAESLRTAMINRETGTLSMDVKVPMDKGKRVLFLTNDYFFTDISDTPFSLGVVLSRGHGEYILLGNTSVEEGLHDLLHPDLALAGDWIYCITDIDPDHRKLSQLEAMIRFLTRKDPDLECDEELVREVLFDAVVTAPMEAYWTALALNMSEESEHVVDMAFLGTRAGLLRSSLFVGSEKVSDRKFLTPEDEASVFTLDRFPLWYRQASEHPAGSFVFNLRWAEGPESAGEPMVVTASTAVAVTVDKRTAIAAAAGVQMKLEFLQRKFWAATRQCSTVDGPCTQSCEDSDLDCFVIDNNGFILISKRSRETGRFLGEVDGAVLTQLLSMGVFSQVTMYDYQAMCKPSSHHHSAAQPLVSPISAFLTATRWLLQELVLFLLEWSVWGSWYDRGAEAKSVFHHSHKHKKQDPLQPCDTEYPVFVYQPAIREANGIVECGPCQKVFVVQQIPNSNLLLLVTDPTCDCSIFPPVLQEATEVKYNASVKCDRMRSQKLRRRPDSCHAFHPEENAQDCGGASDTSASPPLLLLPVCAWGLLPQLLR

SEQ ID NO: 39584 - protein, 204 aa, Homo sapiens [sequence omitted]

SEQ ID NO: 39585 - protein, 204 aa, Homo sapiens [sequence omitted]

SEQ ID NO: 39586 - protein, 267 aa, Homo sapiens
MKLEFLQRKFWAATRQDLDCFVIDNNGFILISKRSRETGRFLGEVDGAVLTQLLSMGVFSQVTMYDYQAMCKPSSHHHSAAQPLVSPISAFLTATRWLLQELVLFLLEWSVWGSWYDRGAEAKSVFHHSHKHKKQDPLQPCDTEYPVFVYQPAIREANGIVECGPCQKVFVVQQIPNSNLLLLVTDPTCDCSIFPPVLQEATEVKYNASVKCDRMRSQKLRRRPDSCHAFHPEENAQDCGGASDTSASPPLLLLPVCAWGLLPQLLR

SEQ ID NO: 39587 - protein, 204 aa, Homo sapiens [sequence omitted]

SEQ ID NO: 39588 - protein, 523 aa, Homo sapiens
MVQKTSMSRGPYPPSQEIPMEVFDPSPQGKYSKRKGRFKRSDGSTSSDTTSNSFVRQGSAESYTSRPSDSDVSLEEDREALRKEAERQALAQLEKAKTKPVAFAVRTNVGYNPSPGDEVPVQGVAITFEPKDFLHIKEKYNNDWWIGRLVKEGCEVGFIPSPVKLDSLRLLQEQKLRQNRLGSSKSGDNSSSSLGDVVTGTRRPTPPASGNEMTNLAFELDPLELEEEEAELGEQSGSAKTSVSSVTTPPPHGKRIPFFKKTEHVPPYDVVPSMRPIILVGPSLKGYEVTDMMQKALFDFLKHRFDGRISITRVTADISLAKRSVLNNPSKHIIIERSNTRSSLAEVQSEIERIFELARTLQLVALDADTINHPAQLSKTSLAPIIVYIKITSPKVLQRLIKSRGKSQSKHLNVQIAASEKLAQCPPEMFDIILDENQLEDACEHLAEYLEAYWKATHPPSSTPPNPLLNRTMATAALAASPAPVSNLQVQVLTSLRRNLGFWGGLESSQRGSVVPQEQEHAM

SEQ ID NO: 39589 - protein, 598 aa, Homo sapiens
MVQKTSMSRGPYPPSQEIPMEVFDPSPQGKYSKRKGRFKRSDGSTSSDTTSNSFVRQGSAESYTSRPSDSDVSLEEDREALRKEAERQALAQLEKAKTKPVAFAVRTNVGYNPSPGDEVPVQGVAITFEPKDFLHIKEKYNNDWWIGRLVKEGCEVGFIPSPVKLDSLRLLQEQKLRQNRLGSSKSGDNSSSSLGDVVTGTRRPTPPASAKQKQKSTEHVPPYDVVPSMRPIILVGPSLKGYEVTDMMQKALFDFLKHRFDGRISITRVTADISLAKRSVLNNPSKHIIIERSNTRSSLAEVQSEIERIFELARTLQLVALDADTINHPAQLSKTSLAPIIVYIKITSPKVLQRLIKSRGKSQSKHLNVQIAASEKLAQCPPEMFDIILDENQLEDACEHLAEYLEAYWKATHPPSSTPPNPLLNRTMATAALAASPAPVSNLQGPYLASGDQPLERATGEHASMHEYPGELGQPPGLYPSSHPPGRAGTLRALSRQDTFDADTPGSRNSAYTELGDSCVDMETDPSEGPGLGDPAGGGTPPARQGSWEDEEEDYEEELTDNRNRGRNKARYCAEGGGPVLGRNKNELEGWGRGVYIR

SEQ ID NO: 39590 - protein, 478 aa, Homo sapiens
MVQKTSMSRGPYPPSQEIPMEVFDPSPQGKYSKRKGRFKRSDGSTSSDTTSNSFVRQGSAESYTSRPSDSDVSLEEDREALRKEAERQALAQLEKAKTKPVAFAVRTNVGYNPSPGDEVPVQGVAITFEPKDFLHIKEKYNNDWWIGRLVKEGCEVGFIPSPVKLDSLRLLQEQKLRQNRLGSSKSGDNSSSSLGDVVTGTRRPTPPASAKQKQKSTEHVPPYDVVPSMRPIILVGPSLKGYEVTDMMQKALFDFLKHRFDGRISITRVTADISLAKRSVLNNPSKHIIIERSNTRSSLAEVQSEIERIFELARTLQLVALDADTINHPAQLSKTSLAPIIVYIKITSPKVLQRLIKSRGKSQSKHLNVQIAASEKLAQCPPEMFDIILDENQLEDACEHLAEYLEAYWKATHPPSSTPPNPLLNRTMATAALAASPAPVSNLQVQVLTSLRRNLGFWGGLESSQRGSVVPQEQEHAM

SEQ ID NO: 39591 - protein, 429 aa, Homo sapiens
MEAPSRTVVVGSAESYTSRPSDSDVSLEEDREALRKEAERQALAQLEKAKTKPVAFAVRTNVGYNPSPGDEVPVQGVAITFEPKDFLHIKEKYNNDWWIGRLVKEGCEVGFIPSPVKLDSLRLLQEQKLRQNRLGSSKSGDNSSSSLGDVVTGTRRPTPPASDSPVQTEHVPPYDVVPSMRPIILVGPSLKGYEVTDMMQKALFDFLKHRFDGRISITRVTADISLAKRSVLNNPSKHIIIERSNTRSSLAEVQSEIERIFELARTLQLVALDADTINHPAQLSKTSLAPIIVYIKITSPKVLQRLIKSRGKSQSKHLNVQIAASEKLAQCPPEMFDIILDENQLEDACEHLAEYLEAYWKATHPPSSTPPNPLLNRTMATAALAASPAPVSNLQVQVLTSLRRNLGFWGGLESSQRGSVVPQEQEHAM

SEQ ID NO: 39592 - protein, 548 aa, Homo sapiens
SGSLYFQGSAESYTSRPSDSDVSLEEDREALRKEAERQALAQLEKAKTKPVAFAVRTNVGYNPSPGDEVPVQGVAITFEPKDFLHIKEKYNNDWWIGRLVKEGCEVGFIPSPVKLDSLRLLQEQKLRQNRLGSSKSGDNSSSSLGDVVTGTRRPTPPASGKSHRHATEHVPPYDVVPSMRPIILVGPSLKGYEVTDMMQKALFDFLKHRFDGRISITRVTADISLAKRSVLNNPSKHIIIERSNTRSSLAEVQSEIERIFELARTLQLVALDADTINHPAQLSKTSLAPIIVYIKITSPKVLQRLIKSRGKSQSKHLNVQIAASEKLAQCPPEMFDIILDENQLEDACEHLAEYLEAYWKATHPPSSTPPNPLLNRTMATAALAASPAPVSNLQGPYLASGDQPLERATGEHASMHEYPGELGQPPGLYPSSHPPGRAGTLRALSRQDTFDADTPGSRNSAYTELGDSCVDMETDPSEGPGLGDPAGGGTPPARQGSWEDEEEDYEEELTDNRNRGRNKARYCAEGGGPVLGRNKNELEGWGRGVYIR

SEQ ID NO: 39593 - protein, 632 aa, Homo sapiens
MNQGSGLDLLKISYGKGARRKNRFKGSDGSTSSDTTSNSFVRQGSADSYTSRPSDSDVSLEEDREAVRREAERQAQAQLEKAKTKPVAFAVRTNVSYSAAHEDDVPVPGMAISFEAKDFLHVKEKFNNDWWIGRLVKEGCEIGFIPSPVKLENMRLQHEQRAKQGKFYSSKSGGNSSSSLGDIVPSSRKSTPPSSAIDIDATGLDAEENDIPANHRSPKPSANSVTSPHSKEKRMPFFKKTEHTPPYDVVPSMRPVVLVGPSLKGYEVTDMMQKALFDFLKHRFEGRISITRVTADISLAKRSVLNNPSKHAIIERSNTRSSLAEVQSEIERIFELARTLQLVVLDADTINHPAQLSKTSLAPIIVYVKISSPKVLQRLIKSRGKSQAKHLNVQMVAADKLAQCPPELFDVILDENQLEDACEHLADYLEAYWKATHPPSSSLPNPLLSRTLATSSLPLSPTLASNSQGSQGDQRTDRSAPIRSASQAEEEPSVEPVKKSQHRSSSSAPHHNHRSGTSRGLSRQETFDSETQESRDSAYVEPKEDYSHDHVDHYASHRDHNHRDETHGSSDHRHRESRHRSRDVDREQDHNECNKQRSRHKSKDRYCEKDGEVISKKRNEAGEWNRDVYIRQ

SEQ ID NO: 39594 - protein, 660 aa, Homo sapiens
MVQRDMSKSPPTAAAAVAQEIQMELLENVAPAGALGAAAQSYGKGARRKNRFKGSDGSTSSDTTSNSFVRQGSADSYTSRPSDSDVSLEEDREAVRREAERQAQAQLEKAKTKPVAFAVRTNVSYSAAHEDDVPVPGMAISFEAKDFLHVKEKFNNDWWIGRLVKEGCEIGFIPSPVKLENMRLQHEQRAKQGKFYSSKSGGNSSSSLGDIVPSSRKSTPPSSAIDIDATGLDAEENDIPANHRSPKPSANSVTSPHSKEKRMPFFKKTEHTPPYDVVPSMRPVVLVGPSLKGYEVTDMMQKALFDFLKHRFEGRISITRVTADISLAKRSVLNNPSKHAIIERSNTRSSLAEVQSEIERIFELARTLQLVVLDADTINHPAQLSKTSLAPIIVYVKISSPKVLQRLIKSRGKSQAKHLNVQMVAADKLAQCPPELFDVILDENQLEDACEHLADYLEAYWKATHPPSSSLPNPLLSRTLATSSLPLSPTLASNSQGSQGDQRTDRSAPIRSASQAEEEPSVEPVKKSQHRSSSSAPHHNHRSGTSRGLSRQETFDSETQESRDSAYVEPKEDYSHDHVDHYASHRDHNHRDETHGSSDHRHRESRHRSRDVDREQDHNECNKQRSRHKSKDRYCEKDGEVISKKRNEAGEWNRDVYIRQ

SEQ ID NO: 39595 - protein, 636 aa, Homo sapiens
MVQRDMSKSPPTAAAAVAQEIQMELLENVAPAGALGAAAQSYGKGARRKNRFKGSDGSTSSDTTSNSFVRQGSADSYTSRPSDSDVSLEEDREAVRREAERQAQAQLEKAKTKPVAFAVRTNVSYSAAHEDDVPVPGMAISFEAKDFLHVKEKFNNDWWIGRLVKEGCEIGFIPSPVKLENMRLQHEQRAKQGKFYSSKSGGNSSSSLGDIVPSSRKSTPPSSGAKSADEQDQWKTAGLFWRFTTEHTPPYDVVPSMRPVVLVGPSLKGYEVTDMMQKALFDFLKHRFEGRISITRVTADISLAKRSVLNNPSKHAIIERSNTRSSLAEVQSEIERIFELARTLQLVVLDADTINHPAQLSKTSLAPIIVYVKISSPKVLQRLIKSRGKSQAKHLNVQMVAADKLAQCPPELFDVILDENQLEDACEHLADYLEAYWKATHPPSSSLPNPLLSRTLATSSLPLSPTLASNSQGSQGDQRTDRSAPIRSASQAEEEPSVEPVKKSQHRSSSSAPHHNHRSGTSRGLSRQETFDSETQESRDSAYVEPKEDYSHDHVDHYASHRDHNHRDETHGSSDHRHRESRHRSRDVDREQDHNECNKQRSRHKSKDRYCEKDGEVISKKRNEAGEWNRDVYIRQ

SEQ ID NO: 39596 - protein, 612 aa, Homo sapiens
MKATWIRLLKRAKGGRLKNSDICGSADSYTSRPSDSDVSLEEDREAVRREAERQAQAQLEKAKTKPVAFAVRTNVSYSAAHEDDVPVPGMAISFEAKDFLHVKEKFNNDWWIGRLVKEGCEIGFIPSPVKLENMRLQHEQRAKQGKFYSSKSGGNSSSSLGDIVPSSRKSTPPSSAIDIDATGLDAEENDIPANHRSPKPSANSVTSPHSKEKRMPFFKKTEHTPPYDVVPSMRPVVLVGPSLKGYEVTDMMQKALFDFLKHRFEGRISITRVTADISLAKRSVLNNPSKHAIIERSNTRSSLAEVQSEIERIFELARTLQLVVLDADTINHPAQLSKTSLAPIIVYVKISSPKVLQRLIKSRGKSQAKHLNVQMVAADKLAQCPPELFDVILDENQLEDACEHLADYLEAYWKATHPPSSSLPNPLLSRTLATSSLPLSPTLASNSQGSQGDQRTDRSAPIRSASQAEEEPSVEPVKKSQHRSSSSAPHHNHRSGTSRGLSRQETFDSETQESRDSAYVEPKEDYSHDHVDHYASHRDHNHRDETHGSSDHRHRESRHRSRDVDREQDHNECNKQRSRHKSKDRYCEKDGEVISKKRNEAGEWNRDVYIRQ

SEQ ID NO: 39597 - protein, 567 aa, Homo sapiens
MQCCGLVHRRRVRVSYGSADSYTSRPSDSDVSLEEDREAVRREAERQAQAQLEKAKTKPVAFAVRTNVSYSAAHEDDVPVPGMAISFEAKDFLHVKEKFNNDWWIGRLVKEGCEIGFIPSPVKLENMRLQHEQRAKQGKFYSSKSGGNSSSSLGDIVPSSRKSTPPSSAKQKQKSTEHTPPYDVVPSMRPVVLVGPSLKGYEVTDMMQKALFDFLKHRFEGRISITRVTADISLAKRSVLNNPSKHAIIERSNTRSSLAEVQSEIERIFELARTLQLVVLDADTINHPAQLSKTSLAPIIVYVKISSPKVLQRLIKSRGKSQAKHLNVQMVAADKLAQCPPELFDVILDENQLEDACEHLADYLEAYWKATHPPSSSLPNPLLSRTLATSSLPLSPTLASNSQGSQGDQRTDRSAPIRSASQAEEEPSVEPVKKSQHRSSSSAPHHNHRSGTSRGLSRQETFDSETQESRDSAYVEPKEDYSHDHVDHYASHRDHNHRDETHGSSDHRHRESRHRSRDVDREQDHNECNKQRSRHKSKDRYCEKDGEVISKKRNEAGEWNRDVYIRQ

SEQ ID NO: 39598 - protein, 606 aa, Homo sapiens
MLDRRLIAPQTKYIIPGGSADSYTSRPSDSDVSLEEDREAVRREAERQAQAQLEKAKTKPVAFAVRTNVSYSAAHEDDVPVPGMAISFEAKDFLHVKEKFNNDWWIGRLVKEGCEIGFIPSPVKLENMRLQHEQRAKQGKFYSSKSGGNSSSSLGDIVPSSRKSTPPSSAIDIDATGLDAEENDIPANHRSPKPSANSVTSPHSKEKRMPFFKKTEHTPPYDVVPSMRPVVLVGPSLKGYEVTDMMQKALFDFLKHRFEGRISITRVTADISLAKRSVLNNPSKHAIIERSNTRSSLAEVQSEIERIFELARTLQLVVLDADTINHPAQLSKTSLAPIIVYVKISSPKVLQRLIKSRGKSQAKHLNVQMVAADKLAQCPPELFDVILDENQLEDACEHLADYLEAYWKATHPPSSSLPNPLLSRTLATSSLPLSPTLASNSQGSQGDQRTDRSAPIRSASQAEEEPSVEPVKKSQHRSSSSAPHHNHRSGTSRGLSRQETFDSETQESRDSAYVEPKEDYSHDHVDHYASHRDHNHRDETHGSSDHRHRESRHRSRDVDREQDHNECNKQRSRHKSKDRYCEKDGEVISKKRNEAGEWNRDVYIRQ

SEQ ID NO: 39599 - protein, 608 aa, Homo sapiens
MNQGSGLDLLKISYGKGARRKNRFKGSDGSTSSDTTSNSFVRQGSADSYTSRPSDSDVSLEEDREAVRREAERQAQAQLEKAKTKPVAFAVRTNVSYSAAHEDDVPVPGMAISFEAKDFLHVKEKFNNDWWIGRLVKEGCEIGFIPSPVKLENMRLQHEQRAKQGKFYSSKSGGNSSSSLGDIVPSSRKSTPPSSGAKSADEQDQWKTAGLFWRFTTEHTPPYDVVPSMRPVVLVGPSLKGYEVTDMMQKALFDFLKHRFEGRISITRVTADISLAKRSVLNNPSKHAIIERSNTRSSLAEVQSEIERIFELARTLQLVVLDADTINHPAQLSKTSLAPIIVYVKISSPKVLQRLIKSRGKSQAKHLNVQMVAADKLAQCPPELFDVILDENQLEDACEHLADYLEAYWKATHPPSSSLPNPLLSRTLATSSLPLSPTLASNSQGSQGDQRTDRSAPIRSASQAEEEPSVEPVKKSQHRSSSSAPHHNHRSGTSRGLSRQETFDSETQESRDSAYVEPKEDYSHDHVDHYASHRDHNHRDETHGSSDHRHRESRHRSRDVDREQDHNECNKQRSRHKSKDRYCEKDGEVISKKRNEAGEWNRDVYIRQ

SEQ ID NO: 39600 - protein, 605 aa, Homo sapiens
MQCCGLVHRRRVRVSYGSADSYTSRPSDSDVSLEEDREAVRREAERQAQAQLEKAKTKPVAFAVRTNVSYSAAHEDDVPVPGMAISFEAKDFLHVKEKFNNDWWIGRLVKEGCEIGFIPSPVKLENMRLQHEQRAKQGKFYSSKSGGNSSSSLGDIVPSSRKSTPPSSAIDIDATGLDAEENDIPANHRSPKPSANSVTSPHSKEKRMPFFKKTEHTPPYDVVPSMRPVVLVGPSLKGYEVTDMMQKALFDFLKHRFEGRISITRVTADISLAKRSVLNNPSKHAIIERSNTRSSLAEVQSEIERIFELARTLQLVVLDADTINHPAQLSKTSLAPIIVYVKISSPKVLQRLIKSRGKSQAKHLNVQMVAADKLAQCPPELFDVILDENQLEDACEHLADYLEAYWKATHPPSSSLPNPLLSRTLATSSLPLSPTLASNSQGSQGDQRTDRSAPIRSASQAEEEPSVEPVKKSQHRSSSSAPHHNHRSGTSRGLSRQETFDSETQESRDSAYVEPKEDYSHDHVDHYASHRDHNHRDETHGSSDHRHRESRHRSRDVDREQDHNECNKQRSRHKSKDRYCEKDGEVISKKRNEAGEWNRDVYIRQ

SEQ ID NO: 39601 - protein, 484 aa, Homo sapiens
MYDDSYVPGFEDSEAGSADSYTSRPSLDSDVSLEEDRESARREVESQAQQQLERAKHKPVAFAVRTNVSYCGVLDEECPVQGSGVNFEAKDFLHIKEKYSNDWWIGRLVKEGGDIAFIPSPQRLESIRLKQEQKARRSGNPSSLSDIGNRRSPPPSLAKQKQKQAEHVPPYDVVPSMRPVVLVGPSLKGYEVTDMMQKALFDFLKHRFDGRISITRVTADLSLAKRSVLNNPGKRTIIERSSARSSIAEVQSEIERIFELAKSLQLVVLDADTINHPAQLAKTSLAPIIVFVKVSSPKVLQRLIRSRGKSQMKHLTVQMMAYDKLVQCPPESFDVILDENQLEDACEHLAEYLEVYWRATHHPAPGPGLLGPPSAIPGLQNQQLLGERGEEHSPLERDSLMPSDEASESSRQAWTGSSQRSSRHLEEDYADAYQDLYQPHRQHTSGLPSANGHDPQDRLLAQDSEHNHSDRNWQRNRPWPKDSY

SEQ ID NO: 39602 - protein, 521 aa, Homo sapiens
MSSSSYAKNGTADGPHSPTSQVARGTTTRRSRLKRSDGSTTSTSFILRQGSADSYTSRPSDSDVSLEEDREAIRQEREQQAAIQLERAKSKPVAFAVKTNVSYCGALDEDVPVPSTAISFDAKDFLHIKEKYNNDWWIGRLVKEGCEIGFIPSPLRLENIRIQQEQKRGRFHGGKSSGNSSSSLGEMVSGTFRATPTSTVKMVLKIHTEHIPPYDVVPSMRPVVLVGPSLKGYEVTDMMQKALFDFLKHRFDGRISITRVTADISLAKRSVLNNPSKRAIIERSNTRSSLAEVQSEIERIFELARSLQLVVLDADTINHPAQLIKTSLAPIIVHVKVSSPKVLQRLIKSRGKSQSKHLNVQLVAADKLAQCPPEMFDVILDENQLEDACEHLGEYLEAYWRATHTTSSTPMTPLLGRNLGSTALSPYPTAISGLQSQRMRHSNHSTENSPIERRSLMTSDENYHNERARKSRNRLSSSSQHSRDHYPLVEEDYPDSYQDTYKPHRNRGSPGGYSHDSRHRL

SEQ ID NO: 39603 - protein, 487 aa, Homo sapiens
MYDNLYLHGIEDSEAGSADSYTSRPSDSDVSLEEDREAIRQEREQQAAIQLERAKSKPVAFAVKTNVSYCGALDEDVPVPSTAISFDAKDFLHIKEKYNNDWWIGRLVKEGCEIGFIPSPLRLENIRIQQEQKRGRFHGGKSSGNSSSSLGEMVSGTFRATPTSTVKMVLKIHTEHIPPYDVVPSMRPVVLVGPSLKGYEVTDMMQKALFDFLKHRFDGRISITRVTADISLAKRSVLNNPSKRAIIERSNTRSSLAEVQSEIERIFELARSLQLVVLDADTINHPAQLIKTSLAPIIVHVKVSSPKVLQRLIKSRGKSQSKHLNVQLVAADKLAQCPPEMFDVILDENQLEDACEHLGEYLEAYWRATHTTSSTPMTPLLGRNLGSTALSPYPTAISGLQSQRMRHSNHSTENSPIERRSLMTSDENYHNERARKSRNRLSSSSQHSRDHYPLVEEDYPDSYQDTYKPHRNRGSPGGYSHDSRHRL

SEQ ID NO: 39604 - protein, 486 aa, Homo sapiens
MYDNLYLHGIEDSEAGSADSYTSRPSDSDVSLEEDREAIRQEREQQAAIQLERAKSKPVAFAVKTNVSYCGALDEDVPVPSTAISFDAKDFLHIKEKYNNDWWIGRLVKEGCEIGFIPSPLRLENIRIQQEQKRGRFHGGKSSGNSSSSLGEMVSGTFRATPTSTAKQKQKVTEHIPPYDVVPSMRPVVLVGPSLKGYEVTDMMQKALFDFLKHRFDGRISITRVTADISLAKRSVLNNPSKRAIIERSNTRSSLAEVQSEIERIFELARSLQLVVLDADTINHPAQLIKTSLAPIIVHVKVSSPKVLQRLIKSRGKSQSKHLNVQLVAADKLAQCPPEMFDVILDENQLEDACEHLGEYLEAYWRATHTTSSTPMTPLLGRNLGSTALSPYPTAISGLQSQRMRHSNHSTENSPIERRSLMTSDENYHNERARKSRNRLSSSSQHSRDHYPLVEEDYPDSYQDTYKPHRNRGSPGGYSHDSRHRL

SEQ ID NO: 39605 - protein, 520 aa, Homo sapiens
MSSSSYAKNGTADGPHSPTSQVARGTTTRRSRLKRSDGSTTSTSFILRQGSADSYTSRPSDSDVSLEEDREAIRQEREQQAAIQLERAKSKPVAFAVKTNVSYCGALDEDVPVPSTAISFDAKDFLHIKEKYNNDWWIGRLVKEGCEIGFIPSPLRLENIRIQQEQKRGRFHGGKSSGNSSSSLGEMVSGTFRATPTSTAKQKQKVTEHIPPYDVVPSMRPVVLVGPSLKGYEVTDMMQKALFDFLKHRFDGRISITRVTADISLAKRSVLNNPSKRAIIERSNTRSSLAEVQSEIERIFELARSLQLVVLDADTINHPAQLIKTSLAPIIVHVKVSSPKVLQRLIKSRGKSQSKHLNVQLVAADKLAQCPPEMFDVILDENQLEDACEHLGEYLEAYWRATHTTSSTPMTPLLGRNLGSTALSPYPTAISGLQSQRMRHSNHSTENSPIERRSLMTSDENYHNERARKSRNRLSSSSQHSRDHYPLVEEDYPDSYQDTYKPHRNRGSPGGYSHDSRHRL

SEQ ID NO: 39606 - protein, 415 aa, Homo sapiens
FYFLCQGSADSYTSRPSDSDVSLEEDREAIRQEREQQAAIQLERAKSKPVAFAVKTNVSYCGALDEDVPVPSTAISFDAKDFLHIKEKYNNDWWIGRLVKEGCEIGFIPSPLRLENIRIQQEQKRGRFHGGKSSGNSSSSLGEMVSGTFRATPTSTAKQKQKVTEHIPPYDVVPSMRPVVLVGPSLKGYEVTDMMQKALFDFLKHRFDGRISITRVTADISLAKRSVLNNPSKRAIIERSNTRSSLAEVQSEIERIFELARSLQLVVLDADTINHPAQLIKTSLAPIIVHVKVSSPKVLQRLIKSRGKSQSKHLNVQLVAADKLAQCPPSQRMRHSNHSTENSPIERRSLMTSDENYHNERARKSRNRLSSSSQHSRDHYPLVEEDYPDSYQDTYKPHRNRGSPGGYSHDSRHRL

SEQ ID NO: 39607 - protein, 222 aa, Homo sapiens
MSQTKMLKVRVTLFCILAGIVLAMTAVVTDHWAVLSPHMEHHNTTCEAAHFGLWRICTKRIPMDDSKTCGPITLPGEKNCSYFRHFNPGESSEIFEFTTQKEYSISAAAIAIFSLGFIILGSLCVLLSLGKKRDYLLRPASMFYAFAGLCILVSVEVMRQSVKRMIDSEDTVWIEYYYSWSFACACAAFILLFLGGLALLLFSLPRMPRNPWESCMDAEPEH

SEQ ID NO: 39608 - protein, 323 aa, Homo sapiens
MGLFDRGVQMLLTTVGAFAAFSLMTIAVGTDYWLYSRGVCKTKSVSENETSKKNEEVMTHSGLWRTCCLEGNFKGLCKQIDHFPEDADYEADTAEYFLRAVRASSIFPILSVILLFMGGLCIAASEFYKTRHNIILSAGIFFVSAGLSNIIGIIVYISANAGDPSKSDSKKNSYSYGWSFYFGALSFIIAEMVGVLAVHMFIDRHKQLRATARATDYLQASAITRIPSYRYRYQRRSRSSSRSTEPSHSRDASPVGIKGFNTLPSTEISMYTLSRDPLKAATTPTATYNSDRDNSFLQVHNCIQKENKDSLHSNTANRRTTPV

SEQ ID NO: 39609 - protein, 315 aa, Homo sapiens
MRMCDRGIQMLITTVGAFAAFSLMTIAVGTDYWLYSRGVCRTKSTSDNETSRKNEEVMTHSGLWRTCCLEGAFRGVCKKIDHFPEDADYEQDTAEYLLRAVRASSVFPILSVTLLFFGGLCVAASEFHRSRHNVILSAGIFFVSAGLSNIIGIIVYISANAGDPGQRDSKKSYSYGWSFYFGAFSFIIAEIVGVVAVHIYIEKHQQLRAKSHSEFLKKSTFARLPPYRYRFRRRSSSRSTEPRSRDLSPISKGFHTIPSTDISMFTLSRDPSKITMGTLLNSDRDHAFLQFHNSTPKEFKESLHNNPANRRTTPV

SEQ ID NO: 39610 - protein, 296 aa, Homo sapiens
MSACGRKALTLLSSVFAVCGLGLLGIAVSTDYWLYLEEGVIVPQNQSTEIKMSLHSGLWRVCFLAGEERGRCFTIEYVMPMNTQLTSESTVNVLKMIRSATPFPLVSLFFMFIGFILNNIGHIRPHRTILAFVSGIFFILSGLSLVVGLVLYISSINDEMLNRTKDAETYFNYKYGWSFAFAAISFLLTEVKPVTLSMDRLGLGTAPLSRGEWGWGRRDIPQPFWTPDHPLYFPSSSQNVSLSYLSGSPPARMSPGPCSCPHVHFPPHSSCVLCRPQPREMRQAPAASPSSAVFSL

SEQ ID NO: 39611 - protein, 275 aa, Homo sapiens
MSACGRKALTLLSSVFAVCGLGLLGIAVSTDYWLYLEEGVIVPQNQSTEIKMSLHSGLWRVCFLAGEERGRCFTIEYVMPMNTQLTSESTVNVLKMIRSATPFPLVSLFFMFIGFILNNIGHIRPHRTILAFVSGIFFILSGLSLVVGLVLYISSINDEMLNRTKDAETYFNYKYGWSFAFAAISFLLTESAGVMSVYLFMKRYTAEDMYRPHPGFYRPRLSNCSDYSGQFLHPDAWVRGRSPSDISSEASLQMNSNYPALLKCPDYDQMSSSPC

SEQ ID NO: 39612 - protein, 275 aa, Homo sapiens; identical to SEQ ID NO: 39611

SEQ ID NO: 39613 - protein, 260 aa, Homo sapiens
MMWSNFFLQEENRRRGAAGRRRAHGQGRSGLTPEREGKVKLALLLAAVGATLAVLSVGTEFWVELNTYKANGSAVCEAAHLGLWKACTKRLWQADVPVDRDTCGPAELPGEANCTYFKFFTTGENARIFQRTTKKEVNLAAAVIAVLGLAVMALGCLCIIMVLSKGAEFLLRVGAVCFGLSGLLLLVSLEVFRHSVRALLQRVSPEPPPAPRLTYEYSWSLGCGVGAGLILLLGAGCFLLLTLPSWPWGSLCPKRGHRAT

SEQ ID NO: 39614 - protein, 214 aa, Homo sapiens
MMWSNFFLQEENRRRGAAGRRRAHGQGRSGLTPEREGKVKLALLLAAVGATLAVLSVGTEFWVELNTYKANGSAVCEAAHLGLWKACTKRLWQADVPVDRDTCGPAELPGEANCTYFKFFTTGENARIFQRTTKKGLLLLVSLEVFRHSVRALLQRVSPEPPPAPRLTYEYSWSLGCGVGAGLILLLGAGCFLLLTLPSWPWGSLCPKRGHRAT

SEQ ID NO: 39615 - protein, 189 aa, Homo sapiens
MMWSNFFLQEENRRRGAAGRRRAHGQGRSGLTPEREGKVKLALLLAAVGATLAVLSVGTEFWVELNTYKANGSAVCEAAHLGLWKACTKRLWQADVPVDRDTCGPAELPGGLLLLVSLEVFRHSVRALLQRVSPEPPPAPRLTYEYSWSLGCGVGAGLILLLGAGCFLLLTLPSWPWGSLCPKRGHRAT

SEQ ID NO: 39616 - protein, 275 aa, Homo sapiens
MSHCSSRALTLLSSVFGACGLLLVGIAVSTDYWLYMEEGTVLPQNQTTEVKMALHAGLWRVCFFAGREKGRCVASEYFLEPEINLVTENTENILKTVRTATPFPMVSLFLVFTAFVISNIGHIRPQRTILAFVSGIFFILSGLSLVVGLVLYISSINDEVMNRPSSSEQYFHYRYGWSFAFAASSFLLKEGAGVMSVYLFTKRYAEEEMYRPHPAFYRPRLSDCSDYSGQFLQPEAWRRGRSPSDISSDVSIQMTQNYPPAIKYPDHLHISTSPC

SEQ ID NO: 39617 - protein, 275 aa, Homo sapiens; identical to SEQ ID NO: 39616

SEQ ID NO: 39618 - protein, 425 aa, Homo sapiens
LESLKRWNEERGLWCEKGVQVLLTTVGAFAAFGLMTIAISTDYWLYTRALICNTTNLTAGGDDGTPHRGGGGASEKKDPGGLTHSGLWRICCLEGLKRGVCVKINHFPEDTDYDHDSAEYLLRVVRASSIFPILSAILLLLGGVCVAASRVYKSKRNIILGAGILFVAAGLSNIIGVIVYISANAGEPGPKRDEEKKNHYSYGWSFYFGGLSFILAEVIGVLAVNIYIERSREAHCQSRSDLLKAGGGAGGSGGSGPSAILRLPSYRFRYRRRSRSSSRSSEPSPSRDASPGGPGGPGFASTDISMYTLSRDPSKGSVAAGLAGAGGGGGGAVGAFGGAAGGAGGGGGGGGGAGAERDRGGASGFLTLHNAFPKEAGGGVTVTVTGPPAPPAPAPPAPSAPAPGTLAKEAAASNTNTLNRKTTPV

SEQ ID NO: 39619 - protein, 2179 aa, Homo sapiens
MVNENTRMYIPEENHQGSNYGSPRPAHANMNANAAAGLAPEHIPTPGAALSWQAAIDAARQAKLMGSAGNATISTVSSTQRKRQQYGKPKKQGSTTATRPPRALLCLTLKNPIRRACISIVEWKPFEIIILLTIFANCVALAIYIPFPEDDSNATNSNLERVEYLFLIIFTVEAFLKVIAYGLLFHPNAYLRNGWNLLDFIIVVVGLFSAILEQATKADGANALGGKGAGFDVKALRAFRVLRPLRLVSGVPSLQVVLNSIIKAMVPLLHIALLVLFVIIIYAIIGLELFMGKMHKTCYNQEGIADVPAEDDPSPCALETGHGRQCQNGTVCKPGWDGPKHGITNFDNFAFAMLTVFQCITMEGWTDVLYWVNDAVGRDWPWIYFVTLIIIGSFFVLNLVLGVLSGEFSKEREKAKARGDFQKLREKQQLEEDLKGYLDWITQAEDIDPENEDEGMDEEKPRNMSMPTSETESVNTENVAGGDIEGENCGARLAHRISKSKFSRYWRRWNRFCRRKCRAAVKSNVFYWLVIFLVFLNTLTIASEHYNQPNWLTEVQDTANKALLALFTAEMLLKMYSLGLQAYFVSLFNRFDCFVVCGGILETILVETKIMSPLGISVLRCVRLLRIFKITRYWNSLSNLVASLLNSVRSIASLLLLLFLFIIIFSLLGMQLFGGKFNFDEMQTRRSTFDNFPQSLLTVFQILTGEDWNSVMYDGIMAYGGPSFPGMLVCIYFIILFICGNYILLNVFLAIAVDNLADAESLTSAQKEEEEEKERKKLARTASPEKKQELVEKPAVGESKEEKIELKSITADGESPPATKINMDDLQPNENEDKSPYPNPETTGEEDEEEPEMPVGPRPRPLSELHLKEKAVPMPEASAFFIFSSNNRFRLQCHRIVNDTIFTNLILFFILLSSISLAAEDPVQHTSFRNHILFYFDIVFTTIFTIEIALKMTAYGAFLHKGSFCRNYFNILDLLVVSVSLISFGIQSSAINVVKILRVLRVLRPLRAINRAKGLKHVVQCVFVAIRTIGNIVIVTTLLQFMFACIGVQLFKGKLYTCSDSSKQTEAECKGNYITYKDGEVDHPIIQPRSWENSKFDFDNVLAAMMALFTVSTFEGWPELLYRSIDSHTEDKGPIYNYRVEISIFFIIYIIIIAFFMMNIFVGFVIVTFQEQGEQEYKNCELDKNQRQCVEYALKARPLRRYIPKNQHQYKVWYVVNSTYFEYLMFVLILLNTICLAMQHYGQSCLFKIAMNILNMLFTGLFTVEMILKLIAFKPKHYFCDAWNTFDALIVVGSIVDIAITEVNPAEHTQCSPSMGPSCSHPPLAVLTAPPVADGFQNAEENSRISITFFRLFRVMRLVKLLSRGEGIRTLLWTFIKSFQALPYVALLIVMLFFIYAVIGMQVFGKIALNDTTEINRNNNFQTFPQAVLLLFRCATGEAWQDIMLACMPGKKCAPESEPSNSTEGETPCGSSFAVFYFISFYMLCAFLIINLFVAVIMDNFDYLTRDWSILGPHHLDEFKRIWAEYDPEAKGRIKHLDVVTLLRRIQPPLGFGKLCPHRVACKRLVSMNMPLNSDGTVMFNATLFALVRTALRIKTEEGPSPSEAHQGAEDPFRPAGNLEQANEELRAIIKKIWKRTSMKLLDQVVPPAGDDEVTVGKFYATFLIQEYFRKFKKRKEQGLVGKPSQRNALSLQAGLRTLHDIGPEIRRAISGDLTAEEELDKAMKEAVSAASEDDIFRRAGGLFGNHVSYYQSDGRSAFPQTFTTQRPLHINKAGSSQGDTESPSHEKLVDSTFTPSSYSSTGSNANINNANNTALGRLPRPAGYPSTVSTVEGHGPPLSPAIRVQEVAWKLSSNRCHSRESQAAMAGQEETSQDETYEVKMNHDTEACSEPSLLSTEMLSYQDDENRQLTLPEEDKRDIRQSPKRGFLRSASLGRRASFHLECLKRQKDRGGDISQKTVLPLHLVHHQALAVAGLSPLLQRSHSPASFPRPFATPPATPGSRGWPPQPVPTLRLEGVESSEKLNSSFPSIHCGSWAETTPGGGGSSAARRVRPVSLMVPSQAGAPGRQFHGSASSLVEAVLISEGLGQFAQDPKFIEVTTQELADACDMTIEEMESAADNILSGGAPQSPNGALLPFVNCRDAGQDRAGGEEDAGCVRARGRPSEEELQDSRVYVSSL

SEQ ID NO: 39620 - protein, 2186 aa, Homo sapiens
MVNENTRMYIPEENHQGSNYGSPRPAHANMNANAAAGLAPEHIPTPGAALSWQAAIDAARQAKLMGSAGNATISTVSSTQRKRQQYGKPKKQGSTTATRPPRALLCLTLKNPIRRACISIVEWKPFEIIILLTIFANCVALAIYIPFPEDDSNATNSNLERVEYLFLIIFTVEAFLKVIAYGLLFHPNAYLRNGWNLLDFIIVVVGLFSAILEQATKADGANALGGKGAGFDVKALRAFRVLRPLRLVSGVPSLQVVLNSIIKAMVPLLHIALLVLFVIIIYAIIGLELFMGKMHKTCYNQEGIADVPAEDDPSPCALETGHGRQCQNGTVCKPGWDGPKHGITNFDNFAFAMLTVFQCITMEGWTDVLYWVNDAVGRDWPWIYFVTLIIIGSFFVLNLVLGVLSGEFSKEREKAKARGDFQKLREKQQLEEDLKGYLDWITQAEDIDPENEDEGMDEEKPRNMSMPTSETESVNTENVAGGDIEGENCGARLAHRISKSKFSRYWRRWNRFCRRKCRAAVKSNVFYWLVIFLVFLNTLTIASEHYNQPNWLTEVQDTANKALLALFTAEMLLKMYSLGLQAYFVSLFNRFDCFVVCGGILETILVETKIMSPLGISVLRCVRLLRIFKITRYWNSLSNLVASLLNSVRSIASLLLLLFLFIIIFSLLGMQLFGGKFNFDEMQTRRSTFDNFPQSLLTVFQILTGEDWNSVMYDGIMAYGGPSFPGMLVCIYFIILFICGNYILLNVFLAIAVDNLADAESLTSAQKEEEEEKERKKLARTASPEKKQELVEKPAVGESKEEKIELKSITADGESPPATKINMDDLQPNENEDKSPYPNPETTGEEDEEEPEMPVGPRPRPLSELHLKEKAVPMPEASAFFIFSSNNRFRLQCHRIVNDTIFTNLILFFILLSSISLAAEDPVQHTSFRNHILFYFDIVFTTIFTIEIALKILGNADYVFTSIFTLEIILKMTAYGAFLHKGSFCRNYFNILDLLVVSVSLISFGIQSSAINVVKILRVLRVLRPLRAINRAKGLKHVVQCVFVAIRTIGNIVIVTTLLQFMFACIGVQLFKGKLYTCSDSSKQTEAECKGNYITYKDGEVDHPIIQPRSWENSKFDFDNVLAAMMALFTVSTFEGWPELLYRSIDSHTEDKGPIYNYRVEISIFFIIYIIIIAFFMMNIFVGFVIVTFQEQGEQEYKNCELDKNQRQCVEYALKARPLRRYIPKNQHQYKVWYVVNSTYFEYLMFVLILLNTICLAMQHYGQSCLFKIAMNILNMLFTGLFTVEMILKLIAFKPKGYFSDPWNVFDFLIVIGSIIDVILSETNHYFCDAWNTFDALIVVGSIVDIAITEVNPAEHTQCSPSMNAEENSRISITFFRLFRVMRLVKLLSRGEGIRTLLWTFIKSFQALPYVALLIVMLFFIYAVIGMQVFGKIALNDTTEINRNNNFQTFPQAVLLLFRCATGEAWQDIMLACMPGKKCAPESEPSNSTEGETPCGSSFAVFYFISFYMLCAFLIINLFVAVIMDNFDYLTRDWSILGPHHLDEFKRIWAEYDPEAKGRIKHLDVVTLLRRIQPPLGFGKLCPHRVACKRLVSMNMPLNSDGTVMFNATLFALVRTALRIKTEGNLEQANEELRAIIKKIWKRTSMKLLDQVVPPAGDDEVTVGKFYATFLIQEYFRKFKKRKEQGLVGKPSQRNALSLQAGLRTLHDIGPEIRRAISGDLTAEEELDKAMKEAVSAASEDDIFRRAGGLFGNHVSYYQSDGRSAFPQTFTTQRPLHINKAGSSQGDTESPSHEKLVDSTFTPSSYSSTGSNANINNANNTALGRLPRPAGYPSTVSTVEGHGPPLSPAIRVQEVAWKLSSNRCHSRESQAAMAGQEETSQDETYEVKMNHDTEACSEPSLLSTEMLSYQDDENRQLTLPEEDKRDIRQSPKRGFLRSASLGRRASFHLECLKRQKDRGGDISQKTVLPLHLVHHQALAVAGLSPLLQRSHSPASFPRPFATPPATPGSRGWPPQPVPTLRLEGVESSEKLNSSFPSIHCGSWAETTPGGGGSSAARRVRPVSLMVPSQAGAPGRQFHGSASSLVEAVLISEGLGQFAQDPKFIEVTTQELADACDMTIEEMESAADNILSGGAPQSPNGALLPFVNCRDAGQDRAGGEEDAGCVRARGRPSEEELQDSRVYVSSL

SEQ ID NO: 39621 - protein, 2146 aa, Homo sapiens
MVNENTRMYIPEENHQGSNYGSPRPAHANMNANAAAGLAPEHIPTPGAALSWQAAIDAARQAKLMGSAGNATISTVSSTQRKRQQYGKPKKQGSTTATRPPRALLCLTLKNPIRRACISIVEWKPFEIIILLTIFANCVALAIYIPFPEDDSNATNSNLERVEYLFLIIFTVEAFLKVIAYGLLFHPNAYLRNGWNLLDFIIVVVGLFSAILEQATKADGANALGGKGAGFDVKALRAFRVLRPLRLVSGVPSLQVVLNSIIKAMVPLLHIALLVLFVIIIYAIIGLELFMGKMHKTCYNQEGIADVPAEDDPSPCALETGHGRQCQNGTVCKPGWDGPKHGITNFDNFAFAMLTVFQCITMEGWTDVLYWVNDAVGRDWPWIYFVTLIIIGSFFVLNLVLGVLSGEFSKEREKAKARGDFQKLREKQQLEEDLKGYLDWITQAEDIDPENEDEGMDEEKPRNMSMPTSETESVNTENVAGGDIEGENCGARLAHRISKSKFSRYWRRWNRFCRRKCRAAVKSNVFYWLVIFLVFLNTLTIASEHYNQPNWLTEVQDTANKALLALFTAEMLLKMYSLGLQAYFVSLFNRFDCFVVCGGILETILVETKIMSPLGISVLRCVRLLRIFKITRYWNSLSNLVASLLNSVRSIASLLLLLFLFIIIFSLLGMQLFGGKFNFDEMQTRRSTFDNFPQSLLTVFQILTGEDWNSVMYDGIMAYGGPSFPGMLVCIYFIILFICGNYILLNVFLAIAVDNLADAESLTSAQKEEEEEKERKKLARTASPEKKQELVEKPAVGESKEEKIELKSITADGESPPATKINMDDLQPNENEDKSPYPNPETTGEEDEEEPEMPVGPRPRPLSELHLKEKAVPMPEASAFFIFSSNNRFRLQCHRIVNDTIFTNLILFFILLSSISLAAEDPVQHTSFRNHILGNADYVFTSIFTLEIILKMTAYGAFLHKGSFCRNYFNILDLLVVSVSLISFGIQSSAINVVKILRVLRVLRPLRAINRAKGLKHVVQCVFVAIRTIGNIVIVTTLLQFMFACIGVQLFKGKLYTCSDSSKQTEAECKGNYITYKDGEVDHPIIQPRSWENSKFDFDNVLAAMMALFTVSTFEGWPELLYRSIDSHTEDKGPIYNYRVEISIFFIIYIIIIAFFMMNIFVGFVIVTFQEQGEQEYKNCELDKNQRQCVEYALKARPLRRYIPKNQHQYKVWYVVNSTYFEYLMFVLILLNTICLAMQHYGQSCLFKIAMNILNMLFTGLFTVEMILKLIAFKPKHYFCDAWNTFDALIVVGSIVDIAITEVNNAEENSRISITFFRLFRVMRLVKLLSRGEGIRTLLWTFIKSFQALPYVALLIVMLFFIYAVIGMQVFGKIALNDTTEINRNNNFQTFPQAVLLLFRCATGEAWQDIMLACMPGKKCAPESEPSNSTEGETPCGSSFAVFYFISFYMLCAFLIINLFVAVIMDNFDYLTRDWSILGPHHLDEFKRIWAEYDPEAKGRIKHLDVVTLLRRIQPPLGFGKLCPHRVACKRLVSMNMPLNSDGTVMFNATLFALVRTALRIKTEEGPSPSEAHQGAEDPFRPAGNLEQANEELRAIIKKIWKRTSMKLLDQVVPPAGDDEVTVGKFYATFLIQEYFRKFKKRKEQGLVGKPSQRNALSLQAGLRTLHDIGPEIRRAISGDLTAEEELDKAMKEAVSAASEDDIFRRAGGLFGNHVSYYQSDGRSAFPQTFTTQRPLHINKAGSSQGDTESPSHEKLVDSTFTPSSYSSTGSNANINNANNTALGRLPRPAGYPSTVSTVEGHGPPLSPAIRVQEVAWKLSSNRCHSRESQAAMAGQEETSQDETYEVKMNHDTEACSEPSLLSTEMLSYQDDENRQLTLPEEDKRDIRQSPKRGFLRSASLGRRASFHLECLKRQKDRGGDISQKTVLPLHLVHHQALAVAGLSPLLQRSHSPASFPRPFATPPATPGSRGWPPQPVPTLRLEGVESSEKLNSSFPSIHCGSWAETTPGGGGSSAARRVRPVSLMVPSQAGAPGRQFHGSASSLVEAVLISEGLGQFAQDPKFIEVTTQELADACDMTIEEMESAADNILSGGAPQSPNGALLPFVNCRDAGQDRAGGEEDAGCVRARGRPSEEELQDSRVYVSSL

SEQ ID NO: 39622 - protein, 2146 aa, Homo sapiens
MVNENTRMYIPEENHQGSNYGSPRPAHANMNANAAAGLAPEHIPTPGAALSWQAAIDAARQAKLMGSAGNATISTVSSTQRKRQQYGKPKKQGSTTATRPPRALLCLTLKNPIRRACISIVEWKPFEIIILLTIFANCVALAIYIPFPEDDSNATNSNLERVEYLFLIIFTVEAFLKVIAYGLLFHPNAYLRNGWNLLDFIIVVVGLFSAILEQATKADGANALGGKGAGFDVKALRAFRVLRPLRLVSGVPSLQVVLNSIIKAMVPLLHIALLVLFVIIIYAIIGLELFMGKMHKTCYNQEGIADVPAEDDPSPCALETGHGRQCQNGTVCKPGWDGPKHGITNFDNFAFAMLTVFQCITMEGWTDVLYWVNDAVGRDWPWIYFVTLIIIGSFFVLNLVLGVLSGEFSKEREKAKARGDFQKLREKQQLEEDLKGYLDWITQAEDIDPENEDEGMDEEKPRNMSMPTSETESVNTENVAGGDIEGENCGARLAHRISKSKFSRYWRRWNRFCRRKCRAAVKSNVFYWLVIFLVFLNTLTIASEHYNQPNWLTEVQDTANKALLALFTAEMLLKMYSLGLQAYFVSLFNRFDCFVVCGGILETILVETKIMSPLGISVLRCVRLLRIFKITRYWNSLSNLVASLLNSVRSIASLLLLLFLFIIIFSLLGMQLFGGKFNFDEMQTRRSTFDNFPQSLLTVFQILTGEDWNSVMYDGIMAYGGPSFPGMLVCIYFIILFICGNYILLNVFLAIAVDNLADAESLTSAQKEEEEEKERKKLARTASPEKKQELVEKPAVGESKEEKIELKSITADGESPPATKINMDDLQPNENEDKSPYPNPETTGEEDEEEPEMPVGPRPRPLSELHLKEKAVPMPEASAFFIFSSNNRFRLQCHRIVNDTIFTNLILFFILLSSISLAAEDPVQHTSFRNHILFYFDIVFTTIFTIEIALKMTAYGAFLHKGSFCRNYFNILDLLVVSVSLISFGIQSSAINVVKILRVLRVLRPLRAINRAKGLKHVVQCVFVAIRTIGNIVIVTTLLQFMFACIGVQLFKGKLYTCSDSSKQTEAECKGNYITYKDGEVDHPIIQPRSWENSKFDFDNVLAAMMALFTVSTFEGWPELLYRSIDSHTEDKGPIYNYRVEISIFFIIYIIIIAFFMMNIFVGFVIVTFQEQGEQEYKNCELDKNQRQCVEYALKARPLRRYIPKNQHQYKVWYVVNSTYFEYLMFVLILLNTICLAMQHYGQSCLFKIAMNILNMLFTGLFTVEMILKLIAFKPKHYFCDAWNTFDALIVVGSIVDIAITEVNNAEENSRISITFFRLFRVMRLVKLLSRGEGIRTLLWTFIKSFQALPYVALLIVMLFFIYAVIGMQVFGKIALNDTTEINRNNNFQTFPQAVLLLFRCATGEAWQDIMLACMPGKKCAPESEPSNSTEGETPCGSSFAVFYFISFYMLCAFLIINLFVAVIMDNFDYLTRDWSILGPHHLDEFKRIWAEYDPEAKGRIKHLDVVTLLRRIQPPLGFGKLCPHRVACKRLVSMNMPLNSDGTVMFNATLFALVRTALRIKTEEGPSPSEAHQGAEDPFRPAGNLEQANEELRAIIKKIWKRTSMKLLDQVVPPAGDDEVTVGKFYATFLIQEYFRKFKKRKEQGLVGKPSQRNALSLQAGLRTLHDIGPEIRRAISGDLTAEEELDKAMKEAVSAASEDDIFRRAGGLFGNHVSYYQSDGRSAFPQTFTTQRPLHINKAGSSQGDTESPSHEKLVDSTFTPSSYSSTGSNANINNANNTALGRLPRPAGYPSTVSTVEGHGPPLSPAIRVQEVAWKLSSNRCHSRESQAAMAGQEETSQDETYEVKMNHDTEACSEPSLLSTEMLSYQDDENRQLTLPEEDKRDIRQSPKRGFLRSASLGRRASFHLECLKRQKDRGGDISQKTVLPLHLVHHQALAVAGLSPLLQRSHSPASFPRPFATPPATPGSRGWPPQPVPTLRLEGVESSEKLNSSFPSIHCGSWAETTPGGGGSSAARRVRPVSLMVPSQAGAPGRQFHGSASSLVEAVLISEGLGQFAQDPKFIEVTTQELADACDMTIEEMESAADNILSGGAPQSPNGALLPFVNCRDAGQDRAGGEEDAGCVRARGRPSEEELQDSRVYVSSL

SEQ ID NO: 39623 - protein, 2138 aa, Homo sapiens
MVNENTRMYIPEENHQGSNYGSPRPAHANMNANAAAGLAPEHIPTPGAALSWQAAIDAARQAKLMGSAGNATISTVSSTQRKRQQYGKPKKQGSTTATRPPRALLCLTLKNPIRRACISIVEWKPFEIIILLTIFANCVALAIYIPFPEDDSNATNSNLERVEYLFLIIFTVEAFLKVIAYGLLFHPNAYLRNGWNLLDFIIVVVGLFSAILEQATKADGANALGGKGAGFDVKALRAFRVLRPLRLVSGVPSLQVVLNSIIKAMVPLLHIALLVLFVIIIYAIIGLELFMGKMHKTCYNQEGIADVPAEDDPSPCALETGHGRQCQNGTVCKPGWDGPKHGITNFDNFAFAMLTVFQCITMEGWTDVLYWVNDAVGRDWPWIYFVTLIIIGSFFVLNLVLGVLSGEFSKEREKAKARGDFQKLREKQQLEEDLKGYLDWITQAEDIDPENEDEGMDEEKPRNMSMPTSETESVNTENVAGGDIEGENCGARLAHRISKSKFSRYWRRWNRFCRRKCRAAVKSNVFYWLVIFLVFLNTLTIASEHYNQPNWLTEVQDTANKALLALFTAEMLLKMYSLGLQAYFVSLFNRFDCFVVCGGILETILVETKIMSPLGISVLRCVRLLRIFKITRYWNSLSNLVASLLNSVRSIASLLLLLFLFIIIFSLLGMQLFGGKFNFDEMQTRRSTFDNFPQSLLTVFQILTGEDWNSVMYDGIMAYGGPSFPGMLVCIYFIILFICGNYILLNVFLAIAVDNLADAESLTSAQKEEEEEKERKKLARTASPEKKQELVEKPAVGESKEEKIELKSITADGESPPATKINMDDLQPNENEDKSPYPNPETTGEEDEEEPEMPVGPRPRPLSELHLKEKAVPMPEASAFFIFSSNNRFRLQCHRIVNDTIFTNLILFFILLSSISLAAEDPVQHTSFRNHILFYFDIVFTTIFTIEIALKMTAYGAFLHKGSFCRNYFNILDLLVVSVSLISFGIQSSAINVVKILRVLRVLRPLRAINRAKGLKHVVQCVFVAIRTIGNIVIVTTLLQFMFACIGVQLFKGKLYTCSDSSKQTEAECKGNYITYKDGEVDHPIIQPRSWENSKFDFDNVLAAMMALFTVSTFEGWPELLYRSIDSHTEDKGPIYNYRVEISIFFIIYIIIIAFFMMNIFVGFVIVTFQEQGEQEYKNCELDKNQRQCVEYALKARPLRRYIPKNQHQYKVWYVVNSTYFEYLMFVLILLNTICLAMQHYGQSCLFKIAMNILNMLFTGLFTVEMILKLIAFKPKGYFSDPWNVFDFLIVIGSIIDVILSETNPAEHTQCSPSMNAEENSRISITFFRLFRVMRLVKLLSRGEGIRTLLWTFIKSFQALPYVALLIVMLFFIYAVIGMQVFGKIALNDTTEINRNNNFQTFPQAVLLLFRCATGEAWQDIMLACMPGKKCAPESEPSNSTEGETPCGSSFAVFYFISFYMLCAFLIINLFVAVIMDNFDYLTRDWSILGPHHLDEFKRIWAEYDPEAKGRIKHLDVVTLLRRIQPPLGFGKLCPHRVACKRLVSMNMPLNSDGTVMFNATLFALVRTALRIKTEGNLEQANEELRAIIKKIWKRTSMKLLDQVVPPAGDDEVTVGKFYATFLIQEYFRKFKKRKEQGLVGKPSQRNALSLQAGLRTLHDIGPEIRRAISGDLTAEEELDKAMKEAVSAASEDDIFRRAGGLFGNHVSYYQSDGRSAFPQTFTTQRPLHINKAGSSQGDTESPSHEKLVDSTFTPSSYSSTGSNANINNANNTALGRLPRPAGYPSTVSTVEGHGPPLSPAIRVQEVAWKLSSNRCHSRESQAAMAGQEETSQDETYEVKMNHDTEACSEPSLLSTEMLSYQDDENRQLTLPEEDKRDIRQSPKRGFLRSASLGRRASFHLECLKRQKDRGGDISQKTVLPLHLVHHQALAVAGLSPLLQRSHSPASFPRPFATPPATPGSRGWPPQPVPTLRLEGVESSEKLNSSFPSIHCGSWAETTPGGGGSSAARRVRPVSLMVPSQAGAPGRQFHGSASSLVEAVLISEGLGQFAQDPKFIEVTTQELADACDMTIEEMESAADNILSGGAPQSPNGALLPFVNCRDAGQDRAGGEEDAGCVRARGRPSEEELQDSRVYVSSL

SEQ ID NO: 39624 - protein, 2138 aa, Homo sapiens
MVNENTRMYIPEENHQGSNYGSPRPAHANMNANAAAGLAPEHIPTPGAALSWQAAIDAARQAKLMGSAGNATISTVSSTQRKRQQYGKPKKQGSTTATRPPRALLCLTLKNPIRRACISIVEWKPFEIIILLTIFANCVALAIYIPFPEDDSNATNSNLERVEYLFLIIFTVEAFLKVIAYGLLFHPNAYLRNGWNLLDFIIVVVGLFSAILEQATKADGANALGGKGAGFDVKALRAFRVLRPLRLVSGVPSLQVVLNSIIKAMVPLLHIALLVLFVIIIYAIIGLELFMGKMHKTCYNQEGIADVPAEDDPSPCALETGHGRQCQNGTVCKPGWDGPKHGITNFDNFAFAMLTVFQCITMEGWTDVLYWVNDAVGRDWPWIYFVTLIIIGSFFVLNLVLGVLSGEFSKEREKAKARGDFQKLREKQQLEEDLKGYLDWITQAEDIDPENEDEGMDEEKPRNMSMPTSETESVNTENVAGGDIEGENCGARLAHRISKSKFSRYWRRWNRFCRRKCRAAVKSNVFYWLVIFLVFLNTLTIASEHYNQPNWLTEVQDTANKALLALFTAEMLLKMYSLGLQAYFVSLFNRFDCFVVCGGILETILVETKIMSPLGISVLRCVRLLRIFKITRYWNSLSNLVASLLNSVRSIASLLLLLFLFIIIFSLLGMQLFGGKFNFDEMQTRRSTFDNFPQSLLTVFQILTGEDWNSVMYDGIMAYGGPSFPGMLVCIYFIILFICGNYILLNVFLAIAVDNLADAESLTSAQKEEEEEKERKKLARTASPEKKQELVEKPAVGESKEEKIELKSITADGESPPATKINMDDLQPNENEDKSPYPNPETTGEEDEEEPEMPVGPRPRPLSELHLKEKAVPMPEASAFFIFSSNNRFRLQCHRIVNDTIFTNLILFFILLSSISLAAEDPVQHTSFRNHILGNADYVFTSIFTLEIILKMTAYGAFLHKGSFCRNYFNILDLLVVSVSLISFGIQSSAINVVKILRVLRVLRPLRAINRAKGLKHVVQCVFVAIRTIGNIVIVTTLLQFMFACIGVQLFKGKLYTCSDSSKQTEAECKGNYITYKDGEVDHPIIQPRSWENSKFDFDNVLAAMMALFTVSTFEGWPELLYRSIDSHTEDKGPIYNYRVEISIFFIIYIIIIAFFMMNIFVGFVIVTFQEQGEQEYKNCELDKNQRQCVEYALKARPLRRYIPKNQHQYKVWYVVNSTYFEYLMFVLILLNTICLAMQHYGQSCLFKIAMNILNMLFTGLFTVEMILKLIAFKPKHYFCDAWNTFDALIVVGSIVDIAITEVNPAEHTQCSPSMNAEENSRISITFFRLFRVMRLVKLLSRGEGIRTLLWTFIKSFQALPYVALLIVMLFFIYAVIGMQVFGKIALNDTTEINRNNNFQTFPQAVLLLFRCATGEAWQDIMLACMPGKKCAPESEPSNSTEGETPCGSSFAVFYFISFYMLCAFLIINLFVAVIMDNFDYLTRDWSILGPHHLDEFKRIWAEYDPEAKGRIKHLDVVTLLRRIQPPLGFGKLCPHRVACKRLVSMNMPLNSDGTVMFNATLFALVRTALRIKTEGNLEQANEELRAIIKKIWKRTSMKLLDQVVPPAGDDEVTVGKFYATFLIQEYFRKFKKRKEQGLVGKPSQRNALSLQAGLRTLHDIGPEIRRAISGDLTAEEELDKAMKEAVSAASEDDIFRRAGGLFGNHVSYYQSDGRSAFPQTFTTQRPLHINKAGSSQGDTESPSHEKLVDSTFTPSSYSSTGSNANINNANNTALGRLPRPAGYPSTVSTVEGHGPPLSPAIRVQEVAWKLSSNRCHSRESQAAMAGQEETSQDETYEVKMNHDTEACSEPSLLSTEMLSYQDDENRQLTLPEEDKRDIRQSPKRGFLRSASLGRRASFHLECLKRQKDRGGDISQKTVLPLHLVHHQALAVAGLSPLLQRSHSPASFPRPFATPPATPGSRGWPPQPVPTLRLEGVESSEKLNSSFPSIHCGSWAETTPGGGGSSAARRVRPVSLMVPSQAGAPGRQFHGSASSLVEAVLISEGLGQFAQDPKFIEVTTQELADACDMTIEEMESAADNILSGGAPQSPNGALLPFVNCRDAGQDRAGGEEDAGCVRARGRPSEEELQDSRVYVSSL

SEQ ID NO: 39625 - protein, 2138 aa, Homo sapiens
MVNENTRMYIPEENHQGSNYGSPRPAHANMNANAAAGLAPEHIPTPGAALSWQAAIDAARQAKLMGSAGNATISTVSSTQRKRQQYGKPKKQGSTTATRPPRALLCLTLKNPIRRACISIVEWKPFEIIILLTIFANCVALAIYIPFPEDDSNATNSNLERVEYLFLIIFTVEAFLKVIAYGLLFHPNAYLRNGWNLLDFIIVVVGLFSAILEQATKADGANALGGKGAGFDVKALRAFRVLRPLRLVSGVPSLQVVLNSIIKAMVPLLHIALLVLFVIIIYAIIGLELFMGKMHKTCYNQEGIADVPAEDDPSPCALETGHGRQCQNGTVCKPGWDGPKHGITNFDNFAFAMLTVFQCITMEGWTDVLYWMQDAMGYELPWVYFVSLVIFGSFFVLNLVLGVLSGEFSKEREKAKARGDFQKLREKQQLEEDLKGYLDWITQAEDIDPENEDEGMDEEKPRNMSMPTSETESVNTENVAGGDIEGENCGARLAHRISKSKFSRYWRRWNRFCRRKCRAAVKSNVFYWLVIFLVFLNTLTIASEHYNQPNWLTEVQDTANKALLALFTAEMLLKMYSLGLQAYFVSLFNRFDCFVVCGGILETILVETKIMSPLGISVLRCVRLLRIFKITRYWNSLSNLVASLLNSVRSIASLLLLLFLFIIIFSLLGMQLFGGKFNFDEMQTRRSTFDNFPQSLLTVFQILTGEDWNSVMYDGIMAYGGPSFPGMLVCIYFIILFICGNYILLNVFLAIAVDNLADAESLTSAQKEEEEEKERKKLARTASPEKKQELVEKPAVGESKEEKIELKSITADGESPPATKINMDDLQPNENEDKSPYPNPETTGEEDEEEPEMPVGPRPRPLSELHLKEKAVPMPEASAFFIFSSNNRFRLQCHRIVNDTIFTNLILFFILLSSISLAAEDPVQHTSFRNHILFYFDIVFTTIFTIEIALKMTAYGAFLHKGSFCRNYFNILDLLVVSVSLISFGIQSSAINVVKILRVLRVLRPLRAINRAKGLKHVVQCVFVAIRTIGNIVIVTTLLQFMFACIGVQLFKGKLYTCSDSSKQTEAECKGNYITYKDGEVDHPIIQPRSWENSKFDFDNVLAAMMALFTVSTFEGWPELLYRSIDSHTEDKGPIYNYRVEISIFFIIYIIIIAFFMMNIFVGFVIVTFQEQGEQEYKNCELDKNQRQCVEYALKARPLRRYIPKNQHQYKVWYVVNSTYFEYLMFVLILLNTICLAMQHYGQSCLFKIAMNILNMLFTGLFTVEMILKLIAFKPKGYFSDPWNVFDFLIVIGSIIDVILSETNPAEHTQCSPSMNAEENSRISITFFRLFRVMRLVKLLSRGEGIRTLLWTFIKSFQALPYVALLIVMLFFIYAVIGMQVFGKIALNDTTEINRNNNFQTFPQAVLLLFRCATGEAWQDIMLACMPGKKCAPESEPSNSTEGETPCGSSFAVFYFISFYMLCAFLIINLFVAVIMDNFDYLTRDWSILGPHHLDEFKRIWAEYDPEAKGRIKHLDVVTLLRRIQPPLGFGKLCPHRVACKRLVSMNMPLNSDGTVMFNATLFALVRTALRIKTEGNLEQANEELRAIIKKIWKRTSMKLLDQVVPPAGDDEVTVGKFYATFLIQEYFRKFKKRKEQGLVGKPSQRNALSLQAGLRTLHDIGPEIRRAISGDLTAEEELDKAMKEAVSAASEDDIFRRAGGLFGNHVSYYQSDGRSAFPQTFTTQRPLHINKAGSSQGDTESPSHEKLVDSTFTPSSYSSTGSNANINNANNTALGRLPRPAGYPSTVSTVEGHGPPLSPAIRVQEVAWKLSSNRCHSRESQAAMAGQEETSQDETYEVKMNHDTEACSEPSLLSTEMLSYQDDENRQLTLPEEDKRDIRQSPKRGFLRSASLGRRASFHLECLKRQKDRGGDISQKTVLPLHLVHHQALAVAGLSPLLQRSHSPASFPRPFATPPATPGSRGWPPQPVPTLRLEGVESSEKLNSSFPSIHCGSWAETTPGGGGSSAARRVRPVSLMVPSQAGAPGRQFHGSASSLVEAVLISEGLGQFAQDPKFIEVTTQELADACDMTIEEMESAADNILSGGAPQSPNGALLPFVNCRDAGQDRAGGEEDAGCVRARGRPSEEELQDSRVYVSSL

SEQ ID NO: 39626 - protein, 2158 aa, Homo sapiens
MVNENTRMYIPEENHQGSNYGSPRPAHANMNANAAAGLAPEHIPTPGAALSWQAAIDAARQAKLMGSAGNATISTVSSTQRKRQQYGKPKKQGSTTATRPPRALLCLTLKNPIRRACISIVEWKPFEIIILLTIFANCVALAIYIPFPEDDSNATNSNLERVEYLFLIIFTVEAFLKVIAYGLLFHPNAYLRNGWNLLDFIIVVVGLFSAILEQATKADGANALGGKGAGFDVKALRAFRVLRPLRLVSGVPSLQVVLNSIIKAMVPLLHIALLVLFVIIIYAIIGLELFMGKMHKTCYNQEGIADVPAEDDPSPCALETGHGRQCQNGTVCKPGWDGPKHGITNFDNFAFAMLTVFQCITMEGWTDVLYWVNDAVGRDWPWIYFVTLIIIGSFFVLNLVLGVLSGEFSKEREKAKARGDFQKLREKQQLEEDLKGYLDWITQAEDIDPENEDEGMDEEKPRNMSMPTSETESVNTENVAGGDIEGENCGARLAHRISKSKFSRYWRRWNRFCRRKCRAAVKSNVFYWLVIFLVFLNTLTIASEHYNQPNWLTEVQDTANKALLALFTAEMLLKMYSLGLQAYFVSLFNRFDCFVVCGGILETILVETKIMSPLGISVLRCVRLLRIFKITRYWNSLSNLVASLLNSVRSIASLLLLLFLFIIIFSLLGMQLFGGKFNFDEMQTRRSTFDNFPQSLLTVFQILTGEDWNSVMYDGIMAYGGPSFPGMLVCIYFIILFICGNYILLNVFLAIAVDNLADAESLTSAQKEEEEEKERKKLARTASPEKKQELVEKPAVGESKEEKIELKSITADGESPPATKINMDDLQPNENEDKSPYPNPETTGEEDEEEPEMPVGPRPRPLSELHLKEKAVPMPEASAFFIFSSNNRFRLQCHRIVNDTIFTNLILFFILLSSISLAAEDPVQHTSFRNHILFYFDIVFTTIFTIEIALKILGNADYVFTSIFTLEIILKMTAYGAFLHKGSFCRNYFNILDLLVVSVSLISFGIQSSAINVVKILRVLRVLRPLRAINRAKGLKHVVQCVFVAIRTIGNIVIVTTLLQFMFACIGVQLFKGKLYTCSDSSKQTEAECKGNYITYKDGEVDHPIIQPRSWENSKFDFDNVLAAMMALFTVSTFEGWPELLYRSIDSHTEDKGPIYNYRVEISIFFIIYIIIIAFFMMNIFVGFVIVTFQEQGEQEYKNCELDKNQRQCVEYALKARPLRRYIPKNQHQYKVWYVVNSTYFEYLMFVLILLNTICLAMQHYGQSCLFKIAMNILNMLFTGLFTVEMILKLIAFKPKHYFCDAWNTFDALIVVGSIVDIAITEVNPAEHTQCSPSMNAEENSRISITFFRLFRVMRLVKLLSRGEGIRTLLWTFIKSFQALPYVALLIVMLFFIYAVIGMQVFGKIALNDTTEINRNNNFQTFPQAVLLLFRCATGEAWQDIMLACMPGKKCAPESEPSNSTEGETPCGSSFAVFYFISFYMLCAFLIINLFVAVIMDNFDYLTRDWSILGPHHLDEFKRIWAEYDPEAKGRIKHLDVVTLLRRIQPPLGFGKLCPHRVACKRLVSMNMPLNSDGTVMFNATLFALVRTALRIKTEGNLEQANEELRAIIKKIWKRTSMKLLDQVVPPAGDDEVTVGKFYATFLIQEYFRKFKKRKEQGLVGKPSQRNALSLQAGLRTLHDIGPEIRRAISGDLTAEEELDKAMKEAVSAASEDDIFRRAGGLFGNHVSYYQSDGRSAFPQTFTTQRPLHINKAGSSQGDTESPSHEKLVDSTFTPSSYSSTGSNANINNANNTALGRLPRPAGYPSTVSTVEGHGPPLSPAIRVQEVAWKLSSNRCHSRESQAAMAGQEETSQDETYEVKMNHDTEACSEPSLLSTEMLSYQDDENRQLTLPEEDKRDIRQSPKRGFLRSASLGRRASFHLECLKRQKDRGGDISQKTVLPLHLVHHQALAVAGLSPLLQRSHSPASFPRPFATPPATPGSRGWPPQPVPTLRLEGVESSEKLNSSFPSIHCGSWAETTPGGGGSSAARRVRPVSLMVPSQAGAPGRQFHGSASSLVEAVLISEGLGQFAQDPKFIEVTTQELADACDMTIEEMESAADNILSGGAPQSPNGALLPFVNCRDAGQDRAGGEEDAGCVRARGRPSEEELQDSRVYVSSL

SEQ ID NO: 39627 - protein, 2173 aa, Homo sapiens
MVNENTRMYIPEENHQGSNYGSPRPAHANMNANAAAGLAPEHIPTPGAALSWQAAIDAARQAKLMGSAGNATISTVSSTQRKRQQYGKPKKQGSTTATRPPRALLCLTLKNPIRRACISIVEWKPFEIIILLTIFANCVALAIYIPFPEDDSNATNSNLERVEYLFLIIFTVEAFLKVIAYGLLFHPNAYLRNGWNLLDFIIVVVGLFSAILEQATKADGANALGGKGAGFDVKALRAFRVLRPLRLVSGVPSLQVVLNSIIKAMVPLLHIALLVLFVIIIYAIIGLELFMGKMHKTCYNQEGIADVPAEDDPSPCALETGHGRQCQNGTVCKPGWDGPKHGITNFDNFAFAMLTVFQCITMEGWTDVLYWMQDAMGYELPWVYFVSLVIFGSFFVLNLVLGVLSGEFSKEREKAKARGDFQKLREKQQLEEDLKGYLDWITQAEDIDPENEDEGMDEEKPRNMSMPTSETESVNTENVAGGDIEGENCGARLAHRISKSKFSRYWRRWNRFCRRKCRAAVKSNVFYWLVIFLVFLNTLTIASEHYNQPNWLTEVQDTANKALLALFTAEMLLKMYSLGLQAYFVSLFNRFDCFVVCGGILETILVETKIMSPLGISVLRCVRLLRIFKITRYWNSLSNLVASLLNSVRSIASLLLLLFLFIIIFSLLGMQLFGGKFNFDEMQTRRSTFDNFPQSLLTVFQILTGEDWNSVMYDGIMAYGGPSFPGMLVCIYFIILFICGNYILLNVFLAIAVDNLADAESLTSAQKEEEEEKERKKLARTASPEKKQELVEKPAVGESKEEKIELKSITADGESPPATKINMDDLQPNENEDKSPYPNPETTGEEDEEEPEMPVGPRPRPLSELHLKEKAVPMPEASAFFIFSSNNRFRLQCHRIVNDTIFTNLILFFILLSSISLAAEDPVQHTSFRNHILFYFDIVFTTIFTIEIALKMTAYGAFLHKGSFCRNYFNILDLLVVSVSLISFGIQSSAINVVKILRVLRVLRPLRAINRAKGLKHVVQCVFVAIRTIGNIVIVTTLLQFMFACIGVQLFKGKLYTCSDSSKQTEAECKGNYITYKDGEVDHPIIQPRSWENSKFDFDNVLAAMMALFTVSTFEGWPELLYRSIDSHTEDKGPIYNYRVEISIFFIIYIIIIAFFMMNIFVGFVIVTFQEQGEQEYKNCELDKNQRQCVEYALKARPLRRYIPKNQHQYKVWYVVNSTYFEYLMFVLILLNTICLAMQHYGQSCLFKIAMNILNMLFTGLFTVEMILKLIAFKPKGYFSDPWNVFDFLIVIGSIIDVILSETNPAEHTQCSPSMNAEENSRISITFFRLFRVMRLVKLLSRGEGIRTLLWTFIKSFQALPYVALLIVMLFFIYAVIGMQVFGKIALNDTTEINRNNNFQTFPQAVLLLFRCATGEAWQDIMLACMPGKKCAPESEPSNSTEGETPCGSSFAVFYFISFYMLCAFLIINLFVAVIMDNFDYLTRDWSILGPHHLDEFKRIWAEYDPEAKGRIKHLDVVTLLRRIQPPLGFGKLCPHRVACKRLVSMNMPLNSDGTVMFNATLFALVRTALRIKTEGNLEQANEELRAIIKKIWKRTSMKLLDQVVPPAGDDEVTVGKFYATFLIQEYFRKFKKRKEQGLVGKPSQRNALSLQAGLRTLHDIGPEIRRAISGDLTAEEELDKAMKEAVSAASEDDIFRRAGGLFGNHVSYYQSDGRSAFPQTFTTQRPLHINKAGSSQGDTESPSHEKLVDSTFTPSSYSSTGSNANINNANNTALGRLPRPAGYPSTVSTVEGHGPPLSPAIRVQEVAWKLSSNRERHVPMCEDLELRRDSGSAGTQAHCLLLRKANPSRCHSRESQAAMAGQEETSQDETYEVKMNHDTEACSEPSLLSTEMLSYQDDENRQLTLPEEDKRDIRQSPKRGFLRSASLGRRASFHLECLKRQKDRGGDISQKTVLPLHLVHHQALAVAGLSPLLQRSHSPASFPRPFATPPATPGSRGWPPQPVPTLRLEGVESSEKLNSSFPSIHCGSWAETTPGGGGSSAARRVRPVSLMVPSQAGAPGRQFHGSASSLVEAVLISEGLGQFAQDPKFIEVTTQELADACDMTIEEMESAADNILSGGAPQSPNGALLPFVNCRDAGQDRAGGEEDAGCVRARGRPSEEELQDSRVYVSSL

SEQ ID NO: 39628 - protein, 2157 aa, Homo sapiens
MVNENTRMYIPEENHQGSNYGSPRPAHANMNANAAAGLAPEHIPTPGAALSWQAAIDAARQAKLMGSAGNATISTVSSTQRKRQQYGKPKKQGSTTATRPPRALLCLTLKNPIRRACISIVEWKPFEIIILLTIFANCVALAIYIPFPEDDSNATNSNLERVEYLFLIIFTVEAFLKVIAYGLLFHPNAYLRNGWNLLDFIIVVVGLFSAILEQATKADGANALGGKGAGFDVKALRAFRVLRPLRLVSGVPSLQVVLNSIIKAMVPLLHIALLVLFVIIIYAIIGLELFMGKMHKTCYNQEGIADVPAEDDPSPCALETGHGRQCQNGTVCKPGWDGPKHGITNFDNFAFAMLTVFQCITMEGWTDVLYWVNDAVGRDWPWIYFVTLIIIGSFFVLNLVLGVLSGEFSKEREKAKARGDFQKLREKQQLEEDLKGYLDWITQAEDIDPENEDEGMDEEKPRNMSMPTSETESVNTENVAGGDIEGENCGARLAHRISKSKFSRYWRRWNRFCRRKCRAAVKSNVFYWLVIFLVFLNTLTIASEHYNQPNWLTEVQDTANKALLALFTAEMLLKMYSLGLQAYFVSLFNRFDCFVVCGGILETILVETKIMSPLGISVLRCVRLLRIFKITRYWNSLSNLVASLLNSVRSIASLLLLLFLFIIIFSLLGMQLFGGKFNFDEMQTRRSTFDNFPQSLLTVFQILTGEDWNSVMYDGIMAYGGPSFPGMLVCIYFIILFICGNYILLNVFLAIAVDNLADAESLTSAQKEEEEEKERKKLARTASPEKKQELVEKPAVGESKEEKIELKSITADGESPPATKINMDDLQPNENEDKSPYPNPETTGEEDEEEPEMPVGPRPRPLSELHLKEKAVPMPEASAFFIFSSNNRFRLQCHRIVNDTIFTNLILFFILLSSISLAAEDPVQHTSFRNHILFYFDIVFTTIFTIEIALKMTAYGAFLHKGSFCRNYFNILDLLVVSVSLISFGIQSSAINVVKILRVLRVLRPLRAINRAKGLKHVVQCVFVAIRTIGNIVIVTTLLQFMFACIGVQLFKGKLYTCSDSSKQTEAECKGNYITYKDGEVDHPIIQPRSWENSKFDFDNVLAAMMALFTVSTFEGWPELLYRSIDSHTEDKGPIYNYRVEISIFFIIYIIIIAFFMMNIFVGFVIVTFQEQGEQEYKNCELDKNQRQCVEYALKARPLRRYIPKNQHQYKVWYVVNSTYFEYLMFVLILLNTICLAMQHYGQSCLFKIAMNILNMLFTGLFTVEMILKLIAFKPKHYFCDAWNTFDALIVVGSIVDIAITEVNPAEHTQCSPSMNAEENSRISITFFRLFRVMRLVKLLSRGEGIRTLLWTFIKSFQALPYVALLIVMLFFIYAVIGMQVFGKIALNDTTEINRNNNFQTFPQAVLLLFRCATGEAWQDIMLACMPGKKCAPESEPSNSTEGETPCGSSFAVFYFISFYMLCAFLIINLFVAVIMDNFDYLTRDWSILGPHHLDEFKRIWAEYDPEAKGRIKHLDVVTLLRRIQPPLGFGKLCPHRVACKRLVSMNMPLNSDGTVMFNATLFALVRTALRIKTEEGPSPSEAHQGAEDPFRPAGNLEQANEELRAIIKKIWKRTSMKLLDQVVPPAGDDEVTVGKFYATFLIQEYFRKFKKRKEQGLVGKPSQRNALSLQAGLRTLHDIGPEIRRAISGDLTAEEELDKAMKEAVSAASEDDIFRRAGGLFGNHVSYYQSDGRSAFPQTFTTQRPLHINKAGSSQGDTESPSHEKLVDSTFTPSSYSSTGSNANINNANNTALGRLPRPAGYPSTVSTVEGHGPPLSPAIRVQEVAWKLSSNRCHSRESQAAMAGQEETSQDETYEVKMNHDTEACSEPSLLSTEMLSYQDDENRQLTLPEEDKRDIRQSPKRGFLRSASLGRRASFHLECLKRQKDRGGDISQKTVLPLHLVHHQALAVAGLSPLLQRSHSPASFPRPFATPPATPGSRGWPPQPVPTLRLEGVESSEKLNSSFPSIHCGSWAETTPGGGGSSAARRVRPVSLMVPSQAGAPGRQFHGSASSLVEAVLISEGLGQFAQDPKFIEVTTQELADACDMTIEEMESAADNILSGGAPQSPNGALLPFVNCRDAGQDRAGGEEDAGCVRARGRPSEEELQDSRVYVSSL

SEQ ID NO: 39629 - protein, 2155 aa, Homo sapiens
MVNENTRMYIPEENHQGSNYGSPRPAHANMNANAAAGLAPEHIPTPGAALSWQAAIDAARQAKLMGSAGNATISTVSSTQRKRQQYGKPKKQGSTTATRPPRALLCLTLKNPIRRACISIVEWKPFEIIILLTIFANCVALAIYIPFPEDDSNATNSNLERVEYLFLIIFTVEAFLKVIAYGLLFHPNAYLRNGWNLLDFIIVVVGLFSAILEQATKADGANALGGKGAGFDVKALRAFRVLRPLRLVSGVPSLQVVLNSIIKAMVPLLHIALLVLFVIIIYAIIGLELFMGKMHKTCYNQEGIADVPAEDDPSPCALETGHGRQCQNGTVCKPGWDGPKHGITNFDNFAFAMLTVFQCITMEGWTDVLYWVNDAVGRDWPWIYFVTLIIIGSFFVLNLVLGVLSGEFSKEREKAKARGDFQKLREKQQLEEDLKGYLDWITQAEDIDPENEDEGMDEEKPRNMSMPTSETESVNTENVAGGDIEGENCGARLAHRISKSKFSRYWRRWNRFCRRKCRAAVKSNVFYWLVIFLVFLNTLTIASEHYNQPNWLTEVQDTANKALLALFTAEMLLKMYSLGLQAYFVSLFNRFDCFVVCGGILETILVETKIMSPLGISVLRCVRLLRIFKITRYWNSLSNLVASLLNSVRSIASLLLLLFLFIIIFSLLGMQLFGGKFNFDEMQTRRSTFDNFPQSLLTVFQILTGEDWNSVMYDGIMAYGGPSFPGMLVCIYFIILFICGNYILLNVFLAIAVDNLADAESLTSAQKEEEEEKERKKLARTASPEKKQELVEKPAVGESKEEKIELKSITADGESPPATKINMDDLQPNENEDKSPYPNPETTGEEDEEEPEMPVGPRPRPLSELHLKEKAVPMPEASAFFIFSSNNRFRLQCHRIVNDTIFTNLILFFILLSSISLAAEDPVQHTSFRNHILGNADYVFTSIFTLEIILKMTAYGAFLHKGSFCRNYFNILDLLVVSVSLISFGIQSSAINVVKILRVLRVLRPLRAINRAKGLKHVVQCVFVAIRTIGNIVIVTTLLQFMFACIGVQLFKGKLYTCSDSSKQTEAECKGNYITYKDGEVDHPIIQPRSWENSKFDFDNVLAAMMALFTVSTFEGWPELLYRSIDSHTEDKGPIYNYRVEISIFFIIYIIIIAFFMMNIFVGFVIVTFQEQGEQEYKNCELDKNQRQCVEYALKARPLRRYIPKNQHQYKVWYVVNSTYFEYLMFVLILLNTICLAMQHYGQSCLFKIAMNILNMLFTGLFTVEMILKLIAFKPKGYFSDPWNVFDFLIVIGSIIDVILSETNHYFCDAWNTFDALIVVGSIVDIAITEVNNAEENSRISITFFRLFRVMRLVKLLSRGEGIRTLLWTFIKSFQALPYVALLIVMLFFIYAVIGMQVFGKIALNDTTEINRNNNFQTFPQAVLLLFRCATGEAWQDIMLACMPGKKCAPESEPSNSTEGETPCGSSFAVFYFISFYMLCAFLIINLFVAVIMDNFDYLTRDWSILGPHHLDEFKRIWAEYDPEAKGRIKHLDVVTLLRRIQPPLGFGKLCPHRVACKRLVSMNMPLNSDGTVMFNATLFALVRTALRIKTEGNLEQANEELRAIIKKIWKRTSMKLLDQVVPPAGDDEVTVGKFYATFLIQEYFRKFKKRKEQGLVGKPSQRNALSLQAGLRTLHDIGPEIRRAISGDLTAEEELDKAMKEAVSAASEDDIFRRAGGLFGNHVSYYQSDGRSAFPQTFTTQRPLHINKAGSSQGDTESPSHEKLVDSTFTPSSYSSTGSNANINNANNTALGRLPRPAGYPSTVSTVEGHGPPLSPAIRVQEVAWKLSSNRCHSRESQAAMAGQEETSQDETYEVKMNHDTEACSEPSLLSTEMLSYQDDENRQLTLPEEDKRDIRQSPKRGFLRSASLGRRASFHLECLKRQKDRGGDISQKTVLPLHLVHHQALAVAGLSPLLQRSHSPASFPRPFATPPATPGSRGWPPQPVPTLRLEGVESSEKLNSSFPSIHCGSWAETTPGGGGSSAARRVRPVSLMVPSQAGAPGRQFHGSASSLVEAVLISEGLGQFAQDPKFIEVTTQELADACDMTIEEMESAADNILSGGAPQSPNGALLPFVNCRDAGQDRAGGEEDAGCVRARGRPSEEELQDSRVYVSSL

SEQ ID NO: 39630 - protein, 2209 aa, Homo sapiens
MVNENTRMYIPEENHQGSNYGSPRPAHANMNANAAAGLAPEHIPTPGAALSWQAAIDAARQAKLMGSAGNATISTVSSTQRKRQQYGKPKKQGSTTATRPPRALLCLTLKNPIRRACISIVEWKPFEIIILLTIFANCVALAIYIPFPEDDSNATNSNLERVEYLFLIIFTVEAFLKVIAYGLLFHPNAYLRNGWNLLDFIIVVVGLFSAILEQATKADGANALGGKGAGFDVKALRAFRVLRPLRLVSGVPSLQVVLNSIIKAMVPLLHIALLVLFVIIIYAIIGLELFMGKMHKTCYNQEGIADVPAEDDPSPCALETGHGRQCQNGTVCKPGWDGPKHGITNFDNFAFAMLTVFQCITMEGWTDVLYWMQDAMGYELPWVYFVSLVIFGSFFVLNLVLGVLSGEFSKEREKAKARGDFQKLREKQQLEEDLKGYLDWITQAEDIDPENEDEGMDEEKPRNMSMPTSETESVNTENVAGGDIEGENCGARLAHRISKSKFSRYWRRWNRFCRRKCRAAVKSNVFYWLVIFLVFLNTLTIASEHYNQPNWLTEVQDTANKALLALFTAEMLLKMYSLGLQAYFVSLFNRFDCFVVCGGILETILVETKIMSPLGISVLRCVRLLRIFKITRYWNSLSNLVASLLNSVRSIASLLLLLFLFIIIFSLLGMQLFGGKFNFDEMQTRRSTFDNFPQSLLTVFQILTGEDWNSVMYDGIMAYGGPSFPGMLVCIYFIILFICGNYILLNVFLAIAVDNLADAESLTSAQKEEEEEKERKKLARTASPEKKQELVEKPAVGESKEEKIELKSITADGESPPATKINMDDLQPNENEDKSPYPNPETTGEEDEEEPEMPVGPRPRPLSELHLKEKAVPMPEASAFFIFSSNNRFRLQCHRIVNDTIFTNLILFFILLSSISLAAEDPVQHTSFRNHILFYFDIVFTTIFTIEIALKMTAYGAFLHKGSFCRNYFNILDLLVVSVSLISFGIQSSAINVVKILRVLRVLRPLRAINRAKGLKHVVQCVFVAIRTIGNIVIVTTLLQFMFACIGVQLFKGKLYTCSDSSKQTEAECKGNYITYKDGEVDHPIIQPRSWENSKFDFDNVLAAMMALFTVSTFEGWPELLYRSIDSHTEDKGPIYNYRVEISIFFIIYIIIIAFFMMNIFVGFVIVTFQEQGEQEYKNCELDKNQRQCVEYALKARPLRRYIPKNQHQYKVWYVVNSTYFEYLMFVLILLNTICLAMQHYGQSCLFKIAMNILNMLFTGLFTVEMILKLIAFKPKHYFCDAWNTFDALIVVGSIVDIAITEVNPAEHTQCSPSMNAEENSRISITFFRLFRVMRLVKLLSRGEGIRTLLWTFIKSFQALPYVALLIVMLFFIYAVIGMQVFGKIALNDTTEINRNNNFQTFPQAVLLLFRCATGEAWQDIMLACMPGKKCAPESEPSNSTEGETPCGSSFAVFYFISFYMLCAFLIINLFVAVIMDNFDYLTRDWSILGPHHLDEFKRIWAEYDPEAKGRIKHLDVVTLLRRIQPPLGFGKLCPHRVACKRLVSMNMPLNSDGTVMFNATLFALVRTALRIKTEGNLEQANEELRAIIKKIWKRTSMKLLDQVVPPAGDDEVTVGKFYATFLIQEYFRKFKKRKEQGLVGKPSQRNALSLQAGLRTLHDIGPEIRRAISGDLTAEEELDKAMKEAVSAASEDDIFRRAGGLFGNHVSYYQSDGRSAFPQTFTTQRPLHINKAGSSQGDTESPSHEKLVDSTFTPSSYSSTGSNANINNANNTALGRLPRPAGYPSTVSTVEGHGPPLSPAIRVQEVAWKLSSNRMHCCDMLDGGTFPPALGPRRAPPCLHQQLQGSLAGLREDTPCIVPGHASLCCSSRVGEWLPAGCTAPQHARCHSRESQAAMAGQEETSQDETYEVKMNHDTEACSEPSLLSTEMLSYQDDENRQLTLPEEDKRDIRQSPKRGFLRSASLGRRASFHLECLKRQKDRGGDISQKTVLPLHLVHHQALAVAGLSPLLQRSHSPASFPRPFATPPATPGSRGWPPQPVPTLRLEGVESSEKLNSSFPSIHCGSWAETTPGGGGSSAARRVRPVSLMVPSQAGAPGRQFHGSASSLVEAVLISEGLGQFAQDPKFIEVTTQELADACDMTIEEMESAADNILSGGAPQSPNGALLPFVNCRDAGQDRAGGEEDAGCVRARGRPSEEELQDSRVYVSSL

SEQ ID NO: 39631 - protein, 2157 aa, Homo sapiens
MVNENTRMYIPEENHQGSNYGSPRPAHANMNANAAAGLAPEHIPTPGAALSWQAAIDAARQAKLMGSAGNATISTVSSTQRKRQQYGKPKKQGSTTATRPPRALLCLTLKNPIRRACISIVEWKPFEIIILLTIFANCVALAIYIPFPEDDSNATNSNLERVEYLFLIIFTVEAFLKVIAYGLLFHPNAYLRNGWNLLDFIIVVVGLFSAILEQATKADGANALGGKGAGFDVKALRAFRVLRPLRLVSGVPSLQVVLNSIIKAMVPLLHIALLVLFVIIIYAIIGLELFMGKMHKTCYNQEGIADVPAEDDPSPCALETGHGRQCQNGTVCKPGWDGPKHGITNFDNFAFAMLTVFQCITMEGWTDVLYWVNDAVGRDWPWIYFVTLIIIGSFFVLNLVLGVLSGEFSKEREKAKARGDFQKLREKQQLEEDLKGYLDWITQAEDIDPENEDEGMDEEKPRNMSMPTSETESVNTENVAGGDIEGENCGARLAHRISKSKFSRYWRRWNRFCRRKCRAAVKSNVFYWLVIFLVFLNTLTIASEHYNQPNWLTEVQDTANKALLALFTAEMLLKMYSLGLQAYFVSLFNRFDCFVVCGGILETILVETKIMSPLGISVLRCVRLLRIFKITRYWNSLSNLVASLLNSVRSIASLLLLLFLFIIIFSLLGMQLFGGKFNFDEMQTRRSTFDNFPQSLLTVFQILTGEDWNSVMYDGIMAYGGPSFPGMLVCIYFIILFICGNYILLNVFLAIAVDNLADAESLTSAQKEEEEEKERKKLARTASPEKKQELVEKPAVGESKEEKIELKSITADGESPPATKINMDDLQPNENEDKSPYPNPETTGEEDEEEPEMPVGPRPRPLSELHLKEKAVPMPEASAFFIFSSNNRFRLQCHRIVNDTIFTNLILFFILLSSISLAAEDPVQHTSFRNHILGNADYVFTSIFTLEIILKMTAYGAFLHKGSFCRNYFNILDLLVVSVSLISFGIQSSAINVVKILRVLRVLRPLRAINRAKGLKHVVQCVFVAIRTIGNIVIVTTLLQFMFACIGVQLFKGKLYTCSDSSKQTEAECKGNYITYKDGEVDHPIIQPRSWENSKFDFDNVLAAMMALFTVSTFEGWPELLYRSIDSHTEDKGPIYNYRVEISIFFIIYIIIIAFFMMNIFVGFVIVTFQEQGEQEYKNCELDKNQRQCVEYALKARPLRRYIPKNQHQYKVWYVVNSTYFEYLMFVLILLNTICLAMQHYGQSCLFKIAMNILNMLFTGLFTVEMILKLIAFKPKHYFCDAWNTFDALIVVGSIVDIAITEVNPAEHTQCSPSMNAEENSRISITFFRLFRVMRLVKLLSRGEGIRTLLWTFIKSFQALPYVALLIVMLFFIYAVIGMQVFGKIALNDTTEINRNNNFQTFPQAVLLLFRCATGEAWQDIMLACMPGKKCAPESEPSNSTEGETPCGSSFAVFYFISFYMLCAFLIINLFVAVIMDNFDYLTRDWSILGPHHLDEFKRIWAEYDPEAKGRIKHLDVVTLLRRIQPPLGFGKLCPHRVACKRLVSMNMPLNSDGTVMFNATLFALVRTALRIKTEEGPSPSEAHQGAEDPFRPAGNLEQANEELRAIIKKIWKRTSMKLLDQVVPPAGDDEVTVGKFYATFLIQEYFRKFKKRKEQGLVGKPSQRNALSLQAGLRTLHDIGPEIRRAISGDLTAEEELDKAMKEAVSAASEDDIFRRAGGLFGNHVSYYQSDGRSAFPQTFTTQRPLHINKAGSSQGDTESPSHEKLVDSTFTPSSYSSTGSNANINNANNTALGRLPRPAGYPSTVSTVEGHGPPLSPAIRVQEVAWKLSSNRCHSRESQAAMAGQEETSQDETYEVKMNHDTEACSEPSLLSTEMLSYQDDENRQLTLPEEDKRDIRQSPKRGFLRSASLGRRASFHLECLKRQKDRGGDISQKTVLPLHLVHHQALAVAGLSPLLQRSHSPASFPRPFATPPATPGSRGWPPQPVPTLRLEGVESSEKLNSSFPSIHCGSWAETTPGGGGSSAARRVRPVSLMVPSQAGAPGRQFHGSASSLVEAVLISEGLGQFAQDPKFIEVTTQELADACDMTIEEMESAADNILSGGAPQSPNGALLPFVNCRDAGQDRAGGEEDAGCVRARGRPSEEELQDSRVYVSSL

SEQ ID NO: 39632 - protein, 2166 aa, Homo sapiens
MVNENTRMYIPEENHQGSNYGSPRPAHANMNANAAAGLAPEHIPTPGAALSWQAAIDAARQAKLMGSAGNATISTVSSTQRKRQQYGKPKKQGSTTATRPPRALLCLTLKNPIRRACISIVEWKPFEIIILLTIFANCVALAIYIPFPEDDSNATNSNLERVEYLFLIIFTVEAFLKVIAYGLLFHPNAYLRNGWNLLDFIIVVVGLFSAILEQATKADGANALGGKGAGFDVKALRAFRVLRPLRLVSGVPSLQVVLNSIIKAMVPLLHIALLVLFVIIIYAIIGLELFMGKMHKTCYNQEGIADVPAEDDPSPCALETGHGRQCQNGTVCKPGWDGPKHGITNFDNFAFAMLTVFQCITMEGWTDVLYWVNDAVGRDWPWIYFVTLIIIGSFFVLNLVLGVLSGEFSKEREKAKARGDFQKLREKQQLEEDLKGYLDWITQAEDIDPENEDEGMDEEKPRNMSMPTSETESVNTENVAGGDIEGENCGARLAHRISKSKFSRYWRRWNRFCRRKCRAAVKSNVFYWLVIFLVFLNTLTIASEHYNQPNWLTEVQDTANKALLALFTAEMLLKMYSLGLQAYFVSLFNRFDCFVVCGGILETILVETKIMSPLGISVLRCVRLLRIFKITRYWNSLSNLVASLLNSVRSIASLLLLLFLFIIIFSLLGMQLFGGKFNFDEMQTRRSTFDNFPQSLLTVFQILTGEDWNSVMYDGIMAYGGPSFPGMLVCIYFIILFICGNYILLNVFLAIAVDNLADAESLTSAQKEEEEEKERKKLARTASPEKKQELVEKPAVGESKEEKIELKSITADGESPPATKINMDDLQPNENEDKSPYPNPETTGEEDEEEPEMPVGPRPRPLSELHLKEKAVPMPEASAFFIFSSNNRFRLQCHRIVNDTIFTNLILFFILLSSISLAAEDPVQHTSFRNHILFYFDIVFTTIFTIEIALKMTAYGAFLHKGSFCRNYFNILDLLVVSVSLISFGIQSSAINVVKILRVLRVLRPLRAINRAKGLKHVVQCVFVAIRTIGNIVIVTTLLQFMFACIGVQLFKGKLYTCSDSSKQTEAECKGNYITYKDGEVDHPIIQPRSWENSKFDFDNVLAAMMALFTVSTFEGWPELLYRSIDSHTEDKGPIYNYRVEISIFFIIYIIIIAFFMMNIFVGFVIVTFQEQGEQEYKNCELDKNQRQCVEYALKARPLRRYIPKNQHQYKVWYVVNSTYFEYLMFVLILLNTICLAMQHYGQSCLFKIAMNILNMLFTGLFTVEMILKLIAFKPKGYFSDPWNVFDFLIVIGSIIDVILSETNHYFCDAWNTFDALIVVGSIVDIAITEVNPAEHTQCSPSMNAEENSRISITFFRLFRVMRLVKLLSRGEGIRTLLWTFIKSFQALPYVALLIVMLFFIYAVIGMQVFGKIALNDTTEINRNNNFQTFPQAVLLLFRCATGEAWQDIMLACMPGKKCAPESEPSNSTEGETPCGSSFAVFYFISFYMLCAFLIINLFVAVIMDNFDYLTRDWSILGPHHLDEFKRIWAEYDPEAKGRIKHLDVVTLLRRIQPPLGFGKLCPHRVACKRLVSMNMPLNSDGTVMFNATLFALVRTALRIKTEGNLEQANEELRAIIKKIWKRTSMKLLDQVVPPAGDDEVTVGKFYATFLIQEYFRKFKKRKEQGLVGKPSQRNALSLQAGLRTLHDIGPEIRRAISGDLTAEEELDKAMKEAVSAASEDDIFRRAGGLFGNHVSYYQSDGRSAFPQTFTTQRPLHINKAGSSQGDTESPSHEKLVDSTFTPSSYSSTGSNANINNANNTALGRLPRPAGYPSTVSTVEGHGPPLSPAIRVQEVAWKLSSNRCHSRESQAAMAGQEETSQDETYEVKMNHDTEACSEPSLLSTEMLSYQDDENRQLTLPEEDKRDIRQSPKRGFLRSASLGRRASFHLECLKRQKDRGGDISQKTVLPLHLVHHQALAVAGLSPLLQRSHSPASFPRPFATPPATPGSRGWPPQPVPTLRLEGVESSEKLNSSFPSIHCGSWAETTPGGGGSSAARRVRPVSLMVPSQAGAPGRQFHGSASSLVEAVLISEGLGQFAQDPKFIEVTTQELADACDMTIEEMESAADNILSGGAPQSPNGALLPFVNCRDAGQDRAGGEEDAGCVRARGRPSEEELQDSRVYVSSL

SEQ ID NO: 39633 - protein, 2138 aa, Homo sapiens
MVNENTRMYIPEENHQGSNYGSPRPAHANMNANAAAGLAPEHIPTPGAALSWQAAIDAARQAKLMGSAGNATISTVSSTQRKRQQYGKPKKQGSTTATRPPRALLCLTLKNPIRRACISIVEWKPFEIIILLTIFANCVALAIYIPFPEDDSNATNSNLERVEYLFLIIFTVEAFLKVIAYGLLFHPNAYLRNGWNLLDFIIVVVGLFSAILEQATKADGANALGGKGAGFDVKALRAFRVLRPLRLVSGVPSLQVVLNSIIKAMVPLLHIALLVLFVIIIYAIIGLELFMGKMHKTCYNQEGIADVPAEDDPSPCALETGHGRQCQNGTVCKPGWDGPKHGITNFDNFAFAMLTVFQCITMEGWTDVLYWMQDAMGYELPWVYFVSLVIFGSFFVLNLVLGVLSGEFSKEREKAKARGDFQKLREKQQLEEDLKGYLDWITQAEDIDPENEDEGMDEEKPRNMSMPTSETESVNTENVAGGDIEGENCGARLAHRISKSKFSRYWRRWNRFCRRKCRAAVKSNVFYWLVIFLVFLNTLTIASEHYNQPNWLTEVQDTANKALLALFTAEMLLKMYSLGLQAYFVSLFNRFDCFVVCGGILETILVETKIMSPLGISVLRCVRLLRIFKITRYWNSLSNLVASLLNSVRSIASLLLLLFLFIIIFSLLGMQLFGGKFNFDEMQTRRSTFDNFPQSLLTVFQILTGEDWNSVMYDGIMAYGGPSFPGMLVCIYFIILFICGNYILLNVFLAIAVDNLADAESLTSAQKEEEEEKERKKLARTASPEKKQELVEKPAVGESKEEKIELKSITADGESPPATKINMDDLQPNENEDKSPYPNPETTGEEDEEEPEMPVGPRPRPLSELHLKEKAVPMPEASAFFIFSSNNRFRLQCHRIVNDTIFTNLILFFILLSSISLAAEDPVQHTSFRNHILGNADYVFTSIFTLEIILKMTAYGAFLHKGSFCRNYFNILDLLVVSVSLISFGIQSSAINVVKILRVLRVLRPLRAINRAKGLKHVVQCVFVAIRTIGNIVIVTTLLQFMFACIGVQLFKGKLYTCSDSSKQTEAECKGNYITYKDGEVDHPIIQPRSWENSKFDFDNVLAAMMALFTVSTFEGWPELLYRSIDSHTEDKGPIYNYRVEISIFFIIYIIIIAFFMMNIFVGFVIVTFQEQGEQEYKNCELDKNQRQCVEYALKARPLRRYIPKNQHQYKVWYVVNSTYFEYLMFVLILLNTICLAMQHYGQSCLFKIAMNILNMLFTGLFTVEMILKLIAFKPKHYFCDAWNTFDALIVVGSIVDIAITEVNPAEHTQCSPSMNAEENSRISITFFRLFRVMRLVKLLSRGEGIRTLLWTFIKSFQALPYVALLIVMLFFIYAVIGMQVFGKIALNDTTEINRNNNFQTFPQAVLLLFRCATGEAWQDIMLACMPGKKCAPESEPSNSTEGETPCGSSFAVFYFISFYMLCAFLIINLFVAVIMDNFDYLTRDWSILGPHHLDEFKRIWAEYDPEAKGRIKHLDVVTLLRRIQPPLGFGKLCPHRVACKRLVSMNMPLNSDGTVMFNATLFALVRTALRIKTEGNLEQANEELRAIIKKIWKRTSMKLLDQVVPPAGDDEVTVGKFYATFLIQEYFRKFKKRKEQGLVGKPSQRNALSLQAGLRTLHDIGPEIRRAISGDLTAEEELDKAMKEAVSAASEDDIFRRAGGLFGNHVSYYQSDGRSAFPQTFTTQRPLHINKAGSSQGDTESPSHEKLVDSTFTPSSYSSTGSNANINNANNTALGRLPRPAGYPSTVSTVEGHGPPLSPAIRVQEVAWKLSSNRCHSRESQAAMAGQEETSQDETYEVKMNHDTEACSEPSLLSTEMLSYQDDENRQLTLPEEDKRDIRQSPKRGFLRSASLGRRASFHLECLKRQKDRGGDISQKTVLPLHLVHHQALAVAGLSPLLQRSHSPASFPRPFATPPATPGSRGWPPQPVPTLRLEGVESSEKLNSSFPSIHCGSWAETTPGGGGSSAARRVRPVSLMVPSQAGAPGRQFHGSASSLVEAVLISEGLGQFAQDPKFIEVTTQELADACDMTIEEMESAADNILSGGAPQSPNGALLPFVNCRDAGQDRAGGEEDAGCVRARGRPSEEELQDSRVYVSSL

SEQ ID NO: 39634 - protein, 2138 aa, Homo sapiens
MVNENTRMYIPEENHQGSNYGSPRPAHANMNANAAAGLAPEHIPTPGAALSWQAAIDAARQAKLMGSAGNATISTVSSTQRKRQQYGKPKKQGSTTATRPPRALLCLTLKNPIRRACISIVEWKPFEIIILLTIFANCVALAIYIPFPEDDSNATNSNLERVEYLFLIIFTVEAFLKVIAYGLLFHPNAYLRNGWNLLDFIIVVVGLFSAILEQATKADGANALGGKGAGFDVKALRAFRVLRPLRLVSGVPSLQVVLNSIIKAMVPLLHIALLVLFVIIIYAIIGLELFMGKMHKTCYNQEGIADVPAEDDPSPCALETGHGRQCQNGTVCKPGWDGPKHGITNFDNFAFAMLTVFQCITMEGWTDVLYWVNDAVGRDWPWIYFVTLIIIGSFFVLNLVLGVLSGEFSKEREKAKARGDFQKLREKQQLEEDLKGYLDWITQAEDIDPENEDEGMDEEKPRNMSMPTSETESVNTENVAGGDIEGENCGARLAHRISKSKFSRYWRRWNRFCRRKCRAAVKSNVFYWLVIFLVFLNTLTIASEHYNQPNWLTEVQDTANKALLALFTAEMLLKMYSLGLQAYFVSLFNRFDCFVVCGGILETILVETKIMSPLGISVLRCVRLLRIFKITRYWNSLSNLVASLLNSVRSIASLLLLLFLFIIIFSLLGMQLFGGKFNFDEMQTRRSTFDNFPQSLLTVFQILTGEDWNSVMYDGIMAYGGPSFPGMLVCIYFIILFICGNYILLNVFLAIAVDNLADAESLTSAQKEEEEEKERKKLARTASPEKKQELVEKPAVGESKEEKIELKSITADGESPPATKINMDDLQPNENEDKSPYPNPETTGEEDEEEPEMPVGPRPRPLSELHLKEKAVPMPEASAFFIFSSNNRFRLQCHRIVNDTIFTNLILFFILLSSISLAAEDPVQHTSFRNHILGNADYVFTSIFTLEIILKMTAYGAFLHKGSFCRNYFNILDLLVVSVSLISFGIQSSAINVVKILRVLRVLRPLRAINRAKGLKHVVQCVFVAIRTIGNIVIVTTLLQFMFACIGVQLFKGKLYTCSDSSKQTEAECKGNYITYKDGEVDHPIIQPRSWENSKFDFDNVLAAMMALFTVSTFEGWPELLYRSIDSHTEDKGPIYNYRVEISIFFIIYIIIIAFFMMNIFVGFVIVTFQEQGEQEYKNCELDKNQRQCVEYALKARPLRRYIPKNQHQYKVWYVVNSTYFEYLMFVLILLNTICLAMQHYGQSCLFKIAMNILNMLFTGLFTVEMILKLIAFKPKGYFSDPWNVFDFLIVIGSIIDVILSETNPAEHTQCSPSMNAEENSRISITFFRLFRVMRLVKLLSRGEGIRTLLWTFIKSFQALPYVALLIVMLFFIYAVIGMQVFGKIALNDTTEINRNNNFQTFPQAVLLLFRCATGEAWQDIMLACMPGKKCAPESEPSNSTEGETPCGSSFAVFYFISFYMLCAFLIINLFVAVIMDNFDYLTRDWSILGPHHLDEFKRIWAEYDPEAKGRIKHLDVVTLLRRIQPPLGFGKLCPHRVACKRLVSMNMPLNSDGTVMFNATLFALVRTALRIKTEGNLEQANEELRAIIKKIWKRTSMKLLDQVVPPAGDDEVTVGKFYATFLIQEYFRKFKKRKEQGLVGKPSQRNALSLQAGLRTLHDIGPEIRRAISGDLTAEEELDKAMKEAVSAASEDDIFRRAGGLFGNHVSYYQSDGRSAFPQTFTTQRPLHINKAGSSQGDTESPSHEKLVDSTFTPSSYSSTGSNANINNANNTALGRLPRPAGYPSTVSTVEGHGPPLSPAIRVQEVAWKLSSNRCHSRESQAAMAGQEETSQDETYEVKMNHDTEACSEPSLLSTEMLSYQDDENRQLTLPEEDKRDIRQSPKRGFLRSASLGRRASFHLECLKRQKDRGGDISQKTVLPLHLVHHQALAVAGLSPLLQRSHSPASFPRPFATPPATPGSRGWPPQPVPTLRLEGVESSEKLNSSFPSIHCGSWAETTPGGGGSSAARRVRPVSLMVPSQAGAPGRQFHGSASSLVEAVLISEGLGQFAQDPKFIEVTTQELADACDMTIEEMESAADNILSGGAPQSPNGALLPFVNCRDAGQDRAGGEEDAGCVRARGRPSEEELQDSRVYVSSL

SEQ ID NO: 39635 - protein, 2144 aa, Homo sapiens
MVNENTRMYIPEENHQGSNYGSPRPAHANMNANAAAGLAPEHIPTPGAALSWQAAIDAARQAKLMGSAGNATISTVSSTQRKRQQYGKPKKQGSTTATRPPRALLCLTLKNPIRRACISIVEWKPFEIIILLTIFANCVALAIYIPFPEDDSNATNSNLERVEYLFLIIFTVEAFLKVIAYGLLFHPNAYLRNGWNLLDFIIVVVGLFSAILEQATKADGANALGGKGAGFDVKALRAFRVLRPLRLVSGVPSLQVVLNSIIKAMVPLLHIALLVLFVIIIYAIIGLELFMGKMHKTCYNQEGIADVPAEDDPSPCALETGHGRQCQNGTVCKPGWDGPKHGITNFDNFAFAMLTVFQCITMEGWTDVLYWVNDAVGRDWPWIYFVTLIIIGSFFVLNLVLGVLSGEFSKEREKAKARGDFQKLREKQQLEEDLKGYLDWITQAEDIDPENEDEGMDEEKPRNMSMPTSETESVNTENVAGGDIEGENCGARLAHRISKSKFSRYWRRWNRFCRRKCRAAVKSNVFYWLVIFLVFLNTLTIASEHYNQPNWLTEVQDTANKALLALFTAEMLLKMYSLGLQAYFVSLFNRFDCFVVCGGILETILVETKIMSPLGISVLRCVRLLRIFKITRYWNSLSNLVASLLNSVRSIASLLLLLFLFIIIFSLLGMQLFGGKFNFDEMQTRRSTFDNFPQSLLTVFQILTGEDWNSVMYDGIMAYGGPSFPGMLVCIYFIILFICGNYILLNVFLAIAVDNLADAESLTSAQKEEEEEKERKKLARTASPEKKQELVEKPAVGESKEEKIELKSITADGESPPATKINMDDLQPNENEDKSPYPNPETTGEEDEEEPEMPVGPRPRPLSELHLKEKAVPMPEASAFFIFSSNNRFRLQCHRIVNDTIFTNLILFFILLSSISLAAEDPVQHTSFRNHILFYFDIVFTTIFTIEIALKMTAYGAFLHKGSFCRNYFNILDLLVVSVSLISFGIQSSAINVVKILRVLRVLRPLRAINRAKGLKHVVQCVFVAIRTIGNIVIVTTLLQFMFACIGVQLFKGKLYTCSDSSKQTEAECKGNYITYKDGEVDHPIIQPRSWENSKFDFDNVLAAMMALFTVSTFEGWPELLYRSIDSHTEDKGPIYNYRVEISIFFIIYIIIIAFFMMNIFVGFVIVTFQEQGEQEYKNCELDKNQRQCVEYALKARPLRRYIPKNQHQYKVWYVVNSTYFEYLMFVLILLNTICLAMQHYGQSCLFKIAMNILNMLFTGLFTVEMILKLIAFKPKHYFCDAWNTFDALIVVGSIVDIAITENAEENSRISITFFRLFRVMRLVKLLSRGEGIRTLLWTFIKSFQALPYVALLIVMLFFIYAVIGMQVFGKIALNDTTEINRNNNFQTFPQAVLLLFRCATGEAWQDIMLACMPGKKCAPESEPSNSTEGETPCGSSFAVFYFISFYMLCAFLIINLFVAVIMDNFDYLTRDWSILGPHHLDEFKRIWAEYDPEAKGRIKHLDVVTLLRRIQPPLGFGKLCPHRVACKRLVSMNMPLNSDGTVMFNATLFALVRTALRIKTEEGPSPSEAHQGAEDPFRPAGNLEQANEELRAIIKKIWKRTSMKLLDQVVPPAGDDEVTVGKFYATFLIQEYFRKFKKRKEQGLVGKPSQRNALSLQAGLRTLHDIGPEIRRAISGDLTAEEELDKAMKEAVSAASEDDIFRRAGGLFGNHVSYYQSDGRSAFPQTFTTQRPLHINKAGSSQGDTESPSHEKLVDSTFTPSSYSSTGSNANINNANNTALGRLPRPAGYPSTVSTVEGHGPPLSPAIRVQEVAWKLSSNRCHSRESQAAMAGQEETSQDETYEVKMNHDTEACSEPSLLSTEMLSYQDDENRQLTLPEEDKRDIRQSPKRGFLRSASLGRRASFHLECLKRQKDRGGDISQKTVLPLHLVHHQALAVAGLSPLLQRSHSPASFPRPFATPPATPGSRGWPPQPVPTLRLEGVESSEKLNSSFPSIHCGSWAETTPGGGGSSAARRVRPVSLMVPSQAGAPGRQFHGSASSLVEAVLISEGLGQFAQDPKFIEVTTQELADACDMTIEEMESAADNILSGGAPQSPNGALLPFVNCRDAGQDRAGGEEDAGCVRARGRPSEEELQDSRVYVSSL

SEQ ID NO: 39636 - protein, 2138 aa, Homo sapiens
MVNENTRMYIPEENHQGSNYGSPRPAHANMNANAAAGLAPEHIPTPGAALSWQAAIDAARQAKLMGSAGNATISTVSSTQRKRQQYGKPKKQGSTTATRPPRALLCLTLKNPIRRACISIVEWKPFEIIILLTIFANCVALAIYIPFPEDDSNATNSNLERVEYLFLIIFTVEAFLKVIAYGLLFHPNAYLRNGWNLLDFIIVVVGLFSAILEQATKADGANALGGKGAGFDVKALRAFRVLRPLRLVSGVPSLQVVLNSIIKAMVPLLHIALLVLFVIIIYAIIGLELFMGKMHKTCYNQEGIADVPAEDDPSPCALETGHGRQCQNGTVCKPGWDGPKHGITNFDNFAFAMLTVFQCITMEGWTDVLYWVNDAVGRDWPWIYFVTLIIIGSFFVLNLVLGVLSGEFSKEREKAKARGDFQKLREKQQLEEDLKGYLDWITQAEDIDPENEDEGMDEEKPRNMSMPTSETESVNTENVAGGDIEGENCGARLAHRISKSKFSRYWRRWNRFCRRKCRAAVKSNVFYWLVIFLVFLNTLTIASEHYNQPNWLTEVQDTANKALLALFTAEMLLKMYSLGLQAYFVSLFNRFDCFVVCGGILETILVETKIMSPLGISVLRCVRLLRIFKITRYWNSLSNLVASLLNSVRSIASLLLLLFLFIIIFSLLGMQLFGGKFNFDEMQTRRSTFDNFPQSLLTVFQILTGEDWNSVMYDGIMAYGGPSFPGMLVCIYFIILFICGNYILLNVFLAIAVDNLADAESLTSAQKEEEEEKERKKLARTASPEKKQELVEKPAVGESKEEKIELKSITADGESPPATKINMDDLQPNENEDKSPYPNPETTGEEDEEEPEMPVGPRPRPLSELHLKEKAVPMPEASAFFIFSSNNRFRLQCHRIVNDTIFTNLILFFILLSSISLAAEDPVQHTSFRNHILFYFDIVFTTIFTIEIALKMTAYGAFLHKGSFCRNYFNILDLLVVSVSLISFGIQSSAINVVKILRVLRVLRPLRAINRAKGLKHVVQCVFVAIRTIGNIVIVTTLLQFMFACIGVQLFKGKLYTCSDSSKQTEAECKGNYITYKDGEVDHPIIQPRSWENSKFDFDNVLAAMMALFTVSTFEGWPELLYRSIDSHTEDKGPIYNYRVEISIFFIIYIIIIAFFMMNIFVGFVIVTFQEQGEQEYKNCELDKNQRQCVEYALKARPLRRYIPKNQHQYKVWYVVNSTYFEYLMFVLILLNTICLAMQHYGQSCLFKIAMNILNMLFTGLFTVEMILKLIAFKPKHYFCDAWNTFDALIVVGSIVDIAITEVNPAEHTQCSPSMNAEENSRISITFFRLFRVMRLVKLLSRGEGIRTLLWTFIKSFQALPYVALLIVMLFFIYAVIGMQVFGKIALNDTTEINRNNNFQTFPQAVLLLFRCATGEAWQDIMLACMPGKKCAPESEPSNSTEGETPCGSSFAVFYFISFYMLCAFLIINLFVAVIMDNFDYLTRDWSILGPHHLDEFKRIWAEYDPEAKGRIKHLDVVTLLRRIQPPLGFGKLCPHRVACKRLVSMNMPLNSDGTVMFNATLFALVRTALRIKTEGNLEQANEELRAIIKKIWKRTSMKLLDQVVPPAGDDEVTVGKFYATFLIQEYFRKFKKRKEQGLVGKPSQRNALSLQAGLRTLHDIGPEIRRAISGDLTAEEELDKAMKEAVSAASEDDIFRRAGGLFGNHVSYYQSDGRSAFPQTFTTQRPLHINKAGSSQGDTESPSHEKLVDSTFTPSSYSSTGSNANINNANNTALGRLPRPAGYPSTVSTVEGHGPPLSPAIRVQEVAWKLSSNRCHSRESQAAMAGQEETSQDETYEVKMNHDTEACSEPSLLSTEMLSYQDDENRQLTLPEEDKRDIRQSPKRGFLRSASLGRRASFHLECLKRQKDRGGDISQKTVLPLHLVHHQALAVAGLSPLLQRSHSPASFPRPFATPPATPGSRGWPPQPVPTLRLEGVESSEKLNSSFPSIHCGSWAETTPGGGGSSAARRVRPVSLMVPSQAGAPGRQFHGSASSLVEAVLISEGLGQFAQDPKFIEVTTQELADACDMTIEEMESAADNILSGGAPQSPNGALLPFVNCRDAGQDRAGGEEDAGCVRARGRPSEEELQDSRVYVSSL

SEQ ID NO: 39637 - protein, 2157 aa, Homo sapiens
MVNENTRMYIPEENHQGSNYGSPRPAHANMNANAAAGLAPEHIPTPGAALSWQAAIDAARQAKLMGSAGNATISTVSSTQRKRQQYGKPKKQGSTTATRPPRALLCLTLKNPIRRACISIVEWKPFEIIILLTIFANCVALAIYIPFPEDDSNATNSNLERVEYLFLIIFTVEAFLKVIAYGLLFHPNAYLRNGWNLLDFIIVVVGLFSAILEQATKADGANALGGKGAGFDVKALRAFRVLRPLRLVSGVPSLQVVLNSIIKAMVPLLHIALLVLFVIIIYAIIGLELFMGKMHKTCYNQEGIADVPAEDDPSPCALETGHGRQCQNGTVCKPGWDGPKHGITNFDNFAFAMLTVFQCITMEGWTDVLYWVNDAVGRDWPWIYFVTLIIIGSFFVLNLVLGVLSGEFSKEREKAKARGDFQKLREKQQLEEDLKGYLDWITQAEDIDPENEDEGMDEEKPRNMSMPTSETESVNTENVAGGDIEGENCGARLAHRISKSKFSRYWRRWNRFCRRKCRAAVKSNVFYWLVIFLVFLNTLTIASEHYNQPNWLTEVQDTANKALLALFTAEMLLKMYSLGLQAYFVSLFNRFDCFVVCGGILETILVETKIMSPLGISVLRCVRLLRIFKITRYWNSLSNLVASLLNSVRSIASLLLLLFLFIIIFSLLGMQLFGGKFNFDEMQTRRSTFDNFPQSLLTVFQILTGEDWNSVMYDGIMAYGGPSFPGMLVCIYFIILFICGNYILLNVFLAIAVDNLADAESLTSAQKEEEEEKERKKLARTASPEKKQELVEKPAVGESKEEKIELKSITADGESPPATKINMDDLQPNENEDKSPYPNPETTGEEDEEEPEMPVGPRPRPLSELHLKEKAVPMPEASAFFIFSSNNRFRLQCHRIVNDTIFTNLILFFILLSSISLAAEDPVQHTSFRNHILFYFDIVFTTIFTIEIALKMTAYGAFLHKGSFCRNYFNILDLLVVSVSLISFGIQSSAINVVKILRVLRVLRPLRAINRAKGLKHVVQCVFVAIRTIGNIVIVTTLLQFMFACIGVQLFKGKLYTCSDSSKQTEAECKGNYITYKDGEVDHPIIQPRSWENSKFDFDNVLAAMMALFTVSTFEGWPELLYRSIDSHTEDKGPIYNYRVEISIFFIIYIIIIAFFMMNIFVGFVIVTFQEQGEQEYKNCELDKNQRQCVEYALKARPLRRYIPKNQHQYKVWYVVNSTYFEYLMFVLILLNTICLAMQHYGQSCLFKIAMNILNMLFTGLFTVEMILKLIAFKPKGYFSDPWNVFDFLIVIGSIIDVILSETNPAEHTQCSPSMNAEENSRISITFFRLFRVMRLVKLLSRGEGIRTLLWTFIKSFQALPYVALLIVMLFFIYAVIGMQVFGKIALNDTTEINRNNNFQTFPQAVLLLFRCATGEAWQDIMLACMPGKKCAPESEPSNSTEGETPCGSSFAVFYFISFYMLCAFLIINLFVAVIMDNFDYLTRDWSILGPHHLDEFKRIWAEYDPEAKGRIKHLDVVTLLRRIQPPLGFGKLCPHRVACKRLVSMNMPLNSDGTVMFNATLFALVRTALRIKTEEGPSPSEAHQGAEDPFRPAGNLEQANEELRAIIKKIWKRTSMKLLDQVVPPAGDDEVTVGKFYATFLIQEYFRKFKKRKEQGLVGKPSQRNALSLQAGLRTLHDIGPEIRRAISGDLTAEEELDKAMKEAVSAASEDDIFRRAGGLFGNHVSYYQSDGRSAFPQTFTTQRPLHINKAGSSQGDTESPSHEKLVDSTFTPSSYSSTGSNANINNANNTALGRLPRPAGYPSTVSTVEGHGPPLSPAIRVQEVAWKLSSNRCHSRESQAAMAGQEETSQDETYEVKMNHDTEACSEPSLLSTEMLSYQDDENRQLTLPEEDKRDIRQSPKRGFLRSASLGRRASFHLECLKRQKDRGGDISQKTVLPLHLVHHQALAVAGLSPLLQRSHSPASFPRPFATPPATPGSRGWPPQPVPTLRLEGVESSEKLNSSFPSIHCGSWAETTPGGGGSSAARRVRPVSLMVPSQAGAPGRQFHGSASSLVEAVLISEGLGQFAQDPKFIEVTTQELADACDMTIEEMESAADNILSGGAPQSPNGALLPFVNCRDAGQDRAGGEEDAGCVRARGRPSEEELQDSRVYVSSL

SEQ ID NO: 39638 - protein, 2209 aa, Homo sapiens
MVNENTRMYIPEENHQGSNYGSPRPAHANMNANAAAGLAPEHIPTPGAALSWQAAIDAARQAKLMGSAGNATISTVSSTQRKRQQYGKPKKQGSTTATRPPRALLCLTLKNPIRRACISIVEWKPFEIIILLTIFANCVALAIYIPFPEDDSNATNSNLERVEYLFLIIFTVEAFLKVIAYGLLFHPNAYLRNGWNLLDFIIVVVGLFSAILEQATKADGANALGGKGAGFDVKALRAFRVLRPLRLVSGVPSLQVVLNSIIKAMVPLLHIALLVLFVIIIYAIIGLELFMGKMHKTCYNQEGIADVPAEDDPSPCALETGHGRQCQNGTVCKPGWDGPKHGITNFDNFAFAMLTVFQCITMEGWTDVLYWMQDAMGYELPWVYFVSLVIFGSFFVLNLVLGVLSGEFSKEREKAKARGDFQKLREKQQLEEDLKGYLDWITQAEDIDPENEDEGMDEEKPRNMSMPTSETESVNTENVAGGDIEGENCGARLAHRISKSKFSRYWRRWNRFCRRKCRAAVKSNVFYWLVIFLVFLNTLTIASEHYNQPNWLTEVQDTANKALLALFTAEMLLKMYSLGLQAYFVSLFNRFDCFVVCGGILETILVETKIMSPLGISVLRCVRLLRIFKITRYWNSLSNLVASLLNSVRSIASLLLLLFLFIIIFSLLGMQLFGGKFNFDEMQTRRSTFDNFPQSLLTVFQILTGEDWNSVMYDGIMAYGGPSFPGMLVCIYFIILFICGNYILLNVFLAIAVDNLADAESLTSAQKEEEEEKERKKLARTASPEKKQELVEKPAVGESKEEKIELKSITADGESPPATKINMDDLQPNENEDKSPYPNPETTGEEDEEEPEMPVGPRPRPLSELHLKEKAVPMPEASAFFIFSSNNRFRLQCHRIVNDTIFTNLILFFILLSSISLAAEDPVQHTSFRNHILFYFDIVFTTIFTIEIALKMTAYGAFLHKGSFCRNYFNILDLLVVSVSLISFGIQSSAINVVKILRVLRVLRPLRAINRAKGLKHVVQCVFVAIRTIGNIVIVTTLLQFMFACIGVQLFKGKLYTCSDSSKQTEAECKGNYITYKDGEVDHPIIQPRSWENSKFDFDNVLAAMMALFTVSTFEGWPELLYRSIDSHTEDKGPIYNYRVEISIFFIIYIIIIAFFMMNIFVGFVIVTFQEQGEQEYKNCELDKNQRQCVEYALKARPLRRYIPKNQHQYKVWYVVNSTYFEYLMFVLILLNTICLAMQHYGQSCLFKIAMNILNMLFTGLFTVEMILKLIAFKPKGYFSDPWNVFDFLIVIGSIIDVILSETNPAEHTQCSPSMNAEENSRISITFFRLFRVMRLVKLLSRGEGIRTLLWTFIKSFQALPYVALLIVMLFFIYAVIGMQVFGKIALNDTTEINRNNNFQTFPQAVLLLFRCATGEAWQDIMLACMPGKKCAPESEPSNSTEGETPCGSSFAVFYFISFYMLCAFLIINLFVAVIMDNFDYLTRDWSILGPHHLDEFKRIWAEYDPEAKGRIKHLDVVTLLRRIQPPLGFGKLCPHRVACKRLVSMNMPLNSDGTVMFNATLFALVRTALRIKTEGNLEQANEELRAIIKKIWKRTSMKLLDQVVPPAGDDEVTVGKFYATFLIQEYFRKFKKRKEQGLVGKPSQRNALSLQAGLRTLHDIGPEIRRAISGDLTAEEELDKAMKEAVSAASEDDIFRRAGGLFGNHVSYYQSDGRSAFPQTFTTQRPLHINKAGSSQGDTESPSHEKLVDSTFTPSSYSSTGSNANINNANNTALGRLPRPAGYPSTVSTVEGHGPPLSPAIRVQEVAWKLSSNRMHCCDMLDGGTFPPALGPRRAPPCLHQQLQGSLAGLREDTPCIVPGHASLCCSSRVGEWLPAGCTAPQHARCHSRESQAAMAGQEETSQDETYEVKMNHDTEACSEPSLLSTEMLSYQDDENRQLTLPEEDKRDIRQSPKRGFLRSASLGRRASFHLECLKRQKDRGGDISQKTVLPLHLVHHQALAVAGLSPLLQRSHSPASFPRPFATPPATPGSRGWPPQPVPTLRLEGVESSEKLNSSFPSIHCGSWAETTPGGGGSSAARRVRPVSLMVPSQAGAPGRQFHGSASSLVEAVLISEGLGQFAQDPKFIEVTTQELADACDMTIEEMESAADNILSGGAPQSPNGALLPFVNCRDAGQDRAGGEEDAGCVRARGRPSEEELQDSRVYVSSL

SEQ ID NO: 39639 - protein, 1279 aa, Homo sapiens
MVNENTRMYIPEENHQGSNYGSPRPAHANMNANAAAGLAPEHIPTPGAALSWQAAIDAARQAKLMGSAGNATISTVSSTQRKRQQYGKPKKQGSTTATRPPRALLCLTLKNPIRRACISIVEWKPFEIIILLTIFANCVALAIYIPFPEDDSNATNSNLERVEYLFLIIFTVEAFLKVIAYGLLFHPNAYLRNGWNLLDFIIVVVGLFSAILEQATKADGANALGGKGAGFDVKALRAFRVLRPLRLVSGVPSLQVVLNSIIKAMVPLLHIALLVLFVIIIYAIIGLELFMGKMHKTCYNQEGIADVPAEDDPSPCALETGHGRQCQNGTVCKPGWDGPKHGITNFDNFAFAMLTVFQCITMEGWTDVLYWVNDAVGRDWPWIYFVTLIIIGSFFVLNLVLGVLSGEFSKEREKAKARGDFQKLREKQQLEEDLKGYLDWITQAEDIDPENEDEGMDEEKPRNMSMPTSETESVNTENVAGGDIEGENCGARLAHRISKSKFSRYWRRWNRFCRRKCRAAVKSNVFYWLVIFLVFLNTLTIASEHYNQPNWLTEVQDTANKALLALFTAEMLLKMYSLGLQAYFVSLFNRFDCFVVCGGILETILVETKIMSPLGISVLRCVRLLRIFKITRYWNSLSNLVASLLNSVRSIASLLLLLFLFIIIFSLLGMQLFGGKFNFDEMQTRRSTFDNFPQSLLTVFQILTGEDWNSVMYDGIMAYGGPSFPGMLVCIYFIILFICGNYILLNVFLAIAVDNLADAESLTSAQKEEEEEKERKKLARTASPEKKQELVEKPAVGESKEEKIELKSITADGESPPATKINMDDLQPNENEDKSPYPNPETTGEEDEEEPEMPVGPRPRPLSELHLKEKAVPMPEASAFFIFSSNNRFRLQCHRIVNDTIFTNLILFFILLSSISLAAEDPVQHTSFRNHILGNADYVFTSIFTLEIILKMTAYGAFLHKGSFCRNYFNILDLLVVSVSLISFGIQSSAINVVKILRVLRVLRPLRAINRAKGLKHVVQCVFVAIRTIGNIVIVTTLLQFMFACIGVQLFKGKLYTCSDSSKQTEAECKGNYITYKDGEVDHPIIQPRSWENSKFDFDNVLAAMMALFTVSTFEGWPELLYRSIDSHTEDKGPIYNYRVEISIFFIIYIIIIAFFMMNIFVGFVIVTFQEQGEQEYKNCELDKNQRQCVEYALKARPLRRYIPKNQHQYKVWYVVNSTYFEYLMFVLILLNTICLAMQHYGQSCLFKIAMNILNMLFTGLFTVEMILKLIAFKPKVGL

SEQ ID NO: 39640 - protein, 2181 aa, Homo sapiens
MMMMMMMKKMQHQRQQQADHANEANYARGTRLPLSGEGPTSQPNSSKQTVLSWQAAIDAARQAKAAQTMSTSAPPPVGSLSQRKRQQYAKSKKQGNSSNSRPARALFCLSLNNPIRRACISIVEWKPFDIFILLAIFANCVALAIYIPFPEDDSNSTNHNLEKVEYAFLIIFTVETFLKIIAYGLLLHPNAYVRNGWNLLDFVIVIVGLFSVILEQLTKETEGGNHSSGKSGGFDVKALRAFRVLRPLRLVSGVPSLQVVLNSIIKAMVPLLHIALLVLFVIIIYAIIGLELFIGKMHKTCFFADSDIVAEEDPAPCAFSGNGRQCTANGTECRSGWVGPNGGITNFDNFAFAMLTVFQCITMEGWTDVLYWVNDAIGWEWPWVYFVSLIILGSFFVLNLVLGVLSGEFSKEREKAKARGDFQKLREKQQLEEDLKGYLDWITQAEDIDPENEEEGGEEGKRNTSMPTSETESVNTENVSGEGENRGCCGSLWCWWRRRGAAKAGPSGCRRWGQAISKSKLSRRWRRWNRFNRRRCRAAVKSVTFYWLVIVLVFLNTLTISSEHYNQPDWLTQIQDIANKVLLALFTCEMLVKMYSLGLQAYFVSLFNRFDCFVVCGGITETILVELEIMSPLGISVFRCVRLLRIFKVTRHWTSLSNLVASLLNSMKSIASLLLLLFLFIIIFSLLGMQLFGGKFNFDETQTKRSTFDNFPQALLTVFQILTGEDWNAVMYDGIMAYGGPSSSGMIVCIYFIILFICGNYILLNVFLAIAVDNLADAESLNTAQKEEAEEKERKKIARKESLENKKNNKPEVNQIANSDNKVTIDDYREEDEDKDPYPPCDVPVGEEEEEEEEDEPEVPAGPRPRRISELNMKEKIAPIPEGSAFFILSKTNPIRVGCHKLINHHIFTNLILVFIMLSSAALAAEDPIRSHSFRNTILGYFDYAFTAIFTVEILLKMTTFGAFLHKGAFCRNYFNLLDMLVVGVSLVSFGIQSSAISVVKILRVLRVLRPLRAINRAKGLKHVVQCVFVAIRTIGNIMIVTTLLQFMFACIGVQLFKGKFYRCTDEAKSNPEECRGLFILYKDGDVDSPVVRERIWQNSDFNFDNVLSAMMALFTVSTFEGWPALLYKAIDSNGENIGPIYNHRVEISIFFIIYIIIVAFFMMNIFVGFVIVTFQEQGEKEYKNCELDKNQRQCVEYALKARPLRRYIPKNPYQYKFWYVVNSSPFEYMMFVLIMLNTLCLAMQHYEQSKMFNDAMDILNMVFTGVFTVEMVLKVIAFKPKGYFSDAWNTFDSLIVIGSIIDVALSEADPTESENVPVPTATPGNSEESNRISITFFRLFRVMRLVKLLSRGEGIRTLLWTFIKSFQALPYVALLIAMLFFIYAVIGMQMFGKVAMRDNNQINRNNNFQTFPQAVLLLFRCATGEAWQEIMLACLPGKLCDPESDYNPGEEYTCGSNFAIVYFISFYMLCAFLIINLFVAVIMDNFDYLTRDWSILGPHHLDEFKRIWSEYDPEAKGRIKHLDVVTLLRRIQPPLGFGKLCPHRVACKRLVAMNMPLNSDGTVMFNATLFALVRTALKIKTEGNLEQANEELRAVIKKIWKKTSMKLLDQVVPPAGDDEVTVGKFYATFLIQDYFRKFKKRKEQGLVGKYPAKNTTIALQAGLRTLHDIGPEIRRAISCDLQDDEPEETKREEEDDVFKRNGALLGNHVNHVNSDRRDSLQQTNTTHRPLHVQRPSIPPASDTEKPLFPPAGNSVCHNHHNHNSIGKQVPTSTNANLNNANMSKAAHGKRPSIGNLEHVSENGHHSSHKHDREPQRRSSVKRTRYYETYIRSDSGDEQLPTICREDPEIHGYFRDPHCLGEQEYFSSEECYEDDSSPTWSRQNYGYYSRYPGRNIDSERPRGYHHPQGFLEDDDSPVCYDSRRSPRRRLLPPTPASHRRSSFNFECLRRQSSQEEVPSSPIFPHRTALPLHLMQQQIMAVAGLDSSKAQKYSPSHSTRSWATPPATPPYRDWTPCYTPLIQVEQSEALDQVNGSLPSLHRSSWYTDEPDISYRTFTPASLTVPSSFRNKNSDKQRSADSLVEAVLISEGLGRYARDPKFVSATKHEIADACDLTIDEMESAASTLLNGNVRPRANGDVGPLSHRQDYELQDFGPGYSDEEPDPGRDEEDLADEMICITTL

SEQ ID NO: 39641 - protein, 2161 aa, Homo sapiens
MMMMMMMKKMQHQRQQQADHANEANYARGTRLPLSGEGPTSQPNSSKQTVLSWQAAIDAARQAKAAQTMSTSAPPPVGSLSQRKRQQYAKSKKQGNSSNSRPARALFCLSLNNPIRRACISIVEWKPFDIFILLAIFANCVALAIYIPFPEDDSNSTNHNLEKVEYAFLIIFTVETFLKIIAYGLLLHPNAYVRNGWNLLDFVIVIVGLFSVILEQLTKETEGGNHSSGKSGGFDVKALRAFRVLRPLRLVSGVPSLQVVLNSIIKAMVPLLHIALLVLFVIIIYAIIGLELFIGKMHKTCFFADSDIVAEEDPAPCAFSGNGRQCTANGTECRSGWVGPNGGITNFDNFAFAMLTVFQCITMEGWTDVLYWMNDAMGFELPWVYFVSLVIFGSFFVLNLVLGVLSGEFSKEREKAKARGDFQKLREKQQLEEDLKGYLDWITQAEDIDPENEEEGGEEGKRNTSMPTSETESVNTENVSGEGENRGCCGSLCQAISKSKLSRRWRRWNRFNRRRCRAAVKSVTFYWLVIVLVFLNTLTISSEHYNQPDWLTQIQDIANKVLLALFTCEMLVKMYSLGLQAYFVSLFNRFDCFVVCGGITETILVELEIMSPLGISVFRCVRLLRIFKVTRHWTSLSNLVASLLNSMKSIASLLLLLFLFIIIFSLLGMQLFGGKFNFDETQTKRSTFDNFPQALLTVFQILTGEDWNAVMYDGIMAYGGPSSSGMIVCIYFIILFICGNYILLNVFLAIAVDNLADAESLNTAQKEEAEEKERKKIARKESLENKKNNKPEVNQIANSDNKVTIDDYREEDEDKDPYPPCDVPVGEEEEEEEEDEPEVPAGPRPRRISELNMKEKIAPIPEGSAFFILSKTNPIRVGCHKLINHHIFTNLILVFIMLSSAALAAEDPIRSHSFRNTILGYFDYAFTAIFTVEILLKMTTFGAFLHKGAFCRNYFNLLDMLVVGVSLVSFGIQSSAISVVKILRVLRVLRPLRAINRAKGLKHVVQCVFVAIRTIGNIMIVTTLLQFMFACIGVQLFKGKFYRCTDEAKSNPEECRGLFILYKDGDVDSPVVRERIWQNSDFNFDNVLSAMMALFTVSTFEGWPALLYKAIDSNGENIGPIYNHRVEISIFFIIYIIIVAFFMMNIFVGFVIVTFQEQGEKEYKNCELDKNQRQCVEYALKARPLRRYIPKNPYQYKFWYVVNSSPFEYMMFVLIMLNTLCLAMQHYEQSKMFNDAMDILNMVFTGVFTVEMVLKVIAFKPKGYFSDAWNTFDSLIVIGSIIDVALSEADPTESENVPVPTATPGNSEESNRISITFFRLFRVMRLVKLLSRGEGIRTLLWTFIKSFQALPYVALLIAMLFFIYAVIGMQMFGKVAMRDNNQINRNNNFQTFPQAVLLLFRCATGEAWQEIMLACLPGKLCDPESDYNPGEEYTCGSNFAIVYFISFYMLCAFLIINLFVAVIMDNFDYLTRDWSILGPHHLDEFKRIWSEYDPEAKGRIKHLDVVTLLRRIQPPLGFGKLCPHRVACKRLVAMNMPLNSDGTVMFNATLFALVRTALKIKTEGNLEQANEELRAVIKKIWKKTSMKLLDQVVPPAGDDEVTVGKFYATFLIQDYFRKFKKRKEQGLVGKYPAKNTTIALQAGLRTLHDIGPEIRRAISCDLQDDEPEETKREEEDDVFKRNGALLGNHVNHVNSDRRDSLQQTNTTHRPLHVQRPSIPPASDTEKPLFPPAGNSVCHNHHNHNSIGKQVPTSTNANLNNANMSKAAHGKRPSIGNLEHVSENGHHSSHKHDREPQRRSSVKRTRYYETYIRSDSGDEQLPTICREDPEIHGYFRDPHCLGEQEYFSSEECYEDDSSPTWSRQNYGYYSRYPGRNIDSERPRGYHHPQGFLEDDDSPVCYDSRRSPRRRLLPPTPASHRRSSFNFECLRRQSSQEEVPSSPIFPHRTALPLHLMQQQIMAVAGLDSSKAQKYSPSHSTRSWATPPATPPYRDWTPCYTPLIQVEQSEALDQVNGSLPSLHRSSWYTDEPDISYRTFTPASLTVPSSFRNKNSDKQRSADSLVEAVLISEGLGRYARDPKFVSATKHEIADACDLTIDEMESAASTLLNGNVRPRANGDVGPLSHRQDYELQDFGPGYSDEEPDPGRDEEDLADEMICITTL

SEQ ID NO: 39642 - protein, 2137 aa, Homo sapiens
MMMMMMMKKMQHQRQQQADHANEANYARGTRLPLSGEGPTSQPNSSKQTVLSWQAAIDAARQAKAAQTMSTSAPPPVGSLSQRKRQQYAKSKKQGNSSNSRPARALFCLSLNNPIRRACISIVEWKPFDIFILLAIFANCVALAIYIPFPEDDSNSTNHNLEKVEYAFLIIFTVETFLKIIAYGLLLHPNAYVRNGWNLLDFVIVIVGLFSVILEQLTKETEGGNHSSGKSGGFDVKALRAFRVLRPLRLVSGVPSLQVVLNSIIKAMVPLLHIALLVLFVIIIYAIIGLELFIGKMHKTCFFADSDIVAEEDPAPCAFSGNGRQCTANGTECRSGWVGPNGGITNFDNFAFAMLTVFQCITMEGWTDVLYWMNDAMGFELPWVYFVSLVIFGSFFVLNLVLGVLSGEFSKEREKAKARGDFQKLREKQQLEEDLKGYLDWITQAEDIDPENEEEGGEEGKRNTSMPTSETESVNTENVSGEGENRGCCGSLCQAISKSKLSRRWRRWNRFNRRRCRAAVKSVTFYWLVIVLVFLNTLTISSEHYNQPDWLTQIQDIANKVLLALFTCEMLVKMYSLGLQAYFVSLFNRFDCFVVCGGITETILVELEIMSPLGISVFRCVRLLRIFKVTRHWTSLSNLVASLLNSMKSIASLLLLLFLFIIIFSLLGMQLFGGKFNFDETQTKRSTFDNFPQALLTVFQILTGEDWNAVMYDGIMAYGGPSSSGMIVCIYFIILFICGNYILLNVFLAIAVDNLADAESLNTAQKEEAEEKERKKIARKESLENKKNNKPEVNQIANSDNKVTIDDYREEDEDKDPYPPCDVPVGEEEEEEEEDEPEVPAGPRPRRISELNMKEKIAPIPEGSAFFILSKTNPIRVGCHKLINHHIFTNLILVFIMLSSAALAAEDPIRSHSFRNTILGYFDYAFTAIFTVEILLKMTTFGAFLHKGAFCRNYFNLLDMLVVGVSLVSFGIQSSAISVVKILRVLRVLRPLRAINRAKGLKHVVQCVFVAIRTIGNIMIVTTLLQFMFACIGVQLFKGKFYRCTDEAKSNPEECRGLFILYKDGDVDSPVVRERIWQNSDFNFDNVLSAMMALFTVSTFEGWPALLYKAIDSNGENIGPIYNHRVEISIFFIIYIIIVAFFMMNIFVGFVIVTFQEQGEKEYKNCELDKNQRQCVEYALKARPLRRYIPKNPYQYKFWYVVNSSPFEYMMFVLIMLNTLCLAMQHYEQSKMFNDAMDILNMVFTGVFTVEMVLKVIAFKPKGYFSDAWNTFDSLIVIGSIIDVALSEADNSEESNRISITFFRLFRVMRLVKLLSRGEGIRTLLWTFIKSFQALPYVALLIAMLFFIYAVIGMQMFGKVAMRDNNQINRNNNFQTFPQAVLLLFRCATGEAWQEIMLACLPGKLCDPESDYNPGEEYTCGSNFAIVYFISFYMLCAFLIINLFVAVIMDNFDYLTRDWSILGPHHLDEFKRIWSEYDPEAKGRIKHLDVVTLLRRIQPPLGFGKLCPHRVACKRLVAMNMPLNSDGTVMFNATLFALVRTALKIKTEGNLEQANEELRAVIKKIWKKTSMKLLDQVVPPAGDDEVTVGKFYATFLIQDYFRKFKKRKEQGLVGKYPAKNTTIALQAGLRTLHDIGPEIRRAISCDLQDDEPEETKREEEDDVFKRNGALLGNHVNHVNSDRRDSLQQTNTTHRPLHVQRPSIPPASDTEKPLFPPAGNSVCHNHHNHNSIGKQVPTSTNANLNNANMSKAAHGKRPSIGNLEHVSENGHHSSHKHDREPQRRSSVKRSDSGDEQLPTICREDPEIHGYFRDPHCLGEQEYFSSEECYEDDSSPTWSRQNYGYYSRYPGRNIDSERPRGYHHPQGFLEDDDSPVCYDSRRSPRRRLLPPTPASHRRSSFNFECLRRQSSQEEVPSSPIFPHRTALPLHLMQQQIMAVAGLDSSKAQKYSPSHSTRSWATPPATPPYRDWTPCYTPLIQVEQSEALDQVNGSLPSLHRSSWYTDEPDISYRTFTPASLTVPSSFRNKNSDKQRSADSLVEAVLISEGLGRYARDPKFVSATKHEIADACDLTIDEMESAASTLLNGNVRPRANGDVGPLSHRQDYELQDFGPGYSDEEPDPGRDEEDLADEMICITTL

SEQ ID NO: 39643 - protein, 1854 aa, Homo sapiens
ANGTECRSGWVGPNGGITNFDNFAFAMLTVFQCITMEGWTDVLYWMNDAMGFELPWVYFVSLVIFGSFFVLNLVLGVLSGEFSKEREKAKARGDFQKLREKQQLEEDLKGYLDWITQAEDIDPENEEEGGEEGKRNTSMPTSETESVNTENVSGEGENRGCCGSLWCWWRRRGAAKAGPSGCRRWGQAISKSKLSRRWRRWNRFNRRRCRAAVKSVTFYWLVIVLVFLNTLTISSEHYNQPDWLTQIQDIANKVLLALFTCEMLVKMYSLGLQAYFVSLFNRFDCFVVCGGITETILVELEIMSPLGISVFRCVRLLRIFKVTRHWTSLSNLVASLLNSMKSIASLLLLLFLFIIIFSLLGMQLFGGKFNFDETQTKRSTFDNFPQALLTVFQILTGEDWNAVMYDGIMAYGGPSSSGMIVCIYFIILFICGNYILLNVFLAIAVDNLADAESLNTAQKEEAEEKERKKIARKESLENKKNNKPEVNQIANSDNKVTIDDYREEDEDKDPYPPCDVPVGEEEEEEEEDEPEVPAGPRPRRISELNMKEKIAPIPEGSAFFILSKTNPIRVGCHKLINHHIFTNLILVFIMLSSAALAAEDPIRSHSFRNTILGYFDYAFTAIFTVEILLKMTTFGAFLHKGAFCRNYFNLLDMLVVGVSLVSFGIQSSAISVVKILRVLRVLRPLRAINRAKGLKHVVQCVFVAIRTIGNIMIVTTLLQFMFACIGVQLFKGKFYRCTDEAKSNPEECRGLFILYKDGDVDSPVVRERIWQNSDFNFDNVLSAMMALFTVSTFEGWPALLYKAIDSNGENIGPIYNHRVEISIFFIIYIIIVAFFMMNIFVGFVIVTFQEQGEKEYKNCELDKNQRQCVEYALKARPLRRYIPKNPYQYKFWYVVNSSPFEYMMFVLIMLNTLCLAMQHYEQSKMFNDAMDILNMVFTGVFTVEMVLKVIAFKPKHYFTDAWNTFDALIVVGSVVDIAITEVNPTESENVPVPTATPGNSEESNRISITFFRLFRVMRLVKLLSRGEGIRTLLWTFIKSFQALPYVALLIAMLFFIYAVIGMQMFGKVAMRDNNQINRNNNFQTFPQAVLLLFRCATGEAWQEIMLACLPGKLCDPESDYNPGEEYTCGSNFAIVYFISFYMLCAFLIINLFVAVIMDNFDYLTRDWSILGPHHLDEFKRIWSEYDPEAKGRIKHLDVVTLLRRIQPPLGFGKLCPHRVACKRLVAMNMPLNSDGTVMFNATLFALVRTALKIKTEGNLEQANEELRAVIKKIWKKTSMKLLDQVVPPAGDDEVTVGKFYATFLIQDYFRKFKKRKEQGLVGKYPAKNTTIALQAGLRTLHDIGPEIRRAISCDLQDDEPEETKREEEDDVFKRNGALLGNHVNHVNSDRRDSLQQTNTTHRPLHVQRPSIPPASDTEKPLFPPAGNSVCHNHHNHNSIGKQVPTSTNANLNNANMSKAAHGKRPSIGNLEHVSENGHHSSHKHDREPQRRSSVKRTRYYETYIRSDSGDEQLPTICREDPEIHGYFRDPHCLGEQEYFSSEECYEDDSSPTWSRQNYGYYSRYPGRNIDSERPRGYHHPQGFLEDDDSPVCYDSRRSPRRRLLPPTPASHRRSSFNFECLRRQSSQEEVPSSPIFPHRTALPLHLMQQQIMAVAGLDSSKAQKYSPSHSTRSWATPPATPPYRDWTPCYTPLIQVEQSEALDQVNGSLPSLHRSSWYTDEPDISYRTFTPASLTVPSSFRNKNSDKQRSADSLVEAVLISEGLGRYARDPKFVSATKHEIADACDLTIDEMESAASTLLNGNVRPRANGDVGPLSHRQDYELQDFGPGYSDEEPDPGRDEEDLADEMICITTL

SEQ ID NO: 39644 - protein, 539 aa, Homo sapiens
MGETWLCPAALGLLYKAIDSNGENIGPIYNHRVEISIFFIIYIIIVAFFMMNIFVGFVIVTFQEQGEKEYKNCELDKNQRQCVEYALKARPLRRYIPKNPYQYKFWYVVNSSPFEYMMFVLIMLNTLCLAMQHYEQSKMFNDAMDILNMVFTGVFTVEMVLKVIAFKPKGYFSDAWNTFDSLIVIGSIIDVALSEADNSEESNRISITFFRLFRVMRLVKLLSRGEGIRTLLWTFIKSFQALPYVALLIAMLFFIYAVIGMQMFGKVAMRDNNQINRNNNFQTFPQAVLLLFRCATGEAWQEIMLACLPGKLCDPESDYNPGEEYTCGSNFAIVYFISFYMLCAFLIINLFVAVIMDNFDYLTRDWSILGPHHLDEFKRIWSEYDPEAKGRIKHLDVVTLLRRIQPPLGFGKLCPHRVACKRLVAMNMPLNSDGTVMFNATLFALVRTALKIKTEGNLEQANEELRAVIKKIWKKTSMKLLDQVVPPAGDDEVTVGKFYATFLIQDYFRKFKKRKEQGLVGKYPAKNTTIALQMLERML

SEQ ID NO: 39645 - protein, 351 aa, Homo sapiens
MNGLAQSRLETCISYLHCYSAGLRTLHDIGPEIRRAISCDLQDDEPEETKREEEDDVFKRNGALLGNHVNHVNSDRRDSLQQTNTTHRPLHVQRPSIPPASDTEKPLFPPAGNSVCHNHHNHNSIGKQVPTSTNANLNNANMSKAAHGKRPSIGNLEHVSENGHHSSHKHDREPQRRSSVKRTRYYETYIRSDSGDEQLPTICREDPEIHGYFRDPHCLGEQEYFSSEECYEDDSSPTWSRQNYGYYSRYPGRNIDSERPRGYHHPQGFLEDDDSPVCYDSRRSPRRRLLPPTPASHRRSSFNFECLRRQSSQEEVPSSPIFPHRTALPLHLMQQQSPLSSDHGSCRPRFK

SEQ ID NO: 39646 - protein, 1966 aa, Homo sapiens
MSESEGGKDTTPEPSPANGAGPGPEWGLCPGPPAVEGESSGASGLGTPKRRNQHSKHKTVAVASAQRSPRALFCLTLANPLRRSCISIVEWKPFDILILLTIFANCVALGVYIPFPEDDSNTANHNLEQVEYVFLVIFTVETVLKIVAYGLVLHPSAYIRNGWNLLDFIIVVVGLFSVLLEQGPGRPGDAPHTGGKPGGFDVKALRAFRVLRPLRLVSGVPSLHIVLNSIMKALVPLLHIALLVLFVIIIYAIIGLELFLGRMHKTCYFLGSDMEAEEDPSPCASSGSGRACTLNQTECRGRWPGPNGGITNFDNFFFAMLTVFQCVTMEGWTDVLYWMQDAMGYELPWVYFVSLVIFGSFFVLNLVLGVLSGEFSKEREKAKARGDFQKQREKQQMEEDLRGYLDWITQAEELDMEDPSADDNLGPQLAELTNRRRGRLRWFSHSTRSTHSTSSHASLPASDTGSMTETQGDEDEEEGALASCTRCLNKIMKTRVCRRLRRANRVLRARCRRAVKSNACYWAVLLLVFLNTLTIASEHHGQPVWLTQIQEYANKVLLCLFTVEMLLKLYGLGPSAYVSSFFNRFDCFVVCGGILETTLVEVGAMQPLGISVLRCVRLLRIFKVTRHWASLSNLVASLLNSMKSIASLLLLLFLFIIIFSLLGMQLFGGKFNFDQTHTKRSTFDTFPQALLTVFQILTGEDWNVVMYDGIMAYGGPFFPGMLVCIYFIILFICGNYILLNVFLAIAVDNLASGDAGTAKDKGGEKSNEKDLPQENEGLVPGVEKEEEEGARREGADMEEEEEEEEEEEEEEEEEGAGGVELLQEVVPKEKVVPIPEGSAFFCLSQTNPLRKGCHTLIHHHVFTNLILVFIILSSVSLAAEDPIRAHSFRNHILGYFDYAFTSIFTVEILLKMTVFGAFLHRGSFCRSWFNMLDLLVVSVSLISFGIHSSAISVVKILRVLRVLRPLRAINRAKGLKHVVQCVFVAIRTIGNIMIVTTLLQFMFACIGVQLFKGKFYTCTDEAKHTPQECKGSFLVYPDGDVSRPLVRERLWVNSDFNFDNVLSAMMALFTVSTFEGWPALLYKAIDAYAEDHGPIYNYRVEISVFFIVYIIIIAFFMMNIFVGFVIITFRAQGEQEYQNCELDKNQRQCVEYALKAQPLRRYIPKNPHQYRVWATVNSAAFEYLMFLLILLNTVALAMQHYEQTAPFNYAMDILNMVFTGLFTIEMVLKIIAFKPKHYFTDAWNTFDALIVVGSIVDIAVTEVNNGGHLGESSEDSSRISITFFRLFRVMRLVKLLSKGEGIRTLLWTFIKSFQALPYVALLIAMIFFIYAVIGMQMFGKVALQDGTQINRNNNFQTFPQAVLLLFRCATGEAWQEIMLASLPGNRCDPESDFGPGEEFTCGSNFAIAYFISFFMLCAFLIINLFVAVIMDNFDYLTRDWSILGPHHLDEFKRIWSEYDPGAKGRIKHLDVVALLRRIQPPLGFGKLCPHRVACKRLVAMNMPLNSDGTVTFNATLFALVRTSLKIKTEGNLEQANQELRIVIKKIWKRMKQKLLDEVIPPPDEEEVTVGKFYATFLIQDYFRKFRRRKEKGLLGNDAAPSTSSALQAGLRSLQDLGPEMRQALTCDTEEEEEEGQEGVEEEDEKDLETNKATMVSQPSARRGSGISVSLPVGDRLPDSLSFGPSDDDRGTPTSSQPSVPQAGSNTHRRGSGALIFTIPEEGNSQPKGTKGQNKQDEDEEVPDRLSYLDEQAGTPPCSVLLPPHRAQRYMDGHLVPRRRLLPPTPAGRKPSFTIQCLQRQGSCEDLPIPGTYHRGRNSGPNRAQGSWATPPQRGRLLYAPLLLVEEGAAGEGYLGRSSGPLRTFTCLHVPGTHSDPSHGKRGSADSLVEAVLISEGLGLFARDPRFVALAKQEIADACRLTLDEMDNAASDLLAQGTSSLYSDEESILSRFDEEDLGDEMACVHAL

SEQ ID NO: 39647 - protein, 1912 aa, Homo sapiens
MSESEGGKGERILPSLQTLGASIVEWKPFDILILLTIFANCVALGVYIPFPEDDSNTANHNLEQVEYVFLVIFTVETVLKIVAYGLVLHPSAYIRNGWNLLDFIIVVVGLFSVLLEQGPGRPGDAPHTGGKPGGFDVKALRAFRVLRPLRLVSGVPSLHIVLNSIMKALVPLLHIALLVLFVIIIYAIIGLELFLGRMHKTCYFLGSDMEAEEDPSPCASSGSGRACTLNQTECRGRWPGPNGGITNFDNFFFAMLTVFQCVTMEGWTDVLYWMQDAMGYELPWVYFVSLVIFGSFFVLNLVLGVLSGEFSKEREKAKARGDFQKQREKQQMEEDLRGYLDWITQAEELDMEDPSADDNLGSMAEEGRAGHRPQLAELTNRRRGRLRWFSHSTRSTHSTSSHASLPASDTGSMTETQGDEDEEEGALASCTRCLNKIMKTRVCRRLRRANRVLRARCRRAVKSNACYWAVLLLVFLNTLTIASEHHGQPVWLTQIQEYANKVLLCLFTVEMLLKLYGLGPSAYVSSFFNRFDCFVVCGGILETTLVEVGAMQPLGISVLRCVRLLRIFKVTRHWASLSNLVASLLNSMKSIASLLLLLFLFIIIFSLLGMQLFGGKFNFDQTHTKRSTFDTFPQALLTVFQILTGEDWNVVMYDGIMAYGGPFFPGMLVCIYFIILFICGNYILLNVFLAIAVDNLASGDAGTAKDKGGEKSNEKDLPQENEGLVPGVEKEEEEGARREGADMEEEEEEEEEEEEEEEEEGAGGVELLQEVVPKEKVVPIPEGSAFFCLSQTNPLRKGCHTLIHHHVFTNLILVFIILSSVSLAAEDPIRAHSFRNHILGYFDYAFTSIFTVEILLKMTVFGAFLHRGSFCRSWFNMLDLLVVSVSLISFGIHSSAISVVKILRVLRVLRPLRAINRAKGLKHVVQCVFVAIRTIGNIMIVTTLLQFMFACIGVQLFKGKFYTCTDEAKHTPQECKGSFLVYPDGDVSRPLVRERLWVNSDFNFDNVLSAMMALFTVSTFEGWPALLYKAIDAYAEDHGPIYNYRVEISVFFIVYIIIIAFFMMNIFVGFVIITFRAQGEQEYQNCELDKNQRQCVEYALKAQPLRRYIPKNPHQYRVWATVNSAAFEYLMFLLILLNTVALAMQHYEQTAPFNYAMDILNMVFTGLFTIEMVLKIIAFKPKHYFTDAWNTFDALIVVGSIVDIAVTEVNNGGHLGESSEDSSRISITFFRLFRVMRLVKLLSKGEGIRTLLWTFIKSFQALPYVALLIAMIFFIYAVIGMQMFGKVALQDGTQINRNNNFQTFPQAVLLLFRCATGEAWQEIMLASLPGNRCDPESDFGPGEEFTCGSNFAIAYFISFFMLCAFLIINLFVAVIMDNFDYLTRDWSILGPHHLDEFKRIWSEYDPGAKGRIKHLDVVALLRRIQPPLGFGKLCPHRVACKRLVAMNMPLNSDGTVTFNATLFALVRTSLKIKTEGNLEQANQELRIVIKKIWKRMKQKLLDEVIPPPDEEEVTVGKFYATFLIQDYFRKFRRRKEKGLLGNDAAPSTSSALQAGLRSLQDLGPEMRQALTCDTEEEEEEGQEGVEEEDEKDLETNKATMVSQPSARRGSGISVSLPVGDRLPDSLSFGPSDDDRGTPTSSQPSVPQAGSNTHRRGSGALIFTIPEEGNSQPKGTKGQNKQDEDEEVPDRLSYLDEQAGTPPCSVLLPPHRAQRYMDGHLVPRRRLLPPTPAGRKPSFTIQCLQRQGSCEDLPIPGTYHRGRNSGPNRAQGSWATPPQRGRLLYAPLLLVEEGAAGEGYLGRSSGPLRTFTCLHVPGTHSDPSHGKRGSADSLVEAVLISEGLGLFARDPRFVALAKQEIADACRLTLDEMDNAASDLLAQGTSSLYSDEESILSRFDEEDLGDEMACVHAL

SEQ ID NO: 39648 - protein, 1977 aa, Homo sapiens
MSESEGGKDTTPEPSPANGAGPGPEWGLCPGPPAVEGESSGASGLGTPKRRNQHSKHKTVAVASAQRSPRALFCLTLANPLRRSCISIVEWKPFDILILLTIFANCVALGVYIPFPEDDSNTANHNLEQVEYVFLVIFTVETVLKIVAYGLVLHPSAYIRNGWNLLDFIIVVVGLFSVLLEQGPGRPGDAPHTGGKPGGFDVKALRAFRVLRPLRLVSGVPSLHIVLNSIMKALVPLLHIALLVLFVIIIYAIIGLELFLGRMHKTCYFLGSDMEAEEDPSPCASSGSGRACTLNQTECRGRWPGPNGGITNFDNFFFAMLTVFQCVTMEGWTDVLYWMQDAMGYELPWVYFVSLVIFGSFFVLNLVLGVLSGEFSKEREKAKARGDFQKQREKQQMEEDLRGYLDWITQAEELDMEDPSADDNLGSMAEEGRAGHRPQLAELTNRRRGRLRWFSHSTRSTHSTSSHASLPASDTGSMTETQGDEDEEEGALASCTRCLNKIMKTRVCRRLRRANRVLRARCRRAVKSNACYWAVLLLVFLNTLTIASEHHGQPVWLTQIQEYANKVLLCLFTVEMLLKLYGLGPSAYVSSFFNRFDCFVVCGGILETTLVEVGAMQPLGISVLRCVRLLRIFKVTRHWASLSNLVASLLNSMKSIASLLLLLFLFIIIFSLLGMQLFGGKFNFDQTHTKRSTFDTFPQALLTVFQILTGEDWNVVMYDGIMAYGGPFFPGMLVCIYFIILFICGNYILLNVFLAIAVDNLASGDAGTAKDKGGEKSNEKDLPQENEGLVPGVEKEEEEGARREGADMEEEEEEEEEEEEEEEEEGAGGVELLQEVVPKEKVVPIPEGSAFFCLSQTNPLRKGCHTLIHHHVFTNLILVFIILSSVSLAAEDPIRAHSFRNHILGYFDYAFTSIFTVEILLKMTVFGAFLHRGSFCRSWFNMLDLLVVSVSLISFGIHSSAISVVKILRVLRVLRPLRAINRAKGLKHVVQCVFVAIRTIGNIMIVTTLLQFMFACIGVQLFKGKFYTCTDEAKHTPQECKGSFLVYPDGDVSRPLVRERLWVNSDFNFDNVLSAMMALFTVSTFEGWPALLYKAIDAYAEDHGPIYNYRVEISVFFIVYIIIIAFFMMNIFVGFVIITFRAQGEQEYQNCELDKNQRQCVEYALKAQPLRRYIPKNPHQYRVWATVNSAAFEYLMFLLILLNTVALAMQHYEQTAPFNYAMDILNMVFTGLFTIEMVLKIIAFKPKHYFTDAWNTFDALIVVGSIVDIAVTEVNNGGHLGESSEDSSRISITFFRLFRVMRLVKLLSKGEGIRTLLWTFIKSFQALPYVALLIAMIFFIYAVIGMQMFGKVALQDGTQINRNNNFQTFPQAVLLLFRCATGEAWQEIMLASLPGNRCDPESDFGPGEEFTCGSNFAIAYFISFFMLCAFLIINLFVAVIMDNFDYLTRDWSILGPHHLDEFKRIWSEYDPGAKGRIKHLDVVALLRRIQPPLGFGKLCPHRVACKRLVAMNMPLNSDGTVTFNATLFALVRTSLKIKTEGNLEQANQELRIVIKKIWKRMKQKLLDEVIPPPDEEEVTVGKFYATFLIQDYFRKFRRRKEKGLLGNDAAPSTSSALQAGLRSLQDLGPEMRQALTCDTEEEEEEGQEGVEEEDEKDLETNKATMVSQPSARRGSGISVSLPVGDRLPDSLSFGPSDDDRGTPTSSQPSVPQAGSNTHRRGSGALIFTIPEEGNSQPKGTKGQNKQDEDEEVPDRLSYLDEQAGTPPCSVLLPPHRAQRYMDGHLVPRRRLLPPTPAGRKPSFTIQCLQRQGSCEDLPIPGTYHRGRNSGPNRAQGSWATPPQRGRLLYAPLLLVEEGAAGEGYLGRSSGPLRTFTCLHVPGTHSDPSHGKRGSADSLVEAVLISEGLGLFARDPRFVALAKQEIADACRLTLDEMDNAASDLLAQGTSSLYSDEESILSRFDEEDLGDEMACVHAL

SEQ ID NO: 39649 - protein, 1873 aa, Homo sapiens
MEPSSPQDEGLRKKQPKKPVPEILPRPPRALFCLTLENPLRKACISIVEWKPFETIILLTIFANCVALAVYLPMPEDDNNSLNLGLEKLEYFFLIVFSIEAAMKIIAYGFLFHQDAYLRSGWNVLDFTIVFLGVFTVILEQVNVIQSHTAPMSSKGAGLDVKALRAFRVLRPLRLVSGVPSLQVVLNSIFKAMLPLFHIALLVLFMVIIYAIIGLELFKGKMHKTCYFIGTDIVATVENEEPSPCARTGSGRRCTINGSECRGGWPGPNHGITHFDNFGFSMLTVYQCITMEGWTDVLYWVNDAIGNEWPWIYFVTLILLGSFFILNLVLGVLSGEFTKEREKAKSRGTFQKLREKQQLDEDLRGYMSWITQGEVMDVEDFREGKLSLDEGGSDTESLYEIAGLNKIIQFIRHWRQWNRIFRWKCHDIVKSKVFYWLVILIVALNTLSIASEHHNQPLWLTRLQDIANRVLLSLFTTEMLMKMYGLGLRQYFMSIFNRFDCFVVCSGILEILLVESGAMTPLGISVLRCIRLLRIFKITKYWTSLSNLVASLLNSIRSIASLLLLLFLFIVIFALLGMQLFGGRYDFEDTEVRRSNFDNFPQALISVFQVLTGEDWTSMMYNGIMAYGGPSYPGMLVCIYFIILFVCGNYILLNVFLAIAVDNLAEAESLTSAQKAKAEEKKRRKMSKGLPDKSEEEKSTMAKKLEQKPKGEGIPTTAKLKIDEFESNVNEVKDPYPSADFPGDDEEDEPEIPLSPRPRPLAELQLKEKAVPIPEASSFFIFSPTNKIRVLCHRIVNATWFTNFILLFILLSSAALAAEDPIRADSMRNQILKHFDIGFTSVFTVEIVLKMTTYGAFLHKGSFCRNYFNMLDLLVVAVSLISMGLESSAISVVKILRVLRVLRPLRAINRAKGLKHVVQCMFVAISTIGNIVLVTTLLQFMFACIGVQLFKGKFFRCTDLSKMTEEECRGYYYVYKDGDPMQIELRHREWVHSDFHFDNVLSAMMSLFTVSTFEGWPQLLYKAIDSNAEDVGPIYNNRVEMAIFFIIYIILIAFFMMNIFVGFVIVTFQEQGETEYKNCELDKNQRQCVQYALKARPLRCYIPKNPYQYQVWYIVTSSYFEYLMFALIMLNTICLGMQHYNQSEQMNHISDILNVAFTIIFTLEMILKLMAFKARGYFGDPWNVFDFLIVIGSIIDVILSEIDTFLASSGGLYCLGGGCGNVDPDESARISSAFFRLFRVMRLIKLLSRAEGVRTLLWTFIKSFQALPYVALLIVMLFFIYAVIGMQMFGKIALVDGTQINRNNNFQTFPQAVLLLFRCATGEAWQEILLACSYGKLCDPESDYAPGEEYTCGTNFAYYYFISFYMLCAFLVINLFVAVIMDNFDYLTRDWSILGPHHLDEFKAIWAEYDPEAKGRIKHLDVVTLLRRIQPPLGFGKFCPHRVACKRLVGMNMPLNSDGTVTFNATLFALVRTALKIKTEGNFEQANEELRAIIKKIWKRTSMKLLDQVIPPIGDDEVTVGKFYATFLIQEHFRKFMKRQEEYYGYRPKKDIVQIQAGLRTIEEEAAPEICRTVSGDLAAEEELERAMVEAAMEEGIFRRTGGLFGQVDNFLERTNSLPPVMANQRPLQFAEIEMEEMESPVFLEDFPQDPRTNPLARANTNNANANVAYGNSNHSNSHVFSSVHYEREFPEETETPATRGRALGQPCRVLGPHSKPCVEMLKGLLTQRAMPRGQAPPAPCQCPRVESSMPEDRKSSTPGSLHEETPHSRSTRENTSRCSAPATALLIQKALVRGGLGTLAADANFIMATGQALADACQMEPEEVEIMATELLKGREAPEGMASSLGCLNLGSSLGSLDQHQGSQETLIPPRL

SEQ ID NO: 39650 - protein, 1854 aa, Homo sapiens
MEPSSPQDEGLRKKQPKKPVPEILPRPPRALFCLTLENPLRKACISIVEWKPFETIILLTIFANCVALAVYLPMPEDDNNSLNLGLEKLEYFFLIVFSIEAAMKIIAYGFLFHQDAYLRSGWNVLDFTIVFLGVFTVILEQVNVIQSHTAPMSSKGAGLDVKALRAFRVLRPLRLVSGVPSLQVVLNSIFKAMLPLFHIALLVLFMVIIYAIIGLELFKGKMHKTCYFIGTDIVATVENEEPSPCARTGSGRRCTINGSECRGGWPGPNHGITHFDNFGFSMLTVYQCITMEGWTDVLYWVNDAIGNEWPWIYFVTLILLGSFFILNLVLGVLSGEFTKEREKAKSRGTFQKLREKQQLDEDLRGYMSWITQGEVMDVEDFREGKLSLDEGGSDTESLYEIAGLNKIIQFIRHWRQWNRIFRWKCHDIVKSKVFYWLVILIVALNTLSIASEHHNQPLWLTRLQDIANRVLLSLFTTEMLMKMYGLGLRQYFMSIFNRFDCFVVCSGILEILLVESGAMTPLGISVLRCIRLLRIFKITKYWTSLSNLVASLLNSIRSIASLLLLLFLFIVIFALLGMQLFGGRYDFEDTEVRRSNFDNFPQALISVFQVLTGEDWTSMMYNGIMAYGGPSYPGMLVCIYFIILFVCGNYILLNVFLAIAVDNLAEAESLTSAQKAKAEEKKRRKMSKGLPDKSEEEKSTMAKKLEQKPKGEGIPTTAKLKIDEFESNVNEVKDPYPSADFPGDDEEDEPEIPLSPRPRPLAELQLKEKAVPIPEASSFFIFSPTNKIRVLCHRIVNATWFTNFILLFILLSSAALAAEDPIRADSMRNQILKHFDIGFTSVFTVEIVLKMTTYGAFLHKGSFCRNYFNMLDLLVVAVSLISMGLESSAISVVKILRVLRVLRPLRAINRAKGLKHVVQCMFVAISTIGNIVLVTTLLQFMFACIGVQLFKGKFFRCTDLSKMTEEECRGYYYVYKDGDPMQIELRHREWVHSDFHFDNVLSAMMSLFTVSTFEGWPQLLYKAIDSNAEDVGPIYNNRVEMAIFFIIYIILIAFFMMNIFVGFVIVTFQEQGETEYKNCELDKNQRQCVQYALKARPLRCYIPKNPYQYQVWYIVTSSYFEYLMFALIMLNTICLGMQHYNQSEQMNHISDILNVAFTIIFTLEMILKLMAFKARGYFGDPWNVFDFLIVIGSIIDVILSEIDDPDESARISSAFFRLFRVMRLIKLLSRAEGVRTLLWTFIKSFQALPYVALLIVMLFFIYAVIGMQMFGKIALVDGTQINRNNNFQTFPQAVLLLFRCATGEAWQEILLACSYGKLCDPESDYAPGEEYTCGTNFAYYYFISFYMLCAFLVINLFVAVIMDNFDYLTRDWSILGPHHLDEFKAIWAEYDPEAKGRIKHLDVVTLLRRIQPPLGFGKFCPHRVACKRLVGMNMPLNSDGTVTFNATLFALVRTALKIKTEGNFEQANEELRAIIKKIWKRTSMKLLDQVIPPIGDDEVTVGKFYATFLIQEHFRKFMKRQEEYYGYRPKKDIVQIQAGLRTIEEEAAPEICRTVSGDLAAEEELERAMVEAAMEEGIFRRTGGLFGQVDNFLERTNSLPPVMANQRPLQFAEIEMEEMESPVFLEDFPQDPRTNPLARANTNNANANVAYGNSNHSNSHVFSSVHYEREFPEETETPATRGRALGQPCRVLGPHSKPCVEMLKGLLTQRAMPRGQAPPAPCQCPRVESSMPEDRKSSTPGSLHEETPHSRSTRENTSRCSAPATALLIQKALVRGGLGTLAADANFIMATGQALADACQMEPEEVEIMATELLKGREAPEGMASSLGCLNLGSSLGSLDQHQGSQETLIPPRL

SEQ ID NO: 39651 - protein, 1533 aa, Homo sapiens
MKTHLDRPLVVELGRDGARGPVGGKARPEAAEAPEGVDPPRRHHRHRDKDKTPAAGDQDRAEAPKAESGEPGAREERPRPHRSHSKEAAGPPEARSERGRGPGPEGGRRHHRRGSPEEAAEREPRRHRAHRHQDPSKECAGAKGERRARHRGGPRAGPREAESGEEPARRHRARHKAQPAHEAVEKETTEKEATEKEAEIVEADKEKELRNHQPREPHCDLETSGTVTVGPMHTLPSTCLQKVEEQPEDADNQRNVTRMGSQPPDPNTIVHIPVMLTGPLGEATVVPSGNVDLESQAEGKKEVEADDVMRSGPRPIVPYSSMFCLSPTNLLRRFCHYIVTMRYFEVVILVVIALSSIALAAEDPVRTDSPRNNALKYLDYIFTGVFTFEMVIKMIDLGLLLHPGAYFRDLWNILDFIVVSGALVAFAFSSFVGGSKGKDINTIKSLRVLRVLRPLKTIKRLPKLKAVFDCVVNSLKNVLNILIVYMLFMFIFAVIAVQLFKGKFFYCTDESKELERDCRGQYLDYEKEEVEAQPRQWKKYDFHYDNVLWALLTLFTVSTGEGWPMVLKHSVDATYEEQGPSPGYRMELSIFYVVYFVVFPFFFVNIFVALIIITFQEQGDKVMSECSLEKNERACIDFAISAKPLTRYMPQNRQSFQYKTWTFVVSPPFEYFIMAMIALNTVVLMMKFYDAPYEYELMLKCLNIVFTSMFSMECVLKIIAFGVLNYFRDAWNVFDFVTVLGSITDILVTEIANNFINLSFLRLFRAARLIKLLRQGYTIRILLWTFVQSFKALPYVCLLIAMLFFIYAIIGMQVFGNIALDDDTSINRHNNFRTFLQALMLLFRSATGEAWHEIMLSCLSNQACDEQANATECGSDFAYFYFVSFIFLCSFLMLNLFVAVIMDNFEYLTRDSSILGPHHLDEFIRVWAEYDPAACGRISYNDMFEMLKHMSPPLGLGKKCPARVAYKRLVRMNMPISNEDMTVHFTSTLMALIRTALEIKLAPAGTKQHQCDAELRKEISVVWANLPQKTLDLLVPPHKPDEMTVGKVYAALMIFDFYKQNKTTRDQMQQAPGGLSQMGPVSLFHPLKATLEQTQPAVLRGARVFLRQKSSTSLSNGGAIQNQESGIKESVSWGTQRTQDAPHEARPPLERGHSTEIPVGRSGALAVDVQMQSITRRGPDGEPQPGLESQGRAASMPRLAAETQPVTDASPMKRSISTLAQRPRGTHLCSTTPDRPPPSQASSHHHHHRCHRRRDRKQRSLEKGPSLSADMDGAPSSAVGPGLPPGEGPTGCRRERERRQERGRSQERRQPSSSSSEKQRFYSCDRFGGREPPKPKPSLSSHPTSPTAGQEPGPHPQGSGSVNGSPLLSTSGASTPGRGGRRQLPQTPLTPRPSITYKTANSSPIHFAGAQTSLPAFSPGRLSRGLSEHNALLQRDPLSQPLAPGSRIGSDPYLGQRLDSEASVHALPEDTLTFEEAVATNSGRSSRTSYVSSLTSQSHPLRRVPNGYHCTLGLSSGGRARHSYHHPDQDHWC

SEQ ID NO: 39652 - protein, 101 aa, Homo sapiens
DNLANAQELTKDEEEMEEAANQKLALQKAKEVAEVSPMSAANISIAAFVKQARGTVSRSSSVSSVNSPRQQNSAKARSVWEQRASQLRLQNLRASCEALYS

SEQ ID NO: 39653 - protein, 2237 aa, Homo sapiens
MVRFGDELGGRYGGPGGGERARGGGAGGAGGPGPGGLQPGQRVLYKQSIAQRARTMALYNPIPVKQNCFTVNRSLFVFSEDNVVRKYAKRITEWPPFEYMILATIIANCIVLALEQHLPDGDKTPMSERLDDTEPYFIGIFCFEAGIKIIALGFVFHKGSYLRNGWNVMDFVVVLTGILATAGTDFDLRTLRAVRVLRPLKLVSGIPSLQVVLKSIMKAMVPLLQIGLLLFFAILMFAIIGLEFYMGKFHKACFPNSTDAEPVGDFPCGKEAPARLCEGDTECREYWPGPNFGITNFDNILFAILTVFQCITMEGWTDILYNTNDAAGNTWNWLYFIPLIIIGSFFMLNLVLGVLSGEFAKERERVENRRAFLKLRRQQQIERELNGYLEWIFKAEEVMLAEEDRNAEEKSPLDVLKRAATKKSRNDLIHAEEGEDRFADLCAVGSPFARASLKSGKTESSSYFRRKEKMFRFFIRRMVKAQSFYWVVLCVVALNTLCVAMVHYNQPRRLTTTLYFAEFVFLGLFLTEMSLKMYGLGPRSYFRSSFNCFDFGVIVGSVFEVVWAAIKPGSSFGISVLRALRLLRIFKVTKYWSSLRNLVVSLLNSMKSIISLLFLLFLFIVVFALLGMQLFGGQFNFQDETPTTNFDTFPAAILTVFQILTGEDWNAVMYHGIESQGGVSKGMFSSFYFIVLTLFGNYTLLNVFLAIAVDNLANAQELTKDEEEMEEAANQKLALQKAKEVAEVSPMSAANISIAARQQNSAKARSVWEQRASQLRLQNLRASCEALYSEMDPEERLRFATTRHLRPDMKTHLDRPLVVELGRDGARGPVGGKARPEAAEAPEGVDPPRRHHRHRDKDKTPAAGDQDRAEAPKAESGEPGAREERPRPHRSHSKEAAGPPEARSERGRGPGPEGGRRHHRRGSPEEAAEREPRRHRAHRHQDPSKECAGAKGERRARHRGGPRAGPREAESGEEPARRHRARHKAQPAHEAVEKETTEKEATEKEAEIVEADKEKELRNHQPREPHCDLETSGTVTVGPMHTLPSTCLQKVEEQPEDADNQRNVTRMGSQPPDPNTIVHIPVMLTGPLGEATVVPSGNVDLESQAEGKKEVEADDVMRSGPRPIVPYSSMFCLSPTNLLRRFCHYIVTMRYFEVVILVVIALSSIALAAEDPVRTDSPRNNALKYLDYIFTGVFTFEMVIKMIDLGLLLHPGAYFRDLWNILDFIVVSGALVAFAFSGSKGKDINTIKSLRVLRVLRPLKTIKRLPKLKAVFDCVVNSLKNVLNILIVYMLFMFIFAVIAVQLFKGKFFYCTDESKELERDCRGQYLDYEKEEVEAQPRQWKKYDFHYDNVLWALLTLFTVSTGEGWPMVLKHSVDATYEEQGPSPGYRMELSIFYVVYFVVFPFFFVNIFVALIIITFQEQGDKVMSECSLEKNERACIDFAISAKPLTRYMPQNRQSFQYKTWTFVVSPPFEYFIMAMIALNTVVLMMKFYDAPYEYELMLKCLNIVFTSMFSMECVLKIIAFGVLNYFRDAWNVFDFVTVLGSITDILVTEIAETNNFINLSFLRLFRAARLIKLLRQGYTIRILLWTFVQSFKALPYVCLLIAMLFFIYAIIGMQVFGNIALDDDTSINRHNNFRTFLQALMLLFRSATGEAWHEIMLSCLSNQACDEQANATECGSDFAYFYFVSFIFLCSFLMLNLFVAVIMDNFEYLTRDSSILGPHHLDEFIRVWAEYDPAACGRISYNDMFEMLKHMSPPLGLGKKCPARVAYKRLVRMNMPISNEDMTVHFTSTLMALIRTALEIKLAPAGTKQHQCDAELRKEISVVWANLPQKTLDLLVPPHKPDEMTVGKVYAALMIFDFYKQNKTTRDQMQQAPGGLSQMGPVSLFHPLKATLEQTQPAVLRGARVFLRQKSSTSLSNGGAIQNQESGIKESVSWGTQRTQDAPHEARPPLERGHSTEIPVGRSGALAVDVQMQSITRRGPDGEPQPGLESQGRAASMPRLAAETQPVTDASPMKRSISTLAQRPRGTHLCSTTPDRPPPSQASSHHHHHRCHRRRDRKQRSLEKGPSLSADMDGAPSSAVGPGLPPGEGPTGCRRERERRQERGRSQERRQPSSSSSEKQRFYSCDRFGGREPPKPKPSLSSHPTSPTAGQEPGPHPQAGSAVGFPNTTPCCRETPSASPWPLALELALTLTWGSVWTVRPLSTPCLRTLSLSRRLWPPTRAAPPGLPTCPP

SEQ ID NO: 39654 - protein, 2340 aa, Homo sapiens
MVRFGDELGGRYGGPGGGERARGGGAGGAGGPGPGGLQPGQRVLYKQSIAQRARTMALYNPIPVKQNCFTVNRSLFVFSEDNVVRKYAKRITEWPPFEYMILATIIANCIVLALEQHLPDGDKTPMSERLDDTEPYFIGIFCFEAGIKIIALGFVFHKGSYLRNGWNVMDFVVVLTGILATAGTDFDLRTLRAVRVLRPLKLVSGIPSLQVVLKSIMKAMVPLLQIGLLLFFAILMFAIIGLEFYMGKFHKACFPNSTDAEPVGDFPCGKEAPARLCEGDTECREYWPGPNFGITNFDNILFAILTVFQCITMEGWTDILYNTNDAAGNTWNWLYFIPLIIIGSFFMLNLVLGVLSGEFAKERERVENRRAFLKLRRQQQIERELNGYLEWIFKAEEVMLAEEDRNAEEKSPLDAVLKRAATKKSRNDLIHAEEGEDRFADLCAVGSPFARASLKSGKTESSSYFRRKEKMFRFFIRRMVKAQSFYWVVLCVVALNTLCVAMVHYNQPRRLTTTLYFAEFVFLGLFLTEMSLKMYGLGPRSYFRSSFNCFDFGVIVGSVFEVVWAAIKPGSSFGISVLRALRLLRIFKVTKYWSSLRNLVVSLLNSMKSIISLLFLLFLFIVVFALLGMQLFGGQFNFQDETPTTNFDTFPAAILTVFQILTGEDWNAVMYHGIESQGGVSKGMFSSFYFIVLTLFGNYTLLNVFLAIAVDNLANAQELTKDEEEMEEAANQKLALQKAKEVAEVSPMSAANISIAARQQNSAKARSVWEQRASQLRLQNLRASCEALYSEMDPEERLRFATTRHLRPDMKTHLDRPLVVELGRDGARGPVGGKARPEAAEAPEGVDPPRRHHRHRDKDKTPAAGDQDRAEAPKAESGEPGAREERPRPHRSHSKEAAGPPEARSERGRGPGPEGGRRHHRRGSPEEAAEREPRRHRAHRHQDPSKECAGAKGERRARHRGGPRAGPREAESGEEPARRHRARHKAQPAHEAVEKETTEKEATEKEAEIVEADKEKELRNHQPREPHCDLETSGTVTVGPMHTLPSTCLQKVEEQPEDADNQRNVTRMGSQPPDPNTIVHIPVMLTGPLGEATVVPSGNVDLESQAEGKKEVEADDVMRSGPRPIVPYSSMFCLSPTNLLRRFCHYIVTMRYFEVVILVVIALSSIALAAEDPVRTDSPRNNALKYLDYIFTGVFTFEMVIKMIDLGLLLHPGAYFRDLWNILDFIVVSGALVAFAFSGSKGKDINTIKSLRVLRVLRPLKTIKRLPKLKAVFDCVVNSLKNVLNILIVYMLFMFIFAVIAVQLFKGKFFYCTDESKELERDCRGQYLDYEKEEVEAQPRQWKKYDFHYDNVLWALLTLFTVSTGEGWPMVLKHSVDATYEEQGPSPGYRMELSIFYVVYFVVFPFFFVNIFVALIIITFQEQGDKVMSECSLEKNERACIDFAISAKPLTRYMPQNRQSFQYKTWTFVVSPPFEYFIMAMIALNTVVLMMKFYDAPYEYELMLKCLNIVFTSMFSMECVLKIIAFGVLNYFRDAWNVFDFVTVLGSITDILVTEIAETNNFINLSFLRLFRAARLIKLLRQGYTIRILLWTFVQSFKALPYVCLLIAMLFFIYAIIGMQVFGNIALDDDTSINRHNNFRTFLQALMLLFRSATGEAWHEIMLSCLSNQACDEQANATECGSDFAYFYFVSFIFLCSFLMLNLFVAVIMDNFEYLTRDSSILGPHHLDEFIRVWAEYDPAACGRISYNDMFEMLKHMSPPLGLGKKCPARVAYKRLVRMNMPISNEDMTVHFTSTLMALIRTALEIKLAPAGTKQHQCDAELRKEISVVWANLPQKTLDLLVPPHKPDEMTVGKVYAALMIFDFYKQNKTTRDQMQQAPGGLSQMGPVSLFHPLKATLEQTQPAVLRGARVFLRQKSSTSLSNGGAIQNQESGIKESVSWGTQRTQDAPHEARPPLERGHSTEIPVGRSGALAVDVQMQSITRRGPDGEPQPGLESQGRAASMPRLAAETQPVTDASPMKRSISTLAQRPRGTHLCSTTPDRPPPSQASSHHHHHRCHRRRDRKQRSLEKGPSLSADMDGAPSSAVGPGLPPGEGPTGCRRERERRQERGRSQERRQPSSSSSEKQRFYSCDRFGGREPPKPKPSLSSHPTSPTAGQEPGPHPQGSGSVNGSPLLSTSGASTPGRGGRRQLPQTPLTPRPSITYKTANSSPIHFAGAQTSLPAFSPGRLSRGLSEHNALLQRDPLSQPLAPGSRIGSDPYLGQRLDSEASVHALPEDTLTFEEAVATNSGRSSRTSYVSSLTSQSHPLRRVPNGYHCTLGLSSGGRARHSYHHPDQDHWC

SEQ ID NO: 39655 - protein, 2338 aa, Homo sapiens
MVRFGDELGGRYGGPGGGERARGGGAGGAGGPGPGGLQPGQRVLYKQSIAQRARTMALYNPIPVKQNCFTVNRSLFVFSEDNVVRKYAKRITEWPPFEYMILATIIANCIVLALEQHLPDGDKTPMSERLDDTEPYFIGIFCFEAGIKIIALGFVFHKGSYLRNGWNVMDFVVVLTGILATAGTDFDLRTLRAVRVLRPLKLVSGIPSLQVVLKSIMKAMVPLLQIGLLLFFAILMFAIIGLEFYMGKFHKACFPNSTDAEPVGDFPCGKEAPARLCEGDTECREYWPGPNFGITNFDNILFAILTVFQCITMEGWTDILYNTNDAAGNTWNWLYFIPLIIIGSFFMLNLVLGVLSGEFAKERERVENRRAFLKLRRQQQIERELNGYLEWIFKAEEVMLAEEDRNAEEKSPLDAVLKRAATKKSRNDLIHAEEGEDRFADLCAVGSPFARASLKSGKTESSSYFRRKEKMFRFFIRRMVKAQSFYWVVLCVVALNTLCVAMVHYNQPRRLTTTLYFAEFVFLGLFLTEMSLKMYGLGPRSYFRSSFNCFDFGVIVGSVFEVVWAAIKPGSSFGISVLRALRLLRIFKVTKYWSSLRNLVVSLLNSMKSIISLLFLLFLFIVVFALLGMQLFGGQFNFQDETPTTNFDTFPAAILTVFQILTGEDWNAVMYHGIESQGGVSKGMFSSFYFIVLTLFGNYTLLNVFLAIAVDNLANAQELTKDEEEMEEAANQKLALQKAKEVAEVSPMSAANISIAARQQNSAKARSVWEQRASQLRLQNLRASCEALYSEMDPEERLRFATTRHLRPDMKTHLDRPLVVELGRDGARGPVGGKARPEAAEAPEGVDPPRRHHRHRDKDKTPAAGDQDRAEAPKAESGEPGAREERPRPHRSHSKEAAGPPEARSERGRGPGPEGGRRHHRRGSPEEAAEREPRRHRAHRHQDPSKECAGAKGERRARHRGGPRAGPREAESGEEPARRHRARHKAQPAHEAVEKETTEKEATEKEAEIVEADKEKELRNHQPREPHCDLETSGTVTVGPMHTLPSTCLQKVEEQPEDADNQRNVTRMGSQPPDPNTIVHIPVMLTGPLGEATVVPSGNVDLESQAEGKKEVEADDVMRSGPRPIVPYSSMFCLSPTNLLRRFCHYIVTMRYFEVVILVVIALSSIALAAEDPVRTDSPRNNALKYLDYIFTGVFTFEMVIKMIDLGLLLHPGAYFRDLWNILDFIVVSGALVAFAFSGSKGKDINTIKSLRVLRVLRPLKTIKRLPKLKAVFDCVVNSLKNVLNILIVYMLFMFIFAVIAVQLFKGKFFYCTDESKELERDCRGQYLDYEKEEVEAQPRQWKKYDFHYDNVLWALLTLFTVSTGEGWPMVLKHSVDATYEEQGPSPGYRMELSIFYVVYFVVFPFFFVNIFVALIIITFQEQGDKVMSECSLEKNERACIDFAISAKPLTRYMPQNRQSFQYKTWTFVVSPPFEYFIMAMIALNTVVLMMKFYDAPYEYELMLKCLNIVFTSMFSMECVLKIIAFGVLNYFRDAWNVFDFVTVLGSITDILVTEIANNFINLSFLRLFRAARLIKLLRQGYTIRILLWTFVQSFKALPYVCLLIAMLFFIYAIIGMQVFGNIALDDDTSINRHNNFRTFLQALMLLFRSATGEAWHEIMLSCLSNQACDEQANATECGSDFAYFYFVSFIFLCSFLMLNLFVAVIMDNFEYLTRDSSILGPHHLDEFIRVWAEYDPAACGRISYNDMFEMLKHMSPPLGLGKKCPARVAYKRLVRMNMPISNEDMTVHFTSTLMALIRTALEIKLAPAGTKQHQCDAELRKEISVVWANLPQKTLDLLVPPHKPDEMTVGKVYAALMIFDFYKQNKTTRDQMQQAPGGLSQMGPVSLFHPLKATLEQTQPAVLRGARVFLRQKSSTSLSNGGAIQNQESGIKESVSWGTQRTQDAPHEARPPLERGHSTEIPVGRSGALAVDVQMQSITRRGPDGEPQPGLESQGRAASMPRLAAETQPVTDASPMKRSISTLAQRPRGTHLCSTTPDRPPPSQASSHHHHHRCHRRRDRKQRSLEKGPSLSADMDGAPSSAVGPGLPPGEGPTGCRRERERRQERGRSQERRQPSSSSSEKQRFYSCDRFGGREPPKPKPSLSSHPTSPTAGQEPGPHPQGSGSVNGSPLLSTSGASTPGRGGRRQLPQTPLTPRPSITYKTANSSPIHFAGAQTSLPAFSPGRLSRGLSEHNALLQRDPLSQPLAPGSRIGSDPYLGQRLDSEASVHALPEDTLTFEEAVATNSGRSSRTSYVSSLTSQSHPLRRVPNGYHCTLGLSSGGRARHSYHHPDQDHWC

SEQ ID NO: 39656 - protein, 2337 aa, Homo sapiens
MVRFGDELGGRYGGPGGGERARGGGAGGAGGPGPGGLQPGQRVLYKQSIAQRARTMALYNPIPVKQNCFTVNRSLFVFSEDNVVRKYAKRITEWPPFEYMILATIIANCIVLALEQHLPDGDKTPMSERLDDTEPYFIGIFCFEAGIKIIALGFVFHKGSYLRNGWNVMDFVVVLTGILATAGTDFDLRTLRAVRVLRPLKLVSGIPSLQVVLKSIMKAMVPLLQIGLLLFFAILMFAIIGLEFYMGKFHKACFPNSTDAEPVGDFPCGKEAPARLCEGDTECREYWPGPNFGITNFDNILFAILTVFQCITMEGWTDILYNTNDAAGNTWNWLYFIPLIIIGSFFMLNLVLGVLSGEFAKERERVENRRAFLKLRRQQQIERELNGYLEWIFKAEEVMLAEEDRNAEEKSPLDVLKRAATKKSRNDLIHAEEGEDRFADLCAVGSPFARASLKSGKTESSSYFRRKEKMFRFFIRRMVKAQSFYWVVLCVVALNTLCVAMVHYNQPRRLTTTLYFAEFVFLGLFLTEMSLKMYGLGPRSYFRSSFNCFDFGVIVGSVFEVVWAAIKPGSSFGISVLRALRLLRIFKVTKYWSSLRNLVVSLLNSMKSIISLLFLLFLFIVVFALLGMQLFGGQFNFQDETPTTNFDTFPAAILTVFQILTGEDWNAVMYHGIESQGGVSKGMFSSFYFIVLTLFGNYTLLNVFLAIAVDNLANAQELTKDEEEMEEAANQKLALQKAKEVAEVSPMSAANISIAARQQNSAKARSVWEQRASQLRLQNLRASCEALYSEMDPEERLRFATTRHLRPDMKTHLDRPLVVELGRDGARGPVGGKARPEAAEAPEGVDPPRRHHRHRDKDKTPAAGDQDRAEAPKAESGEPGAREERPRPHRSHSKEAAGPPEARSERGRGPGPEGGRRHHRRGSPEEAAEREPRRHRAHRHQDPSKECAGAKGERRARHRGGPRAGPREAESGEEPARRHRARHKAQPAHEAVEKETTEKEATEKEAEIVEADKEKELRNHQPREPHCDLETSGTVTVGPMHTLPSTCLQKVEEQPEDADNQRNVTRMGSQPPDPNTIVHIPVMLTGPLGEATVVPSGNVDLESQAEGKKEVEADDVMRSGPRPIVPYSSMFCLSPTNLLRRFCHYIVTMRYFEVVILVVIALSSIALAAEDPVRTDSPRNNALKYLDYIFTGVFTFEMVIKMIDLGLLLHPGAYFRDLWNILDFIVVSGALVAFAFSGSKGKDINTIKSLRVLRVLRPLKTIKRLPKLKAVFDCVVNSLKNVLNILIVYMLFMFIFAVIAVQLFKGKFFYCTDESKELERDCRGQYLDYEKEEVEAQPRQWKKYDFHYDNVLWALLTLFTVSTGEGWPMVLKHSVDATYEEQGPSPGYRMELSIFYVVYFVVFPFFFVNIFVALIIITFQEQGDKVMSECSLEKNERACIDFAISAKPLTRYMPQNRQSFQYKTWTFVVSPPFEYFIMAMIALNTVVLMMKFYDAPYEYELMLKCLNIVFTSMFSMECVLKIIAFGVLNYFRDAWNVFDFVTVLGSITDILVTEIANNFINLSFLRLFRAARLIKLLRQGYTIRILLWTFVQSFKALPYVCLLIAMLFFIYAIIGMQVFGNIALDDDTSINRHNNFRTFLQALMLLFRSATGEAWHEIMLSCLSNQACDEQANATECGSDFAYFYFVSFIFLCSFLMLNLFVAVIMDNFEYLTRDSSILGPHHLDEFIRVWAEYDPAACGRISYNDMFEMLKHMSPPLGLGKKCPARVAYKRLVRMNMPISNEDMTVHFTSTLMALIRTALEIKLAPAGTKQHQCDAELRKEISVVWANLPQKTLDLLVPPHKPDEMTVGKVYAALMIFDFYKQNKTTRDQMQQAPGGLSQMGPVSLFHPLKATLEQTQPAVLRGARVFLRQKSSTSLSNGGAIQNQESGIKESVSWGTQRTQDAPHEARPPLERGHSTEIPVGRSGALAVDVQMQSITRRGPDGEPQPGLESQGRAASMPRLAAETQPVTDASPMKRSISTLAQRPRGTHLCSTTPDRPPPSQASSHHHHHRCHRRRDRKQRSLEKGPSLSADMDGAPSSAVGPGLPPGEGPTGCRRERERRQERGRSQERRQPSSSSSEKQRFYSCDRFGGREPPKPKPSLSSHPTSPTAGQEPGPHPQGSGSVNGSPLLSTSGASTPGRGGRRQLPQTPLTPRPSITYKTANSSPIHFAGAQTSLPAFSPGRLSRGLSEHNALLQRDPLSQPLAPGSRIGSDPYLGQRLDSEASVHALPEDTLTFEEAVATNSGRSSRTSYVSSLTSQSHPLRRVPNGYHCTLGLSSGGRARHSYHHPDQDHWC

SEQ ID NO: 39657 - protein, 164 aa, Homo sapiens
NFRTFLQALMLLFRSATGEAWHEIMLSCLSNQACDEQANATECGSDFAYFYFVSFIFLCSFLMLNLFVAVIMDNFEYLTRDSSILGPHHLDEFIRVWAEYDPAACCRIHYKDMYSLLRCIAPPVGLGKNCPRRLAYKRLVRMNMPISNEDMTVHFTSTLMALIR

SEQ ID NO: 39658 - protein, 108 aa, Homo sapiens
LRNHQPREPHCDLETSGTVTVGPMHTLPSTCLQKVEEQPEDADNQRNVTRMGSQPPDPNTIVHIPVMLTGPLGEATVVPTLEKNVCLFLLTSMVSDEKSTVIRIVFFL

SEQ ID NO: 39659 - protein, 2339 aa, Homo sapiens [sequence omitted]

SEQ ID NO: 39660 - protein, 165 aa, Homo sapiens
  VARIANT 1: note = MOD_RES - Any amino acid
XNFRTFLQALMLLFRSATGEAWHEIMLSCLSNQACDEQANATECGSDFAYFYFVSFIFLCSFLMLNLFVAVIMDNFEYLTRDSSILGPHHLDEFIRVWAEYDPAACCRIHYKDMYSLLRCIAPPVGLGKNCPRRLAYKRLVRMNMPISNEDMTVHFTSTLMALIR

SEQ ID NO: 39661 - protein, 187 aa, Homo sapiens
LRNHQPREPHCDLETSGTVTVGPMHTLPSTCLQKVEEQPEDADNQRNVTRMGSQPPDPNTIVHIPVMLTGPLGEATVVPSPTIGRLQAEEQGEPARVSKLNLESDVRGQEASSTGERYRLGGGNVDLESQAEGKKEVEADDVMRSGPRPIVPYSSMFCLSPTNLLRRFCHYIVTMRYFEVVILVVIA

SEQ ID NO: 39662 - protein, 2261 aa, Homo sapiens
MARFGDEMPARYGGGGSGAAAGVVVGSGGGRGAGGSRQGGQPGAQRMYKQSMAQRARTMALYNPIPVRQNCLTVNRSLFLFSEDNVVRKYAKKITEWPPFEYMILATIIANCIVLALEQHLPDDDKTPMSERLDDTEPYFIGIFCFEAGIKIIALGFAFHKGSYLRNGWNVMDFVVVLTGILATVGTEFDLRTLRAVRVLRPLKLVSGIPSLQVVLKSIMKAMIPLLQIGLLLFFAILIFAIIGLEFYMGKFHTTCFEEGTDDIQGESPAPCGTEEPARTCPNGTKCQPYWEGPNNGITQFDNILFAVLTVFQCITMEGWTDLLYNSNDASGNTWNWLYFIPLIIIGSFFMLNLVLGVLSGEFAKERERVENRRAFLKLRRQQQIERELNGYMEWISKAEEVILAEDETDGEQRHPFDGALRRTTIKKSKTDLLNPEEAEDQLADIASVGSPFARASIKSAKLENSTFFHKKERRMRFYIRRMVKTQAFYWTVLSLVALNTLCVAIVHYNQPEWLSDFLYYAEFIFLGLFMSEMFIKMYGLGTRPYFHSSFNCFDCGVIIGSIFEVIWAVIKPGTSFGISVLRALRLLRIFKVTKYWASLRNLVVSLLNSMKSIISLLFLLFLFIVVFALLGMQLFGGQFNFDEGTPPTNFDTFPAAIMTVFQILTGEDWNEVMYDGIKSQGGVQGGMVFSIYFIVLTLFGNYTLLNVFLAIAVDNLANAQELTKDEQEEEEAANQKLALQKAKEVAEVSPLSAANMSIAVKEQQKNQKPAKSVWEQRTSEMRKQNLLASREALYNEMDPDERWKAAYTRHLRPDMKTHLDRPLVVDPQENRNNNTNKSRAAEPTVDQRLGQQRAEDFLRKQARYHDRARDPSGSAGLDARRPWAGSQEAELSREGPYGRESDHHAREGSLEQPGFWEGEAERGKAGDPHRRHVHRQGGSRESRSGSPRTGADGEHRRHRAHRRPGEEGPEDKAERRARHREGSRPARGGEGEGEGPDGGERRRRHRHGAPATYEGDARREDKERRHRRRKENQGSGVPVSGPNLSTTRPIQQDLGRQDPPLAEDIDNMKNNKLATAESAAPHGSLGHAGLPQSPAKMGNSTDPGPMLAIPAMATNPQNAASRRTPNNPGNPSNPGPPKTPENSLIVTNPSGTQTNSAKTARKPDHTTVDIPPACPPPLNHTVVQVNKNANPDPLPKKEEEKKEEEEDDRGEDGPKPMPPYSSMFILSTTNPLRRLCHYILNLRYFEMCILMVIAMSSIALAAEDPVQPNAPRNNVLRYFDYVFTGVFTFEMVIKMIDLGLVLHQGAYFRDLWNILDFIVVSGALVAFAFTGNSKGKDINTIKSLRVLRVLRPLKTIKRLPKLKAVFDCVVNSLKNVFNILIVYMLFMFIFAVVAVQLFKGKFFHCTDESKEFEKDCRGKYLLYEKNEVKARDREWKKYEFHYDNVLWALLTLFTVSTGEGWPQVLKHSVDATFENQGPSPGYRMEMSIFYVVYFVVFPFFFVNIFVALIIITFQEQGDKMMEEYSLEKNERACIDFAISAKPLTRHMPQNKQSFQYRMWQFVVSPPFEYTIMAMIALNTIVLMMKFYGASVAYENALRVFNIVFTSLFSLECVLKVMAFGILNYFRDAWNIFDFVTVLGSITDILVTEFGNNFINLSFLRLFRAARLIKLLRQGYTIRILLWTFVQSFKALPYVCLLIAMLFFIYAIIGMQVFGNIGIDVEDEDSDEDEFQITEHNNFRTFFQALMLLFRSATGEAWHNIMLSCLSGKPCDKNSGILTRECGNEFAYFYFVSFIFLCSFLMLNLFVAVIMDNFEYLTRDSSILGPHHLDEYVRVWAEYDPAACGRIHYKDMYSLLRVISPPLGLGKKCPHRVACKRLLRMDLPVADDNTVHFNSTLMALIRTALDIKIAKGGADKQQMDAELRKEMMAIWPNLSQKTLDLLVTPHKSTDLTVGKIYAAMMIMEYYRQSKAKKLQAMREEQDRTPLMFQRMEPPSPTQEGGPGQNALPSTQLDPGGALMAHESGLKESPSWVTQRAQEMFQKTGTWSPEQGPPTDMPNSQPNSQSVEMREMGRDGYSDSEHYLPMEGQGRAASMPRLPAENQRRRGRPRGNNLSTISDTSPMKRSASVLGPKARRLDDYSLERVPPEENQRHHQRRRDRSHRASERSLGRYTDVDTGLGTDLSMTTQSGDLPSKERDQERGRPKDRKHRQHHHHHHHHHHPPPPDKDRYAQERPDHGRARARDQRWSRSPSEGREHMAHRQ

SEQ ID NO: 39663 - protein, 2495 aa, Homo sapiens
MARFGDEMPARYGGGGSGAAAGVVVGSGGGRGAGGSRQGGQPGAQRMYKQSMAQRARTMALYNPIPVRQNCLTVNRSLFLFSEDNVVRKYAKKITEWPPFEYMILATIIANCIVLALEQHLPDDDKTPMSERLDDTEPYFIGIFCFEAGIKIIALGFAFHKGSYLRNGWNVMDFVVVLTGILATVGTEFDLRTLRAVRVLRPLKLVSGIPSLQVVLKSIMKAMIPLLQIGLLLFFAILIFAIIGLEFYMGKFHTTCFEEGTDDIQGESPAPCGTEEPARTCPNGTKCQPYWEGPNNGITQFDNILFAVLTVFQCITMEGWTDLLYNSNDASGNTWNWLYFIPLIIIGSFFMLNLVLGVLSGEFAKERERVENRRAFLKLRRQQQIERELNGYMEWISKAEEVILAEDETDGEQRHPFDGALRRTTIKKSKTDLLNPEEAEDQLADIASVGSPFARASIKSAKLENSTFFHKKERRMRFYIRRMVKTQAFYWTVLSLVALNTLCVAIVHYNQPEWLSDFLYYAEFIFLGLFMSEMFIKMYGLGTRPYFHSSFNCFDCGVIIGSIFEVIWAVIKPGTSFGISVLRALRLLRIFKVTKYWASLRNLVVSLLNSMKSIISLLFLLFLFIVVFALLGMQLFGGQFNFDEGTPPTNFDTFPAAIMTVFQILTGEDWNEVMYDGIKSQGGVQGGMVFSIYFIVLTLFGNYTLLNVFLAIAVDNLANAQELTKDEQEEEEAANQKLALQKAKEVAEVSPLSAANMSIAVKEQQKNQKPAKSVWEQRTSEMRKQNLLASREALYNEMDPDERWKAAYTRHLRPDMKTHLDRPLVVDPQENRNNNTNKSRAAEPTVDQRLGQQRAEDFLRKQARYHDRARDPSGSAGLDARRPWAGSQEAELSREGPYGRESDHHAREGSLEQPGFWEGEAERGKAGDPHRRHVHRQGGSRESRSGSPRTGADGEHRRHRAHRRPGEEGPEDKAERRARHREGSRPARGGEGEGEGPDGGERRRRHRHGAPATYEGDARREDKERRHRRRKENQGSGVPVSGPNLSTTRPIQQDLGRQDPPLAEDIDNMKNNKLATAESAAPHGSLGHAGLPQSPAKMGNSTDPGPMLAIPAMATNPQNAASRRTPNNPGNPSNPGPPKTPENSLIVTNPSGTQTNSAKTARKPDHTTVDIPPACPPPLNHTVVQVNKNANPDPLPKKEEEKKEEEEDDRGEDGPKPMPPYSSMFILSTTNPLRRLCHYILNLRYFEMCILMVIAMSSIALAAEDPVQPNAPRNNVLRYFDYVFTGVFTFEMVIKMIDLGLVLHQGAYFRDLWNILDFIVVSGALVAFAFTGNSKGKDINTIKSLRVLRVLRPLKTIKRLPKLKAVFDCVVNSLKNVFNILIVYMLFMFIFAVVAVQLFKGKFFHCTDESKEFEKDCRGKYLLYEKNEVKARDREWKKYEFHYDNVLWALLTLFTVSTGEGWPQVLKHSVDATFENQGPSPGYRMEMSIFYVVYFVVFPFFFVNIFVALIIITFQEQGDKMMEEYSLEKNERACIDFAISAKPLTRHMPQNKQSFQYRMWQFVVSPPFEYTIMAMIALNTIVLMMKFYGASVAYENALRVFNIVFTSLFSLECVLKVMAFGILNYFRDAWNIFDFVTVLGSITDILVTEFGNNFINLSFLRLFRAARLIKLLRQGYTIRILLWTFVQSFKALPYVCLLIAMLFFIYAIIGMQVFGNIGIDVEDEDSDEDEFQITEHNNFRTFFQALMLLFRSATGEAWHNIMLSCLSGKPCDKNSGILTRECGNEFAYFYFVSFIFLCSFLMLNLFVAVIMDNFEYLTRDSSILGPHHLDEYVRVWAEYDPAAWGRMPYLDMYQMLRHMSPPLGLGKKCPARVAYKRLLRMDLPVADDNTVHFNSTLMALIRTALDIKIAKGGADKQQMDAELRKEMMAIWPNLSQKTLDLLVTPHKSTDLTVGKIYAAMMIMEYYRQSKAKKLQAMREEQDRTPLMFQRMEPPSPTQEGGPGQNALPSTQLDPGGALMAHESGLKESPSWVTQRAQEMFQKTGTWSPEQGPPTDMPNSQPNSQSVEMREMGRDGYSDSEHYLPMEGQGRAASMPRLPAENQTISDTSPMKRSASVLGPKARRLDDYSLERVPPEENQRHHQRRRDRSHRASERSLGRYTDVDTGLGTDLSMTTQSGDLPSKERDQERGRPKDRKHRQHHHHHHHHHHPPPPDKDRYAQERPDHGRARARDQRWSRSPSEGREHMAHRQGSSSVSGSPAPSTSGTSTPRRGRRQLPQTPSTPRPHVSYSPVIRKAGGSGPPQQQQQQQQQQQQQAVARPGRAATSGPRRYPGPTAEPLAGDRPPTGGHSSGRSPRMERRVPGPARSESPRACRHGGARWPASGPHVSEGPPGPRHHGYYRGSDYDEADGPGSGGGEEAMAGAYDAPPPVRHASSGATGRSPRTPRASGPACASPSRHGRRLPNGYYPAHGLARPRGPGSRKGLHEPYSESDDDWC

SEQ ID NO: 39664 - protein, 2506 aa, Homo sapiens
MARFGDEMPARYGGGGSGAAAGVVVGSGGGRGAGGSRQGGQPGAQRMYKQSMAQRARTMALYNPIPVRQNCLTVNRSLFLFSEDNVVRKYAKKITEWPPFEYMILATIIANCIVLALEQHLPDDDKTPMSERLDDTEPYFIGIFCFEAGIKIIALGFAFHKGSYLRNGWNVMDFVVVLTGILATVGTEFDLRTLRAVRVLRPLKLVSGIPSLQVVLKSIMKAMIPLLQIGLLLFFAILIFAIIGLEFYMGKFHTTCFEEGTDDIQGESPAPCGTEEPARTCPNGTKCQPYWEGPNNGITQFDNILFAVLTVFQCITMEGWTDLLYNSNDASGNTWNWLYFIPLIIIGSFFMLNLVLGVLSGEFAKERERVENRRAFLKLRRQQQIERELNGYMEWISKAEEVILAEDETDGEQRHPFDALRRTTIKKSKTDLLNPEEAEDQLADIASVGSPFARASIKSAKLENSTFFHKKERRMRFYIRRMVKTQAFYWTVLSLVALNTLCVAIVHYNQPEWLSDFLYYAEFIFLGLFMSEMFIKMYGLGTRPYFHSSFNCFDCGVIIGSIFEVIWAVIKPGTSFGISVLRALRLLRIFKVTKYWASLRNLVVSLLNSMKSIISLLFLLFLFIVVFALLGMQLFGGQFNFDEGTPPTNFDTFPAAIMTVFQILTGEDWNEVMYDGIKSQGGVQGGMVFSIYFIVLTLFGNYTLLNVFLAIAVDNLANAQELTKDEQEEEEAANQKLALQKAKEVAEVSPLSAANMSIAVKEQQKNQKPAKSVWEQRTSEMRKQNLLASREALYNEMDPDERWKAAYTRHLRPDMKTHLDRPLVVDPQENRNNNTNKSRAAEPTVDQRLGQQRAEDFLRKQARYHDRARDPSGSAGLDARRPWAGSQEAELSREGPYGRESDHHAREGSLEQPGFWEGEAERGKAGDPHRRHVHRQGGSRESRSGSPRTGADGEHRRHRAHRRPGEEGPEDKAERRARHREGSRPARGGEGEGEGPDGGERRRRHRHGAPATYEGDARREDKERRHRRRKENQGSGVPVSGPNLSTTRPIQQDLGRQDPPLAEDIDNMKNNKLATAESAAPHGSLGHAGLPQSPAKMGNSTDPGPMLAIPAMATNPQNAASRRTPNNPGNPSNPGPPKTPENSLIVTNPSGTQTNSAKTARKPDHTTVDIPPACPPPLNHTVVQVNKNANPDPLPKKEEEKKEEEEDDRGEDGPKPMPPYSSMFILSTTNPLRRLCHYILNLRYFEMCILMVIAMSSIALAAEDPVQPNAPRNNVLRYFDYVFTGVFTFEMVIKMIDLGLVLHQGAYFRDLWNILDFIVVSGALVAFAFTGNSKGKDINTIKSLRVLRVLRPLKTIKRLPKLKAVFDCVVNSLKNVFNILIVYMLFMFIFAVVAVQLFKGKFFHCTDESKEFEKDCRGKYLLYEKNEVKARDREWKKYEFHYDNVLWALLTLFTVSTGEGWPQVLKHSVDATFENQGPSPGYRMEMSIFYVVYFVVFPFFFVNIFVALIIITFQEQGDKMMEEYSLEKNERACIDFAISAKPLTRHMPQNKQSFQYRMWQFVVSPPFEYTIMAMIALNTIVLMMKFYGASVAYENALRVFNIVFTSLFSLECVLKVMAFGILNYFRDAWNIFDFVTVLGSITDILVTEFGNNFINLSFLRLFRAARLIKLLRQGYTIRILLWTFVQSFKALPYVCLLIAMLFFIYAIIGMQVFGNIGIDVEDEDSDEDEFQITEHNNFRTFFQALMLLFRSATGEAWHNIMLSCLSGKPCDKNSGILTRECGNEFAYFYFVSFIFLCSFLMLNLFVAVIMDNFEYLTRDSSILGPHHLDEYVRVWAEYDPAAWGRMPYLDMYQMLRHMSPPLGLGKKCPARVAYKRLLRMDLPVADDNTVHFNSTLMALIRTALDIKIAKGGADKQQMDAELRKEMMAIWPNLSQKTLDLLVTPHKSTDLTVGKIYAAMMIMEYYRQSKAKKLQAMREEQDRTPLMFQRMEPPSPTQEGGPGQNALPSTQLDPGGALMAHESGLKESPSWVTQRAQEMFQKTGTWSPEQGPPTDMPNSQPNSQSVEMREMGRDGYSDSEHYLPMEGQGRAASMPRLPAENQRRRGRPRGNNLSTISDTSPMKRSASVLGPKARRLDDYSLERVPPEENQRHHQRRRDRSHRASERSLGRYTDVDTGLGTDLSMTTQSGDLPSKERDQERGRPKDRKHRQHHHHHHHHHHPPPPDKDRYAQERPDHGRARARDQRWSRSPSEGREHMAHRQGSSSVSGSPAPSTSGTSTPRRGRRQLPQTPSTPRPHVSYSPVIRKAGGSGPPQQQQQQQQQQQQQAVARPGRAATSGPRRYPGPTAEPLAGDRPPTGGHSSGRSPRMERRVPGPARSESPRACRHGGARWPASGPHVSEGPPGPRHHGYYRGSDYDEADGPGSGGGEEAMAGAYDAPPPVRHASSGATGRSPRTPRASGPACASPSRHGRRLPNGYYPAHGLARPRGPGSRKGLHEPYSESDDDWC

SEQ ID NO: 39665 - protein, 2512 aa, Homo sapiens
MARFGDEMPARYGGGGSGAAAGVVVGSGGGRGAGGSRQGGQPGAQRMYKQSMAQRARTMALYNPIPVRQNCLTVNRSLFLFSEDNVVRKYAKKITEWPPFEYMILATIIANCIVLALEQHLPDDDKTPMSERLDDTEPYFIGIFCFEAGIKIIALGFAFHKGSYLRNGWNVMDFVVVLTGILATVGTEFDLRTLRAVRVLRPLKLVSGIPSLQVVLKSIMKAMIPLLQIGLLLFFAILIFAIIGLEFYMGKFHTTCFEEGTDDIQGESPAPCGTEEPARTCPNGTKCQPYWEGPNNGITQFDNILFAVLTVFQCITMEGWTDLLYNSNDASGNTWNWLYFIPLIIIGSFFMLNLVLGVLSGEFAKERERVENRRAFLKLRRQQQIERELNGYMEWISKAEEVILAEDETDGEQRHPFDGALRRTTIKKSKTDLLNPEEAEDQLADIASVGSPFARASIKSAKLENSTFFHKKERRMRFYIRRMVKTQAFYWTVLSLVALNTLCVAIVHYNQPEWLSDFLYYAEFIFLGLFMSEMFIKMYGLGTRPYFHSSFNCFDCGVIIGSIFEVIWAVIKPGTSFGISVLRALRLLRIFKVTKYWASLRNLVVSLLNSMKSIISLLFLLFLFIVVFALLGMQLFGGQFNFDEGTPPTNFDTFPAAIMTVFQILTGEDWNEVMYDGIKSQGGVQGGMVFSIYFIVLTLFGNYTLLNVFLAIAVDNLANAQELTKVEADEQEEEEAANQKLALQKAKEVAEVSPLSAANMSIAVKEQQKNQKPAKSVWEQRTSEMRKQNLLASREALYNEMDPDERWKAAYTRHLRPDMKTHLDRPLVVDPQENRNNNTNKSRAAEPTVDQRLGQQRAEDFLRKQARYHDRARDPSGSAGLDARRPWAGSQEAELSREGPYGRESDHHAREGSLEQPGFWEGEAERGKAGDPHRRHVHRQGGSRESRSGSPRTGADGEHRRHRAHRRPGEEGPEDKAERRARHREGSRPARGGEGEGEGPDGGERRRRHRHGAPATYEGDARREDKERRHRRRKENQGSGVPVSGPNLSTTRPIQQDLGRQDPPLAEDIDNMKNNKLATAESAAPHGSLGHAGLPQSPAKMGNSTDPGPMLAIPAMATNPQNAASRRTPNNPGNPSNPGPPKTPENSLIVTNPSGTQTNSAKTARKPDHTTVDIPPACPPPLNHTVVQVNKNANPDPLPKKEEEKKEEEEDDRGEDGPKPMPPYSSMFILSTTNPLRRLCHYILNLRYFEMCILMVIAMSSIALAAEDPVQPNAPRNNVLRYFDYVFTGVFTFEMVIKMIDLGLVLHQGAYFRDLWNILDFIVVSGALVAFAFTGNSKGKDINTIKSLRVLRVLRPLKTIKRLPKLKAVFDCVVNSLKNVFNILIVYMLFMFIFAVVAVQLFKGKFFHCTDESKEFEKDCRGKYLLYEKNEVKARDREWKKYEFHYDNVLWALLTLFTVSTGEGWPQVLKHSVDATFENQGPSPGYRMEMSIFYVVYFVVFPFFFVNIFVALIIITFQEQGDKMMEEYSLEKNERACIDFAISAKPLTRHMPQNKQSFQYRMWQFVVSPPFEYTIMAMIALNTIVLMMKFYGASVAYENALRVFNIVFTSLFSLECVLKVMAFGILNYFRDAWNIFDFVTVLGSITDILVTEFGNPNNFINLSFLRLFRAARLIKLLRQGYTIRILLWTFVQSFKALPYVCLLIAMLFFIYAIIGMQVFGNIGIDVEDEDSDEDEFQITEHNNFRTFFQALMLLFRSATGEAWHNIMLSCLSGKPCDKNSGILTRECGNEFAYFYFVSFIFLCSFLMLNLFVAVIMDNFEYLTRDSSILGPHHLDEYVRVWAEYDPAAWGRMPYLDMYQMLRHMSPPLGLGKKCPARVAYKRLLRMDLPVADDNTVHFNSTLMALIRTALDIKIAKGGADKQQMDAELRKEMMAIWPNLSQKTLDLLVTPHKSTDLTVGKIYAAMMIMEYYRQSKAKKLQAMREEQDRTPLMFQRMEPPSPTQEGGPGQNALPSTQLDPGGALMAHESGLKESPSWVTQRAQEMFQKTGTWSPEQGPPTDMPNSQPNSQSVEMREMGRDGYSDSEHYLPMEGQGRAASMPRLPAENQRRRGRPRGNNLSTISDTSPMKRSASVLGPKARRLDDYSLERVPPEENQRHHQRRRDRSHRASERSLGRYTDVDTGLGTDLSMTTQSGDLPSKERDQERGRPKDRKHRQHHHHHHHHHHPPPPDKDRYAQERPDHGRARARDQRWSRSPSEGREHMAHRQGSSSVSGSPAPSTSGTSTPRRGRRQLPQTPSTPRPHVSYSPVIRKAGGSGPPQQQQQQQQQQQQQAVARPGRAATSGPRRYPGPTAEPLAGDRPPTGGHSSGRSPRMERRVPGPARSESPRACRHGGARWPASGPHVSEGPPGPRHHGYYRGSDYDEADGPGSGGGEEAMAGAYDAPPPVRHASSGATGRSPRTPRASGPACASPSRHGRRLPNGYYPAHGLARPRGPGSRKGLHEPYSESDDDWC

SEQ ID NO: 39666 - protein, 267 aa, Homo sapiens
MLFMFIFAVVAVQLFKGKFFHCTDESKEFEKDCRGKYLLYEKNEVKARDREWKKYEFHYDNVLWALLTLFTVSTGEGWPQVLKHSVDATFENQGPSPGYRMEMSIFYVVYFVVFPFFFVNIFVALIIITFQEQGDKMMEEYSLEKNERACIDFAISAKPLTRHMPQNKQSFQYRMWQFVVSPPFEYTIMAMIALNTIVLMMKFYGASVAYENALRVFNIVFTSLFSLECVLKVMAFGILNYFRDAWNIFDFVTVLGSITDILVTEFG

SEQ ID NO: 39667 - protein, 2264 aa, Homo sapiens
MALYNPIPVRQNCFTVNRSLFIFGEDNIVRKYAKKLIDWPPFEYMILATIIANCIVLALEQHLPEDDKTPMSRRLEKTEPYFIGIFCFEAGIKIVALGFIFHKGSYLRNGWNVMDFIVVLSGILATAGTHFNTHVDLRTLRAVRVLRPLKLVSGIPSLQIVLKSIMKAMVPLLQIGLLLFFAILMFAIIGLEFYSGKLHRACFMNNSGILEGFDPPHPCGVQGCPAGYECKDWIGPNDGITQFDNILFAVLTVFQCITMEGWTTVLYNTNDALGATWNWLYFIPLIIIGSFFVLNLVLGVLSGEFAKERERVENRRAFMKLRRQQQIERELNGYRAWIDKAEEVMLAEENKNAGTSALEVLRRATIKRSRTEAMTRDSSDEHCVDISSVGTPLARASIKSAKVDGVSYFRHKERLLRISIRHMVKSQVFYWIVLSLVALNTACVAIVHHNQPQWLTHLLYYAEFLFLGLFLLEMSLKMYGMGPRLYFHSSFNCFDFGVTVGSIFEVVWAIFRPGTSFGISVLRALRLLRIFKITKYWASLRNLVVSLMSSMKSIISLLFLLFLFIVVFALLGMQLFGGRFNFNDGTPSANFDTFPAAIMTVFQILTGEDWNEVMYNGIRSQGGVSSGMWSAIYFIVLTLFGNYTLLNVFLAIAVDNLANAQELTKDEQEEEEAFNQKHALQKAKEVSPMSAPNMPSIERDRRRRHHMSMWEPRSSHLRERRRRHHMSVWEQRTSQLRKHMQMSSQEALNREEAPTMNPLNPLNPLSSLNPLNAHPSLYRRPRAIEGLALGLALEKFEEERISRGGSLKGDGGDRSSALDNQRTPLSLGQREPPWLARPCHGNCDPTQQEAGGGEAVVTFEDRARHRQSQRRSRHRRVRTEGKESSSASRSRSASQERSLDEAMPTEGEKDHELRGNHGAKEPTIQEERAQDLRRTNSLMVSRGSGLAGGLDEADTPLVLPHPELEVGKHVVLTEQEPEGSSEQALLGNVQLDMGRVISQSEPDLSCITANTDKATTESTSVTVAIPDVDPLVDSTVVHISNKTDGEASPLKEAEIREDEEEVEKKKQKKEKRETGKAMVPHSSMFIFSTTNPIRRACHYIVNLRYFEMCILLVIAASSIALAAEDPVLTNSERNKVLRYFDYVFTGVFTFEMVIKMIDQGLILQDGSYFRDLWNILDFVVVVGALVAFALANSMKTNKGRDIKTIKSLRVLRVLRPLKTIKRLPKLKAVFDCVVTSLKNVFNILIVYKLFMFIFAVIAVQLFKGKFFYCTDSSKDTEKECIGNYVDHEKNKMEVKGREWKRHEFHYDNIIWALLTLFTVSTGEGWPQVLQHSVDVTEEDRGPSRSNRMEMSIFYVVYFVVFPFFFVNIFVALIIITFQEQGDKMMEECSLEKNERACIDFAISAKPLTRYMPQNRHTFQYRVWHFVVSPSFEYTIMAMIALNTVVLMMKYYSAPCTYELALKYLNIAFTMVFSLECVLKVIAFGFLNYFRDTWNIFDFITVIGSITEIILTDSKLVNTSGFNMSFLKLFRAARLIKLLRQGYTIRILLWTFVQSFKALPYVCLLIAMLFFIYAIIGMQVFGNIKLDEESHINRHNNFRSFFGSLMLLFRSATGEAWQEIMLSCLGEKGCEPDTTAPSGQNENERCGTDLAYVYFVSFIFFCSFLMLNLFVAVIMDNFEYLTRDSSILGPHHLDEFVRVWAEYDRAACGRIHYTEMYEMLTLMSPPLGLGKRCPSKVAYKRLVLMNMPVAEDMTVHFTSTLMALIRTALDIKIAKGGADRQQLDSELQKETLAIWPHLSQKMLDLLVPMPKASDLTVGKIYAAMMIMDYYKQSKVKKQRQQLEEQKNAPMFQRMEPSSLPQEIIANAKALPYLQQDPVSGLSGRSGYPSMSPLSPQDIFQLACMDPADDGQFQERQSLEPEVSELKSVQPSNHGIYLPSDTQEHAGSGRASSMPRLTVDPQVVTDPSSMRRSFSTIRDKRSNSSWLEEFSMERSSENTYKSRRRSYHSSLRLSAHRLNSDSGHKSDTHRSGGRERGRSKERKHLLSPDVSRCNSEERGTQADWESPERRQSRSPSEGRSQTPNRQGTGSLSESSIPSVSDTSTPRRSRRQLPPVPPKPRPLLSYSSLIRHAGSISPPADGSEEGSPLTSQALESNNACLTESSNSPHPQQSQHASPQRYISEPYLALHEDSHASDCGEEETLTFEAAVATSLGRSNTIGSAPPLRHSWQMPNGHYRRRRRGGPGPGMMCGAVNNLLSDTEEDDKC

SEQ ID NO: 39668 - protein, 2202 aa, Homo sapiens
MALYNPIPVRQNCFTVNRSLFIFGEDNIVRKYAKKLIDWPPFEYMILATIIANCIVLALEQHLPEDDKTPMSRRLEKTEPYFIGIFCFEAGIKIVALGFIFHKGSYLRNGWNVMDFIVVLSGILATAGTHFNTHVDLRTLRAVRVLRPLKLVSGIPSLQIVLKSIMKAMVPLLQIGLLLFFAILMFAIIGLEFYSGKLHRACFMNNSGILEGFDPPHPCGVQGCPAGYECKDWIGPNDGITQFDNILFAVLTVFQCITMEGWTTVLYNTNDALGATWNWLYFIPLIIIGSFFVLNLVLGVLSGEFAKERERVENRRAFMKLRRQQQIERELNGYRAWIDKAEEVMLAEENKNAGTSALEVLRRATIKRSRTEAMTRDSSDEHCVDISSVGTPLARASIKSAKVDGVSYFRHKERLLRISIRHMVKSQVFYWIVLSLVALNTACVAIVHHNQPQWLTHLLYYAEFLFLGLFLLEMSLKMYGMGPRLYFHSSFNCFDFGVTVGSIFEVVWAIFRPGTSFGISVLRALRLLRIFKITKYWASLRNLVVSLMSSMKSIISLLFLLFLFIVVFALLGMQLFGGRFNFNDGTPSANFDTFPAAIMTVFQILTGEDWNEVMYNGIRSQGGVSSGMWSAIYFIVLTLFGNYTLLNVFLAIAVDNLANAQELTKDEQEEEEAFNQKHALQKAKEVSPMSAPNMPSIERERRRRHHMSVWEQRTSQLRKHMQMSSQEALNREEAPTMNPLNPLNPLSSLNPLNAHPSLYRRPRAIEGLALGLALEKFEEERISRGGSLKGDGGDRSSALDNQRTPLSLGQREPPWLARPCHGNCDPTQQEAGGGEAVVTFEDRARHRQSQRRSRHRRVRTEGKESSSASRSRSASQERSLDEAMPTEGEKDHELRGNHGAKEPTIQEERAQDLRRTNSLMVSRGSGLAGGLDEADTPLVLPHPELEVGKHVVLTEQEPEGSSEQALLGNVQLDMGRVISQSEPDLSCITANTDKATTESTSVTVAIPDVDPLVDSTVVHISNKTDGEASPLKEAEIREDEEEVEKKKQKKEKRETGKAMVPHSSMFIFSTTNPIRRACHYIVNLRYFEMCILLVIAASSIALAAEDPVLTNSERNKVLRYFDYVFTGVFTFEMVIKMIDQGLILQDGSYFRDLWNILDFVVVVGALVAFALANSMKTNKGRDIKTIKSLRVLRVLRPLKTIKRLPKLKAVFDCVVTSLKNVFNILIVYKLFMFIFAVIAVQLFKGKFFYCTDSSKDTEKECIGNYVDHEKNKMEVKGREWKRHEFHYDNIIWALLTLFTVSTGEGWPQVLQHSVDVTEEDRGPSRSNRMEMSIFYVVYFVVFPFFFVNIFVALIIITFQEQGDKMMEECSLEKNERACIDFAISAKPLTRYMPQNRHTFQYRVWHFVVSPSFEYTIMAMIALNTVVLMMKYYSAPCTYELALKYLNIAFTMVFSLECVLKVIAFGFLNYFRDTWNIFDFITVIGSITEIILTDSKLVNTSGFNMSFLKLFRAARLIKLLRQGYTIRILLWTFVQSFKALPYVCLLIAMLFFIYAIIGMQVFGNIKLDEESHINRHNNFRSFFGSLMLLFRSATGEAWQEIMLSCLGEKGCEPDTTAPSGQNENERCGTDLAYVYFVSFIFFCSFLMLNLFVAVIMDNFEYLTRDSSILGPHHLDEFVRVWAEYDRAACGRIPYKDMYKLVRVISPPLGLGENCPYRVACKRLVLMNMPVAEDMTVHFTSTLMALIRTALDIKIAKGGADRQQLDSELQKETLAIWPHLSQKMLDLLVPMPKASDLTVGKIYAAMMIMDYYKQSKVKKQRQQLEEQKNAPMFQRMEPSSLPQEIIANAKALPYLQQDPVSGLSGRSGYPSMSPLSPQDIFQLACMDPADDGQFQERQSLVVTDPSSMRRSFSTIRDKRSNSSWLEEFSMERSSENTYKSRRRSYHSSLRLSAHRLNSDSGHKSDTHRSGGRERGRSKERKHLLSPDVSRCNSEERGTQADWESPERRQSRSPSEGRSQTPNRQGTGSLSESSIPSVSDTSTPRRSRRQLPPVPPKPRPLLSYSSLIRHAGSISPPADGSEEGSPLTSQALESNNACLTESSNSPHPQQSQHASPQRYISEPYLALHEDSHASDCGEEETLTFEAAVATSLGRSNTIGSAPPLRHSWQMPNGHYRRRRRGGPGPGMMCGAVNNLLSDTEEDDKC

SEQ ID NO: 39669 - protein, 2294 aa, Homo sapiens
MARFGEAVVARPGSGDGDSDQSRNRQGTPVPASGQAAAYKQTKAQRARTMALYNPIPVRQNCFTVNRSLFIFGEDNIVRKYAKKLIDWPPFEYMILATIIANCIVLALEQHLPEDDKTPMSRRLEKTEPYFIGIFCFEAGIKIVALGFIFHKGSYLRNGWNVMDFIVVLSGILATAGTHFNTHVDLRTLRAVRVLRPLKLVSGIPSLQIVLKSIMKAMVPLLQIGLLLFFAILMFAIIGLEFYSGKLHRACFMNNSGILEGFDPPHPCGVQGCPAGYECKDWIGPNDGITQFDNILFAVLTVFQCITMEGWTTVLYNTNDALGATWNWLYFIPLIIIGSFFVLNLVLGVLSGEFAKERERVENRRAFMKLRRQQQIERELNGYRAWIDKAEEVMLAEENKNAGTSALEVLRRATIKRSRTEAMTRDSSDEHCVDISSVGTPLARASIKSAKVDGVSYFRHKERLLRISIRHMVKSQVFYWIVLSLVALNTACVAIVHHNQPQWLTHLLYYAEFLFLGLFLLEMSLKMYGMGPRLYFHSSFNCFDFGVTVGSIFEVVWAIFRPGTSFGISVLRALRLLRIFKITKYWASLRNLVVSLMSSMKSIISLLFLLFLFIVVFALLGMQLFGGRFNFNDGTPSANFDTFPAAIMTVFQILTGEDWNEVMYNGIRSQGGVSSGMWSAIYFIVLTLFGNYTLLNVFLAIAVDNLANAQELTKDEQEEEEAFNQKHALQKAKEVSPMSAPNMPSIERERRRRHHMSVWEQRTSQLRKHMQMSSQEALNREEAPTMNPLNPLNPLSSLNPLNAHPSLYRRPRAIEGLALGLALEKFEEERISRGGSLKGDGGDRSSALDNQRTPLSLGQREPPWLARPCHGNCDPTQQEAGGGEAVVTFEDRARHRQSQRRSRHRRVRTEGKESSSASRSRSASQERSLDEAMPTEGEKDHELRGNHGAKEPTIQEERAQDLRRTNSLMVSRGSGLAGGLDEADTPLVLPHPELEVGKHVVLTEQEPEGSSEQALLGNVQLDMGRVISQSEPDLSCITANTDKATTESTSVTVAIPDVDPLVDSTVVHISNKTDGEASPLKEAEIREDEEEVEKKKQKKEKRETGKAMVPHSSMFIFSTTNPIRRACHYIVNLRYFEMCILLVIAASSIALAAEDPVLTNSERNKVLRYFDYVFTGVFTFEMVIKMIDQGLILQDGSYFRDLWNILDFVVVVGALVAFALANALGTNKGRDIKTIKSLRVLRVLRPLKTIKRLPKLKAVFDCVVTSLKNVFNILIVYKLFMFIFAVIAVQLFKGKFFYCTDSSKDTEKECIGNYVDHEKNKMEVKGREWKRHEFHYDNIIWALLTLFTVSTGEGWPQVLQHSVDVTEEDRGPSRSNRMEMSIFYVVYFVVFPFFFVNIFVALIIITFQEQGDKMMEECSLEKNERACIDFAISAKPLTRYMPQNRHTFQYRVWHFVVSPSFEYTIMAMIALNTVVLMMKYYSAPCTYELALKYLNIAFTMVFSLECVLKVIAFGFLNYFRDTWNIFDFITVIGSITEIILTDSKLVNTSGFNMSFLKLFRAARLIKLLRQGYTIRILLWTFVQSFKALPYVCLLIAMLFFIYAIIGMQVFGNIKLDEESHINRHNNFRSFFGSLMLLFRSATGEAWQEIMLSCLGEKGCEPDTTAPSGQNENERCGTDLAYVYFVSFIFFCSFLMLNLFVAVIMDNFEYLTRDSSILGPHHLDEFVRVWAEYDRAACGRIHYTEMYEMLTLMSPPLGLGKRCPSKVAYKRLVLMNMPVAEDMTVHFTSTLMALIRTALDIKIAKGGADRQQLDSELQKETLAIWPHLSQKMLDLLVPMPKASDLTVGKIYAAMMIMDYYKQSKVKKQRQQLEEQKNAPMFQRMEPSSLPQEIIANAKALPYLQQDPVSGLSGRSGYPSMSPLSPQDIFQLACMDPADDGQFQERQSLEPEVSELKSVQPSNHGIYLPSDTQEHAGSGRASSMPRLTVDPQVVTDPSSMRRSFSTIRDKRSNSSWLEEFSMERSSENTYKSRRRSYHSSLRLSAHRLNSDSGHKSDTHRSGGRERGRSKERKHLLSPDVSRCNSEERGTQADWESPERRQSRSPSEGRSQTPNRQGTGSLSESSIPSVSDTSTPRRSRRQLPPVPPKPRPLLSYSSLIRHAGSISPPADGSEEGSPLTSQALESNNACLTESSNSPHPQQSQHASPQRYISEPYLALHEDSHASDCGEEETLTFEAAVATSLGRSNTIGSAPPLRHSWQMPNGHYRRRRRGGPGPGMMCGAVNNLLSDTEEDDKC

SEQ ID NO: 39670 - protein, 1877 aa, Homo sapiens
MLAEENKNAGTSALEVLRRATIKRSRTEAMTRDSSDEHCVDISSVGTPLARASIKSAKVDGVSYFRHKERLLRISIRHMVKSQVFYWIVLSLVALNTACVAIVHHNQPQWLTHLLYYAEFLFLGLFLLEMSLKMYGMGPRLYFHSSFNCFDFGVTVGSIFEVVWAIFRPGTSFGISVLRALRLLRIFKITKYWASLRNLVVSLMSSMKSIISLLFLLFLFIVVFALLGMQLFGGRFNFNDGTPSANFDTFPAAIMTVFQILTGEDWNEVMYNGIRSQGGVSSGMWSAIYFIVLTLFGNYTLLNVFLAIAVDNLANAQELTKDEQEEEEAFNQKHALQKAKEVSPMSAPNMPSIERDRRRRHHMSMWEPRSSHLRERRRRHHMSVWEQRTSQLRKHMQMSSQEALNREEAPTMNPLNPLNPLSSLNPLNAHPSLYRRPRAIEGLALGLALEKFEEERISRGGSLKGDGGDRSSALDNQRTPLSLGQREPPWLARPCHGNCDPTQQEAGGGEAVVTFEDRARHRQSQRRSRHRRVRTEGKESSSASRSRSASQERSLDEAMPTEGEKDHELRGNHGAKEPTIQEERAQDLRRTNSLMVSRGSGLAGGLDEADTPLVLPHPELEVGKHVVLTEQEPEGSSEQALLGNVQLDMGRVISQSEPDLSCITANTDKATTESTSVTVAIPDVDPLVDSTVVHISNKTDGEASPLKEAEIREDEEEVEKKKQKKEKRETGKAMVPHSSMFIFSTTNPIRRACHYIVNLRYFEMCILLVIAASSIALAAEDPVLTNSERNKVLRYFDYVFTGVFTFEMVIKMIDQGLILQDGSYFRDLWNILDFVVVVGALVAFALAMSLETNKGRDIKTIKSLRVLRVLRPLKTIKRLPKLKAVFDCVVTSLKNVFNILIVYKLFMFIFAVIAVQLFKGKFFYCTDSSKDTEKECIGNYVDHEKNKMEVKGREWKRHEFHYDNIIWALLTLFTVSTGEGWPQVLQHSVDVTEEDRGPSRSNRMEMSIFYVVYFVVFPFFFVNIFVALIIITFQEQGDKMMEECSLEKNERACIDFAISAKPLTRYMPQNRHTFQYRVWHFVVSPSFEYTIMAMIALNTVVLMMKYYSAPCTYELALKYLNIAFTMVFSLECVLKVIAFGFLNYFRDTWNIFDFITVIGSITEIILTDSKLVNTSGFNMSFLKLFRAARLIKLLRQGYTIRILLWTFVQSFKALPYVCLLIAMLFFIYAIIGMQVFGNIKLDEESHINRHNNFRSFFGSLMLLFRSATGEAWQEIMLSCLGEKGCEPDTTAPSGQNENERCGTDLAYVYFVSFIFFCSFLMLNLFVAVIMDNFEYLTRDSSILGPHHLDEFVRVWAEYDRAACGRIHYTEMYEMLTLMSPPLGLGKRCPSKVAYKRLVLMNMPVAEDMTVHFTSTLMALIRTALDIKIAKGGADRQQLDSELQKETLAIWPHLSQKMLDLLVPMPKASDLTVGKIYAAMMIMDYYKQSKVKKQRQQLEEQKNAPMFQRMEPSSLPQEIIANAKALPYLQQDPVSGLSGRSGYPSMSPLSPQDIFQLACMDPADDGQFQERQSLVVTDPSSMRRSFSTIRDKRSNSSWLEEFSMERSSENTYKSRRRSYHSSLRLSAHRLNSDSGHKSDTHRSGGRERGRSKERKHLLSPDVSRCNSEERGTQADWESPERRQSRSPSEGRSQTPNRQGTGSLSESSIPSVSDTSTPRRSRRQLPPVPPKPRPLLSYSSLIRHAGSISPPADGSEEGSPLTSQALESNNACLTESSNSPHPQQSQHASPQRYISEPYLALHEDSHASDCGEEETLTFEAAVATSLGRSNTIGSAPPLRHSWQMPNGHYRRRRRGGPGPGMMCGAVNNLLSDTEEDDKC

SEQ ID NO: 39671 - protein, 2270 aa, Homo sapiens
MARFGEAVVARPGSGDGDSDQSRNRQGTPVPASGQAAAYKQTKAQRARTMALYNPIPVRQNCFTVNRSLFIFGEDNIVRKYAKKLIDWPPFEYMILATIIANCIVLALEQHLPEDDKTPMSRRLEKTEPYFIGIFCFEAGIKIVALGFIFHKGSYLRNGWNVMDFIVVLSGILATAGTHFNTHVDLRTLRAVRVLRPLKLVSGIPSLQIVLKSIMKAMVPLLQIGLLLFFAILMFAIIGLEFYSGKLHRACFMNNSGILEGFDPPHPCGVQGCPAGYECKDWIGPNDGITQFDNILFAVLTVFQCITMEGWTTVLYNTNDALGATWNWLYFIPLIIIGSFFVLNLVLGVLSGEFAKERERVENRRAFMKLRRQQQIERELNGYRAWIDKAEEVMLAEENKNAGTSALEVLRRATIKRSRTEAMTRDSSDEHCVDISSVGTPLARASIKSAKVDGVSYFRHKERLLRISIRHMVKSQVFYWIVLSLVALNTACVAIVHHNQPQWLTHLLYYAEFLFLGLFLLEMSLKMYGMGPRLYFHSSFNCFDFGVTVGSIFEVVWAIFRPGTSFGISVLRALRLLRIFKITKYWASLRNLVVSLMSSMKSIISLLFLLFLFIVVFALLGMQLFGGRFNFNDGTPSANFDTFPAAIMTVFQILTGEDWNEVMYNGIRSQGGVSSGMWSAIYFIVLTLFGNYTLLNVFLAIAVDNLANAQELTKDEQEEEEAFNQKHALQKAKEVSPMSAPNMPSIERDRRRRHHMSMWEPRSSHLRERRRRHHMSVWEQRTSQLRKHMQMSSQEALNREEAPTMNPLNPLNPLSSLNPLNAHPSLYRRPRAIEGLALGLALEKFEEERISRGGSLKGDGGDRSSALDNQRTPLSLGQREPPWLARPCHGNCDPTQQEAGGGEAVVTFEDRARHRQSQRRSRHRRVRTEGKESSSASRSRSASQERSLDEAMPTEGEKDHELRGNHGAKEPTIQEERAQDLRRTNSLMVSRGSGLAGGLDEADTPLVLPHPELEVGKHVVLTEQEPEGSSEQALLGNVQLDMGRVISQSEPDLSCITANTDKATTESTSVTVAIPDVDPLVDSTVVHISNKTDGEASPLKEAEIREDEEEVEKKKQKKEKRETGKAMVPHSSMFIFSTTNPIRRACHYIVNLRYFEMCILLVIAASSIALAAEDPVLTNSERNKVLRYFDYVFTGVFTFEMVIKMIDQGLILQDGSYFRDLWNILDFVVVVGALVAFALANALGTNKGRDIKTIKSLRVLRVLRPLKTIKRLPKLKAVFDCVVTSLKNVFNILIVYKLFMFIFAVIAVQLFKGKFFYCTDSSKDTEKECIGNYVDHEKNKMEVKGREWKRHEFHYDNIIWALLTLFTVSTGEGWPQVLQHSVDVTEEDRGPSRSNRMEMSIFYVVYFVVFPFFFVNIFVALIIITFQEQGDKMMEECSLEKNERACIDFAISAKPLTRYMPQNRHTFQYRVWHFVVSPSFEYTIMAMIALNTVVLMMKYYSAPCTYELALKYLNIAFTMVFSLECVLKVIAFGFLNYFRDTWNIFDFITVIGSITEIILTDSKLVNTSGFNMSFLKLFRAARLIKLLRQGYTIRILLWTFVQSFKALPYVCLLIAMLFFIYAIIGMQVFGNIKLDEESHINRHNNFRSFFGSLMLLFRSATGEAWQEIMLSCLGEKGCEPDTTAPSGQNENERCGTDLAYVYFVSFIFFCSFLMLNLFVAVIMDNFEYLTRDSSILGPHHLDEFVRVWAEYDRAACGRIHYTEMYEMLTLMSPPLGLGKRCPSKVAYKRLVLMNMPVAEDMTVHFTSTLMALIRTALDIKIAKGGADRQQLDSELQKETLAIWPHLSQKMLDLLVPMPKASDLTVGKIYAAMMIMDYYKQSKVKKQRQQLEEQKNAPMFQRMEPSSLPQEIIANAKALPYLQQDPVSGLSGRSGYPSMSPLSPQDIFQLACMDPADDGQFQERQSLVVTDPSSMRRSFSTIRDKRSNSSWLEEFSMERSSENTYKSRRRSYHSSLRLSAHRLNSDSGHKSDTHRSGGRERGRSKERKHLLSPDVSRCNSEERGTQADWESPERRQSRSPSEGRSQTPNRQGTGSLSESSIPSVSDTSTPRRSRRQLPPVPPKPRPLLSYSSLIRHAGSISPPADGSEEGSPLTSQALESNNACLTESSNSPHPQQSQHASPQRYISEPYLALHEDSHASDCGEEETLTFEAAVATSLGRSNTIGSAPPLRHSWQMPNGHYRRRRRGGPGPGMMCGAVNNLLSDTEEDDKC

SEQ ID NO: 39672 - protein, 2313 aa, Homo sapiens
MARFGEAVVARPGSGDGDSDQSRNRQGTPVPASGQAAAYKQTKAQRARTMALYNPIPVRQNCFTVNRSLFIFGEDNIVRKYAKKLIDWPPFEYMILATIIANCIVLALEQHLPEDDKTPMSRRLEKTEPYFIGIFCFEAGIKIVALGFIFHKGSYLRNGWNVMDFIVVLSGILATAGTHFNTHVDLRTLRAVRVLRPLKLVSGIPSLQIVLKSIMKAMVPLLQIGLLLFFAILMFAIIGLEFYSGKLHRACFMNNSGILEGFDPPHPCGVQGCPAGYECKDWIGPNDGITQFDNILFAVLTVFQCITMEGWTTVLYNTNDALGATWNWLYFIPLIIIGSFFVLNLVLGVLSGEFAKERERVENRRAFMKLRRQQQIERELNGYRAWIDKAEEVMLAEENKNAGTSALEVLRRATIKRSRTEAMTRDSSDEHCVDISSVGTPLARASIKSAKVDGVSYFRHKERLLRISIRHMVKSQVFYWIVLSLVALNTACVAIVHHNQPQWLTHLLYYAEFLFLGLFLLEMSLKMYGMGPRLYFHSSFNCFDFGVTVGSIFEVVWAIFRPGTSFGISVLRALRLLRIFKITKYWASLRNLVVSLMSSMKSIISLLFLLFLFIVVFALLGMQLFGGRFNFNDGTPSANFDTFPAAIMTVFQILTGEDWNEVMYNGIRSQGGVSSGMWSAIYFIVLTLFGNYTLLNVFLAIAVDNLANAQELTKDEQEEEEAFNQKHALQKAKEVSPMSAPNMPSIERDRRRRHHMSMWEPRSSHLRERRRRHHMSVWEQRTSQLRKHMQMSSQEALNREEAPTMNPLNPLNPLSSLNPLNAHPSLYRRPRAIEGLALGLALEKFEEERISRGGSLKGDGGDRSSALDNQRTPLSLGQREPPWLARPCHGNCDPTQQEAGGGEAVVTFEDRARHRQSQRRSRHRRVRTEGKESSSASRSRSASQERSLDEAMPTEGEKDHELRGNHGAKEPTIQEERAQDLRRTNSLMVSRGSGLAGGLDEADTPLVLPHPELEVGKHVVLTEQEPEGSSEQALLGNVQLDMGRVISQSEPDLSCITANTDKATTESTSVTVAIPDVDPLVDSTVVHISNKTDGEASPLKEAEIREDEEEVEKKKQKKEKRETGKAMVPHSSMFIFSTTNPIRRACHYIVNLRYFEMCILLVIAASSIALAAEDPVLTNSERNKVLRYFDYVFTGVFTFEMVIKMIDQGLILQDGSYFRDLWNILDFVVVVGALVAFALANALGTNKGRDIKTIKSLRVLRVLRPLKTIKRLPKLKAVFDCVVTSLKNVFNILIVYKLFMFIFAVIAVQLFKGKFFYCTDSSKDTEKECIGNYVDHEKNKMEVKGREWKRHEFHYDNIIWALLTLFTVSTGEGWPQVLQHSVDVTEEDRGPSRSNRMEMSIFYVVYFVVFPFFFVNIFVALIIITFQEQGDKMMEECSLEKNERACIDFAISAKPLTRYMPQNRHTFQYRVWHFVVSPSFEYTIMAMIALNTVVLMMKYYSAPCTYELALKYLNIAFTMVFSLECVLKVIAFGFLNYFRDTWNIFDFITVIGSITEIILTDSKLVNTSGFNMSFLKLFRAARLIKLLRQGYTIRILLWTFVQSFKALPYVCLLIAMLFFIYAIIGMQVFGNIKLDEESHINRHNNFRSFFGSLMLLFRSATGEAWQEIMLSCLGEKGCEPDTTAPSGQNENERCGTDLAYVYFVSFIFFCSFLMLNLFVAVIMDNFEYLTRDSSILGPHHLDEFVRVWAEYDRAACGRIHYTEMYEMLTLMSPPLGLGKRCPSKVAYKRLVLMNMPVAEDMTVHFTSTLMALIRTALDIKIAKGGADRQQLDSELQKETLAIWPHLSQKMLDLLVPMPKASDLTVGKIYAAMMIMDYYKQSKVKKQRQQLEEQKNAPMFQRMEPSSLPQEIIANAKALPYLQQDPVSGLSGRSGYPSMSPLSPQDIFQLACMDPADDGQFQERQSLEPEVSELKSVQPSNHGIYLPSDTQEHAGSGRASSMPRLTVDPQVVTDPSSMRRSFSTIRDKRSNSSWLEEFSMERSSENTYKSRRRSYHSSLRLSAHRLNSDSGHKSDTHRSGGRERGRSKERKHLLSPDVSRCNSEERGTQADWESPERRQSRSPSEGRSQTPNRQGTGSLSESSIPSVSDTSTPRRSRRQLPPVPPKPRPLLSYSSLIRHAGSISPPADGSEEGSPLTSQALESNNACLTESSNSPHPQQSQHASPQRYISEPYLALHEDSHASDCGEEETLTFEAAVATSLGRSNTIGSAPPLRHSWQMPNGHYRRRRRGGPGPGMMCGAVNNLLSDTEEDDKC

SEQ ID NO: 39673 - protein, 438 aa, Homo sapiens
MARFGEAVVARPGSGDGDSDQSRNRQGTPVPASGQAAAYKQTKAQRARTMALYNPIPVRQNCFTVNRSLFIFGEDNIVRKYAKKLIDWPPFEYMILATIIANCIVLALEQHLPEDDKTPMSRRLEKTEPYFIGIFCFEAGIKIVALGFIFHKGSYLRNGWNVMDFIVVLSGILATAGTHFNTHVDLRTLRAVRVLRPLKLVSGIPSLQIVLKSIMKAMVPLLQIGLLLFFAILMFAIIGLEFYSGKLHRACFMNNSGILEGFDPPHPCGVQGCPAGYECKDWIGPNDGITQFDNILFAVLTVFQCITMEGWTTVLYNTNDALGATWNWLYFIPLIIIGSFFVLNLVLGVLSGEFAKERERVENRRAFMKLRRQQQIERELNGYRAWIDKAEEVMLAEENKNAGTSALEVLRRATIKRSRTEAMTRDSSDEHCVDISSV

SEQ ID NO: 39674 - protein, 2251 aa, Homo sapiens
MARFGEAVVARPGSGDGDSDQSRNRQGTPVPASGQAAAYKQTKAQRARTMALYNPIPVRQNCFTVNRSLFIFGEDNIVRKYAKKLIDWPPFEYMILATIIANCIVLALEQHLPEDDKTPMSRRLEKTEPYFIGIFCFEAGIKIVALGFIFHKGSYLRNGWNVMDFIVVLSGILATAGTHFNTHVDLRTLRAVRVLRPLKLVSGIPSLQIVLKSIMKAMVPLLQIGLLLFFAILMFAIIGLEFYSGKLHRACFMNNSGILEGFDPPHPCGVQGCPAGYECKDWIGPNDGITQFDNILFAVLTVFQCITMEGWTTVLYNTNDALGATWNWLYFIPLIIIGSFFVLNLVLGVLSGEFAKERERVENRRAFMKLRRQQQIERELNGYRAWIDKAEEVMLAEENKNAGTSALEVLRRATIKRSRTEAMTRDSSDEHCVDISSVGTPLARASIKSAKVDGVSYFRHKERLLRISIRHMVKSQVFYWIVLSLVALNTACVAIVHHNQPQWLTHLLYYAEFLFLGLFLLEMSLKMYGMGPRLYFHSSFNCFDFGVTVGSIFEVVWAIFRPGTSFGISVLRALRLLRIFKITKYWASLRNLVVSLMSSMKSIISLLFLLFLFIVVFALLGMQLFGGRFNFNDGTPSANFDTFPAAIMTVFQILTGEDWNEVMYNGIRSQGGVSSGMWSAIYFIVLTLFGNYTLLNVFLAIAVDNLANAQELTKDEQEEEEAFNQKHALQKAKEVSPMSAPNMPSIERERRRRHHMSVWEQRTSQLRKHMQMSSQEALNREEAPTMNPLNPLNPLSSLNPLNAHPSLYRRPRAIEGLALGLALEKFEEERISRGGSLKGDGGDRSSALDNQRTPLSLGQREPPWLARPCHGNCDPTQQEAGGGEAVVTFEDRARHRQSQRRSRHRRVRTEGKESSSASRSRSASQERSLDEAMPTEGEKDHELRGNHGAKEPTIQEERAQDLRRTNSLMVSRGSGLAGGLDEADTPLVLPHPELEVGKHVVLTEQEPEGSSEQALLGNVQLDMGRVISQSEPDLSCITANTDKATTESTSVTVAIPDVDPLVDSTVVHISNKTDGEASPLKEAEIREDEEEVEKKKQKKEKRETGKAMVPHSSMFIFSTTNPIRRACHYIVNLRYFEMCILLVIAASSIALAAEDPVLTNSERNKVLRYFDYVFTGVFTFEMVIKMIDQGLILQDGSYFRDLWNILDFVVVVGALVAFALANALGTNKGRDIKTIKSLRVLRVLRPLKTIKRLPKLKAVFDCVVTSLKNVFNILIVYKLFMFIFAVIAVQLFKGKFFYCTDSSKDTEKECIGNYVDHEKNKMEVKGREWKRHEFHYDNIIWALLTLFTVSTGEGWPQVLQHSVDVTEEDRGPSRSNRMEMSIFYVVYFVVFPFFFVNIFVALIIITFQEQGDKMMEECSLEKNERACIDFAISAKPLTRYMPQNRHTFQYRVWHFVVSPSFEYTIMAMIALNTVVLMMKYYSAPCTYELALKYLNIAFTMVFSLECVLKVIAFGFLNYFRDTWNIFDFITVIGSITEIILTDSKLVNTSGFNMSFLKLFRAARLIKLLRQGYTIRILLWTFVQSFKALPYVCLLIAMLFFIYAIIGMQVFGNIKLDEESHINRHNNFRSFFGSLMLLFRSATGEAWQEIMLSCLGEKGCEPDTTAPSGQNENERCGTDLAYVYFVSFIFFCSFLMLNLFVAVIMDNFEYLTRDSSILGPHHLDEFVRVWAEYDRAACGRIHYTEMYEMLTLMSPPLGLGKRCPSKVAYKRLVLMNMPVAEDMTVHFTSTLMALIRTALDIKIAKGGADRQQLDSELQKETLAIWPHLSQKMLDLLVPMPKASDLTVGKIYAAMMIMDYYKQSKVKKQRQQLEEQKNAPMFQRMEPSSLPQEIIANAKALPYLQQDPVSGLSGRSGYPSMSPLSPQDIFQLACMDPADDGQFQERQSLVVTDPSSMRRSFSTIRDKRSNSSWLEEFSMERSSENTYKSRRRSYHSSLRLSAHRLNSDSGHKSDTHRSGGRERGRSKERKHLLSPDVSRCNSEERGTQADWESPERRQSRSPSEGRSQTPNRQGTGSLSESSIPSVSDTSTPRRSRRQLPPVPPKPRPLLSYSSLIRHAGSISPPADGSEEGSPLTSQALESNNACLTESSNSPHPQQSQHASPQRYISEPYLALHEDSHASDCGEEETLTFEAAVATSLGRSNTIGSAPPLRHSWQMPNGHYRRRRRGGPGPGMMCGAVNNLLSDTEEDDKC

SEQ ID NO: 39675 - protein, 2353 aa, Homo sapiens
MTEGARAADEVRVPLGAPPPGPAALVGASPESPGAPGREAERGSELGVSPSESPAAERGAELGADEEQRVPYPALAATVFFCLGQTTRPRSWCLRLVCNPWFEHVSMLVIMLNCVTLGMFRPCEDVECGSERCNILEAFDAFIFAFFAVEMVIKMVALGLFGQKCYLGDTWNRLDFFIVVAGMMEYSLDGHNVSLSAIRTVRVLRPLRAINRVPSMRILVTLLLDTLPMLGNVLLLCFFVFFIFGIVGVQLWAGLLRNRCFLDSAFVRNNNLTFLRPYYQTEEGEENPFICSSRRDNGMQKCSHIPGRRELRMPCTLGWEAYTQPQAEGVGAARNACINWNQYYNVCRSGDSNPHNGAINFDNIGYAWIAIFQVITLEGWVDIMYYVMDAHSFYNFIYFILLIIVGSFFMINLCLVVIATQFSETKQRESQLMREQRARHLSNDSTLASFSEPGSCYEELLKYVGHIFRKVKRRSLRLYARWQSRWRKKVDPSAVQGQGPGHRQRRAGRHTASVHHLVYHHHHHHHHHYHFSHGSPRRPGPEPGACDTRLVRAGAPPSPPSPGRGPPDAESVHSIYHADCHIEGPQERARVAHAAATAAASLRLATGLGTMNYPTILPSGVGSGKGSTSPGPKGKWAGGPPGTGGHGPLSLNSPDPYEKIPHVVGEHGLGQAPGHLSGLSVPCPLPSPPAGTLTCELKSCPYCTRALEDPEGELSGSESGDSDGRGVYEFTQDVRHGDRWDPTRPPRATDTPGPGPGSPQRRAQQRAAPGEPGWMGRLWVTFSGKLRRIVDSKYFSRGIMMAILVNTLSMGVEYHEQPEELTNALEISNIVFTSMFALEMLLKLLACGPLGYIRNPYNIFDGIIVVISVWEIVGQADGGLSVLRTFRLLRVLKLVRFLPALRRQLVVLVKTMDNVATFCTLLMLFIFIFSILGMHLFGCKFSLKTDTGDTVPDRKNFDSLLWAIVTVFQILTQEDWNVVLYNGMASTSSWAALYFVALMTFGNYVLFNLLVAILVEGFQAEGDANRSDTDEDKTSVHFEEDFHKLRELQTTELKMCSLAVTPNGHLEGRGSLSPPLIMCTAATPMPTPKSSPFLDAAPSLPDSRRGSSSSGDPPLGDQKPPASLRSSPCAPWGPSGAWSSRRSSWSSLGRAPSLKRRGQCGERESLLSGEGKGSTDDEAEDGRAAPGPRATPLRRAESLDPRPLRPAALPPTKCRDRDGQVVALPSDFFLRIDSHREDAAELDDDSEDSCCLRLHKVLEPYKPQWCRSREAWALYLFSPQNRFRVSCQKVITHKMFDHVVLVFIFLNCVTIALERPDIDPGSTERVFLSVSNYIFTAIFVAEMMVKVVALGLLSGEHAYLQSSWNLLDGLLVLVSLVDIVVAMASAGGAKILGVLRVLRLLRTLRPLRVISRAPGLKLVVETLISSLRPIGNIVLICCAFFIIFGILGVQLFKGKFYYCEGPDTRNISTKAQCRAAHYRWVRRKYNFDNLGQALMSLFVLSSKDGWVNIMYDGLDAVGVDQQPVQNHNPWMLLYFISFLLIVSFFVLNMFVGVVVENFHKCRQHQEAEEARRREEKRLRRLERRRRSTFPSPEAQRRPYYADYSPTRRSIHSLCTSHYLDLFITFIICVNVITMSMEHYNQPKSLDEALKYCNYVFTIVFVFEAALKLVAFGFRRFFKDRWNQLDLAIVLLSLMGITLEEIEMSAALPINPTIIRIMRVLRIARVLKLLKMATGMRALLDTVVQALPQVGNLGLLFMLLFFIYAALGVELFGRLECSEDNPCEGLSRHATFSNFGMAFLTLFRVSTGDNWNGIMKDTLRECSREDKHCLSYLPALSPVYFVTFVLVAQFVLVNVVVAVLMKHLEESNKEAREDAELDAEIELEMAQGPGSARRVDADRPPLPQESPGARDAPNLVARKVSVSRMLSLPNDSYMFRPVVPASAPHPRPLQEVEMETYGAGTPLGSVASVHSPPAESCASLQIPLAVSSPARSGEPLHALSPRGTARSPSLSRLLCRQEAVHTDSLEGKIDSPRDTLDPAEPGEKTPVRPVTQGGSLQSPPRSPRPASVRTRKHTFGQRCVSSRPAAPGGEEAEASDPADEEVSHITSSACPWQPTAEPHGPEASPVAGGERDLRRLYSVDAQGFLDKPGRADEQWRPSAELGSGEPGEAKAWGPEAEPALGARRKKKMSPPCISVEPPAEDEGSARPSAAEGGSTTLRRRTPSCEATPHRDSLEPTEGSGAGGDPAAKGERWGQASCRAEHLTVPSFAFEPLDLGVPSGDPFLDGSHSVTPESRASSSGAIVPLEPPESEPPMPVGDPPEKRRGLYLTVPQCPLEKPGSPSATPAPGGGADDPV

SEQ ID NO: 39676 - protein, 2347 aa, Homo sapiens
MTEGARAADEVRVPLGAPPPGPAALVGASPESPGAPGREAERGSELGVSPSESPAAERGAELGADEEQRVPYPALAATVFFCLGQTTRPRSWCLRLVCNPWFEHVSMLVIMLNCVTLGMFRPCEDVECGSERCNILEAFDAFIFAFFAVEMVIKMVALGLFGQKCYLGDTWNRLDFFIVVAGMMEYSLDGHNVSLSAIRTVRVLRPLRAINRVPSMRILVTLLLDTLPMLGNVLLLCFFVFFIFGIVGVQLWAGLLRNRCFLDSAFVRNNNLTFLRPYYQTEEGEENPFICSSRRDNGMQKCSHIPGRRELRMPCTLGWEAYTQPQAEGVGAARNACINWNQYYNVCRSGDSNPHNGAINFDNIGYAWIAIFQVITLEGWVDIMYYVMDAHSFYNFIYFILLIIVGSFFMINLCLVVIATQFSETKQRESQLMREQRARHLSNDSTLASFSEPGSCYEELLKYVGHIFRKVKRRSLRLYARWQSRWRKKVDPSAVQGQGPGHRQRRAGRHTASVHHLVYHHHHHHHHHYHFSHGSPRRPGPEPGACDTRLVRAGAPPSPPSPGRGPPDAESVHSIYHADCHIEGPQERARVAHAAATAAASLRLATGLGTMNYPTILPSGVGSGKGSTSPGPKGKWAGGPPGTGGHGPLSLNSPDPYEKIPHVVGEHGLGQAPGHLSGLSVPCPLPSPPAGTLTCELKSCPYCTRALEDPEGELSGSESGDSDGRGVYEFTQDVRHGDRWDPTRPPRATDTPGPGPGSPQRRAQQRAAPGEPGWMGRLWVTFSGKLRRIVDSKYFSRGIMMAILVNTLSMGVEYHEQPEELTNALEISNIVFTSMFALEMLLKLLACGPLGYIRNPYNIFDGIIVVISVWEIVGQADGGLSVLRTFRLLRVLKLVRFLPALRRQLVVLVKTMDNVATFCTLLMLFIFIFSILGMHLFGCKFSLKTDTGDTVPDRKNFDSLLWAIVTVFQILTQEDWNVVLYNGMASTSSWAALYFVALMTFGNYVLFNLLVAILVEGFQAEGDANRSDTDEDKTSVHFEEDFHKLRELQTTELKMCSLAVTPNGHLEGRGSLSPPLIMCTAATPMPTPKSSPFLDAAPSLPDSRRGSSSSGDPPLGDQKPPASLRSSPCAPWGPSGAWSSRRSSWSSLGRAPSLKRRGQCGERESLLSGEGKGSTDDEAEDGRAAPGPRATPLRRAESLDPRPLRPAALPPTKCRDRDGQVVALPSDFFLRIDSHREDAAELDDDSEDSCCLRLHKVLEPYKPQWCRSREAWALYLFSPQNRFRVSCQKVITHKMFDHVVLVFIFLNCVTIALERPDIDPGSTERVFLSVSNYIFTAIFVAEMMVKVVALGLLSGEHAYLQSSWNLLDGLLVLVSLVDIVVAMASAGGAKILGVLRVLRLLRTLRPLRVISRAPGLKLVVETLISSLRPIGNIVLICCAFFIIFGILGVQLFKGKFYYCEGPDTRNISTKAQCRAAHYRWVRRKYNFDNLGQALMSLFVLSSKDGWVNIMYDGLDAVGVDQQPVQNHNPWMLLYFISFLLIVSFFVLNMFVGVVVENFHKCRQHQEAEEARRREEKRLRRLERRRRKAQRRPYYADYSPTRRSIHSLCTSHYLDLFITFIICVNVITMSMEHYNQPKSLDEALKYCNYVFTIVFVFEAALKLVAFGFRRFFKDRWNQLDLAIVLLSLMGITLEEIEMSAALPINPTIIRIMRVLRIARVLKLLKMATGMRALLDTVVQALPQVGNLGLLFMLLFFIYAALGVELFGRLECSEDNPCEGLSRHATFSNFGMAFLTLFRVSTGDNWNGIMKDTLRECSREDKHCLSYLPALSPVYFVTFVLVAQFVLVNVVVAVLMKHLEESNKEAREDAELDAEIELEMAQGPGSARRVDADRPPLPQESPGARDAPNLVARKVSVSRMLSLPNDSYMFRPVVPASAPHPRPLQEVEMETYGAGTPLGSVASVHSPPAESCASLQIPLAVSSPARSGEPLHALSPRGTARSPSLSRLLCRQEAVHTDSLEGKIDSPRDTLDPAEPGEKTPVRPVTQGGSLQSPPRSPRPASVRTRKHTFGQRCVSSRPAAPGGEEAEASDPADEEVSHITSSACPWQPTAEPHGPEASPVAGGERDLRRLYSVDAQGFLDKPGRADEQWRPSAELGSGEPGEAKAWGPEAEPALGARRKKKMSPPCISVEPPAEDEGSARPSAAEGGSTTLRRRTPSCEATPHRDSLEPTEGSGAGGDPAAKGERWGQASCRAEHLTVPSFAFEPLDLGVPSGDPFLDGSHSVTPESRASSSGAIVPLEPPESEPPMPVGDPPEKRRGLYLTVPQCPLEKPGSPSATPAPGGGADDPV

SEQ ID NO: 39677 - protein, 2229 aa, Homo sapiens
MAESASPPSSSAAAPAAEPGVTTEQPGPRSPPSSPPGLEEPLDGADPHVPHPDLAPIAFFCLRQTTSPRNWCIKMATGPWWWCLCMLVILLNCVTLGMYQPCDDMDCLSDRCKILQVFDDFIFIFFAMEMVLKMVALGIFGKKCYLGDTWNRLDFFIVMAGMVEYSLDLQNINLSAIRTVRVLRPLKAINRVPSMRILVNLLLDTLPMLGNVLLLCFFVFFIFGIIGVQLWAGLLRNRCFLEENFTIQGDVALPPYYQPEEDDEMPFICSLSGDNGIMGCHEIPPLKEQGRECCLSKDDVYDFGAGRQDLNASGLCVNWNRYYNVCRTGSANPHKGAINFDNIGYAWIVIFQVITLEGWVEIMYYVMDAHSFYNFIYFILLIIVGSFFMINLCLVVIATQFSETKQREHRLMLEQRQRYLSSSTVASYAEPGDCYEEIFQYVCHILRKAKRRALGLYQALQSRRQALGPEAPAPAKPGPHAKEPRHYHGKTKGQGDEGRHLGSRHCQTLHGPASPGNDHSGRGKPGPRELCPQHSPLDATPHTLVQPIPATLASDPASCPCCQHEDGRRPSGLGSTDSGQEGSGSGSSAGGEDEADGDGARSSEDGASSELGKEEEEEEQADGAVWLCGDVWRETRAKLRGIVDSKYFNRGIMMAILVNTVSMGIEHHEQANELTNILEICNVVFTSMFALEMILKLAAFGLFDYLRNPYNIFDSIIVIISIWEIVGQADGGLSVLRTFRLLRVLKLVRFMPALRRQLVVLMKTMDNVATFCMLLMLFIFIFSILGMHIFGCKFSLRTDTGDTVPDRKNFDSLLWAIVTVFQILTQEDWNVVLYNGMASTSPWASLYFVALMTFGNYVLFNLLVAILVEGFQAEGDANRSYSDEDQSSSNIEEFDKLQEGLDSSGDPKLCPIPMTPNGHLDPSLPLGGHLGPAGAAGPAPRLSLQPDPMLVALGSRKSSVMSLGRMSYDQRSLSSSRSSYYGPWGRSAAWASRRSSWNSLKHKPPSAEHESLLSAERGGGARVCEVAADEGPPRAAPLHTPHAHHIHHGPHLAHRHRHHRRTLSLDNRDSVDLAELVPAVGAHPRAAWRAAGPAPGHEDCNGRMPSIAKDVFTKMGDRGDRGEDEEEIDYTLCFRVRKMIDVYKPDWCEVREDWSVYLFSPENRFRVLCQTIIAHKLFDYVVLAFIFLNCITIALERPQIEAGSTERIFLTVSNYIFTAIFVGEMTLKVVSLGLYFGEQAYLRSSWNVLDGFLVFVSIIDIVVSLASAGGAKILGVLRVLRLLRTLRPLRVISRAPGLKLVVETLISSLKPIGNIVLICCAFFIIFGILGVQLFKGKFYHCLGVDTRNITNRSDCMAANYRWVHHKYNFDNLGQALMSLFVLASKDGWVNIMYNGLDAVAVDQQPVTNHNPWMLLYFISFLLIVSFFVLNMFVGVVVENFHKCRQHQEAEEARRREEKRLRRLEKKRRKAQRLPYYATYCHTRLLIHSMCTSHYLDIFITFIICLNVVTMSLEHYNQPTSLETALKYCNYMFTTVFVLEAVLKLVAFGLRRFFKDRWNQLDLAIVLLSVMGITLEEIEINAALPINPTIIRIMRVLRIARVLKLLKMATGMRALLDTVVQALPQVGNLGLLFMLLFFIYAALGVELFGKLVCNDENPCEGMSRHATFENFGMAFLTLFQVSTGDNWNGIMKDTLRDCTHDERSCLSSLQFVSPLYFVSFVLTAQFVLINVVVAVLMKHLDDSNKEAQEDAEMDAELELEMAHGLGPGPRLPTGSPGAPGRGPGGAGGGGDTEGGLCRRCYSPAQENLWLDSVSLIIKDSLEGELTIIDNLSGSIFHHYSSPAGCKKCHHDKQEVQLAETEAFSLNSDRSSSILLGDDLSLEDPTACPPGRKDSKGELDPPEPMRVGDLGECFFPLSSTAVSPDPENFLCEMEEIPFNPVRSWLKHDSSQAPPSPFSPDASSPLLPMPAEFFHPAVSASQKGPEKGTGTGTLPKIALQGSWASLRSPRVNCTLLRQATGSDTSLDASPSSSAGSLQTTLEDSLTLSDSPRRALGPPAPAPGPRAGLSPAARRRLSLRGRGLFSLRGLRAHQRSHSSGGSTSPGCTHHDSMDPSDEEGRGGAGGGGAGSEHSETLSSLSLTSLFCPPPPPPAPGLTPARKFSSTSSLAAPGRPHAAALAHGLARSPSWAADRSKDPPGRAPLPMGLGPLAPPPQPLPGELEPGDAASKRKR

SEQ ID NO: 39678 - protein, 2188 aa, Homo sapiens
MAESASPPSSSAAAPAAEPGVTTEQPGPRSPPSSPPGLEEPLDGADPHVPHPDLAPIAFFCLRQTTSPRNWCIKMATGPWWWCLCMLVILLNCVTLGMYQPCDDMDCLSDRCKILQVFDDFIFIFFAMEMVLKMVALGIFGKKCYLGDTWNRLDFFIVMAGMVEYSLDLQNINLSAIRTVRVLRPLKAINRVPSMRILVNLLLDTLPMLGNVLLLCFFVFFIFGIIGVQLWAGLLRNRCFLEENFTIQGDVALPPYYQPEEDDEMPFICSLSGDNGIMGCHEIPPLKEQGRECCLSKDDVYDFGAGRQDLNASGLCVNWNRYYNVCRTGSANPHKGAINFDNIGYAWIVIFQVITLEGWVEIMYYVMDAHSFYNFIYFILLIIVGSFFMINLCLVVIATQFSETKQREHRLMLEQRQRYLSSSTVASYAEPGDCYEEIFQYVCHILRKAKRRALGLYQALQSRRQALGPEAPAPAKPGPHAKEPRHYQLCPQHSPLDATPHTLVQPIPATLASDPASCPCCQHEDGRRPSGLGSTDSGQEGSGSGSSAGGEDEADGDGARSSEDGASSELGKEEEEEEQADGAVWLCGDVWRETRAKLRGIVDSKYFNRGIMMAILVNTVSMGIEHHEQATELTNILEICNVVFTSMFALEMILKLAAFGLFDYLRNPYNIFDSIIVIISIWEIVGQADGGLSVLRTFRLLRVLKLVRFMPALRRQLVVLMKTMDNVATFCMLLMLFIFIFSILGMHIFGCKFSLRTDTGDTVPDRKNFDSLLWAIVTVFQILTQEDWNVVLYNGMASTSPWASLYFVALMTFGNYVLFNLLVAILVEGFQAEGDANRSYSDEDQSSSNIEEFDKLQEGLDSSGDPKLCPIPMTPNGHLDPSLPLGGHLGPAGAAGPAPRLSLQPDPMLVALGSRKSSVMSLGRMSYDQRSLSSSRSSYYGPWGRSAAWASRRSSWNSLKHKPPSAEHESLLSAERGGGARVCEVAADEGPPRAAPLHTPHAHHIHHGPHLAHRHRHHRRTLSLDNRDSVDLAELVPAVGAHPRAAWRAAGPAPGHEDCNGRMPSIAKDVFTKMGDRGDRGEDEEEIDYTLCFRVRKMIDVYKPDWCEVREDWSVYLFSPENRFRVLCQTIIAHKLFDYVVLAFIFLNCITIALERPQIEAGSTERIFLTVSNYIFTAIFVGEMTLKVVSLGLYFGEQAYLRSSWNVLDGFLVFVSIIDIVVSLASAGGAKILGVLRVLRLLRTLRPLRVISRAPGLKLVVETLISSLKPIGNIVLICCAFFIIFGILGVQLFKGKFYHCLGVDTRNITNRSDCMAANYRWVHHKYNFDNLGQALMSLFVLASKDGWVNIMYNGLDAVAVDQQPVTNHNPWMLLYFISFLLIVSFFVLNMFVGVVVENFHKCRQHQEAEEARRREEKRLRRLEKKRRKAQRLPYYATYCHTRLLIHSMCTSHYLDIFITFIICLNVVTMSLEHYNQPTSLETALKYCNYMFTTVFVLEAVLKLVAFGLRRFFKDRWNQLDLAIVLLSVMGITLEEIEINAALPINPTIIRIMRVLRIARVLKLLKMATGMRALLDTVVQALPQVGNLGLLFMLLFFIYAALGVELFGKLVCNDENPCEGMSRHATFENFGMAFLTLFQVSTGDNWNGIMKDTLRDCTHDERSCLSSLQFVSPLYFVSFVLTAQFVLINVVVAVLMKHLDDSNKEAQEDAEMDAELELEMAHGLGPGPRLPTGSPGAPGRGPGGAGGGGDTEGGLCRRCYSPAQENLWLDSVSLIIKDSLEGELTIIDNLSGSIFHHYSSPAGCKKCHHDKQEVQLAETEAFSLNSDRSSSILLGDDLSLEDPTACPPGRKDSKGELDPPEPMRVGDLGECFFPLSSTAVSPDPENFLCEMEEIPFNPVRSWLKHDSSQAPPSPFSPDASSPLLPMPAEFFHPAVSASQKGPEKGTGTGTLPKIALQGSWASLRSPRVNCTLLRQATGSDTSLDASPSSSAGSLQTTLEDSLTLSDSPRRALGPPAPAPGPRAGLSPAARRRLSLRGRGLFSLRGLRAHQRSHSSGGSTSPGCTHHDSMDPSDEEGRGGAGGGGAGSEHSETLSSLSLTSLFCPPPPPPAPGLTPARKFSSTSSLAAPGRPHAAALAHGLARSPSWAADRSKDPPGRAPLPMGLGPLAPPPQPLPGELEPGDAASKRKR

SEQ ID NO: 39679 - protein, 2016 aa, Homo sapiens
MAESASPPSSSAAAPAAEPGVTTEQPGPRSPPSSPPGLEEPLDGADPHVPHPDLAPIAFFCLRQTTSPRNWCIKMVCNPWFECVSMLVILLNCVTLGMYQPCDDMDCLSDRCKILQVFDDFIFIFFAMEMVLKMVALGIFGKKCYLGDTWNRLDFFIVMAGMVEYSLDLQNINLSAIRTVRVLRPLKAINRVPSMRILVNLLLDTLPMLGNVLLLCFFVFFIFGIIGVQLWAGLLRNRCFLEENFTIQGDVALPPYYQPEEDDEMPFICSLSGDNGIMGCHEIPPLKEQGRECCLSKDDVYDFGAGRQDLNASGLCVNWNRYYNVCRTGSANPHKGAINFDNIGYAWIVIFQVITLEGWVEIMYYVMDAHSFYNFIYFILLIIVGSFFMINLCLVVIATQFSETKQREHRLMLEQRQRYLSSSTVASYAEPGDCYEEIFQYVCHILRKAKRRALGLYQALQSRRQALGPEAPAPAKPGPHAKEPRHYHGKTKGQGDEGRHLGSRHCQTLHGPASPGNDHSGRELCPQHSPLDATPHTLVQPIPATLASDPASCPCCQHEDGRRPSGLGSTDSGQEGSGSGSSAGGEDEADGDGARSSEDGASSELGKEEEEEEQADGAVWLCGDVWRETRAKLRGIVDSKYFNRGIMMAILVNTVSMGIEHHEQPEELTNILEICNVVFTSMFALEMILKLAAFGLFDYLRNPYNIFDSIIVIISIWEIVGQADGGLSVLRTFRLLRVLKLVRFMPALRRQLVVLMKTMDNVATFCMLLMLFIFIFSILGMHIFGCKFSLRTDTGDTVPDRKNFDSLLWAIVTVFQILTQEDWNVVLYNGMASTSPWASLYFVALMTFGNYVLFNLLVAILVEGFQAEGDANRSYSDEDQSSSNIEEFDKLQEGLDSSGDPKLCPIPMTPNGHLDPSLPLGGHLGPAGAAGPAPRLSLQPDPMLVALGSRKSSVMSLGRMSYDQRSLSSSRSSYYGPWGRSAAWASRRSSWNSLKHKPPSAEHESLLSAERGGGARVCEVAADEGPPRAAPLHTPHAHHIHHGPHLAHRHRHHRRTLSLDNRDSVDLAELVPAVGAHPRAAWRAAGPAPGHEDCNGRMPSIAKDVFTKMGDRGDRGEDEEEIDYTLCFRVRKMIDVYKPDWCEVREDWSVYLFSPENRFRVLCQTIIAHKLFDYVVLAFIFLNCITIALERPQIEAGSTERIFLTVSNYIFTAIFVGEMTLKVVSLGLYFGEQAYLRSSWNVLDGFLVFVSIIDIVVSLASAGGAKILGVLRVLRLLRTLRPLRVISRAPGLKLVVETLISSLKPIGNIVLICCAFFIIFGILGVQLFKGKFYHCLGVDTRNITNRSDCMAANYRWVHHKYNFDNLGQALMSLFVLASKDGWVNIMYNGLDAVAVDQQPVTNHNPWMLLYFISFLLIVSFFVLNMFVGVVVENFHKCRQHQEAEEARRREEKRLRRLEKKRRKAQRLPYYATYCHTRLLIHSMCTSHYLDIFITFIICLNVVTMSLEHYNQPTSLETALKYCNYMFTTVFVLEAVLKLVAFGLRRFFKDRWNQLDLAIVLLSVMGITLEEIEINAALPINPTIIRIMRVLRIARVLKLLKMATGMRALLDTVVQALPQVGNLGLLFMLLFFIYAALGVELFGKLVCNDENPCEGMSRHATFENFGMAFLTLFQVSTGDNWNGIMKDTLRDCTHDERSCLSSLQFVSPLYFVSFVLTAQFVLINVVVAVLMKHLDDSNKEAQEDAEMDAELELEMAHGLGPGPRLPTGSPGAPGRGPGGAGGGGDTEGGLCRRCYSPAQENLWLDSVSLIIKDSLEGELTIIDNLSGSIFHHYSSPAGCKKCHHDKQEVQLAETEAFSLNSDRSSSILLGDDLSLEDPTACPPGRKDSKGELDPPEPMRVGDLGECFFPLSSTAVSPDPENFLCEMEEIPFNPVRSWLKHDSSQAPPSPFSPDASSPLLPMPAEFFHPAVSASQKGPEKGTGTGTLPKIALQGSWASLRSPRVNCTLLRQVPTPPRP

SEQ ID NO: 39680 - protein, 2223 aa, Homo sapiens
MAESASPPSSSAAAPAAEPGVTTEQPGPRSPPSSPPGLEEPLDGADPHVPHPDLAPIAFFCLRQTTSPRNWCIKMVCNPWFECVSMLVILLNCVTLGMYQPCDDMDCLSDRCKILQVFDDFIFIFFAMEMVLKMVALGIFGKKCYLGDTWNRLDFFIVMAGMVEYSLDLQNINLSAIRTVRVLRPLKAINRVPSMRILVNLLLDTLPMLGNVLLLCFFVFFIFGIIGVQLWAGLLRNRCFLEENFTIQGDVALPPYYQPEEDDEMPFICSLSGDNGIMGCHEIPPLKEQGRECCLSKDDVYDFGAGRQDLNASGLCVNWNRYYNVCRTGSANPHKGAINFDNIGYAWIVIFQVITLEGWVEIMYYVMDAHSFYNFIYFILLIIVGSFFMINLCLVVIATQFSETKQREHRLMLEQRQRYLSSSTVASYAEPGDCYEEIFQYVCHILRKAKRRALGLYQALQSRRQALGPEAPAPAKPGPHAKEPRHYHGKTKGQGDEGRHLGSRHCQTLHGPASPGNDHSGRELCPQHSPLDATPHTLVQPIPATLASDPASCPCCQHEDGRRPSGLGSTDSGQEGSGSGSSAGGEDEADGDGARSSEDGASSELGKEEEEEEQADGAVWLCGDVWRETRAKLRGIVDSKYFNRGIMMAILVNTVSMGIEHHEQPEELTNILEICNVVFTSMFALEMILKLAAFGLFDYLRNPYNIFDSIIVIISIWEIVGQADGGLSVLRTFRLLRVLKLVRFMPALRRQLVVLMKTMDNVATFCMLLMLFIFIFSILGMHIFGCKFSLRTDTGDTVPDRKNFDSLLWAIVTVFQILTQEDWNVVLYNGMASTSPWASLYFVALMTFGNYVLFNLLVAILVEGFQAEGDANRSYSDEDQSSSNIEEFDKLQEGLDSSGDPKLCPIPMTPNGHLDPSLPLGGHLGPAGAAGPAPRLSLQPDPMLVALGSRKSSVMSLGRMSYDQRSLSSSRSSYYGPWGRSAAWASRRSSWNSLKHKPPSAEHESLLSAERGGGARVCEVAADEGPPRAAPLHTPHAHHIHHGPHLAHRHRHHRRTLSLDNRDSVDLAELVPAVGAHPRAAWRAAGPAPGHEDCNGRMPSIAKDVFTKMGDRGDRGEDEEEIDYTLCFRVRKMIDVYKPDWCEVREDWSVYLFSPENRFRVLCQTIIAHKLFDYVVLAFIFLNCITIALERPQIEAGSTERIFLTVSNYIFTAIFVGEMTLKVVSLGLYFGEQAYLRSSWNVLDGFLVFVSIIDIVVSLASAGGAKILGVLRVLRLLRTLRPLRVISRAPGLKLVVETLISSLKPIGNIVLICCAFFIIFGILGVQLFKGKFYHCLGVDTRNITNRSDCMAANYRWVHHKYNFDNLGQALMSLFVLASKDGWVNIMYNGLDAVAVDQQPVTNHNPWMLLYFISFLLIVSFFVLNMFVGVVVENFHKCRQHQEAEEARRREEKRLRRLEKKRRKAQRLPYYATYCHTRLLIHSMCTSHYLDIFITFIICLNVVTMSLEHYNQPTSLETALKYCNYMFTTVFVLEAVLKLVAFGLRRFFKDRWNQLDLAIVLLSVMGITLEEIEINAALPINPTIIRIMRVLRIARVLKLLKMATGMRALLDTVVQALPQVGNLGLLFMLLFFIYAALGVELFGKLVCNDENPCEGMSRHATFENFGMAFLTLFQVSTGDNWNGIMKDTLRDCTHDERSCLSSLQFVSPLYFVSFVLTAQFVLINVVVAVLMKHLDDSNKEAQEDAEMDAELELEMAHGLGPGPRLPTGSPGAPGRGPGGAGGGGDTEGGLCRRCYSPAQENLWLDSVSLIIKDSLEGELTIIDNLSGSIFHHYSSPAGCKKCHHDKQEVQLAETEAFSLNSDRSSSILLGDDLSLEDPTACPPGRKDSKGELDPPEPMRVGDLGECFFPLSSTAVSPDPENFLCEMEEIPFNPVRSWLKHDSSQAPPSPFSPDASSPLLPMPAEFFHPAVSASQKGPEKGTGTGTLPKIALQGSWASLRSPRVNCTLLRQATGSDTSLDASPSSSAGSLQTTLEDSLTLSDSPRRALGPPAPAPGPRAGLSPAARRRLSLRGRGLFSLRGLRAHQRSHSSGGSTSPGCTHHDSMDPSDEEGRGGAGGGGAGSEHSETLSSLSLTSLFCPPPPPPAPGLTPARKFSSTSSLAAPGRPHAAALAHGLARSPSWAADRSKDPPGRAPLPMGLGPLAPPPQPLPGELEPGDAASKRKR

SEQ ID NO: 39681 - protein, 2188 aa, Homo sapiens
MAESASPPSSSAAAPAAEPGVTTEQPGPRSPPSSPPGLEEPLDGADPHVPHPDLAPIAFFCLRQTTSPRNWCIKMVCNPWFECVSMLVILLNCVTLGMYQPCDDMDCLSDRCKILQVFDDFIFIFFAMEMVLKMVALGIFGKKCYLGDTWNRLDFFIVMAGMVEYSLDLQNINLSAIRTVRVLRPLKAINRVPSMRILVNLLLDTLPMLGNVLLLCFFVFFIFGIIGVQLWAGLLRNRCFLEENFTIQGDVALPPYYQPEEDDEMPFICSLSGDNGIMGCHEIPPLKEQGRECCLSKDDVYDFGAGRQDLNASGLCVNWNRYYNVCRTGSANPHKGAINFDNIGYAWIVIFQVITLEGWVEIMYYVMDAHSFYNFIYFILLIIVGSFFMINLCLVVIATQFSETKQREHRLMLEQRQRYLSSSTVASYAEPGDCYEEIFQYVCHILRKAKRRALGLYQALQSRRQALGPEAPAPAKPGPHAKEPRHYQLCPQHSPLDATPHTLVQPIPATLASDPASCPCCQHEDGRRPSGLGSTDSGQEGSGSGSSAGGEDEADGDGARSSEDGASSELGKEEEEEEQADGAVWLCGDVWRETRAKLRGIVDSKYFNRGIMMAILVNTVSMGIEHHEQPEELTNILEICNVVFTSMFALEMILKLAAFGLFDYLRNPYNIFDSIIVIISIWEIVGQADGGLSVLRTFRLLRVLKLVRFMPALRRQLVVLMKTMDNVATFCMLLMLFIFIFSILGMHIFGCKFSLRTDTGDTVPDRKNFDSLLWAIVTVFQILTQEDWNVVLYNGMASTSPWASLYFVALMTFGNYVLFNLLVAILVEGFQAEGDANRSYSDEDQSSSNIEEFDKLQEGLDSSGDPKLCPIPMTPNGHLDPSLPLGGHLGPAGAAGPAPRLSLQPDPMLVALGSRKSSVMSLGRMSYDQRSLSSSRSSYYGPWGRSAAWASRRSSWNSLKHKPPSAEHESLLSAERGGGARVCEVAADEGPPRAAPLHTPHAHHIHHGPHLAHRHRHHRRTLSLDNRDSVDLAELVPAVGAHPRAAWRAAGPAPGHEDCNGRMPSIAKDVFTKMGDRGDRGEDEEEIDYTLCFRVRKMIDVYKPDWCEVREDWSVYLFSPENRFRVLCQTIIAHKLFDYVVLAFIFLNCITIALERPQIEAGSTERIFLTVSNYIFTAIFVGEMTLKVVSLGLYFGEQAYLRSSWNVLDGFLVFVSIIDIVVSLASAGGAKILGVLRVLRLLRTLRPLRVISRAPGLKLVVETLISSLKPIGNIVLICCAFFIIFGILGVQLFKGKFYHCLGVDTRNITNRSDCMAANYRWVHHKYNFDNLGQALMSLFVLASKDGWVNIMYNGLDAVAVDQQPVTNHNPWMLLYFISFLLIVSFFVLNMFVGVVVENFHKCRQHQEAEEARRREEKRLRRLEKKRRKAQRLPYYATYCHTRLLIHSMCTSHYLDIFITFIICLNVVTMSLEHYNQPTSLETALKYCNYMFTTVFVLEAVLKLVAFGLRRFFKDRWNQLDLAIVLLSVMGITLEEIEINAALPINPTIIRIMRVLRIARVLKLLKMATGMRALLDTVVQALPQVGNLGLLFMLLFFIYAALGVELFGKLVCNDENPCEGMSRHATFENFGMAFLTLFQVSTGDNWNGIMKDTLRDCTHDERSCLSSLQFVSPLYFVSFVLTAQFVLINVVVAVLMKHLDDSNKEAQEDAEMDAELELEMAHGLGPGPRLPTGSPGAPGRGPGGAGGGGDTEGGLCRRCYSPAQENLWLDSVSLIIKDSLEGELTIIDNLSGSIFHHYSSPAGCKKCHHDKQEVQLAETEAFSLNSDRSSSILLGDDLSLEDPTACPPGRKDSKGELDPPEPMRVGDLGECFFPLSSTAVSPDPENFLCEMEEIPFNPVRSWLKHDSSQAPPSPFSPDASSPLLPMPAEFFHPAVSASQKGPEKGTGTGTLPKIALQGSWASLRSPRVNCTLLRQATGSDTSLDASPSSSAGSLQTTLEDSLTLSDSPRRALGPPAPAPGPRAGLSPAARRRLSLRGRGLFSLRGLRAHQRSHSSGGSTSPGCTHHDSMDPSDEEGRGGAGGGGAGSEHSETLSSLSLTSLFCPPPPPPAPGLTPARKFSSTSSLAAPGRPHAAALAHGLARSPSWAADRSKDPPGRAPLPMGLGPLAPPPQPLPGELEPGDAASKRKR

SEQ ID NO: 39682 - protein, 1981 aa, Homo sapiens
MAESASPPSSSAAAPAAEPGVTTEQPGPRSPPSSPPGLEEPLDGADPHVPHPDLAPIAFFCLRQTTSPRNWCIKMVCNPWFECVSMLVILLNCVTLGMYQPCDDMDCLSDRCKILQVFDDFIFIFFAMEMVLKMVALGIFGKKCYLGDTWNRLDFFIVMAGMVEYSLDLQNINLSAIRTVRVLRPLKAINRVPSMRILVNLLLDTLPMLGNVLLLCFFVFFIFGIIGVQLWAGLLRNRCFLEENFTIQGDVALPPYYQPEEDDEMPFICSLSGDNGIMGCHEIPPLKEQGRECCLSKDDVYDFGAGRQDLNASGLCVNWNRYYNVCRTGSANPHKGAINFDNIGYAWIVIFQVITLEGWVEIMYYVMDAHSFYNFIYFILLIIVGSFFMINLCLVVIATQFSETKQREHRLMLEQRQRYLSSSTVASYAEPGDCYEEIFQYVCHILRKAKRRALGLYQALQSRRQALGPEAPAPAKPGPHAKEPRHYQLCPQHSPLDATPHTLVQPIPATLASDPASCPCCQHEDGRRPSGLGSTDSGQEGSGSGSSAGGEDEADGDGARSSEDGASSELGKEEEEEEQADGAVWLCGDVWRETRAKLRGIVDSKYFNRGIMMAILVNTVSMGIEHHEQPEELTNILEICNVVFTSMFALEMILKLAAFGLFDYLRNPYNIFDSIIVIISIWEIVGQADGGLSVLRTFRLLRVLKLVRFMPALRRQLVVLMKTMDNVATFCMLLMLFIFIFSILGMHIFGCKFSLRTDTGDTVPDRKNFDSLLWAIVTVFQILTQEDWNVVLYNGMASTSPWASLYFVALMTFGNYVLFNLLVAILVEGFQAEGDANRSYSDEDQSSSNIEEFDKLQEGLDSSGDPKLCPIPMTPNGHLDPSLPLGGHLGPAGAAGPAPRLSLQPDPMLVALGSRKSSVMSLGRMSYDQRSLSSSRSSYYGPWGRSAAWASRRSSWNSLKHKPPSAEHESLLSAERGGGARVCEVAADEGPPRAAPLHTPHAHHIHHGPHLAHRHRHHRRTLSLDNRDSVDLAELVPAVGAHPRAAWRAAGPAPGHEDCNGRMPSIAKDVFTKMGDRGDRGEDEEEIDYTLCFRVRKMIDVYKPDWCEVREDWSVYLFSPENRFRVLCQTIIAHKLFDYVVLAFIFLNCITIALERPQIEAGSTERIFLTVSNYIFTAIFVGEMTLKVVSLGLYFGEQAYLRSSWNVLDGFLVFVSIIDIVVSLASAGGAKILGVLRVLRLLRTLRPLRVISRAPGLKLVVETLISSLKPIGNIVLICCAFFIIFGILGVQLFKGKFYHCLGVDTRNITNRSDCMAANYRWVHHKYNFDNLGQALMSLFVLASKDGWVNIMYNGLDAVAVDQQPVTNHNPWMLLYFISFLLIVSFFVLNMFVGVVVENFHKCRQHQEAEEARRREEKRLRRLEKKRRKAQRLPYYATYCHTRLLIHSMCTSHYLDIFITFIICLNVVTMSLEHYNQPTSLETALKYCNYMFTTVFVLEAVLKLVAFGLRRFFKDRWNQLDLAIVLLSVMGITLEEIEINAALPINPTIIRIMRVLRIARVLKLLKMATGMRALLDTVVQALPQVGNLGLLFMLLFFIYAALGVELFGKLVCNDENPCEGMSRHATFENFGMAFLTLFQVSTGDNWNGIMKDTLRDCTHDERSCLSSLQFVSPLYFVSFVLTAQFVLINVVVAVLMKHLDDSNKEAQEDAEMDAELELEMAHGLGPGPRLPTGSPGAPGRGPGGAGGGGDTEGGLCRRCYSPAQENLWLDSVSLIIKDSLEGELTIIDNLSGSIFHHYSSPAGCKKCHHDKQEVQLAETEAFSLNSDRSSSILLGDDLSLEDPTACPPGRKDSKGELDPPEPMRVGDLGECFFPLSSTAVSPDPENFLCEMEEIPFNPVRSWLKHDSSQAPPSPFSPDASSPLLPMPAEFFHPAVSASQKGPEKGTGTGTLPKIALQGSWASLRSPRVNCTLLRQVPTPPRP

SEQ ID NO: 39683 - protein, 346 aa, Homo sapiens
MMDKFRMIFQFLQSNQESFMNGICGIMALASAQMYSAFDFNCPCLPGYNAAYSAGILLAPPLVLFLLGLVMNNNVSMLAEEWKRPLGRRAKDPAVLRYMFCSMAQRALIAPVVWVAVTLLDGKCFLCAFCTAVPVSALGNGSLAPGLPAPELARLLARVPCPEIYDGDWLLAREVAVRYLRCISQALGWSFVLLTTLLAFVVRSVRPCFTQAAFLKSKYWSHYIDIERKLFDETCTEHAKAFAKVCIQQFFEAMNHDLELGHTHGTLATAPASAAAPTTPDGAEEEREKLRGITDQGTMNRLLTSWHKCKPPLRLGQEEPPLMGNGWAGGGPRPPRKEVATYFSKV

SEQ ID NO: 39684 - protein, 323 aa, Homo sapiens
MAALIAENFRFLSLFFKSKDVMIFNGLVALGTVGSQELFSVVAFHCPCSPARNYLYGLAAIGVPALVLFIIGIILNNHTWNLVAECQHRRTKNCSAAPTFLLLSSILGRAAVAPVTWSVISLLRGEAYVCALSEFVDPSSLTAREEHFPSAHATEILARFPCKENPDNLSDFREEVSRRLRYESQLFGWLLIGVVAILVFLTKCLKHYCSPLSYRQEAYWAQYRANEDQLFQRTAEVHSRVLAANNVRRFFGFVALNKDDEELIANFPVEGTQPRPQWNAITGVYLYRENQGLPLYSRLHKWAQGLAGNGAAPDNVEMALLPS

SEQ ID NO: 39685 - protein, 323 aa, Homo sapiens; identical to SEQ ID NO: 39684

SEQ ID NO: 39686 - protein, 218 aa, Homo sapiens
MAALIAENFRFLSLFFKSKDVMIFNGLVALGTVGSQELFSVVAFHCPCSPARNYLYGLAAIGVPALVLFIIGIILNNHTWNLVAECQHRRTKNCSAAPTFLLLSSILGRAAVAPVTWSVISLLRGEAYVCALSEFVDPSSLTAREEHFPSAHATEILARFPCKENPDNLSDFREEVSRRLRYESQVRSCAKGSSSSLVVAGERSGDGLVLKLGLVLRG

SEQ ID NO: 39687 - protein, 296 aa, Homo sapiens
MESMAVATDGGERPGVPAGSGLSASQRRAELRRRKLLMNSEQRINRIMGFHRPGSGAEEESQTKSKQQDSDKLNSLSVPSVSKRVVLGDSVSTGTTDQQGGVAEVKGTQLGDKLDSFIKPPECSSDVNLELRQRNRGDLTADSVQRGSRHGLEQYLSRFEEAMKLRKQLISEKPSQEDGNTTEEFDSFRIFRLVGCALLALGVRAFVCKYLSIFAPFLTLQLAYMGLYKYFPKSEKKIKTTVLTAALLLSGIPAEVINRSMDTYSKMGEVFTDLCVYFFTFIFCHELLDYWGSEVP

SEQ ID NO: 39688 - protein, 370 aa, Homo sapiens
MLGAVEGPRWKQAEDIRDIYDFRDVLGTGAFSEVILAEDKRTQKLVAIKCIAKEALEGKEGSMENEIAVLHKIKHPNIVALDDIYESGGHLYLIMQLVSGGELFDRIVEKGFYTERDASRLIFQVLDAVKYLHDLGIVHRDLKPENLLYYSLDEDSKIMISDFGLSKMEDPGSVLSTACGTPGYVAPEVLAQKPYSKAVDCWSIGVIAYILLCGYPPFYDENDAKLFEQILKAEYEFDSPYWDDISDSAKDFIRHLMEKDPEKRFTCEQALQHPWIAGDTALDKNIHQSVSEQIKKNFAKSKWKQAFNATAVVRHMRKLQLGTSQEGQGQTASHGELLTPVAGGPAAGCCCRDCCVEPGTELSPTLPHQL

SEQ ID NO: 39689 - protein, 478 aa, Homo sapiens
MATITCTRFTEEYQLFEELGKGAFSVVRRCVKVLAGQEYAAKIINTKKLSARDHQKLEREARICRLLKHPNIVRLHDSISEEGHHYLIFDLVTGGELFEDIVAREYYSEADASHCIQQILEAVLHCHQMGVVHRDLKPENLLLASKLKGAAVKLADFGLAIEVEGEQQAWFGFAGTPGYLSPEVLRKDPYGKPVDLWACGVILYILLVGYPPFWDEDQHRLYQQIKAGAYDFPSPEWDTVTPEAKDLINKMLTINPSKRITAAEALKHPWISHRSTVASCMHRQETVDCLKKFNARRKLKGAILTTMLATRNFSGGKSGGNKKSDGVKESSESTNTTIEDEDTKVRKQEIIKVTEQLIEAISNGDFESYTKMCDPGMTAFEPEALGNLVEGLDFHRFYFENLWSRNSKPVHTTILNPHIHLMGDESACIAYIRITQYLDAGGIPRTAQSEETRVWHRRDGKWQIVHFHRSGAPSVLPH

SEQ ID NO: 39690 - protein, 489 aa, Homo sapiens
MATITCTRFTEEYQLFEELGKGAFSVVRRCVKVLAGQEYAAKIINTKKLSARDHQKLEREARICRLLKHPNIVRLHDSISEEGHHYLIFDLVTGGELFEDIVAREYYSEADASHCIQQILEAVLHCHQMGVVHRDLKPENLLLASKLKGAAVKLADFGLAIEVEGEQQAWFGFAGTPGYLSPEVLRKDPYGKPVDLWACGVILYILLVGYPPFWDEDQHRLYQQIKAGAYDFPSPEWDTVTPEAKDLINKMLTINPSKRITAAEALKHPWISHRSTVASCMHRQETVDCLKKFNARRKLKGAILTTMLATRNFSGGKSGGNKKSDGVKKRKSSSSVQLMESSESTNTTIEDEDTKVRKQEIIKVTEQLIEAISNGDFESYTKMCDPGMTAFEPEALGNLVEGLDFHRFYFENLWSRNSKPVHTTILNPHIHLMGDESACIAYIRITQYLDAGGIPRTAQSEETRVWHRRDGKWQIVHFHRSGAPSVLPH

SEQ ID NO: 39691 - protein, 91 aa, Homo sapiens
MATITCTRFTEEYQLFEELGKGAFSVVRRCVKVLAGQEYAAKIINTKKLSARDHQKLEREARICRLLKHPNIVRLHDSISEEGHHYLIFDL

SEQ ID NO: 39692 - protein, 517 aa, Homo sapiens
MATTVTCTRFTDEYQLYEDIGKGAFSVVRRCVKLCTGHEYAAKIINTKKLSARDHQKLEREARICRLLKHSNIVRLHDSISEEGFHYLVFDLVTGGELFEDIVAREYYSEADASHCIQQILEAVLHCHQMGVVHRDLKPENLLLASKCKGAAVKLADFGLAIEVQGDQQAWFGFAGTPGYLSPEVLRKEAYGKPVDIWACGVILYILLVGYPPFWDEDQHKLYQQIKAGAYDFPSPEWDTVTPEAKNLINQMLTINPAKRITAHEALKHPWVCQRSTVASMMHRQETVECLKKFNARRKLKGAILTTMLATRNFSAKSLLNKKADGVKPQTNSTKNSAAATSPKGTLPPAALEPQTTVIHNPVDGIKESSDSANTTIEDEDAKARKQEIIKTTEQLIEAVNNGDFEAYAKICDPGLTSFEPEALGNLVEGMDFHRFYFENLLAKNSKPIHTTILNPHVHVIGEDAACIAYIRLTQYIDGQGRPRTSQSEETRVWHRRDGKWQNVHFHCSGAPVAPLQ

SEQ ID NO: 39693 - protein, 449 aa, Homo sapiens
MATTVTCTRFTDEYQLYEDIGKGAFSVVRRCVKLCTGHEYAAKIINTKKLSARDHQKLEREARICRLLKHSNIVRLHDSISEEGFHYLVFDLVTGGELFEDIVAREYYSEADASHCIQQILEAVLHCHQMGVVHRDLKPENLLLASKCKGAAVKLADFGLAIEVQGDQQAWFGFAGTPGYLSPEVLRKEAYGKPVDIWACGVILYILLVGYPPFWDEDQHKLYQQIKAGAYDFPSPEWDTVTPEAKNLINQMLTINPAKRITAHEALKHPWVCQRSTVASMMHRQETVECLKKFNARRKLKGAILTTMLATRNFSARKQEIIKTTEQLIEAVNNGDFEAYAKICDPGLTSFEPEALGNLVEGMDFHRFYFENLLAKNSKPIHTTILNPHVHVIGEDAACIAYIRLTQYIDGQGRPRTSQSEETRVWHRRDGKWQNVHFHCSGAPVAPLQ

SEQ ID NO: 39694 - protein, 492 aa, Homo sapiens
MATTVTCTRFTDEYQLYEDIGKGAFSVVRRCVKLCTGHEYAAKIINTKKLSARDHQKLEREARICRLLKHSNIVRLHDSISEEGFHYLVFDLVTGGELFEDIVAREYYSEADASHCIQQILEAVLHCHQMGVVHRDLKPENLLLASKCKGAAVKLADFGLAIEVQGDQQAWFGFAGTPGYLSPEVLRKEAYGKPVDIWACGVILYILLVGYPPFWDEDQHKLYQQIKAGAYDFPSPEWDTVTPEAKNLINQMLTINPAKRITAHEALKHPWVCQRSTVASMMHRQETVECLKKFNARRKLKGAILTTMLATRNFSVGRQTTAPATMSTAASGTTMGLVEQAKSLLNKKADGVKEPQTTVIHNPVDGIKESSDSANTTIEDEDAKARKQEIIKTTEQLIEAVNNGDFEAYAFYFENLLAKNSKPIHTTILNPHVHVIGEDAACIAYIRLTQYIDGQGRPRTSQSEETRVWHRRDGKWQNVHFHCSGAPVAPLQ

SEQ ID NO: 39695 - protein, 542 aa, Homo sapiens
MATTVTCTRFTDEYQLYEDIGKGAFSVVRRCVKLCTGHEYAAKIINTKKLSARDHQKLEREARICRLLKHSNIVRLHDSISEEGFHYLVFDLVTGGELFEDIVAREYYSEADASHCIQQILEAVLHCHQMGVVHRDLKPENLLLASKCKGAAVKLADFGLAIEVQGDQQAWFGFAGTPGYLSPEVLRKEAYGKPVDIWACGVILYILLVGYPPFWDEDQHKLYQQIKAGAYDFPSPEWDTVTPEAKNLINQMLTINPAKRITAHEALKHPWVCQRSTVASMMHRQETVECLKKFNARRKLKGAILTTMLATRNFSVGRQTTAPATMSTAASGTTMGLVEQAKSLLNKKADGVKPQTNSTKNSAAATSPKGTLPPAALEPQTTVIHNPVDGIKESSDSANTTIEDEDAKARKQEIIKTTEQLIEAVNNGDFEAYAKICDPGLTSFEPEALGNLVEGMDFHRFYFENLLAKNSKPIHTTILNPHVHVIGEDAACIAYIRLTQYIDGQGRPRTSQSEETRVWHRRDGKWQNVHFHCSGAPVAPLQ

SEQ ID NO: 39696 - protein, 479 aa, Homo sapiens
MATTVTCTRFTDEYQLYEDIGKGAFSVVRRCVKLCTGHEYAAKIINTKKLSARDHQKLEREARICRLLKHSNIVRLHDSISEEGFHYLVFDLVTGGELFEDIVAREYYSEADASHCIQQILEAVLHCHQMGVVHRDLKPENLLLASKCKGAAVKLADFGLAIEVQGDQQAWFGFAGTPGYLSPEVLRKEAYGKPVDIWACGVILYILLVGYPPFWDEDQHKLYQQIKAGAYDFPSPEWDTVTPEAKNLINQMLTINPAKRITAHEALKHPWVCQRSTVASMMHRQETVECLKKFNARRKLKGAILTTMLATRNFSAAKSLLNKKADGVKESSDSANTTIEDEDAKARKQEIIKTTEQLIEAVNNGDFEAYAKICDPGLTSFEPEALGNLVEGMDFHRFYFENLLAKNSKPIHTTILNPHVHVIGEDAACIAYIRLTQYIDGQGRPRTSQSEETRVWHRRDGKWQNVHFHCSGAPVAPLQ

SEQ ID NO: 39697 - protein, 503 aa, Homo sapiens
MATTVTCTRFTDEYQLYEDIGKGAFSVVRRCVKLCTGHEYAAKIINTKKLSARDHQKLEREARICRLLKHSNIVRLHDSISEEGFHYLVFDLVTGGELFEDIVAREYYSEADASHCIQQILEAVLHCHQMGVVHRDLKPENLLLASKCKGAAVKLADFGLAIEVQGDQQAWFGFAGTPGYLSPEVLRKEAYGKPVDIWACGVILYILLVGYPPFWDEDQHKLYQQIKAGAYDFPSPEWDTVTPEAKNLINQMLTINPAKRITAHEALKHPWVCQRSTVASMMHRQETVECLKKFNARRKLKGAILTTMLATRNFSAAKSLLNKKADGVKPQTNSTKNSAAATSPKGTLPPAALESSDSANTTIEDEDAKARKQEIIKTTEQLIEAVNNGDFEAYAKICDPGLTSFEPEALGNLVEGMDFHRFYFENLLAKNSKPIHTTILNPHVHVIGEDAACIAYIRLTQYIDGQGRPRTSQSEETRVWHRRDGKWQNVHFHCSGAPVAPLQ

SEQ ID NO: 39698 - protein, 518 aa, Homo sapiens
MATTVTCTRFTDEYQLYEDIGKGAFSVVRRCVKLCTGHEYAAKIINTKKLSARDHQKLEREARICRLLKHSNIVRLHDSISEEGFHYLVFDLVTGGELFEDIVAREYYSEADASHCIQQILEAVLHCHQMGVVHRDLKPENLLLASKCKGAAVKLADFGLAIEVQGDQQAWFGFAGTPGYLSPEVLRKEAYGKPVDIWACGVILYILLVGYPPFWDEDQHKLYQQIKAGAYDFPSPEWDTVTPEAKNLINQMLTINPAKRITAHEALKHPWVCQRSTVASMMHRQETVECLKKFNARRKLKGAILTTMLATRNFSAAKSLLNKKADGVKPQTNSTKNSAAATSPKGTLPPAALEPQTTVIHNPVDGIKESSDSANTTIEDEDAKARKQEIIKTTEQLIEAVNNGDFEAYAKICDPGLTSFEPEALGNLVEGMDFHRFYFENLLAKNSKPIHTTILNPHVHVIGEDAACIAYIRLTQYIDGQGRPRTSQSEETRVWHRRDGKWQNVHFHCSGAPVAPLQ

SEQ ID NO: 39699 - protein, 666 aa, Homo sapiens
MATTVTCTRFTDEYQLYEDIGKGAFSVVRRCVKLCTGHEYAAKIINTKKLSARDHQKLEREARICRLLKHSNIVRLHDSISEEGFHYLVFDLVTGGELFEDIVAREYYSEADASHCIQQILEAVLHCHQMGVVHRDLKPENLLLASKCKGAAVKLADFGLAIEVQGDQQAWFGFAGTPGYLSPEVLRKEAYGKPVDIWACGVILYILLVGYPPFWDEDQHKLYQQIKAGAYDFPSPEWDTVTPEAKNLINQMLTINPAKRITAHEALKHPWVCQRSTVASMMHRQETVECLKKFNARRKLKGAILTTMLATRNFSVGRQTTAPATMSTAASGTTMGLVEQAKSLLNKKADGVKPQTNSTKNSAAATSPKGTLPPAALEPQTTVIHNPVDGIKESSDSANTTIEDEDAKAPRVPDILSSVRRGSGAPEAEGPLPCPSPAPFSPLPAPSPRISDILNSVRRGSGTPEAEGPLSAGPPPCLSPALLGPLSSPSPRISDILNSVRRGSGTPEAEGPSPVGPPPCPSPTIPGPLPTPSRKQEIIKTTEQLIEAVNNGDFEAYAKICDPGLTSFEPEALGNLVEGMDFHRFYFENLLAKNSKPIHTTILNPHVHVIGEDAACIAYIRLTQYIDGQGRPRTSQSEETRVWHRRDGKWQNVHFHCSGAPVAPLQ

SEQ ID NO: 39700 - protein, 542 aa, Homo sapiens; identical to SEQ ID NO: 39695

SEQ ID NO: 39701 - protein, 518 aa, Homo sapiens; identical to SEQ ID NO: 39698

SEQ ID NO: 39702 - protein, 305 aa, Homo sapiens
MGVVHRDLKPENLLLASKCKGAAVKLADFGLAIEVQGDQQAWFGFAGTPGYLSPEVLRKEAYGKPVDIWACGVILYILLVGYPPFWDEDQHKLYQQIKAGAYDFPSPEWDTVTPEAKNLINQMLTINPAKRITAHEALKHPWVCQRSTVASMMHRQETVECLKKFNARRKLKGAILTTMLATRNFSVGRQTTAPATMSTAASGTTMGLVEQAKSLLNKKADGVKPQTNSTKNSAAATSPKGTLPPAALEPQTTVIHNPVDGIKESSDSANTTIEDEDAKARKQEIIKTTEQLIEAVNNGDFEAYA

SEQ ID NO: 39703 - protein, 478 aa, Homo sapiens
MASTTTCTRFTDEYQLFEELGKGAFSVVRRCMKIPTGQEYAAKIINTKKLSARDHQKLEREARICRLLKHPNIVRLHDSISEEGFHYLVFDLVTGGELFEDIVAREYYSEADASHCIQQILESVNHCHLNGIVHRDLKPENLLLASKSKGAAVKLADFGLAIEVQGDQQAWFGFAGTPGYLSPEVLRKDPYGKPVDMWACGVILYILLVGYPPFWDEDQHRLYQQIKAGAYDFPSPEWDTVTPEAKDLINKMLTINPAKRITASEALKHPWICQRSTVASMMHRQETVDCLKKFNARRKLKGAILTTMLATRNFSAAKSLLKKPDGVKESTESSNTTIEDEDVKARKQEIIKVTEQLIEAINNGDFEAYTKICDPGLTAFEPEALGNLVEGMDFHRFYFENALSKSNKPIHTIILNPHVHLVGDDAACIAYIRLTQYMDGSGMPKTMQSEETRVWHRRDGKWQNVHFHRSGSPTVPIK

SEQ ID NO: 39704 - protein, 499 aa, Homo sapiens
MASTTTCTRFTDEYQLFEELGKGAFSVVRRCMKIPTGQEYAAKIINTKKLSARDHQKLEREARICRLLKHPNIVRLHDSISEEGFHYLVFDLVTGGELFEDIVAREYYSEADASHCIQQILESVNHCHLNGIVHRDLKPENLLLASKSKGAAVKLADFGLAIEVQGDQQAWFGFAGTPGYLSPEVLRKDPYGKPVDMWACGVILYILLVGYPPFWDEDQHRLYQQIKAGAYDFPSPEWDTVTPEAKDLINKMLTINPAKRITASEALKHPWICQRSTVASMMHRQETVDCLKKFNARRKLKGAILTTMLATRNFSAAKSLLKKPDGVKESTESSNTTIEDEDVKARKQEIIKVTEQLIEAINNGDFEAYTKICDPGLTAFEPEALGNLVEGMDFHRFYFENALSKSNKPIHTIILNPHVHLVGDDAACIAYIRLTQYMDGSGMPKTMQSEETRVWHRRDGKWQNVHFHRSGSPTVPIKPPCIPNGKENFSGGTSLWQNI

SEQ ID NO: 39705 - protein, 478 aa, Homo sapiens; identical to SEQ ID NO: 39703

SEQ ID NO: 39706 - protein, 492 aa, Homo sapiens
MASTTTCTRFTDEYQLFEELGKGAFSVVRRCMKIPTGQEYAAKIINTKKLSARDHQKLEREARICRLLKHPNIVRLHDSISEEGFHYLVFDLVTGGELFEDIVAREYYSEADASHCIQQILESVNHCHLNGIVHRDLKPENLLLASKSKGAAVKLADFGLAIEVQGDQQAWFGFAGTPGYLSPEVLRKDPYGKPVDMWACGVILYILLVGYPPFWDEDQHRLYQQIKAGAYDFPSPEWDTVTPEAKDLINKMLTINPAKRITASEALKHPWICQRSTVASMMHRQETVDCLKKFNARRKLKGAILTTMLATRNFSAAKSLLKKPDGVKEPQTTVIHNPDGNKESTESSNTTIEDEDVKARKQEIIKVTEQLIEAINNGDFEAYTKICDPGLTAFEPEALGNLVEGMDFHRFYFENALSKSNKPIHTIILNPHVHLVGDDAACIAYIRLTQYMDGSGMPKTMQSEETRVWHRRDGKWQNVHFHRSGSPTVPIK

SEQ ID NO: 39707 - protein, 510 aa, Homo sapiens
MASTTTCTRFTDEYQLFEELGKGAFSVVRRCMKIPTGQEYAAKIINTKKLSARDHQKLEREARICRLLKHPNIVRLHDSISEEGFHYLVFDLVTGGELFEDIVAREYYSEADASHCIQQILESVNHCHLNGIVHRDLKPENLLLASKSKGAAVKLADFGLAIEVQGDQQAWFGFAGTPGYLSPEVLRKDPYGKPVDMWACGVILYILLVGYPPFWDEDQHRLYQQIKAGAYDFPSPEWDTVTPEAKDLINKMLTINPAKRITASEALKHPWICQRSTVASMMHRQETVDCLKKFNARRKLKGAILTTMLATRNFSAAKSLLKKPDGVKKRKSSSSVQMMESTESSNTTIEDEDVKARKQEIIKVTEQLIEAINNGDFEAYTKICDPGLTAFEPEALGNLVEGMDFHRFYFENALSKSNKPIHTIILNPHVHLVGDDAACIAYIRLTQYMDGSGMPKTMQSEETRVWHRRDGKWQNVHFHRSGSPTVPIKPPCIPNGKENFSGGTSLWQNI

SEQ ID NO: 39708 - protein, 513 aa, Homo sapiens
MASTTTCTRFTDEYQLFEELGKGAFSVVRRCMKIPTGQEYAAKIINTKKLSARDHQKLEREARICRLLKHPNIVRLHDSISEEGFHYLVFDLVTGGELFEDIVAREYYSEADASHCIQQILESVNHCHLNGIVHRDLKPENLLLASKSKGAAVKLADFGLAIEVQGDQQAWFGFAGTPGYLSPEVLRKDPYGKPVDMWACGVILYILLVGYPPFWDEDQHRLYQQIKAGAYDFPSPEWDTVTPEAKDLINKMLTINPAKRITASEALKHPWICQRSTVASMMHRQETVDCLKKFNARRKLKGAILTTMLATRNFSAAKSLLKKPDGVKEPQTTVIHNPDGNKESTESSNTTIEDEDVKARKQEIIKVTEQLIEAINNGDFEAYTKICDPGLTAFEPEALGNLVEGMDFHRFYFENALSKSNKPIHTIILNPHVHLVGDDAACIAYIRLTQYMDGSGMPKTMQSEETRVWHRRDGKWQNVHFHRSGSPTVPIKPPCIPNGKENFSGGTSLWQNI

SEQ ID NO: 39709 - protein, 519 aa, Homo sapiens
MASTTTCTRFTDEYQLFEELGKGAFSVVRRCMKIPTGQEYAAKIINTKKLSARDHQKLEREARICRLLKHPNIVRLHDSISEEGFHYLVFDLVTGGELFEDIVAREYYSEADASHCIQQILESVNHCHLNGIVHRDLKPENLLLASKSKGAAVKLADFGLAIEVQGDQQAWFGFAGTPGYLSPEVLRKDPYGKPVDMWACGVILYILLVGYPPFWDEDQHRLYQQIKAGAYDFPSPEWDTVTPEAKDLINKMLTINPAKRITASEALKHPWICQRSTVASMMHRQETVDCLKKFNARRKLKGAILTTMLATRNFSAAKSLLKKPDGVKINNKANVVTSPKENIPTPALESTESSNTTIEDEDVKARKQEIIKVTEQLIEAINNGDFEAYTKICDPGLTAFEPEALGNLVEGMDFHRFYFENALSKSNKPIHTIILNPHVHLVGDDAACIAYIRLTQYMDGSGMPKTMQSEETRVWHRRDGKWQNVHFHRSGSPTVPIKPPCIPNGKENFSGGTSLWQNI

SEQ ID NO: 39710 - protein, 524 aa, Homo sapiens
MASTTTCTRFTDEYQLFEELGKGAFSVVRRCMKIPTGQEYAAKIINTKKLSARDHQKLEREARICRLLKHPNIVRLHDSISEEGFHYLVFDLVTGGELFEDIVAREYYSEADASHCIQQILESVNHCHLNGIVHRDLKPENLLLASKSKGAAVKLADFGLAIEVQGDQQAWFGFAGTPGYLSPEVLRKDPYGKPVDMWACGVILYILLVGYPPFWDEDQHRLYQQIKAGAYDFPSPEWDTVTPEAKDLINKMLTINPAKRITASEALKHPWICQRSTVASMMHRQETVDCLKKFNARRKLKGAILTTMLATRNFSAAKSLLKKPDGVKKRKSSSSVQMMEPQTTVIHNPDGNKESTESSNTTIEDEDVKARKQEIIKVTEQLIEAINNGDFEAYTKICDPGLTAFEPEALGNLVEGMDFHRFYFENALSKSNKPIHTIILNPHVHLVGDDAACIAYIRLTQYMDGSGMPKTMQSEETRVWHRRDGKWQNVHFHRSGSPTVPIKPPCIPNGKENFSGGTSLWQNI

SEQ ID NO: 39711 - protein, 489 aa, Homo sapiens
MASTTTCTRFTDEYQLFEELGKGAFSVVRRCMKIPTGQEYAAKIINTKKLSARDHQKLEREARICRLLKHPNIVRLHDSISEEGFHYLVFDLVTGGELFEDIVAREYYSEADASHCIQQILESVNHCHLNGIVHRDLKPENLLLASKSKGAAVKLADFGLAIEVQGDQQAWFGFAGTPGYLSPEVLRKDPYGKPVDMWACGVILYILLVGYPPFWDEDQHRLYQQIKAGAYDFPSPEWDTVTPEAKDLINKMLTINPAKRITASEALKHPWICQRSTVASMMHRQETVDCLKKFNARRKLKGAILTTMLATRNFSAAKSLLKKPDGVKKRKSSSSVQMMESTESSNTTIEDEDVKARKQEIIKVTEQLIEAINNGDFEAYTKICDPGLTAFEPEALGNLVEGMDFHRFYFENALSKSNKPIHTIILNPHVHLVGDDAACIAYIRLTQYMDGSGMPKTMQSEETRVWHRRDGKWQNVHFHRSGSPTVPIK

SEQ ID NO: 39712 - protein, 182 aa, Homo sapiens
  VARIANT 1: note = MOD_RES - Any amino acid
XRKLKGAILTTMLATRNFSAAKSLLKKPDGVKESTESSNTTIEDEDVKARKQEIIKVTEQLIEAINNGDFEAYTKICDPGLTAFEPEALGNLVEGMDFHRFYFENALSKSNKPIHTIILNPHVHLVGDDAACIAYIRLTQYMDGSGMPKTMQSEETRVWHRRDGKWQNVHFHRSGSPTVPIK

SEQ ID NO: 39713 - protein, 478 aa, Homo sapiens
MASTTTCTRFTDEYQLFEELGKGAFSVVRRCMKIPTGQEYAAKIINTKKLSARDHQKLEREARICRLLKHPNIVRLHDSISEEGFHYLVFDLVTGGELFEDIVAREYYSEADASHCIQQILESVNHCHLNGIVHRDLKPENLLLASKSKGAAVKLADFGLAIEVQGDQQAWFGFAGTPGYLSPEVLRKDPYGKPVDMWACGVILYILLVGYPPFWDEDQHRLYQQIKAGAYDFPSPEWDTVTPEAKDLINKMLTINPAKRITASEALKHPWICQRSTVASMMHRQETVDCLKKFNARRKLKGAILTTMLATRNFSAAKSLLKKPDGVKESTESSNTTIEDEDVKARKQEIIKVTEQLIEAINNGDFEAYTKICDPGLTAFEPEALGNLVEGMDFHRFYFENALSKSNKPIHTIILNPHVHLVGDDAACIAYIRLTQYMDGSGMPKTMQSEETRVWHRRDGKWQNVHFHRSGSPTVPIN

SEQ ID NO: 39714 - protein, 529 aa, Homo sapiens
MATTATCTRFTDDYQLFEELGKGAFSVVRRCVKKTSTQEYAAKIINTKKLSARDHQKLEREARICRLLKHPNIVRLHDSISEEGFHYLVFDLVTGGELFEDIVAREYYSEADASHCIHQILESVNHIHQHDIVHRDLKPENLLLASKCKGAAVKLADFGLAIEVQGEQQAWFGFAGTPGYLSPEVLRKDPYGKPVDIWACGVILYILLVGYPPFWDEDQHKLYQQIKAGAYDFPSPEWDTVTPEAKNLINQMLTINPAKRITADQALKHPWVCQRSTVASMMHRQETVECLRKFNARRKLKGAILTTMLVSRNFSAAKSLLNKKSDGGVKKRKSSSSVHLMPQSNNKNSLVSPAQEPAPLQTAMEPQTTVVHNATDGIKGSTESCNTTTEDEDLKVRKQEIIKITEQLIEAINNGDFEAYTKICDPGLTSFEPEALGNLVEGMDFHKFYFENLLSKNSKPIHTTILNPHVHVIGEDAACIAYIRLTQYIDGQGRPRTSQSEETRVWHRRDGKWLNVHYHCSGAPAAPLQ

SEQ ID NO: 39715 - protein, 527 aa, Homo sapiens
MATTATCTRFTDDYQLFEELGKGAFSVVRRCVKKTSTQEYAAKIINTKKLSARDHQKLEREARICRLLKHPNIVRLHDSISEEGFHYLVFDLVTGGELFEDIVAREYYSEADASHCIHQILESVNHIHQHDIVHRDLKPENLLLASKCKGAAVKLADFGLAIEVQGEQQAWFGFAGTPGYLSPEVLRKDPYGKPVDIWACGVILYILLVGYPPFWDEDQHKLYQQIKAGAYDFPSPEWDTVTPEAKNLINQMLTINPAKRITADQALKHPWVCQRSTVASMMHRQETVECLRKFNARRKLKGAILTTMLVSRNFSVGRQSSAPASPAASAAGLAGQAAKSLLNKKSDGGVKKRKSSSSVHLMEPQTTVVHNATDGIKGSTESCNTTTEDEDLKVRKQEIIKITEQLIEAINNGDFEAYTKICDPGLTSFEPEALGNLVEGMDFHKFYFENLLSKNSKPIHTTILNPHVHVIGEDAACIAYIRLTQYIDGQGRPRTSQSEETRVWHRRDGKWLNVHYHCSGAPAAPLQ

SEQ ID NO: 39716 - protein, 556 aa, Homo sapiens
MATTATCTRFTDDYQLFEELGKGAFSVVRRCVKKTSTQEYAAKIINTKKLSARDHQKLEREARICRLLKHPNIVRLHDSISEEGFHYLVFDLVTGGELFEDIVAREYYSEADASHCIHQILESVNHIHQHDIVHRDLKPENLLLASKCKGAAVKLADFGLAIEVQGEQQAWFGFAGTPGYLSPEVLRKDPYGKPVDIWACGVILYILLVGYPPFWDEDQHKLYQQIKAGAYDFPSPEWDTVTPEAKNLINQMLTINPAKRITADQALKHPWVCQRSTVASMMHRQETVECLRKFNARRKLKGAILTTMLVSRNFSAAKSLLNKKSDGGVKPQSNNKNSLVSPAQEPAPLQTAMEPQTTVVHNATDGIKGSTESCNTTTEDEDLKAAPLRTGNGSSVPEGRSSRDRTAPSAGMQPQPSLCSSAMRKQEIIKITEQLIEAINNGDFEAYTKICDPGLTSFEPEALGNLVEGMDFHKFYFENLLSKNSKPIHTTILNPHVHVIGEDAACIAYIRLTQYIDGQGRPRTSQSEETRVWHRRDGKWLNVHYHCSGAPAAPLQ

SEQ ID NO: 39717 - protein, 495 aa, Homo sapiens
MATTATCTRFTDDYQLFEELGKGAFSVVRRCVKKTSTQEYAAKIINTKKLSARDHQKLEREARICRLLKHPNIVRLHDSISEEGFHYLVFDLVTGGELFEDIVAREYYSEADASHCIHQILESVNHIHQHDIVHRDLKPENLLLASKCKGAAVKLADFGLAIEVQGEQQAWFGFAGTPGYLSPEVLRKDPYGKPVDIWACGVILYILLVGYPPFWDEDQHKLYQQIKAGAYDFPSPEWDTVTPEAKNLINQMLTINPAKRITADQALKHPWVCQRSTVASMMHRQETVECLRKFNARRKLKGAILTTMLVSRNFSAAKSLLNKKSDGGVKEPQTTVVHNATDGIKGSTESCNTTTEDEDLKVRKQEIIKITEQLIEAINNGDFEAYTKICDPGLTSFEPEALGNLVEGMDFHKFYFENLLSKNSKPIHTTILNPHVHVIGEDAACIAYIRLTQYIDGQGRPRTSQSEETRVWHRRDGKWLNVHYHCSGAPAAPLQ

SEQ ID NO: 39718 - protein, 516 aa, Homo sapiens
MATTATCTRFTDDYQLFEELGKGAFSVVRRCVKKTSTQEYAAKIINTKKLSARDHQKLEREARICRLLKHPNIVRLHDSISEEGFHYLVFDLVTGGELFEDIVAREYYSEADASHCIHQILESVNHIHQHDIVHRDLKPENLLLASKCKGAAVKLADFGLAIEVQGEQQAWFGFAGTPGYLSPEVLRKDPYGKPVDIWACGVILYILLVGYPPFWDEDQHKLYQQIKAGAYDFPSPEWDTVTPEAKNLINQMLTINPAKRITADQALKHPWVCQRSTVASMMHRQETVECLRKFNARRKLKGAILTTMLVSRNFSVGRQSSAPASPAASAAGLAGQAAKSLLNKKSDGGVKEPQTTVVHNATDGIKGSTESCNTTTEDEDLKVRKQEIIKITEQLIEAINNGDFEAYTKICDPGLTSFEPEALGNLVEGMDFHKFYFENLLSKNSKPIHTTILNPHVHVIGEDAACIAYIRLTQYIDGQGRPRTSQSEETRVWHRRDGKWLNVHYHCSGAPAAPLQ

SEQ ID NO: 39719 - protein, 533 aa, Homo sapiens
MATTATCTRFTDDYQLFEELGKGAFSVVRRCVKKTSTQEYAAKIINTKKLSARDHQKLEREARICRLLKHPNIVRLHDSISEEGFHYLVFDLVTGGELFEDIVAREYYSEADASHCIHQILESVNHIHQHDIVHRDLKPENLLLASKCKGAAVKLADFGLAIEVQGEQQAWFGFAGTPGYLSPEVLRKDPYGKPVDIWACGVILYILLVGYPPFWDEDQHKLYQQIKAGAYDFPSPEWDTVTPEAKNLINQMLTINPAKRITADQALKHPWVCQRSTVASMMHRQETVECLRKFNARRKLKGAILTTMLVSRNFSAAKSLLNKKSDGGVKEPQTTVVHNATDGIKGSTESCNTTTEDEDLKAAPLRTGNGSSVPEGRSSRDRTAPSAGMQPQPSLCSSAMRKQEIIKITEQLIEAINNGDFEAYTKICDPGLTSFEPEALGNLVEGMDFHKFYFENLLSKNSKPIHTTILNPHVHVIGEDAACIAYIRLTQYIDGQGRPRTSQSEETRVWHRRDGKWLNVHYHCSGAPAAPLQ

SEQ ID NO: 39720 - protein, 558 aa, Homo sapiens
MATTATCTRFTDDYQLFEELGKGAFSVVRRCVKKTSTQEYAAKIINTKKLSARDHQKLEREARICRLLKHPNIVRLHDSISEEGFHYLVFDLVTGGELFEDIVAREYYSEADASHCIHQILESVNHIHQHDIVHRDLKPENLLLASKCKGAAVKLADFGLAIEVQGEQQAWFGFAGTPGYLSPEVLRKDPYGKPVDIWACGVILYILLVGYPPFWDEDQHKLYQQIKAGAYDFPSPEWDTVTPEAKNLINQMLTINPAKRITADQALKHPWVCQRSTVASMMHRQETVECLRKFNARRKLKGAILTTMLVSRNFSAAKSLLNKKSDGGVKKRKSSSSVHLMPQSNNKNSLVSPAQEPAPLQTAMEPQTTVVHNATDGIKGSTESCNTTTEDEDLKGSVPEGRSSRDRTAPSAGMQPQPSLCSSAMRKQEIIKITEQLIEAINNGDFEAYTKICDPGLTSFEPEALGNLVEGMDFHKFYFENLLSKNSKPIHTTILNPHVHVIGEDAACIAYIRLTQYIDGQGRPRTSQSEETRVWHRRDGKWLNVHYHCSGAPAAPLQ

SEQ ID NO: 39721 - protein, 588 aa, Homo sapiens
MATTATCTRFTDDYQLFEELGKGAFSVVRRCVKKTSTQEYAAKIINTKKLSARDHQKLEREARICRLLKHPNIVRLHDSISEEGFHYLVFDLVTGGELFEDIVAREYYSEADASHCIHQILESVNHIHQHDIVHRDLKPENLLLASKCKGAAVKLADFGLAIEVQGEQQAWFGFAGTPGYLSPEVLRKDPYGKPVDIWACGVILYILLVGYPPFWDEDQHKLYQQIKAGAYDFPSPEWDTVTPEAKNLINQMLTINPAKRITADQALKHPWVCQRSTVASMMHRQETVECLRKFNARRKLKGAILTTMLVSRNFSVGRQSSAPASPAASAAGLAGQAAKSLLNKKSDGGVKKRKSSSSVHLMPQSNNKNSLVSPAQEPAPLQTAMEPQTTVVHNATDGIKGSTESCNTTTEDEDLKAAPLRTGNGSSVPEGRSSRDRTAPSAGMQPQPSLCSSAMRKQEIIKITEQLIEAINNGDFEAYTKICDPGLTSFEPEALGNLVEGMDFHKFYFENLLSKNSKPIHTTILNPHVHVIGEDAACIAYIRLTQYIDGQGRPRTSQSEETRVWHRRDGKWLNVHYHCSGAPAAPLQ

SEQ ID NO: 39722 - protein, 453 aa, Homo sapiens
RLLKHPNIVRLHDSISEEGFHYLVFDLVTGGELFEDIVAREYYSEADASHCIHQILESVNHIHQHDIVHRDLKPENLLLASKCKGAAVKLADFGLAIEVQGEQQAWFGFAGTPGYLSPEVLRKDPYGKPVDIWACGVILYILLVGYPPFWDEDQHKLYQQIKAGAYDFPSPEWDTVTPEAKNLINQMLTINPAKRITADQALKHPWVCQRSTVASMMHRQETVECLRKFNARRKLKGAILTTMLVSRNFSAAKSLLNKKSDGGVKPQSNNKNSLVSPAQEPAPLQTAMEPQTTVVHNATDGIKGSTESCNTTTEDEDLKVRKQEIIKITEQLIEAINNGDFEAYTKICDPGLTSFEPEALGNLVEGMDFHKFYFENLLSKNSKPIHTTILNPHVHVIGEDAACIAYIRLTQYIDGQGRPRTSQSEETRVWHRRDGKWLNVHYHCSGAPAAPLQ

SEQ ID NO: 39723 - protein, 335 aa, Homo sapiens
  VARIANT 1: note = MOD_RES - Any amino acid
XYQQIKAGAYDFPSPEWDTVTPEAKNLINQMLTINPAKRITADQALKHPWVCQRSTVASMMHRQETVECLRKFNARRKLKGAILTTMLVSRNFSAAKSLLNKKSDGGVKPQSNNKNSLVSPAQEPAPLQTAMEPQTTVVHNATDGIKGSTESCNTTTEDEDLKAAPLRTGNGSSVPEGRSSRDRTAPSAGMQPQPSLCSSAMRKQEIIKITEQLIEAINNGDFEAYTKICDPGLTSFEPEALGNLVEGMDFHKFYFENLLSKNSKPIHTTILNPHVHVIGEDAACIAYIRLTQYIDGQGRPRTSQSEETRVWHRRDGKWLNVHYHCSGAPAAPLQ

SEQ ID NO: 39724 - protein, 180 aa, Homo sapiens
MATTATCTRFTDDYQLFEELGKGAFSVVRRCVKKTSTQEYAAKIINTKKLSARDHQKLEREARICRLLKHPNIATIHGGIHDASSGDCGVFAQVQCPEKTEGCHPHDHACLQELLSCQKPIEQEVGWRCQATEQQQKQSRKPSPRARALADGHGATNHCGTQRYRWDQGLHRELQHHHRR

SEQ ID NO: 39725 - protein, 79 aa, Homo sapiens
MSEILPYSEDKMGRFGADPEGSDLSFSCRLQDTNSFFAGNQAKRPPKLGQIGRAKRVVIEDDRIDDVLKGMGEKPPSGV

SEQ ID NO: 39726 - protein, 473 aa, Homo sapiens
MLKVTVPSCSASSCSSVTASAAPGTASLVPDYWIDGSNRDALSDFFEVESELGRGATSIVYRCKQKGTQKPYALKVLKKTVDKKIVRTEIGVLLRLSHPNIIKLKEIFETPTEISLVLELVTGGELFDRIVEKGYYSERDAADAVKQILEAVAYLHENGIVHRDLKPENLLYATPAPDAPLKIADFGLSKIVEHQVLMKTVCGTPGYCAPEILRGCAYGPEVDMWSVGIITYILLCGFEPFYDERGDQFMFRRILNCEYYFISPWWDEVSLNAKDLVRKLIVLDPKKRLTTFQALQHPWVTGKAANFVHMDTAQKKLQEFNARRKLKAAVKAVVASSRLGSASSSHGSIQESHKASRDPSPIQDGNEDMKAIPEGEKIQGDGAQAAVKGAQAELMKVQALEKVKGADINAEEAPKMVPKAVEDGIKVADLELEEGLAEEKLKTVEEAAAPREGQGSSAVGFEVPQQDVILPEY

SEQ ID NO: 39727 - protein, 142 aa, Homo sapiens
MLKVTVPSCSASSCSSVTASAAPGTASLVPDYWIDGSNRDALSDFFEVESELGRGATSIVYRCKQKGTQKPYALKVLKKTVDKKIVRTEIGVLLRLSHPNIIKLKEIFETPTEISLVLELVTGGELFDRIVEKGYYSERDAA

SEQ ID NO: 39728 - protein, 473 aa, Homo sapiens; identical to SEQ ID NO: 39726

SEQ ID NO: 39729 - protein, 921 aa, Homo sapiens
MADDDVLFEDVYELCEVIGKGPFSVVRRCINRETGQQFAVKIVDVAKFTSSPGLSTEDLKREASICHMLKHPHIVELLETYSSDGMLYMVFEFMDGADLCFEIVKRADAGFVYSEAVASHYMRQILEALRYCHDNNIIHRDVKPHCVLLASKENSAPVKLGGFGVAIQLGESGLVAGGRVGTPHFMAPEVVKREPYGKPVDVWGCGVILFILLSGCLPFYGTKERLFEGIIKGKYKMNPRQWSHISESAKDLVRRMLMLDPAERITVYEALNHPWLKERDRYAYKIHLPETVEQLRKFNARRKLKGAVLAAVSSHKFNSFYGDPPEELPDFSEDPTSSVLLIVSRAVSQVLDSLEEIHALTDCSEKDLDFLHSVFQDQHLHTLLDLYDKINTKSSPQIRNPPSDAVQRAKEVLEEISCYPENNDAKELKRILTQPHFMALLQTHDVVAHEVYSDEALRVTPPPTSPYLNGDSPESANGDMDMENVTRVRLVQFQKNTDEPMGITLKMNELNHCIVARIMHGGMIHRQGTLHVGDEIREINGISVANQTVEQLQKMLREMRGSITFKIVPSYRTQSSSCERDSPSTSRQSPANGHSSTNNSVSDLPSTTQPKGRQIYVRAQFEYDPAKDDLIPCKEAGIRFRVGDIIQIISKDDHNWWQGKLENSKNGTAGLIPSPELQEWRVACIAMEKTKQEQQASCTWFGKKKKQYKDKYLAKHNADLVTYEEVVKLPAFKRKTLVLLGAHGVGRRHIKNTLITKHPDRFAYPIPHTTRPPKKDEENGKNYYFVSHDQMMQDISNNEYLEYGSHEDAMYGTKLETIRKIHEQGLIAILDVEPQALKVLRTAEFAPFVVFIAAPTITPGLNEDESLQRLQKESDILQRTYAHYFDLTIINNEIDETIRHLEEAVELVCTAPQWVPVSWVY

SEQ ID NO: 39730 - protein, 909 aa, Homo sapiens
MADDDVLFEDVYELCEVIGKGPFSVVRRCINRETGQQFAVKIVDVAKFTSSPGLSTEDLKREASICHMLKHPHIVELLETYSSDGMLYMVFEFMDGADLCFEIVKRADAGFVYSEAVASHYMRQILEALRYCHDNNIIHRDVKPHCVLLASKENSAPVKLGGFGVAIQLGESGLVAGGRVGTPHFMAPEVVKREPYGKPVDVWGCGVILFILLSGCLPFYGTKERLFEGIIKGKYKMNPRQWSHISESAKDLVRRMLMLDPAERITVYEALNHPWLKERDRYAYKIHLPETVEQLRKFNARRKLKGAVLAAVSSHKFNSFYGDPPEELPDFSEDPTSSVLLIVSRAVSQVLDSLEEIHALTDCSEKDLDFLHSVFQDQHLHTLLDLYDKINTKSSPQIRNPPSDAVQRAKEVLEEISCYPENNDAKELKRILTQPHFMALLQTHDVVAHEVYSDEALRVTPPPTSPYLNGDSPESANGDMDMENVTRVRLVQFQKNTDEPMGITLKMNELNHCIVARIMHGGMIHRQGTLHVGDEIREINGISVANQTVEQLQKMLREMRGSITFKIVPSYRTQSSSCERDSPSTSRQSPANGHSSTNNSVSIYVRAQFEYDPAKDDLIPCKEAGIRFRVGDIIQIISKDDHNWWQGKLENSKNGTAGLIPSPELQEWRVACIAMEKTKQEQQASCTWFGKKKKQYKDKYLAKHNADLVTYEEVVKLPAFKRKTLVLLGAHGVGRRHIKNTLITKHPDRFAYPIPHTTRPPKKDEENGKNYYFVSHDQMMQDISNNEYLEYGSHEDAMYGTKLETIRKIHEQGLIAILDVEPQALKVLRTAEFAPFVVFIAAPTITPGLNEDESLQRLQKESDILQRTYAHYFDLTIINNEIDETIRHLEEAVELVCTAPQWVPVSWVY

SEQ ID NO: 39731 - protein, 590 aa, Homo sapiens
MADDDVLFEDVYELCEVIGKGPFSVVRRCINRETGQQFAVKIVDVAKFTSSPGLSTEDLKREASICHMLKHPHIVELLETYSSDGMLYMVFEFMDGADLCFEIVKRADAGFVYSEAVASHYMRQILEALRYCHDNNIIHRDVKPHCVLLASKENSAPVKLGGFGVAIQLGESGLVAGGRVGTPHFMAPEVVKREPYGKPVDVWGCGVILFILLSGCLPFYGTKERLFEGIIKGKYKMNPRQWSHISESAKDLVRRMLMLDPAERITVYEALNHPWLKERDRYAYKIHLPETVEQLRKFNARRKLKGAVLAAVSSHKFNSFYGDPPEELPDFSEDPTSSGLLAAERAVSQVLDSLEEIHALTDCSEKDLDFLHSVFQDQHLHTLLDLYDKINTKSSPQIRNPPSDAVQRAKEVLEEISCYPENNDAKELKRILTQPHFMALLQTHDVVAHEVYSDEALRVTPPPTSPYLNGDSPESANGDMDMENVTRVRLVQFQKNTDEPMGITLKMNELNHCIVARIMHGGMIHRQGTLHVGDEIREINGISVANQTVEQLQKMLREMRGSITFKIVPSYRTQSSSCEVMTLTNHPHLL

SEQ ID NO: 39732 - protein, 909 aa, Homo sapiens
MADDDVLFEDVYELCEVIGKGPFSVVRRCINRETGQQFAVKIVDVAKFTSSPGLSTEDLKREASICHMLKHPHIVELLETYSSDGMLYMVFEFMDGADLCFEIVKRADAGFVYSEAVASHYMRQILEALRYCHDNNIIHRDVKPHCVLLASKENSAPVKLGGFGVAIQLGESGLVAGGRVGTPHFMAPEVVKREPYGKPVDVWGCGVILFILLSGCLPFYGTKERLFEGIIKGKYKMNPRQWSHISESAKDLVRRMLMLDPAERITVYEALNHPWLKERDRYAYKIHLPETVEQLRKFNARRKLKGAVLAAVSSHKFNSFYGDPPEELPDFSEDPTSSGLLAAERAVSQVLDSLEEIHALTDCSEKDLDFLHSVFQDQHLHTLLDLYDKINTKSSPQIRNPPSDAVQRAKEVLEEISCYPENNDAKELKRILTQPHFMALLQTHDVVAHEVYSDEALRVTPPPTSPYLNGDSPESANGDMDMENVTRVRLVQFQKNTDEPMGITLKMNELNHCIVARIMHGGMIHRQGTLHVGDEIREINGISVANQTVEQLQKMLREMRGSITFKIVPSYRTQSSSCERDSPSTSRQSPANGHSSTNNSVSIYVRAQFEYDPAKDDLIPCKEAGIRFRVGDIIQIISKDDHNWWQGKLENSKNGTAGLIPSPELQEWRVACIAMEKTKQEQQASCTWFGKKKKQYKDKYLAKHNADLVTYEEVVKLPAFKRKTLVLLGAHGVGRRHIKNTLITKHPDRFAYPIPHTTRPPKKDEENGKNYYFVSHDQMMQDISNNEYLEYGSHEDAMYGTKLETIRKIHEQGLIAILDVEPQALKVLRTAEFAPFVVFIAAPTITPGLNEDESLQRLQKESDILQRTYAHYFDLTIINNEIDETIRHLEEAVELVCTAPQWVPVSWVY

SEQ ID NO: 39733 - protein, 926 aa, Homo sapiens
MADDDVLFEDVYELCEVIGKGPFSVVRRCINRETGQQFAVKIVDVAKFTSSPGLSTEDLKREASICHMLKHPHIVELLETYSSDGMLYMVFEFMDGADLCFEIVKRADAGFVYSEAVASHYMRQILEALRYCHDNNIIHRDVKPHCVLLASKENSAPVKLGGFGVAIQLGESGLVAGGRVGTPHFMAPEVVKREPYGKPVDVWGCGVILFILLSGCLPFYGTKERLFEGIIKGKYKMNPRQWSHISESAKDLVRRMLMLDPAERITVYEALNHPWLKERDRYAYKIHLPETVEQLRKFNARRKLKGAVLAAVSSHKFNSFYGDPPEELPDFSEDPTSSGLLAAERAVSQVLDSLEEIHALTDCSEKDLDFLHSVFQDQHLHTLLDLYDKINTKSSPQIRNPPSDAVQRAKEVLEEISCYPENNDAKELKRILTQPHFMALLQTHDVVAHEVYSDEALRVTPPPTSPYLNGDSPESANGDMDMENVTRVRLVQFQKNTDEPMGITLKMNELNHCIVARIMHGGMIHRQGTLHVGDEIREINGISVANQTVEQLQKMLREMRGSITFKIVPSYRTQSSSCERDSPSTSRQSPANGHSSTNNSVSDLPSTTQPKGRQIYVRAQFEYDPAKDDLIPCKEAGIRFRVGDIIQIISKDDHNWWQGKLENSKNGTAGLIPSPELQEWRVACIAMEKTKQEQQASCTWFGKKKKQYKDKYLAKHNAVFDQLDLVTYEEVVKLPAFKRKTLVLLGAHGVGRRHIKNTLITKHPDRFAYPIPHTTRPPKKDEENGKNYYFVSHDQMMQDISNNEYLEYGSHEDAMYGTKLETIRKIHEQGLIAILDVEPQALKVLRTAEFAPFVVFIAAPTITPGLNEDESLQRLQKESDILQRTYAHYFDLTIINNEIDETIRHLEEAVELVCTAPQWVPVSWVY

SEQ ID NO: 39734 - protein, 921 aa, Homo sapiens
MADDDVLFEDVYELCEVIGKGPFSVVRRCINRETGQQFAVKIVDVAKFTSSPGLSTEDLKREASICHMLKHPHIVELLETYSSDGMLYMVFEFMDGADLCFEIVKRADAGFVYSEAVASHYMRQILEALRYCHDNNIIHRDVKPHCVLLASKENSAPVKLGGFGVAIQLGESGLVAGGRVGTPHFMAPEVVKREPYGKPVDVWGCGVILFILLSGCLPFYGTKERLFEGIIKGKYKMNPRQWSHISESAKDLVRRMLMLDPAERITVYEALNHPWLKERDRYAYKIHLPETVEQLRKFNARRKLKGAVLAAVSSHKFNSFYGDPPEELPDFSEDPTSSGLLAAERAVSQVLDSLEEIHALTDCSEKDLDFLHSVFQDQHLHTLLDLYDKINTKSSPQIRNPPSDAVQRAKEVLEEISCYPENNDAKELKRILTQPHFMALLQTHDVVAHEVYSDEALRVTPPPTSPYLNGDSPESANGDMDMENVTRVRLVQFQKNTDEPMGITLKMNELNHCIVARIMHGGMIHRQGTLHVGDEIREINGISVANQTVEQLQKMLREMRGSITFKIVPSYRTQSSSCERDSPSTSRQSPANGHSSTNNSVSDLPSTTQPKGRQIYVRAQFEYDPAKDDLIPCKEAGIRFRVGDIIQIISKDDHNWWQGKLENSKNGTAGLIPSPELQEWRVACIAMEKTKQEQQASCTWFGKKKKQYKDKYLAKHNADLVTYEEVVKLPAFKRKTLVLLGAHGVGRRHIKNTLITKHPDRFAYPIPHTTRPPKKDEENGKNYYFVSHDQMMQDISNNEYLEYGSHEDAMYGTKLETIRKIHEQGLIAILDVEPQALKVLRTAEFAPFVVFIAAPTITPGLNEDESLQRLQKESDILQRTYAHYFDLTIINNEIDETIRHLEEAVELVCTAPQWVPVSWVY

SEQ ID NO: 39735 - protein, 381 aa, Homo sapiens
DEIREINGISVANQTVEQLQKMLREMRGSITFKIVPSYRTQSSSCERDSPSTSRQSPANGHSSTNNSVSIYVRAQFEYDPAKDDLIPCKEAGIRFRVGDIIQIISKDDHNWWQGKLENSKNGTAGLIPSPELQEWRVACIAMEKTKQEQQASCTWFGKKKKQYKDKYLAKHNAVFDQLDLVTYEEVVKLPAFKRKTLVLLGAHGVGRRHIKNTLITKHPDRFAYPIPHTTRPPKKDEENGKNYYFVSHDQMMQDISNNEYLEYGSHEDAMYGTKLETIRKIHEQGLIAILDVEPQALKVLRTAEFAPFVVFIAAPTITPGLNEDESLQRLQKESDILQRTYAHYFDLTIINNEIDETIRHLEEAVELVCTAPQWVPVSWVY

SEQ ID NO: 39736 - protein, 518 aa, Homo sapiens
LYDKINTKSSPQIRNPPSDAVQRAKEVLEEISCYPENNDAKELKRILTQPHFMALLQTHDVVAHEVYSDEALRVTPPPTSPYLNGDSPESANGDMDMENVTRVRLVQFQKNTDEPMGITLKMNELNHCIVARIMHGGMIHRQGTLHVGDEIREINGISVANQTVEQLQKMLREMRGSITFKIVPSYRTQSSSCEDLPSTTQPKGRQIYVRAQFEYDPAKDDLIPCKEAGIRFRVGDIIQIISKDDHNWWQGKLENSKNGTAGLIPSPELQEWRVACIAMEKTKQEQQASCTWFGKKKKQYKDKYLAKHNAVFDQLDLVTYEEVVKLPAFKRKTLVLLGAHGVGRRHIKNTLITKHPDRFAYPIPHTTRPPKKDEENGKNYYFVSHDQMMQDISNNEYLEYGSHEDAMYGTKLETIRKIHEQGLIAILDVEPQALKVLRTAEFAPFVVFIAAPTITPGLNEDESLQRLQKESDILQRTYAHYFDLTIINNEIDETIRHLEEAVELVCTAPQWVPVSWVY

SEQ ID NO: 39737 - protein, 897 aa, Homo sapiens
MADDDVLFEDVYELCEVIGKGPFSVVRRCINRETGQQFAVKIVDVAKFTSSPGLSTEDLKREASICHMLKHPHIVELLETYSSDGMLYMVFEFMDGADLCFEIVKRADAGFVYSEAVASHYMRQILEALRYCHDNNIIHRDVKPHCVLLASKENSAPVKLGGFGVAIQLGESGLVAGGRVGTPHFMAPEVVKREPYGKPVDVWGCGVILFILLSGCLPFYGTKERLFEGIIKGKYKMNPRQWSHISESAKDLVRRMLMLDPAERITVYEALNHPWLKERDRYAYKIHLPETVEQLRKFNARRKLKGAVLAAVSSHKFNSFYGDPPEELPDFSEDPTSSGAVSQVLDSLEEIHALTDCSEKDLDFLHSVFQDQHLHTLLDLYDKINTKSSPQIRNPPSDAVQRAKEVLEEISCYPENNDAKELKRILTQPHFMALLQTHDVVAHEVYSDEALRVTPPPTSPYLNGDSPESANGDMDMENVTRVRLVQFQKNTDEPMGITLKMNELNHCIVARIMHGGMIHRQGTLHVGDEIREINGISVANQTVEQLQKMLREMRGSITFKIVPSYRTQSSSCEDLPSTTQPKGRQIYVRAQFEYDPAKDDLIPCKEAGIRFRVGDIIQIISKDDHNWWQGKLENSKNGTAGLIPSPELQEWRVACIAMEKTKQEQQASCTWFGKKKKQYKDKYLAKHNAVFDQLDLVTYEEVVKLPAFKRKTLVLLGAHGVGRRHIKNTLITKHPDRFAYPIPHTTRPPKKDEENGKNYYFVSHDQMMQDISNNEYLEYGSHEDAMYGTKLETIRKIHEQGLIAILDVEPQALKVLRTAEFAPFVVFIAAPTITPGLNEDESLQRLQKESDILQRTYAHYFDLTIINNEIDETIRHLEEAVELVCTAPQWVPVSWVY

SEQ ID NO: 39738 - protein, 898 aa, Homo sapiens
MADDDVLFEDVYELCEVIGKGPFSVVRRCINRETGQQFAVKIVDVAKFTSSPGLSTEDLKREASICHMLKHPHIVELLETYSSDGMLYMVFEFMDGADLCFEIVKRADAGFVYSEAVASHYMRQILEALRYCHDNNIIHRDVKPHCVLLASKENSAPVKLGGFGVAIQLGESGLVAGGRVGTPHFMAPEVVKREPYGKPVDVWGCGVILFILLSGCLPFYGTKERLFEGIIKGKYKMNPRQWSHISESAKDLVRRMLMLDPAERITVYEALNHPWLKERDRYAYKIHLPETVEQLRKFNARRKLKGAVLAAVSSHKFNSFYGDPPEELPDFSEDPTSSGLLAAERAVSQVLDSLEEIHALTDCSEKDLDFLHSVFQDQHLHTLLDLYDKINTKSSPQIRNPPSDAVQRAKEVLEEISCYPENNDAKELKRILTQPHFMALLQTHDVVAHEVYSDEALRVTPPPTSPYLNGDSPESANGDMDMENVTRVRLVQFQKNTDEPMGITLKMNELNHCIVARIMHGGMIHRQGTLHVGDEIREINGISVANQTVEQLQKMLREMRGSITFKIVPSYRTQSSSCEDLPSTTQPKGRQIYVRAQFEYDPAKDDLIPCKEAGIRFRVGDIIQIISKDDHNWWQGKLENSKNGTAGLIPSPELQEWRVACIAMEKTKQEQQASCTWFGKKKKQYKDKYLAKHNADLVTYEEVVKLPAFKRKTLVLLGAHGVGRRHIKNTLITKHPDRFAYPIPHTTRPPKKDEENGKNYYFVSHDQMMQDISNNEYLEYGSHEDAMYGTKLETIRKIHEQGLIAILDVEPQALKVLRTAEFAPFVVFIAAPTITPGLNEDESLQRLQKESDILQRTYAHYFDLTIINNEIDETIRHLEEAVELVCTAPQWVPVSWVY

SEQ ID NO: 39739 - protein, 1078 aa, Homo sapiens
MAFYSCCWVLLALTWHTSAYGPDQRAQKKGDIILGGLFPIHFGVAAKDQDLKSRPESVECIRYNFRGFRWLQAMIFAIEEINSSPALLPNLTLGYRIFDTCNTVSKALEATLSFVAQNKIDSLNLDEFCNCSEHIPSTIAVVGATGSGVSTAVANLLGLFYIPQVSYASSSRLLSNKNQFKSFLRTIPNDEHQATAMADIIEYFRWNWVGTIAADDDYGRPGIEKFREEAEERDICIDFSELISQYSDEEEIQHVVEVIQNSTAKVIVVFSSGPDLEPLIKEIVRRNITGKIWLASEAWASSSLIAMPQYFHVVGGTIGFALKAGQIPGFREFLKKVHPRKSVHNGFAKEFWEETFNCHLQEGAKGPLPVDTFLRGHEESGDRFSNSSTAFRPLCTGDENISSVETPYIDYTHLRISYNVYLAVYSIAHALQDIYTCLPGRGLFTNGSCADIKKVEAWQVLKHLRHLNFTNNMGEQVTFDECGDLVGNYSIINWHLSPEDGSIVFKEVGYYNVYAKKGERLFINEEKILWSGFSREVPFSNCSRDCLAGTRKGIIEGEPTCCFECVECPDGEYSDETDASACNKCPDDFWSNENHTSCIAKEIEFLSWTEPFGIALTLFAVLGIFLTAFVLGVFIKFRNTPIVKATNRELSYLLLFSLLCCFSSSLFFIGEPQDWTCRLRQPAFGISFVLCISCILVKTNRVLLVFEAKIPTSFHRKWWGLNLQFLLVFLCTFMQIVICVIWLYTAPPSSYRNQELEDEIIFITCHEGSLMALGFLIGYTCLLAAICFFFAFKSRKLPENFNEAKFITFSMLIFFIVWISFIPAYASTYGKFVSAVEVIAILAASFGLLACIFFNKIYIILFKPSRNTIEEVRCSTAAHAFKVAARATLRRSNVSRKRSSSLGGSTGSTPSSSISSKSNSEDPFPQPERQKQQQPLALTQQEQQQQPLTLPQQQRSQQQPRCKQKVIFGSGTVTFSLSFDEPQKNAMAHRNSTHQNSLEAQKSSDTLTRHEPLLPLQCGETDLDLTVQETGLQGPVGGDQRPEVEDPEELSPALVVSSSQSFVISGGGSTVTENVVNS

SEQ ID NO: 39740 - protein, 1078 aa, Homo sapiens; identical to SEQ ID NO: 39739

SEQ ID NO: 39741 - protein, 1088 aa, Homo sapiens
MAFYSCCWVLLALTWHTSAYGPDQRAQKKGDIILGGLFPIHFGVAAKDQDLKSRPESVECIRYNFRGFRWLQAMIFAIEEINSSPALLPNLTLGYRIFDTCNTVSKALEATLSFVAQNKIDSLNLDEFCNCSEHIPSTIAVVGATGSGVSTAVANLLGLFYIPQVSYASSSRLLSNKNQFKSFLRTIPNDEHQATAMADIIEYFRWNWVGTIAADDDYGRPGIEKFREEAEERDICIDFSELISQYSDEEEIQHVVEVIQNSTAKVIVVFSSGPDLEPLIKEIVRRNITGKIWLASEAWASSSLIAMPQYFHVVGGTIGFALKAGQIPGFREFLKKVHPRKSVHNGFAKEFWEETFNCHLQEGAKGPLPVDTFLRGHEESGDRFSNSSTAFRPLCTGDENISSVETPYIDYTHLRISYNVYLAVYSIAHALQDIYTCLPGRGLFTNGSCADIKKVEAWQVLKHLRHLNFTNNMGEQVTFDECGDLVGNYSIINWHLSPEDGSIVFKEVGYYNVYAKKGERLFINEEKILWSGFSREPLTFVLSVLQVPFSNCSRDCLAGTRKGIIEGEPTCCFECVECPDGEYSDETDASACNKCPDDFWSNENHTSCIAKEIEFLSWTEPFGIALTLFAVLGIFLTAFVLGVFIKFRNTPIVKATNRELSYLLLFSLLCCFSSSLFFIGEPQDWTCRLRQPAFGISFVLCISCILVKTNRVLLVFEAKIPTSFHRKWWGLNLQFLLVFLCTFMQIVICVIWLYTAPPSSYRNQELEDEIIFITCHEGSLMALGFLIGYTCLLAAICFFFAFKSRKLPENFNEAKFITFSMLIFFIVWISFIPAYASTYGKFVSAVEVIAILAASFGLLACIFFNKIYIILFKPSRNTIEEVRCSTAAHAFKVAARATLRRSNVSRKRSSSLGGSTGSTPSSSISSKSNSEDPFPQPERQKQQQPLALTQQEQQQQPLTLPQQQRSQQQPRCKQKVIFGSGTVTFSLSFDEPQKNAMAHRNSTHQNSLEAQKSSDTLTRHEPLLPLQCGETDLDLTVQETGLQGPVGGDQRPEVEDPEELSPALVVSSSQSFVISGGGSTVTENVVNS

SEQ ID NO: 39742 - protein, 189 aa, Homo sapiens
MDAVDATMEKLRAQCLSRGASGIQGLARFFRQLDRDGSRSLDADEFRQGLAKLGLVLDQAEAEGVCRKWDRNGSGTLDLEEFLRALRPPMSQAREAVIAAAFAKLDRSGDGVVTVDDLRGVYSGRAHPKVRSGEWTEDEVLRRFLDNFDSSEKDGQVTLAEFQDYYSGVSASMNTDEEFVAMMTSAWQL

SEQ ID NO: 39743 - protein, 322 aa, Homo sapiens
SQRGKGTCPGSHRNHASSLPSHGLVSIQGISAPAGQWPAPPPWSQEGMQCHRDLALSQALWGWQLSKQSGWAHPSLPHSPLPSTVHSCSWAPPHLQRHLPLATVSPGTTQLTQGPAGRTLGQTQASCPEPRPSMDAVDATMEKLRAQCLSRGASGIQGLARFFRQLDRDGSRSLDADEFRQGLAKLGLVLDQAEAEGVCRKWDRNGSGTLDLEEFLRALRPPMSQAREAVIAAAFAKLDRSGDGVVTVDDLRGVYSGRAHPKVRSGEWTEDEVLRRFLDNFDSSEKDGQVTLAEFQDYYSGVSASMNTDEEFVAMMTSAWQL

SEQ ID NO: 39744 - protein, 162 aa, Homo sapiens
MDAVDATMEKLRAQCLSRGASGIQGLARFFRQLDRDGSRSLDADEFRQGLAKLGLVLDQAEAEGVCRKWDRNGSGTLDLEEFLRALRPPMSQAREAVIAAAFAKLDRSGDGVVTVDDLRGVYSGRAHPKVTLAEFQDYYSGVSASMNTDEEFVAMMTSAWQL

SEQ ID NO: 39745 - protein, 293 aa, Homo sapiens
LINILYRAVISDPEQNLAIEQKESDHILPDSKMTPLRFRKRTLHETKIRTHSTLTENVLSHKLQFDGRIVSRTNVLPFIQKSIYSHQCGRRKGKQYRLGDFYVGATLTFLSSDHLSLPESIKENTLLKLRITNIDQIALDSLKTASMEQEDDIIIQETNDRLVFKAIQDVLKEKLHKRGVRILTGLGKYFQQLDKEGNGLLDKADFKQALKVFHLEVSEKDFESAWLILNDNGNGKVDYGEFKRGIIGEMNEYRKSYVRKAFMKLDFNKSGSVPIINIRKCYCAKKHSQVISG

SEQ ID NO: 39746 - protein, 382 aa, Homo sapiens
MIDHLSRAVISDPEQNLAIEQKESDHILPDSKMTPLRFRKRTLHETKIRTHSTLTENVLSHKLQFDGRIVSRNGRDACRELIGFFFTHDQSLTIYEYRQFGKNRTNVLPFIQKSIYSHQCGRRKGKQYRLGDFYVGATLTFLSSDHLSLPESIKENTLLKLRITNIDQIALDSLKTASMEQEDDIIIQETNDRLVFKAIQDVLKEKLHKRGVRILTGLGKYFQQLDKEGNGLLDKADFKQALKVFHLEVSEKDFESAWLILNDNGNGKVDYGEFKRGIIGEMNEYRKSYVRKAFMKLDFNKSGSVPIINIRKCYCAKKHSQVISGHSTEEEIKSSFLETLKVACSKSDEVSYGEFEDYYEGLSIGIVDDEDFVNILRTPWGI

SEQ ID NO: 39747 - protein, 557 aa, Homo sapiens
MGNSFCYTAVYCMINTGTQMDLEVKGVAATSRSQIQPFFGRKKPLQQRWTSESWTNQNSCPPVVPRLDLGSLVDSDDEDNFSYIPLSTANLPNSSSTLGWVTPCQTPYTQYHLNKLDQNIIPENLPAPTDKCKLKYQQCKTEIKEGYKQYSQRNAENTKSNVTHKQSPRNKIDEKCVQDEEANTDDLTTLDRKAILQQGYADNSCDKQQRARKLDAEIVAAEKKKQIVAEQVMIDHLSRAVISDPEQNLAIEQKESDHILPDSKMTPLRFRKRTLHETKIRTHSTLTENVLSHKLQFDGRIVSRNGRDACRELIGFFFTHDQSLTIYEYRQFGKNRTNVLPFIQKSIYSHQCGRRKGKQYRLGDFYVGATLTFLSSDHLSLPESIKENTLLKLRITNIDQIALDSLKTASMEQEDDIIIQETNDRLVFKAIQDVLKEKLHKRGVRILTGLGKYFQQLDKEGNGLLDKADFKQALKVFHLEVSEKDFESAWLILNDNGNGKVDYGEFKRGIIGEMNEYRKSYVRKAFMKLDFNKSGSVPIINIRKCYCAKKHSQVISG

SEQ ID NO: 39748 - protein, 204 aa, Homo sapiens
MEQEDDIIIQETNDRLVFKAIQDVLKEKLHKRGVRILTGLGKYFQQLDKEGNGLLDKADFKQALKVFHLEVSEKDFESAWLILNDNGNGKVDYGEFKRGIIGEMNEYRKSYVRKAFMKLDFNKSGSVPIINIRKCYCAKKHSQVISGHSTEEEIKSSFLETLKVACSKSDEVSYGEFEDYYEGLSIGIVDDEDFVNILRTPWGI

SEQ ID NO: 39749 - protein, 1002 aa, Homo sapiens
MAAHEWDWFQREELIGQISDIRVQNLQVERENVQKRTFTRWINLHLEKCNPPLEVKDLFVDIQDGKILMALLEVLSGRNLLHEYKSSSHRIFRLNNIAKALKFLEDSNVKLVSIDAAEIADGNPSLVLGLIWNIILFFQIKELTGNLSRNSPSSSLSPGSGGTDSDSSFPPTPTAERSVAISVKDQRKAIKALLAWVQRKTRKYGVAVQDFAGSWRSGLAFLAVIKAIDPSLVDMKQALENSTRENLEKAFSIAQDALHIPRLLEPEDIMVDTPDEQSIMTYVAQFLERFPELEAEDIFDSDKEVPIESTFVRIKETPSEQESKVFVLTENGERTYTVNHETSHPPPSKVFVCDKPESMKEFRLDGVSSHALSDSSTEFMHQIIDQVLQGGPGKTSDISEPSPESSILSSRKENGRSNSLPIKKTVHFEADTYKDPFCSKNLSLCFEGSPRVAKESLRQDGHVLAVEVAEEKEQKQESSKIPESSSDKVAGDIFLVEGTNNNSQSSSCNGALESTARHDEESHSLSPPGENTVMADSFQIKVNLMTVEALEEGDYFEAIPLKASKFNSDLIDFASTSQAFNKVPSPHETKPDEDAEAFENHAEKLGKRSIKSAHKKKDSPEPQVKMDKHEPHQDSGEEAEGCPSAPEETPVDKKPEVHEKAKRKSTRPHYEEEGEDDDLQGVGEELSSSPPSSCVSLETLGSHSEEGLDFKPSPPLSKVSVIPHDLFYFPHYEVPLAAVLEAYVEDPEDLKNEEMDLEEPEGYMPDLDSREEEADGSQSSSSSSVPGESLPSASDQVLYLSRGGVGTTPASEPAPLAPHEDHQQRETKENDPMDSHQSQESPNLENIANPLEENVTKESISSKKKEKRKHVDHVESSLFVAPGSVQSSDDLEEDSSDYSIPSRTSHSDSSIYLRRHTHRSSESDHFSYVQLRNAADLDDRRNRILTRKANSSGEAMSLGSHSPQSDSLTQLVQQPDMMYFILFLWLLVYCLLLFPQLDVSRL

SEQ ID NO: 39750 - protein, 149 aa, Homo sapiens [sequence omitted]

SEQ ID NO: 39751 - protein, 149 aa, Homo sapiens [sequence omitted]

SEQ ID NO: 39752 - protein, 149 aa, Homo sapiens [sequence omitted]

SEQ ID NO: 39753 - protein, 149 aa, Homo sapiens [sequence omitted]

SEQ ID NO: 39754 - protein, 1673 aa, Homo sapiens
MWRAEGKWLPKTSRKSVSQSVFCGTSTYCVLNTVPPIEDDHGNSNSSHVKIFLPKKLLECLPKCSSLPKERHRWNTNEEIAAYLITFEKHEEWLTTSPKTRPQNGSMILYNRKKVKYRKDGYCWKKRKDGKTTREDHMKLKVQGVECLYGCYVHSSIIPTFHRRCYWLLQNPDIVLVHYLNVPAIEDCGKPCGPILCSINTDKKEWAKWTKEELIGQLKPMFHGIKWTCSNGNSSSGFSVEQLVQQILDSHQTKPQPRTHNCLCTGSLGAGGSVHHKCNSAKHRIISPKVEPRTGGYGSHSEVQHNDVSEGKHEHSHSKGSSREKRNGKVAKPVLLHQSSTEVSSTNQVEVPDTTQSSPVSISSGLNSDPDMVDSPVVTGVSGMAVASVMGSLSQSATVFMSEVTNEAVYTMSPTAGPNHHLLSPDASQGLVLAVSSDGHKFAFPTTGSSESLSMLPTNVSEELVLSTTLDGGRKIPETTMNFDPDCFLNNPKQGQTYGGGGLKAEMVSSNIRHSPPGERSFSFTTVLTKEIKTEDTSFEQQMAKEAYSSSAAAVAASSLTLTAGSSLLPSGGGLSPSTTLEQMDFSAIDSNKDYTSSFSQTGHSPHIHQTPSPSFFLQDASKPLPVEQNTHSSLSDSGGTFVMPTVKTEASSQTSSCSGHVETRIESTSSLHLMQFQANFQAMTAEGEVTMETSQAAEGSEVLLKSGELQACSSEHYLQPETNGVIRSAGGVPILPGNVVQGLYPVAQPSLGNASNMELSLDHFDISFSNQFSDLINDFISVEGGSSTIYGHQLVSGDSTALSQSEDGARAPFTQAEMCLPCCSPQQGSLQLSSSEGGASTMAYMHVAEVVSAASAQGTLGMLQQSGRVFMVTDYSPEWSYPEGGVKVLITGPWQEASNNYSCLFDQISVPASLIQPGVLRCYCPAHDTGLVTLQVAFNNQIISNSVVFEYKARALPTLPSSQHDWLSLDDNQFRMSILERLEQMERRMAEMTGSQQHKQASGGGSSGGGSGSGNGGSQAQCASGTGALGSCFESRVVVVCEKMMSRACWAKSKHLIHSKTFRGMTLLHLAAAQGYATLIQTLIKWRTKHADSIDLELEVDPLNVDHFSCTPLMWACALGHLEAAVVLYKWDRRAISIPDSLGRLPLGIARSRGHVKLAECLEHLQRDEQAQLGQNPRIHCPASEEPSTESWMAQWHSEAISSPEIPKGVTVIASTNPELRRPRSEPSNYYSSESHKDYPAPKKHKLNPEYFQTRQEKLLPTALSLEEPNIRKQSPSSKQSVPETLSPSEGVRDFSRELSPPTPETAAFQASGSQPVGKWNSKDLYIGVSTVQVTGNPKGTSVGKEAAPSQVRPREPMSVLMMANREVVNTELGSYRDSAENEECGQPMDDIQVNMMTLAEHIIEATPDRIKQENFVPMESSGLERTDPATISSTMSWLASYLADADCLPSAAQIRSAYNEPLTPSSNTSLSPVGSPVSEIAFEKPNLPSAADWSEFLSASTSEKVENEFAQLTLSDHEQRELYEAARLVQTAFRKYKGRPLREQQEVAAAVIQRCYRKYKQYALYKKMTQAAILIQSKFRSYYEQKKFQQSRRAAVLIQKYYRSYKKCGKRRQARRTAVIVQQKLRSSLLTKKQDQAARKIMRFLRRCRHSPLVDHRLYKRSERIEKGQGT

SEQ ID NO: 39755 - protein, 636 aa, Homo sapiens
MMSRACWAKSKHLIHSKTFRGMTLLHLAAAQGYATLIQTLIKWRTKHADSIDLELEVDPLNVDHFSCTPLMWACALGHLEAAVVLYKWDRRAISIPDSLGRLPLGIARSRGHVKLAECLEHLQRDEQAQLGQNPRIHCPASEEPSTESWMAQWHSEAISSPEIPKGVTVIASTNPELRRPRSEPSNYYSSESHKDYPAPKKHKLNPEYFQTRQEKLLPTALSLEEPNIRKQSPSSKQSVPETLSPSEGVRDFSRELSPPTPETAAFQASGSQPVGKWNSKDLYIGVSTVQVTGNPKGTSVGKEAAPSQVRPREPMSVLMMANREVVNTELGSYRDSAENEECGQPMDDIQVNMMTLAEHIIEATPDRIKQENFVPMESSGLERTDPATISSTMSWLASYLADADCLPSAAQIRSAYNEPLTPSSNTSLSPVGSPVSEIAFEKPNLPSAADWSEFLSASTSEKVENEFAQLTLSDHEQRELYEAARLVQTAFRKYKGRPLREQQEVAAAVIQRCYRKYKQGKNICLKYALYKKMTQAAILIQSKFRSYYEQKKFQQSRRAAVLIQKYYRSYKKCGKRRQARRTAVIVQQKLRSSLLTKKQDQAARKIMRFLRRCRHRVKELKKAKELEDIQQHPLAM

SEQ ID NO: 39756 - protein, 716 aa, Homo sapiens
MACPVSPDHKQEGAHDTGLVTLQVAFNNQIISNSVVFEYKARALPTLPSSQHDWLSLDDNQFRMSILERLEQMERRMAEMTGSQQHKQASGGGSSGGGSGSGNGGSQAQCASGTGALGSCFESRVVVVCEKMMSRACWAKSKHLIHSKTFRGMTLLHLAAAQGYATLIQTLIKWRTKHADSIDLELEVDPLNVDHFSCTPLMWACALGHLEAAVVLYKWDRRAISIPDSLGRLPLGIARSRGHVKLAECLEHLQRDEQAQLGQNPRIHCPASEEPSTESWMAQWHSEAISSPEIPKGVTVIASTNPELRRPRSEPSNYYSSESHKDYPAPKKHKLNPEYFQTRQEKLLPTALSLEEPNIRKQSPSSKQSVPETLSPSEGVRDFSRELSPPTPETAAFQASGSQPVGKWNSKDLYIGVSTVQVTGNPKGTSVGKEAAPSQVRPREPMSVLMMANREVVNTELGSYRDSAENEECGQPMDDIQVNMMTLAEHIIEATLSSTMSWLASYLADADCLPSAAQIRSAYNEPLTPSSNTSLSPVGSPVSEIAFEKVENEFAQLTLSDHEQRELYEAARLVQTAFRKYKGRPLREQQEVAAAVIQRCYRKYKQYALYKKMTQAAILIQSKFRSYYEQKKFQQSRRAAVLIQKYYRSYKKCGKRRQARRTAVIVQQKLRSSLLTKKQDQAARKIMRFLRRCRHRVKELKKAKELEDIQQHPLAM

SEQ ID NO: 39757 - protein, 1659 aa, Homo sapiens
MWRAEGKWLPKTSRKSVSQSVFCGTSTYCVLNTVPPIEDDHGNSNSSHVKIFLPKKLLECLPKCSSLPKERHRWNTNEEIAAYLITFEKHEEWLTTSPKTRPQNGSMILYNRKKVKYRKDGYCWKKRKDGKTTREDHMKLKVQGVECLYGCYVHSSIIPTFHRRCYWLLQNPDIVLVHYLNVPAIEDCGKPCGPILCSINTDKKEWAKWTKEELIGQLKPMFHGIKWTCSNGNSSSGFSVEQLVQQILDSHQTKPQPRTHNCLCTGSLGAGGSVHHKCNSAKHRIISPKVEPRTGGYGSHSEVQHNDVSEGKHEHSHSKGSSREKRNGKVAKPVLLHQSSTEVSSTNQVEVPDTTQSSPVSISSGLNSDPDMVDSPVVTGVSGMAVASVMGSLSQSATVFMSEVTNEAVYTMSPTAGPNHHLLSPDASQGLVLAVSSDGHKFAFPTTGSSESLSMLPTNVSEELVLSTTLDGGRKIPETTMNFDPDCFLNNPKQGQTYGGGGLKAEMVSSNIRHSPPGERSFSFTTVLTKEIKTEDTSFEQQMAKEAYSSSAAAVAASSLTLTAGSSLLPSGGGLSPSTTLEQMDFSAIDSNKDYTSSFSQTGHSPHIHQTPSPSFFLQDASKPLPVEQNTHSSLSDSGGTFVMPTVKTEASSQTSSCSGHVETRIESTSSLHLMQFQANFQAMTAEGEVTMETSQAAEGSEVLLKSGELQACSSEHYLQPETNGVIRSAGGVPILPGNVVQGLYPVAQPSLGNASNMELSLDHFDISFSNQFSDLINDFISVEGGSSTIYGHQLVSGDSTALSQSEDGARAPFTQAEMCLPCCSPQQGSLQLSSSEGGASTMAYMHVAEVVSAASAQGTLGMLQQSGRVFMVTDYSPEWSYPEGGVKVLITGPWQEASNNYSCLFDQISVPASLIQPGVLRCYCPAHDTGLVTLQVAFNNQIISNSVVFEYKARALPTLPSSQHDWLSLDDNQFRMSILERLEQMERRMAEMTGSQQHKQASGGGSSGGGSGSGNGGSQAQCASGTGALGSCFESRVVVVCEKMMSRACWAKSKHLIHSKTFRGMTLLHLAAAQGYATLIQTLIKWRTKHADSIDLELEVDPLNVDHFSCTPLMWACALGHLEAAVVLYKWDRRAISIPDSLGRLPLGIARSRGHVKLAECLEHLQRDEQAQLGQNPRIHCPASEEPSTESWMAQWHSEAISSPEIPKGVTVIASTNPELRRPRSEPSNYYSSESHKDYPAPKKHKLNPEYFQTRQEKLLPTALSLEEPNIRKQSPSSKQSVPETLSPSEGVRDFSRELSPPTPETAAFQASGSQPVGKWNSKDLYIGVSTVQVTGNPKGTSVGKEAAPSQVRPREPMSVLMMANREVVNTELGSYRDSAENEECGQPMDDIQVNMMTLAEHIIEATPDRIKQENFVPMESSGLERTDPATISSTMSWLASYLADADCLPSAAQIRLSPVGSPVSEIAFEKPNLPSAADWSEFLSASTSEKVENEFAQLTLSDHEQRELYEAARLVQTAFRKYKGRPLREQQEVAAAVIQRCYRKYKQYALYKKMTQAAILIQSKFRSYYEQKKFQQSRRAAVLIQKYYRSYKKCGKRRQARRTAVIVQQKLRSSLLTKKQDQAARKIMRFLRRCRHRVKELKKAKELEDIQQHPLAM

SEQ ID NO: 39758 - protein, 80 aa, Homo sapiens
MWRAEGKWLPKTSRKSVSQSVFCGTSTYCVLNTVPPIEDDHGNSNSSHVKIFLPKKLLECLPKCSSLPKERHRWNTNERS

SEQ ID NO: 39759 - protein, 101 aa, Homo sapiens
MWRAEGKWLPKTSRKSVSQSVFCGTSTYCVLNTVPPIEDDHGNSNSSHVKIFLPKKLLECLPKCSSLPKERHRWNTNEALTTHLFMGAAKKRDPQSWSHEG

SEQ ID NO: 39760 - protein, 1202 aa, Homo sapiens
MNTKDTTEVAENSHHLKIFLPKKLLECLPRCPLLPPERLRWNTNEEIASYLITFEKHDEWLSCAPKTRPQNGSIILYNRKKVKYRKDGYLWKKRKDGKTTREDHMKLKVQGMECLYGCYVHSSIVPTFHRRCYWLLQNPDIVLVHYLNVPALEDCGKGCSPIFCSISSDRREWLKWSREELLGQLKPMFHGIKWSCGNGTEEFSVEHLVQQILDTHPTKPAPRTHACLCSGGLGSGSLTHKCSSTKHRIISPKVEPRALTLTSIPHAHPPEPPPLIAPLPPELPKAHTSPSSSSSSSSSGFAEPLEIRPSPPTSRGGSSRGGTAILLLTGLEQRAGGLTPTRHLAPQADPRPSMSLAVVVGTEPSAPPAPPSPAFDPDRFLNSPQRGQTYGGGQGVSPDFPEAEAAHTPCSALEPAAALEPQAAARGPPPQSVAGGRRGNCFFIQDDDSGEELKGHGAAPPIPSPPPSPPPSPAPLEPSSRVGRGEALFGGPVGASELEPFSLSSFPDLMGELISDEAPSIPAPTPQLSPALSTITDFSPEWSYPEGGVKVLITGPWTEAAEHYSCVFDHIAVPASLVQPGVLRCYCPAHEVGLVSLQVAGREGPLSASVLFEYRARRFLSLPSTQLDWLSLDDNQFRMSILERLEQMEKRMAEIAAAGQVPCQGPDAPPVQDEGQGPGFEARVVVLVESMIPRSTWKGPERLAHGSPFRGMSLLHLAAAQGYARLIETLSQWRSVETGSLDLEQEVDPLNVDHFSCTPLMWACALGHLEAAVLLFRWNRQALSIPDSLGRLPLSVAHSRGHVRLARCLEELQRQEPSVEPPFALSPPSSSPDTGLSSVSSPSELSDGTFSVTSAYSSAPDGSPPPAPLPASEMTMEDMAPGQLSSGVPEAPLLLMDYEATNSKGPLSSLPALPPASDDGAAPEDADSPQAVDVIPVDMISLAKQIIEATPERIKREDFVGLPEAGASMRERTGAVGLSETMSWLASYLENVDHFPSSTPPSELPFERGRLAVPSAPSWAEFLSASTSGKMESDFALLTLSDHEQRELYEAARVIQTAFRKYKGRRLKEQQEVAAAVIQRCYRKYKQLTWIALKFALYKKMTQAAILIQSKFRSYYEQKRFQQSRRAAVLIQQHYRSYRRRPGPPHRTSATLPARNKGSFLTKKQDQAARKIMRFLRRCRHRMRELKQNQELEGLPQPGLAT

SEQ ID NO: 39761 - protein, 1195 aa, Homo sapiens
MNTKDTTEVAENSHHLKIFLPKKLLECLPRCPLLPPERLRWNTNEEIASYLITFEKHDEWLSCAPKTRPQNGSIILYNRKKVKYRKDGYLWKKRKDGKTTREDHMKLKVQGMECLYGCYVHSSIVPTFHRRCYWLLQNPDIVLVHYLNVPALEDCGKGCSPIFCSISSDRREWLKWSREELLGQLKPMFHGIKWSCGNGTEEFSVEHLVQQILDTHPTKPAPRTHACLCSGGLGSGSLTHKCSSTKHRIISPKVEPRALTLTSIPHAHPPEPPPLIAPLPPELPKAHTSPSSSSSSSSSGFAEPLEIRPSPPTSRGGSSRGGTAILLLTGLEQRAGGLTPTRHLAPQADPRPSMSLAVVVGTEPSAPPAPPSPAFDPDRFLNSPQRGQTYGGGQGVSPDFPEAEAAHTPCSALEPAAALEPQAAARGPPPQSVAGGRRGNCFFIQDDDSGEELKGHGAAPPIPSPPPSPPPSPAPLEPSSRVGRGEALFGGPVGASELEPFSLSSFPDLMGELISDEAPSIPAPTPQLSPALSTITDFSPEWSYPEGGVKVLITGPWTEAAEHYSCVFDHIAVPASLVQPGVLRCYCPAHEVGLVSLQVAGREGPLSASVLFEYRARRFLSLPSTQLDWLSLDDNQFRMSILERLEQMEKRMAEIAAAGQVPCQGPDAPPVQDEGQGPGFEARVVVLVESMIPRSTWKGPERLAHGSPFRGMSLLHLAAAQGYARLIETLSQWRSVETGSLDLEQEVDPLNVDHFSCTPLMWACALGHLEAAVLLFRWNRQALSIPDSLGRLPLSVAHSRGHVRLARCLEELQRQEPSVEPPFALSPPSSSPDTGLSSVSSPSELSDGTFSVTSAYSSAPDGSPPPAPLPASEMTMEDMAPGQLSSGVPEAPLLLMDYEATNSKGPLSSLPALPPASDDGAAPEDADSPQAVDVIPVDMISLAKQIIEATPERIKREDFVGLPEAGASMRERTGAVGLSETMSWLASYLENVDHFPSSTPPSELPFERGRLAVPSAPSWAEFLSASTSGKMESDFALLTLSDHEQRELYEAARVIQTAFRKYKGRRLKEQQEVAAAVIQRCYRKYKQFALYKKMTQAAILIQSKFRSYYEQKRFQQSRRAAVLIQQHYRSYRRRPGPPHRTSATLPARNKGSFLTKKQDQAARKIMRFLRRCRHRMRELKQNQELEGLPQPGLAT

SEQ ID NO: 39762 - protein, 1201 aa, Homo sapiens
MGTDSPSPRPLRPGVTLPPGALTMNTKDTTEVAENSHHLKIFLPKKLLECLPRCPLLPPERLRWNTNEEIASYLITFEKHDEWLSCAPKTRPQNGSIILYNRKKVKYRKDGYLWKKRKDGKTTREDHMKLKVQGMENPDIVLVHYLNVPALEDCGKGCSPIFCSISSDRREWLKWSREELLGQLKPMFHGIKWSCGNGTEEFSVEHLVQQILDTHPTKPAPRTHACLCSGGLGSGSLTHKCSSTKHRIISPKVEPRALTLTSIPHAHPPEPPPLIAPLPPELPKAHTSPSSSSSSSSSGFAEPLEIRPSPPTSRGGSSRGGTAILLLTGLEQRAGGLTPTRHLAPQADPRPSMSLAVVVGTEPSAPPAPPSPAFDPDRFLNSPQRGQTYGGGQGVSPDFPEAEAAHTPCSALEPAAALEPQAAARGPPPQSVAGGRRGNCFFIQDDDSGEELKGHGAAPPIPSPPPSPPPSPAPLEPSSRVGRGEALFGGPVGASELEPFSLSSFPDLMGELISDEAPSIPAPTPQLSPALSTITDFSPEWSYPEGGVKVLITGPWTEAAEHYSCVFDHIAVPASLVQPGVLRCYCPAHEVGLVSLQVAGREGPLSASVLFEYRARRFLSLPSTQLDWLSLDDNQFRMSILERLEQMEKRMAEIAAAGQVPCQGPDAPPVQDEGQGPGFEARVVVLVESMIPRSTWKGPERLAHGSPFRGMSLLHLAAAQGYARLIETLSQWRSVETGSLDLEQEVDPLNVDHFSCTPLMWACALGHLEAAVLLFRWNRQALSIPDSLGRLPLSVAHSRGHVRLARCLEELQRQEPSVEPPFALSPPSSSPDTGLSSVSSPSELSDGTFSVTSAYSSAPDGSPPPAPLPASEMTMEDMAPGQLSSGVPEAPLLLMDYEATNSKGPLSSLPALPPASDDGAAPEDADSPQAVDVIPVDMISLAKQIIEATPERIKREDFVGLPEAGASMRERTGAVGLSETMSWLASYLENVDHFPSSTPPSELPFERGRLAVPSAPSWAEFLSASTSGKMESDFALLTLSDHEQRELYEAARVIQTAFRKYKGRRLKEQQEVAAAVIQRCYRKYKQLTWIALKFALYKKMTQAAILIQSKFRSYYEQKRFQQSRRAAVLIQQHYRSYRRRPGPPHRTSATLPARNKGSFLTKKQDQAARKIMRFLRRCRHRMRELKQNQELEGLPQPGLAT

SEQ ID NO: 39763 - protein, 1197 aa, Homo sapiens
MAAAAVTRGTPGENSHHLKIFLPKKLLECLPRCPLLPPERLRWNTNEEIASYLITFEKHDEWLSCAPKTRPQNGSIILYNRKKVKYRKDGYLWKKRKDGKTTREDHMKLKVQGMECLYGCYVHSSIVPTFHRRCYWLLQNPDIVLVHYLNVPALEDCGKGCSPIFCSISSDRREWLKWSREELLGQLKPMFHGIKWSCGNGTEEFSVEHLVQQILDTHPTKPAPRTHACLCSGGLGSGSLTHKCSSTKHRIISPKVEPRALTLTSIPHAHPPEPPPLIAPLPPELPKAHTSPSSSSSSSSSGFAEPLEIRPSPPTSRGGSSRGGTAILLLTGLEQRAGGLTPTRHLAPQADPRPSMSLAVVVGTEPSAPPAPPSPAFDPDRFLNSPQRGQTYGGGQGVSPDFPEAEAAHTPCSALEPAAALEPQAAARGPPPQSVAGGRRGNCFFIQDDDSGEELKGHGAAPPIPSPPPSPPPSPAPLEPSSRVGRGEALFGGPVGASELEPFSLSSFPDLMGELISDEAPSIPAPTPQLSPALSTITDFSPEWSYPEGGVKVLITGPWTEAAEHYSCVFDHIAVPASLVQPGVLRCYCPAHEVGLVSLQVAGREGPLSASVLFEYRARRFLSLPSTQLDWLSLDDNQFRMSILERLEQMEKRMAEIAAAGQVPCQGPDAPPVQDEGQGPGFEARVVVLVESMIPRSTWKGPERLAHGSPFRGMSLLHLAAAQGYARLIETLSQWRSVETGSLDLEQEVDPLNVDHFSCTPLMWACALGHLEAAVLLFRWNRQALSIPDSLGRLPLSVAHSRGHVRLARCLEELQRQEPSVEPPFALSPPSSSPDTGLSSVSSPSELSDGTFSVTSAYSSAPDGSPPPAPLPASEMTMEDMAPGQLSSGVPEAPLLLMDYEATNSKGPLSSLPALPPASDDGAAPEDADSPQAVDVIPVDMISLAKQIIEATPERIKREDFVGLPEAGASMRERTGAVGLSETMSWLASYLENVDHFPSSTPPSELPFERGRLAVPSAPSWAEFLSASTSGKMESDFALLTLSDHEQRELYEAARVIQTAFRKYKGRRLKEQQEVAAAVIQRCYRKYKQFALYKKMTQAAILIQSKFRSYYEQKRFQQSRRAAVLIQQHYRSYRRRPGPPHRTSATLPARNKGSFLTKKQDQAARKIMRFLRRCRHRMRELKQNQELEGLPQPGLAT

SEQ ID NO: 39764 - protein, 1241 aa, Homo sapiens
MGTDSPSPRPLRPGVTLPPGALTMNTKDTTEVAENSHHLKIFLPKKLLECLPRCPLLPPERLRWNTNEEIASYLITFEKHDEWLSCAPKTRPQNGSIILYNRKKVKYRKDGYLWKKRKDGKTTREDHMKLKVQGMECLYGCYVHSSIVPTFHRRCYWLLQNPDIVLVHYLNVPALEDCGKGCSPIFCSISSDRREWLKWSREELLGQLKPMFHGIKWSCGNGTEEFSVEHLVQQILDTHPTKPAPRTHACLCSGGLGSGSLTHKCSSTKHRIISPKVEPRALTLTSIPHAHPPEPPPLIAPLPPELPKAHTSPSSSSSSSSSGFAEPLEIRPSPPTSRGGSSRGGTAILLLTGLEQRAGGLTPTRHLAPQADPRPSMSLAVVVGTEPSAPPAPPSPAFDPDRFLNSPQRGQTYGGGQGVSPDFPEAEAAHTPCSALEPAAALEPQAAARGPPPQSVAGGRRGNCFFIQDDDSGEELKGHGAAPPIPSPPPSPPPSPAPLEPSSRVGRGEALFGGPVGASELEPFSLSSFPDLMGELISDEAPSIPAPTPQLSPALSTITDFSPEWSYPEGGVKVLITGPWTEAAEHYSCVFDHIAVPASLVQPGVLRCYCPAHEVGLVSLQVAGREGPLSASVLFEYRARRFLSLPSTQLDWLSLDDNQFRMSILERLEQMEKRMAEIAAAGQVPCQGPDAPPVQDEGQGPGFEARVVVLVESMIPRSTWKGPERLAHGSPFRGMSLLHLAAAQGYARLIETLSQWRSVETGSLDLEQEVDPLNVDHFSCTPLMWACALGHLEAAVLLFRWNRQALSIPDSLGRLPLSVAHSRGHVRLARCLEELQRQEPSVEPPFALSPPSSSPDTGLSSVSSPSELSDGTFSVTSAYSSAPDGSPPPAPLPASEMTMEDMAPGQLSSGVPEAPLLLMDYEATNSKGPLSSLPALPPASDDGAAPEDADSPQAVDVIPVDMISLAKQIIEATPERIKREDFVGLPEAGASMRERTGAVGLSETMSWLASYLENVDHFPSSTPPSELPFERGRLAVPSAPSWAEFLSASTSGKMESDFALLTLSDHEQRELYEAARVIQTAFRKYKGRRLKEQQEVAAAVIQRCYRKYKQLTWIALKFALYKKMTQAAILIQSKFRSYYEQKRFQQSRRAAVLIQQHYRSYRRRPGPPHRTSATLPARNKLLSHQEAGPGSPEDHEIPAALPTQDEGTEAEPGAGRASPAGTGHMTWPPPFSPPWGRLVQS

SEQ ID NO: 39765 - protein, 1489 aa, Homo sapiens
MGDAADPREMRKTFIVPAIKPFDHYDFSRAKIACNLAWLVAKAFGTENVPEELQEPFYTDQYDQEHIKPPVVNLLLSAELYCRAGSLILKSDAAKPLLGHDAVIQALAQKGLYVTDQEKLVTERDLHKKPIQMSAHLAMIDTLMMAYTVEMVSIEKVIACAQQYSAFFQATDLPYDIEDAVMYWINKVNEHLKDIMEQEQKLKEHHTVEAPGGQKSPSKWFWKLVPARYRKEQTLLKQLPCIPLVENLLKDGTDGCALAALIHFYCPDVVRLEDICLKETMSLADSLYNLQLIQEFCQEYLNQCCHFTLEDMLYAASSIKSNYLVFMAELFWWFEVVKPSFVQPRVVRPQGAEPVKDMPSIPVLNAAKRNVLDSSSDFPSSGEGATFTQSHHHLPSRYSRPQAHSSASGGIRRSSSMSYVDGFIGTWPKEKRSSVHGVSFDISFDKEDSVQRSTPNRGITRSISNEGLTLNNSHVSKHIRKNLSFKPINGEEEAESIEEELNIDSHSDLKSCVPLNTNELNSNENIHYKLPNGALQNRILLDEFGNQIETPSIEEALQIIHDTEKSPHTPQPDQIANGFFLHSQEMSILNSNIKLNQSSPDNVTDTKGALSPITDNTEVDTGIHVPSEDIPETMDEDSSLRDYTVSLDSDMDDASKFLQDYDIRTGNTREALSPCPSTVSTKSQPGSSASSSSGVKMTSFAEQKFRKLNHTDGKSSGSSSQKTTPEGSELNIPHVVAWAQIPEETGLPQGRDTTQLLASEMVHLRMKLEEKRRAIEAQKKKMEAAFTKQRQKMGRTAFLTVVKKKGDGISPLREEAAGAEDEKVYTDRAKEKESQKTDGQRSKSLADIKESMENPQAKWLKSPTTPIDPEKQWNLASPSEETLNEGEILEYTKSIEKLNSSLHFLQQEMQRLSLQQEMLMQMREQQSWVISPPQPSPQKQIRDFKPSKQAGLSSAIAPFSSDSPRPTHPSPQSSNRKSASFSVKSQRTPRPNELKITPLNRTLTPPRSVDSLPRLRRFSPSQVPIQTRSFVCFGDDGEPQLKESKPKEEVKKEELESKGTLEQRGHNPEEKEIKPFESTVSEVLSLPVTETVCLTPNEDQLNQPTEPPPKPVFPPTAPKNVNLIEVSLSDLKPPEKADVPVEKYDGESDKEQFDDDQKVCCGFFFKDDQKAENDMAMKRAALLEKRLRREKETQLRKQQLEAEMEHKKEETRRKTEEERQKKEDERARREFIRQEYMRRKQLKLMEDMDTVIKPRPQVVKQKKQRPKSIHRDHIESPKTPIKGPPVSSLSLASLNTGDNESVHSGKRTPRSESVEGFLSPSRCGSRNGEKDWENASTTSSVASGTEYTGPKLYKEPSAKSNKHIIQNALAHCCLAGKVNEGQKKKILEEMEKSDANNFLILFRDSGCQFRSLYTYCPETEEINKLTGIGPKSITKKMIEGLYKYNSDRKQFSHIPAKTLSASVDAITIHSHLWQTKRPVTPKKLLPTKA

SEQ ID NO: 39766 - protein, 1478 aa, Homo sapiens
MGDAADPREMRKTFIVPAIKPFDHYDFSRAKIACNLAWLVAKAFGTENVPEELQEPFYTDQYDQEHIKPPVVNLLLSAELYCRAGSLILKSDAAKPLLGHDAVIQALAQKGLYVTDQEKLVTERDLHKKPIQMSAHLAMIDTLMMAYTVEMVSIEKVIACAQQYSAFFQATDLPYDIEDAVMYWINKVNEHLKDIMEQEQKLKEHHTVEAPGGQKARYRKEQTLLKQLPCIPLVENLLKDGTDGCALAALIHFYCPDVVRLEDICLKETMSLADSLYNLQLIQEFCQEYLNQCCHFTLEDMLYAASSIKSNYLVFMAELFWWFEVVKPSFVQPRVVRPQGAEPVKDMPSIPVLNAAKRNVLDSSSDFPSSGEGATFTQSHHHLPSRYSRPQAHSSASGGIRRSSSMSYVDGFIGTWPKEKRSSVHGVSFDISFDKEDSVQRSTPNRGITRSISNEGLTLNNSHVSKHIRKNLSFKPINGEEEAESIEEELNIDSHSDLKSCVPLNTNELNSNENIHYKLPNGALQNRILLDEFGNQIETPSIEEALQIIHDTEKSPHTPQPDQIANGFFLHSQEMSILNSNIKLNQSSPDNVTDTKGALSPITDNTEVDTGIHVPSEDIPETMDEDSSLRDYTVSLDSDMDDASKFLQDYDIRTGNTREALSPCPSTVSTKSQPGSSASSSSGVKMTSFAEQKFRKLNHTDGKSSGSSSQKTTPEGSELNIPHVVAWAQIPEETGLPQGRDTTQLLASEMVHLRMKLEEKRRAIEAQKKKMEAAFTKQRQKMGRTAFLTVVKKKGDGISPLREEAAGAEDEKVYTDRAKEKESQKTDGQRSKSLADIKESMENPQAKWLKSPTTPIDPEKQWNLASPSEETLNEGEILEYTKSIEKLNSSLHFLQQEMQRLSLQQEMLMQMREQQSWVISPPQPSPQKQIRDFKPSKQAGLSSAIAPFSSDSPRPTHPSPQSSNRKSASFSVKSQRTPRPNELKITPLNRTLTPPRSVDSLPRLRRFSPSQVPIQTRSFVCFGDDGEPQLKESKPKEEVKKEELESKGTLEQRGHNPEEKEIKPFESTVSEVLSLPVTETVCLTPNEDQLNQPTEPPPKPVFPPTAPKNVNLIEVSLSDLKPPEKADVPVEKYDGESDKEQFDDDQKVCCGFFFKDDQKAENDMAMKRAALLEKRLRREKETQLRKQQLEAEMEHKKEETRRKTEEERQKKEDERARREFIRQEYMRRKQLKLMEDMDTVIKPRPQVVKQKKQRPKSIHRDHIESPKTPIKGPPVSSLSLASLNTGDNESVHSGKRTPRSESVEGFLSPSRCGSRNGEKDWENASTTSSVASGTEYTGPKLYKEPSAKSNKHIIQNALAHCCLAGKVNEGQKKKILEEMEKSDANNFLILFRDSGCQFRSLYTYCPETEEINKLTGIGPKSITKKMIEGLYKYNSDRKQFSHIPAKTLSASVDAITIHSHLWQTKRPVTPKKLLPTKA

SEQ ID NO: 39767 - protein, 1462 aa, Homo sapiens
MGDAADPREMRKTFIVPAIKPFDHYDFSRAKIACNLAWLVAKAFGTENVPEELQEPFYTDQYDQEHIKPPVVNLLLSAELYCRAGSLILKSDAAKPLLGHDAVIQALAQKGLYVTDQEKLVTERDLHKKPIQMSAHLAMIDTLMMAYTVEMVSIEKVIACAQQYSAFFQATDLPYDIEDAVMYWINKVNEHLKDIMEQEQKLKEHHTVEAPGGQKARYRKEQTLLKQLPCIPLVENLLKDGTDGCALAALIHFYCPDVVRLEDICLKETMSLADSLYNLQLIQEFCQEYLNQCCHFTLEDMLYAASSIKSNYLVFMAELFWWFEVVKPSFVQPRVVRPQGAEPVKDMPSIPVLNAAKRNVLDSSSDFPSRYSRPQAHSSASGGIRRSSSMSYVDGFIGTWPKEKRSSVHGVSFDISFDKEDSVQRSTPNRGITRSISNEGLTLNNSHVSKHIRKNLSFKPINGEEEAESIEEELNIDSHSDLKSCVPLNTNELNSNENIHYKLPNGALQNRILLDEFGNQIETPSIEEALQIIHDTEKSPHTPQPDQIANGFFLHSQEMSILNSNIKLNQSSPDNVTDTKGALSPITDNTEVDTGIHVPSEDIPETMDEDSSLRDYTVSLDSDMDDASKFLQDYDIRTGNTREALSPCPSTVSTKSQPGSSASSSSGVKMTSFAEQKFRKLNHTDGKSSGSSSQKTTPEGSELNIPHVVAWAQIPEETGLPQGRDTTQLLASEMVHLRMKLEEKRRAIEAQKKKMEAAFTKQRQKMGRTAFLTVVKKKGDGISPLREEAAGAEDEKVYTDRAKEKESQKTDGQRSKSLADIKESMENPQAKWLKSPTTPIDPEKQWNLASPSEETLNEGEILEYTKSIEKLNSSLHFLQQEMQRLSLQQEMLMQMREQQSWVISPPQPSPQKQIRDFKPSKQAGLSSAIAPFSSDSPRPTHPSPQSSNRKSASFSVKSQRTPRPNELKITPLNRTLTPPRSVDSLPRLRRFSPSQVPIQTRSFVCFGDDGEPQLKESKPKEEVKKEELESKGTLEQRGHNPEEKEIKPFESTVSEVLSLPVTETVCLTPNEDQLNQPTEPPPKPVFPPTAPKNVNLIEVSLSDLKPPEKADVPVEKYDGESDKEQFDDDQKVCCGFFFKDDQKAENDMAMKRAALLEKRLRREKETQLRKQQLEAEMEHKKEETRRKTEEERQKKEDERARREFIRQEYMRRKQLKLMEDMDTVIKPRPQVVKQKKQRPKSIHRDHIESPKTPIKGPPVSSLSLASLNTGDNESVHSGKRTPRSESVEGFLSPSRCGSRNGEKDWENASTTSSVASGTEYTGPKLYKEPSAKSNKHIIQNALAHCCLAGKVNEGQKKKILEEMEKSDANNFLILFRDSGCQFRSLYTYCPETEEINKLTGIGPKSITKKMIEGLYKYNSDRKQFSHIPAKTLSASVDAITIHSHLWQTKRPVTPKKLLPTKA

SEQ ID NO: 39768 - protein, 149 aa, Homo sapiens
MADQLTEEQVTEFKEAFSLFDKDGDGCITTRELGTVMRSLGQNPTEAELRDMMSEIDRDGNGTVDFPEFLGMMARKMKDTDNEEEIREAFRVFDKDGNGFVSAAELRHVMTRLGEKLSDEEVDEMIRAADTDGDGQVNYEEFVRVLVSK

SEQ ID NO: 39769 - protein, 181 aa, Homo sapiens
MGLQQEISLQPWCHHPAESCQTTTDMTERLSAEQIKEYKGVFEMFDEEGNGEVKTGELEWLMSLLGINPTKSELASMAKDVDRDNKGFFNCDGFLALMGVYHEKAQNQESELRAAFRVFDKEGKGYIDWNTLKYVLMNAGEPLNEVEAEQMMKEADKDGDRTIDYEEFVAMMTGESFKLIQ

SEQ ID NO: 39770 - protein, 164 aa, Homo sapiens
MGLQQEISLTERLSAEQIKEYKGVFEMFDEEGNGEVKTGELEWLMSLLGINPTKSELASMAKDVDRDNKGFFNCDGFLALMGVYHEKAQNQESELRAAFRVFDKEGKGYIDWNTLKYVLMNAGEPLNEVEAEQMMKEADKDGDRTIDYEEFVAMMTGESFKLIQ

SEQ ID NO: 39771 - protein, 592 aa, Homo sapiens
MEGKWLLCMLLVLGTAIVEAHDGHDDDVIDIEDDLDDVIEEVEDSKPDTTAPPSSPKVTYKAPVPTGEVYFADSFDRGTLSGWILSKAKKDDTDDEIAKYDGKWEVEEMKESKLPGDKGLVLMSRAKHHAISAKLNKPFLFDTKPLIVQYEVNFQNGIECGGAYVKLLSKTPELNLDQFHDKTPYTIMFGPDKCGEDYKLHFIFRHKNPKTGIYEEKHAKRPDADLKTYFTDKKTHLYTLILNPDNSFEILVDQSVVNSGNLLNDMTPPVNPSREIEDPEDRKPEDWDERPKIPDPEAVKPDDWDEDAPAKIPDEEATKPEGWLDDEPEYVPDPDAEKPEDWDEDMDGEWEAPQIANPRCESAPGCGVWQRPVIDNPNYKGKWKPPMIDNPSYQGIWKPRKIPNPDFFEDLEPFRMTPFSAIGLELWSMTSDIFFDNFIICADRRIVDDWANDGWGLKKAADGAAEPGVVGQMIEAAEERPWLWVVYILTVALPVFLVILFCCSGKKQTSGMEYKKTDAPQPDVKEEEEEKEEEKDKGDEEEEGEEKLEEKQKSDAEEDGGTVSQEEEDRKPKAEEDEILNRSPRNRKPRRE

SEQ ID NO: 39772 - protein, 283 aa, Homo sapiens
MLLVLGTAIVEAHDGHDDDVIDIEDDLDDVIEEVEDSKPDTTAPPSSPKVTYKAPVPTGEVYFADSFDRGTLSGWILSKAKKDDTDDEIAKYDGKWEVEEMKESKLPGDKGLVLMSRAKHHAISAKLNKPFLFDTKPLIVQYEVNFQNGIECGGAYNCFLKHQNSTWDQFHDKTPYTIMFGPDKCGEDYKLHFIFRHKNPKTGIYEEKHAKRPDADLKTYFTDKKTHLYTLILNPDNSFEILVDQSVPPVNPSREIEDPEDRKPEDWDERPKIPDPEAVKPDD

SEQ ID NO: 39773 - protein, 327 aa, Homo sapiens
MEGKWLLCMLLVLGTAIVEAHDGHDDDVIDIEDDLDDVIEEVEEMKESKLPGDKGLVLMSRAKHHAISAKLNKPFLFDTKPLIVQYEVNFQNGIECGGAYVKLLSKTPELNLDQFHDKTPYTIMFGPDKCGEDYKLHFIFRHKNPKTGIYEEKHAKRPDADLKTYFTDKKTHLYTLILNPDNSFEILVDQSVVNSGNLLNDMTPPVNPSREIEDPEDRKPEDWDERPKIPDPEAVKPDDWDEDAPAKIPDEEATKPEGWLDDEPEYVPDPDAEKPEDWDEDMDGEWEAPQIANPRCESAPGCGVWQRPVVDIQKTSRHHHQQAPVEH

SEQ ID NO: 39774 - protein, 627 aa, Homo sapiens
MADRRTPTPFAGCRLPRQRRARDASQVSAPGTRRIMEGKWLLCMLLVLGTAIVEAHDGHDDDVIDIEDDLDDVIEEVEDSKPDTTAPPSSPKVTYKAPVPTGEVYFADSFDRGTLSGWILSKAKKDDTDDEIAKYDGKWEVEEMKESKLPGDKGLVLMSRAKHHAISAKLNKPFLFDTKPLIVQYEVNFQNGIECGGAYVKLLSKTPELNLDQFHDKTPYTIMFGPDKCGEDYKLHFIFRHKNPKTGIYEEKHAKRPDADLKTYFTDKKTHLYTLILNPDNSFEILVDQSVVNSGNLLNDMTPPVNPSREIEDPEDRKPEDWDERPKIPDPEAVKPDDWDEDAPAKIPDEEATKPEGWLDDEPEYVPDPDAEKPEDWDEDMDGEWEAPQIANPRCESAPGCGVWQRPVIDNPNYKGKWKPPMIDNPSYQGIWKPRKIPNPDFFEDLEPFRMTPFSAIGLELWSMTSDIFFDNFIICADRRIVDDWANDGWGLKKAADGAAEPGVVGQMIEAAEERPWLWVVYILTVALPVFLVILFCCSGKKQTSGMEYKKTDAPQPDVKEEEEEKEEEKDKGDEEEEGEEKLEEKQKSDAEEDGGTVSQEEEDRKPKAEEDEILNRSPRNRKPRRE

SEQ ID NO: 39775 - protein, 592 aa, Homo sapiens; identical to SEQ ID NO: 39771

SEQ ID NO: 39776 - protein, 134 aa, Homo sapiens
MEGKWLLCMLLVLGTAIVEAHDGHDDDVIDIEDDLDDVIEEVEDSKPDTTAPPSSPKVTYKAPVPTGEVYFADSFDRGTLSGWILSKAKKDDTDDEIAKYDGKWEVEEMKESKLPGDKGLVLMSRAKHHAISAK

SEQ ID NO: 39777 - protein, 168 aa, Homo sapiens
MEGKWLLCMLLVLGTAIVEAHDGHDDDVIDIEDDLDDVIEEVEDSKPDTTAPPSSPKVTYKAPVPTGEVYFADSFDRGTLSGWILSKAKKDDTDDEIAKYDGKWEVEEMKESKLPGDKGLVLMSRAKHHAISAKLNKPFLFDTKPLIVQYEVNFQNGIECGGAYVKLL

SEQ ID NO: 39778 - protein, 592 aa, Homo sapiens; identical to SEQ ID NO: 39771

SEQ ID NO: 39779 - protein, 79 aa, Homo sapiens
MEGKWLLCMLLVLGTAIVEAHDGHDDDVIDIEDDLDDVIEEVEDSKPDTTAPPSSPKVTYKAPVPTGEVYFADSFDRGT

SEQ ID NO: 39780 - protein, 32 aa, Homo sapiens
MEGKWLLCMLLVLGTAIVEAHDGHDDDVIDIE

SEQ ID NO: 39781 - protein, 484 aa, Homo sapiens
MKESKLPGDKGLVLMSRAKHHAISAKLNKPFLFDTKPLIVQYEVNFQNGIECGGAYVKLLSKTPELNLDQFHDKTPYTIMFGPDKCGEDYKLHFIFRHKNPKTGIYEEKHAKRPDADLKTYFTDKKTHLYTLILNPDNSFEILVDQSVVNSGNLLNDMTPPVNPSREIEDPEDRKPEDWDERPKIPDPEAVKPDDWDEDAPAKIPDEEATKPEGWLDDEPEYVPDPDAEKPEDWDEDMDGEWEAPQIANPRCESAPGCGVWQRPVIDNPNYKGKWKPPMIDNPSYQGIWKPRKIPNPDFFEDLEPFRMTPFSAIGLELWSMTSDIFFDNFIICADRRIVDDWANDGWGLKKAADGAAEPGVVGQMIEAAEERPWLWVVYILTVALPVFLVILFCCSGKKQTSGMEYKKTDAPQPDVKEEEEEKEEEKDKGDEEEEGEEKLEEKQKSDAEEDGGTVSQEEEDRKPKAEEDEILNRSPRNRKPRRE

SEQ ID NO: 39782 - protein, 107 aa, Homo sapiens
MEGKWLLCMLLVLGTAIVEAHDGHDDDVIDIEDDLDDVIEEVEDSKPDTTAPPSSPKVTYKAPVPTGEVYFADSFDRGTLSGWILSKAKKDDTDDEIAKYDGKWEVE

SEQ ID NO: 39783 - protein, 144 aa, Homo sapiens
MEGKWLLCMLLVLGTAIVEAHDGHDDDVIDIEDDLDDVIEEVEDSKPDTTAPPSSPKVTYKAPVPTGEVYFADSFDRGTLSGWILSKAKKDDTDDEIAKYDGKWEVEEMKESKLPGDKGLVLMSRAKHHAISAKLNKPFLFDTK

SEQ ID NO: 39784 - protein, 139 aa, Homo sapiens
MRAGRGATPARELFRDAAFPAADSSLFCDLSTPLAQFREDITWRRPQEICATPRLFPDDPREGQVKQGLLGDCWFLCACAALQKSRHLLDQVSCPVQLPADWTCKVQPVWLEFPCLPISCRLRVSSDTSPDSATWGSWK

SEQ ID NO: 39785 - protein, 138 aa, Homo sapiens
MRAGRGATPARELFRDAAFPAADSSLFCDLSTPLAQFREDITWRRPQVPEGGRSQDAPPLLLQEPLLSCVPHRYAQEVSRLCLLPAGTYKVVPSTYLPDTEGAFTVTIATRIDRPSIHSQEMLGQFLQEVSIMAVMKT

SEQ ID NO: 39786 - protein, 517 aa, Homo sapiens
MRAGRGATPARELFRDAAFPAADSSLFCDLSTPLAQFREDITWRRPQEICATPRLFPDDPREGQVKQGLLGDCWFLCACAALQKSRHLLDQVIPPGQPSWADQEYRGSFTCRIWQFGRWVEVTTDDRLPCLAGRLCFSRCQREDVFWLPLLEKVYAKVHGSYEHLWAGQVADALVDLTGGLAERWNLKGVAGSGGQQDRPGRWEHRTCRQLLHLKDQCLISCCVLSPRAGARELGEFHAFIVSDLRELQGQAGQCILLLRIQNPWGRRCWQGLWREGGEGWSQVDAAVASELLSQLQEGEFWVEEEEFLREFDELTVGYPVTEAGHLQSLYTERLLCHTRALPGAWVKGQSAGGCRNNSGFPSNPKFWLRVSEPSEVYIAVLQRSRLHAADWAGRARALVGDSHTSWSPASIPGKHYQAVGLHLWKVPEGGRSQDAPPLLLQEPLLSCVPHRYAQEVSRLCLLPAGTYKVVPSTYLPDTEGAFTVTIATRIDRPSIHSQEMLGQFLQEVSIMAVMKT

SEQ ID NO: 39787 - protein, 444 aa, Homo sapiens
MRAGRGATPARELFRDAAFPAADSSLFCDLSTPLAQFREDITWRRPQEICATPRLFPDDPREGQVKQGLLGDCWFLCACAALQKSRHLLDQVIPPGQPSWADQEYRGSFTCRIWQFGRWVEVTTDDRLPCLAGRLCFSRCQREDVFWLPLLEKVYAKVHGSYEHLWAGQVADALVDLTGGLAERWNLKGVAGSGGQQDRPGRWEHRTCRQLLHLKDQCLISCCVLSPRAGARELGEFHAFIVSDLRELQGQAGQCILLLRIQNPWGRRCWQGLWREGGEGWSQVDAAVASELLSQLQEGEFWVEEEEFLREFDELTVGYPVTEAGHLQSLYTERLLCHTRALPGAWVKGQSAGGCRNNSGFPSNPKFWLRVSEPSEVYIAVLQRSRLHAADWAGRARALVGDSHTSWSPASIPGKHYQAVGLHLWKGVTLGTTLFPVPSWMWPT

SEQ ID NO: 39788 - protein, 672 aa, Homo sapiens
MRAGRGATPARELFRDAAFPAADSSLFCDLSTPLAQFREDITWRRPQEICATPRLFPDDPREGQVKQGLLGDCWFLCACAALQKSRHLLDQVIPPGQPSWADQEYRGSFTCRIWQFGRWVEVTTDDRLPCLAGRLCFSRCQREDVFWLPLLEKVYAKVHGSYEHLWAGQVADALVDLTGGLAERWNLKGVAGSGGQQDRPGRWEHRTCRQLLHLKDQCLISCCVLSPRAGARELGEFHAFIVSDLRELQGQAGQCILLLRIQNPWGRRCWQGLWREGGEGWSQVDAAVASELLSQLQEGEFWVEEEEFLREFDELTVGYPVTEAGHLQSLYTERLLCHTRALPGAWVKGQSAGGCRNNSGFPSNPKFWLRVSEPSEVYIAVLQRSRLHAADWAGRARALVGDSHTSWSPASIPGKHYQAVGLHLWKVEKRRVNLPRVLSMPPVAGTACHAYDREVHLRCELSPGYYLAVPSTFLKDAPGEFLLRVFSTGRVSLSAIRAVAKNTTPGAALPAGEWGTVQLRGSWRVGQTAGGSRNFASYPTNPCFPFSVPEGPGPRCVRITLHQHCRPSDTEFHPIGFHIFQVPEGGRSQDAPPLLLQEPLLSCVPHRYAQEVSRLCLLPAGTYKVVPSTYLPDTEGAFTVTIATRIDRPSIHSQEMLGQFLQEVSIMAVMKT

SEQ ID NO: 39789 - protein, 739 aa, Homo sapiens [sequence omitted]

SEQ ID NO: 39790 - protein, 739 aa, Homo sapiens
MLYSPGPSLPESAESLDGSQEDKPRGSCAEPTFTDTGMVAHINNSRLKAKGVGQHDNAQNFGNQSFEELRAACLRKGELFEDPLFPAEPSSLGFKDLGPNSKNVQNISWQRPKDIINNPLFIMDGISPTDICQGILGDCWLLAAIGSLTTCPKLLYRVVPRGQSFKKNYAGIFHFQIWQFGQWVNVVVDDRLPTKNDKLVFVHSTERSEFWSALLEKAYAKLSGSYEALSGGSTMEGLEDFTGGVAQSFQLQRPPQNLLRLLRKAVERSSLMGCSIEVTSDSELESMTDKMLVRGHAYSVTGLQDVHYRGKMETLIRVRNPWGRIEWNGAWSDSAREWEEVASDIQMQLLHKTEDGEFWMSYQDFLNNFTLLEICNLTPDTLSGDYKSYWHTTFYEGSWRRGSSAGGCRNHPGTFWTNPQFKISLPEGDDPEDDAEGNVVVCTCLVALMQKNWRHARQQGAQLQTIGFVLYAVASPFQNIQDVHLKKEFFTKYQDHGFSEIFTNSREVSSQLRLPPGEYIIIPSTFEPHRDADFLLRVFTEKHSESWELDEVNYAEQLQEEKVSEDDMDQDFLHLFKIVAGEGKEIGVYELQRLLNRMAIKFKSFKTKGFGLDACRCMINLMDKDGSGKLGLLEFKILWKKLKKWMDIFRECDQDHSGTLNSYEMRLVIEKAGIKLNNKVMQVLVARYADDDLIIDFDSFISCFLRLKTMFTFFLTMDPKNTGHICLSLEQWLQMTMWG

SEQ ID NO: 39791 - protein, 719 aa, Homo sapiens
MASSSGRVTIQLVDEEAGVGAGRLQLFRGQSYEAIRAACLDSGILFRDPYFPAGPDALGYDQLGPDSEKAKGVKWMRPHEFCAEPKFICEDMSRTDVCQGSLGNCWFLAAAASLTLYPRLLRRVVPPGQDFQHGYAGVFHFQLWQFGRWMDVVVDDRLPVREGKLMFVRSEQRNEFWAPLLEKAYAKLHGSYEVMRGGHMNEAFVDFTGGVGEVLYLRQNSMGLFSALRHALAKESLVGATALSDRGEYRTEEGLVKGHAYSITGTHKVFLGFTKVRLLRLRNPWGCVEWTGAWSDSCPRWDTLPTECRDALLVKKEDGEFWMELRDFLLHFDTVQICSLSPEVLGPSPEGGGWHVHTFQGRWVRGFNSGGSQPNAETFWTNPQFRLTLLEPDEEDDEDEEGPWGGWGAAGARGPARGGRTPKCTVLLSLIQRNRRRLRAKGLTYLTVGFHVFQIPEELLGLWDSPRSHALLPRLLRADRSPLSARRDVTRRCCLRPGHYLVVPSTAHAGDEADFTLRVFSERRHTAVEIDDVISADLQSLQGPYLPLELGLEQLFQELAGEEEELNASQLQALLSIALEPARAHTSTPREIGLRTCEQLLQCFGHGQSLALHHFQQLWGYLLEWQAIFNKFDEDTSGTMNSYELRLALNAAGFHLNNQLTQTLTSRYRDSRLRVDFERFVSCVAHLTCIFCHCSQHLDGGEGVICLTHRQWMEVATFS

SEQ ID NO: 39792 - protein, 815 aa, Homo sapiens
MPTVISASVAPRTAAEPRSPGPVPHPAQSKATEAGGGNPSGIYSAIISRNFPIIGVKEKTFEQLHKKCLEKKVLYVDPEFPPDETSLFYSQKFPIQFVWKRPPEICENPRFIIDGANRTDICQGELGDCWFLAAIACLTLNQHLLFRVIPHDQSFIENYAGIFHFQFWRYGEWVDVVIDDCLPTYNNQLVFTKSNHRNEFWSALLEKAYAKLHGSYEALKGGNTTEAMEDFTGGVAEFFEIRDAPSDMYKIMKKAIERGSLMGCSIDDGTNMTYGTSPSGLNMGELIARMVRNMDNSLLQDSDLDPRGSDERPTRTIIPVQYETRMACGLVRGHAYSVTGLDEVPFKGEKVKLVRLRNPWGQVEWNGSWSDRWKDWSFVDKDEKARLQHQVTEDGEFWMSYEDFIYHFTKLEICNLTADALQSDKLQTWTVSVNEGRWVRGCSAGGCRNFPDTFWTNPQYRLKLLEEDDDPDDSEVICSFLVALMQKNRRKDRKLGASLFTIGFAIYEVPHQMHGNKQHLQKDFFLYNASKARSKTYINMREVSQRFRLPPSEYVIVPSTYEPHQEGEFILRVFSEKRNLSEEVENTISVDRPVPIIFVSDRANSNKELGVDQESEEGKGKTSPDKQKQSPQPQPGSSDQESEEQQQFRNIFKQIAGDDMEICADELKKVLNTVVNKHKDLKTHGFTLESCRSMIALMDTDGSGKLNLQEFHHLWNKIKAWQKIFKHYDTDQSGTINSYEMRNAVNDAGFHLNNQLYDIITMRYADKHMNIDFDSFICCFVRLEGMFRAFHAFDKDGDGIIKLNVLEWLQLTMYA

SEQ ID NO: 39793 - protein, 309 aa, Homo sapiens
MHGNKQHLQKDFFLYNASKARSKTYINMREVSQRFRLPPSEYVIVPSTYEPHQEGEFILRVFSEKRNLSEEVENTISVDRPVRKETYKPIIFVSDRANSNKELGVDQESEEGKGKTSPDKQKQSPQPQPGSSDQESEEQQQFRNIFKQIAGDDMEICADELKKVLNTVVNKHKDLKTHGFTLESCRSMIALMDTDGSGKLNLQEFHHLWNKIKAWQKIFKHYDTDQSGTINSYEMRNAVNDAGFHLNNQLYDIITMRYADKHMNIDFDSFICCFVRLEGMFRAFHAFDKDGDGIIKLNVLEWLQLTMYA

SEQ ID NO: 39794 - protein, 156 aa, Homo sapiens
MEICADELKKVLNTVVNKHKDLKTHGFTLESCRSMIALMDTDGSGKLNLQEFHHLWNKIKAWQKIFKHYDTDQSGTINSYEMRNAVNDAGFHLNNQLYDIITMRYADKHMNIDFDSFICCFVRLEGMFRAFHAFDKDGDGIIKLNVLEWLQLTMYA

SEQ ID NO: 39795 - protein, 729 aa, Homo sapiens
MPTVISASVAPRTAAEPRSPGPVPHPAQSKATEAGGGNPSGIYSAIISRNFPIIGVKEKTFEQLHKKCLEKKVLYVDPEFPPDETSLFYSQKFPIQFVWKRPPEICENPRFIIDGANRTDICQGELGDCWFLAAIACLTLNQHLLFRVIPHDQSFIENYAGIFHFQFWRYGEWVDVVIDDCLPTYNNQLVFTKSNHRNEFWSALLEKAYAKLHGSYEALKGGNTTEAMEDFTGGVAEFFEIRDAPSDMYKIMKKAIERGSLMGCSIDTIIPVQYETRMACGLVRGHAYSVTGLDEVPFKGEKVKLVRLRNPWGQVEWNGSWSDRWKDWSFVDKDEKARLQHQVTEDGEFWMSYEDFIYHFTKLEICNLTADALQSDKLQTWTVSVNEGRWVRGCSAGGCRNFPDTFWTNPQYRLKLLEEDDDPDDSEVICSFLVALMQKNRRKDRKLGASLFTIGFAIYEVPKEMHGNKQHLQKDFFLYNASKARSKTYINMREVSQRFRLPPSEYVIVPSTYEPHQEGEFILRVFSEKRNLSEEVENTISVDRPVPQPGSSDQESEEQQQFRNIFKQIAGDDMEICADELKKVLNTVVNKHKDLKTHGFTLESCRSMIALMDTDGSGKLNLQEFHHLWNKIKAWQKIFKHYDTDQSGTINSYEMRNAVNDAGFHLNNQLYDIITMRYADKHMNIDFDSFICCFVRLEGMFRAFHAFDKDGDGIIKLNVLEWLQLTMYA

SEQ ID NO: 39796 - protein, 728 aa, Homo sapiens
MSWQISLKTQTTQQKNEICENPRFIIDGANRTDICQGELGDCWFLAAIACLTLNQHLLFRVIPHDQSFIENYAGIFHFQFWRYGEWVDVVIDDCLPTYNNQLVFTKSNHRNEFWSALLEKAYAKLHGSYEALKGGNTTEAMEDFTGGVAEFFEIRDAPSDMYKIMKKAIERGSLMGCSIDDGTNMTYGTSPSGLNMGELIARMVRNMDNSLLQDSDLDPRGSDERPTRTIIPVQYETRMACGLVRGHAYSVTGLDEVPFKGEKVKLVRLRNPWGQVEWNGSWSDRWKDWSFVDKDEKARLQHQVTEDGEFWMSYEDFIYHFTKLEICNLTADALQSDKLQTWTVSVNEGRWVRGCSAGGCRNFPDTFWTNPQYRLKLLEEDDDPDDSEVICSFLVALMQKNRRKDRKLGASLFTIGFAIYEVPKEMHGNKQHLQKDFFLYNASKARSKTYINMREVSQRFRLPPSEYVIVPSTYEPHQEGEFILRVFSEKRNLSEEVENTISVDRPVPIIFVSDRANSNKELGVDQESEEGKGKTSPDKQKQSPQPQPGSSDQESEEQQQFRNIFKQIAGDDMEICADELKKVLNTVVNKHKDLKTHGFTLESCRSMIALMDTDGSGKLNLQEFHHLWNKIKAWQKIFKHYDTDQSGTINSYEMRNAVNDAGFHLNNQLYDIITMRYADKHMNIDFDSFICCFVRLEGMFRAFHAFDKDGDGIIKLNVLEWLQLTMYA

SEQ ID NO: 39797 - protein, 815 aa, Homo sapiens
MPTVISASVAPRTAAEPRSPGPVPHPAQSKATEAGGGNPSGIYSAIISRNFPIIGVKEKTFEQLHKKCLEKKVLYVDPEFPPDETSLFYSQKFPIQFVWKRPPEICENPRFIIDGANRTDICQGELGDCWFLAAIACLTLNQHLLFRVIPHDQSFIENYAGIFHFQFWRYGEWVDVVIDDCLPTYNNQLVFTKSNHRNEFWSALLEKAYAKLHGSYEALKGGNTTEAMEDFTGGVAEFFEIRDAPSDMYKIMKKAIERGSLMGCSIDDGTNMTYGTSPSGLNMGELIARMVRNMDNSLLQDSDLDPRGSDERPTRTIIPVQYETRMACGLVRGHAYSVTGLDEVPFKGEKVKLVRLRNPWGQVEWNGSWSDRWKDWSFVDKDEKARLQHQVTEDGEFWMSYEDFIYHFTKLEICNLTADALQSDKLQTWTVSVNEGRWVRGCSAGGCRNFPDTFWTNPQYRLKLLEEDDDPDDSEVICSFLVALMQKNRRKDRKLGASLFTIGFAIYEVPKEMHGNKQHLQKDFFLYNASKARSKTYINMREVSQRFRLPPSEYVIVPSTYEPHQEGEFILRVFSEKRNLSEEVENTISVDRPVPIIFVSDRANSNKELGVDQESEEGKGKTSPDKQKQSPQPQPGSSDQESEEQQQFRNIFKQIAGDDMEICADELKKVLNTVVNKHKDLKTHGFTLESCRSMIALMDTDGSGKLNLQEFHHLWNKIKAWQKIFKHYDTDQSGTINSYEMRNAVNDAGFHLNNQLYDIITMRYADKHMNIDFDSFICCFVRLEGMFRAFHAFDKDGDGIIKLNVLEWLQLTMYA

SEQ ID NO: 39798 - protein, 821 aa, Homo sapiens
MPTVISASVAPRTAAEPRSPGPVPHPAQSKATEAGGGNPSGIYSAIISRNFPIIGVKEKTFEQLHKKCLEKKVLYVDPEFPPDETSLFYSQKFPIQFVWKRPPEICENPRFIIDGANRTDICQGELGDCWFLAAIACLTLNQHLLFRVIPHDQSFIENYAGIFHFQFWRYGEWVDVVIDDCLPTYNNQLVFTKSNHRNEFWSALLEKAYAKLHGSYEALKGGNTTEAMEDFTGGVAEFFEIRDAPSDMYKIMKKAIERGSLMGCSIDDGTNMTYGTSPSGLNMGELIARMVRNMDNSLLQDSDLDPRGSDERPTRTIIPVQYETRMACGLVRGHAYSVTGLDEVPFKGEKVKLVRLRNPWGQVEWNGSWSDRWKDWSFVDKDEKARLQHQVTEDGEFWMSYEDFIYHFTKLEICNLTADALQSDKLQTWTVSVNEGRWVRGCSAGGCRNFPDTFWTNPQYRLKLLEEDDDPDDSEVICSFLVALMQKNRRKDRKLGASLFTIGFAIYEVPKEMHGNKQHLQKDFFLYNASKARSKTYINMREVSQRFRLPPSEYVIVPSTYEPHQEGEFILRVFSEKRNLSEEVENTISVDRPVKKKKTKPIIFVSDRANSNKELGVDQESEEGKGKTSPDKQKQSPQPQPGSSDQESEEQQQFRNIFKQIAGDDMEICADELKKVLNTVVNKHKDLKTHGFTLESCRSMIALMDTDGSGKLNLQEFHHLWNKIKAWQKIFKHYDTDQSGTINSYEMRNAVNDAGFHLNNQLYDIITMRYADKHMNIDFDSFICCFVRLEGMFRAFHAFDKDGDGIIKLNVLEWLQLTMYA

SEQ ID NO: 39799 - protein, 309 aa, Homo sapiens
MHGNKQHLQKDFFLYNASKARSKTYINMREVSQRFRLPPSEYVIVPSTYEPHQEGEFILRVFSEKRNLSEEVENTISVDRPVKKKKTKPIIFVSDRANSNKELGVDQESEEGKGKTSPDKQKQSPQPQPGSSDQESEEQQQFRNIFKQIAGDDMEICADELKKVLNTVVNKHKDLKTHGFTLESCRSMIALMDTDGSGKLNLQEFHHLWNKIKAWQKIFKHYDTDQSGTINSYEMRNAVNDAGFHLNNQLYDIITMRYADKHMNIDFDSFICCFVRLEGMFRAFHAFDKDGDGIIKLNVLEWLQLTMYA

SEQ ID NO: 39800 - protein, 156 aa, Homo sapiens; identical to SEQ ID NO: 39794

SEQ ID NO: 39801 - protein, 640 aa, Homo sapiens
MFSCVKPYEDQNYSALRRDCRRRKVLFEDPLFPATDDSLYYKGTPGPAVRWKRPKGICEDPRLFVDGISSHDLHQGQVGNCWFVAACSSLASRESLWQKVIPDWKEQEWDPEKPNAYAGIFHFHFWRFGEWVDVVIDDRLPTVNNQLIYCHSNSRNEFWCALVEKAYAKLAGCYQALDGGNTADALVDFTGGVSEPIDLTEGDFANDETKRNQLFERMLKVHSRGGLISASIKAVTAADMEARLACGLVKGHAYAVTDVRKVRLGHGLLAFFKSEKLDMIRLRNPWGEREWNGPWSDTSEEWQKVSKSEREKMGVTVQDDGEFWMTFEDVCRYFTDIIKCRVINTSHLSIHKTWEEARLHGAWTLHEDPRQNRGGGCINHKDTFFQNPQYIFEVKKPEDEVLICIQQRPKRSTRREGKGENLAIGFDIYKVEENRQYRMHSLQHKAASSIYINSRSVFLRTDQPEGRYVIIPTTFEPGHTGEFLLRVFTDVPSNCRELRLDEPPHTCWSSLCGYPQLVTQVHVLGAAGLKDSPTGANSYVIIKCEGDKVRSAVQKGTSTPEYNVKGIFYRKKLSQPITVQVWNHRVLKDEFLGQVHLKADPDNLQALHTLHLRDRNSRQPSNLPGTVAVHILSSTSLMAV

SEQ ID NO: 39802 - protein, 680 aa, Homo sapiens
MSCTGTPSCIYLLSALSLQDLVLDWEPRGVPPPLPGAAATMFSCVKPYEDQNYSALRRDCRRRKVLFEDPLFPATDDSLYYKGTPGPAVRWKRPKGICEDPRLFVDGISSHDLHQGQVGNCWFVAACSSLASRESLWQKVIPDWKEQEWDPEKPNAYAGIFHFHFWRFGEWVDVVIDDRLPTVNNQLIYCHSNSRNEFWCALVEKAYAKLAGCYQALDGGNTADALVDFTGGVSEPIDLTEGDFANDETKRNQLFERMLKVHSRGGLISASIKAVTAADMEARLACGLVKGHAYAVTDVRKVRLGHGLLAFFKSEKLDMIRLRNPWGEREWNGPWSDTSEEWQKVSKSEREKMGVTVQDDGEFWMTFEDVCRYFTDIIKCRVINTSHLSIHKTWEEARLHGAWTLHEDPRQNRGGGCINHKDTFFQNPQYIFEVKKPEDEVLICIQQRPKRSTRREGKGENLAIGFDIYKVEENRQYRMHSLQHKAASSIYINSRSVFLRTDQPEGRYVIIPTTFEPGHTGEFLLRVFTDVPSNCRELRLDEPPHTCWSSLCGYPQLVTQVHVLGAAGLKDSPTGANSYVIIKCEGDKVRSAVQKGTSTPEYNVKGIFYRKKLSQPITVQVWNHRVLKDEFLGQVHLKADPDNLQALHTLHLRDRNSRQPSNLPGTVAVHILSSTSLMAV

SEQ ID NO: 39803 - protein, 97 aa, Homo sapiens
MFSCVKPYEDQNYSALRRDCRRRKVLFEDPLFPATDDSLYYKGTPGPAVRWKRPKGICEDPRLFVDGISSHDLHQGQVGNCWFVAACSSLASRESLW

SEQ ID NO: 39804 - protein, 640 aa, Homo sapiens; identical to SEQ ID NO: 39801

SEQ ID NO: 39805 - protein, 557 aa, Homo sapiens
MFSCVKPYEDQNYSALRRDCRRRKVLFEDPLFPATDDSLYYKGTPGPAVRWKRPKYSGHSLAPHRPGWGDARRMENVPRPGSSGCPSSSLRARDLGICEDPRLFVDGISSHDLHQGQVGNCWFVAACSSLASRESLWQKVIPDWKEQEWDPEKPNAYAGIFHFHFWRFGEWVDVVIDDRLPTVNNQLIYCHSNSRNEFWCALVEKAYAKLAGCYQALDGGNTADALVDFTGGVSEPIDLTEGDFANDETKRNQLFERMLKVHSRGGLISASIKAVTAADMEARLACGLVKGHAYAVTDVRKVRLGHGLLAFFKSEKLDMIRLRNPWGEREWNGPWSDTSEEWQKVSKSEREKMGVTVQDDGEFWMTFEDVCRYFTDIIKCRVINTSHLSIHKTWEEARLHGAWTLHEDPRQNRGGGCINHKDTFFQNPQYIFEVKKPEDEVLICIQQRPKRSTRREGKGENLAIGFDIYKVEENRQYRMHSLQHKAASSIYINSRSVFLRTDQPEGRYVIIPTTFEPGHTGEFLLRVFTDVPSNCRELRLDEPPHTCWSSLCGYPQW

SEQ ID NO: 39806 - protein, 813 aa, Homo sapiens
MDATALERDAVQFARLAVQRDHEGRYSEAVFYYKEAAQALIYAEMAGSSLENIQEKITEYLERVQALHSAVQSKSADPLKSKHQLDLERAHFLVTQAFDEDEKENVEDAIELYTEAVDLCLKTSYETADKVLQNKLKQLARQALDRAEALSEPLTKPVGKISSTSVKPKPPPVRAHFPLGANPFLERPQSFISPQSCDAQGQRYTAEEIEVLRTTSKINGIEYVPFMNVDLRERFAYPMPFCDRWGKLPLSPKQKTTFSKWVRPEDLTNNPTMIYTVSSFSIKQTIVSDCSFVASLAISAAYERRFNKKLITGIIYPQNKDGEPEYNPCGKYMVKLHLNGVPRKVIIDDQLPVDHKGELLCSYSNNKSELWVSLIEKAYMKVMGGYDFPGSNSNIDLHALTGWIPERIAMHSDSQTFSKDNSFRMLYQRFHKGDVLITASTGMMTEAEGEKWGLVPTHAYAVLDIREFKGLRFIQLKNPWSHLRWKGRYSENDVKNWTPELQKYLNFDPRTAQKIDNGIFWISWDDLCQYYDVIYLSWNPGLFKESTCIHSTWDAKQGPVKDAYSLANNPQYKLEVQCPQGGAAVWVLLSRHITDKDDFANNREFITMVVYKTDGKKVYYPADPPPYIDGIRINSPHYLTKIKLTTPGTHTFTLVVSQYEKQNTIHYTVRVYSACSFTFSKIPSPYTLSKRINGKWSGQSAGGCGNFQETHKNNPIYQFHIEKTGPLLIELRGPRQYSVGFEVVTVSTLGDPGPHGFLRKSSGDYRCGFCYLELENIPSGIFNIIPSTFLPKQEGPFFLDFNSIIPIKITQLQ

SEQ ID NO: 39807 - protein, 690 aa, Homo sapiens
MPYLYRAPGPQAHPVPKDARITHSSGQSFEQMRQECLQRGTLFEDADFPASNSSLFYSERPQIPFVWKRPGEIVKNPEFILGGATRTDICQGELGDCWLLAAIASLTLNQKALARVIPQDQSFGPGYAGIFHFQFWQHSEWLDVVIDDRLPTFRDRLVFLHSADHNEFWSALLEKAYAKLNGSYEALKGGSAIEAMEDFTGGVAETFQTKEAPENFYEILEKALKRGSLLGCFIDTRSAAESEARTPFGLIKGHAYSVTGIDQVSFRGQRIELIRIRNPWGQVEWNGSWSDSSPEWRSVGPAEQKRLCHTALDDGEFWMAFKDFKAHFDKVEICNLTPDALEEDAIHKWEVTVHQGSWVRGSTAGGCRNFLDTFWTNPQIKLSLTEKDEGQEECSFLVALMQKDRRKLKRFGANVLTIGYAIYECPDKDEHLNKDFFRYHASRARSKTFINLREVSDRFKLPPGEYILIPSTFEPHQEADFCLRIFSEKKAITRDMDGNVDIDLPEPPKPTPPDQETEEEQRFRALFEQVAGEDMEVTAEELEYVLNAVLQKKKDIKFKKLSLISCKNIISLMDTSGNGKLEFDEFKVFWDKLKQWINLFLRFDADKSGTMSTYELRTALKAAGFQLSSHLLQLIVLRYADEELQLDFDDFLNCLVRLENASRVFQALSTKNKEFIHLNINEFIHLTMNI

SEQ ID NO: 39808 - protein, 664 aa, Homo sapiens
MPYLYRAPGPQAHPVPKDARITHSSGQSFEQMRQECLQRGTLFEDADFPASNSSLFYSERPQIPFVWKRPGEIVKNPEFILGGATRTDICQGELGDCWLLAAIASLTLNQKALARVIPQDQSFGPGYAGIFHFQFWQHSEWLDVVIDDRLPTFRDRLVFLHSADHNEFWSALLEKAYAKLNGSYEALKGGSAIEAMEDFTGGVAETFQTKEAPENFYEILEKALKRGSLLGCFIDTRSAAESEARTPFGLIKGHAYSVTGIDQVSFRGQRIELIRIRNPWGQVEWNGSWSDRMAFKDFKAHFDKVEICNLTPDALEEDAIHKWEVTVHQGSWVRGSTAGGCRNFLDTFWTNPQIKLSLTEKDEGQEECSFLVALMQKDRRKLKRFGANVLTIGYAIYECPDKDEHLNKDFFRYHASRARSKTFINLREVSDRFKLPPGEYILIPSTFEPHQEADFCLRIFSEKKAITRDMDGNVDIDLPEPPKPTPPDQETEEEQRFRALFEQVAGEDMEVTAEELEYVLNAVLQKKKDIKFKKLSLISCKNIISLMDTSGNGKLEFDEFKVFWDKLKQWINLFLRFDADKSGTMSTYELRTALKAAGFQLSSHLLQLIVLRYADEELQLDFDDFLNCLVRLENASRVFQALSTKNKEFIHLNINEFIHLTMNI

SEQ ID NO: 39809 - protein, 627 aa, Homo sapiens
MPYLYRAPGPQAHPVPKDARITHSSGQSFEQMRQECLQRGTLFEDADFPASNSSLFYSERPQIPFVWKRPGFWQHSEWLDVVIDDRLPTFRDRLVFLHSADHNEFWSALLEKAYAKLNGSYEALKGGSAIEAMEDFTGGVAETFQTKEAPENFYEILEKALKRGSLLGCFIDTRSAAESEARTPFGLIKGHAYSVTGIDQVSFRGQRIELIRIRNPWGQVEWNGSWSDSSPEWRSVGPAEQKRLCHTALDDGEFWMAFKDFKAHFDKVEICNLTPDALEEDAIHKWEVTVHQGSWVRGSTAGGCRNFLDTFWTNPQIKLSLTEKDEGQEECSFLVALMQKDRRKLKRFGANVLTIGYAIYECPDKDEHLNKDFFRYHASRARSKTFINLREVSDRFKLPPGEYILIPSTFEPHQEADFCLRIFSEKKAITRDMDGNVDIDLPEPPKPTPPDQETEEEQRFRALFEQVAGEDMEVTAEELEYVLNAVLQKKKDIKFKKLSLISCKNIISLMDTSGNGKLEFDEFKVFWDKLKQWINLFLRFDADKSGTMSTYELRTALKAAGFQLSSHLLQLIVLRYADEELQLDFDDFLNCLVRLENASRVFQALSTKNKEFIHLNINEFIHLTMNI

SEQ ID NO: 39810 - protein, 268 aa, Homo sapiens
MFLVNSFLKGGGGGGGGGGGLGGGLGNVLGGLISGAGGGGGGGGGGGGGGGGGGGGTAMRILGGVISAISEAAAQYNPEPPPPRTHYSNIEANESEEVRQFRRLFAQLAGDDMEVSATELMNILNKVVTRHPDLKTDGFGIDTCRSMVAVMDSDTTGKLGFEEFKYLWNNIKRWQAIYKQFDTDRSGTICSSELPGAFEAAGFHLNEHLYNMIIRRYSDESGNMDFDNFISCLVRLDAMFRAFKSLDKDGTGQIQVNIQEWLQLTMYS

SEQ ID NO: 39811 - protein, 686 aa, Homo sapiens
MNPTETKAVKTEPEKKSQSTKLSVVHEKKSQEGKPKEHTEPKSLPKQASDTGSNDAHNKKAVSRSAEQQPSEKSTEPKTKPQDMISAGGESVAGITAISGKPGDKKKEKKSLTPAVPVESKPDKPSGKSGMDAALDDLIDTLGGPEETEEENTTYTGPEVSDPMSSTYIEELGKREVTIPPKYRELLAKKEGITGPPADSSKPIGPDDAIDALSSDFTCGSPTAAGKKTEKEESTEVLKAQSAGTVRSAAPPQEKKRKVEKDTMSDQALEALSASLGTRQAEPELDLRSIKEVDEAKAKEEKLEKCGEDDETIPSEYRLKPATDKDGKPLLPEPEEKPKPRSESELIDELSEDFDRSECKEKPSKPTEKTEESKAAAPAPVSEAVCRTSMCSIQSAPPEPATLKGTVPDDAVEALADSLGKKEADPEDGKPVMDKVKEKAKEEDREKLGEKEETIPPDYRLEEVKDKDGKPLLPKESKEQLPPMSEDFLLDALSEDFSGPQNASSLKFEDAKLAAAISEVVSQTPASTTQAGAPPRDTSQSDKDLDDALDKLSDSLGQRQPDPDENKPMEDKVKEKAKAEHRDKLGERDDTIPPEYRHLLDDNGQDKPVKPPTKKSEDSKKPADDQDPIDALSGDLDSCPSTTETSQNTAKDKCKKAASSSKAPKNGGKAKDSAKTTEETSKPKDD

SEQ ID NO: 39812 - protein, 756 aa, Homo sapiens
MSQPGQKPAASPRPRRAAAARRTHEHVSEKTSESPSKPGEKKGSDEKKAASLGSSQSSRTYAGGTASATKVSASSGATSKSSSMNPTETKAVKTEPEKKSQSTKLSVVHEKKSQEGKPKEHTEPKSLPKQASDTGSNDAHNKKAVSRSAEQQPSEKSTEPKTKPQDMISAGGESVAGITAISGKPGDKKKEKKSLTPAVPVESKPDKPSGKSGMDAALDDLIDTLGGPEETEEENTTYTGPEVSDPMSSTYIEELGKREVTIPPKYRELLAKPIGPDDAIDALSSDFTCGSPTAAGKKTEKEESTEVLKAQSAGTVRSAAPPQEKKRKVEKDTMSDQALEALSASLGTRQAEPELDLRSIKEVDEAKAKEEKLEKCGEDDETIPSEYRLKPATDKDGKPLLPEPEEKPKPRSESELIDELSEDFDRSECKEKPSKPTEKTEESKAAAPAPVSEAVCRTSMCSIQSAPPEPATLKGTVPDDAVEALADSLGKKEADPEDGKPVMDKVKEKAKEEDREKLGEKEETIPPDYRLEEVKDKDGKPLLPKESKEQLPPMSEDFLLDALSEDFSGPQNASSLKFEDAKLAAAISEVVSQTPASTTQAGAPPRDTSQSDKDLDDALDKLSDSLGQRQPDPDENKPMEDKVKEKAKAEHRDKLGERDDTIPPEYRHLLDDNGQDKPVKPPTKKSEDSKKPADDQDPIDALSGDLDSCPSTTETSQNTAKDKCKKAASSSKAPKNGGKAKDSAKTTEETSKPKDD

SEQ ID NO: 39813 - protein, 695 aa, Homo sapiens
MNPTETKAIPVSQQMEGPHLPNKKKHKKQAVKTEPEKKSQSTKLSVVHEKKSQEGKPKEHTEPKSLPKQASDTGSNDAHNKKAVSRSAEQQPSEKSTEPKTKPQDMISAGGESVAGITAISGKPGDKKKEKKSLTPAVPVESKPDKPSGKSGMDAALDDLIDTLGGPEETEEENTTYTGPEVSDPMSSTYIEELGKREVTIPPKYRELLAKPIGPDDAIDALSSDFTCGSPTAAGKKTEKEESTEVLKAQSAGTVRSAAPPQEKKRKVEKDTMSDQALEALSASLGTRQAEPELDLRSIKEVDEAKAKEEKLEKCGEDDETIPSEYRLKPATDKDGKPLLPEPEEKPKPRSESELIDELSEDFDRSECKEKPSKPTEKTEESKAAAPAPVSEAVCRTSMCSIQSAPPEPATLKGTVPDDAVEALADSLGKKEADPEDGKPVMDKVKEKAKEEDREKLGEKEETIPPDYRLEEVKDKDGKPLLPKESKEQLPPMSEDFLLDALSEDFSGPQNASSLKFEDAKLAAAISEVVSQTPASTTQAGAPPRDTSQSDKDLDDALDKLSDSLGQRQPDPDENKPMEDKVKEKAKAEHRDKLGERDDTIPPEYRHLLDDNGQDKPVKPPTKKSEDSKKPADDQDPIDALSGDLDSCPSTTETSQNTAKDKCKKAASSSKAPKNGGKAKDSAKTTEETSKPKDD

SEQ ID NO: 39814 - protein, 708 aa, Homo sapiens
MNPTETKAIPVSQQMEGPHLPNKKKHKKQAVKTEPEKKSQSTKLSVVHEKKSQEGKPKEHTEPKSLPKQASDTGSNDAHNKKAVSRSAEQQPSEKSTEPKTKPQDMISAGGESVAGITAISGKPGDKKKEKKSLTPAVPVESKPDKPSGKSGMDAALDDLIDTLGGPEETEEENTTYTGPEVSDPMSSTYIEELGKREVTIPPKYRELLAKKEGITGPPADSSKPIGPDDAIDALSSDFTCGSPTAAGKKTEKEESTEVLKAQSAGTVRSAAPPQEKKRKVEKDTMSDQALEALSASLGTRQAEPELDLRSIKEVDEAKAKEEKLEKCGEDDETIPSEYRLKPATDKDGKPLLPEPEEKPKPRSESELIDELSEDFDRSECKEKPSKPTEKTEESKAAAPAPVSEAVCRTSMCSIQSAPPEPATLKGTVPDDAVEALADSLGKKEADPEDGKPVMDKVKEKAKEEDREKLGEKEETIPPDYRLEEVKDKDGKPLLPKESKEQLPPMSEDFLLDALSEDFSGPQNASSLKFEDAKLAAAISEVVSQTPASTTQAGAPPRDTSQSDKDLDDALDKLSDSLGQRQPDPDENKPMEDKVKEKAKAEHRDKLGERDDTIPPEYRHLLDDNGQDKPVKPPTKKSEDSKKPADDQDPIDALSGDLDSCPSTTETSQNTAKDKCKKAASSSKAPKNGGKAKDSAKTTEETSKPKDD

SEQ ID NO: 39815 - protein, 772 aa, Homo sapiens
MSQPGQKPAASPRPRRAAAARRTHEHVSEKTSESPSKPGEKKGSDEKKAASLGSSQSSRTYAGGTASATKVSASSGATSKSSSMNPTETKAIPVSQQMEGPHLPNKKKHKKQAVKTEPEKKSQSTKPKSLPKQASDTGSNDAHNKKAVSRSAEQQPSEKSTEPKTKPQDMISAGGESVAGITAISGKPGDKKKEKKSLTPAVPVESKPDKPSGKSGMDAALDDLIDTLGGPEETEEENTTYTGPEVSDPMSSTYIEELGKREVTIPPKYRELLAKKEGITGPPADSSKPIGPDDAIDALSSDFTCGSPTAAGKKTEKEESTEVLKAQSAGTVRSAAPPQEKKRKVEKDTMSDQALEALSASLGTRQAEPELDLRSIKEVDEAKAKEEKLEKCGEDDETIPSEYRLKPATDKDGKPLLPEPEEKPKPRSESELIDELSEDFDRSECKEKPSKPTEKTEESKAAAPAPVSEAVCRTSMCSIQSAPPEPATLKGTVPDDAVEALADSLGKKEADPEDGKPVMDKVKEKAKEEDREKLGEKEETIPPDYRLEEVKDKDGKPLLPKESKEQLPPMSEDFLLDALSEDFSGPQNASSLKFEDAKLAAAISEVVSQTPASTTQAGAPPRDTSQSDKDLDDALDKLSDSLGQRQPDPDENKPMEDKVKEKAKAEHRDKLGERDDTIPPEYRHLLDDNGQDKPVKPPTKKSEDSKKPADDQDPIDALSGDLDSCPSTTETSQNTAKDKCKKAASSSKAPKNGGKAKDSAKTTEETSKPKDD

SEQ ID NO: 39816 - protein, 791 aa, Homo sapiens
MSQPGQKPAASPRPRRAAAARRTHEHVSEKTSESPSKPGEKKGSDEKKAASLGSSQSSRTYAGGTASATKVSASSGATSKSSSMNPTETKAIPVSQQMEGPHLPNKKKHKKQAVKTEPEKKSQSTKLSVVHEKKSQEGKPKEHTEPKSLPKQASDTGSNDAHNKKAVSRSAEQQPSEKSTEPKTKPQDMISAGGESVAGITAISGKPGDKKKEKKSLTPAVPVESKPDKPSGKSGMDAALDDLIDTLGGPEETEEENTTYTGPEVSDPMSSTYIEELGKREVTIPPKYRELLAKKEGITGPPADSSKPIGPDDAIDALSSDFTCGSPTAAGKKTEKEESTEVLKAQSAGTVRSAAPPQEKKRKVEKDTMSDQALEALSASLGTRQAEPELDLRSIKEVDEAKAKEEKLEKCGEDDETIPSEYRLKPATDKDGKPLLPEPEEKPKPRSESELIDELSEDFDRSECKEKPSKPTEKTEESKAAAPAPVSEAVCRTSMCSIQSAPPEPATLKGTVPDDAVEALADSLGKKEADPEDGKPVMDKVKEKAKEEDREKLGEKEETIPPDYRLEEVKDKDGKPLLPKESKEQLPPMSEDFLLDALSEDFSGPQNASSLKFEDAKLAAAISEVVSQTPASTTQAGAPPRDTSQSDKDLDDALDKLSDSLGQRQPDPDENKPMEDKVKEKAKAEHRDKLGERDDTIPPEYRHLLDDNGQDKPVKPPTKKSEDSKKPADDQDPIDALSGDLDSCPSTTETSQNTAKDKCKKAASSSKAPKNGGKAKDSAKTTEETSKPKDD

SEQ ID NO: 39817 - protein, 754 aa, Homo sapiens
MAFASWWYKTHVSEKTSESPSKPGEKKGSDEKKAASLGSSQSSRTYAGGTASATKVSASSGATSKSSSMNPTETKAVKTEPEKKSQSTKLSVVHEKKSQEGKPKEHTEPKSLPKQASDTGSNDAHNKKAVSRSAEQQPSEKSTEPKTKPQDMISAGGESVAGITAISGKPGDKKKEKKSLTPAVPVESKPDKPSGKSGMDAALDDLIDTLGGPEETEEENTTYTGPEVSDPMSSTYIEELGKREVTIPPKYRELLAKKEGITGPPADSSKPIGPDDAIDALSSDFTCGSPTAAGKKTEKEESTEVLKAQSAGTVRSAAPPQEKKRKVEKDTMSDQALEALSASLGTRQAEPELDLRSIKEVDEAKAKEEKLEKCGEDDETIPSEYRLKPATDKDGKPLLPEPEEKPKPRSESELIDELSEDFDRSECKEKPSKPTEKTEESKAAAPAPVSEAVCRTSMCSIQSAPPEPATLKGTVPDDAVEALADSLGKKEADPEDGKPVMDKVKEKAKEEDREKLGEKEETIPPDYRLEEVKDKDGKPLLPKESKEQLPPMSEDFLLDALSEDFSGPQNASSLKFEDAKLAAAISEVVSQTPASTTQAGAPPRDTSQSDKDLDDALDKLSDSLGQRQPDPDENKPMEDKVKEKAKAEHRDKLGERDDTIPPEYRHLLDDNGQDKPVKPPTKKSEDSKKPADDQDPIDALSGDLDSCPSTTETSQNTAKDKCKKAASSSKAPKNGGKAKDSAKTTEETSKPKDD

SEQ ID NO: 39818 - protein, 791 aa, Homo sapiens; identical to SEQ ID NO: 39816

SEQ ID NO: 39819 - protein, 642 aa, Homo sapiens
MNPTETKAIPVSQQMEGPHLPNKKKHKKQAVKTEPEKKSQSTKLSVVHEKKSQEGKPKEHTEPKSLPKQASDTGSNDAHNKKAVSRSAEQQPSEKSTEPKTKPQDMISAGGESVAGITAISGKPGDKKKEKKSLTPAVPVESKPDKPSGKSGMDAALDDLIDTLGGPEETEEENTTYTGPEVSDPMSSTYIEELGKREVTIPPKYRELLAKKEGITGPPADSSKPIGPDDAIDALSSDFTCGSPTAAGKKTEKEESTEVLKAQSAGTVRSAAPPQEKKRKVEKDTMSDQALEALSASLGTRQAEPELDLRSIKEVDEAKAKEEKLEKCGEDDETIPSEYRLKPATDKDGKPLLPEPEEKPKPRSESELIDELSEDFDRSECKEKPSKPTEKTEESKAAAPAPVSEAVCRTSMCSIQSAPPEPATLKGTVPDDAVEALADSLGKKEADPEDGKPVMDKVKEKAKEEDREKLGEKEETIPPDYRLEEVKDKDGKPLLPKESKEQLPPMSEDFLLDALSEDFSGPQNASSLKFEDAKLAAAISEVVSQTPASTTQAGAPPRDTSQSDKDLDDALDKLSDSLGQRQPDPDENKPMEDKVKEKAKAEHRDKLGERDDTIPPEYRHLLDDNGQDKPVKPPTKKSEDSK

SEQ ID NO: 39820 - protein, 694 aa, Homo sapiens
MEGPHLPNKKKHKKQAVKTEPEKKSQSTKLSVVHEKKSQEGKPKEHTEPKSLPKQASDTGSNDAHNKKAVSRSAEQQPSEKSTEPKTKPQDMISAGGESVAGITAISGKPGDKKKEKKSLTPAVPVESKPDKPSGKSGMDAALDDLIDTLGGPEETEEENTTYTGPEVSDPMSSTYIEELGKREVTIPPKYRELLAKKEGITGPPADSSKPIGPDDAIDALSSDFTCGSPTAAGKKTEKEESTEVLKAQSAGTVRSAAPPQEKKRKVEKDTMSDQALEALSASLGTRQAEPELDLRSIKEVDEAKAKEEKLEKCGEDDETIPSEYRLKPATDKDGKPLLPEPEEKPKPRSESELIDELSEDFDRSECKEKPSKPTEKTEESKAAAPAPVSEAVCRTSMCSIQSAPPEPATLKGTVPDDAVEALADSLGKKEADPEDGKPVMDKVKEKAKEEDREKLGEKEETIPPDYRLEEVKDKDGKPLLPKESKEQLPPMSEDFLLDALSEDFSGPQNASSLKFEDAKLAAAISEVVSQTPASTTQAGAPPRDTSQSDKDLDDALDKLSDSLGQRQPDPDENKPMEDKVKEKAKAEHRDKLGERDDTIPPEYRHLLDDNGQDKPVKPPTKKSEDSKKPADDQDPIDALSGDLDSCPSTTETSQNTAKDKCKKAASSSKAPKNGGKAKDSAKTTEETSKPKDD

SEQ ID NO: 39821 - protein, 750 aa, Homo sapiens
MSQPGQKPAASPRPRRAAAARRTHEHVSEKTSESPSKPGEKKGSDEKKAASLGSSQSSRTYAGGTASATKVSASSGATSKSSSMNPTETKAVKTEPEKKSQSTKPKSLPKQASDTGSNDAHNKKAVSRSAEQQPSEKSTEPKTKPQDMISAGGESVAGITAISGKPGDKKKEKKSLTPAVPVESKPDKPSGKSGMDAALDDLIDTLGGPEETEEENTTYTGPEVSDPMSSTYIEELGKREVTIPPKYRELLAKKEGITGPPADSSKPIGPDDAIDALSSDFTCGSPTAAGKKTEKEESTEVLKAQSAGTVRSAAPPQEKKRKVEKDTMSDQALEALSASLGTRQAEPELDLRSIKEVDEAKAKEEKLEKCGEDDETIPSEYRLKPATDKDGKPLLPEPEEKPKPRSESELIDELSEDFDRSECKEKPSKPTEKTEESKAAAPAPVSEAVCRTSMCSIQSAPPEPATLKGTVPDDAVEALADSLGKKEADPEDGKPVMDKVKEKAKEEDREKLGEKEETIPPDYRLEEVKDKDGKPLLPKESKEQLPPMSEDFLLDALSEDFSGPQNASSLKFEDAKLAAAISEVVSQTPASTTQAGAPPRDTSQSDKDLDDALDKLSDSLGQRQPDPDENKPMEDKVKEKAKAEHRDKLGERDDTIPPEYRHLLDDNGQDKPVKPPTKKSEDSKKPADDQDPIDALSGDLDSCPSTTETSQNTAKDKCKKAASSSKAPKNGGKAKDSAKTTEETSKPKDD

SEQ ID NO: 39822 - protein, 417 aa, Homo sapiens
MLLSVPLLLGLLGLAVAEPAVYFKEQFLDGDGWTSRWIESKHKSDFGKFVLSSGKFYGDEEKDKGLQTSQDARFYALSASFEPFSNKGQTLVVQFTVKHEQNIDCGGGYVKLFPNSLDQTDMHGDSEYNIMFGPDICGPGTKKVHVIFNYKGKNVLINKDIRCKDDEFTHLYTLIVRPDNTYEVKIDNSQVESGSLEDDWDFLPPKKIKDPDASKPEDWDERAKIDDPTDSKPEDWDKPEHIPDPDAKKPEDWDEEMDGEWEPPVIQNPEYKGEWKPRQIDNPDYKGTWIHPEIDNPEYSPDPSIYAYDNFGVLGLDLWQVKSGTIFDNFLITNDEAYAEEFGNETWGVTKAAEKQMKDKQDEEQRLKEEEEDKKRKEEEEAEDKEDDEDKDEDEEDEEDKEEDEEEDVPGQAKDEL

SEQ ID NO: 39823 - protein, 296 aa, Homo sapiens
MHGDSEYNIMFGPDICGPGTKKVHVIFNYKGKNVLINKDIRCKDDEFTHLYTLIVRPDNTYEVKIDNSQVESGSLEDDWDFLPPKKIKDPDASKPEDWDERAKIDDPTDSKPEDWDKPEHIPDPDAKKPEDWDEEMDGEWEPPVIQNPEYKGEWKPRQIDNPDYKGTWIHPEIDNPEYSPDPSIYAYDNFGVLGLDLWQVKSGTIFDNFLITNDEAYAEEFGNETWGVTKAAEKQMKDKQDEEQRLKEEEEDKKRKEEEEAEDKEDDEDKDEDEEDEEDKEEDEEEDVPGQAKDEL

SEQ ID NO: 39824 - protein, 384 aa, Homo sapiens
MARALVQLWAICMLRVALATVYFQEEFLDGEHWRNRWLQSTNDSRFGHFRLSSGKFYGHKEKDKGLQTTQNGRFYAISARFKPFSNKGKTLVIQYTVKHEQKMDCGGGYIKVFPADIDQKNLNGKSQYYIMFGPDICGFDIKKVHVILHFKNKYHENKKLIRCKVDGFTHLYTLILRPDLSYDVKIDGQSIESGSIEYDWNLTSLKKETSPAESKDWEQTKDNKAQDWEKHFLDASTSKQSDWNGDLDGDWPAPMLQKPPYQDGLKPEGIHKDVWLHRKMKNTDYLTQYDLSEFENIGAIGLELWQVRSGTIFDNFLITDDEEYADNFGKATWGETKGPEREMDAIQAKEEMKKAREEEEEELLSGKINRHEHYFNQFHRRNEL

SEQ ID NO: 39825 - protein, 396 aa, Homo sapiens
MSATDRMGPRAVPGLRLALLLLLVLGTPKSGVQGQEGLDFPEYDGVDRVINVNAKNYKNVFKKYEVLALLYHEPPEDDKASQRQFEMEELILELAAQVLEDKGVGFGLVDSEKDAAVAKKLGLTEVDSMYVFKGDEVIEYDGEFSADTIVEFLLDVLEDPVELIEGERELQAFENIEDEIKLIGYFKSKDSEHYKAFEDAAEEFHPYIPFFATFDSKVAKKLTLKLNEIDFYEAFMEEPVTIPDKPNSEEEIVNFVEEHRRSTLRKLKPESMYETWEDDMDGIHIVAFAEEADPDGFEFLETLKAVAQDNTENPDLSIIWIDPDDFPLLVPYWEKTFDIDLSAPQIGVVNVTDADSVWMEMDDEEDLPSAEELEDWLEDVLEGEINTEDDDDDDDD

SEQ ID NO: 39826 - protein, 390 aa, Homo sapiens
MGPRAVPGLRLALLLLLVLGTPKSGVQGQEGLDFPEYDGVDRVINVNAKNYKNVFKKYEVLALLYHEPPEDDKASQRQFEMEELILELAAQVLEDKGVGFGLVDSEKDAAVAKKLGLTEVDSMYVFKGDEVIEYDGEFSADTIVEFLLDVLEDPVELIEGERELQAFENIEDEIKLIGYFKSKDSEHYKAFEDAAEEFHPYIPFFATFDSKVAKKLTLKLNEIDFYEAFMEEPVTIPDKPNSEEEIVNFVEEHRRSTLRKLKPESMYETWEDDMDGIHIVAFAEEADPDGFEFLETLKAVAQDNTENPDLSIIWIDPDDFPLLVPYWEKTFDIDLSAPQIGVVNVTDADSVWMEMDDEEDLPSAEELEDWLEDVLEGEINTEDDDDDDDD

SEQ ID NO: 39827 - protein, 311 aa, Homo sapiens
MSMQRTTRMCSRSMRCWHSSTMNPPRMTRPHKDNSLGLTEVDSMYVFKGDEVIEYDGEFSADTIVEFLLDVLEDPVELIEGERELQAFENIEDEIKLIGYFKSKDSEHYKAFEDAAEEFHPYIPFFATFDSKVAKKLTLKLNEIDFYEAFMEEPVTIPDKPNSEEEIVNFVEEHRRSTLRKLKPESMYETWEDDMDGIHIVAFAEEADPDGFEFLETLKAVAQDNTENPDLSIIWIDPDDFPLLVPYWEKTFDIDLSAPQIGVVNVTDADSVWMEMDDEEDLPSAEELEDWLEDVLEGEINTEDDDDDDDD

SEQ ID NO: 39828 - protein, 399 aa, Homo sapiens
MKRTHLFIVGIYFLSSCRAEEGLNFPTYDGKDRVVSLSEKNFKQVLKKYDLLCLYYHEPVSSDKVTQKQFQLKEIVLELVAQVLEHKAIGFVMVDAKKEAKLAKKLGFDEEGSLYILKGDRTIEFDGEFAADVLVEFLLDLIEDPVEIISSKLEVQAFERIEDYIKLIGFFKSEDSEYYKAFEEAAEHFQPYIKFFATFDKGVAKKLSLKMNEVDFYEPFMDEPIAIPNKPYTEEELVEFVKEHQRPTLRRLRPEEMFETWEDDLNGIHIVAFAEKSDPDGYEFLEILKQVARDNTDNPDLSILWIDPDDFPLLVAYWEKTFKIDLFRPQIGVVNVTDADSVWMEIPDDDDLPTAEELEDWIEDVLSGKINTEDDDEDDDDDDNSDEEDNDDSDDDDDE

SEQ ID NO: 39829 - protein, 353 aa, Homo sapiens
MKRTHLFIVGIYFLSSCRAEEGLNFPTYDGKDRVVSLSEKNFKQVLKKYDLLCLYYHEPVSSDKVTQKQFQLKEIVLELVAQVLEHKAIGFVMVDAKKEAKLAKKLGFDEEGSLYILKGDRTIEFDGEFAADVLVEFLLDLIEDPVEIISSKLEVQAFERIEDYIKLIGFFKSEDSEYYKAFEEAAEHFQPYIKFFATFDKGVAKKLSLKMNEVDFYEPFMDEPIAIPNKPYTDGYEFLEILKQVARDNTDNPDLSILWIDPDDFPLLVAYWEKTFKIDLFRPQIGVVNVTDADSVWMEIPDDDDLPTAEELEDWIEDVLSGKINTEDDDEDDDDDDNSDEEDNDDSDDDDDE

SEQ ID NO: 39830 - protein, 328 aa, Homo sapiens
MKRTHLFIVGIYFLSSCRAEEGLNFPTYDGKDRVVSLSEKNFKQVLKKYDLLCLYYHEPVSSDKVTQKQFQLKEIVLELVAQVLEHKAIGFVMVDAKKEAKLAKKLDYKAFEEAAEHFQPYIKFFATFDKGVAKKLSLKMNEVDFYEPFMDEPIAIPNKPYTEEELVEFVKEHQRPTLRRLRPEEMFETWEDDLNGIHIVAFAEKSDPDGYEFLEILKQVARDNTDNPDLSILWIDPDDFPLLVAYWEKTFKIDLFRPQIGVVNVTDADSVWMEIPDDDDLPTAEELEDWIEDVLSGKINTEDDDEDDDDDDNSDEEDNDDSDDDDDE

SEQ ID NO: 39831 - protein, 315 aa, Homo sapiens
MDLRQFLMCLSLCTAFALSKPTEKKDRVHHEPQLSDKVHNDAQSFDYDHDAFLGAEEAKTFDQLTPEESKERLGKIVSKIDGDKDGFVTVDELKDWIKFAQKRWIYEDVERQWKGHDLNEDGLVSWEEYKNATYGYVLDDPDPDDGFNYKQMMVRDERRFKMADKDGDLIATKEEFTAFLHPEEYDYMKDIVVQETMEDIDKNADGFIDLEEYIGDMYSHDGNTDEPEWVKTEREQFVEFRDKNRDGKMDKEETKDWILPSDYDHAEAEARHLVYESDQNKDGKLTKEEIVDKYDLFVGSQATDFGEALVRHDEF

SEQ ID NO: 39832 - protein, 154 aa, Homo sapiens
MDLRQFLMCLSLCTAFALSKPTEKKDRVHHEPQLSDKVHNDAQSFDYDHDAFLGAEEAKTFDQLTPEESKERLGKIVSKIDGDKDGFVTVDELKDWILPSDYDHAEAEARHLVYESDQNKDGKLTKEEIVDKYDLFVGSQATDFGEALVRHDEF

SEQ ID NO: 39833 - protein, 315 aa, Homo sapiens
MDLRQFLMCLSLCTAFALSKPTEKKDRVHHEPQLSDKVHNDAQSFDYDHDAFLGAEEAKTFDQLTPEESKERLGMIVDKIDADKDGFVTEGELKSWIKHAQKKYIYDNVENQWQEFDMNQDGLISWDEYRNVTYGTYLDDPDPDDGFNYKQMMVRDERRFKMADKDGDLIATKEEFTAFLHPEEYDYMKDIVVQETMEDIDKNADGFIDLEEYIGDMYSHDGNTDEPEWVKTEREQFVEFRDKNRDGKMDKEETKDWILPSDYDHAEAEARHLVYESDQNKDGKLTKEEIVDKYDLFVGSQATDFGEALVRHDEF

SEQ ID NO: 39834 - protein, 323 aa, Homo sapiens
MKETDLIIMDLRQFLMCLSLCTAFALSKPTEKKDRVHHEPQLSDKVHNDAQSFDYDHDAFLGAEEAKTFDQLTPEESKERLGKIVSKIDGDKDGFVTVDELKDWIKFAQKRWIYEDVERQWKGHDLNEDGLVSWEEYKNATYGYVLDDPDPDDGFNYKQMMVRDERRFKMADKDGDLIATKEEFTAFLHPEEYDYMKDIVVQETMEDIDKNADGFIDLEEYIGDMYSHDGNTDEPEWVKTEREQFVEFRDKNRDGKMDKEETKDWILPSDYDHAEAEARHLVYESDQNKDGKLTKEEIVDKYDLFVGSQATDFGEALVRHDEF

SEQ ID NO: 39835 - protein, 147 aa, Homo sapiens
  VARIANT 1: note = MOD_RES - Any amino acid
XIATKEEFTAFLHPEEYDYMKDIVVQETMEDIDKNADGFIDLEEYIGDMYSHDGNTDEPEWVKTEREQFVEFRDKNRDGKMDKEETKDWILPSDYDHAEAEARHLVYESDQNKDGKLTKEEIVDKYDLFVGSQATDFGEALVRHDEF

SEQ ID NO: 39836 - protein, 224 aa, Homo sapiens
MDLRQFLMCLSLCTAFALSKPTEKKDRVHHEPQLSDKVHNDAQSFDYDHDAFLGAEEAKTFDQLTPEESKERLGKIVSKIDGDKDGFVTVDELKDWIKFAQKRWIYEDVERQWKGHDLNEDGLVSWEEYKNATYGYVLDDPDPDDGFNYKQMMVRDERRFKMADKDGDLIATKEEFTAFLHPEEYDYMKDIVVQETMEDIDKNADGFIDLEEYIGWQAYQGGDR

SEQ ID NO: 39837 - protein, 147 aa, Homo sapiens
MKETDLIIMDLRQFLMCLSLCTAFALSKPTEKKDRVHHEPQLSDKVHNDAQSFDYDHDAFLGAEEAKTFDQLTPEESKERLGKIVSKIDGDKDGFVTVDELKDWIKFAQKRWIYEDVERQWKGHDLNEDGLVSWEEYKNATYGYVLE

SEQ ID NO: 39838 - protein, 170 aa, Homo sapiens
MDLRQFLMCLSLCTAFALSKPTEKKDRVHHEPQLSDKVHNDAQSFDYDHDAFLGAEEAKTFDQLTPEESKERLGMIVDKIDADKDGFVTEGELKSWIKHAQKKYIYDNVENQWQEFDMNQDGLISWDEYRNVTYGTYLDDPDPDDGFNYKQMMVRDERRFKMADRARAVC

SEQ ID NO: 39839 - protein, 201 aa, Homo sapiens
MDLRQFLMCLSLCTAFALSKPTEKKDRVHHEPQLSDKVHNDAQSFDYDHDAFLGAEEAKTFDQLTPEESKERLGMIVDKIDADKDGFVTEGELKSWIKHAQKKYIYDNVENQWQEFDMNQDGLISWDEYRNVTYGTYLDDPDPDDGFNYKQMMVRDERRFKMADKDGDLIATKEEIVDKYDLFVGSQATDFGEALVRHDEF

SEQ ID NO: 39840 - protein, 265 aa, Homo sapiens
MDLRQFLMCLSLCTAFALSKPTEKKDRVHHEPQLSDKVHNDAQSFDYDHDAFLGAEEAKTFDQLTPEESKERLGKIVSKIDGDKDGFVTVDELKDWIKFAQKRWIYEDVERQWKGHDLNEDGLVSWEEYKNATYGYVLDDPDPDDGFNYKQMMVRDERRFKMADKDGDLIATKEEFTAFLHPEEYDYMKDIVVQETMEDIDKNADGFIDLEEYIGDMYSHDGNTDESDQNKDGKLTKEEIVDKYDLFVGSQATDFGEALVRHDEF

SEQ ID NO: 39841 - protein, 164 aa, Homo sapiens
MMVRDERRFKMADKDGDLIATKEEFTAFLHPEEYDYMKDIVVQETMEDIDKNADGFIDLEEYIGDMYSHDGNTDEPEWVKTEREQFVEFRDKNRDGKMDKEETKDWILPSDYDHAEAEARHLVYESDQNKDGKLTKEEIVDKYDLFVGSQATDFGEALVRHDEF

SEQ ID NO: 39842 - protein, 323 aa, Homo sapiens
MKETDLIIMDLRQFLMCLSLCTAFALSKPTEKKDRVHHEPQLSDKVHNDAQSFDYDHDAFLGAEEAKTFDQLTPEESKERLGMIVDKIDADKDGFVTEGELKSWIKHAQKKYIYDNVENQWQEFDMNQDGLISWDEYRNVTYGTYLDDPDPDDGFNYKQMMVRDERRFKMADKDGDLIATKEEFTAFLHPEEYDYMKDIVVQETMEDIDKNADGFIDLEEYIGDMYSHDGNTDEPEWVKTEREQFVEFRDKNRDGKMDKEETKDWILPSDYDHAEAEARHLVYESDQNKDGKLTKEEIVDKYDLFVGSQATDFGEALVRHDEF

SEQ ID NO: 39843 - protein, 371 aa, Homo sapiens
MELELDAGDQDLLAFLLEESGDLGTAPDEAVRAPLDWALPLSEVPSDWEVDDLLCSLLSPPASLNILSSSNPCLVHHDHTYSLPRETVSMDLESESCRKEGTQMTPQHMEELAEQEIARLVLTDEEKSLLEKEGLILPETLPLTKTEEQILKRVRRKIRNKRSAQESRRKKKVYVGGLESRVLKYTAQNMELQNKVQLLEEQNLSLLDQLRKLQAMVIEISNKTSSSSTCILVLLVSFCLLLVPAMYSSDTRGSLPAEHGVLSRQLRALPSEDPYQLELPALQSEVPKDSTHQWLDGSDCVLQAPGNTSCLLHYMPQAPSAEPPLEWPFPDLFSEPLCRGPILPLQANLTRKGGWLPTGSPSVILQDRYSG

SEQ ID NO: 39844 - protein, 461 aa, Homo sapiens
MNTDLAAGKMASAACSMDPIDSFELLDLLFDRQDGILRHVELGEGWGHVKDQQVLPNPDSDDFLSSILGSGDSLPSSPLWSPEGSDSGISEDLPSDPQDTPPRSGPATSPAGCHPAQPGKGPCLSYHPGNSCSTTTPGPVIQVPEASVTIDLEMWSPGGRICAEKPADPVDLSPRCNLTVKDLLLSGSSGDLQQHHLGASYLLRPGAGHCQELVLTEDEKKLLAKEGITLPTQLPLTKYEERVLKKIRRKIRNKQSAQESRKKKKEYIDGLETRMSACTAQNQELQRKVLHLEKQNLSLLEQLKKLQAIVVQSTSKSAQTGTCVAVLLLSFALIILPSISPFGPNKTESPGDFAPVRVFSRTLHNDAASRVAADAVPGSEAPGPRPEADTTREESPGSPGADWGFQDTANLTNSTEELDNATLVLRNATEGLGQVALLDWVAPGPSTGSGRAGLEAAGDEL

SEQ ID NO: 39845 - protein, 299 aa, Homo sapiens
MASAACSMDPIDSFELLDLLFDRQDGILRHVELGEGWGHVKDQVLPNPDSDDFLSSILGSGDSLPSSPLWSPEGSDSGISEDLPSDPQDTPPRSGPATSPAGCHPAQPGKGPCLSYHPGNSCSTTTPGPVIQQQHHLGASYLLRPGAGHCQELVLTEDEKKLLAKEGITLPTQLPLTKYEERVLKKIRRKIRNKQSAQESRKKKKEYIDGLETRSCCCPLPSSSSPPSALLAPTKPRALGTLRLYECSPELCTTMLPPAWLLMLCQAPRPQDPDPRLTQPEKSLQEAPGQTGASRTPRT

SEQ ID NO: 39846 - protein, 419 aa, Homo sapiens
MNTDLAAGKMASAACSMDPIDSFELLDLLFDRQDGILRHVELGEGWGHVKDQQVLPNPDSDDFLSSILGSGDSLPSSPLWSPEGSDSGISEDLPSDPQDTPPRSGPATSPAGCHPAQPGKGPCLSYHPGNSCSTTTPGPVIQVPEASVTIDLEMWSPGGRICAEKPADPVDLSPRCNLTVKDLLLSGSSGDLQQHHLGASYLLRPGAGHCQELVLTEDEKKLLAKEGITLPTQLPLTKYEERVLKKIRRKIRNKQSAQESRKKKKAIVVQSTSKSAQTGTCVAVLLLSFALIILPSISPFGPNKTESPGDFAPVRVFSRTLHNDAASRVAADAVPGSEAPGPRPEADTTREESPGSPGADWGFQDTANLTNSTEELDNATLVLRNATEGLGQVALLDWVAPGPSTGSGRAGLEAAGDEL

SEQ ID NO: 39847 - protein, 395 aa, Homo sapiens
MDLGIPDLLDAWLEPPEDIFSTGSVLELGLHCPPPEVPVTRLQEQGLQGWKSGGDRGCGLQESEPEDFLKLFIDPNEVYCSEASPGSDSGISEDPCHPDSPPAPRATSSPMLYEVVYEAGALERMQGETGPNVGLISIQLDQWSPAFMVPDSCMVSELPFDAHAHILPRAGTVAPVPCTTLLPCQTLFLTDEEKRLLGQEGVSLPSHLPLTKAEERVLKKVRRKIRNKQSAQDSRRRKKEYIDGLESRVAACSAQNQELQKKVQELERHNISLVAQLRQLQTLIAQTSNKAAQTSTCVLILLFSLALIILPSFSPFQSRPEAGSEDYQPHGVTSRNILTHKDVTENLETQVVESRLREPPGAKDANGSTRTLLEKMGGKPRPSGRIRSVLHADEM

SEQ ID NO: 39848 - protein, 375 aa, Homo sapiens
MDLGIPDLLDAWLEPPEDIFSTGSVLELGLHCPPPEVPGLQESEPEDFLKLFIDPNEVYCSEASPGSDSGISEDPCHPDSPPAPRATSSPMLYEVVYEAGALERMQGETGPNVGLISIQLDQWSPAFMVPDSCMVSELPFDAHAHILPRAGTVAPVPCTTLLPCQTLFLTDEEKRLLGQEGVSLPSHLPLTKAEERVLKKVRRKIRNKQSAQDSRRRKKEYIDGLESRVAACSAQNQELQKKVQELERHNISLVAQLRQLQTLIAQTSNKAAQTSTCVLILLFSLALIILPSFSPFQSRPEAGSEDYQPHGVTSRNILTHKDVTENLETQVVESRLREPPGAKDANGSTRTLLEKMGGKPRPSGRIRSVLHADEM

SEQ ID NO: 39849 - protein, 217 aa, Homo sapiens
MDLGIPDLLDAWLEPPEDIFSTGSVLELGLHCPPPEVPVTRLQEQGLQGWKSGGDRGCGLQESEPEDFLKLFIDPNEVYCSEASPGSDSGISEDPCHPDSPPAPRATSSPMLYEVVYEAGALERMQGETGPNVGLISIQLDQWSPAFMVPDSCMVSELPFDAHAHILPRAGTVAPVPCTTLLPCQTLFLTDEEKRLLGQEGVSLPSHLPLTKVTCFP

SEQ ID NO: 39850 - protein, 395 aa, Homo sapiens; identical to SEQ ID NO: 39847

SEQ ID NO: 39851 - protein, 395 aa, Homo sapiens; identical to SEQ ID NO: 39847

SEQ ID NO: 39852 - protein, 248 aa, Homo sapiens
MVPDSCMVSELPFDAHAHILPRAGTVAPVPCTTLLPCQTLFLTDEEKRLLGQEGVSLPSHLPLTKAEERVLKKVRRKIRNKQSAQDSRRRKKEYIDGLESRVAACSAQNQELQKKVQELERHNISLVAQLRQLQTLIAQTSNKAAQTSTCVLILLFSLALIILPSFSPFQSRPEAGSEDYQPHGVTSRNILTHKDVTENLETQVVESRLREPPGAKDANGSTRTLLEKMGGKPRPSGRIRSVLHADEM

SEQ ID NO: 39853 - protein, 182 aa, Homo sapiens
MDLGIPDLLDAWLEPPEDIFSTGSVLELGLHCPPPEVPVTRLQEQGLQGWKSGGDRGCGLQESEPEDFLKLFIDPNEVYCSEASPGSDSGISEDPCHPDSPPAPRATSSPMLYEVVYEAGALERMQGETGPNVGLISIQLDQWSPAFMVPDSCMVSELPFDAHAHILPRAGTVAPVPCTTLV

SEQ ID NO: 39854 - protein, 228 aa, Homo sapiens
MDLGIPDLLDAWLEPPEDIFSTGSVLELGLHCPPPEVPGLQESEPEDFLKLFIDPNEVYCSEASPGSDSGISEDPCHPDSPPAPRATSSPMLYEVVYEAGALERMQGETGPNVGLISIQLDQWSPAFMVPDSCMVSELPFDAHAHILPRAGTVAPVPCTTLLPCQTLFLTDEEKRLLGQEGVSLPSHLPLTKAEERVLKKVRRKIRNKQSAQDSRRRKKEYIDGLESR

SEQ ID NO: 39855 - protein, 348 aa, Homo sapiens
MSKCARKKYIKTNPRQMTMETVESQHDGSITASLTESKSAHVQTQTGQNSIPALAQVSVAGSGTRRGSPAVTLVQLPSGQTIHVQGVIQTPQPWVIQSSEIHTVQVAAIAETDESAESEGVIDSHKRREILSRRPSYRKILNELSSDVPGVPKIEEERSEEEGTPPSIATMAVPTSIYQTSTGQYIAIAQGGTIQISNPGSDGVQGLQALTMTNSGAPPPGATIVQYAAQSADGTQQFFVPGSQVVVQAATGDMPTYQIRAPTAALPQGVVMAASPGSLHSPQQLAEEATRKRELRLMKNREAARECRRKKKEYVKCLENRVAVLENQNKTLIEELKALKDLYCHKVE

SEQ ID NO: 39856 - protein, 299 aa, Homo sapiens
MSKCARKKYIKTNPRQMTMETVESQHDGSITASLTESKSAHVQTQTGQNSIPALAQVAAIAETDESAESEGVIDSHKRREILSRRPSYRKILNELSSDVPGVPKIEEERSEEEGTPPSIATMAVPTSIYQTSTGQYIAIAQGGTIQISNPGSDGVQGLQALTMTNSGAPPPGATIVQYAAQSADGTQQFFVPGSQVVVQAATGDMPTYQIRAPTAALPQGVVMAASPGSLHSPQQLAEEATRKRELRLMKNREAARECRRKKKEYVKCLENRVAVLENQNKTLIEELKALKDLYCHKVE

SEQ ID NO: 39857 - protein, 245 aa, Homo sapiens
MVAAIAETDESAESEGVIDSHKRREILSRRPSYRKILNELSSDVPGVPKIEEERSEEEGTPPSIATMAVPTSIYQTSTGQYIAIAQGGTIQISNPGSDGVQGLQALTMTNSGAPPPGATIVQYAAQSADGTQQFFVPGSQVVVQAATGDMPTYQIRAPTAALPQGVVMAASPGSLHSPQQLAEEATRKRELRLMKNREAAKECRRRKKEYVKCLESRVAVLEVQNKKLIEELETLKDICSPKTDY

SEQ ID NO: 39858 - protein, 95 aa, Homo sapiens
MPTYQIRAPTAALPQGVVMAASPGSLHSPQQLAEEATRKRELRLMKNREAARECRRKKKEYVKCLENRVAVLENQNKTLIEELKALKDLYCHKVE

SEQ ID NO: 39859 - protein, 300 aa, Homo sapiens
MSKCARKKYIKTNPRQMTMETVESQHDGSITASLTESKSAHVQTQTGQNSIPALAQVAAIAETDESAESEGVIDSHKRREILSRRPSYRKILNELSSDVPGVPKIEEERSEEEGTPPSIATMAVPTSIYQTSTGQYIAIAQGGTIQISNPGSDGVQGLQALTMTNSGAPPPGATIVQYAAQSADGTQQFFVPGSQVVVQAATGDMPTYQIRAPTAALPQGVVMAASPGSLHSPQQLAEEATRKRELRLMKNREAAKECRRRKKEYVKCLESRVAVLEVQNKKLIEELETLKDICSPKTDY

SEQ ID NO: 39860 - protein, 221 aa, Homo sapiens
MTMETVESQHDGSITASLTESKSAHVQTQTGQNSIPALAQVAAIAETDESAESEGVIDSHKRREILSRRPSYRKILNELSSDVPGVPKIEEERSEEEGTPPSIATMAVPTSIYQTSTGQYTATGDMPTYQIRAPTAALPQGVVMAASPGSLHSPQQLAEEATRKRELRLMKNREAAKECRRRKKEYVKCLESRVAVLEVQNKKLIEELETLKDICSPKTDY

SEQ ID NO: 39861 - protein, 248 aa, Homo sapiens
MSKCARKKYIKTNPRQMTMETVESQHDGSITASLTESKSAHVQTQTGQNSIPALAQVAAIAETDESAESEGVIDSHKRREILSRRPSYRKILNELSSDVPGVPKIEEERSEEEGTPPSIATMAVPTSIYQTSTGQYNEETELAPSHMAAATGDMPTYQIRAPTAALPQGVVMAASPGSLHSPQQLAEEATRKRELRLMKNREAARECRRKKKEYVKCLENRVAVLENQNKTLIEELKALKDLYCHKVE

SEQ ID NO: 39862 - protein, 108 aa, Homo sapiens
MAVTGDDTAATGDMPTYQIRAPTAALPQGVVMAASPGSLHSPQQLAEEATRKRELRLMKNREAARECRRKKKEYVKCLENRVAVLENQNKTLIEELKALKDLYCHKVE

SEQ ID NO: 39863 - protein, 270 aa, Homo sapiens
MWWHQHNLCFRRPIEEDYSSGDVEEKVAAIAETDESAESEGVIDSHKRREILSRRPSYRKILNELSSDVPGVPKIEEERSEEEGTPPSIATMAVPTSIYQTSTGQYIAIAQGGTIQISNPGSDGVQGLQALTMTNSGAPPPGATIVQYAAQSADGTQQFFVPGSQVVVQAATGDMPTYQIRAPTAALPQGVVMAASPGSLHSPQQLAEEATRKRELRLMKNREAAKECRRRKKEYVKCLESRVAVLEVQNKKLIEELETLKDICSPKTDY

SEQ ID NO: 39864 - protein, 332 aa, Homo sapiens
MTMETVESQHDGSITASLTESKSAHVQTQTGQNSIPALAQVSVAGSGTRRGSPAVTLVQLPSGQTIHVQGVIQTPQPWVIQSSEIHTVQVAAIAETDESAESEGVIDSHKRREILSRRPSYRKILNELSSDVPGVPKIEEERSEEEGTPPSIATMAVPTSIYQTSTGQYIAIAQGGTIQISNPGSDGVQGLQALTMTNSGAPPPGATIVQYAAQSADGTQQFFVPGSQVVVQAATGDMPTYQIRAPTAALPQGVVMAASPGSLHSPQQLAEEATRKRELRLMKNREAARECRRKKKEYVKCLENRVAVLENQNKTLIEELKALKDLYCHKVE

SEQ ID NO: 39865 - protein, 333 aa, Homo sapiens
MTMETVESQHDGSITASLTESKSAHVQTQTGQNSIPALAQVSVAGSGTRRGSPAVTLVQLPSGQTIHVQGVIQTPQPWVIQSSEIHTVQVAAIAETDESAESEGVIDSHKRREILSRRPSYRKILNELSSDVPGVPKIEEERSEEEGTPPSIATMAVPTSIYQTSTGQYIAIAQGGTIQISNPGSDGVQGLQALTMTNSGAPPPGATIVQYAAQSADGTQQFFVPGSQVVVQAATGDMPTYQIRAPTAALPQGVVMAASPGSLHSPQQLAEEATRKRELRLMKNREAAKECRRRKKEYVKCLESRVAVLEVQNKKLIEELETLKDICSPKTDY

SEQ ID NO: 39866 - protein, 137 aa, Homo sapiens
MTMETVESQHDGSITASLTESKSAHVQTQTGQNSIPALAQVAAIAETDESAESEGVIDSHKRREILSRRPSYRKILNELSSDVPGVPKIEEERSEEEGTPPSIATMAVPTSIYQTSTGQYSMYAAIRYDTVLALSLL

SEQ ID NO: 39867 - protein, 221 aa, Homo sapiens; identical to SEQ ID NO: 39860

SEQ ID NO: 39868 - protein, 236 aa, Homo sapiens
MSKCARKKYIKTNPRQMTMETVESQHDGSITASLTESKSAHVQTQTGQNSIPALAQVAAIAETDESAESEGVIDSHKRREILSRRPSYRKILNELSSDVPGVPKIEEERSEEEGTPPSIATMAVPTSIYQTSTGQYTATGDMPTYQIRAPTAALPQGVVMAASPGSLHSPQQLAEEATRKRELRLMKNREAARECRRKKKEYVKCLENRVAVLENQNKTLIEELKALKDLYCHKVE

SEQ ID NO: 39869 - protein, 282 aa, Homo sapiens
MWWHQHNLCFRRPIEEDYSSGDVEEKVAAIAETDESAESEGVIDSHKRREILSRRPSYRKILNELSSDVPGVPKIEEERSEEEGTPPSIATMAVPTSIYQTSTGQYIAIAQGGTIQISNPGSDGVQGLQALTMTNSGAPPPGATIVQYAAQSADGTQQFFVPGSQVVVQDEETELAPSHMAAATGDMPTYQIRAPTAALPQGVVMAASPGSLHSPQQLAEEATRKRELRLMKNREAAKECRRRKKEYVKCLESRVAVLEVQNKKLIEELETLKDICSPKTDY

SEQ ID NO: 39870 - protein, 361 aa, Homo sapiens
MSKCARKKYIKTNPRQMTMETVESQHDGSITASLTESKSAHVQTQTGQNSIPALAQVSVAGSGTRRGSPAVTLVQLPSGQTIHVQGVIQTPQPWVIQSSEIHTVQVAAIAETDESAESEGVIDSHKRREILSRRPSYRKILNELSSDVPGVPKIEEERSEEEGTPPSIATMAVPTSIYQTSTGQYIAIAQGGTIQISNPGSDGVQGLQALTMTNSGAPPPGATIVQYAAQSADGTQQFFVPGSQVVVQDEETELAPSHMAAATGDMPTYQIRAPTAALPQGVVMAASPGSLHSPQQLAEEATRKRELRLMKNREAAKECRRRKKEYVKCLESRVAVLEVQNKKLIEELETLKDICSPKTDY

SEQ ID NO: 39871 - protein, 157 aa, Homo sapiens
MSKCARKKYIKTNPRQMTMETVESQHDGSITASLTESKSAHVQTQTGQNSIPALAQVAAIAETDESAESEGVIDSHKRREILSRRPSYRKILNELSSDVPGVPKIEEERSEEEGTPPSIATMAVPTSIYQTSTGQYIAIAQGGTIQISNPGSDGVQG

SEQ ID NO: 39872 - protein, 345 aa, Homo sapiens
MTMETVESQHDGSITASLTESKSAHVQTQTGQNSIPALAQVSVAGSGTRRGSPAVTLVQLPSGQTIHVQGVIQTPQPWVIQSSEIHTVQVAAIAETDESAESEGVIDSHKRREILSRRPSYRKILNELSSDVPGVPKIEEERSEEEGTPPSIATMAVPTSIYQTSTGQYIAIAQGGTIQISNPGSDGVQGLQALTMTNSGAPPPGATIVQYAAQSADGTQQFFVPGSQVVVQDEETELAPSHMAAATGDMPTYQIRAPTAALPQGVVMAASPGSLHSPQQLAEEATRKRELRLMKNREAAKECRRRKKEYVKCLESRVAVLEVQNKKLIEELETLKDICSPKTDY

SEQ ID NO: 39873 - protein, 285 aa, Homo sapiens
MSKCARKKYIKTNPRQMTMETVESQHDGSITASLTESKSAHVQTQTGQNSIPALAQVSVAGSGTRRGSPAVTLVQLPSGQTIHVQGVIQTPQPWVIQSSEIHTVQVAAIAETDESAESEGVIDSHKRREILSRRPSYRKILNELSSDVPGVPKIEEERSEEEGTPPSIATMAVPTSIYQTSTGQYTATGDMPTYQIRAPTAALPQGVVMAASPGSLHSPQQLAEEATRKRELRLMKNREAARECRRKKKEYVKCLENRVAVLENQNKTLIEELKALKDLYCHKVE

SEQ ID NO: 39874 - protein, 95 aa, Homo sapiens; identical to SEQ ID NO: 39858

SEQ ID NO: 39875 - protein, 269 aa, Homo sapiens
MTMETVESQHDGSITASLTESKSAHVQTQTGQNSIPALAQVSVAGSGTRRGSPAVTLVQLPSGQTIHVQGVIQTPQPWVIQSSEIHTVQVAAIAETDESAESEGVIDSHKRREILSRRPSYRKILNELSSDVPGVPKIEEERSEEEGTPPSIATMAVPTSIYQTSTGQYTATGDMPTYQIRAPTAALPQGVVMAASPGSLHSPQQLAEEATRKRELRLMKNREAARECRRKKKEYVKCLENRVAVLENQNKTLIEELKALKDLYCHKVE

SEQ ID NO: 39876 - protein, 194 aa, Homo sapiens
MVAAIAETDESAESEGVIDSHKRREILSRRPSYRKILNELSSDVPGVPKIEEERSEEEGTPPSIATMAVPTSIYQTSTGQYNEETELAPSHMAAATGDMPTYQIRAPTAALPQGVVMAASPGSLHSPQQLAEEATRKRELRLMKNREAAKECRRRKKEYVKCLESRVAVLEVQNKKLIEELETLKDICSPKTDY

SEQ ID NO: 39877 - protein, 120 aa, Homo sapiens
MAVTGDDTDEETELAPSHMAAATGDMPTYQIRAPTAALPQGVVMAASPGSLHSPQQLAEEATRKRELRLMKNREAARECRRKKKEYVKCLENRVAVLENQNKTLIEELKALKDLYCHKVE

SEQ ID NO: 39878 - protein, 96 aa, Homo sapiens
MPTYQIRAPTAALPQGVVMAASPGSLHSPQQLAEEATRKRELRLMKNREAAKECRRRKKEYVKCLESRVAVLEVQNKKLIEELETLKDICSPKTDY

SEQ ID NO: 39879 - protein, 112 aa, Homo sapiens
MNRTQELSGQLSAATGDMPTYQIRAPTAALPQGVVMAASPGSLHSPQQLAEEATRKRELRLMKNREAARECRRKKKEYVKCLENRVAVLENQNKTLIEELKALKDLYCHKVE

SEQ ID NO: 39880 - protein, 312 aa, Homo sapiens
MSKCARKKYIKTNPRQMTMETVESQHDGSITASLTESKSAHVQTQTGQNSIPALAQVAAIAETDESAESEGVIDSHKRREILSRRPSYRKILNELSSDVPGVPKIEEERSEEEGTPPSIATMAVPTSIYQTSTGQYIAIAQGGTIQISNPGSDGVQGLQALTMTNSGAPPPGATIVQYAAQSADGTQQFFVPGSQVVVQDEETELAPSHMAAATGDMPTYQIRAPTAALPQGVVMAASPGSLHSPQQLAEEATRKRELRLMKNREAAKECRRRKKEYVKCLESRVAVLEVQNKKLIEELETLKDICSPKTDY

SEQ ID NO: 39881 - protein, 219 aa, Homo sapiens
MWWHQHNLCFRRPIEEDYSSGDVEEKVAAIAETDESAESEGVIDSHKRREILSRRPSYRKILNELSSDVPGVPKIEEERSEEEGTPPSIATMAVPTSIYQTSTGQYNEETELAPSHMAAATGDMPTYQIRAPTAALPQGVVMAASPGSLHSPQQLAEEATRKRELRLMKNREAAKECRRRKKEYVKCLESRVAVLEVQNKKLIEELETLKDICSPKTDY

SEQ ID NO: 39882 - protein, 121 aa, Homo sapiens
MAVTGDDTDEETELAPSHMAAATGDMPTYQIRAPTAALPQGVVMAASPGSLHSPQQLAEEATRKRELRLMKNREAAKECRRRKKEYVKCLESRVAVLEVQNKKLIEELETLKDICSPKTDY

SEQ ID NO: 39883 - protein, 109 aa, Homo sapiens
MAVTGDDTAATGDMPTYQIRAPTAALPQGVVMAASPGSLHSPQQLAEEATRKRELRLMKNREAAKECRRRKKEYVKCLESRVAVLEVQNKKLIEELETLKDICSPKTDY

SEQ ID NO: 39884 - protein, 102 aa, Homo sapiens
MAAATGDMPTYQIRAPTAALPQGVVMAASPGSLHSPQQLAEEATRKRELRLMKNREAARECRRKKKEYVKCLENRVAVLENQNKTLIEELKALKDLYCHKVE

SEQ ID NO: 39885 - protein, 137 aa, Homo sapiens; identical to SEQ ID NO: 39866

SEQ ID NO: 39886 - protein, 205 aa, Homo sapiens
MTMETVESQHDGSITASLTESKSAHVQTQTGQNSIPALAQVVAIAQGGTIQISNPGSDGVQGLQALTMTNSGAPPPGATIVQYAAQSADGTQQFFVPGSQVVVQAATGDMPTYQIRAPTAALPQGVVMAASPGSLHSPQQLAEEATRKRELRLMKNREAAKECRRRKKEYVKCLESRVAVLEVQNKKLIEELETLKDICSPKTDY

SEQ ID NO: 39887 - protein, 270 aa, Homo sapiens
MTMETVESQHDGSITASLTESKSAHVQTQTGQNSIPALAQVSVAGSGTRRGSPAVTLVQLPSGQTIHVQGVIQTPQPWVIQSSEIHTVQVAAIAETDESAESEGVIDSHKRREILSRRPSYRKILNELSSDVPGVPKIEEERSEEEGTPPSIATMAVPTSIYQTSTGQYTATGDMPTYQIRAPTAALPQGVVMAASPGSLHSPQQLAEEATRKRELRLMKNREAAKECRRRKKEYVKCLESRVAVLEVQNKKLIEELETLKDICSPKTDY

SEQ ID NO: 39888 - protein, 113 aa, Homo sapiens
MNRTQELSGQLSAATGDMPTYQIRAPTAALPQGVVMAASPGSLHSPQQLAEEATRKRELRLMKNREAAKECRRRKKEYVKCLESRVAVLEVQNKKLIEELETLKDICSPKTDY

SEQ ID NO: 39889 - protein, 154 aa, Homo sapiens
MTMETVESQHDGSITASLTESKSAHVQTQTGQNSIPALAQVDEETELAPSHMAAATGDMPTYQIRAPTAALPQGVVMAASPGSLHSPQQLAEEATRKRELRLMKNREAAKECRRRKKEYVKCLESRVAVLEVQNKKLIEELETLKDICSPKTDY

SEQ ID NO: 39890 - protein, 112 aa, Homo sapiens
MSAEVPEAASAEEQKEMEDKVTSPEKAEEAKLKARYPHLGQKPGGSDFLRKRLQKGQKYFDSGDYNMAKAKMKNKQLPTAAPDKTEVTGDHIPTPQDLPQRKPSLVASKLAG

SEQ ID NO: 39891 - protein, 641 aa, Homo sapiens
MTEKPEFQSQVYNYAKDNNIKQDSFKEENPMETSVSANTDQLGNEYFRQPPPRSPPLIHCSGEMLKFTEKSLAKSIAKESALNPSQPPSFLCKTAVPSKEIQNYGEIPEMSVSYEKEVTAEGVERPEIVSTWSSAGISWRSEACRENCEMPDWEQSAESLQPVQEDMALNEVLQKLKHTNRKQEVRIQELQCSNLYLEKRVKELQMKITKQQVFIDVINKLKENVEELIEDKYKIILEKNDTKKTLQNLEEVLANTQKHLQESRNDKEMLQLQFKKIKANYVCLQERYMTEMQQKNKSVSQYLEMDKTLSKKEEEVERLQQLKKELEKATASALDLLKREKEAQEQEFLSLQEEFQKLEKENLEERQKLKSRLEKLLTQVRNLQFMSENERTKNIKLQQQINEVKNENAKLKQQVARSEEQNYVPKFETAQLKDQLEEVLKSDITKDTKTTHSNLLPDCSPCEERLNPADIKRASQLASKMHSLLALMVGLLTCQDIINSDAEHFKESEKVSDIMLQKLKSLHLKKKTLDKEVIDCDSDEAKSIRDVPTLLGAKLDKYHSLNEELDFLVTSYEEIIECADQRLAISHSQIAHLEERNKHLEDLIRKPREKARKPRSKSLENHPKSMTMMPALFKENRNDLD

SEQ ID NO: 39892 - protein, 824 aa, Homo sapiens
MNKDYQKFWSSPSDPVHFEVDTSHEKVESMSESDTMNVSNLSQGVMLSHSPICMETTGTTCDLPQNEIKNFERENEYESTLCEDAYGTLDNLLNDNNIENYSTNALIQPVDTISISSLRQFETVCKFHWVEAFDDEMTEKPEFQSQVYNYAKDNNIKQDSFKEENPMETSVSANTDQLGNEYFRQPPPRSPPLIHCSGEMLKFTEKSLAKSIAKESALNPSQPPSFLCKTAVPSKEIQNYGEIPEMSVSYEKEVTAEGVERPEIVSTWSSAGISWRSEACRENCEMPDWEQSAESLQPVQEDMALNEVLQKLKHTNRKQEVRIQELQCSNLYLEKRVKELQMKITKQQVFIDVINKLKENVEELIEDKYKIILEKNDTKKTLQNLEEVLANTQKHLQESRNDKEMLQLQFKKIKANYVCLQERYMTEMQQKNKSVSQYLEMDKTLSKKEEEVERLQQLKKELEKATASALDLLKREKEAQEQEFLSLQEEFQKLEKENLEERQKLKSRLEKLLTQVRNLQFMSENERTKNIKLQQQINEVKNENAKLKQQVARSEEQNYVPKFETAQLKDQLEEVLKSDITKDTKTTHSNLLPDCSPCEERLNPADIKRASQLASKMHSLLALMVGLLTCQDIINSDAEHFKESEKVSDIMLQKLKSLHLKKKTLDKELLKHKDRITTFRELIAKEKAFQDHAIKVIDCDSDEAKSIRDVPTLLGAKLDKYHSLNEELDFLVTSYEEIIECADQRLAISHSQIAHLEERNKHLEDLIRKPREKARKPRSKSLENHPKSMTMLAYNLYIFIGYRLGAVADACNPSTLGGRGGWIT

SEQ ID NO: 39893 - protein, 777 aa, Homo sapiens
MNKDYQKFWSSPSDPVHFEVDTSHEKVESMSESDTMNVSNLSQGVMLSHSPICMETTGTTCDLPQNEIKNFERENEYESTLCEDAYGTLDNLLNDNNIENYSTNALIQPVDTISISSLRQFETVCKFHWVEAFDDEMTEKPEFQSQVYNYAKDNNIKQDSFKEENPMETSVSANTDQLGNEYFRQPPPRSPPLIHCSGEMLKFTEKSLAKSIAKESALNPSQPPSFLCKTAVPSKEIQNYGEIPEMSVSYEKEVTAEGVERPEIVSTWSSAGISWRSEACRENCEMPDWEQSAESLQPVQEDMALNEVLQKLKHTNRKQEVRIQELQCSNLYLEKRVKELQMKITKQQVFIDVINKLKENVEELIEDKYKIILEKNDTKKTLQNLEEVLANTQKHLQESRNDKEMLQLQFKKIKANYVCLQERYMTEMQQKNKSVSQYLEMDKTLSKKEEEVERLQQLKKELEKATASALDLLKREKEAQEQEFLSLQEEFQKLEKENLEERQKLKSRLEKLLTQVRNLQFMSENERTKNIKLQQQINEVKNENAKLKQQVARSEEQNYVPKFETAQLKDQLEEVLKSDITKDTKTTHSNLLPDCSPCEERLNPADIKRASQLASKMHSLLALMVGLLTCQDIINSDAEHFKESEKVSDIMLQKLKSLHLKKKTLDKEVIDCDSDEAKSIRDVPTLLGAKLDKYHSLNEELDFLVTSYEEIIECADQRLAISHSQIAHLEERNKHLEDLIRKPREKARKPRSKSLENHPKSMTMMPALFKENRNDLD

SEQ ID NO: 39894 - protein, 700 aa, Homo sapiens
MNKDYQKFWSSPSDPVHFEVDTSHEKVESMSESDTMNVSNLSQGVMLSHSPICMETTGTTCDLPQNEIKNFERENEYESTLCEDAYGTLDNLLNDNNIENYSTNALIQPVDTISISSLRQFETVCKFHWVEAFDDEMTEKPEFQSQVYNYAKDNNIKQDSFKEENPMETSVSANTDQLGNEYFRQPPPRSPPLIHCSGEMLKFTEKSLAKSIAKESALNPSQPPSFLCKTAVPSKEIQNYGEIPEMSVSYEKEVTAEGVERPEIVSTWSSAGISWRSEACRENCEMPDWEQSAESLQPVQEDMALNEVLQKLKHTNRKQEVRIQELQCSNLYLEKRVKELQMKITKQQVFIDVINKLKENVEELIEDKYKIILEKNDTKKTLQNLEEVLANTQKHLQESRNDKEMLQLQFKKIKANYVCLQERYMTEMQQKNKSVSQYLEMDKTLSKKEEEVERLQQLKKELEKATASALDLLKREKEAQEQEFLSLQEEFQKLEKENLEERQKLKSRLEKLLTQVRNLQFMSENERTKNIKLQQQINEVKNENAKLKQQVARSEEQNYVPKFETAQLKDQLEEVLKSDITKDTKTTHSNLLPDCSPCEERLNPADIKRASQLASKMHSLLALMVGLLTCQDIINSDAEHFKESEKVSDIMLQKLKSLHLKKKTLDKELLKHKDRITTFRELIAKEKAFQDHAIKVFQGV

SEQ ID NO: 39895 - protein, 839 aa, Homo sapiens
MNKDYQKFWSSPSDPVHFEVDTSHEKVESMSESDTMNVSNLSQGVMLSHSPICMETTGTTCDLPQNEIKNFERENEYESTLCEDAYGTLDNLLNDNNIENYSTNALIQPVDTISISSLRQFETVCKFHWVEAFDDEMTEKPEFQSQVYNYAKDNNIKQDSFKEENPMETSVSANTDQLGNEYFRQPPPRSPPLIHCSGEMLKFTEKSLAKSIAKESALNPSQPPSFLCKTAVPSKEIQNYGEIPEMSVSYEKEVTAEGVERPEIVSTWSSAGISWRSEACRENCEMPDWEQSAESLQPVQEDMALNEVLQKLKHTNRKQEVRIQELQCSNLYLEKRVKELQMKITKQQVFIDVINKLKENVEELIEDKYKIILEKNDTKKTLQNLEEVLANTQKHLQESRNDKEMLQLQFKKIKANYVCLQERYMTEMQQKNKSVSQYLEMDKTLSKKEEEVERLQQLKKELEKATASALDLLKREKEAQEQEFLSLQEEFQKLEKENLEERQKLKSRLEKLLTQVRNLQFMSENERTKNIKLQQQINEVKNENAKLKQQVARSEEQNYVPKFETAQLKDQLEEVLKSDITKDTKTTHSNLLPDCSPCEERLNPADIKRASQLASKMHSLLALMVGLLTCQDIINSDAEHFKESEKVSDIMLQKLKSLHLKKKTLDKELLKHKDRITTFRELIAKEKAFQDHAIKVIDCDSDEAKSIRDVPTLLGAKLDKYHSLNEELDFLITKLGHLLESKENHCNRLIEENDKYQRHLGNLIKKVTSYEEIIECADQRLAISHSQIAHLEERNKHLEDLIRKPREKARKPRSKSLENHPKSMTMMPALFKENRNDLD

SEQ ID NO: 39896 - protein, 703 aa, Homo sapiens
MADRRRQRASQDTEDEESGASGSDSGGSPLRGGGSCSGSAGGGGSGSLPSQRGGRTGALHLRRVESGGAKSAEESECESEDGIEGDAVLSDYESAEDSEGEEGEYSEEENSKVELKSEANDAVNSSTKEEKGEEKPDTKSTVTGERQSGDGQESTEPVENKVGKKGPKHLDDDEDRKNPAYIPRKGLFFEHDLRGQTQEEEVRPKGRQRKLWKDEGRWEHDKFREDEQAPKSRQELIALYGYDIRSAHNPDDIKPRRIRKPRYGSPPQRDPNWNGERLNKSHRHQGLGGTLPPRTFINRNAAGTGRMSAPRNYSRSGGFKEGRAGFRPVEAGGQHGGRSGETVKHEISYRSRRLEQTSVRDPSPEADAPVLGSPEKEEAASEPPAAAPDAAPPPPDRPIEKKSYSRARRTRTKVGDAVKLAEEVPPPPEGLIPAPPVPETTPTPPTKTGTWEAPVDSSTSGLEQDVAQLNIAEQNWSPGQPSFLQPRELRGMPNHIHMGAGPPPQFNRMEEMGVQGGRAKRYSSQRQRPVPEPPAPPVHISIMEGHYYDPLQFQGPIYTHGDSPAPLPPQGMLVQPGMNLPHPGLHPHQTPAPLPNPGLYPPPVSMSPGQPPPQQLLAPTYFSAPGVMNFGNPSYPYAPGALPPPPPPHLYPNTQAPSQVYGGVTYYNPAQQQVQPKPSPPRRTPQPVTIKPPPPEVVSRGSS

SEQ ID NO: 39897 - protein, 703 aa, Homo sapiens; identical to SEQ ID NO: 39896

SEQ ID NO: 39898 - protein, 641 aa, Homo sapiens
MADRRRQRASQDTEDEESGASGSDSGGSPLRGGGSCSGSAGGGGSGSLPSQRGGRTGALHLRRVESGGAKSAEESECESEDGIEGDAVLSDYESAEDSEGEEGEYSEEENSKVELKSEANDAVNSSTKEEKGEEKPDTKSTVTGERQSGDGQESTEPVENKVGKKGPKHLDDDEDRKNPAYIPRKGLFFEHDLRGQTQEEEVRPKGRQRKLWKDEGRWEHDKFREDEQAPKSRQELIALYGYDIRSAHNPDDIKPRRIRKPRYGSPPQRDPNWNGERLNKSHRHQGLGGTLPPRTFINRNAAGTGRMSAPRNYSRSGGFKEGRAGFRPVEAGGQHGGRSGETVKHEISYRSRRLEQTSVRDPSPEADAPVLGSPEKEEAASEPPAAAPDAAPPPPDRPIEKKSYSRARRTRTKVGDAVKLAEEVPPPPEGLIPAPPVPETTPTPPTKTGTWEAPVDSSTSGLEQDVAQLNIAEQNWSPGQPSFLQPRELRGMPNHIHMGAGPPPQFNRMEEMGVQGGRAKRYSSQRQRPVPEPPAPPVHISIMEGHYYDPLQFQGPIYTHGDSPAPLPPQGMLVQPGMNLPHPGLHPHQTPACPDSQTLRHCESCLCWSTVFSCKDFSMCGGVFCYCFKGCPFVISIVTWR

SEQ ID NO: 39899 - protein, 180 aa, Homo sapiens
MQAEGRGTGGSTGDADGPGGPGIPDGPGGNAGGPGEAGATGGRGPRGAGAARASGPGGGAPRGPHGGAASGLNGCCRCGARGPESRLLEFYLAMPFATPMEAELARRSLAQDAPPLPVPGVLLKEFTVSGNILTIRLTAADHRQLQLSISSCLQQLSLLMWITQCFLPVFLAQPPSGQRR

SEQ ID NO: 39900 - protein, 189 aa, Homo sapiens
MTDKTEKVAVDPETVFKRPRECDSPSYQKRQRMALLARKQGAGDSLIAGSAMSKAKKLMTGHAIPPSQLDSQIDDFTGFSKDRMMQKPGSNAPVGGNVTSSFSGDDLECRETASSPKSQREINADIKRKLVKELRCVGQKYEKIFEMLEGVQGPTAVRKRFFESIIKEAARCMRRDFVKHLKKKLKRMI

SEQ ID NO: 39901 - protein, 189 aa, Homo sapiens
MTDKTEKVAVDPETVFKRPRECDSPSYQKRQRMALLARKQGAGDSLIAGSAMSKEKKLMTGHAIPPSQLDSQIDDFTGFSKDRMMQKPGSNAPVGGNVTSSFSGDDLECRETASSPKSQQEINADIKRKLVKELRCVGQKYEKIFEMLEGVQGPTAVRKRFFESIIKEAARCMRRDFVKHLKKKLKRMI

SEQ ID NO: 39902 - protein, 189 aa, Homo sapiens; identical to SEQ ID NO: 39901

SEQ ID NO: 39903 - protein, 189 aa, Homo sapiens
MTDKTEKVAVDPETVFKRPRECDSPSYQKRQRMALLARKQGAGDSLIAGSAMSKEKKLMTGHAIPPSQLDSQIDDFTGFSKDRMMQKPGSNAPVGGNVTSSFSGDDLECRETASSPKSQREINADIKRKLVKELRCVGQKYEKIFEMLEGVQGPTAVRKRFFESIIKEAARCMRRDFVKHLKKKLKRMI

SEQ ID NO: 39904 - protein, 189 aa, Homo sapiens; identical to SEQ ID NO: 39903

SEQ ID NO: 39905 - protein, 189 aa, Homo sapiens; identical to SEQ ID NO: 39901

SEQ ID NO: 39906 - protein, 189 aa, Homo sapiens
MTDKTEKVAVDPETVFKRPRECDSPSYQKRQRMALLARKQGAGDSLIAGSAMSKAKKLMTGHAIPPSQLDSQIDDFTGFSKDRMMQKPGSNAPVGGNVTSSFSGDDLECRETASSPKSQQEINADIKRKLVKELRCVGQKYEKIFEMLEGVQGPTAVRKRFFESIIKEAARCMRRDFVKHLKKKLKRMI

SEQ ID NO: 39907 - protein, 189 aa, Homo sapiens; identical to SEQ ID NO: 39906

SEQ ID NO: 39908 - protein, 189 aa, Homo sapiens
MTDKTEKVAVDPETVFKRPRECDSPSYQKRQRMALLARKQGAGDSLIAGSAMSKEKKLMTGHAIPPSQLDSQIDDFTGFSKDGMMQKPGSNAPVGGNVTSNFSGDDLECRGIASSPKSQQEINADIKCQVVKEIRCLGRKYEKIFEMLEGVQGPTAVRKRFFESIIKEAARCMRRDFVKHLKKKLKRMI

SEQ ID NO: 39909 - protein, 189 aa, Homo sapiens; identical to SEQ ID NO: 39908

SEQ ID NO: 39910 - protein, 189 aa, Homo sapiens; identical to SEQ ID NO: 39906

SEQ ID NO: 39911 - protein, 189 aa, Homo sapiens; identical to SEQ ID NO: 39906

SEQ ID NO: 39912 - protein, 288 aa, Homo sapiens
MSATGDRHPTQGDQEAPVSQEGAQAEAAGAGNQEGGDSGPDSSDVVPAAEVVGVAGPVEGLGEEEGEQAAGLAAVPRGGSAEEDSDIGPATEEEEEEEGNEAANFDLAVVARRYPASGIHFVLLDMVHSLLHRLSHNDHILIENRQLSRLMVGPHAAARNLWGNLPPLLLPQRLGAGAAARAGEGLGLIQEAASVPEPAVPADLAEMAREPAEEAAEEKLSEEATEEPDAEEPATEEPTAQEATAPEEVTKSQPEKWDEEAQDAAGEEEKEQEKEKDAENKVKNSKGT

SEQ ID NO: 39913 - protein, 288 aa, Homo sapiens; identical to SEQ ID NO: 39912

SEQ ID NO: 39914 - protein, 288 aa, Homo sapiens; identical to SEQ ID NO: 39912

SEQ ID NO: 39915 - protein, 288 aa, Homo sapiens; identical to SEQ ID NO: 39912

SEQ ID NO: 39916 - protein, 288 aa, Homo sapiens; identical to SEQ ID NO: 39912

SEQ ID NO: 39917 - protein, 288 aa, Homo sapiens; identical to SEQ ID NO: 39912

SEQ ID NO: 39918 - protein, 288 aa, Homo sapiens; identical to SEQ ID NO: 39912

SEQ ID NO: 39919 - protein, 288 aa, Homo sapiens; identical to SEQ ID NO: 39912

SEQ ID NO: 39920 - protein, 288 aa, Homo sapiens; identical to SEQ ID NO: 39912

SEQ ID NO: 39921 - protein, 288 aa, Homo sapiens; identical to SEQ ID NO: 39912

SEQ ID NO: 39922 - protein, 288 aa, Homo sapiens; identical to SEQ ID NO: 39912

SEQ ID NO: 39923 - protein, 288 aa, Homo sapiens; identical to SEQ ID NO: 39912

SEQ ID NO: 39924 - protein, 288 aa, Homo sapiens; identical to SEQ ID NO: 39912

SEQ ID NO: 39925 - protein, 288 aa, Homo sapiens; identical to SEQ ID NO: 39912

SEQ ID NO: 39926 - protein, 299 aa, Homo sapiens
MSATGDRHPTQGDQEAPVSQEGAQAEAAGAGNQEGGDSGPDSSDMVPAAEVVGVAGPVEGLGEEEGEQAAGLAAVPQGGSAEEDSDIGPATEEEEEEEEGNEAANFDLAVATRRYPAAGIGFVFLYLVHSLLRRLYHNDHIQIANRHLSRLMVGPHAAVPNLWDNPPLLLLSQRLGAGAAAPEGEGLGLIQEAASVQEAASVPEPAVPADLAEMAREPAEEAADEKPPEEAAEEKLTEEATEEPAAEEPTSEEAVAPEEVTKSQPEKWDEEAQDAAGEEEKEQEKEKDVENKVKNSKGT

SEQ ID NO: 39927 - protein, 472 aa, Homo sapiens
MKSILDGLADTTFRTITTDLLYVGSNDIQYEDIKGDMASKLGYFPQKFPLTSFRGSPFQEKMTAGDNPQLVPADQVNITEFYNKSLSSFKENEENIQCGENFMDIECFMVLNPSQQLAIAVLSLTLGTFTVLENLLVLCVILHSRSLRCRPSYHFIGSLAVADLLGSVIFVYSFIDFHVFHRKDSRNVFLFKLGGVTASFTASVGSLFLTAIDRYISIHRPLAYKRIVTRPKAVVAFCLMWTIAIVIAVLPLLGWNCEKLQSVCSDIFPHIDETYLMFWIGVTSVLLLFIVYAYMYILWKAHSHAVRMIQRGTQKSIIIHTSEDGKVQVTRPDQARMDIRLAKTLVLILVVLIICWGPLLAIMVYDVFGKMNKLIKTVFAFCSMLCLLNSTVNPIIYALRSKDLRHAFRSMFPSCEGTAQPLDNSMGDSDCLHKHANNAASVHRAAESCIKSTVKIAKVTMSVSTDTSAEAL

SEQ ID NO: 39928 - protein, 472 aa, Homo sapiens; identical to SEQ ID NO: 39927

SEQ ID NO: 39929 - protein, 472 aa, Homo sapiens; identical to SEQ ID NO: 39927

SEQ ID NO: 39930 - protein, 439 aa, Homo sapiens
MKSILDGLADTTFRTITTDLLGSPFQEKMTAGDNPQLVPADQVNITEFYNKSLSSFKENEENIQCGENFMDIECFMVLNPSQQLAIAVLSLTLGTFTVLENLLVLCVILHSRSLRCRPSYHFIGSLAVADLLGSVIFVYSFIDFHVFHRKDSRNVFLFKLGGVTASFTASVGSLFLTAIDRYISIHRPLAYKRIVTRPKAVVAFCLMWTIAIVIAVLPLLGWNCEKLQSVCSDIFPHIDETYLMFWIGVTSVLLLFIVYAYMYILWKAHSHAVRMIQRGTQKSIIIHTSEDGKVQVTRPDQARMDIRLAKTLVLILVVLIICWGPLLAIMVYDVFGKMNKLIKTVFAFCSMLCLLNSTVNPIIYALRSKDLRHAFRSMFPSCEGTAQPLDNSMGDSDCLHKHANNAASVHRAAESCIKSTVKIAKVTMSVSTDTSAEAL

SEQ ID NO: 39931 - protein, 472 aa, Homo sapiens; identical to SEQ ID NO: 39927

SEQ ID NO: 39932 - protein, 472 aa, Homo sapiens; identical to SEQ ID NO: 39927

SEQ ID NO: 39933 - protein, 411 aa, Homo sapiens
MALQIPPSAPSPLTSCTWAQMTFSTKTSKENEENIQCGENFMDIECFMVLNPSQQLAIAVLSLTLGTFTVLENLLVLCVILHSRSLRCRPSYHFIGSLAVADLLGSVIFVYSFIDFHVFHRKDSRNVFLFKLGGVTASFTASVGSLFLTAIDRYISIHRPLAYKRIVTRPKAVVAFCLMWTIAIVIAVLPLLGWNCEKLQSVCSDIFPHIDETYLMFWIGVTSVLLLFIVYAYMYILWKAHSHAVRMIQRGTQKSIIIHTSEDGKVQVTRPDQARMDIRLAKTLVLILVVLIICWGPLLAIMVYDVFGKMNKLIKTVFAFCSMLCLLNSTVNPIIYALRSKDLRHAFRSMFPSCEGTAQPLDNSMGDSDCLHKHANNAASVHRAAESCIKSTVKIAKVTMSVSTDTSAEAL

SEQ ID NO: 39934 - protein, 472 aa, Homo sapiens; identical to SEQ ID NO: 39927

SEQ ID NO: 39935 - protein, 78 aa, Homo sapiens
MKSILDGLADTTFRTITTDLLYVGSNDIQYEDIKGDMASKLGYFPQKFPLTSFRGSPFQEKMTAGDNPQLVPADQVNI

SEQ ID NO: 39936 - protein, 360 aa, Homo sapiens
MEECWVTEIANGSKDGLDSNPMKDYMILSGPQKTAVAVLCTLLGLLSALENVAVLYLILSSHQLRRKPSYLFIGSLAGADFLASVVFACSFVNFHVFHGVDSKAVFLLKIGSVTMTFTASVGSLLLTAIDRYLCLRYPPSYKALLTRGRALVTLGIMWVLSALVSYLPLMGWTCCPRPCSELFPLIPNDYLLSWLLFIAFLFSGIIYTYGHVLWKAHQHVASLSGHQDRQVPGMARMRLDVRLAKTLGLVLAVLLICWFPVLALMAHSLATTLSDQVKKAFAFCSMLCLINSMVNPVIYALRSGEIRSSAHHCLAHWKKCVRGLGSEAKEEAPRSSVTETEADGKITPWPDSRDLDLSDC

SEQ ID NO: 39937 - protein, 360 aa, Homo sapiens; identical to SEQ ID NO: 39936

SEQ ID NO: 39938 - protein, 278 aa, Homo sapiens [sequence omitted]

SEQ ID NO: 39939 - protein, 54 aa, Homo sapiens
MDSMPEPASRCLLLLPLLLLLLLLLPAPELGPSQAGAEENDWVRLPSKCEGTCG

SEQ ID NO: 39940 - protein, 248 aa, Homo sapiens
MGPVRLGILLFLFLAVHEAWAGMLKEEDDDTERLPSKCEVCKLLSTELQAELSRTGRSREVLELGQVLDTGKRKRHVPYSVSETRLEEALENLCERILDYSVHAERKGSLRYAKGQSQTMATLKGLVQKGVKVDLGIPLELWDEPSVEVTYLKKQCETMLEEFEDIVGDWYFHHQEQPLQNFLCEGHVLPAAETACLQETWTGKEITDGEEKTEGEEEQEEEEEEEEEEGGDKMTKTGSHPKLDREDL

SEQ ID NO: 39941 - protein, 477 aa, Homo sapiens
MANMQGLVERLERAVSRLESLSAESHRPPGNCGEVNGVIAGVAPSVEAFDKLMDSMVAEFLKNSRILAGDVETHAEMVHSAFQAQRAFLLMASQYQQPHENDVAALLKPISEKIQEIQTFRERNRGSNMFNHLSAVSESIPALGWIAVSPKPGPYVKEMNDAATFYTNRVLKDYKHSDLRHVDWVKSYLNIWSELQAYIKEHHTTGLTWSKTGPVASTVSAFSVLSSGPGLPPPPPPLPPPGPPPLFENEGKKEESSPSRSALFAQLNQGEAITKGLRHVTDDQKTYKNPSLRAQGGQTQSPTKSHTPSPTSPKSYPSQKHAPVLELEGKKWRVEYQEDRNDLVISETELKQVAYIFKCEKSTIQIKGKVNSIIIDNCKKLGLVFDNVVGIVEVINSQDIQIQVMGRVPTISINKTEGCHIYLSEDALDCEIVSAKSSEMNILIPQDGDYREFPIPEQFKTAWDGSKLITEPAEIMA

SEQ ID NO: 39942 - protein, 394 aa, Homo sapiens
MANMQGLVERLERAVSRLESLSAESHRPPGNCGEVNGVIAGVAPSVEAFDKLMDSMVAEFLKNSRILAGDVETHAEMVHSAFQAQRAFLLMASQYQQPHENDVAALLKPISEKIQEIQTFRERNRGSNMFNHLSAVSESIPALGWIAVSPKPPPLPPPGPPPLFENEGKKEESSPSRSALFAQLNQGEAITKGLRHVTDDQKTYKNPSLRAQGGQTQSPTKSHTPSPTSPKSYPSQKHAPVLELEGKKWRVEYQEDRNDLVISETELKQVAYIFKCEKSTIQIKGKVNSIIIDNCKKLGLVFDNVVGIVEVINSQDIQIQVMGRVPTISINKTEGCHIYLSEDALDCEIVSAKSSEMNILIPQDGDYREFPIPEQFKTAWDGSKLITEPAEIMA

SEQ ID NO: 39943 - protein, 1046 aa, Homo sapiens
MQKPSGLKPPGRGGKHSSPMGRTSTGSASSSAAVAASSKEGSPLHKQSSGPSSSPAAAAAPEKPGPKAAEVGDDFLGDFVVGERVWVNGVKPGVVQYLGETQFAPGQWAGVVLDDPVGKNDGAVGGVRYFECPALQGIFTRPSKLTRQPTAEGSGSDAHSVESLTAQNLSLHSGTATPPLTSRVIPLRESVLNSSVKTGNESGSNLSDSGSVKRGEKDLRLGDRVLVGGTKTGVVRYVGETDFAKGEWCGVELDEPLGKNDGAVAGTRYFQCPPKFGLFAPIHKVIRIGFPSTSPAKAKKTKRMAMGVSALTHSPSSSSISSVSSVASSVGGRPSRSGLLTETSSRYARKISGTTALQEALKEKQQHIEQLLAERDLERAEVAKATSHICEVEKEIALLKAQHEQYVAEAEEKLQRARLLVESVRKEKVDLSNQLEEERRKVEDLQFRVEEESITKGDLETQTQLEHARIGELEQSLLLEKAQAERLLRELADNRLTTVAEKSRVLQLEEELTLRRGEIEELQQCLLHSGPPPPDHPDAAEILRLRERLLSASKEHQRESGVLRDKYEKALKAYQAEVDKLRAANEKYAQEVAGLKDKVQQATSENMGLMDNWKSKLDSLASDHQKSLEDLKATLNSGPGAQQKEIGELKAVMEGIKMEHQLELGNLQAKHDLETAMHVKEKEALREKLQEAQEELAGLQRHWRAQLEVQASQHRLELQEAQDQRRDAELRVHELEKLDVEYRGQAQAIEFLKEQISLAEKKMLDYERLQRAEAQGKQEVESLREKLLVAENRLQAVEALCSSQHTHMIESNDISEETIRTKETVEGLQDKLNKRDKEVTALTSQTEMLRAQVSALESKCKSGEKKVDALLKEKRRLEAELETVSRKTHDASGQLVLISQELLRKERSLNELRVLLLEANRHSPGPERDLSREVHKAEWRIKEQKLKDDIRGLREKLTGLDKEKSLSDQRRYSLIDRSSAPELLRLQHQLMSTEDALRDALDQAQQVEKLMEAMRSCPDKAQTIGNSGSANGIHQQDKAQKQEDKH

SEQ ID NO: 39944 - protein, 1011 aa, Homo sapiens
MQKPSGLKPPGRGGKHSSPMGRTSTGSASSSAAVAASSKEGSPLHKQSSGPSSSPAAAAAPEKPGPKAAEVGDDFLGDFVVGERVWVNGVKPGVVQYLGETQFAPGQWAGVVLDDPVGKNDGAVGGVRYFECPALQGIFTRPSKLTRQPTAEGSGSDAHSVESLTAQNLSLHSGTATPPLTSRVIPLRESVLNSSVKTGNESGSNLSDSGSVKRGEKDLRLGDRVLVGGTKTGVVRYVGETDFAKGEWCGVELDEPLGKNDGAVAGTRYFQCPPKFGLFAPIHKVIRIGFPSTSPAKAKKTKRMAMGVSALTHSPSSSSISSVSSVASSVGGRPSRSGLLTETSSRYARKISGTTALQEALKEKQQHIEQLLAERDLERAEVAKATSHICEVEKEIALLKAQHEQYVAEAEEKLQRARLLVESVRKEKVDLSNQLEEERRKVEDLQFRVEEESITKGDLELTTVAEKSRVLQLEEELTLRRGEIEELQQCLLHSGPPPPDHPDAAEILRLRERLLSASKEHQRESGVLRDKYEKALKAYQAEVDKLRAANEKYAQEVAGLKDKVQQATSENMGLMDNWKSKLDSLASDHQKSLEDLKATLNSGPGAQQKEIGELKAVMEGIKMEHQLELGNLQAKHDLETAMHVKEKEALREKLQEAQEELAGLQRHWRAQLEVQASQHRLELQEAQDQRRDAELRVHELEKLDVEYRGQAQAIEFLKEQISLAEKKMLDYERLQRAEAQGKQEVESLREKLLVAENRLQAVEALCSSQHTHMIESNDISEETIRTKETVEGLQDKLNKRDKEVTALTSQTEMLRAQVSALESKCKSGEKKVDALLKEKRRLEAELETVSRKTHDASGQLVLISQELLRKERSLNELRVLLLEANRHSPGPERDLSREVHKAEWRIKEQKLKDDIRGLREKLTGLDKEKSLSDQRRYSLIDRSSAPELLRLQHQLMSTEDALRDALDQAQQVEKLMEAMRSCPDKAQTIGNSGSANGIHQQDKAQKQEDKH

SEQ ID NO: 39945 - protein, 1046 aa, Homo sapiens; identical to SEQ ID NO: 39943

SEQ ID NO: 39946 - protein, 50 aa, Homo sapiens
LEEERRKVEDLQFRVEEESITKGDLEAEDHLSPEPSMLTTVAEKSRVLQL

SEQ ID NO: 39947 - protein, 1046 aa, Homo sapiens
MQKPSGLKPPGRGGKHSSPMGRTSTGSASSSAAVAASSKEGSPLHKQSSGPSSSPAAAAAPEKPGPKAAEVGDDFLGDFVVGERVWVNGVKPGVVQYLGETQFAPGQWAGVVLDDPVGKNDGAVGGVRYFECPALQGIFTRPSKLTRQPTAEGSGSDAHSVESLTAQNLSLHSGTATPPLTSRVIPLRESVLNSSVKTGNESGSNLSDSGSVKRGEKDLRLGDRVLVGGTKTGVVRYVGETDFAKGEWCGVELDEPLGKNDGAVAGTRYFQCPPKFGLFAPIHKVIRIGFPSTSPAKAKKTKRMAMGVSALTHSPSSSSISSVSSVASSVGGRPSRSGLLTETSSRYARKISGTTALQEALKEKQQHIEQLLAERDLERAEVAKATSHICEVEKEIALLKAQHEQYVAEAEEKLQRARLLVESVRKEKVDLSNQLEEERRKVEDLQFRVEEESITKGDLETQTQLEHARIGELEQSLLLEKAQAERLLRELADNRLTTVAEKSRVLQLEEELTLRRGEIEELQQCLLHSGPPPPDHPDAAEILRLRERLLSASKEHQRESGVLRDKYEKALKAYQAEVDKLRAANEKYAQEVAGLKDKVQQATSENMGLMDNWKSKLDSLASDHQKSLEDLKATLNSGPGAQQKEIGELKAVMEGIKMEHQLELGNLQAKHDLETAMHVKEKEALREKLQEAQEELAGLQRHWRAQLEVQASQHRLELQEAQDQRRDAELRVHELEKLDVEYRGQAQAIEFLKEQISLAEKKMLDYERLQRAEAQGKQEVESLREKLLVAENRLQAVEALCSSQHTHMIESNDISEETIRTKETVEGLQDKLNKRDKEVTALTSQTEMLRAQVSALESKCKSGEKKVDALLKEKRRLEAELETVSRKTHDASGQLVLISQELLRKERSLNELRVLLLEANRHSPGPERDLSREVHKAEWRIKEQKLKDDIRGLREKLTGLDKEKSLSDQRRYSLIDRSSAPELLRLQHQLMSTEDALRDALDQAQQVEKLMEAMRSCPDKAQTIGNSGSANGIHQQDKAQKQENTH

SEQ ID NO: 39948 - protein, 1608 aa, Homo sapiens
MYSAHRPLMPASSAASRGLGMFVWTNVEPRSVAVFPWHSLVPFLAPSQPDPSVQPSEAQQPASHPVASNQSKEPAESAAVAHERPPGGTGSADPERPPGATCPESPGPGPPHPLGVVESGKGPPPTTEEEASGPPGEPRLDSETESDHDDAFLSIMSPEIQLPLPPGKRRTQSLSALPKERDSSSEKDGRSPNKREKDHIRRPMNAFMIFSKRHRALVHQRHPNQDNRTVSKILGEWWYALGPKEKQKYHDLAFQVKEAHFKAHPDWKWCNKDRKKSSSEAKPTSLGLAGGHKETRERSMSETGTAAAPGVSSELLSVAAQTLLSSDTKAPGSSSCGAERLHTVGGPGSARPRAFSHSGVHSLDGGEVDSQALQELTQMVSGPASYSGPKPSTQYGAPGPFAAPGEGGALAATGRPPLLPTRASRSQRAASEDMTSDEERMVICEEEGDDDVIADDGFGTTDIDLKCKERVTDSESGDSSGEDPEGNKGFGRKVFSPVIRSSFTHCRPPLDPEPPGPPDPPVAFGKGYGSAPSSSASSPASSSASAATSFSLGSGTFKAQESGQGSTAGPLRPPPPGAGGPATPSKATRFLPMDPATFRRKRPESVGGLEPPGPSVIAAPPSGGGNILQTLVLPPNKEEQEGGGARVPSAPAPSLAYGAPAAPLSRPAATMVTNVVRPVSSTPVPIASKPFPTSGRAEASPNDTAGARTEMGTGSRVPGGSPLGVSLVYSDKKSAAATSPAPHLVAGPLLGTVGKAPATVTNLLVGTPGYGAPAPPAVQFIAQGAPGGGTTAGSGAGAGSGPNGPVPLGILQPGALGKAGGITQVQYILPTLPQQLQVAPAPAPAPGTKAAAPSGPAPTTSIRFTLPPGTSTNGKVLAATAPTPGIPILQSVPSAPPPKAQSVSPVQAPPPGGSAQLLPGKVLVPLAAPSMSVRGGGAGQPLPLVSPPFSVPVQNGAQPPSKIIQLTPVPVSTPSGLVPPLSPATLPGPTSQPQKVLLPSSTRITYVQSAGGHALPLGTSPASSQAGTVTSYGPTSSVALGFTSLGPSGPAFVQPLLSAGQAPLLAPGQVGVSPVPSPQLPPACAAPGGPVITAFYSGSPAPTSSAPLAQPSQAPPSLVYTVATSTTPPAATILPKGPPAPATATPAPTSPFPSATAGSMTYSLVAPKAQRPSPKAPQKVKAAIASIPVGSFEAGASGRPGPAPRQPLEPGPVREPTAPESELEGQPTPPAPPPLPETWTPTARSSPPLPPPAEERTSAKGPETMASKFPSSSSDWRVPGQGLENRGEPPTPPSPAPAPAVAPGGSSESSSGRAAGDTPERKEAAGTGKKVKVRPPPLKKTFDSVDNRVLSEVDFEERFAELPEFRPEEVLPSPTLQSLATSPRAILGSYRKKRKNSTDLDSAPEDPTSPKRKMRRRSSCSSEPNTPKSAKCEGDIFTFDRTGTEAEDVLGELEYDKVPYSSLRRTLDQRRALVMQLFQDHGFFPSAQATAAFQARYADIFPSKVCLQLKIREVRQKIMQAATPTEQPPGAEAPLPVPPPTGTAAAPAPTPSPAGGPDPTSPSSDSGTAQAAPPLPPPPESGPGQPGWEGAPQPSPPPPGPSTAATGR

SEQ ID NO: 39949 - protein, 333 aa, Homo sapiens
MYTAIPQSGSPFPGSVQDPGLHVWRVEKLKPVPVAQENQGVFFSGDSYLVLHNGPEEVSHLHLWIGQQSSRDEQGACAVLAVHLNTLLGERPVQHREVQGNESDLFMSYFPRGLKYQEGGVESAFHKTSTGAPAAIKKLYQVKGKKNIRATERALNWDSFNTGDCFILDLGQNIFAWCGGKSNILERNKARDLALAIRDSERQGKAQVLGPKPALKEGNPEEDLTADKANAQAAALYKVSDATGQMNLTKVADSSPFALELLISDDCFVLDNGLCGKIYIWKGRKANEKERQAALQVAEGFISRMQYAPNTQVEILPQGHESPIFKQFFKDWK

SEQ ID NO: 39950 - protein, 286 aa, Homo sapiens
MADFDDRVSDEEKVRIAAKFITHAPPGEFNEVFNDVRLLLNNDNLLREGAAHAFAQYNMDQFTPVKIEGYEDQVLITEHGDLGNSRFLDPRNKISFKFDHLRKEASDPQPEEADGGLKSWRESCDSALRAYVKDHYSNGFCTVYAKTIDGQQTIIACIESHQFQPKNFWNGRWRSEWKFTITPPTAQVVGVLKIQVHYYEDGNVQLVSHKDVQDSLTVSNEAQTAKEFIKIIENAENEYQTAISENYQTMSDTTFKALRRQLPVTRTKIDWNKILSYKIGKEMQNA

SEQ ID NO: 39951 - protein, 286 aa, Homo sapiens
MADLEEQLSDEEKVRIAAKFIIHAPPGEFNEVFNDVRLLLNNDNLLREGAAHAFAQYNLDQFTPVKIEGYEDQVLITEHGDLGNGKFLDPKNRICFKFDHLRKEATDPRPCEVENAVESWRTSVETALRAYVKEHYPNGVCTVYGKKIDGQQTIIACIESHQFQAKNFWNGRWRSEWKFTITPSTTQVVGILKIQVHYYEDGNVQLVSHKDIQDSLTVSNEVQTAKEFIKIVEAAENEYQTAISENYQTMSDTTFKALRRQLPVTRTKIDWNKILSYKIGKEMQNA

SEQ ID NO: 39952 - protein, 172 aa, Homo sapiens
MADLEEQLSDEEKVRIAAKFIIHAPPGEFNEVFNDVRLLLNNDNLLREGAAHAFAQYNLDQFTPVKIEGYEDQVLITEHGDLGNGKFLDPKNRICFKFDHLRKEATDPRPCEVENAVESWRTSVETALRAYVKEHYPNGVCTEWSLEVRMEVYNHSFNHSSGWHLENSGSLL

SEQ ID NO: 39953 - protein, 299 aa, Homo sapiens
MTLSVLSRKDKERVIRRLLLQAPPGEFVNAFDDLCLLIRDEKLMHHQGECAGHQHCQKYSVPLCIDGNPVLLSHHNVMGDYRFFDHQSKLSFKYDLLQNQLKDIQSHGIIQNEAEYLRVVLLCALKLYVNDHYPKGNCNMLRKTVKSKEYLIACIEDHNYETGECWNGLWKSKWIFQVNPFLTQVTGRIFVQAHFFRCVNLHIEISKDLKESLEIVNQAQLALSFARLVEEQENKFQAAVLEELQELSNEALRKILRRDLPVTRTLIDWHRILSDLNLVMYPKLGYVIYSRSVLCNWII

SEQ ID NO: 39954 - protein, 277 aa, Homo sapiens
MSDQQLDCALDLMRRLPPQQIEKNLSDLIDLVPSLCEDLLSSVDQPLKIARDKVVGKDYLLCDYNRDGDSYRSPWSNKYDPPLEDGAMPSARLRKLEVEANNAFDQYRDLYFEGGVSSVYLWDLDHGFAGVILIKKAGDGSKKIKGCWDSIHVVEVQEKSSGRTAHYKLTSTVMLWLQTNKSGSGTMNLGGSLTRQMEKDETVSDCSPHIANIGRLVEDMENKIRSTLNEIYFGKTKDIVNGLRSIDAIPDNQKFKQLQRELSQVLTQRQIYIQPDN

SEQ ID NO: 39955 - protein, 260 aa, Homo sapiens
MPRQFQDTGFSRPGLGQPRRCDPEPRKSDQQLDCALDLMRRLPPQQIEKNLSDLIDLVPSLCEDLLSSVDQPLKIARDKVVGKDYLLCDYNRDGDSYRSPWSNKYDPPLEDGAMPSARLRKLEVEANNAFDQYRDLYFEGGVSSVYLWDLDHGFAGVILIKKAGDGSKKIKGCWDSIHVVEVQEKSSGRTAHYKLTSTVMLWLQTNKSGSGTMNLGGSLTRQMEKDETVSDCSPHIANIGRLVEVCADFCRQIKTRSSEE

SEQ ID NO: 39956 - protein, 277 aa, Homo sapiens; identical to SEQ ID NO: 39954

SEQ ID NO: 39957 - protein, 260 aa, Homo sapiens
MRRLPPQQIEKNLSDLIDLVPSLCEDLLSSVDQPLKIARDKVVGKDYLLCDYNRDGDSYRSPWSNKYDPPLEDGAMPSARLRKLEVEANNAFDQYRDLYFEGGVSSVYLWDLDHGFAGVILIKKAGDGSKKIKGCWDSIHVVEVQEKSSGRTAHYKLTSTVMLWLQTNKSGSGTMNLGGSLTRQMEKDETVSDCSPHIANIGRLVEDMENKIRSTLNEIYFGKTKDIVNGLRSVQTFADKSKQEALKNDLVEALKRKQQC

SEQ ID NO: 39958 - protein, 334 aa, Homo sapiens
MGGPQDKDERTIALVRPWPWGHQALDPAYGLDTMHPSRRSLPFPLNCQLARVGTADYGSPSDQSDQQLDCALDLMRRLPPQQIEKNLSDLIDLVPSLCEDLLSSVDQPLKIARDKVVGKDYLLCDYNRDGDSYRSPWSNKYDPPLEDGAMPSARLRKLEVEANNAFDQYRDLYFEGGVSSVYLWDLDHGFAGVILIKKAGDGSKKIKGCWDSIHVVEVQEKSSGRTAHYKLTSTVMLWLQTNKSGSGTMNLGGSLTRQMEKDETVSDCSPHIANIGRLVEDMENKIRSTLNEIYFGKTKDIVNGLRSVQTFADKSKQEALKNDLVEALKRKQQC

SEQ ID NO: 39959 - protein, 272 aa, Homo sapiens
MSDQQLDCALDLMRRLPPQQIEKNLSDLIDLVPSLCEDLLSSVDQPLKIARDKVVGKDYLLCDYNRDGDSYRSPWSNKYDPPLEDGAMPSARLRKLEVEANNAFDQYRDLYFEGGVSSVYLWDLDHGFAGVILIKKAGDGSKKIKGCWDSIHVVEVQEKSSGRTAHYKLTSTVMLWLQTNKSGSGTMNLGGSLTRQMEKDETVSDCSPHIANIGRLVEDMENKIRSTLNEIYFGKTKDIVNGLRSVQTFADKSKQEALKNDLVEALKRKQQC

SEQ ID NO: 39960 - protein, 206 aa, Homo sapiens
MRRLPPQQIEKNLSDLIDLVPSLCEDLLSSVDQPLKIARDKVVGKDYLLCDYNRDGDSYRSPWSNKYDPPLEDGAMPSARLRKLEVEANNAFDQYRDLYFEGGVSSVYLWDLDHGFAGVILIKKAGDGSKKIKGCWDSIHVVEVQEKSSGRTAHYKLTSTVMLWLQTNKSGSGTMNLGGSLTRQMEKDETVSDCSPHIANIGRLVE

SEQ ID NO: 39961 - protein, 301 aa, Homo sapiens
MHPSRRSLPFPLNCQLARVGTADYGSPSDQSDQQLDCALDLMRRLPPQQIEKNLSDLIDLVPSLCEDLLSSVDQPLKIARDKVVGKDYLLCDYNRDGDSYRSPWSNKYDPPLEDGAMPSARLRKLEVEANNAFDQYRDLYFEGGVSSVYLWDLDHGFAGVILIKKAGDGSKKIKGCWDSIHVVEVQEKSSGRTAHYKLTSTVMLWLQTNKSGSGTMNLGGSLTRQMEKDETVSDCSPHIANIGRLVEDMENKIRSTLNEIYFGKTKDIVNGLRSVQTFADKSKQEALKNDLVEALKRKQQC

SEQ ID NO: 39962 - protein, 121 aa, Homo sapiens
MLKVPSLCEDLLSSVDQPLKIARDKVVGKDYLLCDYNRDGDSYRSPWSNKYDPPLEDGAMPSARLRKLEVEANNAFDQYRDLYFEGGVSSVYLWDLDHGFAGVILIKKAGDGSKKIKGCWD

SEQ ID NO: 39963 - protein, 348 aa, Homo sapiens
MYTAIPQSGSPFPGSVQDPGLHVWRVEKLKPVPVAQENQGVFFSGDSYLVLHNGPEEVSHLHLWIGQQSSRDEQGACAVLAVHLNTLLGERPVQHREVQGNESDLFMSYFPRGLKYQEGGVESAFHKTSTGAPAAIKKLYQVKGKKNIRATERALNWDSFNTGDCFILDLGQNIFAWCGGKSNILERNKARDLALAIRDSERQGKAQVEIVTDGEEPAEMIQVLGPKPALKEGNPEEDLTADKANAQAAALYKVSDATGQMNLTKVADSSPFALELLISDDCFVLDNGLCGKIYIWKGRKANEKERQAALQVAEGFISRMQYAPNTQVEILPQGHESPIFKQFFKDWK

SEQ ID NO: 39964 - protein, 218 aa, Homo sapiens
MYTAIPQSGSPFPGSVQDPGLHVWRVEKLKPVPVAQENQGVFFSGDSYLVLHNGPEEVSHLHLWIGQQSSRDEQGACAVLAVHLNTLLGERPVQHREVQGNESDLFMSYFPRGLKYQEGGVESAFHKTSTGAPAAIKKLYQVKGKKNIRATERALNWDSFNTGDCFILDLGQNIFAWCGGKSNILERNKARDLALAIRDSERQGKAQVEIVTDGEEPA

SEQ ID NO: 39965 - protein, 348 aa, Homo sapiens; identical to SEQ ID NO: 39963

SEQ ID NO: 39966 - protein, 348 aa, Homo sapiens; identical to SEQ ID NO: 39963

SEQ ID NO: 39967 - protein, 253 aa, Homo sapiens
MYTAIPQSGSPFPGSVQDPGLHVWRVEKLKPVPVAQENQGVFFSGDSYLVLHNGPEEVSHLHLWIGQQSSRDEQGACAVLAVHLNTLLGERPVQHREVQGNESDLFMSYFPRGLKYQEGGVESAFHKTSTGAPAAIKKLYQVKGKKNIRATERALNWDSFNTGDCFILDLGQNIFAWCGGKSNILERNKARDLALAIRDSERQGKAQVEIVTDGEEPAEMIQVLGPKPALKEGNPEEDLTADKANAQAAALYK

SEQ ID NO: 39968 - protein, 253 aa, Homo sapiens; identical to SEQ ID NO: 39967

SEQ ID NO: 39969 - protein, 253 aa, Homo sapiens; identical to SEQ ID NO: 39967

SEQ ID NO: 39970 - protein, 327 aa, Homo sapiens
MYTAIPQSGSPFPGSVQDPGLHVWRVEKLKPVPVAQENQGVFFSGDSYLVLHNGPEEVSHLHLNTLLGERPVQHREVQGNESDLFMSYFPRGLKYQEGGVESAFHKTSTGAPAAIKKLYQVKGKKNIRATERALNWDSFNTGDCFILDLGQNIFAWCGGKSNILERNKARDLALAIRDSERQGKAQVEIVTDGEEPAEMIQVLGPKPALKEGNPEEDLTADKANAQAAALYKVSDATGQMNLTKVADSSPFALELLISDDCFVLDNGLCGKIYIWKGRKANEKERQAALQVAEGFISRMQYAPNTQVEILPQGHESPIFKQFFKDWK

SEQ ID NO: 39971 - protein, 217 aa, Homo sapiens
MEGSFSDGGALPEGLAEEAEPQGAAWSGDSGTVSQSHSSASGPWEDEGAEDGAPGRDLPLLRRAAAGYAACLLPGAGARPEVEALDASLEDLLTRVDEFVGMLDMLRGDSSHVVSEGVPRIHAKAAEMRRIYSRIDRLEAFVRMVGGRVARMEEQVTKAEAELGTFPRAFKKLLHTMNVPSLFSKSAPSRPQQAGYEAPVLFRTEDYFPCCSERPQL

SEQ ID NO: 39972 - protein, 2225 aa, Homo sapiens
MAALVLEDGSVLRGQPFGAAVSTAGEVVFQTGMVGYPEALTDPSYKAQILVLTYPLIGNYGIPPDEMDEFGLCKWFESSGIHVAALVVGECCPTPSHWSATRTLHEWLQQHGIPGLQGVDTRELTKKLREQGSLLGKLVQNGTEPSSLPFLDPNARPLVPEVSIKTPRVFNTGGAPRILALDCGLKYNQIRCLCQRGAEVTVVPWDHALDSQEYEGLFLSNGPGDPASYPSVVSTLSRVLSEPNPRPVFGICLGHQLLALAIGAKTYKMRYGNRGHNQPCLLVGSGRCFLTSQNHGFAVETDSLPADWAPLFTNANDGSNEGIVHNSLPFFSVQFHPEHQAGPSDMELLFDIFLETVKEATAGNPGGQTVRERLTERLCPPGIPTPGSGLPPPRKVLILGSGGLSIGQAGEFDYSGSQAIKALKEENIQTLLINPNIATVQTSQGLADKVYFLPITPHYVTQVIRNERPDGVLLTFGGQTALNCGVELTKAGVLARYGVRVLGTPVETIELTEDRRAFAARMAEIGEHVAPSEAANSLEQAQAAAERLGYPVLVRAAFALGGLGSGFASNREELSALVAPAFAHTSQVLVDKSLKGWKEIEYEVVRDAYGNCVTVCNMENLDPLGIHTGESIVVAPSQTLNDREYQLLRQTAIKVTQHLGIVGECNVQYALNPESEQYYIIEVNARLSRSSALASKATGYPLAYVAAKLALGIPLPELRNSVTGGTAAFEPSVDYCVVKIPRWDLSKFLRVSTKIGSCMKSVGEVMGIGRSFEEAFQKALRMVDENCVGFDHTVKPVSDMELETPTDKRIFVVAAALWAGYSVDRLYELTRIDRWFLHRMKRIIAHAQLLEQHRGQPLPPDLLQQAKCLGFSDKQIALAVLSTELAVRKLRQELGICPAVKQIDTVAAEWPAQTNYLYLTYWGTTHDLTFRTPHVLVLGSGVYRIGSSVEFDWCAVGCIQQLRKMGYKTIMVNYNPETVSTDYDMCDRLYFDEISFEVVMDIYELENPEGVILSMGGQLPNNMAMALHRQQCRVLGTSPEAIDSAENRFKFSRLLDTIGISQPQWRELSDLESARQFCQTVGYPCVVRPSYVLSGAAMNVAYTDGDLERFLSSAAAVSKEHPVVISKFIQEAKEIDVDAVASDGVVAAIAISEHVENAGVHSGDATLVTPPQDITAKTLERIKAIVHAVGQELQVTGPFNLQLIAKDDQLKVIECNVRVSRSFPFVSKTLGVDLVALATRVIMGEEVEPVGLMTGSGVVGVKVPQFSFSRLAGADVVLGVEMTSTGEVAGFGESRCEAYLKAMLSTGFKIPKKNILLTIGSYKNKSELLPTVRLLESLGYSLYASLGTADFYTEHGVKVTAVDWHFEEAVDGECPPQRSILEQLAEKNFELVINLSMRGAGGRRLSSFVTKGYRTRRLAADFSVPLIIDIKCTKLFVEALGQIGPAPPLKVHVDCMTSQKLVRLPGLIDVHVHLREPGGTHKEDFASGTAAALAGGITMVCAMPNTRPPIIDAPALALAQKLAEAGARCDFALFLGASSENAGTLGTVAGSAAGLKLYLNETFSELRLDSVVQWMEHFETWPSHLPIVAHAEQQTVAAVLMVAQLTQRSVHICHVARKEEILLIKAAKARGLPVTCEVAPHHLFLSHDDLERLGPGKGEVRPELGSRQDVEALWENMAVIDCFASDHAPHTLEEKCGSRPPPGFPGLETMLPLLLTAVSEGRLSLDDLLQRLHHNPRRIFHLPPQEDTYVEVDLEHEWTIPSHMPFSKAHWTPFEGQKVKGTVRRVVLRGEVAYIDGQVLVPPGYGQDVRKWPQGAVPQLPPSAPATSEMTTTPERPRRGIPGLPDGRFHLPPRIHRASDPGLPAEEPKEKSSRKVAEPELMGTPDGTCYPPPPVPRQASPQNLGTPGLLHPQTSPLLHSLVGQHILSVQQFTKDQMSHLFNVAHTLRMMVQKERSLDILKGKVMASMFYEVSTRTSSSFAAAMARLGGAVLSFSEATSSVQKGESLADSVQTMSCYADVVVLRHPQPGAVELAAKHCRRPVINAGDGVGEHPTQALLDIFTIREELGTVNGMTITMVGDLKHGRTVHSLACLLTQYRVSLRYVAPPSLRMPPTVRAFVASRGTKQEEFESIEEALPDTDVLYMTRIQKERFGSTQEYEACFGQFILTPHIMTRAKKKMVVMHPMPRVNEISVEVDSDPRAAYFRQAENGMYIRMALLATVLGRF

SEQ ID NO: 39973 - protein, 479 aa, Homo sapiens
MEKGLTLPQDCRDFVHSLKMRSKYALFLVFVVIVFVFIEKENKIISRVSDKLKQIPQALADANSTDPALILAENASLLSLSELDSAFSQLQSRLRNLSLQLGVEPAMEAAGEEEEEQRKEEEPPRPAVAGPRRHVLLMATTRTGSSFVGEFFNQQGNIFYLFEPLWHIERTVSFEPGGANAAGSALVYRDVLKQLFLCDLYVLEHFITPLPEDHLTQFMFRRGSSRSLCEDPVCTPFVKKVFEKYHCKNRRCGPLNVTLAAEACRRKEHMALKAVRIRQLEFLQPLAEDPRLDLRVIQLVRDPRAVLASRMVAFAGKYKTWKKWLDDEGQDGLREEEVQRLRGNCESIRLSAELGLRQPAWLRGRYMLVRYEDVARGPLQKAREMYRFAGIPLTPQVEDWIQKNTQAAHDGSGIYSTQKNSSEQFEKWRFSMPFKLAQVVQAACGPAMRLFGYKLARDAAALTNRSVSLLEERGTFWVT

SEQ ID NO: 39974 - protein, 411 aa, Homo sapiens
MQCSWKAVLLLALASIAIQYTAIRTFTAKSFHTCPGLAEAGLAERLCEESPTFAYNLSRKTHILILATTRSGSSFVGQLFNQHLDVFYLFEPLYHVQNTLIPRFTQGKSPADRRVMLGASRDLLRSLYDCDLYFLENYIKPPPVNHTTDRIFRRGASRVLCSRPVCDPPGPADLVLEEGDCVRKCGLLNLTVAAEACRERSHVAIKTVRVPEVNDLRALVEDPRLNLKVIQLVRDPRGILASRSETFRDTYRLWRLWYGTGRKPYNLDVTQLTTVCEDFSNSVSTGLMRPPWLKGKYMLVRYEDLARNPMKKTEEIYGFLGIPLDSHVARWIQNNTRGDPTLGKHKYGTVRNSAATAEKWRFRLSYDIVAFAQNACQQVLAQLGYKIAASEEELKNPSVSLVEERDFRPFS

SEQ ID NO: 39975 - protein, 376 aa, Homo sapiens
MFPRPLTPLAAPNGAEPLGRALRRAPLGRARAGLGGPPLLLPSMLMFAVIVASSGLLLMIERGILAEMKPLPLHPPGREGTAWRGKAPKPGGLSLRAGDADLQVRQDVRNRTLRAVCGQPGMPRDPWDLPVGQRRTLLRHILVSDRYRFLYCYVPKVACSNWKRVMKVLAGVLDSVDVRLKMDHRSDLVFLADLRPEEIRYRLQHYFKFLFVREPLERLLSAYRNKFGEIREYQQRYGAEIVRRYRAGAGPSPAGDDVTFPEFLRYLVDEDPERMNEHWMPVYHLCQPCAVHYDFVGSYERLEADANQVLEWVRAPPHVRFPARQAWYRPASPESLHYHLCSAPRALLQDVLPKYILDFSLFAYPLPNVTKEACQQ

SEQ ID NO: 39976 - protein, 424 aa, Homo sapiens
MTLRPGTMRLACMFSSILLFGAAGLLLFISLQDPTELAPQQVPGIKFNIRPRQPHHDLPPGGSQDGDLKEPTERVTRDLSSGAPRGRNLPAPDQPQPPLQRGTRLRLRQRRRRLLIKKMPAAATIPANSSDAPFIRPGPGTLDGRWVSLHRSQQERKRVMQEACAKYRASSSRRAVTPRHVSRIFVEDRHRVLYCEVPKAGCSNWKRVLMVLAGLASSTADIQHNTVHYGSALKRLDTFDRQGILHRLSTYTKMLFVREPFERLVSAFRDKFEHPNSYYHPVFGKAILARYRANASREALRTGSGVRFPEFVQYLLDVHRPVGMDIHWDHVSRLCSPCLIDYDFVGKFESMEDDANFFLSLIRAPRNLTFPRFKDRHSQEARTTARIAHQYFAQLSALQRQRTYDFYYMDYLMFNYSKPFADLY

SEQ ID NO: 39977 - protein, 424 aa, Homo sapiens; identical to SEQ ID NO: 39976

SEQ ID NO: 39978 - protein, 424 aa, Homo sapiens; identical to SEQ ID NO: 39976

SEQ ID NO: 39979 - protein, 561 aa, Homo sapiens
MRHCINCCIQLLPDGAHKQQVNCQGGPHHGHQACPTCKGENKILFRVDSKQMNLLAVLEVRTEGNENWGGFLRFKKGKRCSLVFGLIIMTLVMASYILSGAHQELLISSPFHYGGFPSNPSLMDSENPSDTKEHHHQSSVNNISYMKDYPSIKLIINSITTRIEFTTRQLPDLEDLKKQELHMFSVIPNKFLPNSKSPCWYEEFSGQNTTDPYLTNSYVLYSKRFRSTFDALRKAFWGHLAHAHGKHFRLRCLPHFYIIGQPKCGTTDLYDRLRLHPEVKFSAIKEPHWWTRKRFGIVRLRDGLRDRYPVEDYLDLFDLAAHQIHQGLQASSAKEQSKMNTIIIGEASASTMWDNNAWTFFYDNSTDGEPPFLTQDFIHAFQPNARLIVMLRDPVERLYSDYLYFASSNKSADDFHEKVTEALQLFENCMLDYSLRACVYNNTLNNAMPVRLQVGLYAVYLLDWLSVFDKQQFLILRLEDHASNVKYTMHKVFQFLNLGPLSEKQEALMTKSPASNARRPEDRNLGPMWPITQKILRDFYRPFNARLAQVLADEAFAWKTT

SEQ ID NO: 39980 - protein, 506 aa, Homo sapiens
MRHCINCCIQLLPDGAHKQQVNCQGGPHHGHQACPTCKGENKILFRVDSKQMNLLAVLEVRTEGNENWGGFLRFKKGKRCSLVFGLIIMTLVMASYILSGAHQELLISSPFHYGGFPSNPSLMDSENPSDTKEHHHQSSVNNISYMKDYPSIKLIINSITTRIEFTTRQLPDLEDLKKQELHMFSVIPNKFLPNSKSPCWYEEFSGQNTTDPYLTNSYVLYSKRFRSTFDALRKAFWGHLAHAHGKHFRLRCLPHFYIIGQPKCGTTDLYDRLRLHPEVKFSAIKEPHWWTRKRFGIVRLRDGLRDRYPVEDYLDLFDLAAHQIHQGLQASSAKEQSKMNTIIIGEASASTMWDNNAWTFFYDNSTDGEPPFLTQDFIHAFQPNARLIVMLRDPVERLYSDYLYFASSNKSADDFHEKVTEALQLFENCMLDYSLRACVYNNTLNNAMPVCTPPPRTPRAGPWQKELVCCYYASGIVGLRFSIGTERSVLMCKCCSPLFMDVKAEN

SEQ ID NO: 39981 - protein, 207 aa, Homo sapiens
MRHCINCCIQLLPDGAHKQQVNCQGGPHHGHQACPTCKGENKILFRVDSKQMNLLAVLEVRTEGNENWGGFLRFKKGKRCSLVFGLIIMTLVMASYILSGAHQELLISSPFHYGGFPSNPSLMDSENPSDTKEHHHQSSVNNISYMKDYPSIKLIINSITTRIEFTTRQLPDLEDLKKQELHMFSVIPNKFLPKHNAQAELGLNVAC

SEQ ID NO: 39982 - protein, 561 aa, Homo sapiens; identical to SEQ ID NO: 39979

SEQ ID NO: 39983 - protein, 482 aa, Homo sapiens
MRHCINCCIQLLPDGAHKQQVNCQGGPHHGHQACPTCKGENKILFRVDSKQMNLLAVLEVRTEGNENWGGFLRFKKGKRCSLVFGLIIMTLVMASYILSGAHQELLISSPFHYGGFPSNPSLMDSENPSDTKEHHHQSSVNNISYMKDYPSIKLIINSITTRIEFTTRQLPDLEDLKKQELHMFSVIPNKFLPNSKSPCWYEEFSGQNTTDPYLTNSYVLYSKRFRSTFDALRKAFWGHLAHAHGKHFRLRCLPHFYIIGQPKCGTTDLYDRLRLHPEVKFSAIKEPHWWTRKRFGIVRLRDGLRDRYPVEDYLDLFDLAAHQIHQGLQASSAKEQSKMNTIIIGEASASTMWDNNAWTFFYDNSTDGEPPFLTQDFIHAFQPNARLIVMLRDPVERLYSDYLYFASSNKSADDFHEKVTEALQLFENCMLDYSLRACVYNNTLNNAMPVCTPPPVPPELAPGRRSWFVVIMQAALWVCVSA

SEQ ID NO: 39984 - protein, 411 aa, Homo sapiens
MGMRARVPKVAHSTRRPPAARMWLPRFSSKTVTVLLLAQTTCLLLFIISRPGPSSPAGGEDRVHVLVLSSWRSGSSFLGQLFSQHPDVFYLMEPAWHVWTTLSQGSAATLHMAVRDLMRSIFLCDMDVFDAYMPQSRNLSAFFNWATSRALCSPPACSAFPRGTISKQDVCKTLCTRQPFSLAREACRSYSHVVLKEVRFFNLQVLYPLLSDPALNLRIVHLVRDPRAVLRSREAAGPILARDNGIVLGTNGKWVEADPHLRLIREVCRSHVRIAEAATLKPPPFLRGRYRLVRFEDLAREPLAEIRALYAFTGLTLTPQLEAWIHNITHGSGIGKPIEAFHTSSRNARNVSQAWRHALPFTKILRVQEVCAGALQLLGYRPVYSADQQRDLTLDLVLPRGPDHFSWASPD

SEQ ID NO: 39985 - protein, 417 aa, Homo sapiens
MSRHLPWICDQRCSSPSSPGRWPPAARMWLPRFSSKTVTVLLLAQTTCLLLFIISRPGPSSPAGGEDRVHVLVLSSWRSGSSFLGQLFSQHPDVFYLMEPAWHVWTTLSQGSAATLHMAVRDLMRSIFLCDMDVFDAYMPQSRNLSAFFNWATSRALCSPPACSAFPRGTISKQDVCKTLCTRQPFSLAREACRSYSHVVLKEVRFFNLQVLYPLLSDPALNLRIVHLVRDPRAVLRSREAAGPILARDNGIVLGTNGKWVEADPHLRLIREVCRSHVRIAEAATLKPPPFLRGRYRLVRFEDLAREPLAEIRALYAFTGLTLTPQLEAWIHNITHGSGIGKPIEAFHTSSRNARNVSQAWRHALPFTKILRVQEVCAGALQLLGYRPVYSADQQRDLTLDLVLPRGPDHFSWASPD

SEQ ID NO: 39986 - protein, 395 aa, Homo sapiens
MWLPRVSSTAVTALLLAQTFLLLFLVSRPGPSSPAGGEARVHVLVLSSWRSGSSFVGQLFNQHPDVFYLMEPAWHVWTTLSQGSAATLHMAVRDLVRSVFLCDMDVFDAYLPWRRNLSDLFQWAVSRALCSPPACSAFPRGAISSEAVCKPLCARQSFTLAREACRSYSHVVLKEVRFFNLQVLYPLLSDPALNLRIVHLVRDPRAVLRSREQTAKALARDNGIVLGTNGTWVEADPGLRVVREVCRSHVRIAEAATLKPPPFLRGRYRLVRFEDLAREPLAEIRALYAFTGLSLTPQLEAWIHNITHGSGPGARREAFKTSSRNALNVSQAWRHALPFAKIRRVQELCAGALQLLGYRPVYSEDEQRNLALDLVLPRGLNGFTWASSTASHPRN

SEQ ID NO: 39987 - protein, 395 aa, Homo sapiens; identical to SEQ ID NO: 39986

SEQ ID NO: 39988 - protein, 486 aa, Homo sapiens
MKGRRRRRREYCKFALLLVLYTLVLLLVPSVLDGGRDGDKGAEHCPGLQRSLGVWSLEAAAAGEREQGAEARAAEEGGANQSPRFPSNLSGAVGEAVSREKQHIYVHATWRTGSSFLGELFNQHPDVFYLYEPMWHLWQALYPGDAESLQGALRDMLRSLFRCDFSVLRLYAPPGDPAARAPDTANLTTAALFRWRTNKVICSPPLCPGAPRARAEVGLVEDTACERSCPPVAIRALEAECRKYPVVVIKDVRLLDLGVLVPLLRDPGLNLKVVQLFRDPRAVHNSRLKSRQGLLRESIQVLRTRQRGDRFHRVLLAHGVGARPGGQSRALPAAPRADFFLTGALEVICEAWLRDLLFARGAPAWLRRRYLRLRYEDLVRQPRAQLRRLLRFSGLRALAALDAFALNMTRGAAYGADRPFHLSARDAREAVHAWRERLSREQVRQVEAACAPAMRLLAYPRSGEEGDAEQPREGETPLEMDADGAT

SEQ ID NO: 39989 - protein, 530 aa, Homo sapiens
MSRSPQRALPPGALPRLLQAAPAAAPRALLPQWPRRPGRRWPASPLGMKVFRRKALVLCAGYALLLVLTMLNLLDYKWHKEPLQQCNPDGPLGAAAGAAGGSWGRPGPPPAGPPRAHARLDLRTPYRPPAAAVGAAPAAAAGMAGVAAPPGNGTRGTGGVGDKRQLVYVFTTWRSGSSFFGELFNQNPEVFFLYEPVWHVWQKLYPGDAVSLQGAARDMLSALYRCDLSVFQLYSPAGSGGRNLTTLGIFGAATNKVVCSSPLCPAYRKEVVGLVDDRVCKKCPPQRLARFEEECRKYRTLVIKGVRVFDVAVLAPLLRDPALDLKVIHLVRDPRAVASSRIRSRHGLIRESLQVVRSRDPRAHRMPFLEAAGHKLGAKKEGVGGPADYHALGAMEVICNSMAKTLQTALQPPDWLQGHYLVVRYEDLVGDPVKTLRRVYDFVGLLVSPEMEQFALNMTSGSGSSSKPFVVSARNATQAANAWRTALTFQQIKQVEEFCYQPMAVLGYERVNSPEEVKDLSKTLLRKPRL

SEQ ID NO: 39990 - protein, 356 aa, Homo sapiens
MHHQWLLLAACFWVIFMFMVASKFITLTFKDPDVYSAKQEFLFLTTMPEVRKLPEEKHIPEELKPTGKELPDSQLVQPLVYMERLELIRNVCRDDALKNLSHTPVSKFVLDRIFVCDKHKILFCQTPKVGNTQWKKVLIVLNGAFSSIEEIPENVVHDHEKNGLPRLSSFSDAEIQKRLKTYFKFFIVRDPFERLISAFKDKFVHNPRFEPWYRHEIAPGIIRKYRRNRTETRGIQFEDFVRYLGDPNHRWLDLQFGDHIIHWVTYVELCAPCEIMYSVIGHHETLEDDAPYILKEAGIDHLVSYPTIPPGITVYNRTKVEHYFLGISKRDIRRLYARFEGDFKLFGYQKPDFLLN

SEQ ID NO: 39991 - protein, 141 aa, Homo sapiens
MHHQWLLLAACFWVIFMFMVASKFITLTFKDPDVYSAKQEFLFLTTMPEVRKLPEEKHIPEELKPTGKELPDSQLVQPLVYMERLELIRNVCRDDALKNLSHTPVSKFVLDRIFVCDKHKILFCQTPKVGNTQWKKVLIVL

SEQ ID NO: 39992 - protein, 356 aa, Homo sapiens; identical to SEQ ID NO: 39990

SEQ ID NO: 39993 - protein, 64 aa, Homo sapiens
MHHQWLLLAACFWVIFMFMVASKFITLTFKDPDVYSAKQEFLFLTTMPEVRKLPEEKHIPEELK

SEQ ID NO: 39994 - protein, 133 aa, Homo sapiens
MHHQWLLLAACFWVIFMFMVASKFITLTFKDPDVYSAKQEFLFLTTMPEVRKLPEEKHIPEELKPTGKELPDSQLVQPLVYMERLELIRNVCRDDALKNLSHTPVSKFVLDRIFVCDKHKILFCQTPKVGNTQ

SEQ ID NO: 39995 - protein, 85 aa, Homo sapiens
MHHQWLLLAACFWVIFMFMVASKFITLTFKDPDVYSAKQEFLFLTTMPEVRKLPEEKHIPEELKPTGKELPDSQLVQPLVYMERL

SEQ ID NO: 39996 - protein, 33 aa, Homo sapiens
MHHQWLLLAACFWVIFMFMVASKFITLTFKDPD

SEQ ID NO: 39997 - protein, 404 aa, Homo sapiens
MQRKAGKKEHVQLRDKRNQEPQFRGNTARKCEPQAAEGRVSEWLRCDNMHHQWLLLAACFWVIFMFMVASKFITLTFKDPDVYSAKQEFLFLTTMPEVRKLPEEKHIPEELKPTGKELPDSQLVQPLVYMERLELIRNVCRDDALKNLSHTPVSKFVLDRIFVCDKHKILFCQTPKVGNTQWKKVLIVLNGAFSSIEEIPENVVHDHEKNGLPRLSSFSDAEIQKRLKTYFKFFIVRDPFERLISAFKDKFVHNPRFEPWYRHEIAPGIIRKYRRNRTETRGIQFEDFVRYLGDPNHRWLDLQFGDHIIHWVTYVELCAPCEIMYSVIGHHETLEDDAPYILKEAGIDHLVSYPTIPPGITVYNRTKVEHYFLGISKRDIRRLYARFEGDFKLFGYQKPDFLLN

SEQ ID NO: 39998 - protein, 261 aa, Homo sapiens
MASPDWGYDDKNGPEQWSKLYPIANGNNQSPVDIKTSETKHDTSLKPISVSYNPATAKEIINVGHSFHVNFEDNDNRSVLKGGPFSDSYRLFQFHFHWGSTNEHGSEHTVDGVKYSAELHVAHWNSAKYSSLAEAASKADGLAVIGVLMKVGEANPKLQKVLDALQAIKTKGKRAPFTNFDPSTLLPSSLDFWTYPGSLTHPPLYESVTWIICKESISVSSEQLAQFRSLLSNVEGDNAVPMQHNNRPTQPLKGRTVRASF

SEQ ID NO: 39999 - protein, 261 aa, Homo sapiens; identical to SEQ ID NO: 39998

SEQ ID NO: 40000 - protein, 261 aa, Homo sapiens; identical to SEQ ID NO: 39998

SEQ ID NO: 40001 - protein, 176 aa, Homo sapiens
MASPDWGYDDKNGPEQWSKLYPIANGNNQSPVDIKTSETKHDTSLKPISVSYNPATAKEIINVGHSFHVNFEDNDNRSVLKGGPFSDSYRLFQFHFHWGSTNEHGSEHTVDGVKYSAELHVAHWNSAKYSSLAEAASKADGLAVIGVLMKVGEANPKLQKVLDALQAIKTKGKRAP

SEQ ID NO: 40002 - protein, 251 aa, Homo sapiens
MASPDWGYDDKNGPEQWSKLYPIANGNNQSPVDIKTSETKHDTSLKPISVSYNPATAKEIINVGHSFHVNFEDNDNRSVLKGGPFSDSYRLFQFHFHWGSTNEHGSEHTVDGVKYSAELHVAHWNSAKYSSLAEAASKADGLAVIGVLMKVGEANPKLQKVLDALQAIKTKGKRAPFTNFDPSTLLPSSLDFWTYPGSLTHPPLYESVTWIICKESISVSSEQLAQFRSLLSNVEGDNAVPMQHNNRPTQP

SEQ ID NO: 40003 - protein, 22 aa, Homo sapiens
MASPDWGYDDKNGPEQWSKLYP

SEQ ID NO: 40004 - protein, 149 aa, Homo sapiens
MASPDWGYDDKNGPEQWSKLYPIANGNNQSPVDIKTSETKHDTSLKPISVSYNPATAKEIINVGHSFHVNFEDNDNRSVLKGGPFSDSYRLFQFHFHWGSTNEHGSEHTVDGVKYSAELHVAHWNSAKYSSLAEAASKADGLAVIGVLM

SEQ ID NO: 40005 - protein, 149 aa, Homo sapiens; identical to SEQ ID NO: 40004

SEQ ID NO: 40006 - protein, 118 aa, Homo sapiens
MASPDWGYDDKNGPEQWSKLYPIANGNNQSPVDIKTSETKHDTSLKPISVSYNPATAKEIINVGHSFHVNFEDNDNRSVLKGGPFSDSYRLFQFHFHWGSTNEHGSEHTVDGVKYSAE

SEQ ID NO: 40007 - protein, 148 aa, Homo sapiens
MASPDWGYDDKNGPEQWSKLYPIANGNNQSPVDIKTSETKHDTSLKPISVSYNPATAKEIINVGHSFHVNFEDNDNRSVLKGGPFSDSYRLFQFHFHWGSTNEHGSEHTVDGVKYSAELHVAHWNSAKYSSLAEAASKADGLAVIGVL

SEQ ID NO: 40008 - protein, 261 aa, Homo sapiens; identical to SEQ ID NO: 39998

SEQ ID NO: 40009 - protein, 99 aa, Homo sapiens
MASPDWGYDDKNGPEQWSKLYPIANGNNQSPVDIKTSETKHDTSLKPISVSYNPATAKEIINVGHSFHVNFEDNDNRSVLKGGPFSDSYRLFQFHFHWG

SEQ ID NO: 40010 - protein, 261 aa, Homo sapiens; identical to SEQ ID NO: 39998

SEQ ID NO: 40011 - protein, 261 aa, Homo sapiens; identical to SEQ ID NO: 39998

SEQ ID NO: 40012 - protein, 260 aa, Homo sapiens
MSHHWGYGKHNGPEHWHKDFPIAKGERQSPVDIDTHTAKYDPSLKPLSVSYDQATSLRILNNGHAFNVEFDDSQDKAVLKGGPLDGTYRLIQFHFHWGSLDGQGSEHTVDKKKYAAELHLVHWNTKYGDFGKAVQQPDGLAVLGIFLKVGSAKPGLQKVVDVLDSIKTKGKSADFTNFDPRGLLPESLDYWTYPGSLTTPPLLECVTWIVLKEPISVSSEQVLKFRKLNFNGEGEPEELMVDNWRPAQPLKNRQIKASFK

SEQ ID NO: 40013 - protein, 260 aa, Homo sapiens
MAKEWGYASHNGPDHWHELFPNAKGENQSPVELHTKDIRHDPSLQPWSVSYDGGSAKTILNNGKTCRVVFDDTYDRSMLRGGPLPGPYRLRQFHLHWGSSDDHGSEHTVDGVKYAAELHLVHWNPKYNTFKEALKQRDGIAVIGIFLKIGHENGEFQIFLDALDKIKTKGKEAPFTKFDPSCLFPACRDYWTYQGSFTTPPCEECIVWLLLKEPMTVSSDQMAKLRSLLSSAENEPPVPLVSNWRPPQPINNRVVRASFK

SEQ ID NO: 40014 - protein, 244 aa, Homo sapiens
MAKEWGYASHNGPDHWHELFPNAKGENQSPWSVSYDGGSAKTILNNGKTCRVVFDDTYDRSMLRGGPLPGPYRLRQFHLHWGSSDDHGSEHTVDGVKYAAELHLVHWNPKYNTFKEALKQRDGIAVIGIFLKIGHENGEFQIFLDALDKIKTKGKEAPFTKFDPSCLFPACRDYWTYQGSFTTPPCEECIVWLLLKEPMTVSSDQMAKLRSLLSSAENEPPVPLVSNWRPPQPINNRVVRASFK

SEQ ID NO: 40015 - protein, 317 aa, Homo sapiens
MVVMNSLRVILQASPGKLLWRKFQIPRFMPARPCSLYTCTYKTRNRALHPLWESVDLVPGGDRQSPINIRWRDSVYDPGLKPLTISYDPATCLHVWNNGYSFLVEFEDSTDKSVIKGGPLEHNYRLKQFHFHWGAIDAWGSEHTVDSKCFPAELHLVHWNAVRFENFEDAALEENGLAVIGVFLKLGKHHKELQKLVDTLPSIKHKDALVEFGSFDPSCLMPTCPDYWTYSGSLTTPPLSESVTWIIKKQPVEVDHDQLEQFRTLLFTSEGEKEKRMVDNFRPLQPLMNRTVRSSFRHDYVLNVQAKPKPATSQATP

SEQ ID NO: 40016 - protein, 317 aa, Homo sapiens; identical to SEQ ID NO: 40015

SEQ ID NO: 40017 - protein, 136 aa, Homo sapiens
MVVMNSLRVILQASPGKLLWRKFQIPRFMPARPCSLYTCTYKTRNRALHPLWESVDLVPGGDRQSPINIRWRDSVYDPGLKPLTISYDPATCLHVWNNGYSFLVEFEDSTDKSVIKGGPLEHNYRLKQFHFHWGAI

SEQ ID NO: 40018 - protein, 76 aa, Homo sapiens
MVVMNSLRVILQASPGKLLWRKFQIPRFMPARPCSLYTCTYKTRNRALHPLWESVDLVPGGDRQSPINIRWRDSVY

SEQ ID NO: 40019 - protein, 179 aa, Homo sapiens
MRALVLLLSLFLLGGQAQHVSDWTYSEGALDEAHWPQHYPACGGQRQSPINLQRTKVRYNPSLKGLNMTGYETQAGEFPMVNNGHTDWQAELFLPSLSSPCGEGAKHKGQRQWLCSPSLDSWWEAIIDGGSLWATLAECGLRAEGPEEGRHMEEKSPASQGACSGSRLPISRGPCTFFL

SEQ ID NO: 40020 - protein, 313 aa, Homo sapiens
MRALVLLLSLFLLGGQAQHVSDWTYSEGALDEAHWPQHYPACGGQRQSPINLQRTKVRYNPSLKGLNMTGYETQAGEFPMVNNGHTVQISLPSTMRMTVADGTVYIAQQMHFHWGGASSEISGSEHTVDGIRHVIEIHIVHYNSKYKSYDIAQDAPDGLAVLAAFVEVKNYPENTYYSNFISHLANIKYPGQRTTLTGLDVQDMLPRNLQHYYTYHGSLTTPPCTENVHWFVLADFVKLSRTQVWKLENSLLDHRNKTIHNDYRRTQPLNHRVVESNFPNQGKGHGGHRGRSQNPRVQPTSTRHPLALGSLEA

SEQ ID NO: 40021 - protein, 308 aa, Homo sapiens
MRALVLLLSLFLLGGQAQHVSDWTYSEGALDEAHWPQHYPACGGQRQSPINLQRTKVRYNPSLKGLNMTGYETQAGEFPMVNNGHTVQISLPSTMRMTVADGTVYIAQQMHFHWGGASSEISGSEHTVDGIRHVIEIHIVHYNSKYKSYDIAQDAPDGLAVLAAFVEVKNYPENTYYSNFISHLANIKYPGQRTTLTGLDVQDMLPRNLQHYYTYHGSLTTPPCTENVHWFVLADFVKLSRTQVWKLENSLLDHRNKTIHNDYRRTQPLNHRVVESNFPNQEYTLGSEFQFYLHKIEEILDYLRRALN

SEQ ID NO: 40022 - protein, 264 aa, Homo sapiens [sequence omitted]

SEQ ID NO: 40023 - protein, 208 aa, Homo sapiens
MSLSITNNGHSVQVDFNDSDDRTVVTGGPLEGPYRLKQFHFHWGKKHDVGSEHTVDGKSFPSELHLVHWNAKKYSTFGEAASAPDGLAVVGVFLETGDEHPSMNRLTDALYMVRFKGTKAQFSCFNPKCLLPASRHYWTYPGSLTTPPLSESVTWIVLREPICISERQMGKFRSLLFTSEDDERIHMVNNFRPPQPLKGRVVKASFRA

SEQ ID NO: 40024 - protein, 290 aa, Homo sapiens
MADLSFIEDTVAFPEKEEDEEEEEEGVEWGYEEGVEWGLVFPDANGEYQSPINLNSREARYDPSLLDVRLSPNYVVCRDCEVTNDGHTIQVILKSKSVLSGGPLPQGHEFELYEVRFHWGRENQRGSEHTVNFKAFPMELHLIHWNSTLFGSIDEAVGKPHGIAIIALFVQIGKEHVGLKAVTEILQDIQYKGKSKTIPCFNPNTLLPDPLLRDYWVYEGSLTIPPCSEGVTWILFRYPLTISQLQIEEFRRLRTHVKGAELVEGCDGILGDNFRPTQPLSDRVIRAAFQ

SEQ ID NO: 40025 - protein, 328 aa, Homo sapiens
MEIVWEVLFLLQANFIVCISAQQNSPKIHEGWWAYKEVVQGSFVPVPSFWGLVNSAWNLCSVGKRQSPVNIETSHMIFDPFLTPLRINTGGRKVSGTMYNTGRHVSLRLDKEHLVNISGGPMTYSHRLEEIRLHFGSEDSQGSEHLLNGQAFSGEVQLIHYNHELYTNVTEAAKSPNGLVVVSIFIKVSDSSNPFLNRMLNRDTITRITYKNDAYLLQGLNIEELYPETSSFITYDGSMTIPPCYETASWIIMNKPVYITRMQMHSLRLLSQNQPSQIFLSMSDNFRPVQPLNNRCIRTNINFSLQGKDCPNNRAQKLQYRVNEWLLK

SEQ ID NO: 40026 - protein, 334 aa, Homo sapiens
MASIRSRSGCGFTEPDELCMVGVRENAQQNSPKIHEGWWAYKEVVQGSFVPVPSFWGLVNSAWNLCSVGKRQSPVNIETSHMIFDPFLTPLRINTGGRKVSGTMYNTGRHVSLRLDKEHLVNISGGPMTYSHRLEEIRLHFGSEDSQGSEHLLNGQAFSGEVQLIHYNHELYTNVTEAAKSPNGLVVVSIFIKVSDSSNPFLNRMLNRDTITRITYKNDAYLLQGLNIEELYPETSSFITYDGSMTIPPCYETASWIIMNKPVYITRMQMHSLRLLSQNQPSQIFLSMSDNFRPVQPLNNRCIRTNINFSLQGKDCPNNRAQKLQYRVNEWLLK

SEQ ID NO: 40027 - protein, 328 aa, Homo sapiens; identical to SEQ ID NO: 40025

SEQ ID NO: 40028 - protein, 328 aa, Homo sapiens; identical to SEQ ID NO: 40025

SEQ ID NO: 40029 - protein, 328 aa, Homo sapiens
MGAAARLSAPRALVLWAALGAAAHIGPAPDPEDWWSYKDNLQGNFVPGPPFWGLVNAAWSLCAVGKRQSPVDVELKRVLYDPFLPPLRLSTGGEKLRGTLYNTGRHVSFLPAPRPVVNVSGGPLLYSHRLSELRLLFGARDGAGSEHQINHQGFSAEVQLIHFNQELYGNFSAASRGPNGLAILSLFVNVASTSNPFLSRLLNRDTITRISYKNDAYFLQDLSLELLFPESFGFITYQGSLSTPPCSETVTWILIDRALNITSLQMHSLRLLSQNPPSQIFQSLSGNSRPLQPLAHRALRGNRDPRHPERRCRGPNYRLHVDGVPHGR

SEQ ID NO: 40030 - protein, 354 aa, Homo sapiens
MPRRSLHAAAVLLLVILKEQPSSPAPVNGSKWTYFGPDGENSWSKKYPSCGGLLQSPIDLHSDILQYDASLTPLEFQGYNLSANKQFLLTNNGHSVKLNLPSDMHIQGLQSRYSATQLHLHWGNPNDPHGSEHTVSGQHFAAELHIVHYNSDLYPDASTASNKSEGLAVLAVLIEMGSFNPSYDKIFSHLQHVKYKGQEAFVPGFNIEELLPERTAEYYRYRGSLTTPPCNPTVLWTVFRNPVQISQEQLLALETALYCTHMDDPSPREMINNFRQVQKFDERLVYTSFSQVQVCTAAGLSLGIILSLALAGILGICIVVVVSIWLFRRKSIKKGDNKGVIYKPATKMETEAHA

SEQ ID NO: 40031 - protein, 343 aa, Homo sapiens
MPRRSLHAAAVLLLVILKEQPSSPAPVNGSKWTYFGPDGENSWSKKYPSCGGLLQSPIDLHSDILQYDASLTPLEFQGYNLSANKQFLLTNNGHSVKLNLPSDMHIQGLQSRYSATQLHLHWGNPNDPHGSEHTVSGQHFAAELHIVHYNSDLYPDASTASNKSEGLAVLAVLIEMGSFNPSYDKIFSHLQHVKYKGQEAFVPGFNIEELLPERTAEYYRYRGSLTTPPCNPTVLWTVFRNPVQISQEQLLALETALYCTHMDDPSPREMINNFRQVQKFDERLVYTSFSQGIILSLALAGILGICIVVVVSIWLFRRKSIKKGDNKGVIYKPATKMETEAHA

SEQ ID NO: 40032 - protein, 283 aa, Homo sapiens
MPRRSLHAAAVLLLVILKEQPSSPAPVNGSKWTYFVKLNLPSDMHIQGLQSRYSATQLHLHWGNPNDPHGSEHTVSGQHFAAELHIVHYNSDLYPDASTASNKSEGLAVLAVLIEMGSFNPSYDKIFSHLQHVKYKGQEAFVPGFNIEELLPERTAEYYRYRGSLTTPPCNPTVLWTVFRNPVQISQEQLLALETALYCTHMDDPSPREMINNFRQVQKFDERLVYTSFSQGIILSLALAGILGICIVVVVSIWLFRRKSIKKGDNKGVIYKPATKMETEAHA

SEQ ID NO: 40033 - protein, 337 aa, Homo sapiens
MLFSALLLEVIWILAADGGQHWTYEGPHGQDHWPASYPECGNNAQSPIDIQTDSVTFDPDLPALQPHGYDQPGTEPLDLHNNGHTVQLSLPSTLYLGGLPRKYVAAQLHLHWGQKGSPGGSEHQINSEATFAELHIVHYDSDSYDSLSEAAERPQGLAVLGILIEVGETKNIAYEHILSHLHEVRHKDQKTSVPPFNLRELLPKQLGQYFRYNGSLTTPPCYQSVLWTVFYRRSQISMEQLEKLQGTLFSTEEEPSKLLVQNYRALQPLNQRMVFASFIQAGSSYTTGEMLSLGVGILVGCLCLLLAVYFIARKIRKKRLENRKSVVFTSAQATTEA

SEQ ID NO: 40034 - protein, 277 aa, Homo sapiens
MSSGIHVALVTGGNKGIGLAIVRDLCRLFSGDVVLTARDVTRGQAAVQQLQAEGLSPRFHQLDIDDLQSIRALRDFLRKEYGGLDVLVNNAGIAFKVADPTPFHIQAEVTMKTNFFGTRDVCTELLPLIKPQGRVVNVSSIMSVRALKSCSPELQQKFRSETITEEELVGLMNKFVEDTKKGVHQKEGWPSSAYGVTKIGVTVLSRIHARKLSEQRKGDKILLNACCPGWVRTDMAGPKATKSPEEGAETPVYLALLPPDAEGPHGQFVSEKRVEQW

SEQ ID NO: 40035 - protein, 277 aa, Homo sapiens
MSSCSRVALVTGANRGIGLAIARELCRQFSGDVVLTARDVARGQAAVQQLQAEGLSPRFHQLDIDDLQSIRALRDFLRKEYGGLNVLVNNAAVAFKSDDPMPFDIKAEMTLKTNFFATRNMCNELLPIMKPHGRVVNISSLQCLRAFENCSEDLQERFHSETLTEGDLVDLMKKFVEDTKNEVHEREGWPNSPYGVSKLGVTVLSRILARRLDEKRKADRILVNACCPGPVKTDMDGKDSIRTVEEGAETPVYLALLPPDATEPQGQLVHDKVVQNW

SEQ ID NO: 40036 - protein, 722 aa, Homo sapiens
MLTMGRLQLVVLGLTCCWAVASAAKLGAVYTEGGFVEGVNKKLGLLGDSVDIFKGIPFAAPTKALENPQPHPGWQGTLKAKNFKKRCLQATITQDSTYGDEDCLYLNIWVPQGRKQVSRDLPVMIWIYGGAFLMGSGHGANFLNNYLYDGEEIATRGNVIVVTFNYRVGPLGFLSTGDANLPGNYGLRDQHMAIAWVKRNIAAFGGDPNNITLFGESAGGASVSLQTLSPYNKGLIRRAISQSGVALSPWVIQKNPLFWAKKVAEKVGCPVGDAARMAQCLKVTDPRALTLAYKVPLAGLEYPMLHYVGFVPVIDGDFIPADPINLYANAADIDYIAGTNNMDGHIFASIDMPAINKGNKKVTEDFYKLVSEFTITKGLRGAKTTFDVYTESWAQDPSQENKKKTVVDFETDVLFLVPTEIALAQHRANAKSAKTYAYLFSHPSRMPVYPKWVGADHADDIQYVFGKPFATPTGYRPQDRTVSKAMIAYWTNFAKTGDPNMGDSAVPTHWEPYTTENSGYLEITKKMGSSSMKRSLRTNFLRYWTLTYLALPTVTDQEATPVPPTGDSEATPVPPTGDSETAPVPPTGDSGAPPVPPTGDSGAPPVPPTGDSGAPPVPPTGDSGAPPVPPTGDSGAPPVPPTGDAGPPPVPPTGDSGAPPVPPTGDSGAPPVTPTGDSETAPVPPTGDSGAPPVPPTGDSEAAPVPPTDDSKEAQMPAVIRF

SEQ ID NO: 40037 - protein, 687 aa, Homo sapiens
MGRLQLVVLGLTCCWAVASAAKLGAVYTEGGFVEGVNKKLGLLGDSVDIFKGIPFAAPTKALENPQPHPGWQGTLKAKNFKKRCLQATITQDSTYGDEDCLYLNIWVPQGRKQVSRDLPVMIWIYGGAFLMGSGHGANFLNNYLYDGEEIATRGNVIVVTFNYRVGPLGFLSTGDANLPGNYGLRDQHMAIAWVKRNIAAFGGDPNNITLFGESAGGASVSLQTLSPYNKGLIRRAISQSGVALSPWVIQKNPLFWAKKVAEKVGCPVGDAARMAQCLKVTDPRALTLAYKVPLAGLEYPMLHYVGFVPVIDGDFIPADPINLYANAADIDYIAGTNNMDGHIFASIDMPAINKGNKKVTEEDFYKLVSEFTITKGLRGAKTTFDVYTESWAQDPSQENKKKTVVDFETDVLFLVPTEIALAQHRANAKDPNMGDSAVPTHWEPYTTENSGYLEITKKMGSSSMKRSLRTNFLRYWTLTYLALPTVTDQEATPVPPTGDSEATPVPPTGDSETAPVPPTGDSGAPPVPPTGDSGAPPVPPTGDSGAPPVPPTGDSGAPPVPPTGDSGAPPVPPTGDSGAPPVPPTGDSGAPPVPPTGDSGAPPVPPTGDAGPPPVPPTGDSGAPPVPPTGDSGAPPVTPTGDSETAPVPPTGDSGAPPVPPTGDSEAAPVPPTDDSKEAQMPAVIRF

SEQ ID NO: 40038 - protein, 756 aa, Homo sapiens
MLTMGRLQLVVLGLTCCWAVASAAKLGAVYTEGGFVEGVNKKLGLLGDSVDIFKGIPFAAPTKALENPQPHPGWQGTLKAKNFKKRCLQATITQDSTYGDEDCLYLNIWVPQGRKQVSRDLPVMIWIYGGAFLMGSGHGANFLNNYLYDGEEIATRGNVIVVTFNYRVGPLGFLSTGDANLPGNYGLRDQHMAIAWVKRNIAAFGGDPNNITLFGESAGGASVSLQTLSPYNKGLIRRAISQSGVALSPWVIQKNPLFWAKKVAEKVGCPVGDAARMAQCLKVTDPRALTLAYKVPLAGLEYPMLHYVGFVPVIDGDFIPADPINLYANAADIDYIAGTNNMDGHIFASIDMPAINKGNKKVTEEDFYKLVSEFTITKGLRGAKTTFDVYTESWAQDPSQENKKKTVVDFETDVLFLVPTEIALAQHRANAKSAKTYAYLFSHPSRMPVYPKWVGADHADDIQYVFGKPFATPTGYRPQDRTVSKAMIAYWTNFAKTGDPNMGDSAVPTHWEPYTTENSGYLEITKKMGSSSMKRSLRTNFLRYWTLTYLALPTVTDQEATPVPPTGDSEATPVPPTGDSETAPVPPTGDSGAPPVPPTGDSGAPPVPPTGDSGAPPVPPTGDSGAPPVPPTGDSGAPPVPPTGDSGAPPVPPTGDSGAPPVPPTGDSGAPPVPPTGDAGPPPVPPTGDSGAPPVPPTGDSGAPPVTPTGDSETAPVPPTGDSGAPPVPPTGDSEAAPVPPTDDSKEAQMPAVIRF

SEQ ID NO: 40039 - protein, 568 aa, Homo sapiens
MWLRAFILATLSASAAWAGHPSSPPVVDTVHGKVLGKFVSLEGFAQPVAIFLGIPFAKPPLGPLRFTPPQPAEPWSFVKNATSYPPMCTQDPKAGQLLSELFTNRKENIPLKLSEDCLYLNIYTPADLTKKNRLPVMVWIHGGGLMVGAASTYDGLALAAHENVVVVTIQYRLGIWGFFSTGDEHSRGNWGHLDQVAALRWVQDNIASFGGNPGSVTIFGESAGGESVSVLVLSPLAKNLFHRAISESGVALTSVLVKKGDVKPLAEQIAITAGCKTTTSAVMVHCLRQKTEEELLETTLKMKFLSLDLQGDPRESQPLLGTVIDGMLLLKTPEELQAERNFHTVPYMVGINKQEFGWLIPMQLMSYPLSEGQLDQKTAMSLLWKSYPLVCIAKELIPEATEKYLGGTDDTVKKKDLFLDLIADVMFGVPSVIVARNHRDAGAPTYMYEFQYRPSFSSDMKPKTVIGDHGDELFSVFGAPFLKEGASEEEIRLSKMVMKFWANFARNGNPNGEGLPHWPEYNQKEGYLQIGANTQAAQKLKDKEVAFWTNLFAKKAVEKPPQTEHIEL

SEQ ID NO: 40040 - protein, 567 aa, Homo sapiens
MWLRAFILATLSASAAWGHPSSPPVVDTVHGKVLGKFVSLEGFAQPVAIFLGIPFAKPPLGPLRFTPPQPAEPWSFVKNATSYPPMCTQDPKAGQLLSELFTNRKENIPLKLSEDCLYLNIYTPADLTKKNRLPVMVWIHGGGLMVGAASTYDGLALAAHENVVVVTIQYRLGIWGFFSTGDEHSRGNWGHLDQVAALRWVQDNIASFGGNPGSVTIFGESAGGESVSVLVLSPLAKNLFHRAISESGVALTSVLVKKGDVKPLAEQIAITAGCKTTTSAVMVHCLRQKTEEELLETTLKMKFLSLDLQGDPRESQPLLGTVIDGMLLLKTPEELQAERNFHTVPYMVGINKQEFGWLIPMQLMSYPLSEGQLDQKTAMSLLWKSYPLVCIAKELIPEATEKYLGGTDDTVKKKDLFLDLIADVMFGVPSVIVARNHRDAGAPTYMYEFQYRPSFSSDMKPKTVIGDHGDELFSVFGAPFLKEGASEEEIRLSKMVMKFWANFARNGNPNGEGLPHWPEYNQKEGYLQIGANTQAAQKLKDKEVAFWTNLFAKKAVEKPPQTEHIEL

SEQ ID NO: 40041 - protein, 566 aa, Homo sapiens
MWLRAFILATLSASAAWGHPSSPPVVDTVHGKVLGKFVSLEGFAQPVAIFLGIPFAKPPLGPLRFTPPQPAEPWSFVKNATSYPPMCTQDPKAGQLLSELFTNRKENIPLKLSEDCLYLNIYTPADLTKKNRLPVMVWIHGGGLMVGAASTYDGLALAAHENVVVVTIQYRLGIWGFFSTGDEHSRGNWGHLDQVAALRWVQDNIASFGGNPGSVTIFGESAGGESVSVLVLSPLAKNLFHRAISESGVALTSVLVKKGDVKPLAEQIAITAGCKTTTSAVMVHCLRQKTEEELLETTLKMKFLSLDLQGDPRESQPLLGTVIDGMLLLKTPEELQAERNFHTVPYMVGINKQEFGWLIPMLMSYPLSEGQLDQKTAMSLLWKSYPLVCIAKELIPEATEKYLGGTDDTVKKKDLFLDLIADVMFGVPSVIVARNHRDAGAPTYMYEFQYRPSFSSDMKPKTVIGDHGDELFSVFGAPFLKEGASEEEIRLSKMVMKFWANFARNGNPNGEGLPHWPEYNQKEGYLQIGANTQAAQKLKDKEVAFWTNLFAKKAVEKPPQTEHIEL

SEQ ID NO: 40042 - protein, 432 aa, Homo sapiens
MVWIHGGGLMVGAASTYDGLALAAHENVVVVTIQYRLGIWGFFSTGDEHSRGNWGHLDQVAALRWVQDNIASFGGNPGSVTIFGESAGGESVSVLVLSPLAKNLFHRAISESGVALTSVLVKKGDVKPLAEQIAITAGCKTTTSAVMVHCLRQKTEEELLETTLKMKFLSLDLQGDPRESQPLLGTVIDGMLLLKTPEELQAERNFHTVPYMVGINKQEFGWLIPMQLMSYPLSEGQLDQKTAMSLLWKSYPLVCIAKELIPEATEKYLGGTDDTVKKKDLFLDLIADVMFGVPSVIVARNHRDAGAPTYMYEFQYRPSFSSDMKPKTVIGDHGDELFSVFGAPFLKEGASEEEIRLSKMVMKFWANFARNGNPNGEGLPHWPEYNQKEGYLQIGANTQAAQKLKDKEVAFWTNLFAKKAVEKPPQTEHIEL

SEQ ID NO: 40043 - protein, 571 aa, Homo sapiens
MERAVRVESGVLVGVVCLLLACPATATGPEVAQPEVDTTLGRVRGRQVGVKGTDRLVNVFLGIPFAQPPLGPDRFSAPHPAQPWEGVRDASTAPPMCLQDVESMNSSRFVLNGKQQIFSVSEDCLVLNVYSPAEVPAGSGRPVMVWVHGGALITGAATSYDGSALAAYGDVVVVTVQYRLGVLGFFSTGDEHAPGNQGFLDVVAALRWVQENIAPFGGDLNCVTVFGGSAGGSIISGLVLSPVAAGLFHRAITQSGVITTPGIIDSHPWPLAQKIANTLACSSSSPAEMVQCLQQKEGEELVLSKKLKNTIYPLTVDGTVFPKSPKELLKEKPFHSVPFLMGVNNHEFSWLIPRGWGLLDTMEQMSREDMLAISTPVLTSLDVPPEMMPTVIDEYLGSNSDAQAKCQAFQEFMGDVFINVPTVSFSRYLRDSGSPVFFYEFQHRPSSFAKIKPAWVKADHGAEGAFVFGGPFLMDESSRLAFPEATEEEKQLSLTMMAQWTHFARTGDPNSKALPPWPQFNQAEQYLEINPVPRAGQKFREAWMQFWSETLPSKIQQWHQKQKNRKAQEDL

SEQ ID NO: 40044 - protein, 210 aa, Homo sapiens
MEQMSREDMLAISTPVLTSLDVPPEMMPTVIDEYLGSNSDAQAKCQAFQEFMGDVFINVPTVSFSRYLRDSGSPVFFYEFQHRPSSFAKIKPAWVKADHGAEGAFVFGGPFLMDESSRLAFPEATEEEKQLSLTMMAQWTHFARTGDPNSKALPPWPQFNQAEQYLEINPVPRAGQKFREAWMQFWSETLPSKIQQWHQKQKNRKAQEDL

SEQ ID NO: 40045 - protein, 568 aa, Homo sapiens
MERAVRVESGVLVGVVCLLLACPATATGPEVAQPEVDTTLGRVRGRQVGVKGTDRLVNVFLGIPFAQPPLGPDRFSAPHPAQPWEGVRDASTAPPMCLQDVESMNSSRFVLNGKQQIFSVSEDCLVLNVYSPAEVPAGSGRPVMVWVHGGALITGAATSYDGSALAAYGDVVVVTVQYRLGVLGFFSTGDEHAPGNQGFLDVVAALRWVQENIAPFGGDLNCVTVFGGSAGGSIISGLVLSPVAAGLFHRAITQSGVITTPGIIDSHPWPLAQKIANTLACSSSSPAEMVQCLQQKEGEELVLSKKLKNTIYPLTVDGTVFPKSPKELLKEKPFHSVPFLMGVNNHEFSWLIPRGWGLLDTMEQMSREDMLAISTPVLTSLDVPPEMMPTVIDEYLGSNSDAQAKCQAFQEFMGDVFINVPTVSFSRYLRDSGSPVFFYEFQHRPSSFAKIKPAWVKADHGAEGAFVFGGPFLMDESSRLEATEEEKQLSLTMMAQWTHFARTGDPNSKALPPWPQFNQAEQYLEINPVPRAGQKFREAWMQFWSETLPSKIQQWHQKQKNRKAQEDL

SEQ ID NO: 40046 - protein, 245 aa, Homo sapiens
MANEAYPCPCDIGHRLEYGGLGREVQVEHIKAYVTKSPVDAGKAVIVIQDIFGWQLPNTRYIADMISGNGYTTIVPDFFVGQEPWDPSGDWSIFPEWLKTRNAQKIDREISAILKYLKQQCHAQKIGIVGFCWGGTAVHHLMMKYSEFRAGVSVYGIVKDSEDIYNLKNPTLFIFAENDVVIPLKDVSLLTQKLKEHCKVEYQIKTFSGQTHGFVHRKREDCSPADKPYIDEARRNLIEWLNKYM

SEQ ID NO: 40047 - protein, 419 aa, Homo sapiens
MRGLLVLSVLLGAVFGKEDFVGHQVLRISVADEAQVQKVKELEDLEHLQLDFWRGPAHPGSPIDVRVPFPSIQAVKIFLESHGISYETMIEDVQSLLDEEQEQMFAFRSRARSTDTFNYATYHTLEEIYDFLDLLVAENPHLVSKIQIGNTYEGRPIYVLKFSTGGSKRPAIWIDTGIHSREWVTQASGVWFAKKITQDYGQDAAFTAILDTLDIFLEIVTNPDGFAFTHSTNRMWRKTRSHTAGSLCIGVDPNRNWDAGFGLSGASSNPCSETYHGKFANSEVEVKSIVDFVKDHGNIKAFISIHSYSQLLMYPYGYKTEPVPDQDELDQLSKAAVTALASLYGTKFNYGSIIKAIYQASGSTIDWTYSQGIKYSFTFELRDTGRYGFLLPASQIIPTAKETWLALLTIMEHTLNHPY

SEQ ID NO: 40048 - protein, 419 aa, Homo sapiens
MAMRLILFFGALFGHIYCLETFVGDQVLEIVPSNEEQIKNLLQLEAQEHLQLDFWKSPTTPGETAHVRVPFVNVQAVKVFLESQGIAYSIMIEDVQVLLDKENEEMLFNRRRERSGNFNFGAYHTLEEISQEMDNLVAEHPGLVSKVNIGSSFENRPMNVLKFSTGGDKPAIWLDAGIHAREWVTQATALWTANKIVSDYGKDPSITSILDALDIFLLPVTNPDGYVFSQTKNRMWRKTRSKVSGSLCVGVDPNRNWDAGFGGPGASSNPCSDSYHGPSANSEVEVKSIVDFIKSHGKVKAFITLHSYSQLLMFPYGYKCTKLDDFDELSEVAQKAAQSLRSLHGTKYKVGPICSVIYQASGGSIDWSYDYGIKYSFAFELRDTGRYGFLLPARQILPTAEETWLGLKAIMEHVRDHPY

SEQ ID NO: 40049 - protein, 417 aa, Homo sapiens
MRLILPVGLIATTLAIAPVRFDREKVFRVKPQDEKQADIIKDLAKTNELDFWYPGATHHVAANMMVDFRVSEKESQAIQSALDQNKMHYEILIHDLQEEIEKQFDVKEDIPGRHSYAKYNNWEKIVAWTEKMMDKYPEMVSRIKIGSTVEDNPLYVLKIGEKNERRKAIFTDCGIHAREWVSPAFCQWFVYQATKTYGRNKIMTKLLDRMNFYILPVFNVDGYIWSWTKNRMWRKNRSKNQNSKCIGTDLNRNFNASWNSIPNTNDPCADNYRGSAPESEKETKAVTNFIRSHLNEIKVYITFHSYSQMLLFPYGYTSKLPPNHEDLAKVAKIGTDVLSTRYETRYIYGPIESTIYPISGSSLDWAYDLGIKHTFAFELRDKGKFGFLLPESRIKPTCRETMLAVKFIAKYILKHTS

SEQ ID NO: 40050 - protein, 421 aa, Homo sapiens
MRWILFIGALIGSSICGQEKFFGDQVLRINVRNGDEISKLSQLVNSNNLKLNFWKSPSSFNRPVDVLVPSVSLQAFKSFLRSQGLEYAVTIEDLQALLDNEDDEMQHNEGQERSSNNFNYGAYHSLEAIYHEMDNIAADFPDLARRVKIGHSFENRPMYVLKFSTGKGVRRPAVWLNAGIHSREWISQATAIWTARKIVSDYQRDPAITSILEKMDIFLLPVANPDGYVYTQTQNRLWRKTRSRNPGSSCIGADPNRNWNASFAGKGASDNPCSEVYHGPHANSEVEVKSVVDFIQKHGNFKGFIDLHSYSQLLMYPYGYSVKKAPDAEELDKVARLAAKALASVSGTEYQVGPTCTTVYPASGSSIDWAYDNGIKFAFTFELRDTGTYGFLLPANQIIPTAEETWLGLKTIMEHVRDNLY

SEQ ID NO: 40051 - protein, 388 aa, Homo sapiens
MRWILFIGALIGSSICGQEKFFGDQVLRINVRNGDEISKLSQLVNSNNLKLNFWKSPSSFNRPVDVLVPSVSLQAFKSFLRSQGLEYAVTIEDLQIYHEMDNIAADFPDLARRVKIGHSFENRPMYVLKFSTGKGVRRPAVWLNAGIHSREWISQATAIWTARKIVSDYQRDPAITSILEKMDIFLLPVANPDGYVYTQTQNRLWRKTRSRNPGSSCIGADPNRNWNASFAGKGASDNPCSEVYHGPHANSEVEVKSVVDFIQKHGNFKGFIDLHSYSQLLMYPYGYSVKKAPDAEELDKVARLAAKALASVSGTEYQVGPTCTTVYPASGSSIDWAYDNGIKFAFTFELRDTGTYGFLLPANQIIPTAEETWLGLKTIMEHVRDNLY

SEQ ID NO: 40052 - protein, 226 aa, Homo sapiens
MKIVSDYQRDPAITSILEKMDIFLLPVANPDGYVYTQTQNRLWRKTRSRNPGSSCIGADPNRNWNASFAGKGASDNPCSEVYHGPHANSEVEVKSVVDFIQKHGNFKGFIDLHSYSQLLMYPYGYSVKKAPDAEELDKVARLAAKALASVSGTEYQVGPTCTTVYPASGSSIDWAYDNGIKFAFTFELRDTGTYGFLLPANQIIPTAEETWLGLKTIMEHVRDNLY

SEQ ID NO: 40053 - protein, 193 aa, Homo sapiens
MHHLNKTHSGLIHMFSIGRSYEGRSLFILKLGRRSRLKRAVWIDCGIHAREWIGPAFCQWFVKEALLTYKSDPAMRKMLNHLYFYIMPVFNVDGYHFSWTNDRFWRKTRSRNSRFRCRGVDANRNWKVKWCDVSSGSSMDWAYKNGIPYAFAFELRDTGYFGFLLPEMLIKPTCTETMLAVKNITMHLLKKCP

SEQ ID NO: 40054 - protein, 437 aa, Homo sapiens
MKCLGKRRGQAAAFLPLCWLFLKILQPGHSHLYNNRYAGDKVIRFIPKTEEEAYALKKISYQLKVDLWQPSSISYVSEGTVTDVHIPQNGSRALLAFLQEANIQYKVLIEDLQKTLEKGSSLHTQRNRRSLSGYNYEVYHSLEEIQNWMHHLNKTHSGLIHMFSIGRSYEGRSLFILKLGRRSRLKRAVWIDCGIHAREWIGPAFCQWFVKEALLTYKSDPAMRKMLNHLYFYIMPVFNVDGYHFSWTNDRFWRKTRSRNSRFRCRGVDANRNWKVKWCDEGASMHPCDDTYCGPFPESEPEVKAVANFLRKHRKHIRAYLSFHAYAQMLLYPYSYKYATIPNFRCVESAAYKAVNALQSVYGVRYRYGPASTTLYVSSGSSMDWAYKNGIPYAFAFELRDTGYFGFLLPEMLIKPTCTETMLAVKNITMHLLKKCP

SEQ ID NO: 40055 - protein, 315 aa, Homo sapiens
MKCLGKRRGQAAAFLPLCWLFLKILQPGHSHLYNNRYAGDKVIRFIPKTEEEAYALKKISYQLKVDLWQPSSISYVSEGTVTDVHIPQNGSRALLAFLQEANIQYKVLIEDLQKTLEKGSSLHTQRNRRSLSGYNYEVYHSLEEIQNWMHHLNKTHSGLIHMFSIGRSYEGRSLFILKLGRRSRLKRAVWIDCGIHAREWIGPAFCQWFVKEALLTYKSDPAMRKMLNHLYFYIMPVFNVDGYHFSWTNDRFWRKTRSRNSRFRCRGVDANRNWKVKWCGKFGTNWDPDPKVSAGFTLQNMSPEDSHGRLMFFCM

SEQ ID NO: 40056 - protein, 423 aa, Homo sapiens
MKLCSLAVLVPIVLFCEQHVFAFQSGQVLAALPRTSRQVQVLQNLTTTYEIVLWQPVTADLIVKKKQVHFFVNASDVDNVKAHLNVSGIPCSVLLADVEDLIQQQISNDTVSPRASASYYEQYHSLNEIYSWIEFITERHPDMLTKIHIGSSFEKYPLYVLKVSGKEQAAKNAIWIDCGIHAREWISPAFCLWFIGHITQFYGIIGQYTNLLRLVDFYVMPVVNVDGYDYSWKKNRMWRKNRSFYANNHCIGTDLNRNFASKHWCEEGASSSSCSETYCGLYPESEPEVKAVASFLRRNINQIKAYISMHSYSQHIVFPYSYTRSKSKDHEELSLVASEAVRAIEKISKNTRYTHGHGSETLYLAPGGGDDWIYDLGIKYSFTIELRDTGTYGFLLPERYIKPTCREAFAAVSKIAWHVIRNV

SEQ ID NO: 40057 - protein, 360 aa, Homo sapiens
MKLCSLAVLVPIVLFCEQHVFAFQSGQVLAALPRTSRQVQVLQNLTTTYEIVLWQPVTADLIVKKKQVHFFVNASDVDNVKAHLNVSGIPCSVLLADVEDLIQQQISNDTVSPRASASYYEQYHSLNEIYSWIEFITERHPDMLTKIHIGSSFEKYPLYVLKVSGKEQAAKNAIWIDCGIHAREWISPAFCLWFIGHNRMWRKNRSFYANNHCIGTDLNRNFASKHWCEEGASSSSCSETYCGLYPESEPEVKAVASFLRRNINQIKAYISMHSYSQHIVFPYSYTRSKSKDHEELSLVASEAVRAIEKISKNTRYTHGHGSETLYLAPGGGDDWIYDLGIKYSVTSNPPVEKLLPLSLK

SEQ ID NO: 40058 - protein, 1380 aa, Homo sapiens
MASGRDERPPWRLGRLLLLMCLLLLGSSARAAHIKKAEATTTTTSAGAEAAEGQFDRYYHEEELESALREAAAAGLPGLARLFSIGRSVEGRPLWVLRLTAGLGSLIPEGDAGPDAAGPDAAGPLLPGRPQVKLVGNMHGDETVSRQVLIYLARELAAGYRRGDPRLVRLLNTTDVYLLPSLNPDGFERAREGDCGFGDGGPSGASGRDNSRGRDLNRSFPDQFSTGEPPALDEVPEVRALIEWIRRNKFVLSGNLHGGSVVASYPFDDSPEHKATGIYSKTSDDEVFKYLAKAYASNHPIMKTGEPHCPGDEDETFKDGITNGAHWYDVEGGMQDYNYVWANCFEITLELSCCKYPPASQLRQEWENNRESLITLIEKVHIGVKGFVKDSITGSGLENATISVAGINHNITTGRFGDFYRLLVPGTYNLTVVLTGYMPLTVTNVVVKEGPATEVDFSLRPTVTSVIPDTTEAVSTASTVAIPNILSGTSSSYQPIQPKDFHHHHFPDMEIFLRRFANEYPNITRLYSLGKSVESRELYVMEISDNPGVHEPGEPEFKYIGNMHGNEVVGRELLLNLIEYLCKNFGTDPEVTDLVHNTRIHLMPSMNPDGYEKSQEGDSISVIGRNNSNNFDLNRNFPDQFVQITDPTQPETIAVMSWMKSYPFVLSANLHGGSLVVNYPFDDDEQGLATYSKSPDDAVFQQIALSYSKENSQMFQGRPCKNMYPNEYFPHGITNGASWYNVPGGMQDWNYLQTNCFEVTIELGCVKYPLEKELPNFWEQNRRSLIQFMKQVHQGVRGFVLDATDGRGILNATISVAEINHPVTTYKTGDYWRLLVPGTYKITASARGYNPVTKNVTVKSEGAIQVNFTLVRSSTDSNNESKKGKGASSSTNDASDPTTKEFETLIKDLSAENGLESLMLRSSSNLALALYRYHSYKDLSEFLRGLVMNYPHITNLTNLGQSTEYRHIWSLEISNKPNVSEPEEPKIRFVAGIHGNAPVGTELLLALAEFLCLNYKKNPAVTQLVDRTRIVIVPSLNPDGRERAQEKDCTSKIGQTNARGKDLDTDFTNNASQPETKAIIENLIQKQDFSLSVALDGGSMLVTYPYDKPVQTVENKETLKHLASLYANNHPSMHMGQPSCPNKSDENIPGGVMRGAEWHSHLGSMKDYSVTYGHCPEITVYTSCCYFPSAARLPSLWADNKRSLLSMLVEVHKGVHGFVKDKTGKPISKAVIVLNEGIKVQTKEGGYFHVLLAPGVHNIIAIADGYQQQHSQVFVHHDAASSVVIVFDTDNRIFGLPRELVVTVSGATMSALILTACIIWCICSIKSNRHKDGFHRLRQHHDEYEDEIRMMSTGSKKSLLSHEFQDETDTEEETLYSSKH

SEQ ID NO: 40059 - protein, 1133 aa, Homo sapiens
MRFVLSGNLHGGSVVASYPFDDSPEHKATGIYSKTSDDEVFKYLAKAYASNHPIMKTGEPHCPGDEDETFKDGITNGAHWYDVEGGMQDYNYVWANCFEITLELSCCKYPPASQLRQEWENNRESLITLIEKVHIGVKGFVKDSITGSGLENATISVAGINHNITTGRFGDFYRLLVPGTYNLTVVLTGYMPLTVTNVVVKEGPATEVDFSLRPTVTSVIPDTTEAVSTASTVAIPNILSGTSSSYQPIQPKDFHHHHFPDMEIFLRRFANEYPNITRLYSLGKSVESRELYVMEISDNPGVHEPGEPEFKYIGNMHGNEVVGRELLLNLIEYLCKNFGTDPEVTDLVHNTRIHLMPSMNPDGYEKSQEGDSISVIGRNNSNNFDLNRNFPDQFVQITDPTQPETIAVMSWMKSYPFVLSANLHGGSLVVNYPFDDDEQGLATYSKSPDDAVFQQIALSYSKENSQMFQGRPCKNMYPNEYFPHGITNGASWYNVPGGMQDWNYLQTNCFEVTIELGCVKYPLEKELPNFWEQNRRSLIQFMKQVHQGVRGFVLDATDGRGILNATISVAEINHPVTTYKTGDYWRLLVPGTYKITASARGYNPVTKNVTVKSEGAIQVNFTLVRSSTDSNNESKKGKGASSSTNDASDPTTKEFETLIKDLSAENGLESLMLRSSSNLALALYRYHSYKDLSEFLRGLVMNYPHITNLTNLGQSTEYRHIWSLEISNKPNVSEPEEPKIRFVAGIHGNAPVGTELLLALAEFLCLNYKKNPAVTQLVDRTRIVIVPSLNPDGRERAQEKDCTSKIGQTNARGKDLDTDFTNNASQPETKAIIENLIQKQDFSLSVALDGGSMLVTYPYDKPVQTVENKETLKHLASLYANNHPSMHMGQPSCPNKSDENIPGGVMRGAEWHSHLGSMKDYSVTYGHCPEITVYTSCCYFPSAARLPSLWADNKRSLLSMLVEVHKGVHGFVKDKTGKPISKAVIVLNEGIKVQTKEGGYFHVLLAPGVHNIIAIADGYQQQHSQVFVHHDAASSVVIVFDTDNRIFGLPRELVVTVSGATMSALILTACIIWCICSIKSNRHKDGFHRLRQHHDEYEDEIRMMSTGSKKSLLSHEFQDETDTEEETLYSSKH

SEQ ID NO: 40060 - protein, 382 aa, Homo sapiens
MRRRRRLQQEDGISFEYHRYPELREALVSVWLQCTAISRIYTVGRSFEGRELLVIELSDNPGVHEPGEPEFKYIGNMHGNEAVGRELLIFLAQYLCNEYQKGNETIVNLIHSTRIHIMPSLNPDGFEKAASQPGELKDWFVGRSNAQGIDLNRNFPDLDRIVYVNEKEGGPNNHLLKNMKKIVDQNTKLAPETKAVIHWIMDIPFVLSANLHGGDLVANYPYDETRSGSAHEYSSSPDDAIFQSLARAYSSFNPAMSDPNRPPCRKNDDDSSFVDGTTNGGAWYSVPGGMQDFNYLSSNCFEITVELSCEKFPPEETLKTYWEDNKNSLISYLEQIHRGVKGFVRDLQGNPIANATISVEGIDHDVTSAKDGDYWRLLTWKL

SEQ ID NO: 40061 - protein, 476 aa, Homo sapiens
MAGRGGSALLALCGALAACGWLLGAEAQEPGAPAAGMRRRRRLQQEDGISFEYHRYPELREALVSVWLQCTAISRIYTVGRSFEGRELLVIELSDNPGVHEPGEPEFKYIGNMHGNEAVGRELLIFLAQYLCNEYQKGNETIVNLIHSTRIHIMPSLNPDGFEKAASQPGELKDWFVGRSNAQGIDLNRNFPDLDRIVYVNEKEGGPNNHLLKNMKKIVDQNTKLAPETKAVIHWIMDIPFVLSANLHGGDLVANYPYDETRSGSAHEYSSSPDDAIFQSLARAYSSFNPAMSDPNRPPCRKNDDDSSFVDGTTNGGAWYSVPGGMQDFNYLSSNCFEITVELSCEKFPPEETLKTYWEDNKNSLISYLEQIHRGVKGFVRDLQGNPIANATISVEGIDHDVTSAKDGDYWRLLIPGNYKLTASAPGYLAITKKVAVPYSPAAGVDFELESFSERKEEEKEELMEWWKMMSETLNF

SEQ ID NO: 40062 - protein, 443 aa, Homo sapiens
MDFPCLWLGLLLPLVAALDFNYHRQEGMEAFLKTVAQNYSSVTHLHSIGKSVKGRNLWVLVVGRFPKEHRIGIPEFKYVANMHGDETVGRELLLHLIDYLVTSDGKDPEITNLINSTRIHIMPSMNPDGFEAVKKPDCYYSIGRENYNQYDLNRNFPDAFEYNNVSRQPETVAVMKWLKTETFVLSANLHGGALVASYPFDNGVQATGALYSRSLTPDDDVFQYLAHTYASRNPNMKKGDECKNKMNFPNGVTNGYSWYPLQGGMQDYNYIWAQCFEITLELSCCKYPREEKLPSFWNNNKASLIEYIKQVHLGVKGQVFDQNGNPLPNVIVEVQDRKHICPYRTNKYGEYYLLLLPGSYIINVTVPGHDPHITKVIIPEKSQNFSALKKDILLPFQGQLDSIPVSNPSCPMIPLYRNLPDHSAATKPSLFLFLVSLLHIFFK

SEQ ID NO: 40063 - protein, 443 aa, Homo sapiens; identical to SEQ ID NO: 40062

SEQ ID NO: 40064 - protein, 443 aa, Homo sapiens; identical to SEQ ID NO: 40062

SEQ ID NO: 40065 - protein, 136 aa, Homo sapiens
MDFPCLWLGLLLPLVAALDFNYHRQEGMEAFLKTVAQNYSSVTHLHSIGKSVKGRNLWVLVVGRFPKEHRIGIPEFKYVANMHGDETVGRELLLHLIDYLVTSDGKDPEITNLINSTRIHIMPSMNPDGFEAVKKP

SEQ ID NO: 40066 - protein, 249 aa, Homo sapiens
MDFPCLWLGLLLPLVAALDFNYHRQEGMEAFLKTVAQNYSSVTHLHSIGKSVKGRNLWVLVVGRFPKEHRIGIPEFKYVANMHGDETVGRELLLHLIDYLVTSDGKDPEITNLINSTRIHIMPSMNPDGFEAVKKPDCYYSIGRENYNQYDLNRNFPDAFEYNNVSRQPETVAVMKWLKTETFVLSANLHGGALVASYPFDNGVQATGALYSRSLTPDDDVFQYLAHTYASRNPNMKKGDECKNKMNFP

SEQ ID NO: 40067 - protein, 443 aa, Homo sapiens; identical to SEQ ID NO: 40062

SEQ ID NO: 40068 - protein, 458 aa, Homo sapiens
MSDLLSVFLHLLLLFKLVAPVTFRHHRYDDLVRTLYKVQNECPGITRVYSIGRSVEGRHLYVLEFSDHPGIHEPLEPEVKYVGNMHGNEALGRELMLQLSEFLCEEFRNRNQRIVQLIQDTRIHILPSMNPDGYEVAAAQGPNKPGYLVGRNNANGVDLNRNFPDLNTYIYYNEKYGGPNHHLPLPDNWKSQVEPETRAVIRWMHSFNFVLSANLHGGAVVANYPYDKSFEHRVRGVRRTASTPTPDDKLFQKLAKVYSYAHGWMFQGWNCGDYFPDGITNGASWYSLSKGMQDFNYLHTNCFEITLELSCDKFPPEEELQREWLGNREALIQFLEQVHQGIKGMVLDENYNNLANAVISVSGINHDVTSGDHGDYFRLLLPGIYTVSATAPGYDPETVTVTVGPAEPTLVNFHLKRSIPQVSPVRRAPSRRHGVRAKVQPQARKKEMEMRQLQRGPA

SEQ ID NO: 40069 - protein, 204 aa, Homo sapiens
MHSFNFVLSANLHGGAVVANYPYDKSFEHRVRGVRRTASTPTPDDKLFQKLAKVYSYAHGWMFQGWNCGDYFPDGITNGASWYSLSKGMQDFNYLHTNCFEITLELSCDKFPPEEELQREWLGNREALIQFLEQVHQGIKGMVLDENYNNLANAVISVSGINHDVTSGDHGDYFRLLLPGIYTVSATAPGYDPETVTVTVGPAE

SEQ ID NO: 40070 - protein, 545 aa, Homo sapiens
MLPGAWLLWTSLLLLARPAQPCPMGCDCFVQEVFCSDEELATVPLDIPPYTKNIIFVETSFTTLETRAFGSNPNLTKVVFLNTQLCQFRPDAFGGLPRLEDLEVTGSSFLNLSTNIFSNLTSLGKLTLNFNMLEALPEGLFQHLAALESLHLQGNQLQALPRRLFQPLTHLKTLNLAQNLLAQLPEELFHPLTSLQTLKLSNNALSGLPQGVFGKLGSLQELFLDSNNISELPPQVFSQLFCLERLWLQRNAITHLPLSIFASLGNLTFLSLQWNMLRVLPAGLFAHTPCLVGLSLTHNQLETVAEGTFAHLSNLRSLMLSYNAITHLPAGIFRDLEELVKLYLGSNNLTALHPALFQNLSKLELLSLSKNQLTTLPEGIFDTNYNLFNLALHGNPWQCDCHLAYLFNWLQQYTDRLLNIQTYCAGPAYLKGQVVPALNEKQLVCPVTRDHLGFQVTWPDESKAGGSWDLAVQERAARSQCTYSNPEGTVVLACDQAQCRWLNVQLSPQQGSLGLQYNASQEWDLRSSCGSLRLTVSIEARAAGP

SEQ ID NO: 40071 - protein, 545 aa, Homo sapiens; identical to SEQ ID NO: 40070

SEQ ID NO: 40072 - protein, 476 aa, Homo sapiens
MVGAMWKVIVSLVLLMPGPCDGLFRSLYRSVSMPPKGDSGQPLFLTPYIEAGKIQKGRELSLVGPFPGLNMKSYAGFLTVNKTYNSNLFFWFFPAQIQPEDAPVVLWLQGGPGGSSMFGLFVEHGPYVVTSNMTLRDRDFPWTTTLSMLYIDNPVGTGFSFTDDTHGYAVNEDDVARDLYSALIQFFQIFPEYKNNDFYVTGESYAGKYVPAIAHLIHSLNPVREVKINLNGIAIGDGYSDPESIIGGYAEFLYQIGLLDEKQKKYFQKQCHECIEHIRKQNWFEAFEILDKLLDGDLTSDPSYFQNVTGCSNYYNFLRCTEPEDQLYYVKFLSLPEVRQAIHVGNQTFNDGTIVEKYLREDTVQSVKPWLTEIMNNYKVLIYNGQLDIIVAAALTERSLMGMDWKGSQEYKKAEKKVWKIFKSDSEVAGYIRQAGDFHQVIIRGGGHILPYDQPLRAFDMINRFIYGKGWDPYVG

SEQ ID NO: 40073 - protein, 476 aa, Homo sapiens; identical to SEQ ID NO: 40072

SEQ ID NO: 40074 - protein, 476 aa, Homo sapiens; identical to SEQ ID NO: 40072

SEQ ID NO: 40075 - protein, 6 aa, Homo sapiens
MVGAMW

SEQ ID NO: 40076 - protein, 52 aa, Homo sapiens
MVGAMWKVIVSLVLLMPGPCDGLFRSLYRSVSMPPKGDSGQPLFLTPYIEAG

SEQ ID NO: 40077 - protein, 43 aa, Homo sapiens
MVGAMWKVIVSLVLLMPGPCDGLFRSLYRSVSMPPKGDSGQPL

SEQ ID NO: 40078 - protein, 232 aa, Homo sapiens
MFGLFVEHGPYVVTSNMTLRDRDFPWTTTLSMLYIDNPVGTGFSFTDDTHGYAVNEDDVARDLYSALIQFFQIFPEYKNNDFYVTGESYAGKYVPAIAHLIHSLNPVREVKINLNGIAIGDGYSDPESIIGGYAEFLYQIGLLDEKQKKYFQKQCHECIEHIRKQNWFEAFEILDKLLDGDLTSDPSYFQNVTGCSNYYNFLRCTEPEDQLYYVKFLSLPEVRQAPRGESDF

SEQ ID NO: 40079 - protein, 526 aa, Homo sapiens
MGHLSAPLHRVRVPWQGLLLTASLLTFWNPPTTAQLTTESMPFNVAEGKEVLLLVHNLPQQLFGYSWYKGERVDGNRQIVGYAIGTQQATPGPANSGRETIYPNASLLIQNVTQNDTGFYTLQVIKSDLVNEEATGQFHVYPELPKPSISSNNSNPVEDKDAVAFTCEPETQDTTYLWWINNQSLPVSPRLQLSNGNRTLTLLSVTRNDTGPYECEIQNPVSANRSDPVTLNVTYGPDTPTISPSDTYYRPGANLSLSCYAASNPPAQYSWLINGTFQQSTQELFIPNITVNNSGSYTCHANNSVTGCNRTTVKTIIVTELSPVVAKPQIKASKTTVTGDKDSVNLTCSTNDTGISIRWFFKNQSLPSSERMKLSQGNTTLSINPVKREDAGTYWCEVFNPISKNQSDPIMLNVNYNALPQENGLSPGAIAGIVIGVVALVALIAVALACFLHFGKTGRASDQRDLTEHKPSVSNHTQDHSNDPPNKMNEVTYSTLNFEAQQPTQPTSASPSLTATEIIYSEVKKQ

SEQ ID NO: 40080 - protein, 359 aa, Homo sapiens
MPFNVAEGKEVLLLVHNLPQQLFGYSWYKGERVDGNRQIVGYAIGTQQATPGPANSGRETIYPNASLLIQNVTQNDTGFYTLQVIKSDLVNEEATGQFHVYPELPKPSISSNNSNPVEDKDAVAFTCEPETQDTTYLWWINNQSLPVSPRLQLSNGNRTLTLLSVTRNDTGPYECEIQNPVSANRSDPVTLNVTYGPDTPTISPSDTYYRPGANLSLSCYAASNPPAQYSWLINGTFQQSTQELFIPNITVNNSGSYTCHANNSVTGCNRTTVKTIIVTEMAFHHVAKAGLKLLSSSNPPASTSQSAKITDNALPQENGLSPGAIAGIVIGVVALVALIAVALACFLHFGKTGSSGPLQ

SEQ ID NO: 40081 - protein, 351 aa, Homo sapiens
MGHLSAPLHRVRVPWQGLLLTASLLTFWNPPTTAQLTTESMPFNVAEGKEVLLLVHNLPQQLFGYSWYKGERVDGNRQIVGYAIGTQQATPGPANSGRETIYPNASLLIQNVTQNDTGFYTLQVIKSDLVNEEATGQFHVYPELPKPSISSNNSNPVEDKDAVAFTCEPETQDTTYLWWINNQSLPVSPRLQLSNGNRTLTLLSVTRNDTGPYECEIQNPVSANRSDPVTLNVTYGPDTPTISPSDTYYRPGANLSLSCYAASNPPAQYSWLINGTFQQSTQELFIPNITVNNSGSYTCHANNSVTGCNRTTVKTIIVTESPVLGEDEAVPGQHHPQHKPCQEGGCWDVLV

SEQ ID NO: 40082 - protein, 252 aa, Homo sapiens
MGHLSAPLHRVRVPWQGLLLTASLLTFWNPPTTAQLTTESMPFNVAEGKEVLLLVHNLPQQLFGYSWYKGERVDGNRQIVGYAIGTQQATPGPANSGRETIYPNASLLIQNVTQNDTGFYTLQVIKSDLVNEEATGQFHVYHNALPQENGLSPGAIAGIVIGVVALVALIAVALACFLHFGKTGRASDQRDLTEHKPSVSNHTQDHSNDPPNKMNEVTYSTLNFEAQQPTQPTSASPSLTATEIIYSEVKKQ

SEQ ID NO: 40083 - protein, 430 aa, Homo sapiens
MGHLSAPLHRVRVPWQGLLLTASLLTFWNPPTTAQLTTESMPFNVAEGKEVLLLVHNLPQQLFGYSWYKGERVDGNRQIVGYAIGTQQATPGPANSGRETIYPNASLLIQNVTQNDTGFYTLQVIKSDLVNEEATGQFHVYPELPKPSISSNNSNPVEDKDAVAFTCEPETQDTTYLWWINNQSLPVSPRLQLSNGNRTLTLLSVTRNDTGPYECEIQNPVSANRSDPVTLNVTYGPDTPTISPSDTYYRPGANLSLSCYAASNPPAQYSWLINGTFQQSTQELFIPNITVNNSGSYTCHANNSVTGCNRTTVKTIIVTDNALPQENGLSPGAIAGIVIGVVALVALIAVALACFLHFGKTGRASDQRDLTEHKPSVSNHTQDHSNDPPNKMNEVTYSTLNFEAQQPTQPTSASPSLTATEIIYSEVKKQ

SEQ ID NO: 40084 - protein, 461 aa, Homo sapiens
MGHLSAPLHRVRVPWQGLLLTASLLTFWNPPTTAQLTTESMPFNVAEGKEVLLLVHNLPQQLFGYSWYKGERVDGNRQIVGYAIGTQQATPGPANSGRETIYPNASLLIQNVTQNDTGFYTLQVIKSDLVNEEATGQFHVYPELPKPSISSNNSNPVEDKDAVAFTCEPETQDTTYLWWINNQSLPVSPRLQLSNGNRTLTLLSVTRNDTGPYECEIQNPVSANRSDPVTLNVTYGPDTPTISPSDTYYRPGANLSLSCYAASNPPAQYSWLINGTFQQSTQELFIPNITVNNSGSYTCHANNSVTGCNRTTVKTIIVTERQNLTMLPRLDSNSWAQAILPSVSQSAEITDNALPQENGLSPGAIAGIVIGVVALVALIAVALACFLHFGKTGRASDQRDLTEHKPSVSNHTQDHSNDPPNKMNEVTYSTLNFEAQQPTQPTSASPSLTATEIIYSEVKKQ

SEQ ID NO: 40085 - protein, 417 aa, Homo sapiens
MGHLSAPLHRVRVPWQGLLLTASLLTFWNPPTTAQLTTESMPFNVAEGKEVLLLVHNLPQQLFGYSWYKGERVDGNRQIVGYAIGTQQATPGPANSGRETIYPNASLLIQNVTQNDTGFYTLQVIKSDLVNEEATGQFHVYPELPKPSISSNNSNPVEDKDAVAFTCEPETQDTTYLWWINNQSLPVSPRLQLSNGNRTLTLLSVTRNDTGPYECEIQNPVSANRSDPVTLNVTYGPDTPTISPSDTYYRPGANLSLSCYAASNPPAQYSWLINGTFQQSTQELFIPNITVNNSGSYTCHANNSVTGCNRTTVKTIIVTELSPVVAKPQIKASKTTVTGDKDSVNLTCSTNDTGISIRWFFKNQSLPSSERMKLSQGNTTLSINPVKREDAGTYWCEVFNPISKNQSDPIMLNVNCK

SEQ ID NO: 40086 - protein, 478 aa, Homo sapiens
MPFNVAEGKEVLLLVHNLPQQLFGYSWYKGERVDGNRQIVGYAIGTQQATPGPANSGRETIYPNASLLIQNVTQNDTGFYTLQVIKSDLVNEEATGQFHVYPELPKPSISSNNSNPVEDKDAVAFTCEPETQDTTYLWWINNQSLPVSPRLQLSNGNRTLTLLSVTRNDTGPYECEIQNPVSANRSDPVTLNVTYGPDTPTISPSDTYYRPGANLSLSCYAASNPPAQYSWLINGTFQQSTQELFIPNITVNNSGSYTCHANNSVTGCNRTTVKTIIVTELSPVVAKPQIKASKTTVTGDKDSVNLTCSTNDTGISIRWFFKNQSLPSSERMKLSQGNTTLSINPVKREDAGTYWCEVFNPISKNQSDPIMLNEMAFHHVAKAGLKLLSSSNPPASTSQSAKITERQNLTMLPRLDSNSWAQAILPSVSQSAEITDNALPQENGLSPGAIAGIVIGVVALVALIAVALACFLHFGKTG

SEQ ID NO: 40087 - protein, 321 aa, Homo sapiens
MGHLSAPLHRVRVPWQGLLLTASLLTFWNPPTTAQLTTESMPFNVAEGKEVLLLVHNLPQQLFGYSWYKGERVDGNRQIVGYAIGTQQATPGPANSGRETIYPNASLLIQNVTQNDTGFYTLQVIKSDLVNEEATGQFHVYPELPKPSISSNNSNPVEDKDAVAFTCEPETQDTTYLWWINNQSLPVSPRLQLSNGNRTLTLLSVTRNDTGPYECEIQNPVSANRSDPVTLNVTYGPDTPTISPSDTYYRPGANLSLSCYAASNPPAQYSWLINGTFQQSTQELFIPNITVNNSGSYTCHANNSVTGCNRTTVKTIIVTGK

SEQ ID NO: 40088 - protein, 485 aa, Homo sapiens
RGDRAAVLEAFLEPKLSSTGEDRASRRHHGAPLSPTSQSACTLGLLLTASLLTFWNPPTTAQLTTESMPFNVAEGKEVLLLVHNLPQQLFGYSWYKGERVDGNRQIVGYAIGTQQATPGPANSGRETIYPNASLLIQNVTQNDTGFYTLQVIKSDLVNEEATGQFHVYPELPKPSISSNNSNPVEDKDAVAFTCEPETQDTTYLWWINNQSLPVSPRLQLSNGNRTLTLLSVTRNDTGPYECEIQNPVSANRSDPVTLNVTYGPDTPTISPSDTYYRPGANLSLSCYAASNPPAQYSWLINGTFQQSTQELFIPNITVNNSGSYTCHANNSVTGCNRTTVKTIIVTELSPVVAKPQIKASKTTVTGDKDSVNLTCSTNDTGISIRWFFKNQSLPSSERMKLSQGNTTLSINPVKREDAGTYWCEVFNPISKNQSDPIMLNVNYNALPQENGLSPGAIAGIVIGVVALVALIAVALACFLHFGKTG

SEQ ID NO: 40089 - protein, 464 aa, Homo sapiens
MGHLSAPLHRVRVPWQGLLLTASLLTFWNPPTTAQLTTESMPFNVAEGKEVLLLVHNLPQQLFGYSWYKGERVDGNRQIVGYAIGTQQATPGPANSGRETIYPNASLLIQNVTQNDTGFYTLQVIKSDLVNEEATGQFHVYPELPKPSISSNNSNPVEDKDAVAFTCEPETQDTTYLWWINNQSLPVSPRLQLSNGNRTLTLLSVTRNDTGPYECEIQNPVSANRSDPVTLNVTYGPDTPTISPSDTYYRPGANLSLSCYAASNPPAQYSWLINGTFQQSTQELFIPNITVNNSGSYTCHANNSVTGCNRTTVKTIIVTELSPVVAKPQIKASKTTVTGDKDSVNLTCSTNDTGISIRWFFKNQSLPSSERMKLSQGNTTLSINPVKREDAGTYWCEVFNPISKNQSDPIMLNVNYNALPQENGLSPGAIAGIVIGVVALVALIAVALACFLHFGKTGSSGPLQ

SEQ ID NO: 40090 - protein, 368 aa, Homo sapiens
MGHLSAPLHRVRVPWQGLLLTASLLTFWNPPTTAQLTTESMPFNVAEGKEVLLLVHNLPQQLFGYSWYKGERVDGNRQIVGYAIGTQQATPGPANSGRETIYPNASLLIQNVTQNDTGFYTLQVIKSDLVNEEATGQFHVYPELPKPSISSNNSNPVEDKDAVAFTCEPETQDTTYLWWINNQSLPVSPRLQLSNGNRTLTLLSVTRNDTGPYECEIQNPVSANRSDPVTLNVTYGPDTPTISPSDTYYRPGANLSLSCYAASNPPAQYSWLINGTFQQSTQELFIPNITVNNSGSYTCHANNSVTGCNRTTVKTIIVTDNALPQENGLSPGAIAGIVIGVVALVALIAVALACFLHFGKTGSSGPLQ

SEQ ID NO: 40091 - protein, 301 aa, Homo sapiens
MLALRVARGSWGALRGAAWAPGTRPSKRRACWALLPPVPCCLGCLAERWRLRPAALGLRLPGIGQRNHCSGAGKAAPRPAAGAGAAAEAPGGQWGPASTPSLYENPWTIPNMLSMTRIGLAPVLGYLIIEEDFNIALGVFALAGLTDLLDGFIARNWANQRSALGSALDPLADKILISILYVSLTYADLIPVPLTYMIISRDVMLIAAVFYVRYRTLPTPRTLAKYFNPCYATARLKPTFISKVNTAVQLILVAASLAAPVFNYADSIYLQILWCFTAFTTAASAYSYYHYGRKTVQVIKD

SEQ ID NO: 40092 - protein, 202 aa, Homo sapiens
MPQYENPWTIPNMLSMTRIGLAPVLGYLIIEEDFNIALGVFALAGLTDLLDGFIARNWANQRSALGSALDPLADKILISILYVSLTYADLIPVPLTYMIISRDVMLIAAVFYVRYRTLPTPRTLAKYFNPCYATARLKPTFISKVNTAVQLILVAASLAAPVFNYADSIYLQILWCFTAFTTAASAYSYYHYGRKTVQVIKD

SEQ ID NO: 40093 - protein, 205 aa, Homo sapiens
MLALRVARGSWGALRGAAWAPGTRPSKRRACWALLPPVPCCLGCLAERWRLRPAALGLRLPGIGQRNHCSGAGKAAPRPAAGAGAAAEAPGGQWGPASTPSLYENPWTIPNMLSMTRIGLAPVLGYLIIEEDFNIALGVFALAGLTDLLDGFIARNWANQRSALGSALDPLADKILISILYVSLTYADLIPANTCQVFQSLLCHC

SEQ ID NO: 40094 - protein, 4069 aa, Homo sapiens
MASRDSNHAGESFLGSDGDEEATRELETEEESEGEEDETAAESEEEPDSRLSDQDEEGKIKQEYIISDPSFSMVTVQREDSGITWETNSSRSSTPWASEESQTSGVCSREGSTVNSPPGNVSFIVDEVKKVRKRTHKSKHGSPSLRRKGNRKRNSFESQDVPTNKKGSPLTSASQVLTTEKEKSYTGIYDKARKKKTTSNTPPITGAIYKEHKPLVLRPVYIGTVQYKIKMFNSVKEELIPLQFYGTLPKGYVIKEIHYRKGKDASISLEPDLDNSGSNTVSKTRKLVAQSIEDKVKEVFPPWRGALSKGSESLTLMFSHEDQKKIYADSPLNATSALEHTVPSYSSSGRAEQGIQLRHSQSVPQQPEDEAKPHEVEPPSVTPDTPATMFLRTTKEECELASPGTAASENDSSVSPSFANEVKKEDVYSAHHSISLEAASPGLAASTQDGLDPDQEQPDLTSIERAEPVSAKLTPTHPSVKGEKEENMLEPSISLSEPLMLEEPEKEEIETSLPIAITPEPEDSNLVEEEIVELDYPESPLVSEKPFPPHMSPEVEHKEEELILPLLAASSPEHVALSEEEREEIASVSTGSAFVSEYSVPQDLNHELQEQEGEPVPPSNVEAIAEHAVLSEEENEEFEAYSPAAAPTSESSLSPSTTEKTSENQSPLFSTVTPEYMVLSGDEASESGCYTPDSTSASEYSVPSLATKESLKKTIDRKSPLILKGVSEYMIPSEEKEDTGSFTPAVAPASEPSLSPSTTEKTSECQSPLPSTATSEHVVPSEGEDLGSERFTPDSKLISKYAAPLNATQESQKKIINEASQFKPKGISEHTVLSVDGKEVIGPSSPDLVVASEHSFPPHTTEMTSECQAPPLSATPSEYVVLSDEEAVELERYTPSSTSASEFSVPPYATPEAQEEEIVHRSLNLKGASSPMNLSEEDQEDIGPFSPDSAFVSEFSFPPYATQEAEKREFECDSPICLTSPSEHTILSDEDTEEAELFSPDSASQVSIPPFRISETEKNELEPDSLLTAVSASGYSCFSEADEEDIGSTAATPVSEQFSSSQKQKAETFPLMSPLEDLSLPPSTDKSEKAEIKPEIPTTSTSVSEYLILAQKQKTQAYLEPESEDLIPSHLTSEVEKGEREASSSVAAIPAALPAQSSIVKEETKPASPHSVLPDSVPAIKKEQEPTAALTLKAADEQMALSKVRKEEIVPDSQEATAHVSQDQKMEPQPPNVPESEMKYSVLPDMVDEPKKGVKPKLVLNVTSELEQRKLSKNEPEVIKPYSPLKETSLSGPEALSAVKMEMKHDSKITTTPIVLHSASSGVEKQVEHGPPALAFSALSEEIKKEIEPSSSTTTASVTKLDSNLTRAVKEEIPTDSSLITPVDRPVLTKVGKGELGSGLPPLVTSADEHSVLAEEDKVAIKGASPIETSSKHLAWSEAEKEIKFDSLPSVSSIAEHSVLSEVEAKEVKAGLPVIKTSSSQHSDKSEEARVEDKQDLLFSTVCDSERLVSSQKKSLMSTSEVLEPEHELPLSLWGEIKKKETELPSSQNVSPASKHIIPKGKDEETASSSPELENLASGLAPTLLLLSDDKNKPAVEVSSTAQGDFPSEKQDVALAELSLEPEKKDKPHQPLELPNAGSEFSSDLGRQSGSIGTKQAKSPITETEDSVLEKGPAELRSREGKEENRELCASSTMPAISELSSLLREESQNEEIKPFSPKIISLESKEPPASVAEGGNPEEFQPFTFSLKGLSEEVSHPADFKKGGNQEIGPLPPTGNLKAQVMGDILDKLSEETGHPNSSQVLQSITEPSKIAPSDLLVEQKKTEKALHSDQTVKLPDVSTSSEDKQDLGIKQFSLMRENLPLEQSKSFMTTKPADVKETKMEEFFISPKDENWMLGKPENVASQHEQRIAGSVQLDSSSSNELRPGQLKAAVSSKDHTCEVRKQVLPHSAEESHLSSQEAVSALDTSSGNTETLSSKSYSSEEVKLAEEPKSLVLAGNVERNIAEGKEIHSLMESESLLLEKANTELSWPSKEDSQEKIKLPPERFFQKPVSGLSVEQVKSETISSSVKTAHFPAEGVEPALGNEKEAHRSTPPFPEEKPLEESKMVQSKVIDDADEGKKPSPEVKIPTQRKPISSIHAREPQSPESPEVTQNPPTQPKVAKPDLPEEKGKKGISSFKSWMSSLFFGSSTPDNKVAEQEDLETQPSPSVEKAVTVIDPEGTIPTNFNVAEKPADHSLSEVKLKTADEPRGTLVKSGDGQNVKEKSMILSNVEDLQQPKFISEVSREDYGKKEISGDSEEMNINSVVTSADGENLEIQSYSLIGEKLVMEEAKTIVPPHVTDSKRVQKPAIAPPSKWNISIFKEEPRSDQKQKSLLSFDVVDKVPQQPKSASSNFASKNITKESEKPESIILPVEESKGSLIDFSEDRLKKEMQNPTSLKISEEETKLRSVSPTEKKDNLENRSYTLAEKKVLAEKQNSVAPLELRDSNEIGKTQITLGSRSTELKESKADAMPQHFYQNEDYNERPKIIVGSEKEKGEEKENQVYVLSEGKKQQEHQPYSVNVAESMSRESDISLGHSLGETQSFSLVKATSVTEKSEAMLAEAHPEIREAKAVGTQPHPLEESKVLVEKTKTFLPVALSCRDEIENHSLSQEGNLVLEKSSRDMPDHSEEKEQFRESELSKGGSVDITKETVKQGFQEKAVGTQPRPLEESKVLVEKTKTFLPVVLSCHDEIENHSLSQEGNLVLEKSSRDMPDHSEEKEQFKESELWKGGSVDITKESMKEGFPSKESERTLARPFDETKSSETPPYLLSPVKPQTLASGASPEINAVKKKEMPRSELTPERHTVHTIQTSKDDTSDVPKQSVLVSKHHLEAAEDTRVKEPLSSAKSNYAQFISNTSASNADKMVSNKEMPKEPEDTYAKGEDFTVTSKPAGLSEDQKTAFSIISEGCEILNIHAPAFISSIDQEESEQMQDKLEYLEEKASFKTIPLPDDSETVACHKTLKSRLEDEKVTPLKENKQKETHKTKEEISTDSETDLSFIQPTIPSEEDYFEKYTLIDYNISPDPEKQKAPQKLNVEEKLSKEVTEETISFPVSSVESALEHEYDLVKLDESFYGPEKGHNILSHPETQSQNSADRNVSKDTKRDVDSKSPGMPLFEAEEGVLSRTQIFPTTIKVIDPEFLEEPPALAFLYKDLYEEAVGEKKKEEETASEGDSVNSEASFPSRNSDTDDGTGIYFEKYILKDDILHDTSLTQKDQGQGLEEKRVGKDDSYQPIAAEGEIWGKFGTICREKSLEEQKGVYGEGESVDHVETVGNVAMQKKAPITEDVRVATQKISYAVPFEDTHHVLERADEAGSHGNEVGNASPEVNLNVPVQVSFPEEEFASGATHVQETSLEEPKILVPPEPSEERLRNSPVQDEYEFTESLHNEVVPQDILSEELSSESTPEDVLSQGKESFEHISENEFASEAEQSTPAEQKELGSERKEEDQLSSEVVTEKAQKELKKSQIDTYCYTCKCPISATDKVFGTHKDHEVSTLDTAISAVKVQLAEFLENLQEKSLRIEAFVSEIESFFNTIEENCSKNEKRLEEQNEEMMKKVLAQYDEKAQSFEEVKKKKMEFLHEQMVHFLQSMDTAKDTLETIVREAEELDEAVFLTSFEEINERLLSAMESTASLEKMPAAFSLFEHYDDSSARSDQMLKQVAVPQPPRLEPQEPNSATSTTIAVYWSMNKEDVIDSFQVYCMEEPQDDQEVNELVEEYRLTVKESYCIFEDLEPDRCYQVWVMAVNFTGCSLPSERAIFRTAPSTPVIRAEDCTVCWNTATIRWRPTTPEATETYTLEYCRQHSPEGEGLRSFSGIKGLQLKVNLQPNDNYFFYVRAINAFGTSEQSEAALISTRGTRFLLLRETAHPALHISSSGTVISFGERRRLTEIPSVLGEELPSCGQHYWETTVTDCPAYRLGICSSSAVQAGALGQGETSWYMHCSEPQRYTFFYSGIVSDVHVTERPARVGILLDYNNQRLIFINAESEQLLFIIRHRFNEGVHPAFALEKPGKCTLHLGIEPPDSVRHK

SEQ ID NO: 40095 - protein, 225 aa, Homo sapiens
MDLRAGDSWGMLACLCTVLWHLPAVPALNRTGDPGPGPSIQKTYDLTRYLEHQLRSLAGTYLNYLGPPFNEPDFNPPRLGAETLPRATVDLEVWRSLNDKLRLTQNYEAYSHLLCYLRGLNRQAATAELRRSLAHFCTSLQGLLGSIAGVMAALGYPLPQPLPGTEPTWTPGPAHSDFLQKMDDFWLLKELQTWLWRSAKDFNRLKKKMQPPAAAVTLHLGAHGF

SEQ ID NO: 40096 - protein, 215 aa, Homo sapiens
MLACLCTVLWHLPAVPALNRTGDPGPGPSIQKTYDLTRYLEHQLRSLAGTYLNYLGPPFNEPDFNPPRLGAETLPRATVDLEVWRSLNDKLRLTQNYEAYSHLLCYLRGLNRQAATAELRRSLAHFCTSLQGLLGSIAGVMAALGYPLPQPLPGTEPTWTPGPAHSDFLQKMDDFWLLKELQTWLWRSAKDFNRLKKKMQPPAAAVTLHLGAHGF

SEQ ID NO: 40097 - protein, 215 aa, Homo sapiens; identical to SEQ ID NO: 40096

SEQ ID NO: 40098 - protein, 626 aa, Homo sapiens
MLAFAARTVVKPLGFLKPFSLMKASSRFKAHQDALPRLPVPPLQQSLDHYLKALQPIVSEEEWAHTKQLVDEFQASGGVGERLQKGLERRARKTENWLSEWWLKTAYLQYRQPVVIYSSPGVMLPKQDFVDLQGQLRFAAKLIEGVLDFKVMIDNETLPVEYLGGKPLCMNQYYQILSSCRVPGPKQDTVSNFSKTKKPPTHITVVHNYQFFELDVYHSDGTPLTADQIFVQLEKIWNSSLQTNKEPVGILTSNHRNSWAKAYNTLIKDKVNRDSVRSIQKSIFTVCLDATMPRVSEDVYRSHVAGQMLHGGGSRLNSGNRWFDKTLQFIVAEDGSCGLVYEHAAAEGPPIVTLLDYVIEYTKKPELVRSPLVPLPMPKKLRFNITPEIKSDIEKAKQNLSIMIQDLDITVMVFHHFGKDFPKSEKLSPDAFIQMALQLAYYRIYGQACATYESASLRMFHLGRTDTIRSASMDSLTFVKAMDDSSVTEHQKVELLRKAVQAHRGYTDRAIRGEAFDRHLLGLKLQAIEDLVSMPDIFMDTSYAIAMHFHLSTSQVPAKTDCVMFFGPVVPDGYGVCYNPMEAHINFSLSAYNSCAETNAARLAHYLEKALLDMRALLQSHPRAKL

SEQ ID NO: 40099 - protein, 545 aa, Homo sapiens
MLAFAARTVVKPLGFLKPFSLMKASSRFKAHQDALPRLPVPPLQQSLDHYLKALQPIVSEEEWAHTKQLVDEFQASGGVGERLQKGLERRARKTENWLSEWWLKTAYLQYRQPVVIYSSPGVMLPKQDFVDLQGQLRFAAKLIEGVLDFKVMIDNETLPVEYLGGKPLCMNQYYQILSSCRVPGPKQDTVSNFSKTKKPPTHITVVHNYQFFELDVYHSDGTPLTADQIFVQLEKIWNSSLQTNKEPVGILTSNHRNSWAKAYNTLIKDKVNRDSVRSIQKKKPELVRSPLVPLPMPKKLRFNITPEIKSDIEKAKQNLSIMIQDLDITVMVFHHFGKDFPKSEKLSPDAFIQMALQLAYYRIYGQACATYESASLRMFHLGRTDTIRSASMDSLTFVKAMDDSSVTEHQKVELLRKAVQAHRGYTDRAIRGEAFDRHLLGLKLQAIEDLVSMPDIFMDTSYAIAMHFHLSTSQVPAKTDCVMFFGPVVPDGYGVCYNPMEAHINFSLSAYNSCAETNAARLAHYLEKALLDMRALLQSHPRAKL

SEQ ID NO: 40100 - protein, 773 aa, Homo sapiens
MAEAHQAVAFQFTVTPDGIDLRLSHEALRQIYLSGLHSWKKKFIRFKNGIITGVYPASPSSWLIVVVGVMTTMYAKIDPSLGIIAKINRTLETANCMSSQTKNVVSGVLFGTGLWVALIVTMRYSLKVLLSYHGWMFTEHGKMSRATKIWMGMVKIFSGRKPMLYSFQTSLPRLPVPAVKDTVNRYLQSVRPLMKEEDFKRMTALAQDFAVGLGPRLQWYLKLKSWWATNYVSDWWEEYIYLRGRGPLMVNSNYYAMDLLYILPTHIQAARAGNAIHAILLYRRKLDREEIKPIRLLGSTIPLCSAQWERMFNTSRIPGEETDTIQHMRDSKHIVVYHRGRYFKVWLYHDGRLLKPREMEQQMQRILDNTSEPQPGEARLAALTAGDRVPWARCRQAYFGRGKNKQSLDAVEKAAFFVTLDETEEGYRSEDPDTSMDSYAKSLLHGRCYDRWFDKSFTFVVFKNGKMGLNAEHSWADAPIVAHLWEYVMSIDSLQLGYAEDGHCKGDINPNIPYPTRLQWDIPGECQEVIETSLNTANLLANDVDFHSFPFVAFGKGIIKKCRTSPDAFVQLALQLAHYKDMGKFCLTYEASMTRLFREGRTETVRSCTTESCDFVRAMVDPAQTVEQRLKLFKLASEKHQHMYRLAMTGSGIDRHLFCLYVVSKYLAVESPFLKEVLSEPWRLSTSQTPQQQVELFDLENNPEYVSSGGGFGPVADDGYGVSYILVGENLINFHISSKFSCPETDSHRFGRHLKEAMTDIITLFGLSSNSKK

SEQ ID NO: 40101 - protein, 756 aa, Homo sapiens
MAEAHQAVAFQFTVTPDGIDLRLSHEALRQIYLSGLHSWKKKFIRFKNGIITGVYPASPSSWLIVVVGVMTTMYAKIDPSLGIIAKINRTLETANCMSSQTKNVVSGVLFGTGLWVALIVTMRYSLKVLLSYHGWMFTEHGKMSRATKIWMGMVKIFSGRKPMLYSFQTSLPRLPVPAVKDTVNRYLQSVRPLMKEEDFKRMTALAQDFAVGLGPRLQWYLKLKSWWATNYVSDWWEEYIYLRGRGPLMVNSNYYAMDLLYILPTHIQAARAGNAIHAILLYRRKLDREEIKPIRLLGSTIPLCSAQWERMFNTSRIPGEETDTIQHMRDSKHIVVYHRGRYFKVWLYHDGRLLKPREMEQQMQRILDNTSEPQPGEARLAALTAGDRVPWARCRQAYFGRGKNKQSLDAVEKAAFFVTLDETEEGYRSEDPDTSMDSYAKSLLHGRCYDRWFDKSFTFVVFKNGKMGLNAEHSWADAPIVAHLWEYVMSIDSLQLGYAEDGHCKGDINPNIPYPTRLQWDIPGECQEVIETSLNTANLLANDVDFHSFPFVAFGKGIIKKCRTSPDAFVQLALQLAHYKDMGKFCLTYEASMTRLFREGRTETVRSCTTESCDFVRAMVDPAQTVEQRLKLFKLASEKHQHMYRLAMTGSGIDRHLFCLYVVSKYLAVESPFLKEVLSEPWRLSTSQTPQQQVELFDLENNPEYVSSGGGFGPVADDGYGVSYILVGENLINFHISSKFSCPETGIISQGPSSDT

SEQ ID NO: 40102 - protein, 773 aa, Homo sapiens; identical to SEQ ID NO: 40100

SEQ ID NO: 40103 - protein, 773 aa, Homo sapiens; identical to SEQ ID NO: 40100

SEQ ID NO: 40104 - protein, 756 aa, Homo sapiens; identical to SEQ ID NO: 40101

SEQ ID NO: 40105 - protein, 772 aa, Homo sapiens
MAEAHQAVAFQFTVTPDGVDFRLSREALKHVYLSGINSWKKRLIRIKNGILRGVYPGSPTSWLVVIMATVGSSFCNVDISLGLVSCIQRCLPQGCGPYQTPQTRALLSMAIFSTGVWVTGIFFFRQTLKLLLCYHGWMFEMHGKTSNLTRIWAMCIRLLSSRHPMLYSFQTSLPKLPVPRVSATIQRYLESVRPLLDDEEYYRMELLAKEFQDKTAPRLQKYLVLKSWWASNYVSDWWEEYIYLRGRSPLMVNSNYYVMDLVLIKNTDVQAARLGNIIHAMIMYRRKLDREEIKPVMALGIVPMCSYQMERMFNTTRIPGKDTDVLQHLSDSRHVAVYHKGRFFKLWLYEGARLLKPQDLEMQFQRILDDPSPPQPGEEKLAALTAGGRVEWAQARQAFFSSGKNKAALEAIERAAFFVALDEESYSYDPEDEASLSLYGKALLHGNCYNRWFDKSFTLISFKNGQLGLNAEHAWADAPIIGHLWEFVLGTDSFHLGYTETGHCLGKPNPALAPPTRLQWDIPKQCQAVIESSYQVAKALADDVELYCFQFLPFGKGLIKKCRTSPDAFVQIALQLAHFRDRGKFCLTYEASMTRMFREGRTETVRSCTSESTAFVQAMMEGSHTKADLRDLFQKAAKKHQNMYRLAMTGAGIDRHLFCLYLVSKYLGVSSPFLAEVLSEPWRLSTSQIPQSQIRMFDPEQHPNHLGAGGGFGPVADDGYGVSYMIAGENTIFFHISSKFSSSETNAQRFGNHIRKALLDIADLFQVPKAYS

SEQ ID NO: 40106 - protein, 772 aa, Homo sapiens; identical to SEQ ID NO: 40105

SEQ ID NO: 40107 - protein, 772 aa, Homo sapiens; identical to SEQ ID NO: 40105

SEQ ID NO: 40108 - protein, 772 aa, Homo sapiens; identical to SEQ ID NO: 40105

SEQ ID NO: 40109 - protein, 125 aa, Homo sapiens
MAEAHQAVAFQFTVTPDGVDFRLSREALKHVYLSGINSWKKRLIRIKNGILRGVYPGSPTSWLVVIMATVGSSFCNVDISLGLVSCIQRCLPQGCGPYQTPQTRALLSMAIFSTGVWVTGIFFFR

SEQ ID NO: 40110 - protein, 567 aa, Homo sapiens
MELLAKEFQDKTAPRLQKYLVLKSWWASNYVSDWWEEYIYLRGRSPLMVNSNYYVMDLVLIKNTDVQAARLGNIIHAMIMYRRKLDREEIKPVMALGIVPMCSYQMERMFNTTRIPGKDTDVLQHLSDSRHVAVYHKGRFFKLWLYEGARLLKPQDLEMQFQRILDDPSPPQPGEEKLAALTAGGRVEWAQARQAFFSSGKNKAALEAIERAAFFVALDEESYSYDPEDEASLSLYGKALLHGNCYNRWFDKSFTLISFKNGQLGLNAEHAWADAPIIGHLWEFVLGTDSFHLGYTETGHCLGKPNPALAPPTRLQWDIPKQAVIESSYQVAKALADDVELYCFQFLPFGKGLIKKCRTSPDAFVQIALQLAHFRDRGKFCLTYEASMTRMFREGRTETVRSCTSESTAFVQAMMEGSHTKADLRDLFQKAAKKHQNMYRLAMTGAGIDRHLFCLYLVSKYLGVSSPFLAEVLSEPWRLSTSQIPQSQIRMFDPEQHPNHLGAGGGFGPVADDGYGVSYMIAGENTIFFHISSKFSSSETNAQRFGNHIRKALLDIADLFQVPKAYS

SEQ ID NO: 40111 - protein, 691 aa, Homo sapiens
MAEAHQAVAFQFTVTPDGVDFRLSREALKHVYLSGINSWKKRLIRIKNGILRGVYPGSPTSWLVVIMATVGSSFCNVDISLGLVSCIQRCLPQGCGPYQTPQTRALLSMAIFSTGVWVTGIFFFRQTLKLLLCYHGWMFEMHGKTSNLTRIWAMCIRLLSSRHPMLYSFQTSLPKLPVPRVSATIQRYLESVRPLLDDEEYYRMELLAKEFQDKTAPRLQKYLVLKSWWASNYVSDWWEEYIYLRGRSPLMVNSNYYVMDLVLIKNTDVQAARLGNIIHAMIMYRRKLDREEIKPVMALGIVPMCSYQMERMFNTTRIPGKDTDVLQHLSDSRHVAVYHKGRFFKLWLYEGARLLSLYGKALLHGNCYNRWFDKSFTLISFKNGQLGLNAEHAWADAPIIGHLWEFVLGTDSFHLGYTETGHCLGKPNPALAPPTRLQWDIPKQCQAVIESSYQVAKALADDVELYCFQFLPFGKGLIKKCRTSPDAFVQIALQLAHFRDRGKFCLTYEASMTRMFREGRTETVRSCTSESTAFVQAMMEGSHTKADLRDLFQKAAKKHQNMYRLAMTGAGIDRHLFCLYLVSKYLGVSSPFLAEVLSEPWRLSTSQIPQSQIRMFDPEQHPNHLGAGGGFGPVADDGYGVSYMIAGENTIFFHISSKFSSSETNAQRFGNHIRKALLDIADLFQVPKAYS

SEQ ID NO: 40112 - protein, 738 aa, Homo sapiens
MAEAHQAVAFQFTVTPDGVDFRLSREALKHVYLSGINSWKKRLIRIKNGILRGVYPGSPTSWLVVIMATVGSSFCNVDISLGLVSCIQRCLPQGCGPYQTPQTRALLSMAIFSTGVWVTGIFFFRQTLKLLLCYHGWMFEMHGKTSNLTRIWAYLESVRPLLDDEEYYRMELLAKEFQDKTAPRLQKYLVLKSWWASNYVSDWWEEYIYLRGRSPLMVNSNYYVMDLVLIKNTDVQAARLGNIIHAMIMYRRKLDREEIKPVMALGIVPMCSYQMERMFNTTRIPGKDTDVLQHLSDSRHVAVYHKGRFFKLWLYEGARLLKPQDLEMQFQRILDDPSPPQPGEEKLAALTAGGRVEWAQARQAFFSSGKNKAALEAIERAAFFVALDEESYSYDPEDEASLSLYGKALLHGNCYNRWFDKSFTLISFKNGQLGLNAEHAWADAPIIGHLWEFVLGTDSFHLGYTETGHCLGKPNPALAPPTRLQWDIPKQCQAVIESSYQVAKALADDVELYCFQFLPFGKGLIKKCRTSPDAFVQIALQLAHFRDRGKFCLTYEASMTRMFREGRTETVRSCTSESTAFVQAMMEGSHTKADLRDLFQKAAKKHQNMYRLAMTGAGIDRHLFCLYLVSKYLGVSSPFLAEVLSEPWRLSTSQIPQSQIRMFDPEQHPNHLGAGGGFGPVADDGYGVSYMIAGENTIFFHISSKFSSSETNAQRFGNHIRKALLDIADLFQVPKAYS

SEQ ID NO: 40113 - protein, 485 aa, Homo sapiens
MLFSYQRSLPRQPVPSVQDTVRKYLESVRPILSDEDFDWTAVLAQEFLRLQASLLQWYLRLKSWWASNYVSDWWEEFVYLRSRNPLMVNSNYYMMDFLYVTPTPLQAARAGNAVHALLLYRHRLNRQEIPPVRGPQWVRDGGVVLWPLGHVGPGRQLTAHGFLQTLLMGMRPLCSAQYEKIFNTTRIPGVQKDYIRHLHDSQHVAVFHRGRFFRMGTHSRNSLLSPRALEQQFQRILDDPSPACPHEEHLAALTAAPRGTWAQVRTSLKTQAAEALEAVEGAAFFVSLDAEPAGLTREDPAASLDAYAHALLAGRGHDRWFDKSFTLIVFSNGKLGLSVEHSWADCPISGHMWEFTLATECFQLGYSTDGHCKGHPDPTLPQPQRLQWDLPDQIHSSISLALRGAKILSENVDCHVVPFSLFGKSFIRRCHLSSDSFIQIALQLAHFRVSWVPHPQPPQGLSPPEPPRPAPPRFLVVAAIVGRPS

SEQ ID NO: 40114 - protein, 803 aa, Homo sapiens
MAEAHQAVGFRPSLTSDGAEVELSAPVLQEIYLSGLRSWKRHLSRFWNDFLTGVFPASPLSWLFLFSAIQLAWFLQLDPSLGLMEKIKELLPDWGGQHHGLRGVLAAALFASCLWGALIFTLHVALRLLLSYHGWLLEPHGAMSSPTKTWLALVRIFSGRHPMLFSYQRSLPRQPVPSVQDTVRKYLESVRPILSDEDFDWTAVLAQEFLRLQASLLQWYLRLKSWWASNYVSDWWEEFVYLRSRNPLMVNSNYYMMDFLYVTPTPLQAARAGNAVHALLLYRHRLNRQEIPPTLLMGMRPLCSAQYEKIFNTTRIPGVQKDYIRHLHDSQHVAVFHRGRFFRMGTHSRNSLLSPRALEQQFQRILDDPSPACPHEEHLAALTAAPRGTWAQVRTSLKTQAAEALEAVEGAAFFVSLDAEPAGLTREDPAASLDAYAHALLAGRGHDRWFDKSFTLIVFSNGKLGLSVEHSWADCPISGHMWEFTLATECFQLGYSTDGHCKGHPDPTLPQPQRLQWDLPDQIHSSISLALRGAKILSENVDCHVVPFSLFGKSFIRRCHLSSDSFIQIALQLAHFRDRGQFCLTYESAMTRLFLEGRTETVRSCTREACNFVRAMEDKEKTDPQCLALFRVAVDKHQALLKAAMSGQGVDRHLFALYIVSRFLHLQSPFLTQVHSEQWQLSTSQIPVQQMHLFDVHNYPDYVSSGGGFGPADDHGYGVSYIFMGDGMITFHISSKKSSTKTDSHRLGQHIEDALLDVASLFQAGQHFKRRFRGSGKENSRHRCGFLSRQTGASKASMTSTDF

SEQ ID NO: 40115 - protein, 714 aa, Homo sapiens
MAEAHQAVGFRPSLTSDGAEVELSAPVLQEIYLSGLRSWKRHLSRFWNDFLTGVFPASPLSWLFLFSAIQLAWFLQLDPSLGLMEKIKELLPDWGGQHHGLRGVLAAALFASCLWGALIFTLHVALRLLLSYHGWLLEPHGAMSSPTKTWLALVRIFSGRHPMLFSYQRSLPRQPVPSVQDTVRKYLESVRPILSDEDFDWTAVLAQEFLRLQASLLQWYLRLKSWWASNYVSDWWEEFVYLRSRNPLMVNSNYYMMDFLYVTPTPLQAARAGNAVHALLLYRHRLNRQEIPPTLLMGMRPLCSAQYEKIFNTTRIPGVQKDYIRHLHDSQHVAVFHRGRFFRMGTHSRNSLLSPRALEQQFQRILDDPSPACPHEEHLAALTAAPRGTWAQVRTSLKTQAAEALEAVEGAAFFVSLDAEPAGLTREDPAASLDAYAHALLAGRGHDRWFDKSFTLIVFSNGKLGLSVEHSWADCPISGHMWEFTLATECFQLGYSTDGHCKGHPDPTLPQPQRLQWDLPDQIHSSISLALRGAKILSENVDCHVVPFSLFGKSFIRRCHLSSDSFIQIALQLAHFRDRGQFCLTYESAMTRLFLEGRTETVRSCTREACNFVRAMEDKEKTADDHGYGVSYIFMGDGMITFHISSKKSSTKTDSHRLGQHIEDALLDVASLFQAGQHFKRRFRGSGKENSRHRCGFLSRQTGASKASMTSTDF

SEQ ID NO: 40116 - protein, 803 aa, Homo sapiens; identical to SEQ ID NO: 40114

SEQ ID NO: 40117 - protein, 792 aa, Homo sapiens
MAEAHQAVGFRPSLTSDGAEVELSAPVLQEIYLSGLRSWKRHLSRFWNDFLTGVFPASPLSWLFLFSAIQLAWFLQLDPSLGLMEKIKELLPDWGGQHHGLRGVLAAALFASCLWGALIFTLHVALRLLLSYHGWLLEPHGAMSSPTKTWLALVRIFSGRHPMLFSYQRSLPRQPVPSVQDTVRKYLESVRPILSDEDFDWTAVLAQEFLRLQASLLQWYLRLKSWWASNYVSDWWEEFVYLRSRNPLMVNSNYYMMAARAGNAVHALLLYRHRLNRQEIPPTLLMGMRPLCSAQYEKIFNTTRIPGVQKDYIRHLHDSQHVAVFHRGRFFRMGTHSRNSLLSPRALEQQFQRILDDPSPACPHEEHLAALTAAPRGTWAQVRTSLKTQAAEALEAVEGAAFFVSLDAEPAGLTREDPAASLDAYAHALLAGRGHDRWFDKSFTLIVFSNGKLGLSVEHSWADCPISGHMWEFTLATECFQLGYSTDGHCKGHPDPTLPQPQRLQWDLPDQIHSSISLALRGAKILSENVDCHVVPFSLFGKSFIRRCHLSSDSFIQIALQLAHFRDRGQFCLTYESAMTRLFLEGRTETVRSCTREACNFVRAMEDKEKTDPQCLALFRVAVDKHQALLKAAMSGQGVDRHLFALYIVSRFLHLQSPFLTQVHSEQWQLSTSQIPVQQMHLFDVHNYPDYVSSGGGFGPADDHGYGVSYIFMGDGMITFHISSKKSSTKTDSHRLGQHIEDALLDVASLFQAGQHFKRRFRGSGKENSRHRCGFLSRQTGASKASMTSTDF

SEQ ID NO: 40118 - protein, 803 aa, Homo sapiens; identical to SEQ ID NO: 40114

SEQ ID NO: 40119 - protein, 507 aa, Homo sapiens
MDPKLGRMAASLLAVLLLLLERGMFSSPSPPPALLEKVFQYIDLHQDEFVQTLKEWVAIESDSVQPVPRFRQELFRMMAVAADTLQRLGARVASVDMGPQQLPDGQSLPIPPIILAELGSDPTKGTVCFYGHLDVQPADRGDGWLTDPYVLTEVDGKLYGRGATDNKGPVLAWINAVSAFRALEQDLPVNIKFIIEGMEEAGSVALEELVEKEKDRFFSGVDYIVISDNLWISQRKPAITYGTRGNSYFMVEVKCRDQDFHSGTFGGILHEPMADLVALLGSLVDSSGHILVPGIYDEVVPLTEEEINTYKAIHLDLEEYRNSSRVEKFLFDTKEEILMHLWRYPSLSIHGIEGAFDEPGTKTVIPGRVIGKFSIRLVPHMNVSAVEKQVTRHLEDVFSKRNSSNKMVVSMTLGLHPWIANIDDTQYLAAKRAIRTVFGTEPDMIRDGSTIPIAKMFQEIVHKSVVLIPLGAVDDGEHSQNEKINRWNYIEGTKLFAAFFLEMAQLH

SEQ ID NO: 40120 - protein, 827 aa, Homo sapiens
MLLCLSPAWLMKVPAPGQPGEAALLVSKAVSFHPGGLTFLDDFVPPRRATYFLAGLGLGPGRGREAAELARDLTCPTGASAELARLLEDRLLTRQLLAQQGGVAVPATLAFTYKPPGLLRGGDASLGLRLVELSGKEGQETLVKEEVEAFLRSEALGDILQVAVKLSGWRWRGRQAWRLHPRAELGAVVDTVLALLEKLEEEESVLVEAVYPPAQLPCSDGPSPGPGLAVRICAVVCRTQGDRPLLSKVVCGVGRGDRPLRHHNSLPRTLEVALAQCGLGEEAQVAAVRQRVKAAAEAALAAVLALEAGLSAEQRGGRRAHTDFLGVDFALTAAGGVLTPVALELNGGLCLEACGALEGLWAAPRLGPAADEAVAAPLVETMLRRSARCLMEGKQLLVVGAGGVSKKFVWEAARDYGLQLHLVESDPNHFASQLVQTFIHFDMTEHRRDEENARLLAELVRARGLKLDGCFSYWDDCLVLTALLCQELGLPCSSPAAMRLAKQKSLTQLHLLHHHGPPWPAPSLHAVPCCPLESEADVERAVHQVPLPGVMKLEFGAGAVGVRLVEDAPQCHEHFSRITRDLQGEADHPGIGLGWGNAMLLMEFVEGTEHDVDLVLFGGRLLAAFVSDNGPTRLPGFTETAACMPTGLAPEQEAQMVQAAFRCCLGCGLLDGVFNVELKLTGAGPRLIEINPRMGGFYLRDWILELYGVDLLLAAVMVACGLRPALPTRPRARGHLVGVMCLVSQHLQALSSTASRETLQALHDRGLLRLNLLEEALVPGEYEEPYCSVACAGPSPTEARLRLLGLCQGLGIDGPSYPVAHFLSHFK

SEQ ID NO: 40121 - protein, 827 aa, Homo sapiens; identical to SEQ ID NO: 40120

SEQ ID NO: 40122 - protein, 950 aa, Homo sapiens
MLSLDPSGPEWDCPLGSKDLEEEGPWGGGSGLPPTGCFPGSWRQDVGLDCKGSPEGAEARAWTVYYYSLLQSCLQQAGLPETQDRGQVPRTGCPGAEVTLCVLGSPSTFLPVLLEGGVQSPGNMLLCLSPAWLMKVPAPGQPGEAALLVSKAVSFHPGGLTFLDDFVPPRRATYFLAGLGLGPGRGREAAELARDLTCPTGASAELARLLEDRLLTRQLLAQQGGVAVPATLAFTYKPPGLLRGGDASLGLRLVELSGKEGQETLVKEEVEAFLRSEALGDILQVAVKLSGWRWRGRQAWRLHPRAELGAVVDTVLALLEKLEEEESVLVEAVYPPAQLPCSDGPSPGPGLAVRICAVVCRTQGDRPLLSKVVCGVGRGDRPLRHHNSLPRTLEVALAQCGLGEEAQVAAVRQRVKAAAEAALAAVLALEAGLSAEQRGGRRAHTDFLGVDFALTAAGGVLTPVALELNGGLCLEACGALEGLWAAPRLGPAADEAVAAPLVETMLRRSARCLMEGKQLLVVGAGGVSKKFVWEAARDYGLQLHLVESDPNHFASQLVQTFIHFDMTEHRRDEENARLLAELVRARGLKLDGCFSYWDDCLVLTALLCQELGLPCSSPAAMRLAKQKSLTQLHLLHHHGPPWPAPSLHAVPCCPLESEADVERAVHQVPLPGVMKLEFGAGAVGVRLVEDAPQCHEHFSRITRDLQGEADHPGIGLGWGNAMLLMEFVEGTEHDVDLVLFGGRLLAAFVSDNGPTRLPGFTETAACMPTGLAPEQEAQMVQAAFRCCLGCGLLDGVFNVELKLTGAGPRLIEINPRMGGFYLRDWILELYGVDLLLAAVMVACGLRPALPTRPRARGHLVGVMCLVSQHLQALSSTASRETLQALHDRGLLRLNLLEEALVPGEYEEPYCSVACAGPSPTEARLRLLGLCQGLGIDGPSYPVAHFLSHFK

SEQ ID NO: 40123 - protein, 924 aa, Homo sapiens
MLSLDPSGPEWDCPLGSKDLEEEGPWGGGSGLPPTGCFPGSWRQDVGLDCKGSPEGAEARAWTVYYYSLLQSCLQQAGLPETQDRGQVPRTGCPGAEVTLCVLGSPSTFLPVLLEGGVQSPGNMLLCLSPAWLMKVPAPGQPGEAALLVSKAVSFHPGGLTFLDDFVPPRRATYFLAGLGLGPGRGREAAELARDLTCPTGASAELARLLEDRLLTRQLLAQQGGVAVPATLAFTYKPPGLLRGGDASLGLRLVELSGKEGQETLVKEEVEAFLRSEALGDILQVAVKLSGWRWRGRQAWRLHPRAELGAVVDTVLALLEKLEEEESVLVEAVYPPAQLPCSDGPSPGPGLAVRICAVVCRTQGDRPLLSKVVCGVGRGDRPLRHHNSLPRTLEAALAAVLALEAGLSAEQRGGRRAHTDFLGVDFALTAAGGVLTPVALELNGGLCLEACGALEGLWAAPRLGPAADEAVAAPLVETMLRRSARCLMEGKQLLVVGAGGVSKKFVWEAARDYGLQLHLVESDPNHFASQLVQTFIHFDMTEHRRDEENARLLAELVRARGLKLDGCFSYWDDCLVLTALLCQELGLPCSSPAAMRLAKQKSLTQLHLLHHHGPPWPAPSLHAVPCCPLESEADVERAVHQVPLPGVMKLEFGAGAVGVRLVEDAPQCHEHFSRITRDLQGEADHPGIGLGWGNAMLLMEFVEGTEHDVDLVLFGGRLLAAFVSDNGPTRLPGFTETAACMPTGLAPEQEAQMVQAAFRCCLGCGLLDGVFNVELKLTGAGPRLIEINPRMGGFYLRDWILELYGVDLLLAAVMVACGLRPALPTRPRARGHLVGVMCLVSQHLQALSSTASRETLQALHDRGLLRLNLLEEALVPGEYEEPYCSVACAGPSPTEARLRLLGLCQGLGIDGPSYPVAHFLSHFK

SEQ ID NO: 40124 - protein, 300 aa, Homo sapiens
MCPLAHPAQDLPLLPSQLSLDPSGPEWDCPLGSKDLEEEGPWGGGSGLPPTGCFPGSWRQDVGLDCKGSPEGAEARAWTVYYYSLLQSCLQQAGLPETQDRGQVPRTGCPGAEVTLCVLGSPSTFLPVLLEGGVQSPGNMLLCLSPAWLMKVPAPGQPGEAALLVSKAVSFHPGGLTFLDDFVPPRRATYFLAGLGLGPGRGREAAELARDLTCPTGASAELARLLEDRLLTRQLLAQQGGVAVPATLAFTYKPPGLLRGGDASLGLRLVELSGKEGQETLVKEERTWLGPKPWTNPGKT

SEQ ID NO: 40125 - protein, 924 aa, Homo sapiens
MLSLDPSGPEWDCPLGSKDLEEEGPWGGGSGLPPTGCFPGSWRQDVGLDCKGSPEGAEARAWTVYYYSLLQSCLQQAGLPETQDRGQVPRTGCPGAEVTLCVLGSPSTFLPVLLEGGVQSPGNMLLCLSPAWLMKVPAPGQPGEAALLVSKAVSFHPGGLTFLDDFVPPRRATYFLAGLGLGPGRGREAAELARDLTCPTGASAELARLLEDRLLTRQLLAQQGGVAVPATLAFTYKPPGLLRGGDASLGLRLVELSGKEGQETLVKEEVEAFLRSEALGDILQVAVKLSGWRWRGRQAWRLHPRAELGAVVDTVLALLEKLEEEESVLVEAVYPPAQLPCSDGPSPGPGLAVRICAVVCRTQGDRPLLSKVVCGVGRGDRPLRHHNSLPRTLEVALAAVLALEAGLSAEQRGGRRAHTDFLGVDFALTAAGGVLTPVALELNGGLCLEACGALEGLWAAPRLGPAADEAVAAPLVETMLRRSARCLMEGKQLLVVGAGGVSKKFVWEAARDYGLQLHLVESDPNHFASQLVQTFIHFDMTEHRRDEENARLLAELVRARGLKLDGCFSYWDDCLVLTALLCQELGLPCSSPAAMRLAKQKSLTQLHLLHHHGPPWPAPSLHAVPCCPLESEADVERAVHQVPLPGVMKLEFGAGAVGVRLVEDAPQCHEHFSRITRDLQGEADHPGIGLGWGNAMLLMEFVEGTEHDVDLVLFGGRLLAAFVSDNGPTRLPGFTETAACMPTGLAPEQEAQMVQAAFRCCLGCGLLDGVFNVELKLTGAGPRLIEINPRMGGFYLRDWILELYGVDLLLAAVMVACGLRPALPTRPRARGHLVGVMCLVSQHLQALSSTASRETLQALHDRGLLRLNLLEEALVPGEYEEPYCSVACAGPSPTEARLRLLGLCQGLGIDGPSYPVAHFLSHFK

SEQ ID NO: 40126 - protein, 401 aa, Homo sapiens
MEPGRRGAAALLALLCVACALRAGRAQYERYSFRSFPRDELMPLESAYRHALDKYSGEHWAESVGYLEISLRLHRLLRDSEAFCHRNCSAAPQPEPAAGLASYPELRLFGGLLRRAHCLKRCKQGLPAFRQSQPSREVLADFQRREPYKFLQFAYFKANNLPKAIAAAHTFLLKHPDDEMMKRNMAYYKSLPGAEDYIKDLETKSYESLFIRAVRAYNGENWRTSITDMELALPDFFKAFYECLAACEGSREIKDFKDFYLSIADHYVEVLECKIQCEENLTPVIGGYPVEKFVATMYHYLQFAYYKLNDLKNAAPCAVSYLLFDQNDKVMQQNLVYYQYHRDTWGLSDEHFQPRPEAVQFFNVTTLQKELYDFAKENIMDDDEGEVVEYVDDLLELEETS

SEQ ID NO: 40127 - protein, 262 aa, Homo sapiens
MEPGRRGAAALLALLCVACALRAGRAQYERYSFRSFPRDELMPLESAYRHALDKYSGEHWAESVGYLEISLRLHRLLRDSEAFCHRNCSAAPQPEPAAGLASYPELRLFGGLLRRAHCLKRCKQGLPAFRQSQPSREVLADFQRREPYKFLQFAYFKANNLPKAIAAAHTFLLKHPDDEMMKRNMAYYKSLPGAEDYLKTWKPSHMKACSSEQCGHTTVRTGEHPSQTWSWPFPTSSKPFTSVSQPARVPGRSRTSRISTFP

SEQ ID NO: 40128 - protein, 262 aa, Homo sapiens
MEPGRRGAAALLALLCVACALRAGRAQYERYSFRSFPRDELMPLESAYRHALDKYSGEHWAESVGYLEISLRLHRLLRDSEAFCHRNCSAAPQPEPAAGLASYPELRLFGGLLRRAHCLKRCKQGLPAFRQSQPSREVLADFQRREPYKFLQFAYFKANNLPKAIAAAHTFLLKHPDDEMMKRNMAYYKSLPGAEDYIKDLETKSYESLFIEQCGHTTVRTGEHPSQTWSWPFPTSSKPFTSVSQPARVPGRSRTSRISTFP

SEQ ID NO: 40129 - protein, 388 aa, Homo sapiens
MEPGRRGAAALLALLCVACALRAGRAQYERYSFRSFPRDELMPLESAYRHALDKYSGEHWAESVRDSEAFCHRNCSAAPQPEPAAGLASYPELRLFGGLLRRAHCLKRCKQGLPAFRQSQPSREVLADFQRREPYKFLQFAYFKANNLPKAIAAAHTFLLKHPDDEMMKRNMAYYKSLPGAEDYIKDLETKSYESLFIRAVRAYNGENWRTSITDMELALPDFFKAFYECLAACEGSREIKDFKDFYLSIADHYVEVLECKIQCEENLTPVIGGYPVEKFVATMYHYLQFAYYKLNDLKNAAPCAVSYLLFDQNDKVMQQNLVYYQYHRDTWGLSDEHFQPRPEAVQFFNVTTLQKELYDFAKENIMDDDEGEVVEYVDDLLELEETS

SEQ ID NO: 40130 - protein, 1156 aa, Homo sapiens
MASLLPLLCLCVVAAHLAGARDATPTEEPMATALGLERRSVYTGQPSPALEDWEEASEWTSWFNVDHPGGDGDFESLAAIRFYYGPARVCPRPLALEARTTDWALPSAVGERVHLNPTRGFWCLNREQPRGRRCSNYHVRFRCPLEASWGAWGPWGPCSGSCGPGRRLRRRHCPSPAGDACPGRPLEAQKCVRPRCPGCSLDTCECPDHILLGSVVTPSGQPLLGARVSLRDQPGTVATSDAHGTFRVPGVCADSRANIRAQMDGFSAGEAQAQANGSISVVTIILDKLEKPYLVKHPESRVREAGQNVTFCCKASGTPMPKKYSWFHNGTLLDRRAHGYGAHLELRGLRPDQAGIYHCKAWNEAGAVRSGTARLTVLAPGQPACDPRPREYLIKLPEDCGQPGSGPAYLDVGLCPDTRCPSLAGSSPRCGDASSRCCSVRRLERREIHCPGYVLPVKVVAECGCQKCLPPRGLVRGRVVAADSGEPLRFARILLGQEPIGFTAYQGDFTIEVPPSTQRLVVTFVDPSGEFMDAVRVLPFDPRGAGVYHEVKAMRKKAPVILHTSQSNTIPLGELEDEAPLGELVLPSGAFRRADGKPYSGPVEARVTFVDPRDLTSAASAPSDLRFVDSDGELAPLRTYGMFSVDLRAPGSAEQLQVGPVAVRVAASQIHMPGHVEALKLWSLNPETGLWEEESGFRREGSSGPRVRREERVFLVGNVEIRERRLFNLDVPERRRCFVKVRAYANDKFTPSEQVEGVVVTLVNLEPAPGFSANPRAWGRFDSAVTGPNGACLPAFCDADRPDAYTALVTATLGGEELEPAPSLPRPLPATVGVTQPYLDRLGYRRTDHDDPAFKRNGFRINLAKPRPGDPAEANGPVYPWRSLRECQGAPVTASHFRFARVEADKYEYNVVPFREGTPASWTGDLLAWWPNPQEFRACFLKVKIQGPQEYMVRSHNAGGSHPRTRGQLYGLRDARSVRDPERPGTSAACVEFKCSGMLFDQRQVDRTLVTIMPQGSCRRVAVNGLLRDYLTRHPPPVPAEDPAAFSMLAPLDPLGHNYGVYTVTDQSPRLAKEIAIGRCFDGSSDGFSREMKADAGTAVTFQCREPPAGRPSLFQRLLESPATALGDIRREMSEAAQAQARASGPLRTRRGRVRQ

SEQ ID NO: 40131 - protein, 1184 aa, Homo sapiens
MVGTKAWVFSFLVLEVTSVLGRQTMLTQSVRRVQPGKKNPSIFAKPADTLESPGEWTTWFNIDYPGGKGDYERLDAIRFYYGDRVCARPLRLEARTTDWTPAGSTGQVVHGSPREGFWCLNREQRPGQNCSNYTVRFLCPPGSLRRDTERIWSPWSPWSKCSAACGQTGVQTRTRICLAEMVSLCSEASEEGQHCMGQDCTACDLTCPMGQVNADCDACMCQDFMLHGAVSLPGGAPASGAAIYLLTKTPKLLTQTDSDGRFRIPGLCPDGKSILKITKVKFAPIVLTMPKTSLKAATIKAEFVRAETPYMVMNPETKARRAGQSVSLCCKATGKPRPDKYFWYHNDTLLDPSLYKHESKLVLRKLQQHQAGEYFCKAQSDAGAVKSKVAQLIVIASDETPCNPVPESYLIRLPHDCFQNATNSFYYDVGRCPVKTCAGQQDNGIRCRDAVQNCCGISKTEEREIQCSGYTLPTKVAKECSCQRCTETRSIVRGRVSAADNGEPMRFGHVYMGNSRVSMTGYKGTFTLHVPQDTERLVLTFVDRLQKFVNTTKVLPFNKKGSAVFHEIKMLRRKKPITLEAMETNIIPLGEVVGEDPMAELEIPSRSFYRQNGEPYIGKVKASVTFLDPRNISTATAAQTDLNFINDEGDTFPLRTYGMFSVDFRDEVTSEPLNAGKVKVHLDSTQVKMPEHISTVKLWSLNPDTGLWEEEGDFKFENQRRNKREDRTFLVGNLEIRERRLFNLDVPESRRCFVKVRAYRSERFLPSEQIQGVVISVINLEPRTGFLSNPRAWGRFDSVITGPNGACVPAFCDDQSPDAYSAYVLASLAGEELQAVESSPKFNPNAIGVPQPYLNKLNYRRTDHEDPRVKKTAFQISMAKPRPNSAEESNGPIYAFENLRACEEAPPSAAHFRFYQIEGDRYDYNTVPFNEDDPMSWTEDYLAWWPKPMEFRACYIKVKIVGPLEVNVRSRNMGGTHRQTVGKLYGIRDVRSTRDRDQPNVSAACLEFKCSGMLYDQDRVDRTLVKVIPQGSCRRASVNPMLHEYLVNHLPLAVNNDTSEYTMLAPLDPLGHNYGIYTVTDQDPRTAKEIALGRCFDGTSDGSSRIMKSNVGVALTFNCVERQVGRQSAFQYLQSTPAQSPAAGTVQGRVPSRRQQRASRGGQRQGGVVASLRFPRVAQQPLIN

SEQ ID NO: 40132 - protein, 757 aa, Homo sapiens
MVPDTACVLLLTLAALGASGQGQSPLGSDLGPQMLRELQETNAALQDVRELLRQQVREITFLKNTVMECDACGMQQSVRTGLPSVRPLLHCAPGFCFPGVACIQTESGARCGPCPAGFTGNGSHCTDVNECNAHPCFPRVRCINTSPGFRCEACPPGYSGPTHQGVGLAFAKANKQVCTDINECETGQHNCVPNSVCINTRGSFQCGPCQPGFVGDQASGCQRRAQRFCPDGSPSECHEHADCVLERDGSRSCVCAVGWAGNGILCGRDTDLDGFPDEKLRCPERQCRKDNCVTVPNSGQEDVDRDGIGDACDPDADGDGVPNEKDNCPLVRNPDQRNTDEDKWGDACDNCRSQKNDDQKDTDQDGRGDACDDDIDGDRIRNQADNCPRVPNSDQKDSDGDGIGDACDNCPQKSNPDQADVDHDFVGDACDSDQDQDGDGHQDSRDNCPTVPNSAQEDSDHDGQGDACDDDDDNDGVPDSRDNCRLVPNPGQEDADRDGVGDVCQDDFDADKVVDKIDVCPENAEVTLTDFRAFQTVVLDPEGDAQIDPNWVVLNQGREIVQTMNSDPGLAVGYTAFNGVDFEGTFHVNTVTDDDYAGFIFGYQDSSSFYVVMWKQMEQTYWQANPFRAVAEPGIQLKAVKSSTGPGEQLRNALWHTGDTESQVRLLWKDPRNVGWKDKKSYRWFLQHRPQVGYIRVRFYEGPELVADSNVVLDTTMRGGRLGVFCFSQENIIWANLRYRCNDTIPEDYETHQLRQA

SEQ ID NO: 40133 - protein, 704 aa, Homo sapiens
MVPDTACVLLLTLAALGASGQGQSPLGSDLGPQMLRELQETNAALQDVRELLRQQVREITFLKNTVMECDACGMQQSVRTGLPSVRPLLHCAPGFCFPGVACIQTESGARCGPCPAGFTGNGSHCTDVNECETGQHNCVPNSVCINTRGSFQCGPCQPGFVGDQASGCQRRAQRFCPDGSPSECHEHADCVLERDGSRSCVCAVGWAGNGILCGRDTDLDGFPDEKLRCPERQCRKDNCVTVPNSGQEDVDRDGIGDACDPDADGDGVPNEKDNCPLVRNPDQRNTDEDKWGDACDNCRSQKNDDQKDTDQDGRGDACDDDIDGDRIRNQADNCPRVPNSDQKDSDGDGIGDACDNCPQKSNPDQADVDHDFVGDACDSDQDQDGDGHQDSRDNCPTVPNSAQEDSDHDGQGDACDDDDDNDGVPDSRDNCRLVPNPGQEDADRDGVGDVCQDDFDADKVVDKIDVCPENAEVTLTDFRAFQTVVLDPEGDAQIDPNWVVLNQGREIVQTMNSDPGLAVGYTAFNGVDFEGTFHVNTVTDDDYAGFIFGYQDSSSFYVVMWKQMEQTYWQANPFRAVAEPGIQLKAVKSSTGPGEQLRNALWHTGDTESQVRLLWKDPRNVGWKDKKSYRWFLQHRPQVGYIRVRFYEGPELVADSNVVLDTTMRGGRLGVFCFSQENIIWANLRYRCNDTIPEDYETHQLRQA

SEQ ID NO: 40134 - protein, 744 aa, Homo sapiens
MVPDTACVLLLTLAALGASGQGQSPLGSDLGPQMLRELQETNAALQDVRELLRQQVREITFLKNTVMECDACGMQQSVRTGLPSVRPLLHCAPGFCFPGPCPAGFTGNGSHCTDVNECNAHPCFPRVRCINTSPGFRCEACPPGYSGPTHQGVGLAFAKANKQVCTDINECETGQHNCVPNSVCINTRGSFQCGPCQPGFVGDQASGCQRRAQRFCPDGSPSECHEHADCVLERDGSRSCVCAVGWAGNGILCGRDTDLDGFPDEKLRCPERQCRKDNCVTVPNSGQEDVDRDGIGDACDPDADGDGVPNEKDNCPLVRNPDQRNTDEDKWGDACDNCRSQKNDDQKDTDQDGRGDACDDDIDGDRIRNQADNCPRVPNSDQKDSDGDGIGDACDNCPQKSNPDQADVDHDFVGDACDSDQDQDGDGHQDSRDNCPTVPNSAQEDSDHDGQGDACDDDDDNDGVPDSRDNCRLVPNPGQEDADRDGVGDVCQDDFDADKVVDKIDVCPENAEVTLTDFRAFQTVVLDPEGDAQIDPNWVVLNQGREIVQTMNSDPGLAVGYTAFNGVDFEGTFHVNTVTDDDYAGFIFGYQDSSSFYVVMWKQMEQTYWQANPFRAVAEPGIQLKAVKSSTGPGEQLRNALWHTGDTESQVRLLWKDPRNVGWKDKKSYRWFLQHRPQVGYIRVRFYEGPELVADSNVVLDTTMRGGRLGVFCFSQENIIWANLRYRCNDTIPEDYETHQLRQA

SEQ ID NO: 40135 - protein, 797 aa, Homo sapiens
MAALAYNLGKREINHYFSVRSAKVLALVAVLLLAACHLASRRYRGNDSCEYLLSSGRFLGEKVWQPHSCMMHKYKISEAKNCLVDKHIAFIGDSRIRQLFYSFVKIINPQFKEEGNKHENIPFEDKTASVKVDFLWHPEVNGSMKQCIKVWTEDSIAKPHVIVAGAATWSIKIHNGSSEALSQYKMNITSIAPLLEKLAKTSDVYWVLQDPVYEDLLSENRKMITNEKIDAYNEAAVSILNSSTRNSKSNVKMFSVSKLIAQETIMESLDGLHLPESSRETTAMILMNVYCNKILKPVDGSCCQPRPPVTLIQKLAACFFTLSIIGYLIFYIIHRNAHRKNKPCTDLESGEEKKNIINTPVSSLEILLQSFCKLGLIMAYFYMCDRANLFMKENKFYTHSSFFIPIIYILVLGVFYNENTKETKVLNREQTDEWKGWMQLVILIYHISGASTFLPVYMHIRVLVAAYLFQTGYGHFSYFWIKGDFGIYRVCQVLFRLNFLVVVLCIVMDRPYQFYYFVPLVTVWFMVIYVTLALWPQIIQKKANGNCFWHFGLLLKLGFLLLFICFLAYSQGAFEKIFSLWPLSKCFELKGNVYEWWFRWRLDRYVVFHGMLFAFIYLALQKRQILSEGKGEPLFSNKISNFLLFISVVSFLTYSIWASSCKNKAECNELHPSVSVVQILAFILIRNIPGYARSVYSSFFAWFGKISLELFICQYHIWLAADTRGILVLIPGNPMLNIIVSTFIFVCVAHEISQITNDLAQIIIPKDNSSLLKRLACIAAFFCGLLILSSIQDKSKH

SEQ ID NO: 40136 - protein, 906 aa, Homo sapiens
MAGNVKKSSGAGGGSGSGGSGSGGLIGLMKDAFQPHHHHHHHLSPHPPGTVDKKMVEKCWKLMDKVVRLCQNPKLALKNSPPYILDLLPDTYQHLRTILSRYEGKMETLGENEYFRVFMENLMKKTKQTISLFKEGKERMYEENSQPRRNLTKLSLIFSHMLAELKGIFPSGLFQGDTFRITKADAAEFWRKAFGEKTIVPWKSFRQALHEVHPISSGLEAMALKSTIDLTCNDYISVFEFDIFTRLFQPWSSLLRNWNSLAVTHPGYMAFLTYDEVKARLQKFIHKPGSYIFRLSCTRLGQWAIGYVTADGNILQTIPHNKPLFQALIDGFREGFYLFPDGRNQNPDLTGLCEPTPQDHIKVTQEQYELYCEMGSTFQLCKICAENDKDVKIEPCGHLMCTSCLTSWQESEGQGCPFCRCEIKGTEPIVVDPFDPRGSGSLLRQGAEGAPSPNYDDDDDERADDTLFMMKELAGAKVERPPSPFSMAPQASLPPVPPRLDLLPQRVCVPSSASALGTASKAASGSLHKDKPLPVPPTLRDLPPPPPPDRPYSVGAESRPQRRPLPCTPGDCPSRDKLPPVPSSRLGDSWLPRPIPKVPVSAPSSSDPWTGRELTNRHSLPFSLPSQMEPRPDVPRLGSTFSLDTSMSMNSSPLVGPECDHPKIKPSSSANAIYSLAARPLPVPKLPPGEQCEGEEDTEYMTPSSRPLRPLDTSQSSRACDCDQQIDSCTYEAMYNIQSQAPSITESSTFGEGNLAAAHANTGPEESENEDDGYDVPKPPVPAVLARRTLSDISNASSSFGWLSLDGDPTTNVTEGSQVPERPPKPFPRRINSERKAGSCQQGSGPAASAATASPQLSSEIENLMSQGYSYQDIQKALVIAQNNIEMAKNILREFVSISSPAHVAT

SEQ ID NO: 40137 - protein, 982 aa, Homo sapiens [sequence omitted]

SEQ ID NO: 40138 - protein, 960 aa, Homo sapiens
MALAPGPDAHAHLPPLIELKFQMANSMNGRNPGGRGGNPRKGRILGIIDAIQDAVGPPKQAAADRRTVEKTWKLMDKVVRLCQNPKLQLKNSPPYILDILPDTYQHLRLILSKYDDNQKLAQLSENEYFKIYIDSLMKKSKRAIRLFKEGKERMYEEQSQDRRNLTKLSLIFSHMLAEIKAIFPNGQFQGDNFRITKADAAEFWRKFFGDKTIVPWKVFRQCLHEVHQISSGLEAMALKSTIDLTCNDYISVFEFDIFTRLFQPWGSILRNWNFLAVTHPGYMAFLTYDEVKARLQKYSTKPGSYIFRLSCTRLGQWAIGYVTGDGNILQTIPHNKPLFQALIDGSREGFYLYPDGRSYNPDLTGLCEPTPHDHIKVTQEQYELYCEMGSTFQLCKICAENDKDVKIEPCGHLMCTSCLTAWQESDGQGCPFCRCEIKGTEPIIVDPFDPRDEGSRCCSIIDPFGMPMLDLDDDDDREESLMMNRLANVRKCTDRQNSPVTSPGSSPLAQRRKPQPDPLQIPHLSLPPVPPRLDLIQKGIVRSPCGSPTGSPKSSPCMVRKQDKPLPAPPPPLRDPPPPPPERPPPIPPDNRLSRHIHHVESVPSRDPPMPLEAWCPRDVFGTNQLVGCRLLGEGSPKPGITASSNVNGRHSRVGSDPVLMRKHRRHDLPLEGAKVFSNGHLGSEEYDVPPRLSPPPPVTTLLPSIKCTGPLANSLSEKTRDPVEEDDDEYKIPSSHPVSLNSQPSHCHNVKPPVRSCDNGHCMLNGTHGPSSEKKSNIPDLSIYLKGEDAFDALPPSLPPPPPPARHSLIEHSKPPGSSSRPSSGQDLFLLPSDPFVDLASGQVPLPPARRLPGENVKTNRTSQDYDQLPSCSDGSQAPARPPKPRPRRTAPEIHHRKPHGPEAALENVDAKIAKLMGEGYAFEEVKRALEIAQNNVEVARSILREFAFPPPVSPRLNL

SEQ ID NO: 40139 - protein, 770 aa, Homo sapiens
MANSMNGRNPGGRGGNPRKGRILGIIDAIQDAVGPPKQAAADRRTVEKTWKLMDKVVRLCQNPKLQLKNSPPYILDILPDTYQHLRLILSKYDDNQKLAQLSENEYFKIYIDSLMKKSKRAIRLFKEGKERMYEEQSQDRRNLTKLSLIFSHMLAEIKAIFPNGQFQGDNFRITKADAAEFWRKFFGDKTIVPWKVFRQCLHEVHQISSGLEAMALKSTIDLTCNDYISVFEFDIFTRLFQPWGSILRNWNFLAVTHPGYMAFLTYDEVKARLQKYSTKPGSYIFRLSCTRLGQWAIGYVTGDGNILQTIPHNKPLFQALIDGSREGFYLYPDGRSYNPDLTGLCEPTPHDHIKVTQEQYELYCEMGSTFQLCKICAENDKDVKIEPCGHLMCTSCLTAWQESDGQGCPFCRCEIKGTEPIIVDPFDPRDEGSRCCSIIDPFGMPMLDLDDDDDREESLMMNRLANVRKCTDRQNSPVTSPGSSPLAQRRKPQPDPLQIPHLSLPPVPPRLDLIQKGIVRSPCGSPTGSPKSSPCMVRKQDKPLPAPPPPLRDPPPPPPERPPPIPPDNRLSRHIHHVESVPSRDPPMPLEAWCPRDVFGTNQLVGCRLLGEGSPKPGITASSNVNGRHSRVGSDPVLMRKHRRHDLPLEGAKVFSNGHLGSEEYDVPPRLSPPPPVTTLLPSIKCTGPLANSLSEKTRDPVEEDDDEYKIPSSHPVSLNSQPSHCHNVKPPVRSCDNGHCMLNGTHGPSSEKKSNIPDLSIYLKGTYRI

SEQ ID NO: 40140 - protein, 810 aa, Homo sapiens
MANSMNGRNPGGRGGNPRKGRILGIIDAIQDAVGPPKQAAADRRTVEKTWKLMDKVVRLCQNPKLQLKNSPPYILDILPDTYQHLRLILSKYDDNQKLAQLSENEYFKIYIDSLMKKSKRAIRLFKEGKERMYEEQSQDRRNLTKLSLIFSHMLAEIKAIFPNGQFQGDNFRITKADAAEFWRKFFGDKTIVPWKVFRQCLHEVHQISSGLEAMALKSTIDLTCNDYISVFEFDIFTRLFQPWGSILRNWNFLAVTHPGYMAFLTYDEVKARLQKYSTKPGSYIFRLSCTRLGQWAIGYVTGDGNILQTIPHNKPLFQALIDGSREGFYLYPDGRSYNPDLTGLCEPTPHDHIKVTQEQYELYCEMGSTFQLCKICAENDKDVKIEPCGHLMCTSCLTAWQESDGQGCPFCRCEIKGTEPIIVDPFDPRDEGSRCCSIIDPFGMPMLDLDDDDDREESLMMNRLANVRKCTDRQNSPVTSPGSSPLAQRRKPQPDPLQIPHLSLPPVPPRLDLIQKGIVRSPCGSPTGSPKSSPCMVRKQDKPLPAPPPPLRDPPPPPPERPPPIPPDNRLSRHIHHVESVPSRDPPMPLEAWCPRDVFGTNQLVGCRLLGEGSPKPGITASSNVNGRHSRVGSDPVLMRKHRRHDLPLEGAKVFSNGHLGSEEYDVPPRLSPPPPVTTLLPSIKCTGPLANSLSEKTRDPVEEDDDEYKIPSSHPVSLNSQPSHCHNVKPPVRSCDNGHCMLNGTHGPSSEKKSNIPDLSIYLKGDVFDSASDPVPLPPARPPTRDNPKHGSSLNRTPSDYDLLIPPLG

SEQ ID NO: 40141 - protein, 139 aa, Homo sapiens
MANSMNGRNPGGRGGNPRKGRILGIIDAIQDAVGPPKQAAADRRTVEKTWKLMDKVVRLCQNPKLQLKNSPPYILDILPDTYQHLRLILSKYDDNQKLAQLSENEYFKIYIDSLMKKSKRAIRLFKEGKERMYEEQSQD

SEQ ID NO: 40142 - protein, 227 aa, Homo sapiens
MALAPGPDAHAHLPPLIELKFQMANSMNGRNPGGRGGNPRKGRILGIIDAIQDAVGPPKQAAADRRTVEKTWKLMDKVVRLCQNPKLQLKNSPPYILDILPDTYQHLRLILSKYDDNQKLAQLSENEYFKIYIDSLMKKSKRAIRLFKEGKERMYEEQSQDRTIVPWKVFRQCLHEVHQISSGLEAMALKSTIDLTCNDYISVFEFDIFTRLFQVSDNFTEYLIYLT

SEQ ID NO: 40143 - protein, 474 aa, Homo sapiens
MALAVAPWGRQWEEARALGRAVRMLQRLEEQCVDPRLSVSPPSLRDLLPRTAQLLREVAHSRRAAGGGGPGGPGGSGDFLLIYLANLEAKSRQVAALLPPRGRRSANDELFRAGSRLRRQLAKLAIIFSHMHAELHALFPGGKYCGHMYQLTKAPAHTFWRESCGARCVLPWAEFESLLGTCHPVEPGCTALALRTTIDLTCSGHVSIFEFDVFTRLFQPWPTLLKNWQLLAVNHPGYMAFLTYDEVQERLQACRDKPGSYIFRPSCTRLGQWAIGYVSSDGSILQTIPANKPLSQVLLEGQKDGFYLYPDGKTHNPDLTELGQAEPQQRIHVSEEQLQLYWAMDSTFELCKICAESNKDVKIEPCGHLLCSCCLAAWQHSDSQTCPFCRCEIKGWEAVSIYQFHGQATAEDSGNSSDQEGRELELGQVPLSAPPLPPRPDLPPRKPRNAQPKVRLLKGNSPPAALGPQDPAPA

SEQ ID NO: 40144 - protein, 428 aa, Homo sapiens
MALAVAPWGRQWEEARALGRAVRMLQRLEEQCVDPRLSVSPPSLRDLLPRTAQLLREVAHSRRAAGGGGPGGPGGSGDFLLIYLANLEAKSRQVAALLPPRGRRSANDELFRAGSRLRRQLAKLAIIFSHMHAELHALFPGGKYCGHMYQLTKAPAHTFWRESCGARCVLPWAEFESLLGTCHPVEPGCTALALRTTIDLTCSGHVSIFEFDVFTRLFQPWPTLLKNWQLLAVNHPGYMAFLTYDEVQERLQACRDKPGSYLYPDGKTHNPDLTELGQAEPQQRIHVSEEQLQLYWAMDSTFELCKICAESNKDVKIEPCGHLLCSCCLAAWQHSDSQTCPFCRCEIKGWEAVSIYQFHGQATAEDSGNSSDQEGRELELGQVPLSAPPLPPRPDLPPRKPRNAQPKVRLLKGNSPPAALGPQDPAPA

SEQ ID NO: 40145 - protein, 490 aa, Homo sapiens
MDHTDNELQGTNSSGSLGGLDVRRRIPIKLISKQANKAKPAPRTQRTINRMPAKAPPGDEGFDYNEEERYDCKGGELFANQRRFPGHLFWDFQINILGEKDDTPVHFCDKCGLPIKIYGRMIPCKHVFCYDCAILHEKKGDKMCPGCSDPVQRIEQCTRGSLFMCSIVQGCKRTYLSQRDLQAHINHRHMRAGKPVTRASLENVHPPIAPPPTEIPERFIMPPDKHHMSHIPPKQHIMMPPPPLQHVPHEHYNQPHEDIRAPPAELSMAPPPPRSVSQETFRISTRKHSNLITVPIQDDSNSGAREPPPPAPAPAHHHPEYQGQPVVSHPHHIMPPQQHYAPPPPPPPPISHPMPHPPQAAGTPHLVYSQAPPPPMTSAPPPITPPPGHIIAQMPPYMNHPPPGPPPPQHGGPPVTAPPPHHYNPNSLPQFTEDQGTLSPPFTQPGGMSPGIWPAPRGPPPPPRLQGPPSQTPLPGPHHPDQTRYRPYYQ

SEQ ID NO: 40146 - protein, 491 aa, Homo sapiens
MDHTDNELQGTNSSGSLGGLDVRRRIPIKLISKQANKAKPAPRTQRTINRMPAKAPPGDEEGFDYNEEERYDCKGGELFANQRRFPGHLFWDFQINILGEKDDTPVHFCDKCGLPIKIYGRMIPCKHVFCYDCAILHEKKGDKMCPGCSDPVQRIEQCTRGSLFMCSIVQGCKRTYLSQRDLQAHINHRHMRAGKPVTRASLENVHPPIAPPPTEIPERFIMPPDKHHMSHIPPKQHIMMPPPPLQHVPHEHYNQPHEDIRAPPAELSMAPPPPRSVSQETFRISTRKHSNLITVPIQDDSNSGAREPPPPAPAPAHHHPEYQGQPVVSHPHHIMPPQQHYAPPPPPPPPISHPMPHPPQAAGTPHLVYSQAPPPPMTSAPPPITPPPGHIIAQMPPYMNHPPPGPPPPQHGGPPVTAPPPHHYNPNSLPQFTEDQGTLSPPFTQPGGMSPGIWPAPRGPPPPPRLQGPPSQTPLPGPHHPDQTRYRPYYQ

SEQ ID NO: 40147 - protein, 370 aa, Homo sapiens
MIPCKHVFCYDCAILHEKKGDKMCPGCSDPVQRIEQCTRGSLFMCSIVQGCKRTYLSQRDLQAHINHRHMRAGKPVTRASLENVHPPIAPPPTEIPERFIMPPDKHHMSHIPPKQHIMMPPPPLQHVPHEHYNQPHEDIRAPPAELSMAPPPPRSVSQETFRISTRKHSNLITVPIQDDSNSGAREPPPPAPAPAHHHPEYQGQPVVSHPHHIMPPQQHYAPPPPPPPPISHPMPHPPQAAGTPHLVYSQAPPPPMTSAPPPITPPPGHIIAQMPPYMNHPPPGPPPPQHGGPPVTAPPPHHYNPNSLPQFTEDQGTLSPPFTQPGGMSPGIWPAPRGPPPPPRLQGPPSQTPLPGPHHPDQTRYRPYYQ

SEQ ID NO: 40148 - protein, 226 aa, Homo sapiens
MKVLILACLVALALARETIESLSSSEESITEYKQKVEKVKHEDQQQGEDEHQDKIYPSFQPQPLIYPFVEPIPYGFLPQNILPLAQPAVVLPVPQPEIMEVPKAKDTVYTKGRVMPVLKSPTIPFFDPQIPKLTDLENLHLPLPLLQPLMQQVPQPIPQTLALPPQPLWSVPQPKVLPIPQQVVPYPQRAVPVQALLLNQELLLNPTHQIYPVTQPLAPVHNPISV

SEQ ID NO: 40149 - protein, 182 aa, Homo sapiens
MKSFLLVVNALALTLPFLAVEVQNQKQPACHENDERPFYQKTAPYVPMYYVPNSYPYYGTNLYQRRPAIAINNPYVPRTYYANPAVVRPHAQIPQRQYLPNSHPPTVVRRPNLHPSFIAIPPKKIQDKIIIPTINTIATVEPTPAPATEPTVDSVVTPEAFSESIITSTPETTTVAVTPPTA

SEQ ID NO: 40150 - protein, 325 aa, Homo sapiens
MASSSGSKAEFIVGGKYKLVRKIGSGSFGDIYLAINITNGEEVAVKLESQKARHPQLLYESKLYKILQGGVGIPHIRWYGQEKDYNVLVMDLLGPSLEDLFNFCSRRFTMKTVLMLADQMISRIEYVHTKNFIHRDIKPDNFLMGIGRHCNKLFLIDFGLAKKYRDNRTRQHIPYREDKNLTGTARYASINAHLGIEQSRRDDMESLGYVLMYFNRTSLPWQGLKAATKKQKYEKISEKKMSTPVEVLCKGFPAEFAMYLNYCRGLRFEEAPDYMYLRQLFRILFRTLNHQYDYTFDWTMLKQKAAQQAASSSGQGQQAQTPTGF

SEQ ID NO: 40151 - protein, 325 aa, Homo sapiens; identical to SEQ ID NO: 40150

SEQ ID NO: 40152 - protein, 337 aa, Homo sapiens
MASSSGSKAEFIVGGKYKLVRKIGSGSFGDIYLAINITNGEEVAVKLESQKARHPQLLYESKLYKILQGGVGIPHIRWYGQEKDYNVLVMDLLGPSLEDLFNFCSRRFTMKTVLMLADQMISRIEYVHTKNFIHRDIKPDNFLMGIGRHCNKLFLIDFGLAKKYRDNRTRQHIPYREDKNLTGTARYASINAHLGIEQSRRDDMESLGYVLMYFNRTSLPWQGLKAATKKQKYEKISEKKMSTPVEVLCKGFPAEFAMYLNYCRGLRFEEAPDYMYLRQLFRILFRTLNHQYDYTFDWTMLKQKAAQQAASSSGQGQQAQTPTGKQTDKTKSNMKGF

SEQ ID NO: 40153 - protein, 365 aa, Homo sapiens
MASSSGSKAEFIVGGKYKLVRKIGSGSFGDIYLAINITNGEEVAVKLESQKARHPQLLYESKLYKILQGGVGIPHIRWYGQEKDYNVLVMDLLGPSLEDLFNFCSRRFTMKTVLMLADQMISRIEYVHTKNFIHRDIKPDNFLMGIGRHCNKCLESPVGKRKRSMTVSTSQDPSFSGLNQLFLIDFGLAKKYRDNRTRQHIPYREDKNLTGTARYASINAHLGIEQSRRDDMESLGYVLMYFNRTSLPWQGLKAATKKQKYEKISEKKMSTPVEVLCKGFPAEFAMYLNYCRGLRFEEAPDYMYLRQLFRILFRTLNHQYDYTFDWTMLKQKAAQQAASSSGQGQQAQTPTGKQTDKTKSNMKGF

SEQ ID NO: 40154 - protein, 342 aa, Homo sapiens
CREEISRIEYIHSKNFIHRDVKPDNFLMGLGKKGNLVYIIDFGLAKKYRDARTHQHIPYRENKNLTGTARYASINTHLGIEQSRRDDLESLGYVLMYFNLGSLPWQGLKAATKRQKYERISEKKMSTPIEVLCKGYPSEFATYLNFCRSLRFDDKPDYSYLRQLFRNLFHRQGFSYDYVFDWNMLKFGASRAADDAERERRDREERLRHSRNPATRGLPSTASGRLRGTQEVAPPTPLTPTSHTANTSPRPVSGMERERKVSMRLHRGAPVNISSSDLTGRQDTSRMSTSQVGAELPGGRWASGYPVRVKSGLWFLQGFFFPFFPPFLRVFNLARVWRLGCR

SEQ ID NO: 40155 - protein, 415 aa, Homo sapiens [sequence omitted]

SEQ ID NO: 40156 - protein, 409 aa, Homo sapiens
MELRVGNRYRLGRKIGSGSFGDIYLGTDIAAGEEVAIKLECVKTKHPQLHIESKIYKMMQGGVGIPTIRWCGAEGDYNVMVMELLGPSLEDLFNFCSRKFSLKTVLLLADQMISRIEYIHSKNFIHRDVKPDNFLMGLGKKGNLVYIIDFGLAKKYRDARTHQHIPYRENKNLTGTARYASINTHLGIEQSRRDDLESLGYVLMYFNLGSLPWQGLKAATKRQKYERISEKKMSTPIEVLCKGYPSEFATYLNFCRSLRFDDKPDYSYLRQLFRNLFHRQGFSYDYVFDWNMLKFGASRAADDAERERRDREERLRHSRNPATRGLPSTASGRLRGTQEVAPPTPLTPTSHTANTSPRPVSGMERERKVSMRLHRGAPVNISSSDLTGRQDTSRMSTSQNSIPFEHHGK

SEQ ID NO: 40157 - protein, 358 aa, Homo sapiens
MMQGGVGIPTIRWCGAEGDYNVMVMELLGPSLEDLFNFCSRKFSLKTVLLLADQMISRIEYIHSKNFIHRDVKPDNFLMGLGKKGNLVYIIDFGLAKKYRDARTHQHIPYRENKNLTGTARYASINTHLGIEQSRRDDLESLGYVLMYFNLGSLPWQGLKAATKRQKYERISEKKMSTPIEVLCKGYPSEFATYLNFCRSLRFDDKPDYSYLRQLFRNLFHRQGFSYDYVFDWNMLKFGASRAADDAERERRDREERLRHSRNPATRGLPSTASGRLRGTQEVAPPTPLTPTSHTANTSPRPVSGMERERKVSMRLHRGAPVNISSSDLTGRQDTSRMSTSQIPGRVASSGLQSVVHR

SEQ ID NO: 40158 - protein, 126 aa, Homo sapiens
MELRVGNRYRLGRKIGSGSFGDIYLGTDIAAGEEVAIKLECVKTKHPQLHIESKIYKMMQGGVGIPTIRWCGAEGDYNVMVMELLGPSLEDLFNFCSRKFSLKTVLLLADQMNNPEEMTWSLWATC

SEQ ID NO: 40159 - protein, 416 aa, Homo sapiens
MELRVGNKYRLGRKIGSGSFGDIYLGANIASGEEVAIKLECVKTKHPQLHIESKFYKMMQGGVGIPSIKWCGAEGDYNVMVMELLGPSLEDLFNFCSRKFSLKTVLLLADQMISRIEYIHSKNFIHRDVKPDNFLMGLGKKGNLVYIIDFGLAKKYRDARTHQHIPYRENKNLTGTARYASINTHLGIEQSRRDDLESLGYVLMYFNLGSLPWQGLKAATKRQKYERISEKKMSTPIEVLCKGYPSEFSTYLNFCRSLRFDDKPDYSYLRQLFRNLFHRQGFSYDYVFDWNMLKFGAARNPEDVDRERREHEREERMGQLRGSATRALPPGPPTGATANRLRSAAEPVASTPASRIQPAGNTSPRAISRVDRERKVSMRLHRGAPANVSSSDLTGRQEVSRIPASQTSVPFDHLGK

SEQ ID NO: 40160 - protein, 119 aa, Homo sapiens
  VARIANT 1: note = MOD_RES - Any amino acid
XRNPEDVDRERREHEREERMGQLRGSATRALPPGPPTGATANRLRSAAEPVASTPASRIQPAGNTSPRAISRVDRERKVSMRLHRGAPANVSSSDLTGRQEVSRIPASQTSVPFDHLGK

SEQ ID NO: 40161 - protein, 416 aa, Homo sapiens; identical to SEQ ID NO: 40159

SEQ ID NO: 40162 - protein, 416 aa, Homo sapiens; identical to SEQ ID NO: 40159

SEQ ID NO: 40163 - protein, 416 aa, Homo sapiens; identical to SEQ ID NO: 40159

SEQ ID NO: 40164 - protein, 416 aa, Homo sapiens; identical to SEQ ID NO: 40159

SEQ ID NO: 40165 - protein, 225 aa, Homo sapiens
MELRVGNKYRLGRKIGSGSFGDIYLGANIASGEEVAIKLECVKTKHPQLHIESKFYKMMQGGVGIPSIKWCGAEGDYNVMVMELLGPSLEDLFNFCSRKFSLKTVLLLADQMISRIEYIHSKNFIHRDVKPDNFLMGLGKKGNLVYIIDFGLAKKYRDARTHQHIPYRENKNLTGTARYASINTHLGIEQSRRDDLESLGYVLMYFNLGSLPWQGLKAATKRQKY

SEQ ID NO: 40166 - protein, 144 aa, Homo sapiens
  VARIANT 1: note = MOD_RES - Any amino acid
XRNLFHRQGFSYDYVFDWNMLKFGAARNPEDVDRERREHEREERMGQLRGSATRALPPGPPTGATANRLRSAAEPVASTPASRIQPAGNTSPRAISRVDRERKVSMRLHRGAPANVSSSDLTGRQEVSRIPASQTSVPFDHLGK

SEQ ID NO: 40167 - protein, 393 aa, Homo sapiens
MDHPSREKDERQRTTKPMAQRSAHCSRPSGSSSSSGVLMVGPNFRVGKKIGCGNFGELRLGKNLYTNEYVAIKLEPIKSRAPQLHLEYRFYKQLGSAGEGLPQVYYFGPCGKYNAMVLELLGPSLEDLFDLCDRTFTLKTVLMIAIQLLSRMEYVHSKNLIYRDVKPENFLIGRQGNKKEHVIHIIDFGLAKEYIDPETKKHIPYREHKSLTGTARYMSINTHLGKEQSRRDDLEALGHMFMYFLRGSLPWQGLKADTLKERYQKIGDTKRNTPIEALCENFPEEMATYLRYVRRLDFFEKPDYEYLRTLFTDLFEKKGYTFDYAYDWVGRPIPTPVGSVHVDSGASAITRESHTHRDRPSQQQPLRNQSLRTVTAEHYDVNNSAIWHRGRGT

SEQ ID NO: 40168 - protein, 422 aa, Homo sapiens
MDHPSREKDERQRTTKPMAQRSAHCSRPSGSSSSSGVLMVGPNFRVGKKIGCGNFGELRLGKNLYTNEYVAIKLEPIKSRAPQLHLEYRFYKQLGSAGEGLPQVYYFGPCGKYNAMVLELLGPSLEDLFDLCDRTFTLKTVLMIAIQLLSRMEYVHSKNLIYRDVKPENFLIGRQGNKKEHVIHIIDFGLAKEYIDPETKKHIPYREHKSLTGTARYMSINTHLGKEQSRRDDLEALGHMFMYFLRGSLPWQGLKADTLKERYQKIGDTKRNTPIEALCENFPEEMATYLRYVRRLDFFEKPDYEYLRTLFTDLFEKKGYTFDYAYDWVGRPIPTPVGSVHVDSGASAITRESHTHRDRPSQQQPLRNQVVSSTNGELNVDDPTGAHSNAPITAHAEVEVVEEAKCCCFFKRKRKKTAQRHK

SEQ ID NO: 40169 - protein, 378 aa, Homo sapiens
MDHPSREKDERQRTTKPMAQRSAHCSRPSGSSSSSGVLMVGPNFRVGKKIGCGNFGELRLGKNLYTNEYVAIKLELLGPSLEDLFDLCDRTFTLKTVLMIAIQLLSRMEYVHSKNLIYRDVKPENFLIGRQGNKKEHVIHIIDFGLAKEYIDPETKKHIPYREHKSLTGTARYMSINTHLGKEQSRRDDLEALGHMFMYFLRGSLPWQGLKADTLKERYQKIGDTKRNTPIEALCENFPEEMATYLRYVRRLDFFEKPDYEYLRTLFTDLFEKKGYTFDYAYDWVGRPIPTPVGSVHVDSGASAITRESHTHRDRPSQQQPLRNQVVSSTNGELNVDDPTGAHSNAPITAHAEVEVVEEAKCCCFFKRKRKKTAQRHK

SEQ ID NO: 40170 - protein, 415 aa, Homo sapiens
MDFDKKGGKGETEEGRRMSKAGGGRSSHGIRSSGTSSGVLMVGPNFRVGKKIGCGNFGELRLGKNLYTNEYVAIKLEPIKSRAPQLHLEYRFYKQLSATEGVPQVYYFGPCGKYNAMVLELLGPSLEDLFDLCDRTFTLKTVLMIAIQLITRMEYVHTKSLIYRDVKPENFLVGRPGTKRQHAIHIIDFGLAKEYIDPETKKHIPYREHKSLTGTARYMSINTHLGKEQSRRDDLEALGHMFMYFLRGSLPWQGLKADTLKERYQKIGDTKRATPIEVLCENFPEEMATYLRYVRRLDFFEKPDYDYLRKLFTDLFDRSGFVFDYEYDWAGKPLPTPIGTVHTDLPSQPQLRDKTQPHSKNQALNSTNGELNADDPTAGHSNAPITAPAEVEVADETKCCCFFKRRKRKSLQRHK

SEQ ID NO: 40171 - protein, 214 aa, Homo sapiens
MSINTHLGKEQSRRDDLEALGHMFMYFLRGSLPWQGLKADTLKERYQKIGDTKRATPIEVLCENFPEEMATYLRYVRRLDFFEKPDYDYLRKLFTDLFDRSGFVFDYEYDWAGKPLPTPIGTVHTDLPSQPQLRDKTQPPESSPCSPLGRDLVRGPRGPPTAAQGQTLAGSQNADCRGRAWLRRPHPRDVGSLPSCKTLAEISTPVSSPPLQEH

SEQ ID NO: 40172 - protein, 423 aa, Homo sapiens
MENKKKDKDKSDDRMARPSGRSGHNTRGTGSSSSGVLMVGPNFRVGKKIGCGNFGELRLGKNLYTNEYVAIKLEPMKSRAPQLHLEYRFYKQLGSGDGIPQVYYFGPCGKYNAMVLELLGPSLEDLFDLCDRTFSLKTVLMIAIQLISRMEYVHSKNLIYRDVKPENFLIGRPGNKTQQVIHIIDFGLAKEYIDPETKKHIPYREHKSLTGTARYMSINTHLGKEQSRRDDLEALGHMFMYFLRGSLPWQGLKADTLKERYQKIGDTKRATPIEVLCENFPEMATYLRYVRRLDFFEKPDYDYLRKLFTDLFDRKGYMFDYEYDWIGKQLPTPVGAVQQDPALSSNREAHQHRDKMQQSKNQVVSSTNGELNTDDPTAGRSNAPITAPTEVEVMDETNCQKVLNMWCCCFFKRRKRKTIQRHK

SEQ ID NO: 40173 - protein, 455 aa, Homo sapiens
MENKKKDKDKSDDRMARPSGRSGHNTRGTGSSSSGVLMVGPNFRVGKKIGCGNFGELRLGKNLYTNEYVAIKLEPMKSRAPQLHLEYRFYKQLGSGDGIPQVYYFGPCGKYNAMVLELLGPSLEDLFDLCDRTFSLKTVLMIAIQLISRMEYVHSKNLIYRDVKPENFLIGRPGNKTQQVIHIIDFGLAKEYIDPETKKHIPYREHKSLTGTARYMSINTHLGKEQSRRDDLEALGHMFMYFLRGSLPWQGLKADTLKERYQKIGDTKRATPIEVLCENFPEMATYLRYVRRLDFFEKPDYDYLRKLFTDLFDRKGYMFDYEYDWIGKQLPTPVGAVQQDPALSSNREAHQHRDKMQQSKNQSADHRAAWDSQQANPHHLRAHLAADRHGGSVQVVSSTNGELNTDDPTAGRSNAPITAPTEVEVMDETNCQKVLNMWCCCFFKRRKRKTIQRHK

SEQ ID NO: 40174 - protein, 447 aa, Homo sapiens
MENKKKDKDKSDDRMARPSGRSGHNTRGTGSSSSGVLMVGPNFRVGKKIGCGNFGELRLGKNLYTNEYVAIKLEPMKSRAPQLHLEYRFYKQLGSGDGIPQVYYFGPCGKYNAMVLELLGPSLEDLFDLCDRTFSLKTVLMIAIQLISRMEYVHSKNLIYRDVKPENFLIGRPGNKTQQVIHIIDFGLAKEYIDPETKKHIPYREHKSLTGTARYMSINTHLGKEQSRRDDLEALGHMFMYFLRGSLPWQGLKADTLKERYQKIGDTKRATPIEVLCENFPEMATYLRYVRRLDFFEKPDYDYLRKLFTDLFDRKGYMFDYEYDWIGKQLPTPVGAVQQDPALSSNREAHQHRDKMQQSKNQSADHRAAWDSQQANPHHLRAHLAADRHGGSVQVVSSTNGELNTDDPTAGRSNAPITAPTEVEVMDETKCCCFFKRRKRKTIQRHK

SEQ ID NO: 40175 - protein, 447 aa, Homo sapiens; identical to SEQ ID NO: 40174

SEQ ID NO: 40176 - protein, 455 aa, Homo sapiens; identical to SEQ ID NO: 40173

SEQ ID NO: 40177 - protein, 424 aa, Homo sapiens
MENKKKDKDKSDDRMARPSGRSGHNTRGTGSSSSGVLMVGPNFRVGKKIGCGNFGELRLGKNLYTNEYVAIKLEPMKSRAPQLHLEYRFYKQLGSGDGIPQVYYFGPCGKYNAMVLELLGPSLEDLFDLCDRTFSLKTVLMIAIQLISRMEYVHSKNLIYRDVKPENFLIGRPGNKTQQVIHIIDFGLAKEYIDPETKKHIPYREHKSLTGTARYMSINTHLGKEQSRRDDLEALGHMFMYFLRGSLPWQGLKADTLKERYQKIGDTKRATPIEVLCENFPEEMATYLRYVRRLDFFEKPDYDYLRKLFTDLFDRKGYMFDYEYDWIGKQLPTPVGAVQQDPALSSNREAHQHRDKMQQSKNQVVSSTNGELNTDDPTAGRSNAPITAPTEVEVMDETNCQKVLNMWCCCFFKRRKRKTIQRHK

SEQ ID NO: 40178 - protein, 423 aa, Homo sapiens; identical to SEQ ID NO: 40172

SEQ ID NO: 40179 - protein, 215 aa, Homo sapiens
MSSSEEVSWISWFCGLRGNEFFCEVDEDYIQDKFNLTGLNEQVPHYRQALDMILDLEPDEELEDNPNQSDLIEQAAEMLYGLIHARYILTNRGIAQMLEKYQQGDFGYCPRVYCENQPMLPIGLSDIPGEAMVKLYCPKCMDVYTPKSSRHHHTDGAYFGTGFPHMLFMVHPEYRPKRPANQFVPRLYGFKIHPMAYQLQLQAASNFKSPVKTIR

SEQ ID NO: 40180 - protein, 215 aa, Homo sapiens; identical to SEQ ID NO: 40179

SEQ ID NO: 40181 - protein, 215 aa, Homo sapiens; identical to SEQ ID NO: 40179

SEQ ID NO: 40182 - protein, 215 aa, Homo sapiens; identical to SEQ ID NO: 40179

SEQ ID NO: 40183 - protein, 228 aa, Homo sapiens
MSSSEEVSWISWFCGLRGNEFFCEVDEDYIQDKFNLTGLNEQVPHYRQALDMILDLEPDEELEDNPNQSDLIEQAAEMLYGLIHARYILTNRGIAQMLEKYQQGDFGYCPRVYCENQPMLPIGLSDIPGEAMVKLYCPKCMDVYTPKSSRHHHTDGAYFGTGFPHMLFMVHPEYRPKRPANQFVPSSCSRHPDVPLLPRRRPFCRMHFRLREVYHQQLIPVHGDHHLL

SEQ ID NO: 40184 - protein, 215 aa, Homo sapiens; identical to SEQ ID NO: 40179

SEQ ID NO: 40185 - protein, 215 aa, Homo sapiens; identical to SEQ ID NO: 40179

SEQ ID NO: 40186 - protein, 234 aa, Homo sapiens
MEKCKGTSRMAGTTSADVKMSSSEEVSWISWFCGLRGNEFFCEVDEDYIQDKFNLTGLNEQVPHYRQALDMILDLEPDEELEDNPNQSDLIEQAAEMLYGLIHARYILTNRGIAQMLEKYQQGDFGYCPRVYCENQPMLPIGLSDIPGEAMVKLYCPKCMDVYTPKSSRHHHTDGAYFGTGFPHMLFMVHPEYRPKRPANQFVPRLYGFKIHPMAYQLQLQAASNFKSPVKTIR

SEQ ID NO: 40187 - protein, 215 aa, Homo sapiens; identical to SEQ ID NO: 40179

SEQ ID NO: 40188 - protein, 228 aa, Homo sapiens; identical to SEQ ID NO: 40183

SEQ ID NO: 40189 - protein, 228 aa, Homo sapiens; identical to SEQ ID NO: 40183

SEQ ID NO: 40190 - protein, 215 aa, Homo sapiens; identical to SEQ ID NO: 40179

SEQ ID NO: 40191 - protein, 234 aa, Homo sapiens; identical to SEQ ID NO: 40186

SEQ ID NO: 40192 - protein, 215 aa, Homo sapiens; identical to SEQ ID NO: 40179

SEQ ID NO: 40193 - protein, 234 aa, Homo sapiens; identical to SEQ ID NO: 40186

SEQ ID NO: 40194 - protein, 234 aa, Homo sapiens; identical to SEQ ID NO: 40186

SEQ ID NO: 40195 - protein, 215 aa, Homo sapiens; identical to SEQ ID NO: 40179

SEQ ID NO: 40196 - protein, 215 aa, Homo sapiens; identical to SEQ ID NO: 40179

SEQ ID NO: 40197 - protein, 234 aa, Homo sapiens; identical to SEQ ID NO: 40186

SEQ ID NO: 40198 - protein, 215 aa, Homo sapiens; identical to SEQ ID NO: 40179

SEQ ID NO: 40199 - protein, 228 aa, Homo sapiens; identical to SEQ ID NO: 40183

SEQ ID NO: 40200 - protein, 234 aa, Homo sapiens; identical to SEQ ID NO: 40186

SEQ ID NO: 40201 - protein, 215 aa, Homo sapiens; identical to SEQ ID NO: 40179

SEQ ID NO: 40202 - protein, 215 aa, Homo sapiens; identical to SEQ ID NO: 40179

SEQ ID NO: 40203 - protein, 215 aa, Homo sapiens; identical to SEQ ID NO: 40179

SEQ ID NO: 40204 - protein, 215 aa, Homo sapiens; identical to SEQ ID NO: 40179

SEQ ID NO: 40205 - protein, 215 aa, Homo sapiens; identical to SEQ ID NO: 40179

SEQ ID NO: 40206 - protein, 215 aa, Homo sapiens; identical to SEQ ID NO: 40179

SEQ ID NO: 40207 - protein, 215 aa, Homo sapiens; identical to SEQ ID NO: 40179

SEQ ID NO: 40208 - protein, 215 aa, Homo sapiens; identical to SEQ ID NO: 40179

SEQ ID NO: 40209 - protein, 215 aa, Homo sapiens; identical to SEQ ID NO: 40179

SEQ ID NO: 40210 - protein, 1431 aa, Homo sapiens
MGKEQELVQAVKAEDVGTAQRLLQRPRPGKAKLLGSTKKINVNFQDPDGFSALHHAALNGNTELISLLLEAQAAVDIKDNKGMRPLHYAAWQGRKEPMKLVLKAGSAVNIPSDEGHIPLHLAAQHGHYDVSEMLLQHQSNPCMVDNSGKTPLDLACEFGRVGVVQLLLSSNMCAALLEPRPGDATDPNGTSPLHLAAKNGHIDIIRLLLQAGIDINRQTKSGTALHEAALCGKTEVVRLLLDSGINAHVRNTYSQTALDIVHQFTTSQASREIKQLLREASAALQVRATKDYCNNYDLTSLNVKAGDIITVLEQHPDGRWKGCIHDNRTGNDRVGYFPSSLGEAIVKRAGSRAGTEPSLPQGSSSSGPSAPPEEIWVLRKPFAGGDRSGSISGMAGGRGSGGHALHAGSEGVKLLATVLSQKSVSESGPGDSPAKPPEGSAGVARSQPPVAHAGQVYGEQPPKKLEPASEGKSSEAVSQWLTAFQLQLYAPNFISAGYDLPTISRMTPEDLTAIGVTKPGHRKKIAAEISGLSIPDWLPEHKPANLAVWLSMIGLAQYYKVLVDNGYENIDFITDITWEDLQEIGITKLGHQKKLMLAVRKLAELQKAEYAKYEGGPLRRKAPQSLEVMAIESPPPPEPTPADCQSPKMTTFQDSELSDELQAAMTGPAEVGPTTEKPSSHLPPTPRATTRQDSSLGGRARHMSSSQELLGDGPPGPSSPMSRSQEYLLDEGPAPGTPPREARPGRHGHSIKRASVPPVPGKPRQVLPPGTSHFTPPQTPTKTRPGSPQALGGPHGPAPATAKVKPTPQLLPPTERPMSPRSLPQSPTHRGFAYVLPQPVEGEVGPAAPGPAPPPVPTAVPTLCLPPEADAEPGRPKKRAHSLNRYAASDSEPERDELLVPAAAGPYATVQRRVGRSHSVRAPAGADKNVNRSQSFAVRPRKKGPPPPPPKRSSSALASANLADEPVPDAEPEDGLLGVRAQCRRASDLAGSVDTGSAGSVKSIAAMLELSSIGGGGRAARRPPEGHPTPRPASPEPGRVATVLASVKHKEAIGPGGEVVNRRRTLSGPVTGLLATARRGPGESADPGPFVEDGTGRQRPRGPSKGEAGVEGPPLAKVEASATLKRRIRAKQNQQENVKFILTESDTVKRRPKAKEREAGPEPPPPLSVYHNGTGTVRRRPASEQAGPPELPPPPPPAEPPPTDLAHLPPLPPPEGEARKPAKPPVSPKPVLTQPVPKLQGSPTPTSKKVPLPGPGSPEVKRAHGTPPPVSPKPPPPPTAPKPVKAVAGLPSGSAGPSPAPSPARQPPAALAKPPGTPPSLGASPAKPPSPGAPALHVPAKPPRAAAAAAAAAAAPPAPPEGASPGDSARQKLEETSACLAAALQAVEEKIRQEDAQGPRDSAAEKSTGSILDDIGSMFDDLADQLDAMLE

SEQ ID NO: 40211 - protein, 704 aa, Homo sapiens
MCAALLEPRPGDATDPNGTSPLHLAAKNGHIDIIRLLLQAGIDINRQTKSGTALHEAALCGKTEVVRLLLDSGINAHVRNTYSQTALDIVHQFTTSQASREIKQLLREASAALQVRATKDYCNNYDLTSLNVKAGDIITVLEQHPDGRWKGCIHDNRTGNDRVGYFPSSLGEAIVKRAGSRAGTEPSLPQGSSSSGPSAPPEEIWVLRKPFAGGDRSGSISGMAGGRGSGGHALHAGSEGVKLLATVLSQKSVSESGPGDSPAKPPEGSAGVARSQPPVAHAGQVYGEQPPKKLEPASEGKSSEAVSQWLTAFQLQLYAPNFISAGYDLPTISRMTPEDLTAIGVTKPGHRKKIAAEISGLSIPDWLPEHKPANLAVWLSMIGLAQYYKVLVDNGYENIDFITDITWEDLQEIGITKLGHQKKLMLAVRKLAELQKAEYAKYEGGPLRRKAPQSLEVMAIESPPPPEPTPADCQSPKMTTFQDSELSDELQAAMTGPAEVGPTTEKPSSHLPPTPRATTRQDSSLGGRARHMSSSQELLGDGPPGPSSPMSRSQEYLLDEGPAPGTPPREARPGRHGHSIKRASVPPVPGKPRQVLPPGTSHFTPPQTPTKTRPGSPQALGGPHGPAPATAKVKPTPQLLPPTERPMSPRSLPQSPTQRTGPGPAQNCPSGRPASRSGAAQGTGDQGQGPPAPPHPQNISYQEY

SEQ ID NO: 40212 - protein, 1202 aa, Homo sapiens
MGREQDLILAVKNGDVTGVQKLVAKVKATKTKLLGSTKRLNVNYQDADGFSALHHAALGGSLELIALLLEAQATVDIKDSNGMRPLHYAAWQGRLEPVRLLLRASAAVNAASLDGQIPLHLAAQYGHYEVSEMLLQHQSNPCLVNKAKKTPLDLACEFGRLKVAQLLLNSHLCVALLEGEAKDPCDPNYTTPLHLAAKNGHREVIRQLLRAGIEINRQTKTGTALHEAALYGKTEVVRLLLEGGVDVNIRNTYNQTALDIVNQFTTSQASREIKQLLREASGILKVRALKDFWNLHDPTALNVRAGDVITVLEQHPDGRWKGHIHESQRGTDRIGYFPPGIVEVVSKRVGIPAARLPSAPTPLRPGFSRTPQPPAEEPPHPLTYSQLPRVGLSPDSPAGDRNSVGSEGSVGSIRSAGSGQSSEGTNGHGPGLLIENAQPLPSAGEDQVLPGLHPPSLADNLSHRPLANCRSGEQIFTQDVRPEQLLEGKDAQAIHNWLSEFQLEGYTAHFLQAGYDVPTISRMTPEDLTAIGVTKPGHRKKIASEIAQLSIAEWLPSYIPTDLLEWLCALGLPQYHKQLVSSGYDSMGLVADLTWEELQEIGVNKLGHQKKLMLGVKRLAELRRGLLQGEALSEGGRRLAKGPELMAIEGLENGEGPATAGPRLLTFQGSELSPELQAAMAGGGPEPLPLPPARSPSQESIGARSRGSGHSQEQPAPQPSGGDPSPPQERNLPEGTERPPKLCSSLPGQGPPPYVFMYPQGSPSSPAPGPPPGAPWAFSYLAGPPATPPDPPRPKRRSHSLSRPGPTEGDAEGEAEGPVGSTLGSYATLTRRPGRSALVRTSPSVTPTPARGTPRSQSFALRARRKGPPPPPPKRLSSVSGPSPEPPPLDESPGPKEGATGPRRRTLSEPAGPSEPPGPPAPAGPASDTEEEEPGPEGTPPSRGSSGEGLPFAEEGNLTIKQRPKPAGPPPRETPVPPGLDFNLTESDTVKRRPKCREREPLQTALLAFGVASATPGPAAPLPSPTPGESPPASSLPQPEPSSLPAQGVPTPLAPSPAMQPPVPPCPGPGLESSAASRWNGETEPPAAPAALLKVPGAGTAPKPVSVACTQLAFSGPKLAPRLGPRPVPPPRPESTGTVGPGQAQQRLEQTSSSLAAALRAAEKSIGTKEQEGTPSASTKHILDDISTMFDALADQLDAMLD

SEQ ID NO: 40213 - protein, 1120 aa, Homo sapiens
MRPLHYAAWQGRLEPVRLLLRASAAVNAASLDGQIPLHLAAQYGHYEVSEMLLQHQSNPCLVNKAKKTPLDLACEFGRLKVAQLLLNSHLCVALLEGEAKDPCDPNYTTPLHLAAKNGHREVIRQLLRAGIEINRQTKTGTALHEAALYGKTEVVRLLLEGGVDVNIRNTYNQTALDIVNQFTTSQASREIKQLLREASGILKVRALKDFWNLHDPTALNVRAGDVITVLEQHPDGRWKGHIHESQRGTDRIGYFPPGIVEVVSKRVGIPAARLPSAPTPLRPGFSRTPQPPAEEPPHPLTYSQLPRVGLSPDSPAGDRNSVGSEGSVGSIRSAGSGQSSEGTNGHGPGLLIENAQPLPSAGEDQVLPGLHPPSLADNLSHRPLANCRSGEQIFTQDVRPEQLLEGKDAQAIHNWLSEFQLEGYTAHFLQAGYDVPTISRMTPEDLTAIGVTKPGHRKKIASEIAQLSIAEWLPSYIPTDLLEWLCALGLPQYHKQLVSSGYDSMGLVADLTWEELQEIGVNKLGHQKKLMLGVKRLAELRRGLLQGEALSEGGRRLAKGPELMAIEGLENGEGPATAGPRLLTFQGSELSPELQAAMAGGGPEPLPLPPARSPSQESIGARSRGSGHSQEQPAPQPSGGDPSPPQERNLPEGTERPPKLCSSLPGQGPPPYVFMYPQGSPSSPAPGPPPGAPWAFSYLAGPPATPPDPPRPKRRSHSLSRPGPTEGDAEGEAEGPVGSTLGSYATLTRRPGRSALVRTSPSVTPTPARGTPRSQSFALRARRKGPPPPPPKRLSSVSGPSPEPPPLDESPGPKEGATGPRRRTLSEPAGPSEPPGPPAPAGPASDTEEEEPGPEGTPPSRGSSGEGLPFAEEGNLTIKQRPKPAGPPPRETPVPPGLDFNLTESDTVKRRPKCREREPLQTALLAFGVASATPGPAAPLPSPTPGESPPASSLPQPEPSSLPAQGVPTPLAPSPAMQPPVPPCPGPGLESSAASRWNGETEPPAAPAALLKVPGAGTAPKPVSVACTQLAFSGPKLAPRLGPRPVPPPRPESTGTVGPGQAQQRLEQTSSSLAAALRAAEKSIGTKEQEGTPSASTKHILDDISTMFDALADQLDAMLD

SEQ ID NO: 40214 - protein, 341 aa, Homo sapiens
MADEKPSNGVLVHMVKLLIKTFLDGIFDDLMENNVLNTDEIHLIGKCLKFVVSNAENLVDDITETAQTAGKIFREHLWNSKKQLSSDISSDGEREANMPGLNIRNKEFNYLHNRNGSELDLLGMRDLLENLGYSVVIKENLTAQEMETALRQFAAHPEHQSSDSTFLVFMSHSILNGICGTKHWDQEPDVLHDDTIFEIFNNRNCQSLKDKPKVIIMQACRGNGAGIVWFTTDSGKAGADTHGRLLQGNICNDAVTKAHVEKDFIAFKSSTPHNVSWRHETNGSVFISQIIYYFREYSWSHHLEEIFQKVQHSFETPNILTQLPTIERLSMTRYFYLFPGN

SEQ ID NO: 40215 - protein, 341 aa, Homo sapiens; identical to SEQ ID NO: 40214

SEQ ID NO: 40216 - protein, 277 aa, Homo sapiens
MENTENSVDSKSIKNLEPKIIHGSESMDSGISLDNSYKMDYPEMGLCIIINNKNFHKSTGMTSRSGTDVDAANLRETFRNLKYEVRNKNDLTREEIVELMRDVSKEDHSKRSSFVCVLLSHGEEGIIFGTNGPVDLKKITNFFRGDRCRSLTGKPKLFIIQACRGTELDCGIETDSGVDDDMACHKIPVEADFLYAYSTAPGYYSWRNSKDGSWFIQSLCAMLKQYADKLEFMHILTRVNRKVATEFESFSFDATFHAKKQIPCIVSMLTKELYFYH

SEQ ID NO: 40217 - protein, 156 aa, Homo sapiens
MSDALIKVSMENTENSVDSKSIKNLEPKIIHGSESMDSGISLDNSYKMDYPEMGLCIIINNKNFHKSTGMTSRSGTDVDAANLRETFRNLKYEVRNKNDLTREEIVELMRDVSKEDHSKRSSFVCVLLSHGEEGIIFGTNGPVDLKNNKLFQRGSL

SEQ ID NO: 40218 - protein, 117 aa, Homo sapiens
MENTENSVDSKSIKNLEPKIIHGSESMDSGISLDNSYKMDYPEMGLCIIINNKNFHKSTGMTSRSGTDVDAANLRETFRNLKYEVRNKNDLTREEIVELMRDVSKEDHSKRSSFVCV

SEQ ID NO: 40219 - protein, 277 aa, Homo sapiens; identical to SEQ ID NO: 40216

SEQ ID NO: 40220 - protein, 321 aa, Homo sapiens
MADSMQEKQRMAGQMLLQTFFNIDQISPNKKAHPNMEAGPPESGESTDALKLCPHEEFLRLCKERAEEIYPIKERNNRTRLALIICNTEFDHLPPRNGADFDITGMKELLEGLDYSVDVEENLTARDMESALRAFATRPEHKSSDSTFLVLMSHGILEGICGTVHDEKKPDVLLYDTIFQIFNNRNCLSLKDKPKVIIVQACRGANRGELWVRDSPASLEVASSQSSENLEEDAVYKTHVEKDFIAFCSSTPHNVSWRDSTMGSIFITQLITCFQKYSWCCHLEEVFRKVQQSFETPRAKAQMPTIERLSMTRYFYLFPGN

SEQ ID NO: 40221 - protein, 70 aa, Homo sapiens
MEKKECPEKSSSSEEELPRRDSGSSRNIDASKLIRLQGSRKLLVDNSIRELQYTKTGIFFQAEACVTNDT

SEQ ID NO: 40222 - protein, 1032 aa, Homo sapiens
MPGRAEAGEAEEEAGAGSGSEAEEDALWERIEGVRHRLARALNPAKLTPYLRQCRVIDEQDEEEVLSTYRFPCRVNRTGRLMDILRCRGKRGYEAFLEALEFYYPEHFTLLTGQEPAQRCSMILDEEGPEGLTQFLMTEVRRLREARKSQLQREQQLQARGRVLEEERAGLEQRLRDQQQAQERCQRLREDWEAGSLELLRLKDENYMIAMRLAQLSEEKNSAVLRSRDLQLAVDQLKLKVSRLEEECALLRRARGPPPGAEEKEKEKEKEKEPDNVDLVSELRAENQRLTASLRELQEGLQQEASRPGAPGSERILLDILEHDWREAQDSRQELCQKLHAVQGELQWAEELRDQYLQEMEDLRLKHRTLQKDCDLYKHRMATVLAQLEEIEKERDQAIQSRDRIQLQYSQSLIEKDQYRKQVRGLEAERDELLTTLTSLEGTKALLEVQLQRAQGGTCLKACASSHSLCSNLSSTWSLSEFPSPLGGPEATGEAAVMGGPEPHNSEEATDSEKEINRLSILPFPPSAGSILRRQREEDPAPPKRSFSSMSDITGSVTLKPWSPGLSSSSSSDSVWPLGKPEGLLARGCGLDFLNRSLAIRVSGRSPPGGPEPQDKGPDGLSFYGDRWSGAVVRRVLSGPGSARMEPREQRVEAAGLEGACLEAEAQQRTLLWNQGSTLPSLMDSKACQSFHEALEAWAKGPGAEPFYIRANLTLPERADPHALCVKAQEILRLVDSAYKRRQEWFCTRVDPLTLRDLDRGTVPNYQRAQQLLEVQEKCLPSSRHRGPRSNLKKRALDQLRLVRPKPVGAPAGDSPDQLLLEPCAEPERSLRPYSLVRPLLVSALRPVVLLPECLAPRLIRNLLDLPSSRLDFQVCPAESLSGEELCPSSAPGAPKAQPATPGLGSRIRAIQESVGKKHCLLELGARGVRELVQNEIYPIVIHVEVTEKNVREVRGLLGRPGWRDSELLRQCRGSEQVLWGLPCSWVQVPAHEWGHAEELAKVVRGRILQEQARLVWVECGSSRGCPSSSEA

SEQ ID NO: 40223 - protein, 1032 aa, Homo sapiens; identical to SEQ ID NO: 40222

SEQ ID NO: 40224 - protein, 746 aa, Homo sapiens
MGVGVGLGNGLRLLPWMEASRPGAPGSERILLDILEHDWREAQDSRQELCQKLHAVQGELQWAEELRDQYLQEMEDLRLKHRTLQKDCDLYKHRMATVLAQLEEIEKERDQAIQSRDRIQLQYSQSLIEKDQYRKQVRGLEAERDELLTTLTSLEGTKALLEVQLQRAQGGTCLKACASSHSLCSNLSSTWSLSEFPSPLGGPEATGEAAVMGGPEPHNSEEATDSEKEINRLSILPFPPSAGSILRRQREEDPAPPKRSFSSMSDITGSVTLKPWSPGLSSSSSSDSVWPLGKPEGLLARGCGLDFLNRSLAIRVSGRSPPGGPEPQDKGPDGLSFYGDRWSGAVVRRVLSGPGSARMEPREQRVEAAGLEGACLEAEAQQRTLLWNQGSTLPSLMDSKACQSFHEALEAWAKGPGAEPFYIRANLTLPERADPHALCVKAQEILRLVDSAYKRRQEWFCTRVDPLTLRDLDRGTVPNYQRAQQLLEVQEKCLPSSRHRGPRSNLKKRALDQLRLVRPKPVGAPAGDSPDQLLLEPCAEPERSLRPYSLVRPLLVSALRPVVLLPECLAPRLIRNLLDLPSSRLDFQVCPAESLSGEELCPSSAPGAPKAQPATPGLGSRIRAIQESVGKKHCLLELGARGVRELVQNEIYPIVIHVEVTEKNVREVRGLLGRPGWRDSELLRQCRGSEQVLWGLPCSWVQVPAHEWGHAEELAKVVRGRILQEQARLVWVECGSSRGCPSSSEA

SEQ ID NO: 40225 - protein, 480 aa, Homo sapiens
MEDLRLKHRTLQKDCDLYKHRMATVLAQLEEIEKERDQAIQSRDRIQLQYSQSLIEKDQYRKQVRGLEAERDELLTTLTSLEGTKALLEVQLQRAQGGTCLKACASSHSLCSNLSSTWSLSEFPSPLGGPEATGEAAVMGGPEPHNSEEATDSEKEINRLSILPFPPSAGSILRRQREEDPAPPKRSFSSMSDITGSVTLKPWSPGLSSSSSSDSVWPLGKPEGLLARGCGLDFLNRSLAIRVSGRSPPGGPEPQDKGPDGLSFYGDRWSGAVVRRVLSGPGSARMEPREQRVEAAGLEGACLEAEAQQRTLLWNQGSTLPSLMDSKACQSFHEALEAWAKGPGAEPFYIRANLTLPERADPHALCVKAQEILRLVDSAYKRRQEWFCTRVDPLTLRDLDRGTVPNYQRAQQLLEVQEKCLPSSRHRGPRSNLKKRALDQLRLVRPKPVGAPAGDSPDQLLLEPCAEPERSLRPYSLVRP

SEQ ID NO: 40226 - protein, 73 aa, Homo sapiens
MPGGGPEMDDYMETLKDEEDALWENVECNRHMLSRYINPAKLTPYLRQCKVIDEQDEDEVLNAPMLPSKINRA

SEQ ID NO: 40227 - protein, 1154 aa, Homo sapiens [sequence omitted]

SEQ ID NO: 40228 - protein, 1037 aa, Homo sapiens
MATESTPSEIIERERKKLLEILQHDPDSILDTLTSRRLISEEEYETLENVTDLLKKSRKLLILVQKKGEATCQHFLKCLFSTFPQSAAICGLRHEVLKHENTVPPQSMGASSNSEDAFSPGIKQPEAPEITVFFSEKEHLDLETSEFFRDKKTSYRETALSARKNEKEYDTPEVTLSYSVEKVGCEVPATITYIKDGQRYEELDDSLYLGKEEYLGSVDTPEDAEATVEEEVYDDPEHVGYDGEEDFENSETTEFSGEEPSYEGSETSLSLEEEQEKSIEERKKVFKDVLLCLNMDRSRKVLPDFVKQFSLDRGCKWTPESPGDLAWNFLMKVQARDVTARDSILSHKVLDEDSKEDLLAGVENLEIRDIQTINPLDVLCATMLCSDSSLQRQVMSNMYQCQFALPLLLPDAENNKSILMLGAMKDIVKKQSTQFSGGPTEDTEKFLTLMKMPVISFVRLGYCSFSKSRILNTLLSPAQLKLHKIFLHQDLPLLVLPRQISDGLVEITWCFPDSDDRKENPFFQKPVALANLRGNLESFWTQFGFLMEVSSAVFFFTDCLGEKEWDLLMFLGEAAIERCYFVLSSQARESEEAQIFQRILNLKPAQLLFWERGDAGDRRKNMEGLQAALQEVMFSSCLRCVSVEDMAALARELGIQVDEDFENTQRIQVSSGENMAGTAEGEGQQRHSQLKSSSKSQALMPIQEPGTQCELSQNLQNLYGTPVFRPVLENSWLFPTRIGGNFNHVSLKASWVMGRPFGSEQRPKWFHPLPFQNAGAQGRGKSFGIQSFHPQIFYSGERFMKFSRVARGCHSNGTFGRLPRPICQHVQACPERPQMMGTLERSRAVASKIGHSYSLDSQPARAVGKPWPQQACTRVTELTEATGKLIRTSHIGKPHPQSFQPAAATQKLRPASQQGVQMKTQGGASNPALQIGSHPMCKSSQFKSDQSNPSTVKHSQPKPFHSVPSQPKSSQTKSCQSQPSQTKPSPCKSTQPKPSQPWPPQSKPSQPRPPQPKSSSTNPSQAKAHHSKAGQKRGGKH

SEQ ID NO: 40229 - protein, 310 aa, Homo sapiens [sequence omitted]

SEQ ID NO: 40230 - protein, 481 aa, Homo sapiens
MATESTPSEIIERERKKLLEILQHDPDSILDTLTSRRLISEEEYETLENVTDLLKKSRKLLILVQKKGEATCQHFLKCLFSTFPQSAAICGLRHEVLKHENTVPPQSMGASSNSEDAFSPGIKQPEAPEITVFFSEKEHLDLETSEFFRDKKTSYRETALSARKNEKEYDTPEVTLSYSVEKVGCEVPATITYIKDGQRYEELDDSLYLGKEEYLGSVDTPEDAEATVEEEVYDDPEHVGYDGEEDFENSETTEFSGEEPSYEGSETSLSLEEEQEKSIEERKKVFKDVLLCLNMDRSRKVLPDFVKQFSLDRGCKWTPESPGDLAWNFLMKVQARDVTARDSILSHKVLDEDSKEDLLAGVENLEIRDIQTINPLDVLCATMLCSDSSLQRQVMSNMYQCQFALPLLLPDAENNKSILMLGAMKDIVKKQSTQFSGGPTEDTEKFLTLMKTLKTLREFKFPLEKTWLGQLKVRVSKDTVS

SEQ ID NO: 40231 - protein, 189 aa, Homo sapiens
MVLEHPARVEPFYAVLESPSFSLMGILLRIASGTRLSIPITSNTLIYYHPHPEDIKFHLYLVPSDALLTKAIDDEEDRFHGVRLQTSPPMEPLNFGSSYIVSNSANLKVMPKELKLSYRSPGEIQHFSKFYAGQMKEPIQLEITEKRHGTLVWDTEVKPVDLQLVAASAPPPFSGLLWQRQPLNPPPAR

SEQ ID NO: 40232 - protein, 431 aa, Homo sapiens
MMRQRQSHYCSVLFLSVNYLGGTFPGDICSEENQIVSSYASKVCFEIEEDYKNRQFLGPEGNVDVELIDKSTNRYSVWFPTAGWYLWSATGLGFLVRDEVTVTIAFGSWSQHLALDLQHHEQWLVGGPLFDVTAEPEEAVAEIHLPHFISLQGEVDVSWFLVAHFKNEGMVLEHPARVEPFYAVLESPSFSLMGILLRIASGTRLSIPITSNTLIYYHPHPEDIKFHLYLVPSDALLTKAIDDEEDRFHGVRLQTSPPMEPLNFGSSYIVSNSANLKVMPKELKLSYRSPGEIQHFSKFYAGQMKEPIQLEITEKRHGTLVWDTEVKPVDLQLVAASAPPPFSGAAFVKENHRQLQARMGDLKGVLDDLQDNEVLTENEKELVEQEKTRQSKNEALLSMVEKKGDLALDVLFRSISERDPYLVSYLRQQNL

SEQ ID NO: 40233 - protein, 537 aa, Homo sapiens
MEKKECPEKSSSSEEELPRRDSGSSRNIDASKLIRLQGSRKLLVDNSIRELQYTKTGIFFQAEACVTNDTVYRELPCVSETLCDISHFFQEDDETEAEPLLFRAVPECQLSGGDIPSVSEEQESSEGQDSGDICSEENQIVSSYASKVCFEIEEDYKNRQFLGPEGNVDVELIDKSTNRYSVWFPTAGWYLWSATGLGFLVRDEVTVTIAFGSWSQHLALDLQHHEQWLVGGPLFDVTAEPEEAVAEIHLPHFISLQAGEVDVSWFLVAHFKNEGMVLEHPARVEPFYAVLESPSFSLMGILLRIASGTRLSIPITSNTLIYYHPHPEDIKFHLYLVPSDALLTKAIDDEEDRFHGVRLQTSPPMEPLNFGSSYIVSNSANLKVMPKELKLSYRSPGEIQHFSKFYAGQMKEPIQLEITEKRHGTLVWDTEVKPVDLQLVAASAPPPFSGAAFVKENHRQLQARMGDLKGVLDDLQDNEVLTENEKELVEQEKTRQSKNEALLSMVEKKGDLALDVLFRSISERDPYLVSYLRQQNL

SEQ ID NO: 40234 - protein, 487 aa, Homo sapiens
MEKKECPEKSSSSEEELPRRVYRELPCVSETLCDISHFFQEDDETEAEPLLFRAVPECQLSGGDIPSVSEEQESSEGQDSGDICSEENQIVSSYASKVCFEIEEDYKNRQFLGPEGNVDVELIDKSTNRYSVWFPTAGWYLWSATGLGFLVRDEVTVTIAFGSWSQHLALDLQHHEQWLVGGPLFDVTAEPEEAVAEIHLPHFISLQAGEVDVSWFLVAHFKNEGMVLEHPARVEPFYAVLESPSFSLMGILLRIASGTRLSIPITSNTLIYYHPHPEDIKFHLYLVPSDALLTKAIDDEEDRFHGVRLQTSPPMEPLNFGSSYIVSNSANLKVMPKELKLSYRSPGEIQHFSKFYAGQMKEPIQLEITEKRHGTLVWDTEVKPVDLQLVAASAPPPFSGAAFVKENHRQLQARMGDLKGVLDDLQDNEVLTENEKELVEQEKTRQSKNEALLSMVEKKGDLALDVLFRSISERDPYLVSYLRQQNL

SEQ ID NO: 40235 - protein, 366 aa, Homo sapiens
MSDYENDDECWSVLEGFRVTLTSVIDPSRITPYLRQCKVLNPDDEEQVLSDPNLVIRKRKVGVLLDILQRTGHKGYVAFLESLELYYPQLYKKVTGKEPARVFSMIIDASGESGLTQLLMTEVMKLQKKVQDLTALLSSKDDFIKELRVKDSLLRKHQERVQRLKEECEAGSRELKRCKEENYDLAMRLAHQSEEKGAALMRNRDLQLEIDQLKHSLMKAEDDCKVERKHTLKLRHAMEQRPSQELLWELQQEKALLQARVQELEASVQEGKLDRSSPYIQVLEEDWRQALRDHQEQANTIFSLRKDLRQGEARRLRCMEEKEMFELQCLALRKDSKMYKDRIEAILLQMEEVAIERDQSTQMEGL

SEQ ID NO: 40236 - protein, 536 aa, Homo sapiens
MSDYENDDECWSVLEGFRVTLTSVIDPSRITPYLRQCKVLNPDDEEQVLSDPNLVIRKRKVGVLLDILQRTGHKGYVAFLESLELYYPQLYKKVTGKEPARVFSMIIDASGESGLTQLLMTEVMKLQKKVQDLTALLSSKDDFIKELRVKDSLLRKHQERVQRLKEECEAGSRELKRCKEENYDLAMRLAHQSEEKGAALMRNRDLQLEIDQLKHSLMKAEDDCKVERKHTLKLRHAMEQRPSQELLWELQQEKALLQARVQELEASVQEGKLDRSSPYIQVLEEDWRQALRDHQEQANTIFSLRKDLRQGEARRLRCMEEKEMFELQCLALRKDSKMYKDRIEAILLQMEEVAIERDQAIATREELHAQHARGLQEKDALRKQVRELGEKADELQLQVFQCEAQLLAVEGRLRRQQLETLVLSSDLEDGSPRRSQELSLPQDLEDTQLSDKGCLAGGGSPKQPFAALHQEQVLRNPHDAGLSSGEPPEKERRRLKESFENYRRKRALRKMQKGWRQGEEDRENTTGSDNTDTEGS

SEQ ID NO: 40237 - protein, 492 aa, Homo sapiens
MSDYENDDECWSVLEGFRVTLTSVIDPSRITPYLRQCKVLNPDDEEQVLSDPNLVIRKRKVGVLLDILQRTGHKGYVAFLESLELYYPQLYKKVTGKEPARVFSMIIDASGESGLTQLLMTEVMKLQKKVQDLTALLSSKDDFIKELRVKDSLLRKHQERVQRLKEECEAGSRELKRCKEENYDLAMRLAHQSEEKGAALMRNRDLQLEIDQLKHSLMKAEDDCKVERKHTLKLRHAMEQRPSQELLWELQQEKALLQARVQELEASVQEGKLDRSSPYIQVLEEDWRQALRDHQEQANTIFSLRKDLRQGEARRLRCMEEKEMFELQCLALRKDSKMYKDRIEAILLQMEEVAIERDQAIATREELHAQHARGLQEKDALRKQVRELGEKADELQLQVFQCEAQLLAVEGRLRRQQLETLVLSSDLEDGSPRRSQELSLPQDLEDTQLSDKGCLAGGGSPKQPFAALHQEQVLRNPHDAGPAGLPGIGAVC

SEQ ID NO: 40238 - protein, 1166 aa, Homo sapiens
MDLGTAEGTRCTDPPAGKPAMAPKRKGGLKLNAICAKLSRQVVVEKRADAGSHTEGSPSQPRDQERSGPESGAARAPRSEEDKRRAVIEKWVNGEYSEEPAPTPVLGRIAREGLELPPEGVYMVQPQGCSDEEDHAEEPSKDGGALEEKDSDGAASKEDSGPSTRQASGEASSLRDYAASTMTEFLGMFGYDDQNTRDELARKISFEKLHAGSTPEAATSSMLPTSEDTLSKRARFSKYEEYIRKLKAGEQLSWPAPSTKTEERVGKEVVGTLPGLRLPSSTAHLETKATILPLPSHSSVQMQNLVARASKYDFFIQKLKTGENLRPQNGSTYKKPSKYDLENVKYLHLFKPGEGSPDMGGAIAFKTGKVGRPSKYDVRGIQKPGPAKVPPTPSLAPAPLASVPSAPSAPGPGPEPPASLSFNTPEYLKSTFSKTDSITTGTVSTVKNGLPTDKPAVTEDVNIYQKYIARFSGSQHCGHIHCAYQYREHYHCLDPECNYQRFTSKQDVIRHYNMHKKRDNSLQHGFMRFSPLDDCSVYYHGCHLNGKSTHYHCMQVGCNKVYTSTSDVMTHENFHKKNTQLINDGFQRFRATEDCGTADCQFYGQKTTHFHCRRPGCTFTFKNKCDIEKHKSYHIKDDAYAKDGFKKFYKYEECKYEGCVYSKATNHFHCIRAGCGFTFTSTSQMTSHKRKHERRHIRSSGALGLPPSLLGAKDTEHEESSNDDLVDFSALSSKNSSLSASPTSQQSSASLAAATAATEAGPSATKPPNSKISGLLPQGLPGSIPLALALSNSGLPTPTPYFPILAGRGSTSLPVGTPSLLGAVSSGSAASATPDTPTLVASGAGDSAPVAAASVPAPPASIMERISASKGLISPMMARLAAAALKPSATFDPGSGQQVTPARFPPAQVKPEPGESTGAPGPHEASQDRSLDLTVKEPSNESNGHAVPANSSLLSSLMNKMSQGNPGLGSLLNIKAEAEGSPAAEPSPFLGKAVKALVQEKLAEPWKVYLRRFGTKDFCDGQCDFLHKAHFHCVVEECGALFSTLDGAIKHANFHFRTEGGAAKGNTEAAFPASAAETKPPMAPSSPPVPPVTTATVSSLEGPAPSPASVPSTPTLLAWKQLASTIPQMPQIPASVPHLPASPLATTSLENAKPQVKPGFLQFQEK

SEQ ID NO: 40239 - protein, 1759 aa, Homo sapiens
MDLGTAEGTRCTDPPAGKPAMAPKRKGGLKLNAICAKLSRQVVVEKRADAGSHTEGSPSQPRDQERSGPESGAARAPRSEEDKRRAVIEKWVNGEYSEEPAPTPVLGRIAREGLELPPEGVYMVQPQGCSDEEDHAEEPSKDGGALEEKDSDGAASKEDSGPSTRQASGEASSLRDYAASTMTEFLGMFGYDDQNTRDELARKISFEKLHAGSTPEAATSSMLPTSEDTLSKRARFSKYEEYIRKLKAGEQLSWPAPSTKTEERVGKEVVGTLPGLRLPSSTAHLETKATILPLPSHSSVQMQNLVARASKYDFFIQKLKTGENLRPQNGSTYKKPSKYDLENVKYLHLFKPGEGSPDMGGAIAFKTGKVGRPSKYDVRGIQKPGPAKVPPTPSLAPAPLASVPSAPSAPGPGPEPPASLSFNTPEYLKSTFSKTDSITTGTVSTVKNGLPTDKPAVTEDVNIYQKYIARFSGSQHCGHIHCAYQYREHYHCLDPECNYQRFTSKQDVIRHYNMHKKRDNSLQHGFMRFSPLDDCSVYYHGCHLNGKSTHYHCMQVGCNKVYTSTSDVMTHENFHKKNTQLINDGFQRFRATEDCGTADCQFYGQKTTHFHCRRPGCTFTFKNKCDIEKHKSYHIKDDAYAKDGFKKFYKYEECKYEGCVYSKATNHFHCIRAGCGFTFTSTSQMTSHKRKHERRHIRSSGALGLPPSLLGAKDTEHEESSNDDLVDFSALSSKNSSLSASPTSQQSSASLAAATAATEAGPSATKPPNSKISGLLPQGLPGSIPLALALSNSGLPTPTPYFPILAGRGSTSLPVGTPSLLGAVSSGSAASATPDTPTLVASGAGDSAPVAAASVPAPPASIMERISASKGLISPMMARLAAAALKPSATFDPGSGQQVTPARFPPAQVKPEPGESTGAPGPHEASQDRSLDLTVKEPSNESNGHAVPANSSLLSSLMNKMSQGNPGLGSLLNIKAEAEGSPAAEPSPFLGKAVKALVQEKLAEPWKVYLRRFGTKDFCDGQCDFLHKAHFHCVVEECGALFSTLDGAIKHANFHFRTEGGAAKGNTEAAFPASAAETKPPMAPSSPPVPPVTTATVSSLEGPAPSPASVPSTPTLLAWKQLASTIPQMPQIPASVPHLPASPLATTSLENAKPQVKPGFLQFQENDPCLATDCKYANKFHFHCLFGNCKYVCKTSGKAESHCLDHINPNNNLVNVRDQFAYYSLQCLCPNQHCEFRMRGHYHCLRTGCYFVTNITTKLPWHIKKHEKAERRAANGFKYFTKREECGRLGCKYNQVNSHFHCIREGCQFSFLLKHQMTSHARKHMRRMLGKNFDRVPPSQGPPGLMDAETDECMDYTGCSPGAMSSESSTMDRSCSSTPVGNESTAAGNTISMPTASGAKKRFWIIEDMSPFGKRRKTASSRKMLDEGMMLEGFRRFDLYEDCKDAACQFSLKVTHYHCTRENCGYKFCGRTHMYKHAQHHDRVDNLVLDDFKRFKASLSCHFADCPFSGTSTHFHCLRCRFRCTDSTKVTAHRKHHGKQDVISAAGFCQFSSSADCAVPDCKYKLKCSHFHCTFPGCRHTVVGMSQMDSHKRKHEKQERGEPAAEGPAPGPPISLDGSLSLGAEPGSLLFLQSAAAGLGLALGDAGDPGPPDAAAPGPREGAAAAAAAAGESSQEDEEEELELPEEEAEDDEDEDDDEDDDDEDDDEDDDDEDLRTDSEESLPEAAAEAAGAGARTPALAALAALGAPGPAPTAASSP

SEQ ID NO: 40240 - protein, 1443 aa, Homo sapiens
QELEAALHRDDVEFISDLIACLLQGCYQRRDITPQTFHSYLEDIINYRWELEEGKPNPLREASFQDLPLRTRVEILHRLCDYRLDADDVFDLLKGLDADSLRVEPLGEDNSGALYWYFYGTRMYKEDPVQGKSNGELSLSRESEGQKNVSSIPGKTGKRRGRPPKRKKLQEEILLSEKQEENSLASEPQTRHGSQGPGQGTWWLLCQTEEEWRQVTESFRERTSLRERQLYKLLSEDFLPEICNMIAQKGKRPQRTKAELHPRWMSDHLSIKPVKQEETPVLTRIEKQKRKEEEEERQILLAVQKKEQEQMLKEERKRELEEKVKAVEGMCSVRVVWRGACLSTSRPVDRAKRRKLREERAWLLAQGKELPPELSHLDPNSPMREEKKTKDLFELDDDFTAMYKVLDVVKAHKDSWPFLEPVDESYAPNYYQIIKAPMDISSMEKKLNGGLYCTKEEFVNDMKTMFRNCRKYNGESSEYTKMSDNLERCFHRAMMKHFPGEDGDTDEEFWIREDEKREKRRSRAGRSGGSHVWTRSRDPEGSSRKQQPMENGGKSLPPTRRAPSSGDDQSSSSTQPPREVGTSNGRGFSHPLHCGGTPSQAPFLNQMRPAVPGTFGPLRGSDPATLYGSSGVPEPHPGEPVQQRQPFTMQPPVGINSLRGPRLGTPEEKQMCGGLTHLSNMGPHPGSLQLGQISGPSQDGSMYAPAQFQPGFIPPRHGGAPARPPDFPESSEIPPSHMYRSYKYLNRVHSAVWNGNHGATNQGPLGPDEKPHLGPGPSHQPRTLGHVMDSRVMRPPVPPNQWTEQSGFLPHGVPSSGYMRPPCKSAGHRLQPPPVPAPSSLFGAPAQALRGVQGGDSMMDSPEMIAMQQLSSRVCPPGVPYHPHQPAHPRLPGPFPQVAHPMSVTVSAPKPALGNPGRAPENSEAQEPENDQAEPLPGLEEKPPGVGTSEGVYLTQLPHPTPPLQTDCTRQSSPQERETVGPELKSSSSESADNCKAMKGKNPWPSDSSYPGPAAQGCVRDLSTVADRGALSENGVIGEASPCGSEGKGLGSSGSEKLLCPRGRTLQETMPCTGQNAATPPSTDPGLTGGTVSQFPPLYMPGLEYPNSAAHYHISPGLQGVGPVMGGKSPASHPQHFPPRGFQSNHPHSGGFPRYRPPQGMRYSYHPPPQPSYHHYQRTPYYACPQSFSDWQRPLHPQGSPSGPPASQPPPPRSLFSDKNAMASLQGCETLNAALTSPTRMDAVAAKVPNDGQNPGPEEEKLDESMERPESPKEFLDLDNHNAATKRQSSLSASEYLYGTPPPLSSGMGFGSSAFPPHSVMLQTGPPYTPQRPASHFQPRAYSSPVAALPPHHPGATQPNGLSQEGPIYRCQEEGLGHFQAVMMEQIGTRSGIRGPFQEMYRPSGMQMHPVQSQASFPKTPTAATSQEEVPPHKPPTLPLDQS

SEQ ID NO: 40241 - protein, 456 aa, Homo sapiens
ELEAALHRDDVEFISDLIACLLQGCYQRRDITPQTFHSYLEDIINYRWELEEGKPNPLREASFQDLPLRTRVEILHRLCDYRLDADDVFDLLKGLDADSLRVEPLGEDNSGALYWYFYGTRMYKEDPVQGKSNGELSLSRESEGQKNVSSIPGKTGKRRGRPPKRKKLQEEILLSEKQEENSLASEPQTRHGSQGPGQGTWWLLCQTEEEWRQVTESFRERTSLRERQLYKLLSEDFLPEICNMIAQKETPVLTRIEKQKRKEEEEERQILLAVQKKEQEQMLKEERKRELEEKVKAVEGMCSVRVVWRGACLSTSRPVDRAKRRKLREERAWLLAQGKELPPELSHLDPNSPMREEKKTKDLFELDDDFTAMYKVLDVVKAHKDSWPFLEPVDESYAPNYYQIIKAPMDISSMEKKLNGGLYCTKEEFVNDMKTMFRNCRKYNGESSGKQGRSLC

SEQ ID NO: 40242 - protein, 527 aa, Homo sapiens
MADSRDPASDQMQHWKEQRAAQKADVLTTGAGNPVGDKLNVITVGPRGPLLVQDVVFTDEMAHFDRERIPERVVHAKGAGAFGYFEVTHDITKYSKAKVFEHIGKKTPIAVRFSTVAGESGSADTVRDPRGFAVKFYTEDGNWDLVGNNTPIFFIRDPILFPSFIHSQKRNPQTHLKDPDMVWDFWSLRPESLHQVSFLFSDRGIPDGHRHMNGYGSHTFKLVNANGEAVYCKFHYKTDQGIKNLSVEDAARLSQEDPDYGIRDLFNAIATGKYPSWTFYIQVMTFNQAETFPFNPFDLTKVWPHKDYPLIPVGKLVLNRNPVNYFAEVEQIAFDPSNMPPGIEASPDKMLQGRLFAYPDTHRHRLGPNYLHIPVNCPYRARVANYQRDGPMCMQDNQGGAPNYYPNSFGAPEQQPSALEHSIQYSGEVRRFNTANDDNVTQVRAFYVNVLNEEQRKRLCENIAGHLKDAQIFIQKKAVKNFTEVHPDYGSHIQALLDKYNAEKPKNAIHTFVQSGSHLAAREKANL

SEQ ID NO: 40243 - protein, 271 aa, Homo sapiens
MPEAPPLLLAAVLLGLVLLVVLLLLLRHWGWGLCLIGWNEFILQPIHNLLMGDTKEQRILNHVLQHAEPGNAQSVLEAIDTYCEQKEWAMNVGDKKGKIVDAVIQEHQPSVLLELGAYCGYSAVRMARLLSPGARLITIEINPDCAAITQRMVDFAGVKDKVTLVVGASQDIIPQLKKKYDVDTLDMVFLDHWKDRYLPDTLLLEECGLLRKGTVLLADNVICPGAPDFLAHVRGSSCFECTHYQSFLEYREVVDGLEKAIYKGPGSEAGP

SEQ ID NO: 40244 - protein, 271 aa, Homo sapiens; identical to SEQ ID NO: 40243

SEQ ID NO: 40245 - protein, 271 aa, Homo sapiens; identical to SEQ ID NO: 40243

SEQ ID NO: 40246 - protein, 221 aa, Homo sapiens
MGDTKEQRILNHVLQHAEPGNAQSVLEAIDTYCEQKEWAMNVGDKKGKIVDAVIQEHQPSVLLELGAYCGYSAVRMARLLSPGARLITIEINPDCAAITQRMVDFAGVKDKVTLVVGASQDIIPQLKKKYDVDTLDMVFLDHWKDRYLPDTLLLEECGLLRKGTVLLADNVICPGAPDFLAHVRGSSCFECTHYQSFLEYREVVDGLEKAIYKGPGSEAGP

SEQ ID NO: 40247 - protein, 223 aa, Homo sapiens
MPEAPPLLLAAVLLGLVLLVVLLLLLRHWGWGLCLIGWNEFILQPIHNLLMGDTKEQRILNHVLQHAEPGNAQSVLEAIDTYCEQKEWAMNVGDKKGKIVDAVIQEHQPSVLLELGAYCGYSAVRMARLLSPGARLITIEINPDCAAITQRMVDFAGVKDKVTLVVGASQDIIPQLKKKYDVDTLDMVFLDHWKDRYLPDTLLLEECGLLRKGTVLLADNVIC

SEQ ID NO: 40248 - protein, 221 aa, Homo sapiens; identical to SEQ ID NO: 40246

SEQ ID NO: 40249 - protein, 887 aa, Homo sapiens
MANGTLTRRHQNGRFVGDADLERQKFSDLKLNGPQDHSHLLYSTIPRMQEPGQIVETYTEEDPEGAMSVVSVETSDDGTTRRTETTVKKVVKTVTTRTVQPVAMGPDGLPVDASSVSNNYIQTLGRDFRKNGNGGPGPYVGQAGTATLPRNFHYPPDGYSRHYEDGYPGGSDNYGSLSRVTRIEERYRPSMEGYRAPSRQDVYGPQPQVRVGGSSVDLHRFHPEPYGLEDDQRSMGYDDLDYGMMSDYGTARRTGTPSDPRRRLRSYEDMIGEEVPSDQYYWAPLAQHERGSLASLDSLRKGGPPPPNWRQPELPEVIAMLGFRLDAVKSNAAAYLQHLCYRNDKVKTDVRKLKGIPVLVGLLDHPKKEVHLGACGALKNISFGRDQDNKIAIKNCDGVPALVRLLRKARDMDLTEVITGTLWNLSSHDSIKMEIVDHALHALTDEVIIPHSGWEREPNEDCKPRHIEWESVLTNTAGCLRNVSSERSEARRKLRECDGLVDALIFIVQAEIGQKDSDSKLVENCVCLLRNLSYQVHREIPQAERYQEAAPNVANNTGPHAASCFGAKKGKGKKPIEDPANDTVDFPKRTSPARGYELLFQPEVVRIYISLLKESKTPAILEASAGAIQNLCAGRWTYGRYIRSALRQEKALSAIADLLTNEHERVVKAASGALRNLAVDARNKELIGKHAIPNLVKNLPGGQQNSSWNFSEDTVISILNTINEVIAENLEAAKKLRETQGIEKLVLINKSGNRSEKEVRAAALVLQTIWGYKELRKPLEKEGWKKSDFQVNLNNASRSQSSHSYDDSTLPLIDRNQKSDNNYSTPNERGDHNRTLDRSGDLGDMEPLKGTTPLMQDEGQESLEEELDVLVLDDEGGQVSYPSMQKI

SEQ ID NO: 40250 - protein, 584 aa, Homo sapiens
MDGWRRPLQSVGKVCEKNMKTSEMHTMSGAQTGRKEKGDPLNIAIDKMTKKTRDLRRQLRKAVMDHISDSFLETNVPLLVLIEAAKSGNEKEVKEYAQVFREHANKLVEVANLACSISNNEEGVKLVRMAATQIDSLCPQVINAALTLAARPQSKVAQDNMDVFKDQWEKQVRVLTEAVDDITSVDDFLSVSENHILEDVNKCVIALQEGDVDTLDRTAGAIRGRAARVIHIINAEMENYEAGVYTEKVLEATKLLSETVMPRFAEQVEVAIEALSANVPQPFEENEFIDASRLVYDGVRDIRKAVLMIRTPEELEDDSDFEQEDYDVRSRTSVQTEDDQLIAGQSARAIMAQLPQEEKAKIAEQVEIFHQEKSKLDAEVAKWDDSGNDIIVLAKQMCMIMMEMTDFTRGKGPLKNTSDVINAAKKIAEAGSRMDKLARAVADQCPDSACKQDLLAYLQRIALYCHQLNICSKVKAEVQNLGGELIVSGLDSATSLIQAAKNLMNAVVLTVKASYVASTKYQKVYGTAAVNSPVVSWKMKAPEKKPLVKREKPEEFQTRVRRGSQKKHISPVQALSEFKAMDSF

SEQ ID NO: 40251 - protein, 939 aa, Homo sapiens
MSGLICLQYGLWHGQKIDFGGPRRLLQRNRGEGSMTSATSPIILKWDPKSLEIRTLTVERLLEPLVTQVTTLVNTSNKGPSGKKKGRSKKAHVLAASVEQATQNFLEKGEQIAKESQDLKEELVAAVEDVRKQGETMRIASSEFADDPCSSVKRGTMVRAARALLSAVTRLLILADMADVMRLLSHLKIVEEALEAVKNATNEQDLANRFKEFGKEMVKLNYVAARRQQELKDPHCRDEMAAARGALKKNATMLYTASQAFLRHPDVAATRANRDYVFKQVQEAIAGISNAAQATSPTDEAKGHTGIGELAAALNEFDNKIILDPMTFSEARFRPSLEERLESIISGAALMADSSCTRDDRRERIVAECNAVRQALQDLLSEYMNNTGRKEKGDPLNIAIDKMTKKTRDLRRQLRKAVMDHISDSFLETNVPLLVLIEAAKSGNEKEVKEYAQVFREHANKLVEVANLACSISNNEEGVKLVRMAATQIDSLCPQVINAALTLAARPQSKVAQDNMDVFKDQWEKQVRVLTEAVDDITSVDDFLSVSENHILEDVNKCVIALQEGDVDTLDRTAGAIRGRAARVIHIINAEMENYEAGVYTEKVLEATKLLSETVMPRFAEQVEVAIEALSANVPQPFEENEFIDASRLVYDGVRDIRKAVLMIRTPEELEDDSDFEQEDYDVRSRTSVQTEDDQLIAGQSARAIMAQLPQEEKAKIAEQVEIFHQEKSKLDAEVAKWDDSGNDIIVLAKQMCMIMMEMTDFTRGKGPLKNTSDVINAAKKIAEAGSRMDKLARAVADQCPDSACKQDLLAYLQRIALYCHQLNICSKVKAEVQNLGGELIVSGLDSATSLIQAAKNLMNAVVLTVKASYVASTKYQKVYGTAAVNSPVVSWKMKAPEKKPLVKREKPEEFQTRVRRGSQKKHISPVQALSEFKAMDSF

SEQ ID NO: 40252 - protein, 953 aa, Homo sapiens
MTSATSPIILKWDPKSLEIRTLTVERLLEPLVTQVTTLVNTSNKGPSGKKKGRSKKAHVLAASVEQATQNFLEKGEQIAKESQDLKEELVAAVEDVRKQGETMRIASSEFADDPCSSVKRGTMVRAARALLSAVTRLLILADMADVMRLLSHLKIVEEALEAVKNATNEQDLANRFKEFGKEMVKLNYVAARRQQELKDPHCRDEMAAARGALKKNATMLYTASQAFLRHPDVAATRANRDYVFKQVQEAIAGISNAAQATSPTDEAKGHTGIGELAAALNEFDNKIILDPMTFSEARFRPSLEERLESIISGAALMADSSCTRDDRRERIVAECNAVRQALQDLLSEYMNNTGRKEKGDPLNIAIDKMTKKTRDLRRQLRKAVMDHISDSFLETNVPLLVLIEAAKSGNEKEVKEYAQVFREHANKLVEVANLACSISNNEEGVKLVRMAATQIDSLCPQVINAALTLAARPQSKVAQDNMDVFKDQWEKQVRVLTEAVDDITSVDDFLSVSENHILEDVNKCVIALQEGDVDTLDRTAGAIRGRAARVIHIINAEMENYEAGVYTEKVLEATKLLSETVMPRFAEQVEVAIEALSANVPQPFEENEFIDASRLVYDGVRDIRKAVLMIRTPEELEDDSDFEQEDYDVRSRTSVQTEDDQLIAGQSARAIMAQLPQEEKAKIAEQVEIFHQEKSKLDAEVAKWDDSGNDIIVLAKQMCMIMMEMTDFTRGKGPLKNTSDVINAAKKIAEAGSRMDKLARAVADQCPDSACKQDLLAYLQRIALYCHQLNICSKVKAEVQNLGGELIVSGTGVQSTFTTFYEVDCDVIDGGRASQLSTHLPTCAEGAPIGSGSSDSSMLDSATSLIQAAKNLMNAVVLTVKASYVASTKYQKVYGTAAVNSPVVSWKMKAPEKKPLVKREKPEEFQTRVRRGSQKKHISPVQALSEFKAMDSF

SEQ ID NO: 40253 - protein, 117 aa, Homo sapiens
MTSATSPIILKWDPKSLEIRTLTVERLLEPLVTQVTTLVNTSNKGPSGKKKGRSKKAHVLAASVEQATQNFLEKGEQIAKESQDLKEELVAAVEDVRKQGETMRIASSEFADDPCSS

SEQ ID NO: 40254 - protein, 66 aa, Homo sapiens
MTSATSPIILKWDPKSLEIRTLTVERLLEPLVTQVTTLVNTSNKGPSGKKKGRSKKAHVLAASVEQ

SEQ ID NO: 40255 - protein, 905 aa, Homo sapiens
MTSATSPIILKWDPKSLEIRTLTVERLLEPLVTQVTTLVNTSNKGPSGKKKGRSKKAHVLAASVEQATQNFLEKGEQIAKESQDLKEELVAAVEDVRKQGETMRIASSEFADDPCSSVKRGTMVRAARALLSAVTRLLILADMADVMRLLSHLKIVEEALEAVKNATNEQDLANRFKEFGKEMVKLNYVAARRQQELKDPHCRDEMAAARGALKKNATMLYTASQAFLRHPDVAATRANRDYVFKQVQEAIAGISNAAQATSPTDEAKGHTGIGELAAALNEFDNKIILDPMTFSEARFRPSLEERLESIISGAALMADSSCTRDDRRERIVAECNAVRQALQDLLSEYMNNTGRKEKGDPLNIAIDKMTKKTRDLRRQLRKAVMDHISDSFLETNVPLLVLIEAAKSGNEKEVKEYAQVFREHANKLVEVANLACSISNNEEGVKLVRMAATQIDSLCPQVINAALTLAARPQSKVAQDNMDVFKDQWEKQVRVLTEAVDDITSVDDFLSVSENHILEDVNKCVIALQEGDVDTLDRTAGAIRGRAARVIHIINAEMENYEAGVYTEKVLEATKLLSETVMPRFAEQVEVAIEALSANVPQPFEENEFIDASRLVYDGVRDIRKAVLMIRTPEELEDDSDFEQEDYDVRSRTSVQTEDDQLIAGQSARAIMAQLPQEEKAKIAEQVEIFHQEKSKLDAEVAKWDDSGNDIIVLAKQMCMIMMEMTDFTRGKGPLKNTSDVINAAKKIAEAGSRMDKLARAVADQCPDSACKQDLLAYLQRIALYCHQLNICSKVKAEVQNLGGELIVSGLDSATSLIQAAKNLMNAVVLTVKASYVASTKYQKVYGTAAVNSPVVSWKMKAPEKKPLVKREKPEEFQTRVRRGSQKKHISPVQALSEFKAMDSF

SEQ ID NO: 40256 - protein, 905 aa, Homo sapiens; identical to SEQ ID NO: 40255

SEQ ID NO: 40257 - protein, 860 aa, Homo sapiens
MTSATSPIILKWDPKSLEIRTLTVERLLEPLVTQVTTLVNTSNKGPSGKKKGRSKKAHVLAASVEQATQNFLEKGEQIAKESQDLKEELVAAVEDVRKQGETMRIASSEFADDPCSSVKRGTMVRAARALLSAVTRLLILADMADVMRLLSHLKIVEEALEAVKNATNEQDLANRFKEFGKEMVKLNYVAARRQQELKDPHCRDEMAAARGALKKNATMLYTASQAFLRHPDVAATRANRDYVFKQVQEAIAGISNAAQATSPTDEAKGHTGIGELAAALNEFDNKIILDPMTFSEARFRPSLEERLESIISGAALMADSSCTRDDRRERIVAECNAVRQALQDLLSEYMNNTGRKEKGDPLNIAIDKMTKKTRDLRRQLRKAVMDHISDSFLETNVPLLVLIEAAKSGNEKEVKEYAQVFREHANKLVEVANLACSISNNEEGVKLVRMAATQIDSLCPQVINAALTLAARPQSKVAQDNMDVFKDQWEKQVRVLTEAVDDITSVDDFLSVSENHILEDVNKCVIALQEGDVDTLDRTAGAIRGRAARVIHIINAEMENYEAGVYTEKVLEATKLLSETVMPRFAEQVEVAIEALSANVPQPFEENEFIDASRLVYDGVRDIRKAVLMIRTPEELEDDSDFEQEDYDVRSRTSVQTEDDQLIAGQSARAIMAQLPQEEKAKIAEQVEIFHQEKSKLDAEVAKWDDSGNDIIVLAKQMCMIMMEMTDFTRGKGPLKNTSDVINAAKKIAEAGSRMDKLARAVADQLDSATSLIQAAKNLMNAVVLTVKASYVASTKYQKVYGTAAVNSPVVSWKMKAPEKKPLVKREKPEEFQTRVRRGSQKKHISPVQALSEFKAMDSF

SEQ ID NO: 40258 - protein, 905 aa, Homo sapiens; identical to SEQ ID NO: 40255

SEQ ID NO: 40259 - protein, 193 aa, Homo sapiens
MSAETPITLNIDPQDLQVQTFTVEKLLEPLIIQVTTLVNCPQNPSSRKKGRSKRASVLLASVEEATWNLLDKGEKIAQEATVLKDELTASLEEVRKESEALKVSAERFTDDPCFLPKREAVVQAARALLAAVTRLLILADMIDVMCLLQHVSAFQRTFESLKNVANKSDLQKTYQKLGKELENLDYLAFKRQQ

SEQ ID NO: 40260 - protein, 234 aa, Homo sapiens
MTQLPEAEKEKIAEQVADFKKVKSKLDAEIEIWDDTSNDIIVLAKNMCMIMMEMTDFTRGKGPLKHTTDVIYAAKMISESGSRMDVLARQIANQCPDPSCKQDLLAYLEQIKFYSHQLKICSQVKAEIQNLGGELIMSALDSVTSLIQAAKNLMNAVVQTVKMSYIASTKIIRIQSPAGPRHPVVMWRMKAPAKKPLIKREKPEETCAAVRRGSAKKKIHPLQVMSEFRGRQIY

SEQ ID NO: 40261 - protein, 895 aa, Homo sapiens
MSAETPITLNIDPQDLQVQTFTVEKLLEPLIIQVTTLVNCPQNPSSRKKGRSKRASVLLASVEEATWNLLDKGEKIAQEATVLKDELTASLEEVRKESEALKVSAERFTDDPCFLPKREAVVQAARALLAAVTRLLILADMIDVMCLLQHVSAFQRTFESLKNVANKSDLQKTYQKLGKELENLDYLAFKRQQDLKSPNQRDEIAGARASLKENSPLLHSICSACLEHSDVASLKASKDTVCEEIQNALNVISNASQGIQNMTTPPEPQAATLGSALDELENLIVLNPLTVTEEEIRPSLEKRLEAIISGAALLADSSCTRDLHRERIIAECNAIRQALQDLLSEYMNNAGKKERSNTLNIALDNMCKKTRDLRRQLRKAIIDHVSDSFLDTTVPLLVLIEAAKNGREKEIKEYAAIFHEHTSRLVEVANLACSMSTNEDGIKIVKIAANHLETLCPQIINAALALAARPKSQAVKNTMEMYKRTWENHIHVLTEAVDDITSIDDFLAVSESHILEDVNKCIIALRDQDADNLDRAAGAIRGRAARVAHIVTGEMDSYEPGAYTEGVMRNVNFLTSTVIPEFVTQVNVALEALSKSSLNVLDDNQFVDISKKIYDTIHDIRCSVMMIRTPEELEDVSDLEEEHEVRSHTSIQTEGKTDRAKMTQLPEAEKEKIAEQVADFKKVKSKLDAEIEIWDDTSNDIIVLAKNMCMIMMEMTDFTRGKGPLKHTTDVIYAAKMISESGSRMDVLARQIANQCPDPSCKQDLLAYLEQIKFYSHQLKICSQVKAEIQNLGGELIMSALDSVTSLIQAAKNLMNAVVQTVKMSYIASTKIIRIQSPAGPRHPVVMWRMKAPAKKPLIKREKPEETCAAVRRGSAKKKIHPLQVMSEFRGRQIY

SEQ ID NO: 40262 - protein, 895 aa, Homo sapiens; identical to SEQ ID NO: 40261

SEQ ID NO: 40263 - protein, 376 aa, Homo sapiens
MSAETPITLNIDPQDLQVQTFTVEKLLEPLIIQVTTLVNCPQNPSSRKKGRSKRASVLLASVEEATWNLLDKGEKIAQEATVLKDELTASLEEVRKESEALKVSAERFTDDPCFLPKREAVVQAARALLAAVTRLLILADMIDVMCLLQHVSAFQRTFESLKNVANKSDLQKTYQKLGKELENLDYLAFKRQQDLKSPNQRDEIAGARASLKENSPLLHSICSACLEHSDVASLKASKDTVCEEIQNALNVISNASQGIQNMTTPPEPQAATLGSALDELENLIVLNPLTVTEEEIRPSLEKRLEAIISGAALLADSSCTRDLHRERIIAECNAIRQALQDLLSEYMNNLCNQKSDLGLTGVKIKLLEECIIFWSL

SEQ ID NO: 40264 - protein, 193 aa, Homo sapiens; identical to SEQ ID NO: 40259

SEQ ID NO: 40265 - protein, 376 aa, Homo sapiens; identical to SEQ ID NO: 40263

SEQ ID NO: 40266 - protein, 734 aa, Homo sapiens
MAASPGPAGVGGAGAVYGSGSSGFALDSGLEIKTRSVEQTLLPLVSQITTLINHKDNTKKSDKTLQAIQRVGQAVNLAVGRFVKVGEAIANENWDLKEEINIACIEAKQAGETIAALTDITNLNHLESDGQITIFTDKTGVIKAARLLLSSVTKVLLLADRVVIKQIITSRNKVLATMERLEKVNSFQEFVQIFSQFGNEMVEFAHLSGDRQNDLKDEKKKAKMAAARAVLEKCTMMLLTASKTCLRHPNCESAHKNKEGVFDRMKVALDKVIEIVTDCKPNGETDISSISIFTGIKEFKMNIEALRENLYFQSKENLSVTLEVILERMEDFTDSAYTSHEHRERILELSTQARMELQQLISVWIQAQSKKTKSIAEELELSILKISHSLNELKKELHSTATQLAADLLKYHADHVVLKALKLTGVEGNLEALAEYACKLSEQKEQLVETCRLLRHISGTEPLEITCIHAEETFQVTGQQIISAAETLTLHPSSKIAKENLDVFCEAWESQISDMSTLLREINDVFEGRRGEKYGYLSLPKPMKNNANLKSLKPDKPDSEEQAKIAKLGLKLGLLTSDADCEIEKWEDQENEIVQYGRNMSSMAYSLYLFTRGEGPLKTSQDLIHQLEVFAAEGLKLTSSVQAFSKQLKDDDKLMLLLEINKLIPLCHQLQTVTKTSLQNKVFLKVDKCITKTRSMMALLVQLLSLCYKLLKKLQMENNGWVSVTNKDTMDSKT

SEQ ID NO: 40267 - protein, 650 aa, Homo sapiens
MAASPGPAGVGGAGAVYGSGSSGFALDSGLEIKTRSVEQTLLPLVSQITTLINHKDNTKKSDKTLQAIQRVGQAVNLAVGRFVKVGEAIANENWDLKEEINIACIEAKQAGETIAALTDITNLNHLESDGQITIFTDKTGVIKAARLLLSSVTKVLLLADRVVIKQIITSRNKVLATMERLEKVNSFQEFVQIFSQFGNEMVEFAHLSGDRQNDLKDEKKKAKMAAARAVLEKCTMMLLTASKTCLRHPNCESAHKNKEGVFDRMKVALDKVIEIVTDCKPNGETDISSISIFTGIKEFKMNIEALRENLYFQSKENLSVTLEVILERMEDFTDSAYTSHEHRERILELSTQARMELQQLISVWIQAQSKKTKSIAEELELSILKISHSLNELKKEIISAAETLTLHPSSKIAKENLDVFCEAWESQISDMSTLLREINDVFEGRRGEKYGYLSLPKPMKNNANLKSLKPDKPDSEEQAKIAKLGLKLGLLTSDADCEIEKWEDQENEIVQYGRNMSSMAYSLYLFTRGEGPLKTSQDLIHQLEVFAAEGLKLTSSVQAFSKQLKDDDKLMLLLEINKLIPLCHQLQTVTKTSLQNKVFLKVDKCITKTRSMMALLVQLLSLCYKLLKKLQMENNGWVSVTNKDTMDSKT

SEQ ID NO: 40268 - protein, 183 aa, Homo sapiens
MAASPGPAGVGGAGAVYGSGSSGFALDSGLEIKTRSVEQTLLPLVSQITTLINHKDNTKKSDKTLQAIQRVGQAVNLAVGRFVKVGEAIANENWDLKEEINIACIEAKQAGETIAALTDITNLNHLESDGQITIFTDKTGVIKAARLLLSSVTKVLLLADRVVIKQIITSRNKRLTIYNLRHS

SEQ ID NO: 40269 - protein, 135 aa, Homo sapiens
MSSMAYSLYLFTRGEGPLKTSQDLIHQLEVFAAEGLKLTSSVQAFSKQLKDDDKLMLLLEINKLIPLCHQLQTVTKTSLQNKVFLKVDKCITKTRSMMALLVQLLSLCYKLLKKLQMENNGWVSVTNKDTMDSKT

SEQ ID NO: 40270 - protein, 718 aa, Homo sapiens
MAASPGPAGVGGAGAVYGSGSSGFALDSGLEIKTRSVEQTLLPLVSQITTLINHKDNTKKSDKTLQAIQRVGQAVNLAVGRFVKVGEAIANENWDLKEEINIACIEAKQAGETIAALTDITNLNHLESDGQITIFTDKTGVIKAARLLLSSVTKVLLLADRVVIKQIITSRNKVLATMERLEKVNSFQEFVQIFSQFGNEMVEFAHLSGDRQNDLKDEKKKAKMAAARAVLEKCTMMLLTASKTCLRHPNCESAHKNKEGVFDRMKVALDKVIEIVTDCKPNGETDISSISIFTGIKEFKMNIEALRENLYFQSKENLSVTLEVILERMEDFTDSAYTSHEHRERILELSTQARMELQQLISVWIQAQSKKTKSIAEELELSILKISHSLNELKKELHSTATQLAADLLKYHADHVVLKALKLTGVEGNLEALAEYACKLSEQKEQLVETCRLLRHISGTEPLEITCIHAEETFQVTGQQIISAAETLTLHPSSKIAKENLDVFCEAWESQISDMSTLLREINDVFEGRRGEKYGYLSLPKPMKNNANLKSLKPDKPDSEEQAKIAKLGLKLGLLTSDADCEIEKWEDQENEIVQYGRNMSSMAYSLYLFTRGEGPLKTSQDLIHQLEVFAAEGLKLTSSVQAFSKQLKDDDKLMLLLEINKLIPLCHQLQTVTKTSLQNKVFLKVDKCITKTRSMMALLVQLLSLCYKLLKKSETRY

SEQ ID NO: 40271 - protein, 933 aa, Homo sapiens
MDDSEVESTASILASVKEQEAQFEKLTRALEEERRHVSAQLERVRVSPQDANPLMANGTLTRRHQNGRFVGDADLERQKFSDLKLNGPQDHSHLLYSTIPRMQEPGQIVETYTEEDPEGAMSVVSVETSDDGTTRRTETTVKKVVKTVTTRTVQPVAMGPDGLPVDASSVSNNYIQTLGRDFRKNGNGGPGPYVGQAGTATLPRNFHYPPDGYSRHYEDGYPGGSDNYGSLSRVTRIEERYRPSMEGYRAPSRQDVYGPQPQVRVGGSSVDLHRFHPEPYGLEDDQRSMGYDDLDYGMMSDYGTARRTGTPSDPRRRLRSYEDMIGEEVPSDQYYWAPLAQHERGSLASLDSLRKGGPPPPNWRQPELPEVIAMLGFRLDAVKSNAAAYLQHLCYRNDKVKTDVRKLKGIPVLVGLLDHPKKEVHLGACGALKNISFGRDQDNKIAIKNCDGVPALVRLLRKARDMDLTEVITGTLWNLSSHDSIKMEIVDHALHALTDEVIIPHSGWEREPNEDCKPRHIEWESVLTNTAGCLRNVSSERSEARRKLRECDGLVDALIFIVQAEIGQKDSDSKLVENCVCLLRNLSYQVHREIPQAERYQEAAPNVANNTGPHAASCFGAKKGKGKKPIEDPANDTVDFPKRTSPARGYELLFQPEVVRIYISLLKESKTPAILEASAGAIQNLCAGRWTYGRYIRSALRQEKALSAIADLLTNEHERVVKAASGALRNLAVDARNKELIGKHAIPNLVKNLPGGQQNSSWNFSEDTVISILNTINEVIAENLEAAKKLRETQGIEKLVLINKSGNRSEKEVRAAALVLQTIWGYKELRKPLEKEGWKKSDFQVNLNNASRSQSSHSYDDSTLPLIDRNQKSDKKPDREEIQMSNMGSNTKSLDNNYSTPNERGDHNRTLDRSGDLGDMEPLKGTTPLMQKI

SEQ ID NO: 40272 - protein, 947 aa, Homo sapiens
MDDSEVESTASILASVKEQEAQFEKLTRALEEERRHVSAQLERVRVSPQDANPLMANGTLTRRHQNGRFVGDADLERQKFSDLKLNGPQDHSHLLYSTIPRMQEPGQIVETYTEEDPEGAMSVVSVETSDDGTTRRTETTVKKVVKTVTTRTVQPVAMGPDGLPVDASSVSNNYIQTLGRDFRKNGNGGPGPYVGQAGTATLPRNFHYPPDGYSRHYEDGYPGGSDNYGSLSRVTRIEERYRPSMEGYRAPSRQDVYGPQPQVRVGGSSVDLHRFHPEPYGLEDDQRSMGYDDLDYGMMSDYGTARRTGTPSDPRRRLRSYEDMIGEEVPSDQYYWAPLAQHERGSLASLDSLRKGGPPPPNWRQPELPEVIAMLGFRLDAVKSNAAAYLQHLCYRNDKVKTDVRKLKGIPVLVGLLDHPKKEVHLGACGALKNISFGRDQDNKIAIKNCDGVPALVRLLRKARDMDLTEVITGTLWNLSSHDSIKMEIVDHALHALTDEVIIPHSGWEREPNEDCKPRHIEWESVLTNTAGCLRNVSSERSEARRKLRECDGLVDALIFIVQAEIGQKDSDSKLVENCVCLLRNLSYQVHREIPQAERYQEAAPNVANNTGPHAASCFGAKKGKDEWFSRGKKPIEDPANDTVDFPKRTSPARGYELLFQPEVVRIYISLLKESKTPAILEASAGAIQNLCAGRWTYGRYIRSALRQEKALSAIADLLTNEHERVVKAASGALRNLAVDARNKELIGKHAIPNLVKNLPGGQQNSSWNFSEDTVISILNTINEVIAENLEAAKKLRETQGIEKLVLINKSGNRSEKEVRAAALVLQTIWGYKELRKPLEKEGWKKSDFQVNLNNASRSQSSHSYDDSTLPLIDRNQKSDNNYSTPNERGDHNRTLDRSGDLGDMEPLKGTTPLMQDEGQESLEEELDVLVLDDEGGQVSYPSMQKI

SEQ ID NO: 40273 - protein, 962 aa, Homo sapiens
MDDSEVESTASILASVKEQEAQFEKLTRALEEERRHVSAQLERVRVSPQDANPLMANGTLTRRHQNGRFVGDADLERQKFSDLKLNGPQDHSHLLYSTIPRMQEPGQIVETYTEEDPEGAMSVVSVETSDDGTTRRTETTVKKVVKTVTTRTVQPVAMGPDGLPVDASSVSNNYIQTLGRDFRKNGNGGPGPYVGQAGTATLPRNFHYPPDGYSRHYEDGYPGGSDNYGSLSRVTRIEERYRPSMEGYRAPSRQDVYGPQPQVRVGGSSVDLHRFHPEPYGLEDDQRSMGYDDLDYGMMSDYGTARRTGTPSDPRRRLRSYEDMIGEEVPSDQYYWAPLAQHERGSLASLDSLRKGGPPPPNWRQPELPEVIAMLGFRLDAVKSNAAAYLQHLCYRNDKVKTDVRKLKGIPVLVGLLDHPKKEVHLGACGALKNISFGRDQDNKIAIKNCDGVPALVRLLRKARDMDLTEVITGTLWNLSSHDSIKMEIVDHALHALTDEVIIPHSGWEREPNEDCKPRHIEWESVLTNTAGCLRNVSSERSEARRKLRECDGLVDALIFIVQAEIGQKDSDSKLVENCVCLLRNLSYQVHREIPQAERYQEAAPNVANNTGPHAASCFGAKKGKGKKPIEDPANDTVDFPKRTSPARGYELLFQPEVVRIYISLLKESKTPAILEASAGAIQNLCAGRWTYGRYIRSALRQEKALSAIADLLTNEHERVVKAASGALRNLAVDARNKELIGKHAIPNLVKNLPGGQQNSSWNFSEDTVISILNTINEVIAENLEAAKKLRETQGIEKLVLINKSGNRSEKEVRAAALVLQTIWGYKELRKPLEKEGWKKSDFQVNLNNASRSQSSHSYDDSTLPLIDRNQKSDKKPDREEIQMSNMGSNTKSLDNNYSTPNERGDHNRTLDRSGDLGDMEPLKGTTPLMQDEGQESLEEELDVLVLDDEGGQVSYPSMQKI

SEQ ID NO: 40274 - protein, 941 aa, Homo sapiens
MDDSEVESTASILASVKEQEAQFEKLTRALEEERRHVSAQLERVRVSPQDANPLMANGTLTRRHQNGRFVGDADLERQKFSDLKLNGPQDHSHLLYSTIPRMQEPGQIVETYTEEDPEGAMSVVSVETSDDGTTRRTETTVKKVVKTVTTRTVQPVAMGPDGLPVDASSVSNNYIQTLGRDFRKNGNGGPGPYVGQAGTATLPRNFHYPPDGYSRHYEDGYPGGSDNYGSLSRVTRIEERYRPSMEGYRAPSRQDVYGPQPQVRVGGSSVDLHRFHPEPYGLEDDQRSMGYDDLDYGMMSDYGTARRTGTPSDPRRRLRSYEDMIGEEVPSDQYYWAPLAQHERGSLASLDSLRKGGPPPPNWRQPELPEVIAMLGFRLDAVKSNAAAYLQHLCYRNDKVKTDVRKLKGIPVLVGLLDHPKKEVHLGACGALKNISFGRDQDNKIAIKNCDGVPALVRLLRKARDMDLTEVITGTLWNLSSHDSIKMEIVDHALHALTDEVIIPHSGWEREPNEDCKPRHIEWESVLTNTAGCLRNVSSERSEARRKLRECDGLVDALIFIVQAEIGQKDSDSKLVENCVCLLRNLSYQVHREIPQAERYQEAAPNVANNTGPHAASCFGAKKGKGKKPIEDPANDTVDFPKRTSPARGYELLFQPEVVRIYISLLKESKTPAILEASAGAIQNLCAGRWTYGRYIRSALRQEKALSAIADLLTNEHERVVKAASGALRNLAVDARNKELIGKHAIPNLVKNLPGGQQNSSWNFSEDTVISILNTINEVIAENLEAAKKLRETQGIEKLVLINKSGNRSEKEVRAAALVLQTIWGYKELRKPLEKEGWKKSDFQVNLNNASRSQSSHSYDDSTLPLIDRNQKSDNNYSTPNERGDHNRTLDRSGDLGDMEPLKGTTPLMQDEGQESLEEELDVLVLDDEGGQVSYPSMQKI

SEQ ID NO: 40275 - protein, 933 aa, Homo sapiens; identical to SEQ ID NO: 40271

SEQ ID NO: 40276 - protein, 938 aa, Homo sapiens
MDDSEVESTASILASVKEQEAQFEKLTRALEEERRHVSAQLERVRVSPQDANPLMANGTLTRRHQNGRFVGDADLERQKFSDLKLNGPQDHSHLLYSTIPRMQEPGQIVETYTEEDPEGAMSVVSVETSDDGTTRRTETTVKKVVKTVTTRTVQPVAMGPDGLPVDASSVSNNYIQTLGRDFRKNGNGGPGPYVGQAGTATLPRNFHYPPDGYSRHYEDGYPGGSDNYGSLSRVTRIEERYRPSMEGYRAPSRQDVYGPQPQVRVGGSSVDLHRFHPEPYGLEDDQRSMGYDDLDYGMMSDYGTARRTGTPSDPRRRLRSYEDMIGEEVPSDQYYWAPLAQHERGSLASLDSLRKGGPPPPNWRQPELPEVIAMLGFRLDAVKSNAAAYLQHLCYRNDKVKTDVRKLKGIPVLVGLLDHPKKEVHLGACGALKNISFGRDQDNKIAIKNCDGVPALVRLLRKARDMDLTEVITGTLWNLSSHDSIKMEIVDHALHALTDEVIIPHSGWEREPNEDCKPRHIEWESVLTNTAGCLRNVSSERSEARRKLRECDGLVDALIFIVQAEIGQKDSDSKLVENCVCLLRNLSYQVHREIPQAERYQEAAPNVANNTGPHAASCFGAKKGKDEWFSRGKKPIEDPANDTVDFPKRTSPARGYELLFQPEVVRIYISLLKESKTPAILEASAGAIQNLCAGRWTYGRYIRSALRQEKALSAIADLLTNEHERVVKAASGALRNLAVDARNKELIGKHAIPNLVKNLPGGQQNSSWNFSEDTVISILNTINEVIAENLEAAKKLRETQGIEKLVLINKSGNRSEKEVRAAALVLQTIWGYKELRKPLEKEGWKKSDFQVNLNNASRSQSSHSYDDSTLPLIDRNQKSDKKPDREEIQMSNMGSNTKSLDNNYSTPNERGDHNRTLDRSGDLGDMEPLKGTTPLMKI

SEQ ID NO: 40277 - protein, 968 aa, Homo sapiens
MDDSEVESTASILASVKEQEAQFEKLTRALEEERRHVSAQLERVRVSPQDANPLMANGTLTRRHQNGRFVGDADLERQKFSDLKLNGPQDHSHLLYSTIPRMQEPGQIVETYTEEDPEGAMSVVSVETSDDGTTRRTETTVKKVVKTVTTRTVQPVAMGPDGLPVDASSVSNNYIQTLGRDFRKNGNGGPGPYVGQAGTATLPRNFHYPPDGYSRHYEDGYPGGSDNYGSLSRVTRIEERYRPSMEGYRAPSRQDVYGPQPQVRVGGSSVDLHRFHPEPYGLEDDQRSMGYDDLDYGMMSDYGTARRTGTPSDPRRRLRSYEDMIGEEVPSDQYYWAPLAQHERGSLASLDSLRKGGPPPPNWRQPELPEVIAMLGFRLDAVKSNAAAYLQHLCYRNDKVKTDVRKLKGIPVLVGLLDHPKKEVHLGACGALKNISFGRDQDNKIAIKNCDGVPALVRLLRKARDMDLTEVITGTLWNLSSHDSIKMEIVDHALHALTDEVIIPHSGWEREPNEDCKPRHIEWESVLTNTAGCLRNVSSERSEARRKLRECDGLVDALIFIVQAEIGQKDSDSKLVENCVCLLRNLSYQVHREIPQAERYQEAAPNVANNTGPHAASCFGAKKGKDEWFSRGKKPIEDPANDTVDFPKRTSPARGYELLFQPEVVRIYISLLKESKTPAILEASAGAIQNLCAGRWTYGRYIRSALRQEKALSAIADLLTNEHERVVKAASGALRNLAVDARNKELIGKHAIPNLVKNLPGGQQNSSWNFSEDTVISILNTINEVIAENLEAAKKLRETQGIEKLVLINKSGNRSEKEVRAAALVLQTIWGYKELRKPLEKEGWKKSDFQVNLNNASRSQSSHSYDDSTLPLIDRNQKSDKKPDREEIQMSNMGSNTKSLDNNYSTPNERGDHNRTLDRSGDLGDMEPLKGTTPLMQDEGQESLEEELDVLVLDDEGGQVSYPSMQKI

SEQ ID NO: 40278 - protein, 867 aa, Homo sapiens
MQEPGQIVETYTEEDPEGAMSVVSVETSDDGTTRRTETTVKKVVKTVTTRTVQPVAMGPDGLPVDASSVSNNYIQTLGRDFRKNGNGGPGPYVGQAGTATLPRNFHYPPDGYSRHYEDGYPGGSDNYGSLSRVTRIEERYRPSMEGYRAPSRQDVYGPQPQVRVGGSSVDLHRFHPEPYGLEDDQRSMGYDDLDYGMMSDYGTARRTGTPSDPRRRLRSYEDMIGEEVPSDQYYWAPLAQHERGSLASLDSLRKGGPPPPNWRQPELPEVIAMLGFRLDAVKSNAAAYLQHLCYRNDKVKTDVRKLKGIPVLVGLLDHPKKEVHLGACGALKNISFGRDQDNKIAIKNCDGVPALVRLLRKARDMDLTEVITGTLWNLSSHDSIKMEIVDHALHALTDEVIIPHSGWEREPNEDCKPRHIEWESVLTNTAGCLRNVSSERSEARRKLRECDGLVDALIFIVQAEIGQKDSDSKLVENCVCLLRNLSYQVHREIPQAERYQEAAPNVANNTGPHAASCFGAKKGKDEWFSRGKKPIEDPANDTVDFPKRTSPARGYELLFQPEVVRIYISLLKESKTPAILEASAGAIQNLCAGRWTYGRYIRSALRQEKALSAIADLLTNEHERVVKAASGALRNLAVDARNKELIGKHAIPNLVKNLPGGQQNSSWNFSEDTVISILNTINEVIAENLEAAKKLRETQGIEKLVLINKSGNRSEKEVRAAALVLQTIWGYKELRKPLEKEGWKKSDFQVNLNNASRSQSSHSYDDSTLPLIDRNQKSDKKPDREEIQMSNMGSNTKSLDNNYSTPNERGDHNRTLDRSGDLGDMEPLKGTTPLMQDEGQESLEEELDVLVLDDEGGQVSYPSMQKI

SEQ ID NO: 40279 - protein, 832 aa, Homo sapiens
MQEPGQIVETYTEEDPEGAMSVVSVETSDDGTTRRTETTVKKVVKTVTTRTVQPVAMGPDGLPVDASSVSNNYIQTLGRDFRKNGNGGPGPYVGQAGTATLPRNFHYPPDGYSRHYEDGYPGGSDNYGSLSRVTRIEERYRPSMEGYRAPSRQDVYGPQPQVRVGGSSVDLHRFHPEPYGLEDDQRSMGYDDLDYGMMSDYGTARRTGTPSDPRRRLRSYEDMIGEEVPSDQYYWAPLAQHERGSLASLDSLRKGGPPPPNWRQPELPEVIAMLGFRLDAVKSNAAAYLQHLCYRNDKVKTDVRKLKGIPVLVGLLDHPKKEVHLGACGALKNISFGRDQDNKIAIKNCDGVPALVRLLRKARDMDLTEVITGTLWNLSSHDSIKMEIVDHALHALTDEVIIPHSGWEREPNEDCKPRHIEWESVLTNTAGCLRNVSSERSEARRKLRECDGLVDALIFIVQAEIGQKDSDSKLVENCVCLLRNLSYQVHREIPQAERYQEAAPNVANNTGPHAASCFGAKKGKGKKPIEDPANDTVDFPKRTSPARGYELLFQPEVVRIYISLLKESKTPAILEASAGAIQNLCAGRWTYGRYIRSALRQEKALSAIADLLTNEHERVVKAASGALRNLAVDARNKELIGKHAIPNLVKNLPGGQQNSSWNFSEDTVISILNTINEVIAENLEAAKKLRETQGIEKLVLINKSGNRSEKEVRAAALVLQTIWGYKELRKPLEKEGWKKSDFQVNLNNASRSQSSHSYDDSTLPLIDRNQKSDKKPDREEIQMSNMGSNTKSLDNNYSTPNERGDHNRTLDRSGDLGDMEPLKGTTPLMQKI

SEQ ID NO: 40280 - protein, 933 aa, Homo sapiens; identical to SEQ ID NO: 40271

SEQ ID NO: 40281 - protein, 4 aa, Homo sapiens
MDDS

SEQ ID NO: 40282 - protein, 933 aa, Homo sapiens; identical to SEQ ID NO: 40271

SEQ ID NO: 40283 - protein, 616 aa, Homo sapiens
MIGEEVPSDQYYWAPLAQHERGSLASLDSLRKGGPPPPNWRQPELPEVIAMLGFRLDAVKSNAAAYLQHLCYRNDKVKTDVRKLKGIPVLVGLLDHPKKEVHLGACGALKNISFGRDQDNKIAIKNCDGVPALVRLLRKARDMDLTEVITGTLWNLSSHDSIKMEIVDHALHALTDEVIIPHSGWEREPNEDCKPRHIEWESVLTNTAGCLRNVSSERSEARRKLRECDGLVDALIFIVQAEIGQKDSDSKLVENCVCLLRNLSYQVHREIPQAERYQEAAPNVANNTGPHAASCFGAKKGKDEWFSRGKKPIEDPANDTVDFPKRTSPARGYELLFQPEVVRIYISLLKESKTPAILEASAGAIQNLCAGRWTYGRYIRSALRQEKALSAIADLLTNEHERVVKAASGALRNLAVDARNKELIGKHAIPNLVKNLPGGQQNSSWNFSEDTVISILNTINEVIAENLEAAKKLRETQGIEKLVLINKSGNRSEKEVRAAALVLQTIWGYKELRKPLEKEGWKKSDFQVNLNNASRSQSSHSYDDSTLPLIDRNQKSDKKPDREEIQMSNMGSNTKSLDNNYSTPNERGDHNRTLDRSGDLGDMEPLKGTTPLMQKI

SEQ ID NO: 40284 - protein, 908 aa, Homo sapiens
MANGTLTRRHQNGRFVGDADLERQKFSDLKLNGPQDHSHLLYSTIPRMQEPGQIVETYTEEDPEGAMSVVSVETSDDGTTRRTETTVKKVVKTVTTRTVQPVAMGPDGLPVDASSVSNNYIQTLGRDFRKNGNGGPGPYVGQAGTATLPRNFHYPPDGYSRHYEDGYPGGSDNYGSLSRVTRIEERYRPSMEGYRAPSRQDVYGPQPQVRVGGSSVDLHRFHPEPYGLEDDQRSMGYDDLDYGMMSDYGTARRTGTPSDPRRRLRSYEDMIGEEVPSDQYYWAPLAQHERGSLASLDSLRKGGPPPPNWRQPELPEVIAMLGFRLDAVKSNAAAYLQHLCYRNDKVKTDVRKLKGIPVLVGLLDHPKKEVHLGACGALKNISFGRDQDNKIAIKNCDGVPALVRLLRKARDMDLTEVITGTLWNLSSHDSIKMEIVDHALHALTDEVIIPHSGWEREPNEDCKPRHIEWESVLTNTAGCLRNVSSERSEARRKLRECDGLVDALIFIVQAEIGQKDSDSKLVENCVCLLRNLSYQVHREIPQAERYQEAAPNVANNTGPHAASCFGAKKGKGKKPIEDPANDTVDFPKRTSPARGYELLFQPEVVRIYISLLKESKTPAILEASAGAIQNLCAGRWTYGRYIRSALRQEKALSAIADLLTNEHERVVKAASGALRNLAVDARNKELIGKHAIPNLVKNLPGGQQNSSWNFSEDTVISILNTINEVIAENLEAAKKLRETQGIEKLVLINKSGNRSEKEVRAAALVLQTIWGYKELRKPLEKEGWKKSDFQVNLNNASRSQSSHSYDDSTLPLIDRNQKSDKKPDREEIQMSNMGSNTKSLDNNYSTPNERGDHNRTLDRSGDLGDMEPLKGTTPLMQDEGQESLEEELDVLVLDDEGGQVSYPSMQKI

SEQ ID NO: 40285 - protein, 610 aa, Homo sapiens
MIGEEVPSDQYYWAPLAQHERGSLASLDSLRKGGPPPPNWRQPELPEVIAMLGFRLDAVKSNAAAYLQHLCYRNDKVKTDVRKLKGIPVLVGLLDHPKKEVHLGACGALKNISFGRDQDNKIAIKNCDGVPALVRLLRKARDMDLTEVITGTLWNLSSHDSIKMEIVDHALHALTDEVIIPHSGWEREPNEDCKPRHIEWESVLTNTAGCLRNVSSERSEARRKLRECDGLVDALIFIVQAEIGQKDSDSKLVENCVCLLRNLSYQVHREIPQAERYQEAAPNVANNTGPHAASCFGAKKGKGKKPIEDPANDTVDFPKRTSPARGYELLFQPEVVRIYISLLKESKTPAILEASAGAIQNLCAGRWTYGRYIRSALRQEKALSAIADLLTNEHERVVKAASGALRNLAVDARNKELIGKHAIPNLVKNLPGGQQNSSWNFSEDTVISILNTINEVIAENLEAAKKLRETQGIEKLVLINKSGNRSEKEVRAAALVLQTIWGYKELRKPLEKEGWKKSDFQVNLNNASRSQSSHSYDDSTLPLIDRNQKSDKKPDREEIQMSNMGSNTKSLDNNYSTPNERGDHNRTLDRSGDLGDMEPLKGTTPLMQKI

SEQ ID NO: 40286 - protein, 645 aa, Homo sapiens
MIGEEVPSDQYYWAPLAQHERGSLASLDSLRKGGPPPPNWRQPELPEVIAMLGFRLDAVKSNAAAYLQHLCYRNDKVKTDVRKLKGIPVLVGLLDHPKKEVHLGACGALKNISFGRDQDNKIAIKNCDGVPALVRLLRKARDMDLTEVITGTLWNLSSHDSIKMEIVDHALHALTDEVIIPHSGWEREPNEDCKPRHIEWESVLTNTAGCLRNVSSERSEARRKLRECDGLVDALIFIVQAEIGQKDSDSKLVENCVCLLRNLSYQVHREIPQAERYQEAAPNVANNTGPHAASCFGAKKGKDEWFSRGKKPIEDPANDTVDFPKRTSPARGYELLFQPEVVRIYISLLKESKTPAILEASAGAIQNLCAGRWTYGRYIRSALRQEKALSAIADLLTNEHERVVKAASGALRNLAVDARNKELIGKHAIPNLVKNLPGGQQNSSWNFSEDTVISILNTINEVIAENLEAAKKLRETQGIEKLVLINKSGNRSEKEVRAAALVLQTIWGYKELRKPLEKEGWKKSDFQVNLNNASRSQSSHSYDDSTLPLIDRNQKSDKKPDREEIQMSNMGSNTKSLDNNYSTPNERGDHNRTLDRSGDLGDMEPLKGTTPLMQDEGQESLEEELDVLVLDDEGGQVSYPSMQKI

SEQ ID NO: 40287 - protein, 838 aa, Homo sapiens
MQEPGQIVETYTEEDPEGAMSVVSVETSDDGTTRRTETTVKKVVKTVTTRTVQPVAMGPDGLPVDASSVSNNYIQTLGRDFRKNGNGGPGPYVGQAGTATLPRNFHYPPDGYSRHYEDGYPGGSDNYGSLSRVTRIEERYRPSMEGYRAPSRQDVYGPQPQVRVGGSSVDLHRFHPEPYGLEDDQRSMGYDDLDYGMMSDYGTARRTGTPSDPRRRLRSYEDMIGEEVPSDQYYWAPLAQHERGSLASLDSLRKGGPPPPNWRQPELPEVIAMLGFRLDAVKSNAAAYLQHLCYRNDKVKTDVRKLKGIPVLVGLLDHPKKEVHLGACGALKNISFGRDQDNKIAIKNCDGVPALVRLLRKARDMDLTEVITGTLWNLSSHDSIKMEIVDHALHALTDEVIIPHSGWEREPNEDCKPRHIEWESVLTNTAGCLRNVSSERSEARRKLRECDGLVDALIFIVQAEIGQKDSDSKLVENCVCLLRNLSYQVHREIPQAERYQEAAPNVANNTGPHAASCFGAKKGKDEWFSRGKKPIEDPANDTVDFPKRTSPARGYELLFQPEVVRIYISLLKESKTPAILEASAGAIQNLCAGRWTYGRYIRSALRQEKALSAIADLLTNEHERVVKAASGALRNLAVDARNKELIGKHAIPNLVKNLPGGQQNSSWNFSEDTVISILNTINEVIAENLEAAKKLRETQGIEKLVLINKSGNRSEKEVRAAALVLQTIWGYKELRKPLEKEGWKKSDFQVNLNNASRSQSSHSYDDSTLPLIDRNQKSDKKPDREEIQMSNMGSNTKSLDNNYSTPNERGDHNRTLDRSGDLGDMEPLKGTTPLMQKI

SEQ ID NO: 40288 - protein, 879 aa, Homo sapiens
MANGTLTRRHQNGRFVGDADLERQKFSDLKLNGPQDHSHLLYSTIPRMQEPGQIVETYTEEDPEGAMSVVSVETSDDGTTRRTETTVKKVVKTVTTRTVQPVAMGPDGLPVDASSVSNNYIQTLGRDFRKNGNGGPGPYVGQAGTATLPRNFHYPPDGYSRHYEDGYPGGSDNYGSLSRVTRIEERYRPSMEGYRAPSRQDVYGPQPQVRVGGSSVDLHRFHPEPYGLEDDQRSMGYDDLDYGMMSDYGTARRTGTPSDPRRRLRSYEDMIGEEVPSDQYYWAPLAQHERGSLASLDSLRKGGPPPPNWRQPELPEVIAMLGFRLDAVKSNAAAYLQHLCYRNDKVKTDVRKLKGIPVLVGLLDHPKKEVHLGACGALKNISFGRDQDNKIAIKNCDGVPALVRLLRKARDMDLTEVITGTLWNLSSHDSIKMEIVDHALHALTDEVIIPHSGWEREPNEDCKPRHIEWESVLTNTAGCLRNVSSERSEARRKLRECDGLVDALIFIVQAEIGQKDSDSKLVENCVCLLRNLSYQVHREIPQAERYQEAAPNVANNTGPHAASCFGAKKGKGKKPIEDPANDTVDFPKRTSPARGYELLFQPEVVRIYISLLKESKTPAILEASAGAIQNLCAGRWTYGRYIRSALRQEKALSAIADLLTNEHERVVKAASGALRNLAVDARNKELIGKHAIPNLVKNLPGGQQNSSWNFSEDTVISILNTINEVIAENLEAAKKLRETQGIEKLVLINKSGNRSEKEVRAAALVLQTIWGYKELRKPLEKEGWKKSDFQVNLNNASRSQSSHSYDDSTLPLIDRNQKSDKKPDREEIQMSNMGSNTKSLDNNYSTPNERGDHNRTLDRSGDLGDMEPLKGTTPLMQKI

SEQ ID NO: 40289 - protein, 879 aa, Homo sapiens; identical to SEQ ID NO: 40288

SEQ ID NO: 40290 - protein, 832 aa, Homo sapiens; identical to SEQ ID NO: 40279

SEQ ID NO: 40291 - protein, 129 aa, Homo sapiens
MANGTLTRRHQNGRFVGDADLERQKFSDLKLNGPQDHSHLLYSTIPRMQEPGQIVETYTEEDPEGAMSVVSVETSDDGTTRRTETTVKKVVKTVTTRTVQPVAMGPDGLPVDASSVSNNYIQTLGRDFR

SEQ ID NO: 40292 - protein, 861 aa, Homo sapiens
MQEPGQIVETYTEEDPEGAMSVVSVETSDDGTTRRTETTVKKVVKTVTTRTVQPVAMGPDGLPVDASSVSNNYIQTLGRDFRKNGNGGPGPYVGQAGTATLPRNFHYPPDGYSRHYEDGYPGGSDNYGSLSRVTRIEERYRPSMEGYRAPSRQDVYGPQPQVRVGGSSVDLHRFHPEPYGLEDDQRSMGYDDLDYGMMSDYGTARRTGTPSDPRRRLRSYEDMIGEEVPSDQYYWAPLAQHERGSLASLDSLRKGGPPPPNWRQPELPEVIAMLGFRLDAVKSNAAAYLQHLCYRNDKVKTDVRKLKGIPVLVGLLDHPKKEVHLGACGALKNISFGRDQDNKIAIKNCDGVPALVRLLRKARDMDLTEVITGTLWNLSSHDSIKMEIVDHALHALTDEVIIPHSGWEREPNEDCKPRHIEWESVLTNTAGCLRNVSSERSEARRKLRECDGLVDALIFIVQAEIGQKDSDSKLVENCVCLLRNLSYQVHREIPQAERYQEAAPNVANNTGPHAASCFGAKKGKGKKPIEDPANDTVDFPKRTSPARGYELLFQPEVVRIYISLLKESKTPAILEASAGAIQNLCAGRWTYGRYIRSALRQEKALSAIADLLTNEHERVVKAASGALRNLAVDARNKELIGKHAIPNLVKNLPGGQQNSSWNFSEDTVISILNTINEVIAENLEAAKKLRETQGIEKLVLINKSGNRSEKEVRAAALVLQTIWGYKELRKPLEKEGWKKSDFQVNLNNASRSQSSHSYDDSTLPLIDRNQKSDKKPDREEIQMSNMGSNTKSLDNNYSTPNERGDHNRTLDRSGDLGDMEPLKGTTPLMQDEGQESLEEELDVLVLDDEGGQVSYPSMQKI

SEQ ID NO: 40293 - protein, 885 aa, Homo sapiens
MANGTLTRRHQNGRFVGDADLERQKFSDLKLNGPQDHSHLLYSTIPRMQEPGQIVETYTEEDPEGAMSVVSVETSDDGTTRRTETTVKKVVKTVTTRTVQPVAMGPDGLPVDASSVSNNYIQTLGRDFRKNGNGGPGPYVGQAGTATLPRNFHYPPDGYSRHYEDGYPGGSDNYGSLSRVTRIEERYRPSMEGYRAPSRQDVYGPQPQVRVGGSSVDLHRFHPEPYGLEDDQRSMGYDDLDYGMMSDYGTARRTGTPSDPRRRLRSYEDMIGEEVPSDQYYWAPLAQHERGSLASLDSLRKGGPPPPNWRQPELPEVIAMLGFRLDAVKSNAAAYLQHLCYRNDKVKTDVRKLKGIPVLVGLLDHPKKEVHLGACGALKNISFGRDQDNKIAIKNCDGVPALVRLLRKARDMDLTEVITGTLWNLSSHDSIKMEIVDHALHALTDEVIIPHSGWEREPNEDCKPRHIEWESVLTNTAGCLRNVSSERSEARRKLRECDGLVDALIFIVQAEIGQKDSDSKLVENCVCLLRNLSYQVHREIPQAERYQEAAPNVANNTGPHAASCFGAKKGKDEWFSRGKKPIEDPANDTVDFPKRTSPARGYELLFQPEVVRIYISLLKESKTPAILEASAGAIQNLCAGRWTYGRYIRSALRQEKALSAIADLLTNEHERVVKAASGALRNLAVDARNKELIGKHAIPNLVKNLPGGQQNSSWNFSEDTVISILNTINEVIAENLEAAKKLRETQGIEKLVLINKSGNRSEKEVRAAALVLQTIWGYKELRKPLEKEGWKKSDFQVNLNNASRSQSSHSYDDSTLPLIDRNQKSDKKPDREEIQMSNMGSNTKSLDNNYSTPNERGDHNRTLDRSGDLGDMEPLKGTTPLMQKI

SEQ ID NO: 40294 - protein, 639 aa, Homo sapiens
MIGEEVPSDQYYWAPLAQHERGSLASLDSLRKGGPPPPNWRQPELPEVIAMLGFRLDAVKSNAAAYLQHLCYRNDKVKTDVRKLKGIPVLVGLLDHPKKEVHLGACGALKNISFGRDQDNKIAIKNCDGVPALVRLLRKARDMDLTEVITGTLWNLSSHDSIKMEIVDHALHALTDEVIIPHSGWEREPNEDCKPRHIEWESVLTNTAGCLRNVSSERSEARRKLRECDGLVDALIFIVQAEIGQKDSDSKLVENCVCLLRNLSYQVHREIPQAERYQEAAPNVANNTGPHAASCFGAKKGKGKKPIEDPANDTVDFPKRTSPARGYELLFQPEVVRIYISLLKESKTPAILEASAGAIQNLCAGRWTYGRYIRSALRQEKALSAIADLLTNEHERVVKAASGALRNLAVDARNKELIGKHAIPNLVKNLPGGQQNSSWNFSEDTVISILNTINEVIAENLEAAKKLRETQGIEKLVLINKSGNRSEKEVRAAALVLQTIWGYKELRKPLEKEGWKKSDFQVNLNNASRSQSSHSYDDSTLPLIDRNQKSDKKPDREEIQMSNMGSNTKSLDNNYSTPNERGDHNRTLDRSGDLGDMEPLKGTTPLMQDEGQESLEEELDVLVLDDEGGQVSYPSMQKI

SEQ ID NO: 40295 - protein, 832 aa, Homo sapiens; identical to SEQ ID NO: 40279

SEQ ID NO: 40296 - protein, 832 aa, Homo sapiens; identical to SEQ ID NO: 40279

SEQ ID NO: 40297 - protein, 879 aa, Homo sapiens; identical to SEQ ID NO: 40288

SEQ ID NO: 40298 - protein, 840 aa, Homo sapiens
MQEPGQIVETYTEEDPEGAMSVVSVETSDDGTTRRTETTVKKVVKTVTTRTVQPVAMGPDGLPVDASSVSNNYIQTLGRDFRKNGNGGPGPYVGQAGTATLPRNFHYPPDGYSRHYEDGYPGGSDNYGSLSRVTRIEERYRPSMEGYRAPSRQDVYGPQPQVRVGGSSVDLHRFHPEPYGLEDDQRSMGYDDLDYGMMSDYGTARRTGTPSDPRRRLRSYEDMIGEEVPSDQYYWAPLAQHERGSLASLDSLRKGGPPPPNWRQPELPEVIAMLGFRLDAVKSNAAAYLQHLCYRNDKVKTDVRKLKGIPVLVGLLDHPKKEVHLGACGALKNISFGRDQDNKIAIKNCDGVPALVRLLRKARDMDLTEVITGTLWNLSSHDSIKMEIVDHALHALTDEVIIPHSGWEREPNEDCKPRHIEWESVLTNTAGCLRNVSSERSEARRKLRECDGLVDALIFIVQAEIGQKDSDSKLVENCVCLLRNLSYQVHREIPQAERYQEAAPNVANNTGPHAASCFGAKKGKGKKPIEDPANDTVDFPKRTSPARGYELLFQPEVVRIYISLLKESKTPAILEASAGAIQNLCAGRWTYGRYIRSALRQEKALSAIADLLTNEHERVVKAASGALRNLAVDARNKELIGKHAIPNLVKNLPGGQQNSSWNFSEDTVISILNTINEVIAENLEAAKKLRETQGIEKLVLINKSGNRSEKEVRAAALVLQTIWGYKELRKPLEKEGWKKSDFQVNLNNASRSQSSHSYDDSTLPLIDRNQKSDNNYSTPNERGDHNRTLDRSGDLGDMEPLKGTTPLMQDEGQESLEEELDVLVLDDEGGQVSYPSMQKI

SEQ ID NO: 40299 - protein, 914 aa, Homo sapiens
MANGTLTRRHQNGRFVGDADLERQKFSDLKLNGPQDHSHLLYSTIPRMQEPGQIVETYTEEDPEGAMSVVSVETSDDGTTRRTETTVKKVVKTVTTRTVQPVAMGPDGLPVDASSVSNNYIQTLGRDFRKNGNGGPGPYVGQAGTATLPRNFHYPPDGYSRHYEDGYPGGSDNYGSLSRVTRIEERYRPSMEGYRAPSRQDVYGPQPQVRVGGSSVDLHRFHPEPYGLEDDQRSMGYDDLDYGMMSDYGTARRTGTPSDPRRRLRSYEDMIGEEVPSDQYYWAPLAQHERGSLASLDSLRKGGPPPPNWRQPELPEVIAMLGFRLDAVKSNAAAYLQHLCYRNDKVKTDVRKLKGIPVLVGLLDHPKKEVHLGACGALKNISFGRDQDNKIAIKNCDGVPALVRLLRKARDMDLTEVITGTLWNLSSHDSIKMEIVDHALHALTDEVIIPHSGWEREPNEDCKPRHIEWESVLTNTAGCLRNVSSERSEARRKLRECDGLVDALIFIVQAEIGQKDSDSKLVENCVCLLRNLSYQVHREIPQAERYQEAAPNVANNTGPHAASCFGAKKGKDEWFSRGKKPIEDPANDTVDFPKRTSPARGYELLFQPEVVRIYISLLKESKTPAILEASAGAIQNLCAGRWTYGRYIRSALRQEKALSAIADLLTNEHERVVKAASGALRNLAVDARNKELIGKHAIPNLVKNLPGGQQNSSWNFSEDTVISILNTINEVIAENLEAAKKLRETQGIEKLVLINKSGNRSEKEVRAAALVLQTIWGYKELRKPLEKEGWKKSDFQVNLNNASRSQSSHSYDDSTLPLIDRNQKSDKKPDREEIQMSNMGSNTKSLDNNYSTPNERGDHNRTLDRSGDLGDMEPLKGTTPLMQDEGQESLEEELDVLVLDDEGGQVSYPSMQKI

SEQ ID NO: 40300 - protein, 126 aa, Homo sapiens
MIGEEVPSDQYYWAPLAQHERGSLASLDSLRKGGPPPPNWRQPELPEVIAMLGFRLDAVKSNAAAYLQHLCYRNDKVKTDVRKLKGIPVLVGLLDHPKKEVHLGACGALKNISFGRDQDNKIAIKN

SEQ ID NO: 40301 - protein, 879 aa, Homo sapiens; identical to SEQ ID NO: 40288

SEQ ID NO: 40302 - protein, 1225 aa, Homo sapiens
MFARKPPGAAPLGAMPVPDQPSSASEKTSSLSPGLNTSNGDGSETETTSAILASVKEQELQFERLTRELEAERQIVASQLERCKLGSETGSMSSMSSAEEQFQWQSQDGQKDIEDELTTGLELVDSCIRSLQESGILDPQDYSTGERPSLLSQSALQLNSKPEGSFQYPASYHSNQTLALGETTPSQLPARGTQARATGQSFSQGTTSRAGHLAGPEPAPPPPPPPREPFAPSLGSAFHLPDAPPAAAAAALYYSSSTLPAPPRGGSPLAAPQGGSPTKLQRGGSAPEGATYAAPRGSSPKQSPSRLAKSYSTSSPINIVVSSAGLSPIRVTSPPTVQSTISSSPIHQLSSTIGTYATLSPTKRLVHASEQYSKHSQELYATATLQRPGSLAAGSRASYSSQHGHLGPELRALQSPEHHIDPIYEDRVYQKPPMRSLSQSQGDPLPPAHTGTYRTSTAPSSPGVDSVPLQRTGSQHGPQNAAAATFQRASYAAGPASNYADPYRQLQYCPSVESPYSKSGPALPPEGTLARSPSIDSIQKDPREFGWRDPELPEVIQMLQHQFPSVQSNAAAYLQHLCFGDNKIKAEIRRQGGIQLLVDLLDHRMTEVHRSACGALRNLVYGKANDDNKIALKNCGGIPALVRLLRKTTDLEIRELVTGVLWNLSSCDALKMPIIQDALAVLTNAVIIPHSGWENSPLQDDRKIQLHSSQVLRNATGCLRNVSSAGEEARRRMRECDGLTDALLYVIQSALGSSEIDSKTVENCVCILRNLSYRLAAETSQGQHMGTDELDGLLCGEANGKDAESSGCWGKKKKKKKSQDQWDGVGPLPDCAEPPKGIQMLWHPSIVKPYLTLLSECSNPDTLEGAAGALQNLAAGSWKWSVYIRAAVRKEKGLPILVELLRIDNDRVVCAVATALRNMALDVRNKELIGKYAMRDLVHRLPGGNNSNNTASKAMSDDTVTAVCCTLHEVITKNMENAKALRDAGGIEKLVGISKSKGDKHSPKVVKAASQVLNSMWQYRDLRSLYKKDGWSQYHFVASSSTIERDRQRPYSSSRTPSISPVRVSPNNRSASAPASPREMISLKERKTDYECTGSNATYHGAKGEHTSRKDAMTAQNTGISTLYRNSYGAPAEDIKHNQVSAQPVPQEPSRKDYETYQPFQNSTRNYDESFFEDQVHHRPPASEYTMHLGLKSTGNYVDFYSAARPYSELNYETSHYPASPDSWV

SEQ ID NO: 40303 - protein, 1167 aa, Homo sapiens
MFARKPPGAAPLGAMPVPDQPSSASEKTSSLSPGLNTSNGDGSETETTSAILASVKEQELQFERLTRELEAERQIVASQLERCKLGSETGSMSSMSSAEEQFQWQSQDGQKDIEDELTTGLELVDSCIRSLQESGILDPQDYSTGERPSLLSQSALQLNSKPEGSFQYPASYHSNQTLALGETTPSQLPARGTQARATGQSFSQGTTSRAGHLAGPEPAPPPPPPPREPFAPSLGSAFHLPDAPPAAAAAALYYSSSTLPAPPRGGSPLAAPQGGSPTKLQRGGSAPEGATYAAPRGSSPKQSPSRLAKSYSTSSPINIVVSSAGLSPIRVTSPPTVQSTISSSPIHQLSSTIGTYATLSPTKRLVHASEQYSKHSQELYATATLQRPGSLAAGSRASYSSQHGHLGPELRALQSPEHHIDPIYEDRVYQKPPMRSLSQSQGDPLPPAHTGTYRTSTAPSSPGVDSVPLQRTGSQHGPQNAAAATFQRASYAAGPASNYADPYRQLQYCPSVESPYSKSGPALPPEGTLARSPSIDSIQKDPREFGWRDPELPEVIQMLQHQFPSVQSNAAAYLQHLCFGDNKIKAEIRRQGGIQLLVDLLDHRMTEVHRSACGALRNLVYGKANDDNKIALKNCGGIPALVRLLRKTTDLEIRELVTGVLWNLSSCDALKMPIIQDALAVLTNAVIIPHSGWENSPLQDDRKIQLHSSQVLRNATGCLRNVSSAGEEARRRMRECDGLTDALLYVIQSALGSSEIDSKTVENCVCILRNLSYRLAAETSQGQHMGTDELDGLLCGEANGKDAESSGCWGKKKKKKKSQDQWSVYIRAAVRKEKGLPILVELLRIDNDRVVCAVATALRNMALDVRNKELIGKYAMRDLVHRLPGGNNSNNTASKAMSDDTVTAVCCTLHEVITKNMENAKALRDAGGIEKLVGISKSKGDKHSPKVVKAASQVLNSMWQYRDLRSLYKKDGWSQYHFVASSSTIERDRQRPYSSSRTPSISPVRVSPNNRSASAPASPREMISLKERKTDYECTGSNATYHGAKGEHTSRKDAMTAQNTGISTLYRNSYGAPAEDIKHNQVSAQPVPQEPSRKDYETYQPFQNSTRNYDESFFEDQVHHRPPASEYTMHLGLKSTGNYVDFYSAARPYSELNYETSHYPASPDSWV

SEQ ID NO: 40304 - protein, 792 aa, Homo sapiens
MRSLSQSQGDPLPPAHTGTYRTSTAPSSPGVDSVPLQRTGSQHGPQNAAAATFQRASYAAGPASNYADPYRQLQYCPSVESPYSKSGPALPPEGTLARSPSIDSIQKDPREFGWRDPELPEVIQMLQHQFPSVQSNAAAYLQHLCFGDNKIKAEIRRQGGIQLLVDLLDHRMTEVHRSACGALRNLVYGKANDDNKIALKNCGGIPALVRLLRKTTDLEIRELVTGVLWNLSSCDALKMPIIQDALAVLTNAVIIPHSGWENSPLQDDRKIQLHSSQVLRNATGCLRNVSSAGEEARRRMRECDGLTDALLYVIQSALGSSEIDSKTVENCVCILRNLSYRLAAETSQGQHMGTDELDGLLCGEANGKDAESSGCWGKKKKKKKSQDQWDGVGPLPDCAEPPKGIQMLWHPSIVKPYLTLLSECSNPDTLEGAAGALQNLAAGSWKWSVYIRAAVRKEKGLPILVELLRIDNDRVVCAVATALRNMALDVRNKELIGKYAMRDLVHRLPGGNNSNNTASKAMSDDTVTAVCCTLHEVITKNMENAKALRDAGGIEKLVGISKSKGDKHSPKVVKAASQVLNSMWQYRDLRSLYKKDGWSQYHFVASSSTIERDRQRPYSSSRTPSISPVRVSPNNRSASAPASPREMISLKERKTDYECTGSNATYHGAKGEHTSRKDAMTAQNTGISTLYRNSYGAPAEDIKHNQVSAQPVPQEPSRKDYETYQPFQNSTRNYDESFFEDQVHHRPPASEYTMHLGLKSTGNYVDFYSAARPYSELNYETSHYPASPDSWV

SEQ ID NO: 40305 - protein, 888 aa, Homo sapiens
MSSMSSAEEQFQWQSQDGQKDIEDELTTGLELVDSCIRSLQESGILDPQDYSTGETGSRASYSSQHGHLGPELRALQSPEHHIDPIYEDRVYQKPPMRSLSQSQGDPLPPAHTGTYRTSTAPSSPGVDSVPLQRTGSQHGPQNAAAATFQRASYAAGPASNYADPYRQLQYCPSVESPYSKSGPALPPEGTLARSPSIDSIQKDPREFGWRDPELPEVIQMLQHQFPSVQSNAAAYLQHLCFGDNKIKAEIRRQGGIQLLVDLLDHRMTEVHRSACGALRNLVYGKANDDNKIALKNCGGIPALVRLLRKTTDLEIRELVTGVLWNLSSCDALKMPIIQDALAVLTNAVIIPHSGWENSPLQDDRKIQLHSSQVLRNATGCLRNVSSAGEEARRRMRECDGLTDALLYVIQSALGSSEIDSKTVENCVCILRNLSYRLAAETSQGQHMGTDELDGLLCGEANGKDAESSGCWGKKKKKKKSQDQWDGVGPLPDCAEPPKGIQMLWHPSIVKPYLTLLSECSNPDTLEGAAGALQNLAAGSWKWSVYIRAAVRKEKGLPILVELLRIDNDRVVCAVATALRNMALDVRNKELIGKYAMRDLVHRLPGGNNSNNTASKAMSDDTVTAVCCTLHEVITKNMENAKALRDAGGIEKLVGISKSKGDKHSPKVVKAASQVLNSMWQYRDLRSLYKKDGWSQYHFVASSSTIERDRQRPYSSSRTPSISPVRVSPNNRSASAPASPREMISLKERKTDYECTGSNATYHGAKGEHTSRKDAMTAQNTGISTLYRNSYGAPAEDIKHNQVSAQPVPQEPSRKDYETYQPFQNSTRNYDESFFEDQVHHRPPASEYTMHLGLKSTGNYVDFYSAARPYSELNYETSHYPASPDSWV

SEQ ID NO: 40306 - protein, 181 aa, Homo sapiens
MSSMSSAEEQFQWQSQDGQKDIEDELTTGLELVDSCIRSLQESGILDPQDYSTGERPSLLSQSALQLNSKPEGSFQYPASYHSNQTLALGETTPSQLPARGTQARATGQSFSQGTTSRAGHLAGPEPAPPPPPPPREPFAPSLGSAFHLPDAPPAAAAAALYYSSSTLPAPPRGGSPLAAP

SEQ ID NO: 40307 - protein, 320 aa, Homo sapiens [sequence omitted]

SEQ ID NO: 40308 - protein, 81 aa, Homo sapiens
MNREGAPGKSPEEMYIQQKVRVLLMLRKMGSNLTASEEEFLRTYAGVVNSQLSQLPPHSIDQGAEDVVMAFSRSETEDRRQ

SEQ ID NO: 40309 - protein, 81 aa, Homo sapiens; identical to SEQ ID NO: 40308

SEQ ID NO: 40310 - protein, 81 aa, Homo sapiens; identical to SEQ ID NO: 40308

SEQ ID NO: 40311 - protein, 81 aa, Homo sapiens; identical to SEQ ID NO: 40308

SEQ ID NO: 40312 - protein, 81 aa, Homo sapiens; identical to SEQ ID NO: 40308

SEQ ID NO: 40313 - protein, 563 aa, Homo sapiens
MDVGELLSYQPNRGTKRPRDDEEEEQKMRRKQTGTRERGRYREEEMTVVEEADDDKKRLLQIIDRDGEEEEEEEEPLDESSVKKMILTFEKRSYKNQELRIKFPDNPEKFMESELDLNDIIQEMHVVATMPDLYHLLVELNAVQSLLGLLGHDNTDVSIAVVDLLQELTDIDTLHESEEGAEVLIDALVDGQVVALLVQNLERLDESVKEEADGVHNTLAIVENMAEFRPEMCTEGAQQGLLQWLLKRLKAKMPFDANKLYCSEVLAILLQDNDENRELLGELDGIDVLLQQLSVFKRHNPSTAEEQEMMENLFDSLCSCLMLSSNRERFLKGEGLQLMNLMLREKKISRSSALKVLDHAMIGPEGTDNCHKFVDILGLRTIFPLFMKSPRKIKKVGTTEKEHEEHVCSILASLLRNLRGQQRTRLLNKFTENDSEKVDRLMELHFKYLGAMQVADKKIEGEKHDMVRRGEIIDNDTEEEFYLRRLDAGLFVLQHICYIMAEICNANVPQIRQRVHQILNMRGSSIKIVRHIIKEYAENIGDGRSPEFRENEQKRILGLLENF

SEQ ID NO: 40314 - protein, 536 aa, Homo sapiens
MRRKQTGTRERGRYREEEMTVVEEADDDKKRLLQIIDRDGEEEEEEEEPLDESSVKKMILTFEKRSYKNQELRIKFPDNPEKFMESELDLNDIIQEMHVVATMPDLYHLLVELNAVQSLLGLLGHDNTDVSIAVVDLLQELTDIDTLHESEEGAEVLIDALVDGQVVALLVQNLERLDESVKEEADGVHNTLAIVENMAEFRPEMCTEGAQQGLLQWLLKRLKAKMPFDANKLYCSEVLAILLQDNDENRELLGELDGIDVLLQQLSVFKRHNPSTAEEQEMMENLFDSLCSCLMLSSNRERFLKGEGLQLMNLMLREKKISRSSALKVLDHAMIGPEGTDNCHKFVDILGLRTIFPLFMKSPRKIKKVGTTEKEHEEHVCSILASLLRNLRGQQRTRLLNKFTENDSEKVDRLMELHFKYLGAMQVADKKIEGEKHDMVRRGEIIDNDTEEEFYLRRLDAGLFVLQHICYIMAEICNANVPQIRQRVHQILNMRGSSIKIVRHIIKEYAENIGDGRSPEFRENEQKRILGLLENF

SEQ ID NO: 40315 - protein, 166 aa, Homo sapiens
MRRKQTGTRERGRYREEEMTVVEEADDDKKRLLQIIDRDGEEEEEEEEPLDESSVKKMILTFEKRSYKNQELRIKFPDNPEKFMESELDLNDIIQEMHVVATMPDLYHLLVELNAVQSLLGLLGHDNTDVSIAVVDLLQELTDIDTLHESEEGAEVLIDALVDGQV

SEQ ID NO: 40316 - protein, 480 aa, Homo sapiens
MIRAAPPPLFLLLLLLLLLVSWASRGEAAPDQDEIQRLPGLAKQPSFRQYSGYLKGSGSKHLHYWFVESQKDPENSPVVLWLNGGPGCSSLDGLLTEHGPFLVQPDGVTLEYNPYSWNLIANVLYLESPAGVGFSYSDDKFYATNDTEVAQSNFEALQDFFRLFPEYKNNKLFLTGESYAGIYIPTLAVLVMQDPSMNLQGLAVGNGLSSYEQNDNSLVYFAYYHGLLGNRLWSSLQTHCCSQNKCNFYDNKDLECVTNLQEVARIVGNSGLNIYNLYAPCAGGVPSHFRYEKDTVVVQDLGNIFTRLPLKRMWHQALLRSGDKVRMDPPCTNTTAASTYLNNPYVRKALNIPEQLPQWDMCNFLVNLQYRRLYRSMNSQYLKLLSSQKYQILLYNGDVDMACNFMGDEWFVDSLNQKMEVQRRPWLVKYGDSGEQIAGFVKEFSHIAFLTIKGAGHMVPTDKPLAAFTMFSRFLNKQPY

SEQ ID NO: 40317 - protein, 481 aa, Homo sapiens
MTSSPRAPPGEQGRGGAEMIRAAPPPLFLLLLLLLLLVSWASRGEAAPDQDEIQRLPGLAKQPSFRQYSGYLKGSGSKHLHYWFVESQKDPENSPVVLWLNGGPGCSSLDGLLTEHGPFLIANVLYLESPAGVGFSYSDDKFYATNDTEVAQSNFEALQDFFRLFPEYKNNKLFLTGESYAGIYIPTLAVLVMQDPSMNLQGLAVGNGLSSYEQNDNSLVYFAYYHGLLGNRLWSSLQTHCCSQNKCNFYDNKDLECVTNLQEVARIVGNSGLNIYNLYAPCAGGVPSHFRYEKDTVVVQDLGNIFTRLPLKRMWHQALLRSGDKVRMDPPCTNTTAASTYLNNPYVRKALNIPEQLPQWDMCNFLVNLQYRRLYRSMNSQYLKLLSSQKYQILLYNGDVDMACNFMGDEWFVDSLNQKMEVQRRPWLVKYGDSGEQIAGFVKEFSHIAFLTIKGAGHMVPTDKPLAAFTMFSRFLNKQPY

SEQ ID NO: 40318 - protein, 289 aa, Homo sapiens
MIRAAPPPLFLLLLLLLLLVSWASRGEAAPDQDEIQRLPGLAKQPSFRQYSGYLKGSGSKHLHYWFVESQKDPENSPVVLWLNGGPGCSSLDGLLTEHGPFLVQPDGVTLEYNPYSWNLIANVLYLESPAGVGFSYSDDKFYATNDTEVAQSNFEALQDFFRLFPEYKNNKLFLTGESYAGIYIPTLAVLVMQDPSMNLQGLAVGNGLSSYEQNDNSLVYFAYYHGLLGNRLWSSLQTHCCSQNKCNFYDNKDLECVTNLQEVARIVGNSGLNIYNLYAPCAGGVPSHF

SEQ ID NO: 40319 - protein, 498 aa, Homo sapiens
MTSSPRAPPGEQGRGGAEMIRAAPPPLFLLLLLLLLLVSWASRGEAAPDQDEIQRLPGLAKQPSFRQYSGYLKGSGSKHLHYWFVESQKDPENSPVVLWLNGGPGCSSLDGLLTEHGPFLVQPDGVTLEYNPYSWNLIANVLYLESPAGVGFSYSDDKFYATNDTEVAQSNFEALQDFFRLFPEYKNNKLFLTGESYAGIYIPTLAVLVMQDPSMNLQGLAVGNGLSSYEQNDNSLVYFAYYHGLLGNRLWSSLQTHCCSQNKCNFYDNKDLECVTNLQEVARIVGNSGLNIYNLYAPCAGGVPSHFRYEKDTVVVQDLGNIFTRLPLKRMWHQALLRSGDKVRMDPPCTNTTAASTYLNNPYVRKALNIPEQLPQWDMCNFLVNLQYRRLYRSMNSQYLKLLSSQKYQILLYNGDVDMACNFMGDEWFVDSLNQKMEVQRRPWLVKYGDSGEQIAGFVKEFSHIAFLTIKGAGHMVPTDKPLAAFTMFSRFLNKQPY

SEQ ID NO: 40320 - protein, 345 aa, Homo sapiens
MIRAAPPPLFLLLLLLLLLVSWASRGEAAPDQDEIQRLPGLAKQPSFRQYSGYLKGSGSKHLHYWFVESQKDPENSPVVLWLNGGPGCSSLDGLLTEHGPFLIANVLYLESPAGVGFSYSDDKFYATNDTEVAQSNFEALQDFFRLFPEYKNNKLFLTGESYAGIYIPTLAVLVMQDPSMNLQGLAVGNGLSSYEQNDNSLVYFAYYHGLLGNRLWSSLQTHCCSQNKCNFYDNKDLECVTNLQEVARIVGNSGLNIYNLYAPCAGGVPSHFRYEKDTVVVQDLGNIFTRLPLKRMWHQALLRSGDKVRMDPPCTNTTAASTYLNNPYVRKALNIPEQLPQWDMC

SEQ ID NO: 40321 - protein, 463 aa, Homo sapiens
MGAGPSLLLAALLLLLSGDGAVRCDTPANCTYLDLLGTWVFQVGSSGSQRDVNCSVMGPQEKKVVVYLQKLDTAYDDLGNSGHFTIIYNQGFEIVLNDYKWFAFFKYKEEGSKVTTYCNETMTGWVHDVLGRNWACFTGKKVGTASENVYVNIAHLKNSQEKYSNRLYKYDHNFVKAINAIQKSWTATTYMEYETLTLGDMIRRSGGHSRKIPRPKPAPLTAEIQQKILHLPTSWDWRNVHGINFVSPVRNQASCGSCYSFASMGMLEARIRILTNNSQTPILSPQEVVSCSQYAQGCEGGFPYLIAGKYAQDFGLVEEACFPYTGTDSPCKMKEDCFRYYSSEYHYVGGFYGGCNEALMKLELVHHGPMAVAFEVYDDFLHYKKGIYHHTGLRDPFNPFELTNHAVLLVGYGTDSASGMDYWIVKNSWGTGWGENGYFRIRRGTDECAIESIAVAATPIPKL

SEQ ID NO: 40322 - protein, 446 aa, Homo sapiens
MGAGPSCDTPANCTYLDLLGTWVFQVGSSGSQRDVNCSVMGPQEKKVVVYLQKLDTAYDDLGNSGHFTIIYNQGFEIVLNDYKWFAFFKYKEEGSKVTTYCNETMTGWVHDVLGRNWACFTGKKVGTASENVYVNIAHLKNSQEKYSNRLYKYDHNFVKAINAIQKSWTATTYMEYETLTLGDMIRRSGGHSRKIPRPKPAPLTAEIQQKILHLPTSWDWRNVHGINFVSPVRNQASCGSCYSFASMGMLEARIRILTNNSQTPILSPQEVVSCSQYAQGCEGGFPYLIAGKYAQDFGLVEEACFPYTGTDSPCKMKEDCFRYYSSEYHYVGGFYGGCNEALMKLELVHHGPMAVAFEVYDDFLHYKKGIYHHTGLRDPFNPFELTNHAVLLVGYGTDSASGMDYWIVKNSWGTGWGENGYFRIRRGTDECAIESIAVAATPIPKL

SEQ ID NO: 40323 - protein, 137 aa, Homo sapiens
MGAGPSLLLAALLLLLSGDGAVRCDTPANCTYLDLLGTWVFQVGSSGSQRDVNCSVMGPQEKKVVVYLQKLDTAYDDLGNSGHFTIIYNQGFEIVLNDYKWFAFFKDVTDFISHLFMQLGTVGIYDLPHLRNKLVIK

SEQ ID NO: 40324 - protein, 141 aa, Homo sapiens
MGAGPSLLLAALLLLLSGDGAVRCDTPANCTYLDLLGTWVFQVGSSGSQRDVNCSVMGPQEKKVVVYLQKLDTAYDDLGNSGHFTIIYNQGFEIVLNDYKWFAFFKDVTDFISHLFMQLGTVGIYDLPHLRNKLAMNRRWG

SEQ ID NO: 40325 - protein, 396 aa, Homo sapiens
MKTLLLLLLVLLELGEAQGSLHRVPLRRHPSLKKKLRARSQLSEFWKSHNLDMIQFTESCSMDQSAKEPLINYLDMEYFGTISIGSPPQNFTVIFDTGSSNLWVPSVYCTSPACKTHSRFQPSQSSTYSQPGQSFSIQYGTGSLSGIIGADQVSVEGLTVVGQQFGESVTEPGQTFVDAEFDGILGLGYPSLAVGGVTPVFDNMMAQNLVDLPMFSVYMSSNPEGGAGSELIFGGYDHSHFSGSLNWVPVTKQAYWQIALDNIQVGGTVMFCSEGCQAIVDTGTSLITGPSDKIKQLQNAIGAAPVDGEYAVECANLNVMPDVTFTINGVPYTLSPTAYTLLDFVDGMQFCSSGFQGLDIHPPAGPLWILGDVFIRQFYSVFDRGNNRVGLAPAVP

SEQ ID NO: 40326 - protein, 363 aa, Homo sapiens
MKTLLLLLLVLLELGEAQGSLHRVPLRRHPSLKKKLRARSQLSEFWKSHNLDMIQFTESCSMDQSAKEPLINYLDMEYFGTISIGSPPQNFTVIFDTGSSNLWVPSVYCTSPACKTHSRFQPSQSSTYSQPGQSFSIQYGTGSLSGIIGADQVSVEGLTVVGQQFGESVTEPGQTFVDAEFDGILGLGYPSLAVGGVTPVFDNMMAQNLVDLPMFSVYMSSNPEGGAGSELIFGGYDHSHFSGSLNWVPVTKQAYWQIALDNMLWSVPTLTSCRMSPSPLTESPIPSAQLPTPYWTSWMECSSAAVAFKDLTSTLQLGPSGSWGMSSFDSFTQSLTVGITVWDWPQQSPKEGPCVCACLSDRP

SEQ ID NO: 40327 - protein, 401 aa, Homo sapiens
MKTLLLLLLVLLELGEAQGSLHRVPLRRHPSLKKKLRARSQLSEFWKSHNLDMIQFTESCSMDQSAKEPLINYLDMEYFGTISIGSPPQNFTVIFDTGSSNLWVPSVYCTSPACKTHSRFQPSQSSTYSQPGQSFSIQYGTGSLSGIIGADQVSAFSYQVEGLTVVGQQFGESVTEPGQTFVDAEFDGILGLGYPSLAVGGVTPVFDNMMAQNLVDLPMFSVYMSSNPEGGAGSELIFGGYDHSHFSGSLNWVPVTKQAYWQIALDNIQVGGTVMFCSEGCQAIVDTGTSLITGPSDKIKQLQNAIGAAPVDGEYAVECANLNVMPDVTFTINGVPYTLSPTAYTLLDFVDGMQFCSSGFQGLDIHPPAGPLWILGDVFIRQFYSVFDRGNNRVGLAPAVP

SEQ ID NO: 40328 - protein, 288 aa, Homo sapiens
MEYFGTISIGSPPQNFTVIFDTGSSNLWVPSVYCTSPACKTHSRFQPSQSSTYSQPGQSFSIQYGTGSLSGIIGADQVSVEGLTVVGQQFGESVTEPGQTFVDAEFDGILGLGYPSLAVGGVTPVFDNMMAQNLVDLPMFSVYMSSNPEGGAGSELIFGGYDHSHFSGSLNWVPVTKQAYWQIALDNMLWSVPTLTSCRMSPSPLTESPIPSAQLPTPYWTSWMECSSAAVAFKDLTSTLQLGPSGSWGMSSFDSFTQSLTVGITVWDWPQQSPKEGPCVCACLSDRP

SEQ ID NO: 40329 - protein, 484 aa, Homo sapiens [sequence omitted]

SEQ ID NO: 40330 - protein, 255 aa, Homo sapiens
MQPLLLLLAFLLPTGAEAGEIIGGRESRPHSRPYMAYLQIQSPAGQSRCGGFLVREDFVLTAAHCWGSNINVTLGAHNIQRRENTQQHITARRAIRHPQYNQRTIQNDIMLLQLSRRVRRNRNVNPVALPRAQEGLRPGTLCTVAGWGRVSMRRGTDTLREVQLRVQRDRQCLRIFGSYDPRRQICVGDRRERKAAFKGDSGGPLLCNNVAHGIVSYGKSSGVPPEVFTRVSSFLPWIRTTMRSFKLLDQMETPL

SEQ ID NO: 40331 - protein, 335 aa, Homo sapiens
MWATLPLLCAGAWLLGVPVCGAAELCVNSLEKFHFKSWMSKHRKTYSTEEYHHRLQTFASNWRKINAHNNGNHTFKMALNQFSDMSFAEIKHKYLWSEPQNCSATKSNYLRGTGPYPPSVDWRKKGNFVSPVKNQGACGSCWTFSTTGALESAIAIATGKMLSLAEQQLVDCAQDFNNHGCQGGLPSQAFEYILYNKGIMGEDTYPYQGKDGYCKFQPGKAIGFVKDVANITIYDEEAMVEAVALYNPVSFAFEVTQDFMMYRTGIYSSTSCHKTPDKVNHAVLAVGYGEKNGIPYWIVKNSWGPQWGMNGYFLIERGKNMCGLAACASYPIPLV

SEQ ID NO: 40332 - protein, 323 aa, Homo sapiens
MWATLPLLCAAELCVNSLEKFHFKSWMSKHRKTYSTEEYHHRLQTFASNWRKINAHNNGNHTFKMALNQFSDMSFAEIKHKYLWSEPQNCSATKSNYLRGTGPYPPSVDWRKKGNFVSPVKNQGACGSCWTFSTTGALESAIAIATGKMLSLAEQQLVDCAQDFNNHGCQGGLPSQAFEYILYNKGIMGEDTYPYQGKDGYCKFQPGKAIGFVKDVANITIYDEEAMVEAVALYNPVSFAFEVTQDFMMYRTGIYSSTSCHKTPDKVNHAVLAVGYGEKNGIPYWIVKNSWGPQWGMNGYFLIERGKNMCGLAACASYPIPLV

SEQ ID NO: 40333 - protein, 206 aa, Homo sapiens
MWATLPLLCAGAWLLGVPVCGAAELCVNSLEKFHFKSWMSKHRKTYSTEEYHHRLQTFASNWRKINAHNNGNHTFKMALNQFSDMSFAEIKHKYLWSEPQNCSATKSNYLRGTGPYPPSVDWRKKGNFVSPVKNQVCLAISILSLQNGHTPRQYTRKNNSKGPQNHHKHIPASVSSRHLSPGRPSLPQLREICEGKRLGEASVNLG

SEQ ID NO: 40334 - protein, 329 aa, Homo sapiens
MWGLKVLLLPVVSFALYPEEILDTHWELWKKTHRKQYNNKVDEISRRLIWEKNLKYISIHNLEASLGVHTYELAMNHLGDMTSEEVVQKMTGLKVPLSHSRSNDTLYIPEWEGRAPDSVDYRKKGYVTPVKNQGQCGSCWAFSSVGALEGQLKKKTGKLLNLSPQNLVDCVSENDGCGGGYMTNAFQYVQKNRGIDSEDAYPYVGQEESCMYNPTGKAAKCRGYREIPEGNEKALKRAVARVGPVSVAIDASLTSFQFYSKGVYYDESCNSDNLNHAVLAVGYGIQKGNKHWIIKNSWGENWGNKGYILMARNKNNACGIANLASFPKM

SEQ ID NO: 40335 - protein, 258 aa, Homo sapiens
MHKENEEIYNVSENRKHCPIFPCPLLTRSGKVPEFRHEREERLEEMIRRQNLDGNLSFVMWGLKVLLLPVVSFALYPEEILDTHWELWKKTHRKQYNNKVDEISRRLIWEKNLKYISIHNLEASLGVHTYELAMNHLGDMTSEEVVQKMTGLKVPLSHSRSNDTLYIPEWEGRAPDSVDYRKKGYVTPVKNQGQCGSCWAFSSVGALEGQLKKKTGKLLNLSPQNLVDCVSENDGCGGGYMTNAFQYVQKNRGIDSED

SEQ ID NO: 40336 - protein, 334 aa, Homo sapiens
MNLSLVLAAFCLGIASAVPKFDQNLDTKWYQWKATHRRLYGANEEGWRRAVWEKNMKMIELHNGEYSQGKHGFTMAMNAFGDMTNEEFRQMMGCFRNQKFRKGKVFREPLFLDLPKSVDWRKKGYVTPVKNQKQCGSCWAFSATGALEGQMFRKTGKLVSLSEQNLVDCSRPQGNQGCNGGFMARAFQYVKENGGLDSEESYPYVAVDEICKYRPENSVANDTGFTVVAPGKEKALMKAVATVGPISVAMDAGHSSFQFYKSGIYFEPDCSSKNLDHGVLVVGYGFEGANSNNSKYWLVKNSWGPEWGSNGYVKIAKDKNNHCGIATAASYPNV

SEQ ID NO: 40337 - protein, 334 aa, Homo sapiens; identical to SEQ ID NO: 40336

SEQ ID NO: 40338 - protein, 331 aa, Homo sapiens
MKRLVCVLLVCSSAVAQLHKDPTLDHHWHLWKKTYGKQYKEKNEEAVRRLIWEKNLKFVMLHNLEHSMGMHSYDLGMNHLGDMTSEEVMSLMSSLRVPSQWQRNITYKSNPNRILPDSVDWREKGCVTEVKYQGSCGACWAFSAVGALEAQLKLKTGKLVSLSAQNLVDCSTEKYGNKGCNGGFMTTAFQYIIDNKGIDSDASYPYKAMDQKCQYDSKYRAATCSKYTELPYGREDVLKEAVANKGPVSVGVDARHPSFFLYRSGVYYEPSCTQNVNHGVLVVGYGDLNGKEYWLVKNSWGHNFGEEGYIRMARNKGNHCGIASFPSYPEI

SEQ ID NO: 40339 - protein, 281 aa, Homo sapiens
MKRLVCVLLVCSSAVAQLHKDPTLDHHWHLWKKTYGKQYKEKNEEAVRRLIWEKNLKFVMLHNLEHSMGMHSYDLGMNHLGDMGSCGACWAFSAVGALEAQLKLKTGKLVSLSAQNLVDCSTEKYGNKGCNGGFMTTAFQYIIDNKGIDSDASYPYKAMDQKCQYDSKYRAATCSKYTELPYGREDVLKEAVANKGPVSVGVDARHPSFFLYRSGVYYEPSCTQNVNHGVLVVGYGDLNGKEYWLVKNSWGHNFGEEGYIRMARNKGNHCGIASFPSYPEI

SEQ ID NO: 40340 - protein, 376 aa, Homo sapiens
MALTAHPSCLLALLVAGLAQGIRGPLRAQDLGPQPLELKEAFKLFQIQFNRSYLSPEEHAHRLDIFAHNLAQAQRLQEEDLGTAEFGVTPFSDLTEEEFGQLYGYRRAAGGVPSMGREIRSEEPEESVPFSCDWRKVASAISPIKDQKNCNCCWAMAAAGNIETLWRISFWDFVDVSVQELLDCGRCGDGCHGGFVWDAFITVLNNSGLASEKDYPFQGKVRAHRCHPKKYQKVAWIQDFIMLQNNEHRIAQYLATYGPITVTINMKPLQLYRKGVIKATPTTCDPQLVDHSVLLVGFGSVKSEEGIWAETVSSQSQPQPPHPTPYWILKNSWGAQWGEKGYFRLHRGSNTCGITKFPLTARVQKPDMKPRVSCPP

SEQ ID NO: 40341 - protein, 303 aa, Homo sapiens
MARRGPGWRPLLLLVLLAGAAQGGLYFRRGQTCYRPLRGDGLAPLGRSTYPRPHEYLSPADLPKSWDWRNVDGVNYASITRNQHIPQYCGSCWAHASTSAMADRINIKRKGAWPSTLLSVQNVIDCGNAGSCEGGNDLSVWDYAHQHGIPDETCNNYQAKDQECDKFNQCGTCNEFKECHAIRNYTLWRVGDYGSLSGREKMMAEIYANGPISCGIMATERLANYTGGIYAEYQDTTYINHVVSVAGWGISDGTEYWIVRNSWGEPWGERGWLRIVTSTYKDGKGARYNLAIEEHCTFGDPIV

SEQ ID NO: 40342 - protein, 780 aa, Homo sapiens
MDQNSVPEKAQNEADTNNADRFFRSHSSPPHHRPGHSRALHHYELHHHGVPHQRGESHHPPEFQDFHDQALSSHVHQSHHHSEARNHGRAHGPTGFGLAPSQGAVPSHRSYGEDYHDELQRDGRRHHDGSQYGGFHQQSDSHYHRGSHHGRPQYLGENLSHYSSGVPHHGEASHHGGSYLPHGPNPYSESFHHSEASHLSGLQHDESQHHQVPHRGWPHHHQVHHHGRSRHHEAHQHGKSPHHGETISPHSSVGSYQRGISDYHSEYHQGDHHPSEYHHGDHPHHTQHHYHQTHRHRDYHQHQDHHGAYHSSYLHGDYVQSTSQLSIPHTSRSLIHDAPGPAASRTGVFPYHVAHPRGSAHSMTRSSSTIRSRVTQMSKKVHTQDISTKHSEDWGKEEGQFQKRKTGRLQRTRKKGHSTNLFQWLWEKLTFLIQGFREMIRNLTQSLAFETFIFFVVCLNTVMLVAQTFAEVEIRGEWYFMALDSIFFCIYVVEALLKIIALGLSYFFDFWNNLDFFIMAMAVLDFLLMQTHSFAIYHQSLFRILKVFKSLRALRAIRVLRRLSFLTSVQEVTGTLGQSLPSIAAILILMFTCLFLFSAVLRALFRKSDPKRFQNIFTTIFTLFTLLTLDDWSLIYMDSRAQGAWYIIPILVIYIIIQYFIFLNLVITVLVDSFQTALFKGLEKAKQERAARIQEKLLEDSLTELRAAEPKEVASEGTMLKRLIEKKFGTMTEKQQELLFHYLQLVASVEQEQQKFRSQAAVIDEIVDTTFEAGEEDFRN

SEQ ID NO: 40343 - protein, 398 aa, Homo sapiens
MSQHRHQRHSRVISSSPVDTTSVGFCPTFKKFKRNDDECRAFVKRVIMSRFFKIIMISTVTSNAFFMALWTSYDIRYRLFRLLEFSEIFFVSICTSELSMKVYVDPINYWKNGYNLLDVIIIIVMFLPYALRQLMGKQFTYLYIADGMQSLRILKLIGYSQGIRTLITAVGQTVYTVASVLLLLFLLMYIFAILGFCLFGSPDNGDHDNWGNLAAAFFTLFSLATVDGWTDLQKQLDNREFALSRAFTIIFILLASFIFLNMFVGVMIMHTEDSIRKFERELMLEQQEMLMGEKQVILQRQQEEISRLMHIQKNADCTSFSELVENFKKTLSHTDPMVLDDFGTSLPFIDIYFSTLDYQDTTVHKLQELYYEIVHVLSLMLEDLPQEKPQSLEKVDEK

SEQ ID NO: 40344 - protein, 472 aa, Homo sapiens
MRDNEKAWWQQWTSHTGLEGWGGTQEDRMGFGGAVAALRGRPSPLQSTIHESYGRPEEQVLINRQEITNKADAWDMQEFITHMYIKQLLRHPAFQLLLALLLVINAITIALRTNSYLDQKHYELFSTIDDIVLTILLCEVLLGWLNGFWIFWKDGWNILNFIIVFILLLRFFINEINIPSINYTLRALRLVHVCMAVEPLARIIRVILQSVPDMANIMVLILFFMLVFSVFGVTLFGAFVPKHFQNIQVALYTLFICITQDGWVDIYSDFQTEKREYAMEIGGAIYFTIFITIGAFIGINLFVIVVTTNLEQMMKAGEQGQQQRITFSETGAEEEEENDQLPLVHCVVARSEKSGLLQEPLAGGPLSNLSENTCDNFCLVLEAIQENLRQYKEIRDELNMIVEEVRAIRFNQEQESEVLNRRSSTSGSLETTSSKDIRQMSQQQDLLSALVSMEKVHDSSSQILLKKHKSSH

SEQ ID NO: 40345 - protein, 1116 aa, Homo sapiens
MESPLIYVSVLLLNIFEFSSGIVYNKDDTEKRFACSNKGFPQENEIIKLYLFLENLKIQCFFQTENEIASKAMLSVFTSGGLAPSLGIMNSTYNGIFHFNLTLFSDRILWLVDIPRENITQSTDIAAVEEWLVRITLHHGLNIYATEGTLLDVIREPILQWTPGDVIPESEISKLYPHVVDLKVTKCPCANDVALLGFIVDTIVDGVYIGITFGGFWHDYDTTWFNMTQTIYSQLQEEYEDLSLVDMVLTNHFLVILTSLGLFVSEDLRYPSRHSLSFSRADFCGFERVDYVKGKLWYNERCFANREHFEVDYVTVTFERNRTLSESSSCFYSQEPFLEWVPCLPHIFKGIKIFPTVLTFLVDQERGTGVYLFYNKVRKTAIASVSTLRNNEPNSQSKFPIFRFPSSFSSPVGMVFHPRSHFLYAYGNQIWLSVDGGNTFQLIANFHDDIIKKTFHSFYTSAITFVSQRGKVYSTKAGMGRYSAVGSVTERIFTLYYDHLGFLHKLTLGRFEASGPPTAFGNSRNLFGQPPDMGFETALAPQHTSLDEIIFFAYVPENEPQETIYSKKFGNIHYGKVIHSGKTGRAYIRKVLQHTTPKGFLSSVIAEMKEPFGLEEVNESSCLSSSLLINKAGNVYKLTLDSQVVQALFEDTDIEKTVVLPGYSSFLITSILDNKNALAIATMPESAPNNMTFLKSTWFLYNFGQRNGRTWKIYSKPCNYWFQHDDSPSLNIVKYIDLGNSYVLKAKVIRNAKGFRMLEIPLLTVFVGNPNLLEVTAEVTFDDTDSYVITISAASKVLHQGSTSLAFIMWSASTECFVTTMVPTLKSSCSYLRSMHHIPSKFIPFEDWISGVHKDSQGFNLIKTLPINYRPPSNMGIAIPLTDNFYHADPSKPIPRNMFHMSKKTGKFKQCANVSTREECNCTKDQKFSHAVAFSDCREKVPRFKFPITQYPVSLEIINEDGRVPLQSPYLVTVTEVNMRHNWKLKHTVPENIKRMKQLVEPILGAAVYNPSGLNLSIKGSELFHFRVTVISGVTFCNLIEEFQIYVDEAPLPFPGHTLIAVATAVVLGGLIFIAFMFQLQGIHPWRTFQRWIRRNQEKFSSISLSELIHRSKSEE

SEQ ID NO: 40346 - protein, 74 aa, Homo sapiens
MESPLIYVSVLLLNIFEFSSGIVYNKDDTEKRFACSNKGFPQENEIIKLYLFLENLKIQCFFQTENEIASKAML

SEQ ID NO: 40347 - protein, 100 aa, Homo sapiens
MESPLIYVSVLLLNIFEFSSGIVYNKDDTEKRFACSNKGFPQENEIIKLYLFLENLKIQCFFQTENEIASKAMLSVFTSGGLAPSLGIMNSTYNGIFHFN

SEQ ID NO: 40348 - protein, 74 aa, Homo sapiens; identical to SEQ ID NO: 40346

SEQ ID NO: 40349 - protein, 517 aa, Homo sapiens
MGRKSKKWGKKVSRYEGKVRLKKVPAKKLVPAWKEKVLWALLAVLLASWRLWAIKDFQECTWQVVLNEFKRVGESGVSDSFFEQEPVDTVSSLFHMLVDSPIDPSEKYLGFPYYLKINYSCEEKPSEDLVRMGHLTGLKPLVLVTFQSPVNFYRWKIEQLQIQMEAAPFRSKGGPGGGGRDRNLAGMNINGFLKRDRDNNIQFTVGEELFNLMPQYFVGVSSRPLWHTVDQSPVLILGGIPNEKYVLMTDTSFKDFSLVEVNGVGQMLSIDSCWVGSFYCPHSGFTATIYDTIATESTLFIRQNQLVYYFTGTYTTLYERNRGSGECAVAGPTPGEGTLVNPSTEGSWIRVLASECIKKLCPVYFHSNGSEYIMALTTGKHEGYVHFGTIRVTTCSIIWSEYIAGEYTLLLLVESGYGNASKRFQVVSYNTASDDLELLYHIPEFIPEARGLEFLMILGTESYTSTAMAPKGIFCNPYNNLIFIWGNFLLQRSGTSWRAATGSTSCSLPRAGRCTSA

SEQ ID NO: 40350 - protein, 1159 aa, Homo sapiens
MCGPAMFPAGPPWPRVRVVQVLWALLAVLLASWRLWAIKDFQECTWQVVLNEFKRVGESGVSDSFFEQEPVDTVSSLFHMLVDSPIDPSEKYLGFPYYLKINYSCEEKPSEDLVRMGHLTGLKPLVLVTFQSPVNFYRWKIEQLQIQMEAAPFRSKEPCMAEEVCSMSWYTPMPIKKGSVVMRVDISSNGLGTFIPDKRFQMNINGFLKRDRDNNIQFTVGEELFNLMPQYFVGVSSRPLWHTVDQSPVLILGGIPNEKYVLMTDTSFKDFSLVELSIDSCWVGSFYCPHSGFTATIYDTIATESTLFIRQNQLVYYFTGTYTTLYERNRGSGSWIRVLASECIKKLCPVYFHSNGSEYIMALTTGKHEGYVHFGTIRDGQVSFEMLPRQWSVCEQIGVTTCSIIWSEYIAGEYTLLLLVESGYGNASKRFQVVSYNTASDDLELLYHIPEFIPEARGLEFLMILGTESYTSTAMAPKGIFCNPYNNLIFIWGNFLLQSSNKENFIYLADFPKELSIKYMARSFRGAVAIVTETEEIWYLLEGSYRVYQLFPSKGWQVHISLKLMQQSSLYASNETMLTLFYEDSKLYQLVYLMNNQKGQLVKRLVPVEQLLMYQQHTSHYDLERKGGYLMLSFIDFCPFSVMRLRSLPSPQRYTRQERYRARPPRVLERSGFHNENSLAIYQGLVYYLLWLHSVYDKPYADPVHDPTWRWWANNKQDQDYYFFLASNWRSAGGVSIEMDSYEKIYNLESAYELPERIFLDKGTEYSFAIFLSAQGHSFRTQSELGTAFQLHSQVDVGVVLADPGCIEASVKQEVLINRNSVLFSITLKDKKLCYDQGISGHHLMETSMTVNVVGSSGLCFQETHLGPHMQGNLMVPVFIGCPPGKRLAFDITYTLEYSRLKNKHYFDCVNVNPEMPCFLFRDIFYPFFLIQDLVTGDSGSFQGSYVLLVVGGGPTLDSLKDYSEDEIYRFNSPLDKTNSLIWTTRTTRTTKDSAFHIMSHESPGIEWLCLENAPCYDNVPQGIFAPEFFFKVLVSNRGVDTSTYCNYQLTFLLHIHGLPLSPKRALFIIMVSASVFVGLVIFYIAFCLLWPLVVKGCTMIRWKINNLIASESYYTYASISGISSMPSLRHSRMGSMFSSRMTEDRAEPKEAVERQLMT

SEQ ID NO: 40351 - protein, 1159 aa, Homo sapiens; identical to SEQ ID NO: 40350

SEQ ID NO: 40352 - protein, 265 aa, Homo sapiens
MYVGYVLDKDSPVYPGPARPASLGLGPQAYGPPAPPPAPPQYPDFSSYSHVEPAPAPPTAWGAPFPAPKDDWAAAYGPGPAAPAASPASLAFGPPPDFSPVPAPPGPGPGLLAQPLGGPGTPSSPGAQRPTPYEWMRRSVAAGGGGGSGKTRTKDKYRVVYTDHQRLELEKEFHYSRYITIRRKSELAANLGLTERQVKIWFQNRRAKERKVNKKKQQQQQPPQPPMAHDITATPAGPSLGGLCPSNTSLLATSSPMPVKEEFLP

SEQ ID NO: 40353 - protein, 154 aa, Homo sapiens [sequence omitted]

SEQ ID NO: 40354 - protein, 60 aa, Homo sapiens
MRGGPRGHHVCGLCAGQGFARVPRPSQASQPRPGPASLCPSNTSLLATSSPMPVKEEFLP

SEQ ID NO: 40355 - protein, 313 aa, Homo sapiens
MYVSYLLDKDVSMYPSSVRHSGGLNLAPQNFVSPPQYPDYGGYHVAAAAAAAANLDSAQSPGPSWPAAYGAPLREDWNGYAPGGAAAAANAVAHGLNGGSPAAAMGYSSPADYHPHHHPHHHPHHPAAAPSCASGLLQTLNPGPPGPAATAAAEQLSPGGQRRNLCEWMRKPAQQSLGSQVKTRTKDKYRVVYTDHQRLELEKEFHYSRYITIRRKAELAATLGLSERQVKIWFQNRRAKERKINKKKLQQQQQQQPPQPPPPPPQPPQPQPGPLRSVPEPLSPVSSLQASVPGSVPGVLGPTGGVLNPTVTQ

SEQ ID NO: 40356 - protein, 284 aa, Homo sapiens
MYGSCLLEKEAGMYPGTLMSPGGDGTAGTGGTGGGGSPMPASNFAAAPAFSHYMGYPHMPSMDPHWPSLGVWGSPYSPPREDWSVYPGPSSTMGTVPVNDVTSSPAAFCSTDYSNLGPVGGGTSGSSLPGQAGGSLVPTDAGAAKASSPSRSRHSPYAWMRKTVQVTGKTRTKEKYRVVYTDHQRLELEKEFHCNRYITIQRKSELAVNLGLSERQVKIWFQNRRAKERKMIKKKISQFENSGGSVQSDSDSISPGELPNTFFTTPSAVRGFQPIEIQQVIVSE

SEQ ID NO: 40357 - protein, 151 aa, Homo sapiens
MMAEEHTDLEAQIVKDIHCKEIDLVNRDPKNINEDIVKVDFEDVIAEPVGTYSFDGVWKVSYTTFTVSKYWCYRLLSTLLGVPLALLWGFLFACISFCHIWAVVPCIKSYLIEIQCISHIYSLCIRTFCNPLFAALGQVCSSIKVVLRKEV

SEQ ID NO: 40358 - protein, 151 aa, Homo sapiens; identical to SEQ ID NO: 40357

SEQ ID NO: 40359 - protein, 270 aa, Homo sapiens
MADHMMAMNHGRFPDGTNGLHHHPAHRMGMGQFPSPHHHQQQQPQHAFNALMGEHIHYGAGNMNATSGIRHAMGPGTVNGGHPPSALAPAARFNNSQFMGPPVASQGGSLPASMQLQKLNNQYFNHHPYPHNHYMPDLHPAAGHQMNGTNQHFRDCNPKHSGGSSTPGGSGGSSTPGGSGSSSGGGAGSSNSGGGSGSGNMPASVAHVPAAMLPPNVIDTDFIDEEVLMSLVIEMGLDRIKELPELWLGQNEFDFMTDFVCKQQPSRVSC

SEQ ID NO: 40360 - protein, 214 aa, Homo sapiens
MADHMMAMNHGRFPDGTNGLHHHPAHRMGMGQFPSPHHHQQQQPQHAFNALMGEHIHYGAGNMNATSGIRHAMGPGTVNGGHPPSALAPAARFNNSQFMGPPVASQGGSLPASMQLQKLNNQYFNHHPYPHNHYMPDLHPAAGHQMNGTNQHFRDCNPPNVIDTDFIDEEVLMSLVIEMGLDRIKELPELWLGQNEFDFMTDFVCKQQPSRVSC

SEQ ID NO: 40361 - protein, 270 aa, Homo sapiens; identical to SEQ ID NO: 40359

SEQ ID NO: 40362 - protein, 270 aa, Homo sapiens; identical to SEQ ID NO: 40359

SEQ ID NO: 40363 - protein, 598 aa, Homo sapiens
MENSSAASASSEAGSSRSQEIEELERFIDSYVLEYQVQGLLADKTEGDGESERTQSHISQWTADCSEPLDSSCSFSRGRAPPQQNGSKDNSLDMLGTDIWAANTFDSFSGATWDLQPEKLDFTQFHRKVRHTPKQPLPHIDREGCGKGKLEDGDGINLNDIEKVLPAWQGYHPMPHEVEIAHTKKLFRRRRNDRRRQQRPPGGNKPQQHGDHQPGSAKHNRDHQKSYQGGSAPHPSGRPTHHGYSQNRRWHHGNMKHPPGDKGEAGAHRNAKETMTIENPKLEDTAGDTGHSSLEAPRSPDTLAPVASERLPPQQSGGPEVETKRKDSILPERIGERPKITLLQSSKDRLRRRLKEKDEVAVETTTPQQNKMDKLIEILNSMRNNSSDVDTKLTTFMEEAQNSTNSEEMLGEIVRTIYQKAVSDRSFAFTAAKLCDKMALFMVEGTKFRSLLLNMLQKDFTVREELQQQDVERWLGFITFLCEVFGTMRSSTGEPFRVLVCPIYTCLRELLQSQDVKEDAVLCCSMELQSTGRLLEEQLPEMMTELLASARDKMLCPSESMLTRSLLLEVIELHANSWNPLTPPITQYYNRTIQKLTA

SEQ ID NO: 40364 - protein, 600 aa, Homo sapiens
MENSSAASASSEAGSSRSQEIEELERFIDSYVLEYQVQGLLADKTEGDGESERTQSHISQWTADCSEPLDSSCSFSRGRAPPQQNGSKDNSLDMLGTDIWAANTFDSFSGATWDLQPEKLDFTQFHRKVRHTPKQPLPHIDREGCGKGKLEDGDGINLNDIEKVLPAWQGYHPMPHEVEIAHTKKLFRRRRNDRRRQQRPPGGNKPQQHGDHQPGSAKHNRDHQKSYQGGSAPHPSGRPTHHGYSQNRRWHHGNMKHPPGDKGEAGAHRNAKETMTIENPKLEDTAGDTGHSSLEAPRSPDTLAPVASERLPPQQSGGPEVETKRKDSILPERIGERPKITLLQSSKDRLRRRLKEKVPDEVAVETTTPQQNKMDKLIEILNSMRNNSSDVDTKLTTFMEEAQNSTNSEEMLGEIVRTIYQKAVSDRSFAFTAAKLCDKMALFMVEGTKFRSLLLNMLQKDFTVREELQQQDVERWLGFITFLCEVFGTMRSSTGEPFRVLVCPIYTCLRELLQSQDVKEDAVLCCSMELQSTGRLLEEQLPEMMTELLASARDKMLCPSESMLTRSLLLEVIELHANSWNPLTPPITQYYNRTIQKLTA

SEQ ID NO: 40365 - protein, 648 aa, Homo sapiens
MGRLPCGPLPGQWTADCSEPLDSSCSFSRGRAPPQQNGSKDNSLDMLGTDIWAANTFDSFSGATWDLQPEKLDFTQFHRKVRHTPKQPLPHIDREGCGKGKLEDGDGINLNDIEKVLPAWQGYHPMPHEVEIAHTKKLFRRRRNDRRRQQRPPGGNKPQQHGDHQPGSAKHNRDHQKSYQGGSAPHPSGRPTHHGYSQNRRWHHGNMKHPPGDKGEAGAHRNAKETMTIENPKLEDTAGDTGHSSLEAPRSPDTLAPVASERLPPQQSGGPEVETKRKDSILPERIGERPKITLLQSSKDRLRRRLKEKDEVAVETTTPQQNKMDKLIEILNSMRNNSSDVDTKLTTFMEEAQNSTNSEEMLGEIVRTIYQKAVSDRSFAFTAAKLCDKMALFMVEGTKFRSLLLNMLQKDFTVREELQQQDVERWLGFITFLCEVFGTMRSSTGEPFRVLVCPIYTCLRELLQSQDVKEDAVLCCSMELQSTGRLLEEQLPEMMTELLASARDKMLCPSESMLTRSLLLEVIELHANSWNQGAWQAAHGQLGPWCTGPDGQAGGQGWPWREKEMGRRAGRVGGQSGARACKLTPIREACFFFLVALALPFLTPASPLPIRPIPHGALCEGSHRCDSSETLAASHAGAPLGSERTSEG

SEQ ID NO: 40366 - protein, 358 aa, Homo sapiens
MESADFYEAEPRPPMSSHLQSPPHAPSSAAFGFPRGAGPAQPPAPPAAPEPLGGICEHETSIDISAYIDPAAFNDEFLADLFQHSRQQEKAKAAVGPTGGGGGGDFDYPGAPAGPGGAVMPGGAHGPPPGYGCAAAGYLDGRLEPLYERVGAPALRPLVIKQEPREEDEAKQLALAGLFPYQPPPPPPPSHPHPHPPPAHLAAPHLQFQIAHCGQTTMHLQPGHPTPPPTPVPSPHPAPALGAAGLPGPGSALKGLGAAHPDLRASGGSGAGKAKKSVDKNSNEYRVRRERNNIAVRKSRDKAKQRNVETQQKVLELTSDNDRLRKRVEQLSRELDTLRGIFRQLPESSLVKAMGNCA

SEQ ID NO: 40367 - protein, 269 aa, Homo sapiens
MSAALFSLDGPARGAPWPAEPAPFYEPGRAGKPGRGAEPGALGEPGAAAPAMYDDESAIDFSAYIDSMAAVPTLELCHDELFADLFNSNHKAGGAGPLELLPGGPARPLGPGPAAPRLLKREPDWGDGDAPGSLLPAQVAACAQTVVSLAAAGQPTPPTSPEPPRSSPRQTPAPGPAREKSAGKRGPDRGSPEYRQRRERNNIAVRKSRDKAKRRNQEMQQKLVELSAENEKLHQRVEQLTRDLAGLRQFFKQLPSPPFLPAAGTADCR

SEQ ID NO: 40368 - protein, 133 aa, Homo sapiens
MSAALFSLDGPARGAPWPAEPAPFYEPGRAGKPGRGAEPGALGEPGAAAPAMYDDESAIDFSAYIDSMAAVPTLELCHDELFADLFNSNHKARAPWARALPLPACSSASPTGATATRPARCCPRRWPRAHRPW

SEQ ID NO: 40369 - protein, 281 aa, Homo sapiens
MSHGTYYECEPRGGQQPLEFSGGRAGPGELGDMCEHEASIDLSAYIESGEEQLLSDLFAVKPAPEARGLKGPGTPAFPHYLPPDPRPFAYPPHTFGPDRKALGPGIYSSPGSYDPRAVAVKEEPRGPEGSRAASRGSYNPLQYQVAHCGQTAMHLPPTLAAPGQPLRVLKAPLATAAPPCSPLLKAPSPAGPLHKGKKAVNKDSLEYRLRRERNNIAVRKSRDKAKRRILETQQKVLEYMAENERLRSRVEQLTQELDTLRNLFRQIPEAANLIKGVGGCS

SEQ ID NO: 40370 - protein, 1054 aa, Homo sapiens
MAAVKEPLEFHAKRPWRPEEAVEDPDEEDEDNTSEAENGFSLEEVLRLGGTKQDYLMLATLDENEEVIDGGKKGAIDDLQQGELEAFIQNLNLAKYTKASLVEEDEPAEKENSSKKEVKIPKINNKNTAESQRTSVNKVKNKNRPEPHSDENGSTTPKVKKDKQNIFEFFERQTLLLRPGGKWYDLEYSNEYSLKPQPQDVVSKYKTLAQKLYQHEINLFKSKTNSQKGASSTWMKAIVSSGTLGDRMAAMILLIQDDAVHTLQFVETLVNLVKKKGSKQQCLMALDTFKELLITDLLPDNRKLRIFSQRPFDKLEQLSSGNKDSRDRRLILWYFEHQLKHLVAEFVQVLETLSHDTLVTTKTRALTVAHELLCNKPEEEKALLVQVVNKLGDPQNRIATKASHLLETLLCKHPNMKGVVSGEVERLLFRSNISSKAQYYAICFLNQMALSHEESELANKLITVYFCFFRTCVKKKDVESKMLSALLTGVNRAYPYSQTGDDKVREQIDTLFKVLHIVNFNTSVQALMLLFQVMNSQQTISDRYYTALYRKMLDPGLMTCSKQAMFLNLVYKSLKADIVLRRVKAFVKRLLQVTCQQMPPFICGALYLVSEILKAKPGLRSQLDDHPESDDEENFIDANDDEDMEKFTDADKETEIVKKLETEETVPETDVETKKPEVASWVHFDNLKGGKQLNKYDPFSRNPLFCGAENTSLWELKKLSVHFHPSVALFAKTILQGNYIQYSGDPLQDFTLMRFLDRFVYRNPKPHKGKENTDSVVMQPKRKHFIKDIRHLPVNSKEFLAKEESQIPVDEVFFHRYYKKVAVKEKQKRDADEESIEDVDDEEFEELIDTFEDDNCFSSGKDDMDFAGNVKKRTKGAKDNTLDEDSEGSDDELGNLDDDEVSLGSMDDEEFAEVDEDGGTFMDVLDDESESVPELEVHSKVSTKKSKRKGTDDFDFAGSFQGPRKKKRNLNDSSLFVSAEEFGHLLDENMGSKFDNIGMNAMANKDNASLKQLRWEAERDDWLHNRDAKSIIKKKKHFKKKRIKTTQKTKKQRK

SEQ ID NO: 40371 - protein, 998 aa, Homo sapiens
MAAVKEPLEFHAKRPWRPEEAVEDPDEEDEDNTSEAENGFSLEEVLRLGGTKQDYLMLATLDENEEVIDGGKKGAIDDLQQGELEAFIQNLNLAKYTKASLVEEDEPAEKENSSKKEVKIPKINNKNTAESQRTSVNKVKNKNRPEPHSDENGSTTPKVKKDKQNIFEFFERQTLLLRPGGKWYDLEYSNEYSLKPQPQDVVSKYKTLAQKLYQHEINLFKSKTNSQKGASSTWMKAIVSSGTLGDRMAAMILLIQDDAVHTLQFVETLVNLVKKKGSKQQCLMALDTFKELLITDLLPDNRKLRIFSQRPFDKLEQLSSGNKDSRDRRLILWYFEHQLKHLVAEFVQVLETLSHDTLVTTKTRALTVAHELLCNKPEEEKALLVQVVNKLGDPQNRIATKASHLLETLLCKHPNMKGVVSGEVERLLFRSNISSKAQYYAICFLNQMALSHEESELANKLITVYFCFFRTCVKKKDVESKMLSALLTGVNRAYPYSQTGDDKVREQIDTLFKVLHIVNFNTSVQALMLLFQVMNSQQTISDRYYTALYRKMLDPGLMTCSKQAMFLNLVYKSLKADIVLRRVKAFVKRLLQVTCQQMPPFICGALYLVSEILKAKPGLRSQLDDHPESDDEENFIDANDDEDMEKFTDADKETEIVKKLETEETVPETDVETKKPEVASWVHFDNLKGGKQLNKYDPFSRNPLFCGAENTSLWELKKLSVHFHPSVALFAKTILQGNYIQYSGDPLQDFTLMRFLDRFVYRNPKPHKGKENTDSVVMQPKRKHFIKDIRHLPVNSKEFLAKEESQIPVDEVFFHRYYKKVAVKEKQKRDADEESIEDVDDEEFEELIDTFEDDNCFSSGKDDMDFAGNVKKRTKGAKDNTLDEDSEGSDDELGNLDDDEVSLGSMDDEEFAEVDEDGGTFMDVLDDESESVPELEVHSKVSTKKSKRKGTDDFDFAGSFQGPRKKKRNLNDSSLFVSAEEFGHLLDENMGSKFDNIA

SEQ ID NO: 40372 - protein, 663 aa, Homo sapiens
MAATEISVLSEQFTKIKELELMPEKGLKEEEKDGVCREKDHRSPSELEAERTSGAFQDSVLEEEVELVLAPSEESEKYILTLQTVHFTSEAVELQDMSLLSIQQQEGVQVVVQQPGPGLLWLEEGPRQSLQQCVAISIQQELYSPQEMEVLQFHALEENVMVASEDSKLAVSLAETTGLIKLEEEQEKNQLLAERTKEQLFFVETMSGDERSDEIVLTVSNSNVEEQEDQPTAGQADAEKAKSTKNQRKTKGAKGTFHCDVCMFTSSRMSSFNRHMKTHTSEKPHLCHLCLKTFRTVTLLRNHVNTHTGTRPYKCNDCNMAFVTSGELVRHRRYKHTHEKPFKCSMCKYASVEASKLKRHVRSHTGERPFQCCQCSYASRDTYKLKRHMRTHSGEKPYECHICHTRFTQSGTMKIHILQKHGENVPKYQCPHCATIIARKSDLRVHMRNLHAYSAAELKCRYCSAVFHERYALIQHQKTHKNEKRFKCKHCSYACKQERHMTAHIRTHTGEKPFTCLSCNKCFRQKQLLNAHFRKYHDANFIPTVYKCSKCGKGFSRWINLHRHSEKCGSGEAKSAASGKGRRTRKRKQTILKEATKGQKEAAKGWKEAANGDEAAAEEASTTKGEQFPGEMFPVACRETTARVKEEVDEGVTCEMLLNTMDK

SEQ ID NO: 40373 - protein, 663 aa, Homo sapiens; identical to SEQ ID NO: 40372

SEQ ID NO: 40374 - protein, 427 aa, Homo sapiens
MAATEISVLSEQFTKIKELELMPEKGLKEEEKDGVCREKDHRSPSELEAERTSGAFQDSVLEEEVELVLAPSEESEKYILTLQTVHFTSEAVELQDMSLLSIQQQEGVQVVVQQPGPGLLWLEEGPRQSLQQCVAISIQQELYSPQEMEVLQFHALEENVMVASEDSKLAVSLAETTGLIKLEEEQEKNQLLAERTKEQLFFVETMSGDERSDEIVLTVSNSNVEEQEDQPTAGQADAEKAKSTKNQRKTKGAKGTFHCDVCMFTSSRMSSFNRHMKTHTSEKPHLCHLCLKTFRTVTLLRNHVNTHTGTRPYKCNDCNMAFVTSGELVRHRRYKHTHEKPFKCSMCKYASVEASKLKRHVRSHTGERPFQCCQCSYASRDTYKLKRHMRTHSEATSKRSLQEIPRCKFHPDCLQMLQVWQRLFPLD

SEQ ID NO: 40375 - protein, 573 aa, Homo sapiens
MAATEISVLSEQFTKIKELELMPEKGLKEEEKDGVCREKDHRSPSELEAERTSGAFQDSVLEEEVELVLAPSEESEKYILTLQTVHFTSEAVELQDMSLLSIQQQEGVQVVVQQPGPGLLWLEEGPRQSLQQCVAISIQQELYSPQEMEVLQFHALEENVMVASEDSKLAVSLAETTGLIKLEEEQEKNQLLAERTKEQLFFVETMSGDERSDEIVLTVSNSNVEEQEDQPTAGQADAEKAKSTKNQRKTKGAKGTFHCDVCMFTSSRMSSFNRHMKTHTSEKPHLCHLCLKTFRTVTLLRNHVNTHTGTRPYKCNDCNMAFVTSGELVRHRRYKHTHEKPFKCSMCKYASVEASKLKRHVRSHTGERPFQCCQCSYASRDTYKLKRHMRTHSGEKPYECHICHTRFTQSGTMKIHILQKHGENVPKYQCPHCATIIARKSDLRVHMRNLHAYSAAELKCRYCSAVFHERYALIQHQKTHKNEKRFKCKHCSYACKQERHMTAHIRTHTGEKPFTCLSCNKCFRQKQLLNAHFRKYHDANFIPTVYKCSKCGKGFSRWITSKWSGLKPQTFIT

SEQ ID NO: 40376 - protein, 700 aa, Homo sapiens
MAATEISVLSEQFTKIKELELMPEKGLKEEEKDGVCREKDHRSPSELEAERTSGAFQDSVLEEEVELVLAPSEESEKYILTLQTVHFTSEAVELQDMSLLSIQQQEGVQVVVQQPGPGLLWLEEGPRQSLQQCVAISIQQELYSPQEMEVLQFHALEENVMVASEDSKLAVSLAETTGLIKLEEEQEKNQLLAERTKEQLFFVETMSGDERSDEIVLTVSNSNVEEQEDQPTAGQADAEKAKSTKNQRKTKGAKGTFHCDVCMFTSSRMSSFNRHMKTHTSEKPHLCHLCLKTFRTVTLLRNHVNTHTGTRPYKCNDCNMAFVTSGELVRHRRYKHTHEKPFKCSMCKYASVEASKLKRHVRSHTGERPFQCCQCSYASRDTYKLKRHMRTHSGEKPYECHICHTRFTQSGTMKIHILQKHGENVPKYQCPHCATIIARKSDLRVHMRNLHAYSAAELKCRYCSAVFHERYALIQHQKTHKNEKRFKCKHCSYACKQERHMTAHIRTHTGEKPFTCLSCNKCFRQKQLLNAHFRKYHDANFIPTVYKCSKCGKGFSRWINLHRHSEKCGSGEAKSAASGKGRRTRKRKQTILKEATKGQKEAAKGWKEAANGDEAAAEEASTTKGEQFPGEMFPVACRETTARVKEEVDEGVTCEMLLNTMDNSAGCTGRMMLVSAWLLGRPQETYNQGRRRRGSRRVTW

SEQ ID NO: 40377 - protein, 451 aa, Homo sapiens
MAATEISVLSEQFTKIKELELMPEKGLKEEEKDGVCREKDHRSPSELEAERTSGAFQDSVLEEEVELVLAPSEESEKYILTLQTVHFTSEAVELQDMSLLSIQQQEGVQVVVQQPGPGLLWLEEGPRQSLQQCVAISIQQELYSPQEMEVLQFHALEENVMVASEDSKLAVSLAETTGLIKLEEEQEKNQLLAERTKEQLFFVETMSGDERSDEIVLTVSNSNVEEQEDQPTAGQADAEKAKSTKNQRKTKGAKGTFHCDVCMFTSSRMSSFNRHMKTHTSEKPHLCHLCLKTFRTVTLLRNHVNTHTGTRPYKCNDCNMAFVTSGELVRHRRYKHTHEKPFKCSMCKYASVEASKLKRHVRSHTGERPFQCCQCSYASRDTYKLKRHMRTHSGEKPYECHICHTRFTQSGTMKIHILQKHGENVPKYQCPHCATIIARKSDLRFLGLPFP

SEQ ID NO: 40378 - protein, 613 aa, Homo sapiens
MAATEISVLSEQFTKIKELELMPEKGLKEEEKDGVCREKDHRSPSELEAERTSGAFQDSVLEEEVELVLAPSEESEKYILTLQTVHFTSEAVELQDMSLLSIQQQEGVQVVVQQPGPGLLWLEEGPRQSLQQCVAISIQQELYSPQEMEVLQFHALEENVMVASEDSKLAVSLAETTGLIKLEEEQEKNQLLAERTKEQLFFVETMSGDERSDEIVLTVSNSNVEEQEDQPTAGQADAEKAKSTKNQRKTKGAKGTFHCDVCMFTSSRMSSFNRHMKTHTSEKPHLCHLCLKTFRTVTLLRNHVNTHTGTRPYKCNDCNMAFVTSGELVRHRRYKHTHEKPFKCSMCKYASVEASKLKRHVRSHTGERPFQCCQCSYASRDTYKLKRHMRTHSGVHMRNLHAYSAAELKCRYCSAVFHERYALIQHQKTHKNEKRFKCKHCSYACKQERHMTAHIRTHTGEKPFTCLSCNKCFRQKQLLNAHFRKYHDANFIPTVYKCSKCGKGFSRWINLHRHSEKCGSGEAKSAASGKGRRTRKRKQTILKEATKGQKEAAKGWKEAANGDEAAAEEASTTKGEQFPGEMFPVACRETTARVKEEVDEGVTCEMLLNTMDK

SEQ ID NO: 40379 - protein, 483 aa, Homo sapiens
MAATEISVLSEQFTKIKELELMPEKGLKEEEKDGVCREKDHRSPSELEAERTSGAFQDSVLEEEVELVLAPSEESEKYILTLQTVHFTSEAVELQDMSLLSIQQQEGVQVVVQQPGPGLLWLEEGPRQSLQQCVAISIQQELYSPQEMEVLQFHALEENVMVASEDSKLAVSLAETTGLIKLEEEQEKNQLLAERTKEQLFFVETMSGDERSDEIVLTVSNSNVEEQEDQPTAGQADAEKAKSTKNQRKTKGAKGTFHCDVCMFTSSRMSSFNRHMKTHTSEKPHLCHLCLKTFRTVTLLRNHVNTHTGTRPYKCNDCNMAFVTSGELVRHRRYKHTHEKPFKCSMCKYASVEERHMTAHIRTHTGEKPFTCLSCNKCFRQKQLLNAHFRKYHDANFIPTVYKCSKCGKGFSRWILWVGNSEVAELGGPGSGPLLRLQSGCPPGLHHPKAGLGPEDPLPGQLRHTTAGTGLSSLLQGPLCRAA

SEQ ID NO: 40380 - protein, 665 aa, Homo sapiens
MAATEISVLSEQFTKIKELELMPEKGLKEEEKDGVCREKDHRSPSELEAERTSGAFQDSVLEEEVELVLAPSEESEKYILTLQTVHFTSEAVELQDMSLLSIQQQEGVQVVVQQPGPGLLWLEEGPRQSLQQCVAISIQQELYSPQEMEVLQFHALEENVMVASEDSKLAVSLAETTGLIKLEEEQEKNQLLAERTKEQLFFVETMSGDERSDEIVLTVSNSNVEEQEDQPTAGQADAEKAKSTKNQRKTKGAKGTFHCDVCMFTSSRMSSFNRHMKTHTSEKPHLCHLCLKTFRTVTLLRNHVNTHTGTRPYKCNDCNMAFVTSGELVRHRRYKHTHEKPFKCSMCKYASVEASKLKRHVRSHTGERPFQCCQCSYASRDTYKLKRHMRTHSGEKPYECHICHTRFTQSGTMKIHILQKHGENVPKYQCPHCATIIARKSDLRVHMRNLHAYSAAELKCRYCSAVFHERYALIQHQKTHKNEKRFKCKHCSYACKQERHMTAHIRTHTGEKPFTCLSCNKCFRQKQLLNAHFRKYHDANFIPTVYKCSKCGKGFSRWINLHRHSEKCGSGEAKSAASGKGRRTRKRKQTILKEATKGQKEAAKGWKEAANGDGVISAHRNLCLLGSSDSHASVSGAGITDARHHAWLIVLLFLVEMGFYHVSHS

SEQ ID NO: 40381 - protein, 403 aa, Homo sapiens
MFTSSRMSSFNRHMKTHTSEKPHLCHLCLKTFRTVTLLRNHVNTHTGTRPYKCNDCNMAFVTSGELVRHRRYKHTHEKPFKCSMCKYASVEASKLKRHVRSHTGERPFQCCQCSYASRDTYKLKRHMRTHSGEKPYECHICHTRFTQSGTMKIHILQKHGENVPKYQCPHCATIIARKSDLRVHMRNLHAYSAAELKCRYCSAVFHERYALIQHQKTHKNEKRFKCKHCSYACKQERHMTAHIRTHTGEKPFTCLSCNKCFRQKQLLNAHFRKYHDANFIPTVYKCSKCGKGFSRWINLHRHSEKCGSGEAKSAASGKGRRTRKRKQTILKEATKGQKEAAKGWKEAANGDGVISAHRNLCLLGSSDSHASVSGAGITDARHHAWLIVLLFLVEMGFYHVSHS

SEQ ID NO: 40382 - protein, 422 aa, Homo sapiens
MSGDERSDEIVLTVSNSNVEEQEDQPTAGQADAEKAKSTKNQRKTKGAKGTFHCDVCMFTSSRMSSFNRHMKTHTSEKPHLCHLCLKTFRTVTLLRNHVNTHTGTRPYKCNDCNMAFVTSGELVRHRRYKHTHEKPFKCSMCKYASVEASKLKRHVRSHTGERPFQCCQCSYASRDTYKLKRHMRTHSGEKPYECHICHTRFTQSGTMKIHILQKHGENVPKYQCPHCATIIARKSDLRVHMRNLHAYSAAELKCRYCSAVFHERYALIQHQKTHKNEKRFKCKHCSYACKQERHMTAHIRTHTGEKPFTCLSCNKCFRQKQLLNAHFRKYHDANFIPTVYKCSKCGKGFSRWILWVGNSEVAELGGPGSGPLLRLQSGCPPGLHHPKAGLGPEDPLPGQLRHTTAGTGLSSLLQGPLCRAA

SEQ ID NO: 40383 - protein, 431 aa, Homo sapiens
MFHSPRRLCSALLQRDAPGLRRLPAPGLRRPLSPPAAVPRPASPRLLAAASAASGAARSCSRTVCSMGTGTSRLYSALAKTLNSSAASQHPEYLVSPDPEHLEPIDPKELLEECRAVLHTRPPRFQRDFVDLRTDCPSTHPPIRVMQWNILAQALGEGKDNFVQCPVEALKWEERKCLILEEILAYQPDILCLQEVDHYFDTFQPLLSRLGYQGTFFPKPWSPCLDVEHNNGPDGCALFFLQNRFKLVNSANIRLTAMTLKTNQVAIAQTLECKESGRQFCIAVTHLKARTGWERFRSAQGCDLLQNLQNITQGAKIPLIVCGDFNAEPTEEVYKHFASSSLNLNSAYKLLSADGQSEPPYTTWKIRTSGECRHTLDYIWYSKHALNVRSALDLLTEEQIGPNRLPSFNYPSDHLSLVCDFSFTEESDGLS

SEQ ID NO: 40384 - protein, 710 aa, Homo sapiens
MSRSPDAKEDPVECPLCMEPLEIDDINFFPCTCGYQICRFCWHRIRTDENGLCPACRKPYPEDPAVYKPLSQEELQRIKNEKKQKQNERKQKISENRKHLASVRVVQKNLVFVVGLSQRLADPEVLKRPEYFGKFGKIHKVVINNSTSYAGSQGPSASAYVTYIRSEDALRAIQCVNNVVVDGRTLKASLGTTKYCSYFLKNMQCPKPDCMYLHELGDEAASFTKEEMQAGKHQEYEQKLLQELYKLNPNFLQLSTGSVDKNKNKVTPLQSPIDKPSDSLSIGNGDNSQQISNSDTPSPPPGLSKSNPVIPISSSNHSARSPFEGAVTESQSLFSDNFRHPNPIPSGLPPFPSSPQTSSDWPTAPEPQSLFTSETIPVSSSTDWQAAFGFGSSKQPEDDLGFDPFDVTRKALADLIEKELSVQDQPSLSPTSLQNSSSHTTTAKGPGSGFLHPAAATNANSLNSTFSVLPQRFPQFQQHRAVYNSFSFPGQAARYPWMAFPRNSIMHLNHTANPTSNSNFLDLNLPPQHNTGLGGIPVADNSSSVESLNMKEWQDGLRALLPNININFGGLPNSSSPSNANHSAPTSNTATTDSLSWDSPGSWTDPAIITGIPASSGNSLDSLQDDNPPHWLKSLQALTEMDGPSAAPSQTHHSAPFSTQIPLHRASWNPYPPPSNPSSFHSPPPGFQTAFRPPSKTPTDLLQSSTLDRH

SEQ ID NO: 40385 - protein, 1227 aa, Homo sapiens
MTQKVEELKETVKEEFMPWVSQYLVMKRVSIEPNFHSLYSNFLDTLKNPEFNKMVLNETYRNIKDLDVKSLLLEAYVKGQQELLYVVPFVAKVLESSIRSVVFRPPNPWTMAIMNVLAELHQEHDLKLNLKFEIEVLCKNLALDINELKPGNLLKDKDRLKNLDEQLSAPKKDVKQPEELPPITTTTTSTTPATNTTCTATVPPQPQYSYHDINVYSLAGLAPHITLNPTIPLFQAHPQLKQCVRQAIERAVQELVHPVVDRSIKIAMTTCEQIVRKDFALDSEESRMRIAAHHMMRNLTAGMAMITCREPLLMSISTNLKNSFASALRTASPQQREMMDQAAAQLAQDNCELACCFIQKTAVEKAGPEMDKRLATEFELRKHARQEGRRYCDPVVLTYQAERMPEQIRLKVGGVDPKQLAVYEEFARNVPGFLPTNDLSQPTGFLAQPMKQAWATDDVAQIYDKCITELEQHLHAIPPTLAMNPQAQALRSLLEVVVLSRNSRDAIAALGLLQKAVEGLLDATSGADADLLLRYRECHLLVLKALQDGRAYGSPWCNKQITRCLIECRDEYKYNVEAVELLIRNHLVNMQQYDLHLAQSMENGLNYMAVAFAMQLVKILLVDERSVAHVTEADLFHTIETLMRINAHSRGNAPEGLPQLMEVVRSNYEAMIDRAHGGPNFMMHSGISQASEYDDPPGLREKAEYLLREWVNLYHSAAAGRDSTKAFSAFVGQMHQQGILKTDDLITRFFRLCTEMCVEISYRAQAEQQHNPAANPTMIRAKCYHNLDAFVRLIALLVKHSGEATNTVTKINLLNKVLGIVVGVLLQDHDVRQSEFQQLPYHRIFIMLLLELNAPEHVLETINFQTLTAFCNTFHILRPTKAPGFVYAWLELISHRIFIARMLAHTPQQKGWPMYAQLLIDLFKYLAPFLRNVELTKPMQILYKGTLRVLLVLLHDFPEFLCDYHYGFCDVIPPNCIQLRNLILSAFPRNMRLPDPFTPNLKVDMLSEINIAPRILTNFTGVMPPQFKKDLDSYLKTRSPVTFLSDLRSNLQVSNEPGNRYNLQLINALVLYVGTQAIAHIHNKGSTPSMSTITHSAHMDIFQNLAVDLDTEGRYLFLNAIANQLRYPNSHTHYFSCTMLYLFAEANTEAIQEQITRVLLERLIVNRPHPWGLLITFIELIKNPAFKFWNHEFVHCAPEIEKLFQSVAQCCMGQKQAQQVMEGTGAS

SEQ ID NO: 40386 - protein, 2376 aa, Homo sapiens
MNLDSLSLALSQISYLVDNLTKKNYRASQQEIQHIVNRHGPEADRHLLRCLFSHVDFSGDGKSSGKDFHQTQFLIQECALLITKPNFISTLSYAIDNPLHYQKSLKPAPHLFAQLSKVLKLSKVQEVIFGLALLNSSSSDLRGFAAQFIKQKLPDLLRSYIDADVSGNQEGGFQDIAIEVLHLLLSHLLFGQKGAFGVGQEQIDAFLKTLRRDFPQERCPVVLAPLLYPEKRDILMDRILPDSGGVAKTMMESSLADFMQEVGYGFCASIEECRNIIVQFGVREVTAAQVARVLGMMARTHSGLTDGIPLQSISAPGSGIWSDGKDKSDGAQAHTWNVEVLIDVLKELNPSLNFKEVTYELDHPGFQIRDSKGLHNVVYGIQRGLGMEVFPVDLIYRPWKHAEGQLSFIQHSLINPEIFCFADYPCHTVATDILKAPPEDDNREIATWKSLDLIESLLRLAEVGQYEQVKQLFSFPIKHCPDMLVLALLQINTSWHTLRHELISTLMPIFLGNHPNSAIILHYAWHGQGQSPSIRQLIMHAMAEWYMRGEQYDQAKLSRILDVAQDLKALSMLLNGTPFAFVIDLAALASRREYLKLDKWLTDKIREHGEPFIQACMTFLKRRCPSILGGLAPEKDQPKSAQLPPETLATMLACLQACAGSVSQELSETILTMVANCSNVMNKARQPPPGVMPKGRPPSASSLDAISPVQIDPLAGMTSLSIGGSAAPHTQSMQGFPPNLGSAFSTPQSPAKAFPPLSTPNQTTAFSGIGGLSSQLPVGGLGTGSLTGIGTGALGLPAVNNDPFVQRKLGTSGLNQPTFQQSKMKPSDLSQVWPEANQHFSKEIDDEANSYFQRIYNHPPHPTMSVDEVLEMLQRFKDSTIKREREVFNCMLRNLFEEYRFFPQYPDKELHITACLFGGIIEKGLVTYMALGLALRYVLEALRKPFGSKMYYFGIAALDRFKNRLKDYPQYCQHLASISHFMQFPHHLQEYIEYGQQSRDPPVKMQGSITTPGSIALAQAQAQAQVPAKAPLAGQVSTMVTTSTTTTVAKTVTVTRPTGVSFKKDVPPSINTTNIDTLLVATDQTERIVEPPENIQEKIAFIFNNLSQSNMTQKVEELKETVKEEFMPWVSQYLVMKRVSIEPNFHSLYSNFLDTLKNPEFNKMVLNETYRNIKVLLTSDKAAANFSDRSLLKNLGHWLGMITLAKNKPILHTDLDVKSLLLEAYVKGQQELLYVVPFVAKVLESSIRSVVFRPPNPWTMAIMNVLAELHQEHDLKLNLKFEIEVLCKNLALDINELKPGNLLKDKDRLKNLDEQLSAPKKDVKQPEELPPITTTTTSTTPATNTTCTATVPPQPQYSYHDINVYSLAGLAPHITLNPTIPLFQAHPQLKQCVRQAIERAVQELVHPVVDRSIKIAMTTCEQIVRKDFALDSEESRMRIAAHHMMRNLTAGMAMITCREPLLMSISTNLKNSFASALRTASPQQREMMDQAAAQLAQDNCELACCFIQKTAVEKAGPEMDKRLATEFELRKHARQEGRRYCDPVVLTYQAERMPEQIRLKVGGVDPKQLAVYEEFARNVPGFLPTNDLSQPTGFLAQPMKQAWATDDVAQIYDKCITELEQHLHAIPPTLAMNPQAQALRSLLEVVVLSRNSRDAIAALGLLQKAVEGLLDATSGADADLLLRYRECHLLVLKALQDGRAYGSPWCNKQITRCLIECRDEYKYNVEAVELLIRNHLVNMQQYDLHLAQSMENGLNYMAVAFAMQLVKILLVDERSVAHVTEADLFHTIETLMRINAHSRGNAPEGLPQLMEVVRSNYEAMIDRAHGGPNFMMHSGISQASEYDDPPGLREKAEYLLREWVNLYHSAAAGRDSTKAFSAFVGQMHQQGILKTDDLITRFFRLCTEMCVEISYRAQAEQQHNPAANPTMIRAKCYHNLDAFVRLIALLVKHSGEATNTVTKINLLNKVLGIVVGVLLQDHDVRQSEFQQLPYHRIFIMLLLELNAPEHVLETINFQTLTAFCNTFHILRPTKAPGFVYAWLELISHRIFIARMLAHTPQQKGWPMYAQLLIDLFKYLAPFLRNVELTKPMQILYKGTLRVLLVLLHDFPEFLCDYHYGFCDVIPPNCIQLRNLILSAFPRNMRLPDPFTPNLKVDMLSEINIAPRILTNFTGVMPPQFKKDLDSYLKTRSPVTFLSDLRSNLQVSNEPGNRYNLQLINALVLYVGTQAIAHIHNKGSTPSMSTITHSAHMDIFQNLAVDLDTEGRYLFLNAIANQLRYPNSHTHYFSCTMLYLFAEANTEAIQEQITRVLLERLIVNRPHPWGLLITFIELIKNPAFKFWNHEFVHCAPEIEKLFQSVAQCCMGQKQAQQVMEGTGAS

SEQ ID NO: 40387 - protein, 2150 aa, Homo sapiens
MNLDSLSLALSQISYLVDNLTKKNYRASQQEIQHIVNRHGPEADRHLLRCLFSHVDFSGDGKSSGKDFHQTQFLIQECALLITKPNFISTLSYAIDNPLHYQKSLKPAPHLFAQLSKVLKLSKVQEVIFGLALLNSSSSDLRGFAAQFIKQKLPDLLRSYIDADVSGNQEGGFQDIAIEVLHLLLSHLLFGQKGAFGVGQEQIDAFLKTLRRDFPQERCPVVLAPLLYPEKRDILMDRILPDSGGVAKTMMESSLADFMQEVGYGFCASIEECRNIIVQFGVREVTAAQVARVLGMMARTHSGLTDGIPLQSISAPGSGIWSDGKDKSDGAQAHTWNVEVLIDVLKELNPSLNFKEVTYELDHPGFQIRDSKGLHNVVYGIQRGLGMEVFPVDLIYRPWKHAEGQLSFIQHSLINPEIFCFADYPCHTVATDILKAPPEDDNREIATWKSLDLIESLLRLAEVGQYEQVKQLFSFPIKHCPDMLVLALLQINTSWHTLRHELISTLMPIFLGNHPNSAIILHYAWHGQGQSPSIRQLIMHAMAEWYMRGEQYDQAKLSRILDVAQDLKALSMLLNGTPFAFVIDLAALASRREYLKLDKWLTDKIREHGEPFIQACMTFLKRRCPSILGGLAPEKDQPKSAQLPPETLATMLACLQACAGSVSQELSETILTMVANCSNVMNKARQPPPGVMPKGRPPSASSLDAISPVQIDPLAGMTSLSIGGSAAPHTQSMQGFPPNLGSAFSTPQSPAKAFPPLSTPNQTTAFSGIGGLSSQLPVGGLGTGSLTGIGTGALGLPAVNNDPFVQRKLGTSGLNQPTFQQTDLSQVWPEANQHFSKEIDDEANSYFQRIYNHPPHPTMSVDEVLEMLQRFKDSTIKREREVFNCMLRNLFEEYRFFPQYPDKELHITACLFGGIIEKGLVTYMALGLALRYVLEALRKPFGSKMYYFGIAALDRFKNRLKDYPQYCQHLASISHFMQFPHHLQEYIEYGQQSRDPPVKMQGSITTPGSIALAQAQAQAQVPAKAPLAGQVSTMVTTSTTTTVAKTVTVTRPTGVSFKKDVPPSINTTNIDTLLVATDQTERIVEPPENIQEKIAFIFNNLSQSNMTQKVEELKETVKEEFMPWVSQYLVMKRVSIEPNFHSLYSNFLDTLKNPEFNKMVLNETYRNIKVLLTSDKAAANFSDRSLLKNLGHWLGMITLAKNKPILHTDLDVKSLLLEAYVKGQQELLYVVPFVAKVLESSIRSVVFRPPNPWTMAIMNVLAELHQEHDLKLNLKFEIEVLCKNLALDINELKPGNLLKDKDRLKNLDEQLSAPKKDVKQPEELPPITTTTTSTTPATNTTCTATVPPQPQYSYHDINVYSLAGLAPHITLNPTIPLFQAHPQLKQCVRQAIERAVQELVHPVVDRSIKIAMTTCEQIVRKDFALDSEESRMRIAAHHMMRNLTAGMAMITCREPLLMSISTNLKNSFASALRTASPQQREMMDQAAAQLAQDNCELACCFIQKTAVEKAGPEMDKRLATEFELRKHARQEGRRYCDPVVLTYQAERMPEQIRLKVGGVDPKQLAVYEEFARNVPGFLPTNDLSQPTGFLAQPMKQAWATDDVAQIYDKCITELEQHLHAIPPTLAMNPQAQALRSLLEVVVLSRNSRDAIAALGLLQKAVEGLLDATSGADADLLLRYRECHLLVLKALQDGRAYGSPWCNKQITRCLIECRDEYKYNVEAVELLIRNHLVNMQQYDLHLAQSMENGLNYMAVAFAMQLVKILLVDERSVAHVTEADLFHTIETLMRINAHSRGNAPEGLPQLMEVVRSNYEAMIDRAHGGPNFMMHSGISQASEYDDPPGLREKAEYLLREWVNLYHSAAAGRDSTKAFSAFVGQMHQQGILKTDDLITRFFRLCTEMCVEISYRAQAEQQHNPAANPTMIRAKCYHNLDAFVRLIALLVKHSGEATNTVTKINLLNKVLGIVVGVLLQDHDVRQSEFQQLPYHRIFIMLLLELNAPEHVLETINFQTLTAFCNTFHILRPTKAPGFVYAWLELISHRIFIARMLAHTPQQKGWPMYAQLLIDLFKYLAPFLRNVELTKPMQILYKGTLRVLLVLLHDFPEFLCDYHYGFCDVIPPNCIQLRNLILSAFPRNMRLPDPFTPNLKEIML

SEQ ID NO: 40388 - protein, 1070 aa, Homo sapiens
MLLNGTPFAFVIDLAALASRREYLKLDKWLTDKIREHGEPFIQACMTFLKRRCPSILGGLAPEKDQPKSAQLPPETLATMLACLQACAGSVSQELSETILTMVANCSNVMNKARQPPPGVMPKGRPPSASSLDAISPVQIDPLAGMTSLSIGGSAAPHTQSMQGFPPNLGSAFSTPQSPAKAFPPLSTPNQTTAFSGIGGLSSQLPVGGLGTGSLTGIGTGALGLPAVNNDPFVQRKLGTSGLNQPTFQQSKMKPSDLSQVWPEANQHFSKEIDDEANSYFQRIYNHPPHPTMSVDEVLEMLQRFKDSTIKREREVFNCMLRNLFEEYRFFPQYPDKELHITACLFGGIIEKGLVTYMALGLALRYVLEALRKPFGSKMYYFGIAALDRFKNRLKDYPQYCQHLASISHFMQFPHHLQEYIEYGQQSRDPPVKMQGSITTPGSIALAQAQAQAQVPAKAPLAGQVSTMVTTSTTTTVAKTVTVTRPTGVSFKKDVPPSINTTNIDTLLVATDQTERIVEPPENIQEKIAFIFNNLSQSNMTQKVEELKETVKEEFMPWVSQYLVMKRVSIEPNFHSLYSNFLDTLKNLITRFFRLCTEMCVEISYRAQAEQQHNPAANPTMIRAKCYHNLDAFVRLIALLVKHSGEATNTVTKINLLNKVLGIVVGVLLQDHDVRQSEFQQLPYHRIFIMLLLELNAPEHVLETINFQTLTAFCNTFHILRPTKAPGFVYAWLELISHRIFIARMLAHTPQQKGWPMYAQLLIDLFKYLAPFLRNVELTKPMQILYKGTLRVLLVLLHDFPEFLCDYHYGFCDVIPPNCIQLRNLILSAFPRNMRLPDPFTPNLKVDMLSEINIAPRILTNFTGVMPPQFKKDLDSYLKTRSPVTFLSDLRSNLQVSNEPGNRYNLQLINALVLYVGTQAIAHIHNKGSTPSMSTITHSAHMDIFQNLAVDLDTEGRYLFLNAIANQLRYPNSHTHYFSCTMLYLFAEANTEAIQEQITRVLLERLIVNRPHPWGLLITFIELIKNPAFKFWNHEFVHCAPEIEKLFQSVAQCCMGQKQAQQVMEGTGAS

SEQ ID NO: 40389 - protein, 1551 aa, Homo sapiens
MNLDSLSLALSQISYLVDNLTKKNYRASQQEIQHIVNRHGPEADRHLLRCLFSHVDFSGDGKSSGKDFHQTQFLIQECALLITKPNFISTLSYAIDNPLHYQKSLKPAPHLFAQLSKVLKLSKVQEVIFGLALLNSSSSDLRGFAAQFIKQKLPDLLRSYIDADVSGNQEGGFQDIAIEVLHLLLSHLLFGQKGAFGVGQEQIDAFLKTLRRDFPQERCPVVLAPLLYPEKRDILMDRILPDSGGVAKTMMESSLADFMQEVGYGFCASIEECRNIIVQFGVREVTAAQVARVLGMMARTHSGLTDGIPLQSISAPGSGIWSDGKDKSDGAQAHTWNVEVLIDVLKELNPSLNFKEVTYELDHPGFQIRDSKGLHNVVYGIQRGLGMEVFPVDLIYRPWKHAEGQLSFIQHSLINPEIFCFADYPCHTVATDILKAPPEDDNREIATWKSLDLIESLLRLAEVGQYEQVKQLFSFPIKHCPDMLVLALLQINTSWHTLRHELISTLMPIFLGNHPNSAIILHYAWHGQGQSPSIRQLIMHAMAEWYMRGEQYDQAKLSRILDVAQDLKALSMLLNGTPFAFVIDLAALASRREYLKLDKWLTDKIREHGEPFIQACMTFLKRRCPSILGGLAPEKDQPKSAQLPPETLATMLACLQACAGSVSQELSETILTMVANCSNVMNKARQPPPGVMPKGRPPSASSLDAISPVQIDPLAGMTSLSIGGSAAPHTQSMQGFPPNLGSAFSTPQSPAKAFPPLSTPNQTTAFSGIGGLSSQLPVGGLGTGSLTGIGTGALGLPAVNNDPFVQRKLGTSGLNQPTFQQSKMKPSDLSQVWPEANQHFSKEIDDEANSYFQRIYNHPPHPTMSVDEVLEMLQRFKDSTIKREREVFNCMLRNLFEEYRFFPQYPDKELHITACLFGGIIEKGLVTYMALGLALRYVLEALRKPFGSKMYYFGIAALDRFKNRLKDYPQYCQHLASISHFMQFPHHLQEYIEYGQQSRDPPVKMQGSITTPGSIALAQAQAQAQVPAKAPLAGQVSTMVTTSTTTTVAKTVTVTRPTGVSFKKDVPPSINTTNIDTLLVATDQTERIVEPPENIQEKIAFIFNNLSQSNMTQKVEELKETVKEEFMPWVSQYLVMKRVSIEPNFHSLYSNFLDTLKNPEFNKMVLNETYRNIKVLLTSDKAAANFSDRSLLKNLGHWLGMITLAKNKPILHTDLDVKSLLLEAYVKGQQELLYVVPFVAKVLESSIRSVVFRPPNPWTMAIMNVLAELHQEHDLKLNLKFEIEVLCKNLALDINELKPGNLLKDKDRLKNLDEQLSAPKKDVKQPEELPPITTTTTSTTPATNTTCTATVPPQPQYSYHDINVYSLAGLAPHITLNPTIPLFQAHPQLKQCVRQAIERAVQELVHPVVDRSIKIAMTTCEQIVRKDFALDSEESRMRIAAHHMMRNLTAGMAMITCREPLLMSISTNLKNSFASALRVSWLFPWYRYKTYYCLSVIIFFFVYIWHWALPLILNNHHICLMSSIILDCNSVRQSIMSVCFFFFLLYSQHDV

SEQ ID NO: 40390 - protein, 316 aa, Homo sapiens
MLLLELNAPEHVLETINFQTLTAFCNTFHILRPTKAPGFVYAWLELISHRIFIARMLAHTPQQKGWPMYAQLLIDLFKYLAPFLRNVELTKPMQILYKGTLRVLLVLLHDFPEFLCDYHYGFCDVIPPNCIQLRNLILSAFPRNMRLPDPFTPNLKVDMLSEINIAPRILTNFTGVMPPQFKKDLDSYLKTRSPVTFLSDLRSNLQVSNEPGNRYNLQLINALVLYVGTQAIAHIHNKGSTPSMSTITHSAHMDIFQNLAVDLDTEGRYLFLNAIANQSGTQIATLTTSVAPCCTFLQRPIRKPSKNRSQEFSWNG

SEQ ID NO: 40391 - protein, 540 aa, Homo sapiens
MVRTDGHTLSEKRNYQVTNSMFGASRKKFVEGVDSDYHDENMYYSQSSMFPHRSEKDMLASPSTSGQLSQFGASLYGQQSALGLPMRGMSNNTPQLNRSLSQGTQLPSHVTPTTGVPTMSLHTPPSPSRGILPMNPRNMMNHSQVGQGIGIPSRTNSMSSSGLGSPNRSSPSIICMPKQQPSRQPFTVNSMSGFGMNRNQAFGMNNSLSSNIFNGTDGSENVTGLDLSDFPALADRNRREGSGNPTPLINPLAGRAPYVGMVTKPANEQSQDFSIHNEDFPALPGSSYKDPTSSNDDSKSNLNTSGKTTSSTDGPKFPGDKSSTTQNNNQQKKGIQVLPDGRVTNIPQGMVTDQFGMIGLLTFIRAAETDPGMVHLALGSDLTTLGLNLNSPENLYPKFASPWASSPCRPQDIDFHVPSEYLTNIHIRDKLAAIKLGRYGEDLLFYLYYMNGGDVLQLLAAVELFNRDWRYHKEERVWITRAPGMEPTMKTNTYERGTYYFFDCLNWRKVAKEFHLEYDKLEERPHLPSTFNYNPAQQAF

SEQ ID NO: 40392 - protein, 540 aa, Homo sapiens; identical to SEQ ID NO: 40391

SEQ ID NO: 40393 - protein, 25 aa, Homo sapiens
MVRTDGHTLSEKRNYQVTNSMFGAS

SEQ ID NO: 40394 - protein, 183 aa, Homo sapiens
MVRTDGHTLSEKRNYQVTNSMFGASRKKFVEGVDSDYHDENMYYSQSSMFPHRSEKDMLASPSTSGQLSQFGASLYGQQSALGLPMRGMSNNTPQLNRSLSQGTQLPSHVTPTTGVPTMSLHTPPSPSRGILPMNPRNMMNHSQVGQGIGIPSRTNSMSSSGLGSPNRSSPSIICMPKQQPSR

SEQ ID NO: 40395 - protein, 540 aa, Homo sapiens; identical to SEQ ID NO: 40391

SEQ ID NO: 40396 - protein, 191 aa, Homo sapiens
MVTDQFGMIGLLTFIRAAETDPGMVHLALGSDLTTLGLNLNSPENLYPKFASPWASSPCRPQDIDFHVPSEYLTNIHIRDKLAAIKLGRYGEDLLFYLYYMNGGDVLQLLAAVELFNRDWRYHKEERVWITRAPGMEPTMKTNTYERGTYYFFDCLNWRKVAKEFHLEYDKLEERPHLPSTFNYNPAQQAF

SEQ ID NO: 40397 - protein, 321 aa, Homo sapiens
MVRTDGHTLSEKRNYQVTNSMFGASRKKFVEGVDSDYHDENMYYSQSSMFPHRSEKDMLASPSTSGQLSQFGASLYGQQSALGLPMRGMSNNTPQLNRSLSQGTQLPSHVTPTTGVPTMSLHTPPSPSRGILPMNPRNMMNHSQVGQGIGIPSRTNSMSSSGLGSPNRSSPSIICMPKQQPSRQPFTVNSMSGFGMNRNQAFGMNNSLSSNIFNGTDGSENVTGLDLSDFPALADRNRREGSGNPTPLINPLAGRAPYVGMVTKPANEQSQDFSIHNEDFPALPGSSYKDPTSSNDDSKSNLNTSGKTTSSTDGPKFPGDK

SEQ ID NO: 40398 - protein, 753 aa, Homo sapiens
MADKRKLQGEIDRCLKKVSEGVEQFEDIWQKLHNAANANQKEKYEADLKKEIKKLQRLRDQIKTWVASNEIKDKRQLIDNRKLIETQMERFKVVERETKTKAYSKEGLGLAQKVDPAQKEKEEVGQWLTNTIDTLNMQVDQFESEVESLSVQTRKKKGDKDKQDRIEGLKRHIEKHRYHVRMLETILRMLDNDSILVDAIRKIKDDVEYYVDSSQDPDFEENEFLYDDLDLEDIPQALVATSPPSHSHMEDEIFNQSSSTPTSTTSSSPIPPSPANCTTENSEDDKKRGRSTDSEVSQSPAKNGSKPVHSNQHPQSPAVPPTYPSGPPPAASALSTTPGNNGVPAPAAPPSALGPKASPAPSHNSGTPAPYAQAVAPPAPSGPSTTQPRPPSVQPSGGGGGGSGGGGSSSSSNSSAGGGAGKQNGATSYSSVVADSPAEVALSSSGGNNASSQALGPPSGPHNPPPSTSKEPSAAAPTGAGGVAPGSGNNSGGPSLLVPLPVNPPSSPTPSFSDAKAAGALLNGPPQFSTAPEIKAPEPLSSLKSMAERAAISSGIEDPVPTLHLTERDIILSSTSAPPASAQPPLQLSEVNIPLSLGVCPLGPVPLTKEQLYQQAMEEAAWHHMPHPSDSERIRQYLPRNPCPTPPYHHQMPPPHSDTVEFYQRLSTETLFFIFYYLEGTKAQYLAAKALKKQSWRFHTKYMMWFQRHEEPKTITDEFEQGTYIYFDYEKWGQRKKEGFTFEYRYLEDRDLQ

SEQ ID NO: 40399 - protein, 571 aa, Homo sapiens
MLETILRMLDNDSILVDAIRKIKDDVEYYVDSSQDPDFEENEFLYDDLDLEDIPQALVATSPPSHSHMEDEIFNQSSSTPTSTTSSSPIPPSPANCTTENSEDDKKRGRSTDSEVSQSPAKNGSKPVHSNQHPQSPAVPPTYPSGPPPAASALSTTPGNNGVPAPAAPPSALGPKASPAPSHNSGTPAPYAQAVAPPAPSGPSTTQPRPPSVQPSGGGGGGSGGGGSSSSSNSSAGGGAGKQNGATSYSSVVADSPAEVALSSSGGNNASSQALGPPSGPHNPPPSTSKEPSAAAPTGAGGVAPGSGNNSGGPSLLVPLPVNPPSSPTPSFSDAKAAGALLNGPPQFSTAPEIKAPEPLSSLKSMAERAAISSGIEDPVPTLHLTERDIILSSTSAPPASAQPPLQLSEVNIPLSLGVCPLGPVPLTKEQLYQQAMEEAAWHHMPHPSDSERIRQYLPRNPCPTPPYHHQMPPPHSDTVEFYQRLSTETLFFIFYYLEPRDVRTAWVDSEAGPLRHTSAPLPVAHWLTRGPSPALLQQPQSRPTPLCSSAHSQASLETTGELSSPLPTPLL

SEQ ID NO: 40400 - protein, 753 aa, Homo sapiens; identical to SEQ ID NO: 40398

SEQ ID NO: 40401 - protein, 288 aa, Homo sapiens
  VARIANT 1: note = MOD_RES - Any amino acid
XKEPSAAAPTGAGGVAPGSGNNSGGPSLLVPLPVNPPSSPTPSFSDAKAAGALLNGPPQFSTAPEIKAPEPLSSLKSMAERAAISSGIEDPVPTLHLTERDIILSSTSAPPASAQPPLQLSEVNIPLSLGVCPLGPVPLTKEQLYQQAMEEAAWHHMPHPSDSERIRQYLPRNPCPTPPYHHQMPPPHSDTVEFYQRLSTETLFFIFYYLEGTKAQYLAAKALKKQSWRFHTKYMMWFQRHEEPKTITDEFEQLAQSLSLTKYSSLWLSAQPGTPPSHPPLGQLLGLL

SEQ ID NO: 40402 - protein, 767 aa, Homo sapiens
MSRSPDAKEDPVECPLCMEPLEIDDINFFPCTCGYQICRFCWHRIRTDENGLCPACRKPYPEDPAVYKPLSQEELQRIKNEKKQKQNERKQKISENRKHLASVRVVQKNLVFVVGLSQRLADPEVLKRPEYFGKFGKIHKVVINNSTSYAGSQGPSASAYVTYIRSEDALRAIQCVNNVVVDGRTLKASLGTTKYCSYFLKNMQCPKPDCMYLHELGDEAASFTKEEMQAGKHQEYEQKLLQELYKLNPNFLQLSTGSVDKNKNKVTPLQRYDTPIDKPSDSLSIGNGDNSQQISNSDTPSPPPGLSKSNPVIPISSSNHSARSPFEGAVTESQSLFSDNFRHPNPIPSGLPPFPSSPQTSSDWPTAPEPQSLFTSETIPVSSSTDWQAAFGFGSSKQPEDDLGFDPFDVTRKALADLIEKELSVQDQPSLSPTSLQNSSSHTTTAKGPGSGFLHPAAATNANSLNSTFSVLPQRFPQFQQHRAVYNSFSFPGQAARYPWMAFPRNSIMHLNHTANPTSNSNFLDLNLPPQHNTGLGGIPVADNSSSVESLNMKEWQDGLRALLPNININFGGLPNSSSPSNANHSAPTSNTATTDSLSWDSPGSWTDPAIITGIPASSGNSLDSLQDDNPPHWLKSLQALTEMDGPSAAPSQTHHSAPFSTQIPLHRASWNPYPPPSNPSSFHSPPPGIYYRVQHWTAIRQRGATIRKCRICPTLFSPSQPTTHSSLLISYVLKNPVPDQFFFSLTPDAMRSQGHYHLFINCKNFC

SEQ ID NO: 40403 - protein, 575 aa, Homo sapiens
MSRSPDAKEDPVECPLCMEPLEIDDINFFPCTCGYQICRFCWHRIRTDENGLCPACRKPYPEDPAVYKPLSQEELQRIKNEKKQKQNERKQKISENRKHLASVRVVQKNLVFVVGLSQRLADPEVLKRPEYFGKFGKIHKVVINNSTSYAGSQGPSASAYVTYIRSEDALRAIQCVNNVVVDGRTLKASLGTTKYCSYFLKNMQCPKPDCMYLHELGDEAASFTKEEMQAGKHQEYEQKLLQELYKLNPNFLQLSTGSVDKNKNKVTPLQRYDTPIDKPSDSLSIGNGDNSQQISNSDTPSPPPGLSKSNPVIPISSSNHSARSPFEGAVTESQSLFSDNFRHPNPIPSGLPPFPSSPQTSSDWPTAPEPQSLFTSETIPVSSSTDWQAAFGFGSSKQPEDDLGFDPFDVTRKALADLIEKELSVQDQPSLSPTSLQNSSSHTTTAKGPGSGFLHPAAATNANSLNSTFSVLPQRFPQFQQHRAVYNSFSFPGQAARYPWMAFPRNSIMHLNHTANPTSNSNFLDLNLPPQHNTGLGGIPVAGEEEVKVSTMPLSTSSHSLQQGQQPTSLHTTVA

SEQ ID NO: 40404 - protein, 433 aa, Homo sapiens
MSRSPDAKEDPVECPLCMEPLEIDDINFFPCTCGYQICRFCWHRIRTDENGLCPACRKPYPEDPAVYKPLSQEELQRIKNEKKQKQNERKQKISENRKHLASVRVVQKNLVFVVGLSQRLADPEVLKRPEYFGKFGKIHKVVINNSTSYAGSQGPSASAYVTYIRSEDALRAIQCVNNVVVDGRTLKASLGTTKYCSYFLKNMQCPKPDCMYLHELGDEAASFTKEEMQAGKHQEYEQKLLQELYKLNPNFLQLSTGSVDKNKNKVTPLQRYDTPIDKPSDSLSIGNGDNSQQISNSDTPSPPPGLSKSNPVIPISSSNHSARSPFEGAVTESQSLFSDNFRHPNPIPSGLPPFPSSPQTSSDWPTAPEPQSLFTSETIPVSSSTDWQAAFGFGSSKQPEDDLGFDPFDVTRKALADLTEPIERKRLAVLKRR

SEQ ID NO: 40405 - protein, 639 aa, Homo sapiens
MSRSPDAKEDPVECPLCMEPLEIDDINFFPCTCGYQICRFCWHRIRTDENGLCPACRKPYPEDPAVYKPLSQEELQRIKNEKKQKQNERKQKISENRKHLASVRVVQKNLVFVVGLSQRLADPEVLKRPEYFGKFGKIHKVVINNSTSYAGSQGPSASAYVTYIRSEDALRAIQCVNNVVVDGRTLKASLGTTKYCSYFLKNMQCPKPDCMYLHELGDEAASFTKEEMQAGKHQEYEQKLLQELYKLNPNFLQLSTGSVDKNKNKVTPLQSPIDKPSDSLSIGNGDNSQQISNSDTPSPPPGLSKSNPVIPISSSNHSARSPFEGAVTESQSLFSDNFRHPNPIPSGLPPFPSSPQTSSDWPTAPEPQSLFTSETIPVSSSTDWQAAFGFGSSKQPEDDLGFDPFDVTRKALADLIEKELSVQDQPSLSPTSLQNSSSHTTTAKGPGSGFLHPAAATNANSLNSTFSVLPQRFPQFQQHRAVYNSFSFPGQAARYPWMAFPRNSIMHLNHTANPTSNSNFLDLNLPPQHNTGLGGIPVAGIPASSGNSLDSLQDDNPPHWLKSLQALTEMDGPSAAPSQTHHSAPFSTQIPLHRASWNPYPPPSNPSSFHSPPPGFQTAFRPPSKTPTDLLQSSTLDRH

SEQ ID NO: 40406 - protein, 433 aa, Homo sapiens; identical to SEQ ID NO: 40404

SEQ ID NO: 40407 - protein, 642 aa, Homo sapiens
MSRSPDAKEDPVECPLCMEPLEIDDINFFPCTCGYQICRFCWHRIRTDENGLCPACRKPYPEDPAVYKPLSQEELQRIKNEKKQKQNERKQKISENRKHLASVRVVQKNLVFVVGLSQRLADPEVLKRPEYFGKFGKIHKVVINNSTSYAGSQGPSASAYVTYIRSEDALRAIQCVNNVVVDGRTLKASLGTTKYCSYFLKNMQCPKPDCMYLHELGDEAASFTKEEMQAGKHQEYEQKLLQELYKLNPNFLQLSTGSVDKNKNKVTPLQRYDTPIDKPSDSLSIGNGDNSQQISNSDTPSPPPGLSKSNPVIPISSSNHSARSPFEGAVTESQSLFSDNFRHPNPIPSGLPPFPSSPQTSSDWPTAPEPQSLFTSETIPVSSSTDWQAAFGFGSSKQPEDDLGFDPFDVTRKALADLIEKELSVQDQPSLSPTSLQNSSSHTTTAKGPGSGFLHPAAATNANSLNSTFSVLPQRFPQFQQHRAVYNSFSFPGQAARYPWMAFPRNSIMHLNHTANPTSNSNFLDLNLPPQHNTGLGGIPVAGIPASSGNSLDSLQDDNPPHWLKSLQALTEMDGPSAAPSQTHHSAPFSTQIPLHRASWNPYPPPSNPSSFHSPPPGFQTAFRPPSKTPTDLLQSSTLDRH

SEQ ID NO: 40408 - protein, 572 aa, Homo sapiens
MSRSPDAKEDPVECPLCMEPLEIDDINFFPCTCGYQICRFCWHRIRTDENGLCPACRKPYPEDPAVYKPLSQEELQRIKNEKKQKQNERKQKISENRKHLASVRVVQKNLVFVVGLSQRLADPEVLKRPEYFGKFGKIHKVVINNSTSYAGSQGPSASAYVTYIRSEDALRAIQCVNNVVVDGRTLKASLGTTKYCSYFLKNMQCPKPDCMYLHELGDEAASFTKEEMQAGKHQEYEQKLLQELYKLNPNFLQLSTGSVDKNKNKVTPLQSPIDKPSDSLSIGNGDNSQQISNSDTPSPPPGLSKSNPVIPISSSNHSARSPFEGAVTESQSLFSDNFRHPNPIPSGLPPFPSSPQTSSDWPTAPEPQSLFTSETIPVSSSTDWQAAFGFGSSKQPEDDLGFDPFDVTRKALADLIEKELSVQDQPSLSPTSLQNSSSHTTTAKGPGSGFLHPAAATNANSLNSTFSVLPQRFPQFQQHRAVYNSFSFPGQAARYPWMAFPRNSIMHLNHTANPTSNSNFLDLNLPPQHNTGLGGIPVAGEEEVKVSTMPLSTSSHSLQQGQQPTSLHTTVA

SEQ ID NO: 40409 - protein, 713 aa, Homo sapiens
MSRSPDAKEDPVECPLCMEPLEIDDINFFPCTCGYQICRFCWHRIRTDENGLCPACRKPYPEDPAVYKPLSQEELQRIKNEKKQKQNERKQKISENRKHLASVRVVQKNLVFVVGLSQRLADPEVLKRPEYFGKFGKIHKVVINNSTSYAGSQGPSASAYVTYIRSEDALRAIQCVNNVVVDGRTLKASLGTTKYCSYFLKNMQCPKPDCMYLHELGDEAASFTKEEMQAGKHQEYEQKLLQELYKLNPNFLQLSTGSVDKNKNKVTPLQRYDTPIDKPSDSLSIGNGDNSQQISNSDTPSPPPGLSKSNPVIPISSSNHSARSPFEGAVTESQSLFSDNFRHPNPIPSGLPPFPSSPQTSSDWPTAPEPQSLFTSETIPVSSSTDWQAAFGFGSSKQPEDDLGFDPFDVTRKALADLIEKELSVQDQPSLSPTSLQNSSSHTTTAKGPGSGFLHPAAATNANSLNSTFSVLPQRFPQFQQHRAVYNSFSFPGQAARYPWMAFPRNSIMHLNHTANPTSNSNFLDLNLPPQHNTGLGGIPVADNSSSVESLNMKEWQDGLRALLPNININFGGLPNSSSPSNANHSAPTSNTATTDSLSWDSPGSWTDPAIITGIPASSGNSLDSLQDDNPPHWLKSLQALTEMDGPSAAPSQTHHSAPFSTQIPLHRASWNPYPPPSNPSSFHSPPPGFQTAFRPPSKTPTDLLQSSTLDRH

SEQ ID NO: 40410 - protein, 557 aa, Homo sapiens
MPKEKYEPPDPRRMYTIMSSEEAANGKKSHWAELEISGKVRSLSASLWSLTHLTALHLSDNSLSRIPSDIAKLHNLVYLDLSSNKIRSLPAELGNMVSLRELHLNNNLLRVLPFELGKLFQLQTLGLKGNPLTQDILNLYQEPDGTRRLLNYLLDNLSGTAKRITTEQPPPRSWIMLQEPDRTRPTALFSVMCYNVLCDKYATRQLYGYCPSWALNWDYRKKAIIQEILSCNADIVSLQEVETEQYYSFFLVELKERGYNGFFSPKSRARTMSEQERKHVDGCAIFFKTEKFTLVQKHTVEFNQLAMANSEGSEAMLNRVMTKDNIGVAVLLELRKESIEMPSGKPHLGTEKQLILVANAHMHWDPEYSDVKLVQTMMFLSEVKNIIDKASRNLKSSVLGEFGTIPLVLCADLNSLPDSGVVEYLSTGGVETNHKDFKELRYNESLTNFSCHGKNGTTNGRITHGFKLQSAYESGLMPYTNYTFDFKGIIDYIFYSKPQLNTLGILGPLDHHWLVENNISGCPHPLIPSDHFSLFAQLELLLPFLPQVNGIHLPGRR

SEQ ID NO: 40411 - protein, 557 aa, Homo sapiens; identical to SEQ ID NO: 40410

SEQ ID NO: 40412 - protein, 285 aa, Homo sapiens
MPAATVDHSQRICEVWACNLDEEMKKIRQVIRKYNYVAMDTEFPGVVARPIGEFRSNADYQYQLLRCNVDLLKIIQLGLTFMNEQGEYPPGTSTWQFNFKFNLTEDMYAQDSIELLTTSGIQFKKHEEEGIETQYFAELLMTSGVVLCEGVKWLSFHSGYDFGYLIKILTNSNLPEEELDFFEILRLFFPVIYDVKYLMKSCKNLKGGLQEVAEQLELERIGPQHQAGSDSLLTGMAFFKMREMFFEDHIDDAKYCGHLYGLGSGSSYVQNGTGNAYEEEANKQS

SEQ ID NO: 40413 - protein, 41 aa, Homo sapiens
MPAATVDHSQRICEVWACNLDEEMKKIRQVIRKYNYVAMDT

SEQ ID NO: 40414 - protein, 244 aa, Homo sapiens
MPAATVDHSQRICEVWACNLDEEMKKIRQVIRKYNYVAMDTEFPGVVARPIGEFRSNADYQYQLLRCNVDLLKIIQLGLTFMNEQGEYPPGTSTWQFNFKFNLTEDMYAQDSIELLTTSGIQFKKHEEEGIETQYFAELLMTSGVVLCEGVKWLSFHSGYDFGYLIKILTNSNLPEEELDFFEILRLFFPVIYDVKYLMKSCKNLKGGLQEVAEQLELERIGPQHQAGSDSLLTGMAFFKMREV

SEQ ID NO: 40415 - protein, 147 aa, Homo sapiens
MPAATVDHSQRICEVWACNLDEEMKKIRQVIRKYNYVAMDTEFPGVVARPIGEFRSNADYQYQLLRCNVDLLKIIQLGLTFMNEQGEYPPGTSTWQFNFKFNLTEDMYAQDSIELLTTSGIQFKKHEEEGIETQYFAELLMTSGVVL

SEQ ID NO: 40416 - protein, 292 aa, Homo sapiens
MPAALVENSQVICEVWASNLEEEMRKIREIVLSYSYIAMDTEFPGVVVRPIGEFRSSIDYQYQLLRCNVDLLKIIQLGLTFTNEKGEYPSGINTWQFNFKFNLTEDMYSQDSIDLLANSGLQFQKHEEEGIDTLHFAELLMTSGVVLCDNVKWLSFHSGYDFGYMVKLLTDSRLPEEEHEFFHILNLFFPSIYDVKYLMKSCKNLKGGLQEVADQLDLQRIGRQHQAGSDSLLTGMAFFRMKELFFEDSIDDAKYCGRLYGLGTGVAQKQNEDVDSAQEKMSILAIINNMQQ

SEQ ID NO: 40417 - protein, 292 aa, Homo sapiens; identical to SEQ ID NO: 40416

SEQ ID NO: 40418 - protein, 118 aa, Homo sapiens
MPAALVENSQVICEVWASNLEEEMRKIREIVLSYSYIAMDTEFPGVVVRPIGEFRSSIDYQYQLLRCNVDLLKIIQLGLTFTNEKGEYPSGINTWQFNFKFNLTEDMYSQDSIDLLAN

SEQ ID NO: 40419 - protein, 292 aa, Homo sapiens; identical to SEQ ID NO: 40416

SEQ ID NO: 40420 - protein, 55 aa, Homo sapiens
MPAALVENSQVICEVWASNLEEEMRKIREIVLSYSYIAMDTEFPGVVVRPIGEFR

SEQ ID NO: 40421 - protein, 225 aa, Homo sapiens
MPAALVENSQVICEVWASNLEEEMRKIREIVLSYSYIAMDTEFPGVVVRPIGEFRSSIDYQYQLLRCNVDLLKIIQLGLTFTNEKGEYPSGINTWQFNFKFNLTGYDFGYMVKLLTDSRLPEEEHEFFHILNLFFPSIYDVKYLMKSCKNLKGGLQEVADQLDLQRIGRQHQAGSDSLLTGMAFFRMKELFFEDSIDDAKYCGRLYGLGTGVAQKQNEDVDSAQE

SEQ ID NO: 40422 - protein, 119 aa, Homo sapiens
MPAALVENSQVICEVWASNLEEEMRKIREIVLSYSYIAMDTEFPGVVVRPIGEFRSSIDYQYQLLRCNVDLLKIIQLGLTFTNEKGEYPSGINTWQFNFKFNLTEDMYSQDSIDLLANS

SEQ ID NO: 40423 - protein, 238 aa, Homo sapiens
MPAALVENSQVICEVWASNLEEEMRKIREIVLSYSYIAMDTEFPGVVVRPIGEFRSSIDYQYQLLRCNVDLLKIIQLGLTFTNEKGEYPSGINTWQFNFKFNLTGYDFGYMVKLLTDSRLPEEEHEFFHILNLFFPSIYDVKYLMKSCKNLKGGLQEVADQLDLQRIGRQHQAGSDSLLTGMAFFRMKELFFEDSIDDAKYCGRLYGLGTGVAQKQNEDVDSAQEKMSILAIINNMQQ

SEQ ID NO: 40424 - protein, 55 aa, Homo sapiens; identical to SEQ ID NO: 40420

SEQ ID NO: 40425 - protein, 85 aa, Homo sapiens
MYSQDSIDLLANSGLQFQKHEEEGIDTLHFAELLMTSGVVLCDNVKWLSFHSGYDFGYMVKLLTDSRLPEEEHEFFHILNLFFPS

SEQ ID NO: 40426 - protein, 133 aa, Homo sapiens
MPAALVENSQVICEVWASNLEEEMRKIREIVLSYSYIAMDTEFPGVVVRPIGEFRSSIDYQYQLLRCNVDLLKIIQLGLTFTNEKGEYPSGINTWQFNFKFNLTEDMYSQDSIDLLANSGLQFQKHEEEGIDT

SEQ ID NO: 40427 - protein, 186 aa, Homo sapiens
MYSQDSIDLLANSGLQFQKHEEEGIDTLHFAELLMTSGVVLCDNVKWLSFHSGYDFGYMVKLLTDSRLPEEEHEFFHILNLFFPSIYDVKYLMKSCKNLKGGLQEVADQLDLQRIGRQHQAGSDSLLTGMAFFRMKELFFEDSIDDAKYCGRLYGLGTGVAQKQNEDVDSAQEKMSILAIINNMQQ

SEQ ID NO: 40428 - protein, 186 aa, Homo sapiens; identical to SEQ ID NO: 40427

SEQ ID NO: 40429 - protein, 186 aa, Homo sapiens; identical to SEQ ID NO: 40427

SEQ ID NO: 40430 - protein, 121 aa, Homo sapiens
MPAALVENSQVICEVWASNLEEEMRKIREIVLSYSYIAMDTEFPGVVVRPIGEFRSSIDYQYQLLRCNVDLLKIIQLGLTFTNEKGEYPSGINTWQFNFKFNLTGYDFGYMVKLLTDSRLP

SEQ ID NO: 40431 - protein, 186 aa, Homo sapiens; identical to SEQ ID NO: 40427

SEQ ID NO: 40432 - protein, 128 aa, Homo sapiens
MVKLLTDSRLPEEEHEFFHILNLFFPSIYDVKYLMKSCKNLKGGLQEVADQLDLQRIGRQHQAGSDSLLTGMAFFRMKELFFEDSIDDAKYCGRLYGLGTGVAQKQNEDVDSAQEKMSILAIINNMQQ

SEQ ID NO: 40433 - protein, 269 aa, Homo sapiens
MRKIREIVLSYSYIAMDTEFPGVVVRPIGEFRSSIDYQYQLLRCNVDLLKIIQLGLTFTNEKGEYPSGINTWQFNFKFNLTEDMYSQDSIDLLANSGLQFQKHEEEGIDTLHFAELLMTSGVVLCDNVKWLSFHSGYDFGYMVKLLTDSRLPEEEHEFFHILNLFFPSIYDVKYLMKSCKNLKGGLQEVADQLDLQRIGRQHQAGSDSLLTGMAFFRMKELFFEDSIDDAKYCGRLYGLGTGVAQKQNEDVDSAQEKMSILAIINNMQQ

SEQ ID NO: 40434 - protein, 1445 aa, Homo sapiens
MQGPPLLTAAHLLCVCTAALAVAPGPRFLVTAPGIIRPGGNVTIGVELLEHCPSQVTVKAELLKTASNLTVSVLEAEGVFEKGSFKTLTLPSLPLNSADEIYELRVTGRTQDEILFSNSTRLSFETKRISVFIQTDKALYKPKQEVKFRIVTLFSDFKPYKTSLNILIKDPKSNLIQQWLSQQSDLGVISKTFQLSSHPILGDWSIQVQVNDQTYYQSFQVSEYVLPKFEVTLQTPLYCSMNSKHLNGTITAKYTYGKPVKGDVTLTFLPLSFWGKKKNITKTFKINGSANFSFNDEEMKNVMDSSNGLSEYLDLSSPGPVEILTTVTESVTGISRNVSTNVFFKQHDYIIEFFDYTTVLKPSLNFTATVKVTRADGNQLTLEERRNNVVITVTQRNYTEYWSGSNSGNQKMEAVQKINYTVPQSGTFKIEFPILEDSSELQLKAYFLGSKSSMAVHSLFKSPSKTYIQLKTRDENIKVGSPFELVVSGNKRLKELSYMVVSRGQLVAVGKQNSTMFSLTPENSWTPKACVIVYYIEDDGEIISDVLKIPVQLVFKNKIKLYWSKVKAEPSEKVSLRISVTQPDSIVGIVAVDKSVNLMNASNDITMENVVHELELYNTGYYLGMFMNSFAVFQECGLWVLTDANLTKDYIDGVYDNAEYAERFMEENEGHIVDIHDFSLGSSPHVRKHFPETWIWLDTNMGYRIYQEFEVTVPDSITSWVATGFVISEDLGLGLTTTPVELQAFQPFFIFLNLPYSVIRGEEFALEITIFNYLKDATEVKVIIEKSDKFDILMTSNEINATGHQQTLLVPSEDGATVLFPIRPTHLGEIPITVTALSPTASDAVTQMILVKAEGIEKSYSQSILLDLTDNRLQSTLKTLSFSFPPNTVTGSERVQITAIGDVLGPSINGLASLIRMPYGCGEQNMINFAPNIYILDYLTKKKQLTDNLKEKALSFMRQGYQRELLYQREDGSFSAFGNYDPSGSTWLSAFVLRCFLEADPYIDIDQNVLHRTYTWLKGHQKSNGEFWDPGRVIHSELQGGNKSPVTLTAYIVTSLLGYRKYQPNIDVQESIHFLESEFSRGISDNYTLALITYALSSVGSPKAKEALNMLTWRAEQEGGMQFWVSSESKLSDSWQPRSLDIEVAAYALLSHFLQFQTSEGIPIMRWLSRQRNSLGGFASTQDTTVALKALSEFAALMNTERTNIQVTVTGPSSPSPVKFLIDTHNRLLLQTAELAVVQPTAVNISANGFGFAICQLNVVYNVKASGSSRRRRSIQNQEAFDLDVAVKENKDDLNHVDLNVCTSFSGPGRSGMALMEVNLLSGFMVPSEAISLSETVKKVEYDHGKLNLYLDSVNETQFCVNIPAVRNFKVSNTQDASVSIVDYYEPRRQAVRSYNSEVKLSSCDLCSDVQGCRPCEDGASGSHHHSSVIFIFCFKLLYFMELWL

SEQ ID NO: 40435 - protein, 1368 aa, Homo sapiens
MQGPPLLTAAHLLCVCTAALAVAPGPRFLVTAPGIIRPGGNVTIGVELLEHCPSQVTVKAELLKTASNLTVSVLEAEGVFEKGSFKTLTLPSDPKSNLIQQWLSQQSDLGVISKTFQLSSHPILGDWSIQVQVNDQTYYQSFQVSEYVLPKFEVTLQTPLYCSMNSKHLNGTITAKYTYGKPVKGDVTLTFLPLSFWGKKKNITKTFKINGSANFSFNDEEMKNVMDSSNGLSEYLDLSSPGPVEILTTVTESVTGISRNVSTNVFFKQHDYIIEFFDYTTVLKPSLNFTATVKVTRADGNQLTLEERRNNVVITVTQRNYTEYWSGSNSGNQKMEAVQKINYTVPQSGTFKIEFPILEDSSELQLKAYFLGSKSSMAVHSLFKSPSKTYIQLKTRDENIKVGSPFELVVSGNKRLKELSYMVVSRGQLVAVGKQNSTMFSLTPENSWTPKACVIVYYIEDDGEIISDVLKIPVQLVFKNKIKLYWSKVKAEPSEKVSLRISVTQPDSIVGIVAVDKSVNLMNASNDITMENVVHELELYNTGYYLGMFMNSFAVFQECGLWVLTDANLTKDYIDGVYDNAEYAERFMEENEGHIVDIHDFSLGSSPHVRKHFPETWIWLDTNMGYRIYQEFEVTVPDSITSWVATGFVISEDLGLGLTTTPVELQAFQPFFIFLNLPYSVIRGEEFALEITIFNYLKDATEVKVIIEKSDKFDILMTSNEINATGHQQTLLVPSEDGATVLFPIRPTHLGEIPITVTALSPTASDAVTQMILVKAEGIEKSYSQSILLDLTDNRLQSTLKTLSFSFPPNTVTGSERVQITAIGDVLGPSINGLASLIRMPYGCGEQNMINFAPNIYILDYLTKKKQLTDNLKEKALSFMRQGYQRELLYQREDGSFSAFGNYDPSGSTWLSAFVLRCFLEADPYIDIDQNVLHRTYTWLKGHQKSNGEFWDPGRVIHSELQGGNKSPVTLTAYIVTSLLGYRKYQPNIDVQESIHFLESEFSRGISDNYTLALITYALSSVGSPKAKEALNMLTWRAEQEGGMQFWVSSESKLSDSWQPRSLDIEVAAYALLSHFLQFQTSEGIPIMRWLSRQRNSLGGFASTQDTTVALKALSEFAALMNTERTNIQVTVTGPSSPSPVKFLIDTHNRLLLQTAELAVVQPTAVNISANGFGFAICQLNVVYNVKASGSSRRRRSIQNQEAFDLDVAVKENKDDLNHVDLNVCTSFSGPGRSGMALMEVNLLSGFMVPSEAISLSETVKKVEYDHGKLNLYLDSVNETQFCVNIPAVRNFKVSNTQDASVSIVDYYEPRRQAVRSYNSEVKLSSCDLCSDVQGCRPCEDGASGSHHHSSVIFIFCFKLLYFMELWL

SEQ ID NO: 40436 - protein, 1428 aa, Homo sapiens
MQGPPLLTAAHLLCVCTAALAVAPGPRFLVTAPGIIRPGGNVTIGVELLEHCPSQVTVKAELLKTASNLTVSVLEAEGVFEKGSFKTLTLPSLPLNSADEIYELRVTGRTQDEILFSNSTRLSFETKRISVFIQTDKALYKPKQEVKFRIVTLFSDFKPYKTSLNILIKDPKSNLIQQWLSQQSDLGVISKTFQLSSHPILGDWSIQVQVNDQTYYQSFQVSEYVLPKFEVTLQTPLYCSMNSKHLNGTITAKYTYGKPVKGDVTLTFLPLSFWGKKKNITKTFKINGSANFSFNDEEMKNVMDSSNGLSEYLDLSSPGPVEILTTVTESVTGISRNVSTNVFFKQHDYIIEFFDYTTVLKPSLNFTATVKVTRADGNQLTLEERRNNVVITVTQRNYTEYWSGSNSGNQKMEAVQKINYTVPQSGTFKIEFPILEDSSELQLKAYFLGSKSSMAVHSLFKSPSKTYIQLKTRDENIKVGSPFELVVSGNKRLKELSYMVVSRGQLVAVGKQNSTMFSLTPENSWTPKACVIVYYIEDDGEIISDVLKIPVQLVFKNKIKLYWSKVKAEPSEKVSLRISVTQPDSIVGIVAVDKSVNLMNASNDITMENVVHELELYNTGYYLGMFMNSFAVFQECGLWVLTDANLTKDYIDGVYDNAEYAERFMEENEGHIVDIHDFSLGSSPHVRKHFPETWIWLDTNMGYRIYQEFEVTVPDSITSWVATGFVISEDLGLGLTTTPVELQAFQPFFIFLNLPYSVIRGEEFALEITIFNYLKDATEVKVIIEKSDKFDILMTSNEINATGHQQTLLVPSEDGATVLFPIRPTHLGEIPITVTALSPTASDAVTQMILVKAEGIEKSYSQSILLDLTDNRLQSTLKTLSFSFPPNTVTGSERVQITAIGDVLGPSINGLASLIRMPYGCGEQNMINFAPNIYILDYLTKKKQLTDNLKEKALSFMRQGYQRELLYQREDGSFSAFGNYDPSGSTWLSAFVLRCFLEADPYIDIDQNVLHRTYTWLKGHQKSNGEFWDPGRVIHSELQGGNKSPVTLTAYIVTSLLGYRKYQPNIDVQESIHFLESEFSRGISDNYTLALITYALSSVGSPKAKEALNMLTWRAEQEGGMQFWVSSESKLSDSWQPRSLDIEVAAYALLSHFLQFQTSEGIPIMRWLSRQRNSLGGFASTQDTTVALKALSEFAALMNTERTNIQVTVTGPSSPSPLAVVQPTAVNISANGFGFAICQLNVVYNVKASGSSRRRRSIQNQEAFDLDVAVKENKDDLNHVDLNVCTSFSGPGRSGMALMEVNLLSGFMVPSEAISLSETVKKVEYDHGKLNLYLDSVNETQFCVNIPAVRNFKVSNTQDASVSIVDYYEPRRQAVRSYNSEVKLSSCDLCSDVQGCRPCEDGASGSHHHSSVIFIFCFKLLYFMELWL

SEQ ID NO: 40437 - protein, 253 aa, Homo sapiens
MGEFNEKKTTCGTVCLKYLLFTYNCCFWLAGLAVMAVGIWTLALKSDYISLLASGTYLATAYILVVAGTVVMVTGVLGCCATFKERRNLLRLYFILLLIIFLLEIIAGILAYAYYQQLNTELKENLKDTMTKRYHQPGHEAVTSAVDQLQQEFHCCGSNNSQDWRDSEWIRSQEAGGRVVPDSCCKTVVALCGQRDHASNIYKVEGGCITKLETFIQEHLRVIGAVGIGIACVQVFGMIFTCCLYRSLKLEHY

SEQ ID NO: 40438 - protein, 253 aa, Homo sapiens; identical to SEQ ID NO: 40437

SEQ ID NO: 40439 - protein, 253 aa, Homo sapiens; identical to SEQ ID NO: 40437

SEQ ID NO: 40440 - protein, 180 aa, Homo sapiens
MGEFNEKKTTCGTVCLKYLLFTYNCCFWLAGLAVMAVGIWTLALKSDYISLLASGTYLATAYILVVAGTVVMVTGVLGCCATFKERRNLLRLYFILLLIIFLLEIIAGILAYAYYQQLNTELKENLKDTMTKRYHQPGHEAVTSAVDQLQQEFHCCGSNNSQDWRDSEWIRSQEAGGRVV

SEQ ID NO: 40441 - protein, 79 aa, Homo sapiens
MGEFNEKKTTCGTVCLKYLLFTYNCCFWLAGLAVMAVGIWTLALKSDYISLLASGTYLATAYILVVAGTVVMVTGVLGC

SEQ ID NO: 40442 - protein, 92 aa, Homo sapiens
MGEFNEKKTTCGTVCLKYLLFTYNCCFWLAGLAVMAVGIWTLALKSDYISLLASGTYLATAYILVVAGTVVMVTGVLGCCATFKERRNLLRL

SEQ ID NO: 40443 - protein, 65 aa, Homo sapiens
MGEFNEKKTTCGTVCLKYLLFTYNCCFWLAGLAVMAVGIWTLALKSDYISLLASGTYLATAYILV

SEQ ID NO: 40444 - protein, 176 aa, Homo sapiens
MGEFNEKKTTCGTVCLKYLLFTYNCCFWLAGLAVMAVGIWTLALKSDYISLLASGTYLATAYILVVAGTVVMVTGVLGCCATFKERRNLLRLYFILLLIIFLLEIIAGILAYAYYQQLNTELKENLKDTMTKRYHQPGHEAVTSAVDQLQQEFHCCGSNNSQDWRDSEWIRSQEAG

SEQ ID NO: 40445 - protein, 180 aa, Homo sapiens; identical to SEQ ID NO: 40440

SEQ ID NO: 40446 - protein, 90 aa, Homo sapiens
MGEFNEKKTTCGTVCLKYLLFTYNCCFWLAGLAVMAVGIWTLALKSDYISLLASGTYLATAYILVVAGTVVMVTGVLGCCATFKERRNLL

SEQ ID NO: 40447 - protein, 170 aa, Homo sapiens
MGEFNEKKTTCGTVCLKYLLFTYNCCFWLAGLAVMAVGIWTLALKSDYISLLASGTYLATAYILVVAGTVVMVTGVLGCCATFKERRNLLRLYFILLLIIFLLEIIAGILAYAYYQQLNTELKENLKDTMTKRYHQPGHEAVTSAVDQLQQEFHCCGSNNSQDWRDSEWI

SEQ ID NO: 40448 - protein, 253 aa, Homo sapiens; identical to SEQ ID NO: 40437

SEQ ID NO: 40449 - protein, 1156 aa, Homo sapiens
MSKLRMVLLEDSGSADFRRHFVNLSPFTITVVLLLSACFVTSSLGGTDKELRLVDGENKCSGRVEVKVQEEWGTVCNNGWSMEAVSVICNQLGCPTAIKAPGWANSSAGSGRIWMDHVSCRGNESALWDCKHDGWGKHSNCTHQQDAGVTCSDGSNLEMRLTRGGNMCSGRIEIKFQGRWGTVCDDNFNIDHASVICRQLECGSAVSFSGSSNFGEGSGPIWFDDLICNGNESALWNCKHQGWGKHNCDHAEDAGVICSKGADLSLRLVDGVTECSGRLEVRFQGEWGTICDDGWDSYDAAVACKQLGCPTAVTAIGRVNASKGFGHIWLDSVSCQGHEPAIWQCKHHEWGKHYCNHNEDAGVTCSDGSDLELRLRGGGSRCAGTVEVEIQRLLGKVCDRGWGLKEADVVCRQLGCGSALKTSYQVYSKIQATNTWLFLSSCNGNETSLWDCKNWQWGGLTCDHYEEAKITCSAHREPRLVGGDIPCSGRVEVKHGDTWGSICDSDFSLEAASVLCRELQCGTVVSILGGAHFGEGNGQIWAEEFQCEGHESHLSLCPVAPRPEGTCSHSRDVGVVCSRYTEIRLVNGKTPCEGRVELKTLGAWGSLCNSHWDIEDAHVLCQQLKCGVALSTPGGARFGKGNGQIWRHMFHCTGTEQHMGDCPVTALGASLCPSEQVASVICSGNQSQTLSSCNSSSLGPTRPTIPEESAVACIESGQLRLVNGGGRCAGRVEIYHEGSWGTICDDSWDLSDAHVVCRQLGCGEAINATGSAHFGEGTGPIWLDEMKCNGKESRIWQCHSHGWGQQNCRHKEDAGVICSEFMSLRLTSEASREACAGRLEVFYNGAWGTVGKSSMSETTVGVVCRQLGCADKGKINPASLDKAMSIPMWVDNVQCPKGPDTLWQCPSSPWEKRLASPSEETWITCDNKIRLQEGPTSCSGRVEIWHGGSWGTVCDDSWDLDDAQVVCQQLGCGPALKAFKEAEFGQGTGPIWLNEVKCKGNESSLWDCPARRWGHSECGHKEDAAVNCTDISVQKTPQKATTGRSSRQSSFIAVGILGVVLLAIFVALFFLTKKRRQRQRLAVSSRGENLVHQIQYREMNSCLNADDLDLMNSSENSHESADFSAAELISVSKFLPISGMEKEAILSHTEKENGNL

SEQ ID NO: 40450 - protein, 1154 aa, Homo sapiens
MSKLRMVLLEDSGSADFRRHFVNLSPFTITVVLLLSACFVTSSLGGTDKELRLVDGENKCSGRVEVKVQEEWGTVCNNGWSMEAVSVICNQLGCPTAIKAPGWANSSAGSGRIWMDHVSCRGNESALWDCKHDGWGKHSNCTHQQDAGVTCSDGSNLEMRLTRGGNMCSGRIEIKFQGRWGTVCDDNFNIDHASVICRQLECGSAVSFSGSSNFGEGSGPIWFDDLICNGNESALWNCKHQGWGKHNCDHAEDAGVICSKGADLSLRLVDGVTECSGRLEVRFQGEWGTICDDGWDSYDAAVACKQLGCPTAVTAIGRVNASKGFGHIWLDSVSCQGHEPAIWQCKHHEWGKHYCNHNEDAGVTCSDGSDLELRLRGGGSRCAGTVEVEIQRLLGKVCDRGWGLKEADVVCRQLGCGSALKTSYQVYSKIQATNTWLFLSSCNGNETSLWDCKNWQWGGLTCDHYEEAKITCSAHREPRLVGGDIPCSGRVEVKHGDTWGSICDSDFSLEAASVLCRELQCGTVVSILGGAHFGEGNGQIWAEEFQCEGHESHLSLCPVAPRPEGTCSHSRDVGVVCSSKTQKTSLIGSHTVKGTGLGSHSCLFLKPCLLPGYTEIRLVNGKTPCEGRVELKTLGAWGSLCNSHWDIEDAHVLCQQLKCGVALSTPGGARFGKGNGQIWRHMFHCTGTEQHMGDCPVTALGASLCPSEQVASVICSGNQSQTLSSCNSSSLGPTRPTIPEESAVACIESGQLRLVNGGGRCAGRVEIYHEGSWGTICDDSWDLSDAHVVCRQLGCGEAINATGSAHFGEGTGPIWLDEMKCNGKESRIWQCHSHGWGQQNCRHKEDAGVICSEFMSLRLTSEASREACAGRLEVFYNGAWGTVGKSSMSETTVGVVCRQLGCADKGKINPASLDKAMSIPMWVDNVQCPKGPDTLWQCPSSPWEKRLASPSEETWITCDNKIRLQEGPTSCSGRVEIWHGGSWGTVCDDSWDLDDAQVVCQQLGCGPALKAFKEAEFGQGTGPIWLNEVKCKGNESSLWDCPARRWGHSECGHKEDAAVNCTDISVQKTPQKATTGRSSRQSSFIAVGILGVVLLAIFVALFFLTKKRRQRQRLAVSSRGENLVHQIQYREMNSCLNADDLDLMNSSGGHSEPH

SEQ ID NO: 40451 - protein, 1121 aa, Homo sapiens
MSKLRMVLLEDSGSADFRRHFVNLSPFTITVVLLLSACFVTSSLGGTDKELRLVDGENKCSGRVEVKVQEEWGTVCNNGWSMEAVSVICNQLGCPTAIKAPGWANSSAGSGRIWMDHVSCRGNESALWDCKHDGWGKHSNCTHQQDAGVTCSDGSNLEMRLTRGGNMCSGRIEIKFQGRWGTVCDDNFNIDHASVICRQLECGSAVSFSGSSNFGEGSGPIWFDDLICNGNESALWNCKHQGWGKHNCDHAEDAGVICSKGADLSLRLVDGVTECSGRLEVRFQGEWGTICDDGWDSYDAAVACKQLGCPTAVTAIGRVNASKGFGHIWLDSVSCQGHEPAIWQCKHHEWGKHYCNHNEDAGVTCSDGSDLELRLRGGGSRCAGTVEVEIQRLLGKVCDRGWGLKEADVVCRQLGCGSALKTSYQVYSKIQATNTWLFLSSCNGNETSLWDCKNWQWGGLTCDHYEEAKITCSAHREPRLVGGDIPCSGRVEVKHGDTWGSICDSDFSLEAASVLCRELQCGTVVSILGGAHFGEGNGQIWAEEFQCEGHESHLSLCPVAPRPEGTCSHSRDVGVVCSRYTEIRLVNGKTPCEGRVELKTLGAWGSLCNSHWDIEDAHVLCQQLKCGVALSTPGGARFGKGNGQIWRHMFHCTGTEQHMGDCPVTALGASLCPSEQVASVICSGNQSQTLSSCNSSSLGPTRPTIPEESAVACIESGQLRLVNGGGRCAGRVEIYHEGSWGTICDDSWDLSDAHVVCRQLGCGEAINATGSAHFGEGTGPIWLDEMKCNGKESRIWQCHSHGWGQQNCRHKEDAGVICSEFMSLRLTSEASREACAGRLEVFYNGAWGTVGKSSMSETTVGVVCRQLGCADKGKINPASLDKAMSIPMWVDNVQCPKGPDTLWQCPSSPWEKRLASPSEETWITCDNKIRLQEGPTSCSGRVEIWHGGSWGTVCDDSWDLDDAQVVCQQLGCGPALKAFKEAEFGQGTGPIWLNEVKCKGNESSLWDCPARRWGHSECGHKEDAAVNCTDISVQKTPQKATTGRSSRQSSFIAVGILGVVLLAIFVALFFLTKKRRQRQRLAVSSRGENLVHQIQYREMNSCLNADDLDLMNSSGGHSEPH

SEQ ID NO: 40452 - protein, 184 aa, Homo sapiens
MSRLSRSLLWAATCLGVLCVLSADKNTTQHPNVTTLAPISNVTSAPVTSLPLVTTPAPETCEGRNSCVSCFNVSVVNTTCFWIECKDESYCSHNSTVSDCQVGNTTDFCSAKPTVQPSPSTTSKTVTTSGTTNNTVTPTSQPVRKSTFDAASFIGGIVLVLGVQAVIFFLYKFCKSKERNYHTL

SEQ ID NO: 40453 - protein, 197 aa, Homo sapiens
MSRLSRSLLWAATCLGVLCVLSADKNTTQHPNVTTLAPISNVTSAPVTSLPLVTTPAPETCEGRNSCVSCFNVSVVNTTCFWIECKDESYCSHNSTVSDCQVGNTTDFCSVSTATPVPTANSTAKPTVQPSPSTTSKTVTTSGTTNNTVTPTSQPVRKSTFDAASFIGGIVLVLGVQAVIFFLYKFCKSKERNYHTL

SEQ ID NO: 40454 - protein, 178 aa, Homo sapiens
MSRLSRSLLWAATCLGVLCVLSADKNTTQHPNVTTLAPISNVTSAPVTSLPLVTTPAPETCEGRNSCVSCFNVSVVNTTCFWIECKDESYCSHNSTVSDCQVGNTTDFCSVSTATPVPTANSTGTTNNTVTPTSQPVRKSTFDAASFIGGIVLVLGVQAVIFFLYKFCKSKERNYHTL

SEQ ID NO: 40455 - protein, 165 aa, Homo sapiens
MSRLSRSLLWAATCLGVLCVLSADKNTTQHPNVTTLAPISNVTSAPVTSLPLVTTPAPETCEGRNSCVSCFNVSVVNTTCFWIECKDESYCSHNSTVSDCQVGNTTDFCSGTTNNTVTPTSQPVRKSTFDAASFIGGIVLVLGVQAVIFFLYKFCKSKERNYHTL

SEQ ID NO: 40456 - protein, 189 aa, Homo sapiens
MSRLSRSLLWAATCLGVLCVLSADKNTTQHPNVTTLAPISNVTSAPVTSLPLVTTPAPETCEGRNSCVSCFNVSVVNTTCFWIECKDESYCSHNSTVSDCQVGNTTDFCSVSTATPVPTANSTAKPTVQPSPSTTSKTVTTSGTTNNTVTPTSQPVRKSTFDAASFIGGIVLVLEIRCHTRNYIPDLKK

SEQ ID NO: 40457 - protein, 157 aa, Homo sapiens
MSRLSRSLLWAATCLGVLCVLSADKNTTQHPNVTTLAPISNVTSAPVTSLPLVTTPAPETCEGRNSCVSCFNVSVVNTTCFWIECKDESYCSHNSTVSDCQVGNTTDFCSVSTATPVPTANSTAKPTVQPSPSTTSKTVTTSEIRCHTRNYIPDLKK

SEQ ID NO: 40458 - protein, 248 aa, Homo sapiens
MSAVLLLALLGFILPLPGVQALLCQFGTVQHVWKVSDLPRQWTPKNTSCDSGLGCQDTLMLIESGPQVSLVLSKGCTEAKDQEPRVTEHRMGPGLSLISYTFVCRQEDFCNNLVNSLPLWAPQPPADPGSLRCPVCLSMEGCLEGTTEEICPKGTTHCYDGLLRLRGGGIFSNLRVQGCMPQPVCNLLNGTQEIGPVGMTENCDMKDFLQLKPVGLLEEHNVGEKERGQGQHQCVQLDWQKRAATGIF

SEQ ID NO: 40459 - protein, 145 aa, Homo sapiens
MSAVLLLALLGFILPLPGVQALLCQFGTVQHVWKVSDLPRQWTPKNTSCDSGLGCQDTLMLIESGPQVSLVLSKGCTEAKDQEPRVTEHRMGPGLSLISYTFVCRQEDFCNNLVNSLPLWAPQPPADPMMGAAEGPFGKAEQVDS

SEQ ID NO: 40460 - protein, 145 aa, Homo sapiens; identical to SEQ ID NO: 40459

SEQ ID NO: 40461 - protein, 556 aa, Homo sapiens [sequence omitted]

SEQ ID NO: 40462 - protein, 363 aa, Homo sapiens
MEVRPEEPLVVKVEEGDNAVLQCLKGTSDGPTQQLTWSRESPLKPFLKLSLGLPGLGIHMRPLGKYYCHRGNLTMSFHLEITARPVLWHWLLRTGGWKVSAVTLAYLIFCLCSLVGILHLQRALVLRRKRKRMTDPTRRFFKVTPPPGSGPQNQYGNVLSLPTPTSGLGRAQRWAAGLGGTAPSYGNPSSDVQADGALGSRSPPGVGPEEEEGEGYEEPDSEEDSEFYENDSNLGQDQLSQDGSGYENPEDEPLGPEDEDSFSNAESYENEDEELTQPVARTMDFLSPHGSAWDPSREATSLGSQSYEDMRGILYAAPQLRSIRGQPGPNHEEDADSYENMDNPDGPDPAWGGGGRMGTWSTR

SEQ ID NO: 40463 - protein, 405 aa, Homo sapiens [sequence omitted]

SEQ ID NO: 40464 - protein, 557 aa, Homo sapiens
MPPPRLLFFLLFLTPMEVRPEEPLVVKVEEGDNAVLQCLKGTSDGPTQQLTWSRESPLKPFLKLSLGLPGLGIHMRPLAIWLFIFNVSQQMGGFYLCQPGPPSEKAWQPGWTVNVEGSGELFRWNVSDLGGLGCGLKNRSSEGPSSPSGKLMSPKLYVWAKDRPEIWEGEPPCLPPRDSLNQSLSQDLTMAPGSTLWLSCGVPPDSVSRGPLSWTHVHPKGPKSLLSLELKDDRPARDMWVMETGLLLPRATAQDAGKYYCHRGNLTMSFHLEITARPVLWHWLLRTGGWKVSAVTLAYLIFCLCSLVGILHLQRALVLRRKRKRMTDPTRRFFKVTPPPGSGPQNQYGNVLSLPTPTSGLGRAQRWAAGLGGTAPSYGNPSSDVQADGALGSRSPPGVGPEEEEGEGYEEPDSEEDSEFYENDSNLGQDQLSQDGSGYENPEDEPLGPEDEDSFSNAESYENEDEELTQPVARTMDFLSPHGSAWDPSREATSLAGSQSYEDMRGILYAAPQLRSIRGQPGPNHEEDADSYENMDNPDGPDPAWGGGGRMGTWSTR

SEQ ID NO: 40465 - protein, 327 aa, Homo sapiens
MLFLLLPLLAVLPGDGNADGLKEPLSFHVTWIASFYNHSWKQNLVSGWLSDLQTHTWDSNSSTIVFLCPWSRGNFSNEEWKELETLFRIRTIRSFEGIRRYAHELQFEYPFEIQVTGGCELHSGKVSGSFLQLAYQGSDFVSFQNNSWLPYPVAGNMAKHFCKVLNQNQHENDITHNLLSDTCPRFILGLLDAGKAHLQRQVKPEAWLSHGPSPGPGHLQLVCHVSGFYPKPVWVMWMRGEQEQQGTQRGDILPSADGTWYLRATLEVAAGEAADLSCRVKHSSLEGQDIVLYWEHHSSVGFIILAVIVPLLLLIGLALWFRKRCFC

SEQ ID NO: 40466 - protein, 333 aa, Homo sapiens
MLLLPFQLLAVLFPGGNSEHAFQGPTSFHVIQTSSFTNSTWAQTQGSGWLDDLQIHGWDSDSGTAIFLKPWSKGNFSDKEVAELEEIFRVYIFGFAREVQDFAGDFQMKYPFEIQGIAGCELHSGGAIVSFLRGALGGLDFLSVKNASCVPSPEGGSRAQKFCALIIQYQGIMETVRILLYETCPRYLLGVLNAGKADLQRQVKPEAWLSSGPSPGPGRLQLVCHVSGFYPKPVWVMWMRGEQEQQGTQLGDILPNANWTWYLRATLDVADGEAAGLSCRVKHSSLEGQDIILYWRNPTSIGSIVLAIIVPSLLLLLCLALWYMRRRSYQNIP

SEQ ID NO: 40467 - protein, 246 aa, Homo sapiens
  VARIANT 1: note = MOD_RES - Any amino acid
XSSFTNSTWAQTQGSGWLDDLQIHGWDSDSGTAIFLKPWSKGNFSDKEVAELEEIFRVYIFGFAREVQDFAGDFQMKYPFEIQGIAGCELHSGGAIVSFLRGALGGLDFLSVKNASCVPSPEGGSRAQKFCALIIQYQGIMETVRILLYETCPRYLLGVLNAGKADLQRQVKPEAWLSSGPSPGPGRLQLVCHVSGFYPKPVWVMWMRGNPTSIGSIVLAIIVPSLLLLLCLALWYMRRRSYQNIP

SEQ ID NO: 40468 - protein, 346 aa, Homo sapiens
MLFLQFLLLALLLPGGDNADASQEHVSFHVIQIFSFVNQSWARGQGSGWLDELQTHGWDSESGTIIFLHNWSKGNFSNEELSDLELLFRFYLFGLTREIQDHASQDYSKYPFEVQVKAGCELHSGKSPEGFFQVAFNGLDLLSFQNTTWVPSPGCGSLAQSVCHLLNHQYEGVTETVYNLIRSTCPRFLLGLLDAGKMYVHRQVRPEAWLSSRPSLGSGQLLLVCHASGFYPKPVWVTWMRNEQEQLGTKHGDILPNADGTWYLQVILEVASEEPAGLSCRVRHSSLGGQDIILYWAHIRTSCETLPPDSPIVLRTQQPRSLVQYSDAIPSTLHLNCFSFCIINIC

SEQ ID NO: 40469 - protein, 333 aa, Homo sapiens
MLFLQFLLLALLLPGGDNADASQEHVSFHVIQIFSFVNQSWARGQGSGWLDELQTHGWDSESGTIIFLHNWSKGNFSNEELSDLELLFRFYLFGLTREIQDHASQDYSKYPFEVQVKAGCELHSGKSPEGFFQVAFNGLDLLSFQNTTWVPSPGCGSLAQSVCHLLNHQYEGVTETVYNLIRSTCPRFLLGLLDAGKMYVHRQVRPEAWLSSRPSLGSGQLLLVCHASGFYPKPVWVTWMRNEQEQLGTKHGDILPNADGTWYLQVILEVASEEPAGLSCRVRHSSLGGQDIILYWGHHFSMNWIALVVIVPLVILIVLVLWFKKHCSYQDIL

SEQ ID NO: 40470 - protein, 281 aa, Homo sapiens
  VARIANT 1: note = MOD_RES - Any amino acid
XFLHNWSKGNFSNEELSDLELLFRFYLFGLTREIQDHASQDYSKYPFEVQVKAGCELHSGKSPEGFFQVAFNGLDLLSFQNTTWVPSPGCGSLAQSVCHLLNHQYEGVTETVYNLIRSTCPRFLLGLLDAGKMYVHRQVRPEAWLSSRPSLGSGQLLLVCHASGFYPKPVWVTWMRNEQEQLGTKHGDILPNADGTWYLQVILEVASEEPAGLSCRVRHSSLGGQDIILYWAHIRTSCETLPPDSPIVLRTQQPRSLVQYSDAIPSTLHLNCFSFCIINIC

SEQ ID NO: 40471 - protein, 136 aa, Homo sapiens
MYVHRQVRPEAWLSSRPSLGSGQLLLVCHASGFYPKPVWVTWMRNEQEQLGTKHGDILPNADGTWYLQVILEVASEEPAGLSCRVRHSSLGGQDIILYWGHHFSMNWIALVVIVPLVILIVLVLWFKKHCSYQDIL

SEQ ID NO: 40472 - protein, 335 aa, Homo sapiens
MGCLLFLLLWALLQAWGSAEVPQRLFPLRCLQISSFANSSWTRTDGLAWLGELQTHSWSNDSDTVRSLKPWSQGTFSDQQWETLQHIFRVYRSSFTRDVKEFAKMLRLSYPLELQVSAGCEVHPGNASNNFFHVAFQGKDILSFQGTSWEPTQEAPLWVNLAIQVLNQDKWTRETVQWLLNGTCPQFVSGLLESGKSELKKQVKPKAWLSRGPSPGPGRLLLVCHVSGFYPKPVWVKWMRGEQEQQGTQPGDILPNADETWYLRATLDVVAGEAAGLSCRVKHSSLEGQDIVLYWGGSYTSMGLIALAVLACLLFLLIVGFTSRFKRQTSYQGVL

SEQ ID NO: 40473 - protein, 144 aa, Homo sapiens
MLLLFLLFEGLCCPGENTAVKPEAWLSCGPSPGPGRLQLVCHVSGFYPKPVWVMWMRGGYSIFLILICLTVIVTLVILVVVDSRLKKQSSNKNILSPHTPSPVFLMGANTQDTKNSRHQFCLAQVSWIKNRVLKKWKTRLNQLW

SEQ ID NO: 40474 - protein, 231 aa, Homo sapiens
MLLLFLLFEGLCCPGENTAAPQALQSYHLAAEEQLSFRMLQTSSFANHSWAHSEGSGWLGDLQTHGWDTVLGTIRFLKPWSHGNFSKQELKNLQSLFQLYFHSFIQIVQASAGQFQLELKPEAWLSCGPSPGPGRLQLVCHVSGFYPKPVWVMWMRGGYSIFLILICLTVIVTLVILVVVDSRLKKQSPVFLMGANTQDTKNSRHQFCLAQVSWIKNRVLKKWKTRLNQLW

SEQ ID NO: 40475 - protein, 286 aa, Homo sapiens
MLLLFLLFEGLCCPGENTAAPQALQSYHLAAEEQLSFRMLQTSSFANHSWAHSEGSGWLGDLQTHGWDTVLGTIRFLKPWSHGNFSKQELKNLQSLFQLYFHSFIQIVQASAGQFQLELKPEAWLSCGPSPGPGRLQLVCHVSGFYPKPVWVMWMRGEQEQRGTQRGDVLPNADETWYLRATLDVAAGEAAGLSCRVKHSSLGGHDLIIHWGGYSIFLILICLTVIVTLVILVVVDSRLKKQSPVFLMGANTQDTKNSRHQFCLAQVSWIKNRVLKKWKTRLNQLW

SEQ ID NO: 40476 - protein, 132 aa, Homo sapiens
MLLLFLLFEGLCCPGENTAVKPEAWLSCGPSPGPGRLQLVCHVSGFYPKPVWVMWMRGGYSIFLILICLTVIVTLVILVVVDSRLKKQSPVFLMGANTQDTKNSRHQFCLAQVSWIKNRVLKKWKTRLNQLW

SEQ ID NO: 40477 - protein, 376 aa, Homo sapiens
MLLLFLLFEGLCCPGENTAAPQALQSYHLAAEEQLSFRMLQTSSFANHSWAHSEGSGWLGDLQTHGWDTVLGTIRFLKPWSHGNFSKQELKNLQSLFQLYFHSFIQIVQASAGQFQLEYPFEIQILAGCRMNAPQIFLNMAYQGSDFLSFQGISWEPSPGAGIRAQNICKVLNRYLDIKEILQSLLGHTCPRFLAGLMEAGESELKRKVKPEAWLSCGPSPGPGRLQLVCHVSGFYPKPVWVMWMRGEQEQRGTQRGDVLPNADETWYLRATLDVAAGEAAGLSCRVKHSSLGGHDLIIHWGGYSIFLILICLTVIVTLVILVVVDSRLKKQSPVFLMGANTQDTKNSRHQFCLAQVSWIKNRVLKKWKTRLNQLW

SEQ ID NO: 40478 - protein, 290 aa, Homo sapiens
MLLLFLLFEGLCCPGENTAAPQALQSYHLAAEEQLSFRMLQTSSFANHSWAHSEGSGWLGDLQTHGWDTVLGTIRFLKPWSHGNFSKQELKNLQSLFQLYFHSFIQIVQASAGQFQLEYPFEIQILAGCRMNAPQIFLNMAYQGSDFLSFQGISWEPSPGAGIRAQNICKVLNRYLDIKEILQSLLGHTCPRFLAGLMEAGESELKRKVKPEAWLSCGPSPGPGRLQLVCHVSGFYPKPVWVMWMRGEQEQRGTQRGDVLPNADETWWIFHLSHPDLFDCDSYPGHIGCS

SEQ ID NO: 40479 - protein, 60 aa, Homo sapiens
  VARIANT 1: note = MOD_RES - Any amino acid
XVSGFYPKPVWVMWMRGEQEQRGTQRGDVLPNADETWWIFHLSHPDLFDCDSYPGHIGCS

SEQ ID NO: 40480 - protein, 321 aa, Homo sapiens
MLLLFLLFEGLCCPGENTAAPQALQSYHLAAEEQLSFRMLQTSSFANHSWAHSEGSGWLGDLQTHGWDTVLGTIRFLKPWSHGNFSKQELKNLQSLFQLYFHSFIQIVQASAGQFQLEYPFEIQILAGCRMNAPQIFLNMAYQGSDFLSFQGISWEPSPGAGIRAQNICKVLNRYLDIKEILQSLLGHTCPRFLAGLMEAGESELKRKVKPEAWLSCGPSPGPGRLQLVCHVSGFYPKPVWVMWMRGGYSIFLILICLTVIVTLVILVVVDSRLKKQSPVFLMGANTQDTKNSRHQFCLAQVSWIKNRVLKKWKTRLNQLW

SEQ ID NO: 40481 - protein, 101 aa, Homo sapiens
MLLLFLLFEGLCCPGENTAVKPEAWLSCGPSPGPGRLQLVCHVSGFYPKPVWVMWMRGEQEQRGTQRGDVLPNADETWWIFHLSHPDLFDCDSYPGHIGCS

SEQ ID NO: 40482 - protein, 298 aa, Homo sapiens
MLLLFLLFEGLCCPGENTAAPQALQSYHLAAEEQLSFRMLQTSSFANHSWAHSEGSGWLGDLQTHGWDTVLGTIRFLKPWSHGNFSKQELKNLQSLFQLYFHSFIQIVQASAGQFQLELKPEAWLSCGPSPGPGRLQLVCHVSGFYPKPVWVMWMRGEQEQRGTQRGDVLPNADETWYLRATLDVAAGEAAGLSCRVKHSSLGGHDLIIHWGGYSIFLILICLTVIVTLVILVVVDSRLKKQSSNKNILSPHTPSPVFLMGANTQDTKNSRHQFCLAQVSWIKNRVLKKWKTRLNQLW

SEQ ID NO: 40483 - protein, 187 aa, Homo sapiens
MLLLFLLFEGLCCPGENTAVKPEAWLSCGPSPGPGRLQLVCHVSGFYPKPVWVMWMRGEQEQRGTQRGDVLPNADETWYLRATLDVAAGEAAGLSCRVKHSSLGGHDLIIHWGGYSIFLILICLTVIVTLVILVVVDSRLKKQSPVFLMGANTQDTKNSRHQFCLAQVSWIKNRVLKKWKTRLNQLW

SEQ ID NO: 40484 - protein, 388 aa, Homo sapiens
MLLLFLLFEGLCCPGENTAAPQALQSYHLAAEEQLSFRMLQTSSFANHSWAHSEGSGWLGDLQTHGWDTVLGTIRFLKPWSHGNFSKQELKNLQSLFQLYFHSFIQIVQASAGQFQLEYPFEIQILAGCRMNAPQIFLNMAYQGSDFLSFQGISWEPSPGAGIRAQNICKVLNRYLDIKEILQSLLGHTCPRFLAGLMEAGESELKRKVKPEAWLSCGPSPGPGRLQLVCHVSGFYPKPVWVMWMRGEQEQRGTQRGDVLPNADETWYLRATLDVAAGEAAGLSCRVKHSSLGGHDLIIHWGGYSIFLILICLTVIVTLVILVVVDSRLKKQSSNKNILSPHTPSPVFLMGANTQDTKNSRHQFCLAQVSWIKNRVLKKWKTRLNQLW

SEQ ID NO: 40485 - protein, 340 aa, Homo sapiens
MIKSRVKRYRRRRGSQRAPQALQSYHLAAEEQLSFRMLQTSSFANHSWAHSEGSGWLGDLQTHGWDTVLGTIRFLKPWSHGNFSKQELKNLQSLFQLYFHSFIQIVQASAGQFQLEYPFEIQILAGCRMNAPQIFLNMAYQGSDFLSFQGISWEPSPGAGIRAQNICKVLNRYLDIKEILQSLLGHTCPRFLAGLMEAGESELKRKVKPEAWLSCGPSPGPGRLQLVCHVSGFYPKPVWVMWMRGEQEQRGTQRGDVLPNADETWYLRATLDVAAGEAAGLSCRVKHSSLGGHDLIIHWGEKQLRLCWEIMKIALGLLSVGLRKWVGMLGTRRVKLGQSK

SEQ ID NO: 40486 - protein, 289 aa, Homo sapiens
MLLLFLLFEGLCCPGENTADPFEIQILAGCRMNAPQIFLNMAYQGSDFLSFQGISWEPSPGAGIRAQNICKVLNRYLDIKEILQSLLGHTCPRFLAGLMEAGESELKRKVKPEAWLSCGPSPGPGRLQLVCHVSGFYPKPVWVMWMRGEQEQRGTQRGDVLPNADETWYLRATLDVAAGEAAGLSCRVKHSSLGGHDLIIHWGGYSIFLILICLTVIVTLVILVVVDSRLKKQSSNKNILSPHTPSPVFLMGANTQDTKNSRHQFCLAQVSWIKNRVLKKWKTRLNQLW

SEQ ID NO: 40487 - protein, 199 aa, Homo sapiens
MLLLFLLFEGLCCPGENTAVKPEAWLSCGPSPGPGRLQLVCHVSGFYPKPVWVMWMRGEQEQRGTQRGDVLPNADETWYLRATLDVAAGEAAGLSCRVKHSSLGGHDLIIHWGGYSIFLILICLTVIVTLVILVVVDSRLKKQSSNKNILSPHTPSPVFLMGANTQDTKNSRHQFCLAQVSWIKNRVLKKWKTRLNQLW

SEQ ID NO: 40488 - protein, 348 aa, Homo sapiens
MLCPWRTANLGLLLILTIFLVAEAEGAAQPNNSLMLQTSKENHALASSSLCMDEKQITQNYSKVLAEVNTSWPVKMATNAVLCCPPIALRNLIIITWEIILRGQPSCTKAYKKETNETKETNCTDERITWVSRPDQNSDLQIRTVAITHDGYYRCIMVTPDGNFHRGYHLQVLVTPEVTLFQNRNRTAVCKAVAGKPAAHISWIPEGDCATKQEYWSNGTVTVKSTCHWEVHNVSTVTCHVSHLTGNKSLYIELLPVPGAKKSAKLYIPYIILTIIILTIVGFIWLLKVNGCRKYKLNKTESTPVVEEDEMQPYASYTEKNNPLYDTTNKVKASEALQSEVDTDLHTL

SEQ ID NO: 40489 - protein, 188 aa, Homo sapiens
MLCPWRTANLGLLLILTIFLVAEAEGAAQPNNSLMLQTSKENHALASSSLCMDEKQITQNYSKVLAEVNTSWPVKMATNAVLCCPPIALRNLIIITWEIILRGQPSCTKAYKKETNETKETNCTDERITWVSRPDQNSDLQIRTVAITHDGYYRCIMVTPDGNFHRGYHLQVLGKEHHILRYFTSPDL

SEQ ID NO: 40490 - protein, 325 aa, Homo sapiens
MLCPWRTANLGLLLILTIFLVAASSSLCMDEKQITQNYSKVLAEVNTSWPVKMATNAVLCCPPIALRNLIIITWEIILRGQPSCTKAYKKETNETKETNCTDERITWVSRPDQNSDLQIRTVAITHDGYYRCIMVTPDGNFHRGYHLQVLVTPEVTLFQNRNRTAVCKAVAGKPAAHISWIPEGDCATKQEYWSNGTVTVKSTCHWEVHNVSTVTCHVSHLTGNKSLYIELLPVPGAKKSAKLYIPYIILTIIILTIVGFIWLLKVNGCRKYKLNKTESTPVVEEDEMQPYASYTEKNNPLYDTTNKVKASEALQSEVDTDLHTL

SEQ ID NO: 40491 - protein, 165 aa, Homo sapiens
MLCPWRTANLGLLLILTIFLVAASSSLCMDEKQITQNYSKVLAEVNTSWPVKMATNAVLCCPPIALRNLIIITWEIILRGQPSCTKAYKKETNETKETNCTDERITWVSRPDQNSDLQIRTVAITHDGYYRCIMVTPDGNFHRGYHLQVLGKEHHILRYFTSPDL

SEQ ID NO: 40492 - protein, 328 aa, Homo sapiens
MTVEKEAPDAHFTVDKQNISLWPREPPPKSGPSLVPGKTPTVRAALICLTLVLVASVLLQAVLYPRFMGTISDVKTNVQLLKGRVDNISTLDSEIKKNSDGMEAAGVQIQMVNESLGYVRSQFLKLKTSVEKANAQIQILTRSWEEVSTLNAQIPELKSDLEKASALNTKIRALQGSLENMSKLLKRQNDILQVVSQGWKYFKGNFYYFSLIPKTWYSAEQFCVSRNSHLTSVTSESEQEFLYKTAGGLIYWIGLTKAGMEGDWSWVDDTPFNKVQSVRFWIPGEPNNAGNNEHCGNIKAPSLQAWNDAPCDKTFLFICKRPYVPSEP

SEQ ID NO: 40493 - protein, 360 aa, Homo sapiens
MSDSKEPRLQQLGLLVSKVPSSISQEQSRQDAIYQNLTQLKAAVGELSEKSKLQEIYQELTQLKAAVGELPEKSKLQEIYQELTRLKAAVGELPEKSKLQEIYQELTWLKAAVGELPEKSKMQEIYQELTRLKAAVGELPEKSKQQEIYQELTRLKAAVGELPEKSKQQEIYQELTRLKAAVGELPEKSKQQEIYQELTQLKAAVERLCHPCPWEWTFFQGNCYFMSNSQRNWHDSITACKEVGAQLVVIKSAEEQNFLQLQSSRSNRFTWMGLSDLNQEGTWQWVDGSPLLPSFKQYWNRGEPNNVGEEDCAEFSGNGWNDDKCNLAKFWICKKSAASCSRDEEQFLSPAPATPNPPPA

SEQ ID NO: 40494 - protein, 268 aa, Homo sapiens
MSDSKEPRLQQLGLLVSKVPSSISQEQSRQDAIYQNLTQLKAAVGELSEKSKLQEIYQELTQLKAAVGELPEKSKLQEIYQELTRLKAAVGELPEKSKQQEIYQELTQLKAAVERLCHPCPWEWTFFQGNCYFMSNSQRNWHDSITACKEVGAQLVVIKSAEEQNFLQLQSSRSNRFTWMGLSDLNQEGTWQWVDGSPLLPSFKQYWNRGEPNNVGEEDCAEFSGNGWNDDKCNLAKFWICKKSAASCSRDEEQFLSPAPATPNPPPA

SEQ ID NO: 40495 - protein, 380 aa, Homo sapiens
MSDSKEPRLQQLGLLEEEQLRGLGFRQTRGYKSLAVSKVPSSISQEQSRQDAIYQNLTQLKAAVGELSEKSKLQEIYQELTQLKAAVGELPEKSKLQEIYQELTRLKAAVGELPEKSKLQEIYQELTWLKAAVGELPEKSKMQEIYQELTRLKAAVGELPEKSKQQEIYQELTRLKAAVGELPEKSKQQEIYQELTRLKAAVGELPEKSKQQEIYQELTQLKAAVERLCHPCPWEWTFFQGNCYFMSNSQRNWHDSITACKEVGAQLVVIKSAEEQNFLQLQSSRSNRFTWMGLSDLNQEGTWQWVDGSPLLPSFKQYWNRGEPNNVGEEDCAEFSGNGWNDDKCNLAKFWICKKSAASCSRDEEQFLSPAPATPNPPPA

SEQ ID NO: 40496 - protein, 404 aa, Homo sapiens
MSDSKEPRLQQLGLLEEEQLRGLGFRQTRGYKSLAGCLGHGPLVLQLLSFTLLAGLLVQVSKVPSSISQEQSRQDAIYQNLTQLKAAVGELSEKSKLQEIYQELTQLKAAVGELPEKSKLQEIYQELTRLKAAVGELPEKSKLQEIYQELTWLKAAVGELPEKSKMQEIYQELTRLKAAVGELPEKSKQQEIYQELTRLKAAVGELPEKSKQQEIYQELTRLKAAVGELPEKSKQQEIYQELTQLKAAVERLCHPCPWEWTFFQGNCYFMSNSQRNWHDSITACKEVGAQLVVIKSAEEQNFLQLQSSRSNRFTWMGLSDLNQEGTWQWVDGSPLLPSFKQYWNRGEPNNVGEEDCAEFSGNGWNDDKCNLAKFWICKKSAASCSRDEEQFLSPAPATPNPPPA

SEQ ID NO: 40497 - protein, 398 aa, Homo sapiens
MSDSKEPRLQQLGLLEEEQLRGLGFRQTRGYKSLAGCLGHGPLVLQLLSFTLLAGLLVQVSKVPSSISQEQSRQDAIYQNLTQLKAAVGELSEKSKLQEIYQELTQLKAAVGELPEKSKLQEIYQELTRLKAAVGELPEKSKLQEIYQELTWLKAAVGELPEKSKMQEIYQELTRLKAAVGELPEKSKQQEIYQELTRLKAAVGELPEKSKQQEIYQELTRLKAAVGELPEKSKQQEIYQELTQLKAAVERLCHPCPWEWTFFQGNCYFMSNSQRNWHDSITACKEVGAQLVVIKSAEEQSSRSNRFTWMGLSDLNQEGTWQWVDGSPLLPSFKQYWNRGEPNNVGEEDCAEFSGNGWNDDKCNLAKFWICKKSAASCSRDEEQFLSPAPATPNPPPA

SEQ ID NO: 40498 - protein, 168 aa, Homo sapiens
MSDSKEPRLQQLGLLEEEQLRGLGFRQTRGYKSLAGCLGHGPLVLQLLSFTLLAGLLVQVSKVPSSISQEQSRSNRFTWMGLSDLNQEGTWQWVDGSPLLPSFKQYWNRGEPNNVGEEDCAEFSGNGWNDDKCNLAKFWICKKSAASCSRDEEQFLSPAPATPNPPPA

SEQ ID NO: 40499 - protein, 312 aa, Homo sapiens
MSDSKEPRLQQLGLLEEEQLRGLGFRQTRGYKSLAGCLGHGPLVLQLLSFTLLAGLLVQVSKVPSSISQEQSRQDAIYQNLTQLKAAVGELSEKSKLQEIYQELTQLKAAVGELPEKSKLQEIYQELTRLKAAVGELPEKSKLQEIYQELTWLKAAVERLCHPCPWEWTFFQGNCYFMSNSQRNWHDSITACKEVGAQLVVIKSAEEQNFLQLQSSRSNRFTWMGLSDLNQEGTWQWVDGSPLLPSFKQYWNRGEPNNVGEEDCAEFSGNGWNDDKCNLAKFWICKKSAASCSRDEEQFLSPAPATPNPPPA

SEQ ID NO: 40500 - protein, 34 aa, Homo sapiens
MSDSKEPRLQQLGLLEEEQLRGLGFRQTRRNQKC

SEQ ID NO: 40501 - protein, 284 aa, Homo sapiens
MSDSKEPRLQQLGLLGCLGHGPLVLQLLSFTLLAGLLVQVLGPVSKVPSSISQEQSRQDAIYQNLTQLKAAVGELSEKSKLQEIYQELTQLKAAVGELPEKSKLQEIYQELTRLKAAVGELPEKSKLQEIYQELTWLKAAVGELPEKSKMQEIYQELTRLKAAVGELPEKSKQQEIYQELTRLKAAVGELPEKSKQQEIYQELTRLKAAVGELPEKSKQQEIYQELTQLKAAVERLCHPCPWEWTFFQGNCYFMSNSQRNWHDSITACKEVGAQLVVIKSAEEQ

SEQ ID NO: 40502 - protein, 312 aa, Homo sapiens; identical to SEQ ID NO: 40499

SEQ ID NO: 40503 - protein, 336 aa, Homo sapiens
MDYPTLLLALLHVYRALCEEVLWHTSVPFAENMSLECVYPSMGILTQVEWFKIGTQQDSIAIFSPTHGMVIRKPYAERVYFLNSTMASNNMTLFFRNASEDDVGYYSCSLYTYPQGTWQKVIQVVQSDSFEAAVPSNSHIVSEPGKNVTLTCQPQMTWPVQAVRWEKIQPRQIDLLTYCNLVHGRNFTSKFPRQIVSNCSHGRWSVIVIPDVTVSDSGLYRCYLQASAGENETFVMRLTVAEGKTDNQYTLFVAGGTVLLLLFVISITTIIVIFLNRRRRRERRDLFTESWDTQKAPNNYRSPISTSQPTNQSMDDTREDIYVNYPTFSRRPKTRV

SEQ ID NO: 40504 - protein, 273 aa, Homo sapiens
MLGQVVTLILLLLLKVYQGKGCQGSADHVVSISGVPLQLQPNSIQTKVDSIAWKKLLPSQNGFHHILKWENGSLPSNTSNDRFSFIVKNLSLLIKAAQQQDSGLYCLEVTSISGKVQTATFQVFVFEFRFWPFLVIIVILSALFLGTLACFCVWRRKRKEKQSETSPKEFLTIYEDVKDLKTRRNHEQEQTFPGGGSTIYSMIQSQSSAPTSQEPAYTLYSLIQPSRKSGSRKRNHSPSFNSTIYEVIGKSQPKAQNPARLSRKELENFDVYS

SEQ ID NO: 40505 - protein, 329 aa, Homo sapiens
MLGQVVTLILLLLLKVYQGKGCQGSADHVVSISGVPLQLQPNSIQTKVDSIAWKKLLPSQNGFHHILKWENGSLPSNTSNDRFSFIVKNLSLLIKAAQQQDSGLYCLEVTSISGKVQTATFQVFVFDKVEKPRLQGQGKILDRGRCQVALSCLVSRDGNVSYAWYRGSKLIQTAGNLTYLDEEVDINGTHTYTCNVSNPVSWESHTLNLTQDCQNAHQEFRFWPFLVIIVILSALFLGTLACFCVWRRKRKEKQSETSPKEFLTIYEDVKDLKTRRNHEQEQTFPGGGSTIYSMIQSQSSAPTSQEPAYTLYSLIQPSRKGDRFYSFSG

SEQ ID NO: 40506 - protein, 370 aa, Homo sapiens
MLGQVVTLILLLLLKVYQGKGCQGSADHVVSISGVPLQLQPNSIQTKVDSIAWKKLLPSQNGFHHILKWENGSLPSNTSNDRFSFIVKNLSLLIKAAQQQDSGLYCLEVTSISGKVQTATFQVFVFESLLPDKVEKPRLQGQGKILDRGRCQVALSCLVSRDGNVSYAWYRGSKLIQTAGNLTYLDEEVDINGTHTYTCNVSNPVSWESHTLNLTQDCQNAHQEFRFWPFLVIIVILSALFLGTLACFCVWRRKRKEKQSETSPKEFLTIYEDVKDLKTRRNHEQEQTFPGGGSTIYSMIQSQSSAPTSQEPAYTLYSLIQPSRKSGSRKRNHSPSFNSTIYEVIGKSQPKAQNPARLSRKELENFDVYS

SEQ ID NO: 40507 - protein, 365 aa, Homo sapiens
MLGQVVTLILLLLLKVYQGKGCQGSADHVVSISGVPLQLQPNSIQTKVDSIAWKKLLPSQNGFHHILKWENGSLPSNTSNDRFSFIVKNLSLLIKAAQQQDSGLYCLEVTSISGKVQTATFQVFVFDKVEKPRLQGQGKILDRGRCQVALSCLVSRDGNVSYAWYRGSKLIQTAGNLTYLDEEVDINGTHTYTCNVSNPVSWESHTLNLTQDCQNAHQEFRFWPFLVIIVILSALFLGTLACFCVWRRKRKEKQSETSPKEFLTIYEDVKDLKTRRNHEQEQTFPGGGSTIYSMIQSQSSAPTSQEPAYTLYSLIQPSRKSGSRKRNHSPSFNSTIYEVIGKSQPKAQNPARLSRKELENFDVYS

SEQ ID NO: 40508 - protein, 164 aa, Homo sapiens
MKWKALFTAAILQAQLPITEAQSFGLLDPKLCYLLDGILFIYGVILTALFLRVKFSRSADAPAYQQGQNQLYNELNLGRREEYDVLDKRRGRDPEMGGKPQRRKNPQEGLYNELQKDKMAEAYSEIGMKGERRRGKGHDGLYQGLSTATKDTYDALHMQALPPR

SEQ ID NO: 40509 - protein, 163 aa, Homo sapiens
MKWKALFTAAILQAQLPITEAQSFGLLDPKLCYLLDGILFIYGVILTALFLRVKFSRSADAPAYQQGQNQLYNELNLGRREEYDVLDKRRGRDPEMGGKPRRKNPQEGLYNELQKDKMAEAYSEIGMKGERRRGKGHDGLYQGLSTATKDTYDALHMQALPPR

SEQ ID NO: 40510 - protein, 757 aa, Homo sapiens
MLLRLLLAWAAAGPTLGQDPWAAEPRAACGPSSCYALFPRRRTFLEAWRACRELGGDLATPRTPEEAQRVDSLVGAGPASRLLWIGLQRQARQCQLQRPLRGFTWTTGDQDTAFTNWAQPASGGPCPAQRCVALEASGEHRWLEGSCTLAVDGYLCQFGFEGACPALQDEAGQAGPAVYTTPFHLVSTEFEWLPFGSVAAVQCQAGRGASLLCVKQPEGGVGWSRAGPLCLGTGCSPDNGGCEHECVEEVDGHVSCRCTEGFRLAADGRSCEDPCAQAPCEQQCEPGGPQGYSCHCRLGFRPAEDDPHRCVDTDECQIAGVCQQMCVNYVGGFECYCSEGHELEADGISCSPAGAMGAQASQDLGDELLDDGEDEEDEDEAWKAFNGGWTEMPGILWMEPTQPPDFALAYRPSFPEDREPQIPYPEPTWPPPLSAPRVPYHSSVLSVTRPVVVSATHPTLPSAHQPPVIPATHPALSRDHQIPVIAANYPDLPSAYQPGILSVSHSAQPPAHQPPMISTKYPELFPAHQSPMFPDTRVAGTQTTTHLPGIPPNHAPLVTTLGAQLPPQAPDALVLRTQATQLPIIPTAQPSLTTTSRSPVSPAHQISVPAATQPAALPTLLPSQSPTNQTSPISPTHPHSKAPQIPREDGPSPKLALWLPSPAPTAAPTALGEAGLAEHSQRDDRWLLVALLVPTCVFLVVLLALGIVYCTRCGPHAPNKRITDCYRWVIHAGSKSPTEPMPPRGSLTGVQTCRTSV

SEQ ID NO: 40511 - protein, 316 aa, Homo sapiens
MLRRRGSPGMGVHVGAALGALWFCLTGALEVQVPEDPVVALVGTDATLCCSFSPEPGFSLAQLNLIWQLTDTKQLVHSFAEGQDQGSAYANRTALFPDLLAQGNASLRLQRVRVADEGSFTCFVSIRDFGSAAVSLQVAAPYSKPSMTLEPNKDLRPGDTVTITCSSYRGYPEAEVFWQDGQGVPLTGNVTTSQMANEQGLFDVHSVLRVVLGANGTYSCLVRNPVLQQDAHGSVTITGQPMTFPPEALWVTVGLSVCLIALLVALAFVCWRKIKQSCEEENAGAEDQDGEGEGSKTALQPLKHSDSKEDDGQEIA

SEQ ID NO: 40512 - protein, 534 aa, Homo sapiens
MLRRRGSPGMGVHVGAALGALWFCLTGALEVQVPEDPVVALVGTDATLCCSFSPEPGFSLAQLNLIWQLTDTKQLVHSFAEGQDQGSAYANRTALFPDLLAQGNASLRLQRVRVADEGSFTCFVSIRDFGSAAVSLQVAAPYSKPSMTLEPNKDLRPGDTVTITCSSYQGYPEAEVFWQDGQGVPLTGNVTTSQMANEQGLFDVHSILRVVLGANGTYSCLVRNPVLQQDAHSSVTITPQRSPTGAVEVQVPEDPVVALVGTDATLRCSFSPEPGFSLAQLNLIWQLTDTKQLVHSFTEGRDQGSAYANRTALFPDLLAQGNASLRLQRVRVADEGSFTCFVSIRDFGSAAVSLQVAAPYSKPSMTLEPNKDLRPGDTVTITCSSYRGYPEAEVFWQDGQGVPLTGNVTTSQMANEQGLFDVHSVLRVVLGANGTYSCLVRNPVLQQDAHGSVTITGQPMTFPPEALWVTVGLSVCLIALLVALAFVCWRKIKQSCEEENAGAEDQDGEGEGSKTALQPLKHSDSKEDDGQEIA

SEQ ID NO: 40513 - protein, 493 aa, Homo sapiens
MLRRRGSPGMGVHVGAALGALWFCLTGALEVQVPEDPVVALVGTDATLCCSFSPEPGFSLAQLNLIWQLTDTKQLVHSFAEGQDQGSAYANRTALFPDLLAQGNASLRLQRVRVADEGSFTCFVSIRDFGSAAVSLQVAAPYSKPSMTLEPNKDLRPGDTVTITCSSYQGYPEAEVFWQDGQGVPLTGNVTTSQMANEQGLFDVHSILRVVLGANGTYSCLVRNPVLQQDAHSSVTITPQRSPTGAVEVQVPEDPVVALVGTDATLRCSFSPEPGFSLAQLNLIWQLTDTKQLVHSFTEGRDQGSAYANRTALFPDLLAQGNASLRLQRVRVADEGSFTCFVSIRDFGSAAVSLQVAAPYSKPSMTLEPNKDLRPGDTVTITCSSYRGYPEAEVFWQDGQGVPLTGNVTTSQMANEQGLFDVHSVLRVVLGANGTYSCLVRNPVLQQDAHGSVTITGQPMTFPPGPASSAVPLSPAHPPHGSMCWSHWFSRGL

SEQ ID NO: 40514 - protein, 140 aa, Homo sapiens
MLRRRGSPGMGVHVGAALGALWFCLTGALEVQVPEDPVVALVGTDATLCCSFSPEPGFSLAQLNLIWQLTDTKQLVHSFAEGQDQGSAYANRTALFPDLHRAAYDIPPRGPVGDRGAVCLSHCTAGGPGFRVLEKDQTEL

SEQ ID NO: 40515 - protein, 136 aa, Homo sapiens
MLRRRGSPGMGVHVGAALGALWFCLTGALEVQVPEDPVVALVGTDATLCCSFSPEPGFSLAQLNLIWQLTDTKQLVHSFAEGQDQGSAYANRTALFPDLLAQGNASLRLQRVRVADEGSFTCFVSIRDFGSAAVSL

SEQ ID NO: 40516 - protein, 133 aa, Homo sapiens
MLRRRGSPGMGVHVGAALGALWFCLTGALEVQVPEDPVVALVGTDATLCCSFSPEPGFSLAQLNLIWQLTDTKQLVHSFAEGQDQGSAYANRTALFPDLLAQGNASLRLQRVRVADEGSFTCFVSIRDFGSAA

SEQ ID NO: 40517 - protein, 533 aa, Homo sapiens
MLRRRGSPGMGVHVGAALGALWFCLTGALEVQVPEDPVVALVGTDATLCCSFSPEPGFSLAQLNLIWQLTDTKQLVHSFAEGQDQGSAYANRTALFPDLLAQGNASLRLQRVRVADEGSFTCFVSIRDFGSAAVSLQVAAPYSKPSMTLEPNKDLRPGDTVTITCSSYQGYPEAEVFWQDGQGVPLTGNVTTSQMANEQGLFDVHSILRVVLGANGTYSCLVRNPVLQQDAHSSVTITPQRSPTGAVEVQVPEDPVVALVGTDATLRCSFSPEPGFSLAQLNLIWQLTDTKQLVHSFTEGRDQGSAYANRTALFPDLLAQGNASLRLQRVRVADEGSFTCFVSIRDFGSAAVSLQVAAPYSKPSMTLEPNKDLRPGDTVTITCSSYRGYPEAEVFWQDGQGVPLTGNVTTSQMANEQGLFDVHSVLRVVLGANGTYSCLVRNPVLQQDAHGSVTITGQPMTFPPEALWVTVGLSVCLIALLVALAFVCWRKIKQSCEEENAGAEDQDGEGEGSKTALQPLKHSDSKEGKDTWA

SEQ ID NO: 40518 - protein, 165 aa, Homo sapiens
MLRRRGSPGMGVHVGAALGALWFCLTGALEVQVPEDPVVALVGTDATLCCSFSPEPGFSLAQLNLIWQLTDTKQLVHSFAEGQDQGSAYANRTALFPDLLAQGNASLRLQRVRVADEGSFTCFVSIRDFGSAAVSLQVAAPYSKPSMTLEPNKDLRPGDTVTITC

SEQ ID NO: 40519 - protein, 51 aa, Homo sapiens
MLRRRGSPGMGVHVGAALGALWFCLTGALEVQVPEDPVVALVGTDATLCCS

SEQ ID NO: 40520 - protein, 220 aa, Homo sapiens
MLRLLLALNLFPSIQVTGNKILVKQSPMLVAYDNAVNLSCKYSYNLFSREFRASLHKGLDSAVEVCVVYGNYSQQLQVYSKTGFNCDGKLGNESVTFYLQNLYVNQTDIYFCKIEVMYPPPYLDNEKSNGTIIHVKGKHLCPSPLFPGPSKPFWVLVVVGGVLACYSLLVTVAFIIFWVRSKRSRLLHSDYMNMTPRRPGPTRKHYQPYAPPRDFAAYRS

SEQ ID NO: 40521 - protein, 101 aa, Homo sapiens
MLRLLLALNLFPSIQVTGKHLCPSPLFPGPSKPFWVLVVVGGVLACYSLLVTVAFIIFWVRSKRSRLLHSDYMNMTPRRPGPTRKHYQPYAPPRDFAAYRS

SEQ ID NO: 40522 - protein, 136 aa, Homo sapiens
MLRLLLALNLFPSIQVTGNKILVKQSPMLVAYDNAVNLSYNEKSNGTIIHVKGKHLCPSPLFPGPSKPFWVLVVVGGVLACYSLLVTVAFIIFWVRSKRSRLLHSDYMNMTPRRPGPTRKHYQPYAPPRDFAAYRS

SEQ ID NO: 40523 - protein, 234 aa, Homo sapiens
MPCGLSALIMCPKGMVAVVVAVDDGDSQALAGNKILVKQSPMLVAYDNAVNLSCKYSYNLFSREFRASLHKGLDSAVEVCVVYGNYSQQLQVYSKTGFNCDGKLGNESVTFYLQNLYVNQTDIYFCKIEVMYPPPYLDNEKSNGTIIHVKGKHLCPSPLFPGPSKPFWVLVVVGGVLACYSLLVTVAFIIFWVRSKRSRLLHSDYMNMTPRRPGPTRKHYQPYAPPRDFAAYRS

SEQ ID NO: 40524 - protein, 639 aa, Homo sapiens
MVDYIVEYDYDAVHDDELTIRVGEIIRNVKKLQEEGWLEGELNGRRGMFPDNFVKEIKRETEFKDDSLPIKRERHGNVASLVQRISTYGLPAGGIQPHPQTKNIKKKTKKRQCKVLFEYIPQNEDELELKVGDIIDINEEVEEGWWSGTLNNKLGLFPSNFVKELEVTDDGETHEAQDDSETVLAGPTSPIPSLGNVSETASGSVTQPKKIRGIGFGDIFKEGSVKLRTRTSSSETEEKKPEKPLILQSLGPKTQSVEITKTDTEGKIKAKEYCRTLFAYEGTNEDELTFKEGEIIHLISKETGEAGWWRGELNGKEGVFPDNFAVQINELDKDFPKPKKPPPPAKAPAPKPELIAAEKKYFSLKPEEKDEKSTLEQKPSKPAAPQVPPKKPTPPTKASNLLRSSGTVYPKRPEKPVPPPPPIAKINGEVSSISSKFETEPVSKLKLDSEQLPLRPKSVDFDSLTVRTSKETDVVNFDDIASSENLLHLTANRPKMPGRRLPGRFNGGHSPTHSPEKILKLPKEEDSANLKPSELKKDTCYSPKPSVYLSTPSSASKANTTAFLTPLEIKAKVETDDVKKNSLDELRAQIIELLCIVEALKKDHGKELEKLRKDLEEEKTMRSNLEMEIEKLKKAVLSS

SEQ ID NO: 40525 - protein, 238 aa, Homo sapiens
MCRRCKPELRQNFQSASGICICHWLQIRRTRSREGRAMWLPPALLLLSLSGCFSIQGPESVRAPEQGSLTVQCHYKQGWETYIKWWCRGVRWDTCKILIETRGSEQGEKSDRVSIKDNQKDRTFTVTMEGLRRDDADVYWCGIERRGPDLGTQVKVIVDPEGAASTTASSPTNSNMAVFIGSHKRNHYMLLVFVKVPILLILVTAILWLKGSQRVPEEPGEQPIYMNFSEPLTKDMAT

SEQ ID NO: 40526 - protein, 201 aa, Homo sapiens
MWLPPALLLLSLSGCFSIQGPESVRAPEQGSLTVQCHYKQGWETYIKWWCRGVRWDTCKILIETRGSEQGEKSDRVSIKDNQKDRTFTVTMEGLRRDDADVYWCGIERRGPDLGTQVKVIVDPEGAASTTASSPTNSNMAVFIGSHKRNHYMLLVFVKVPILLILVTAILWLKGSQRVPEEPGEQPIYMNFSEPLTKDMAT

SEQ ID NO: 40527 - protein, 244 aa, Homo sapiens
MPLLTLYLLLFWLSGYSIVTQITGPTTVNGLERGSLTVQCVYRSGWETYLKWWCRGAIWRDCKILVKTSGSEQEVKRDRVSIKDNQKNRTFTVTMEDLMKTDADTYWCGIEKTGNDLGVTVQVTIDPAPVTQEETSSSPTLTGHHLDNRSEGSQAANYRPAAHQAQAPEAQCPPAPHLHHIAAAFGGRLTLGLEDDEVPAESSRDVPRAGTAAPGGRPLLCRPDPAAGRNLPAKGYHEAFLCPG

SEQ ID NO: 40528 - protein, 290 aa, Homo sapiens
MPLLTLYLLLFWLSGYSIVTQITGPTTVNGLERGSLTVQCVYRSGWETYLKWWCRGAIWRDCKILVKTSGSEQEVKRDRVSIKDNQKNRTFTVTMEDLMKTDADTYWCGIEKTGNDLGVTVQVTIDPAPVTQEETSSSPTLTGHHLDNRHKLLKLSVLLPLIFTILLLLLVAASLLAWRMMKYQQKAAGMSPEQVLQPLEGDLCYADLTLQLAGTSPQKATTKLSSAQVDQVEVEYVTMASLPKEDISYASLTLGAEDQEPTYCNMGHLSSHLPGRGPEEPTEYSTISRP

SEQ ID NO: 40529 - protein, 194 aa, Homo sapiens
MWLPQLDLMRVISAKSQGYSIVTQITGPTTVNGLERGSLTVQCVYRSGWETYLKWWCRGAIWRDCKILVKTSGSEQEVKRDRVSIKDNQKNRTFTVTMEDLMKTDADTYWCGIEKTGNDLGVTVQVTIDPAPVTQEETSSSPTLTGHHLDNSSRDVPRAGTAAPGGRPLLCRPDPAAGRNLPAKGYHEAFLCPG

SEQ ID NO: 40530 - protein, 239 aa, Homo sapiens
MWLPQLDLMRVISAKSQGYSIVTQITGPTTVNGLERGSLTVQCVYRSGWETYLKWWCRGAIWRDCKILVKTSGSEQEVKRDRVSIKDNQKNRTFTVTMEDLMKTDADTYWCGIEKTGNDLGVTVQVTIDPASTPAPTTPTSTTFTAPVTQEETSSSPTLTGHHLDNRHKLLKLSVLLPLIFTILLLLLVAASLLAWRMMKYQQKGTAAPGGRPLLCRPDPAAGRNLPAKGYHEAFLCPG

SEQ ID NO: 40531 - protein, 232 aa, Homo sapiens
MLRAALPALLLPLLGLAAAAVADCPSSTWIQFQDSCYIFLQEAIKVESIEDVRNQCTDHGADMISIHNEEENAFILDTLKKQWKGPDDILLGMFYDTDDASFKWFDNSNMTFDKWTDQDDDEDLVDTCAFLHIKTGEWKKGNCEVSSVEGTLCKTAIPYKRKYLSDNHILISALVIASTVILTVLGAIIWFLYKKHSDSRFTTVFSTAPQSPYNEDCVLVVGEENEYPVQFD

SEQ ID NO: 40532 - protein, 174 aa, Homo sapiens
MLRAALPALLLPLLGLAAAAVADCPSSTWIQFQDSCYIFLQEAIKVESIEDVRNQCTDHGADMISIHNEEENAFILDTLKKQWKGPDDILLGMFYDTDVPYKRKYLSDNHILISALVIASTVILTVLGAIIWFLYKKHSDSRFTTVFSTAPQSPYNEDCVLVVGEENEYPVQFD

SEQ ID NO: 40533 - protein, 282 aa, Homo sapiens
MSGGWMAQVGAWRTGALGLALLLLLGLGLGLEAAASPLSTPTSAQAAGPSSGSCPPTKFQCRTSGLCVPLTWRCDRDLDCSDGSDEEECRIEPCTQKGQCPPPPGLPCPCTGVSDCSGGTDKKLRNCSRLACLAGELRCTLSDDCIPLTWRCDGHPDCPDSSDELGCGTNEILPEGDATTMGPPVTLESVTSLRNATTMGPPVTLESVPSVGNATSSSAGDQSGSPTAYGVIAAAAVLSASLVTATLLLLSWLRAQERLRPLGLLVAMKESLLLSEQKTSLP

SEQ ID NO: 40534 - protein, 201 aa, Homo sapiens
NEILPEGDATTMGPPVTLESVTSLRNATTMGPPVTLESVPSVGNAILLCRRPVWKPNCLWGYCSCCGAQCKPGHRHPPPFVLAPSPGAPPPTGVTGGHEGVPAAVRTEDLAALRTSTCHHRHSALGVAGQEESSDADGYPGTPALRDLSSSGHVEPRTRAPAEVALEIEGPWTLPMEIRGARMGNLPQPELRGWPQAAPRG

SEQ ID NO: 40535 - protein, 240 aa, Homo sapiens
MSGGWMAQVGAWRTGALGLALLLLLGLGLGLEAAASPLSTPTSAQAAGIEPCTQKGQCPPPPGLPCPCTGVSDCSGGTDKKLRNCSRLACLAGELRCTLSDDCIPLTWRCDGHPDCPDSSDELGCGTNEILPEGDATTMGPPVTLESVTSLRNATTMGPPVTLESVPSVGNATSSSAGDQSGSPTAYGVIAAAAVLSASLVTATLLLLSWLRAQERLRPLGLLVAMKESLLLSEQKTSLP

SEQ ID NO: 40536 - protein, 364 aa, Homo sapiens
MPLLLLLPLLWAGALAMDPNFWLQVQESVTVQEGLCVLVPCTFFHPIPYYDKNSPVHGYWFREGAIISRDSPVATNKLDQEVQEETQGRFRLLGDPSRNNCSLSIVDARRRDNGSYFFRMERGSTKYSYKSPQLSVHVTDLTHRPKILIPGTLEPGHSKNLTCSVSWACEQGTPPIFSWLSAAPTSLGPRTTHSSVLIITPRPQDHGTNLTCQVKFAGAGVTTERTIQLNVTYVPQNPTTGIFPGDGSGKQETRAGVVHGAIGGAGVTALLALCLCLIFFIVKTHRRKAARTAVGRNDTHPTTGSASPKHQKKSKLHGPTETSSCSGAAPTVEMDEELHYASLNFHGMNPSKDTSTEYSEVRTQ

SEQ ID NO: 40537 - protein, 310 aa, Homo sapiens
MPLLLLLPLLWAGALAMDPNFWLQVQESVTVQEGLCVLVPCTFFHPIPYYDKNSPVHGYWFREGAIISRDSPVATNKLDQEVQEETQGRFRLLGDPSRNNCSLSIVDARRRDNGSYFFRMERGSTKYSYKSPQLSVHVTDLTHRPKILIPGTLEPGHSKNLTCSVSWACEQGTPPIFSWLSAAPTSLGPRTTHSSVLIITPRPQDHGTNLTCQVKFAGAGVTTERTIQLNVTYVPQNPTTGIFPGDGSGKQETRAGVVHGAIGGAGVTALLALCLCLIFFIVKTHRRKAARTAVGRNDTHPTTGSASPVR

SEQ ID NO: 40538 - protein, 237 aa, Homo sapiens
MPLLLLLPLLWADLTHRPKILIPGTLEPGHSKNLTCSVSWACEQGTPPIFSWLSAAPTSLGPRTTHSSVLIITPRPQDHGTNLTCQVKFAGAGVTTERTIQLNVTYVPQNPTTGIFPGDGSGKQETRAGVVHGAIGGAGVTALLALCLCLIFFIVKTHRRKAARTAVGRNDTHPTTGSASPKHQKKSKLHGPTETSSCSGAAPTVEMDEELHYASLNFHGMNPSKDTSTEYSEVRTQ

SEQ ID NO: 40539 - protein, 212 aa, Homo sapiens
MPLLLLLPLLWADLTHRPKILIPGTLEPGHSKNLTCSVSWACEQGTPPIFSWLSAAPTSLGPRTTHSSVLIITPRPQDHGTNLTCQVKFAGAGVTTERTIQLNVTYVPQNPTTGIFPGDGSGKQETRAGVVHGAIGGAGVTALLALCLCLIFFIVKTHRRKAARTAVGRNDTHPTTGSASPVSDGASWHPVCPADTSSQCGPPSCPIQHFQN

SEQ ID NO: 40540 - protein, 472 aa, Homo sapiens
MGCDRNCGLIAGAVIGAVLAVFGGILMPVGDLLIQKTIKKQVVLEEGTIAFKNWVKTGTEVYRQFWIFDVQNPQEVMMNSSNIQVKQRGPYTYRVRFLAKENVTQDAEDNTVSFLQPNGAIFEPSLSVGTEADNFTVLNLAVAAASHIYQNQFVQMILNSLINKSKSSMFQVRTLRELLWGYRDPFLSLVPYPVTTTVGLFYPYNNTADGVYKVFNGKDNISKVAIIDTYKGKRNLSYWESHCDMINGTDAASFPPFVEKSQVLQFFSSDICRSIYAVFESDVNLKGIPVYRFVLPSKAFASPVENPDNYCFCTEKIISKNCTSYGVLDISKCKEGRPVYISLPHFLYASPDVSEPIDGLNPNEEEHRTYLDIEPITGFTLQFAKRLQVNLLVKPSEKIQVLKNLKRNYIVPILWLNETGTIGDEKANMFRSQVTGKINLLGLIEMILLSVGVVMFVAFMISYCACRSKTIK

SEQ ID NO: 40541 - protein, 472 aa, Homo sapiens; identical to SEQ ID NO: 40540

SEQ ID NO: 40542 - protein, 203 aa, Homo sapiens
MGCDRNCGLIAGAVIGAVLAVFGGILMPVGDLLIQKTIKKQVVLEEGTIAFKNWVKTGTEVYRQFWIFDVQNPQEVMMNSSNIQVKQRGPYTYRVRFLAKENVTQDAEDNTVSFLQPNGAIFEPSLSVGTEADNFTVLNLAVAAASHIYQNQFVQMILNSLINKSKSSMFQVRTLRELLWGYRDPFLSLVPYPVTTTVGLFYP

SEQ ID NO: 40543 - protein, 463 aa, Homo sapiens
MGCDRNCGLIAGAVIGAVLAVFGGILMPVGDLLIQKTIKKQVVLEEGTIAFKNWVKTGTEVYRQFWIFDVQNPQEVMMNSSNIQVKQRGPYTYRVRFLAKENVTQDAEDNTVSFLQPNGAIFEPSLSVGTEADNFTVLNLAVAAASHIYQNQFVQMILNSLINKSKSSMFQVRTLRELLWGYRDPFLSLVPYPVTTTVGLFYPYNNTADGVYKVFNGKDNISKVAIIDTYKGKRNLSYWESHCDMINGTDAASFPPFVEKSQVLQFFSSDICRSIYAVFESDVNLKGIPVYRFVLPSKAFASPVENPDNYCFCTEKIISKNCTSYGVLDISKCKEGRPVYISLPHFLYASPDVSEPIDGLNPNEEEHRTYLDIEPITGFTLQFAKRLQVNLLVKPSEKIQVLKNLKRNYIVPILWLNETGTIGDEKANMFRSQVTGKINLLGLIEMILLSVGVVMFVAFMISY

SEQ ID NO: 40544 - protein, 148 aa, Homo sapiens
MGCDRNCGLIAGAVIGAVLAVFGGILMPVGDLLIQKTIKKQVVLEEGTIAFKNWVKTGTEVYRQFWIFDVQNPQEVMMNSSNIQVKQRGPYTYRVRFLAKENVTQDAEDNTVSFLQPNGAIFEPSLSVGTEADNFTVLNLAVAAASHI

SEQ ID NO: 40545 - protein, 93 aa, Homo sapiens
MGCDRNCGLIAGAVIGAVLAVFGGILMPVGDLLIQKTIKKQVVLEEGTIAFKNWVKTGTEVYRQFWIFDVQNPQEVMMNSSNIQVKQRGPYTY

SEQ ID NO: 40546 - protein, 472 aa, Homo sapiens; identical to SEQ ID NO: 40540

SEQ ID NO: 40547 - protein, 433 aa, Homo sapiens
MGCDRNCGLIAGAVIGAVLAVFGGILMPVGDLLIQKTIKKQVVLEEGTIAFKNWVKTGTEVYRQFWIFDVQNPQEVMMNSSNIQVKQRGPYTYRVRFLAKENVTQDAEDNTVSFLQPNGAIFEPSLSVGTEADNFTVLNLAVAAASHIYQNQFVQMILNSLINKSKSSMFQVRTLRELLWGYRDPFLSLVPYPVTTTVGLFYPYNNTADGVYKVFNGKDNISKVAIIDTYKGKRSIYAVFESDVNLKGIPVYRFVLPSKAFASPVENPDNYCFCTEKIISKNCTSYGVLDISKCKEGRPVYISLPHFLYASPDVSEPIDGLNPNEEEHRTYLDIEPITGFTLQFAKRLQVNLLVKPSEKIQVLKNLKRNYIVPILWLNETGTIGDEKANMFRSQVTGKINLLGLIEMILLSVGVVMFVAFMISYCACRSKTIK

SEQ ID NO: 40548 - protein, 472 aa, Homo sapiens; identical to SEQ ID NO: 40540

SEQ ID NO: 40549 - protein, 93 aa, Homo sapiens; identical to SEQ ID NO: 40545

SEQ ID NO: 40550 - protein, 143 aa, Homo sapiens
MGCDRNCGLIAGAVIGAVLAVFGGILMPVGDLLIQKTIKKQVVLEEGTIAFKNWVKTGTEVYRQFWIFDVQNPQEVMMNSSNIQVKQRGPYTYRVRFLAKENVTQDAEDNTVSFLQPNGAIFEPSLSVGTEADNFTVLNLAVA

SEQ ID NO: 40551 - protein, 472 aa, Homo sapiens; identical to SEQ ID NO: 40540

SEQ ID NO: 40552 - protein, 65 aa, Homo sapiens
MGCDRNCGLIAGAVIGAVLAVFGGILMPVGDLLIQKTIKKQVVLEEGTIAFKNWVKTGTEVYRQF

SEQ ID NO: 40553 - protein, 396 aa, Homo sapiens
MMNSSNIQVKQRGPYTYRVRFLAKENVTQDAEDNTVSFLQPNGAIFEPSLSVGTEADNFTVLNLAVAAASHIYQNQFVQMILNSLINKSKSSMFQVRTLRELLWGYRDPFLSLVPYPVTTTVGLFYPYNNTADGVYKVFNGKDNISKVAIIDTYKGKRNLSYWESHCDMINGTDAASFPPFVEKSQVLQFFSSDICRSIYAVFESDVNLKGIPVYRFVLPSKAFASPVENPDNYCFCTEKIISKNCTSYGVLDISKCKEGRPVYISLPHFLYASPDVSEPIDGLNPNEEEHRTYLDIEPITGFTLQFAKRLQVNLLVKPSEKIQVLKNLKRNYIVPILWLNETGTIGDEKANMFRSQVTGKINLLGLIEMILLSVGVVMFVAFMISYCACRSKTIK

SEQ ID NO: 40554 - protein, 412 aa, Homo sapiens
MGCDRNCGLIAGAVIGAVLAVFGGILMPVGDLLIQKTIKKQVVLEEGTIAFKNWVKTGTEVYRQFWIFDVQNPQEVMMNSSNIQVKQRGPYTYRVRFLAKENVTQDAEDNTVSFLQPNGAIFEPSLSVGTEADNFTVLNLAVAYNNTADGVYKVFNGKDNISKVAIIDTYKGKRNLSYWESHCDMINGTDAASFPPFVEKSQVLQFFSSDICRSIYAVFESDVNLKGIPVYRFVLPSKAFASPVENPDNYCFCTEKIISKNCTSYGVLDISKCKEGRPVYISLPHFLYASPDVSEPIDGLNPNEEEHRTYLDIEPITGFTLQFAKRLQVNLLVKPSEKIQVLKNLKRNYIVPILWLNETGTIGDEKANMFRSQVTGKINLLGLIEMILLSVGVVMFVAFMISYCACRSKTIK

SEQ ID NO: 40555 - protein, 288 aa, Homo sapiens
MGCDRNCGLIAGAVIGAVLAVFGGILMPVGDLLIQKTIKKQVVLEEGTIAFKNWVKTGTEVYRQFWIFDVQNPQEVMMNSSNIQVKQRGPYTYRVRFLAKENVTQDAEDNTVSFLQPNGAIFEPSLSVGTEADNFTVLNLAVAAASHIYQNQFVQMILNSLINKSKSSMFQVRTLRELLWGYRDPFLSLVPYPVTTTVGLFYPYNNTADGVYKVFNGKDNISKVAIIDTYKGKRNLSYWESHCDMINGTDAASFPPFVEKSQVLQFFSSDICRETCVHFTSSFSVCKS

SEQ ID NO: 40556 - protein, 281 aa, Homo sapiens
MSAQESCLSLIKYFLFVFNLFFFVLGSLIFCFGIWILIDKTSFVSFVGLAFVPLQIWSKVLAISGIFTMGIALLGCVGALKELRCLLGLYFGMLLLLFATQITLGILISTQRAQLERSLRDVVEKTIQKYGTNPEETAAEESWDYVQFQLRCCGWHYPQDWFQVLILRGNGSEAHRVPCSCYNLSATNDSTILDKVILPQLSRLGHLARSRHSADICAVPAESHIYREGCAQGLQKWLHNNLISIVGICLGVGLLELGFMTLSIFLCRNLDHVYNRLARYR

SEQ ID NO: 40557 - protein, 156 aa, Homo sapiens
MSAQESCLSLIKYFLFVFNLFFFVLGSLIFCFGIWILIDKTSFVSFVGLAFVPLQIWSKVLAISGIFTMGIALLGCVGALKELRCLLGLYFGMLLLLFATQITLGILISTQRAQKDTPTWTKGDRHKQLQRETHGKKREQEKEIDALKEETETYEP

SEQ ID NO: 40558 - protein, 213 aa, Homo sapiens
MGIALLGCVGALKELRCLLGLYFGMLLLLFATQITLGILISTQRAQLERSLRDVVEKTIQKYGTNPEETAAEESWDYVQFQLRCCGWHYPQDWFQVLILRGNGSEAHRVPCSCYNLSATNDSTILDKVILPQLSRLGHLARSRHSADICAVPAESHIYREGCAQGLQKWLHNNLISIVGICLGVGLLELGFMTLSIFLCRNLDHVYNRLARYR

SEQ ID NO: 40559 - protein, 270 aa, Homo sapiens
MSAQESCLSLIKYFLFVFNLFFFVLGSLIFCFGIWILIDKTSFVSFVGLAFVPLQIWSKVLAISGIFTMGIALLGCVGALKELRCLLGLYFGMLLLLFATQITLGILISTQRAQLERSLRDVVEKTIQKYGTNPEETAAEESWDYVQFQLRCCGWHYPQDWFQVLILRGNGSEAHRVPCSCYNLSATNDSTILDKVILPQLSRLGHLARSRHSADICAVPAESHIYREGCAQGLQKWLHNNLISIVGICLGVGLLEVIWPRPHPRSALNP

SEQ ID NO: 40560 - protein, 300 aa, Homo sapiens
MANCEFSPVSGDKPCCRLSRRAQLCLGVSILVLILVVVLAVVVPRWRQQWSGPGTTKRFPETVLARCVKYTEIHPEMRHVDCQSVWDAFKGAFISKHPCNITEEDYQPLMKLGTQTVPCNKILLWSRIKDLAHQFTQVQRDMFTLEDTLLGYLADDLTWCGEFNTSKINYQSCPDWRKDCSNNPVSVFWKTVSRRFAEAACDVVHVMLNGSRSKIFDKNSTFGSVEVHNLQPEKVQTLEAWVIHGGREDSRDLCQDPTIKELESIISKRNIQFSCKNIYRPDKFLQCVKNPEDSSCTSEI

SEQ ID NO: 40561 - protein, 160 aa, Homo sapiens
MANCEFSPVSGDKPCCRLSRRAQLCLGVSILVLILVVVLAVVVPRWRQQWSGPGTTKRFPETVLARCVKYTEIHPEMRHVDCQSVWDAFKGAFISKHPCNITEEDYQPLMKLGTQTVPCNKNETINLAQTGERTAATTLFQYSGKRFPAGLQKLPVMWSM

SEQ ID NO: 40562 - protein, 207 aa, Homo sapiens
MQSGTHWRVLGLCLLSVGVWGQDGNEEMGGITQTPYKVSISGTTVILTCPQYPGSEILWQHNDKNIGGDEDDKNIGSDEDHLSLKEFSELEQSGYYVCYPRGSKPEDANFYLYLRARVCENCMEMDVMSVATIVIVDICITGGLLLLVYYWSKNRKAKAKPVTRGAGAGGRQRGQNKERPPPVPNPDYEPIRKGQRDLYSGLNQRRI

SEQ ID NO: 40563 - protein, 201 aa, Homo sapiens
MQSGTHWRVLGLCLLSVGVWGQDGNEEMAYKVSISGTTVILTCPQYPGSEILWQHNDKNIGGDEDDKNIGSDEDHLSLKEFSELEQSGYYVCYPRGSKPEDANFYLYLRARVCENCMEMDVMSVATIVIVDICITGGLLLLVYYWSKNRKAKAKPVTRGAGAGGRQRGQNKERPPPVPNPDYEPIRKGQRDLYSGLNQRRI

SEQ ID NO: 40564 - protein, 78 aa, Homo sapiens
MIGFLTEDKKKWNLGSNAKDPRGMYQCKGSQNKSKPLQVYYRTSDKQTLLPNDQLYQPLKDREDDQYSHLQGNQLRRN

SEQ ID NO: 40565 - protein, 182 aa, Homo sapiens
MEQGKGLAVLILAIILLQGTLAQSIKGNHLVKVYDYQEDGSVLLTCDAEAKNITWFKDGKMIGFLTEDKKKWNLGSNAKDPRGMYQCKGSQNKSKPLQVYYRMCQNCIELNAATISGFLFAEIVSIFVLAVGVYFIAGQDGVRQSRASDKQTLLPNDQLYQPLKDREDDQYSHLQGNQLRRN

SEQ ID NO: 40566 - protein, 399 aa, Homo sapiens
MEPPGRRECPFPSWRFPGLLLAAMVLLLYSFSDACEEPPTFEAMELIGKPKPYYEIGERVDYKCKKGYFYIPPLATHTICDRNHTWLPVSDDACYRETCPYIRDPLNGQAVPANGTYEFGYQMHFICNEGYYLIGEEILYCELKGSVAIWSGKPPICEKVLCTPPPKIKNGKHTFSEVEVFEYLDAVTYSCDPAPGPDPFSLIGESTIYCGDNSVWSRAAPECKVVKCRFPVVENGKQISGFGKKFYYKATVMFECDKGFYLDGSDTIVCDSNSTWDPPVPKCLKVLPPSSTKPPALSHSVSTSSTTKSPASSASGPRPTYKPPVSNYPGYPKPEEGILDSLDVWVIAVIVIAIVVGVAVICVVPYRYLQRRKKKGKADGGAEYATYQTKSTTPAEQRG

SEQ ID NO: 40567 - protein, 349 aa, Homo sapiens
MEPPGRRECPFPSWRFPGLLLAAMVLLLYSFSDACEEPPTFEAMELIGKPKPYYEIGERVDYKCKKGYFYIPPLATHTICDRNHTWLPVSDDACYRETCPYIRDPLNGQAVPANGTYEFGYQMHFICNEGYYLIGEEILYCELKGSVAIWSGKPPICEKVLCTPPPKIKNGKHTFSEVEVFEYLDAVTYSCDPAPGPDPFSLIGESTIYCGDNSVWSRAAPECKVVKCRFPVVENGKQISGFGKKFYYKATVMFECDKGFYLDGSDTIVCDSNSTWDPPVPKCLKGPRPTYKPPVSNYPGYPKPEEGILDSLDVWVIAVIVIAIGKQMVELNMPLTRLNQPLQQSREAE

SEQ ID NO: 40568 - protein, 384 aa, Homo sapiens
MEPPGRRECPFPSWRFPGLLLAAMVLLLYSFSDACEEPPTFEAMELIGKPKPYYEIGERVDYKCKKGYFYIPPLATHTICDRNHTWLPVSDDACYRETCPYIRDPLNGQAVPANGTYEFGYQMHFICNEGYYLIGEEILYCELKGSVAIWSGKPPICEKVLCTPPPKIKNGKHTFSEVEVFEYLDAVTYSCDPAPGPDPFSLIGESTIYCGDNSVWSRAAPECKVVKCRFPVVENGKQISGFGKKFYYKATVMFECDKGFYLDGSDTIVCDSNSTWDPPVPKCLKVSTSSTTKSPASSASGPRPTYKPPVSNYPGYPKPEEGILDSLDVWVIAVIVIAIVVGVAVICVVPYRYLQRRKKKGKADGGAEYATYQTKSTTPAEQRG

SEQ ID NO: 40569 - protein, 369 aa, Homo sapiens
MEPPGRRECPFPSWRFPGLLLAAMVLLLYSFSDACEEPPTFEAMELIGKPKPYYEIGERVDYKCKKGYFYIPPLATHTICDRNHTWLPVSDDACYRETCPYIRDPLNGQAVPANGTYEFGYQMHFICNEGYYLIGEEILYCELKGSVAIWSGKPPICEKVLCTPPPKIKNGKHTFSEVEVFEYLDAVTYSCDPAPGPDPFSLIGESTIYCGDNSVWSRAAPECKVVKCRFPVVENGKQISGFGKKFYYKATVMFECDKGFYLDGSDTIVCDSNSTWDPPVPKCLKGPRPTYKPPVSNYPGYPKPEEGILDSLDVWVIAVIVIAIVVGVAVICVVPYRYLQRRKKKGKADGGAEYATYQTKSTTPAEQRG

SEQ ID NO: 40570 - protein, 392 aa, Homo sapiens [sequence omitted]

SEQ ID NO: 40571 - protein, 355 aa, Homo sapiens
MEPPGRRECPFPSWRFPGLLLAAMVLLLYSFSDACEEPPTFEAMELIGKPKPYYEIGERVDYKCKKGYFYIPPLATHTICDRNHTWLPVSDDACYRETCPYIRDPLNGQAVPANGTYEFGYQMHFICNEGYYLIGEEILYCELKGSVAIWSGKPPICEKVLCTPPPKIKNGKHTFSEVEVFEYLDAVTYSCDPAPGPDPFSLIGESTIYCGDNSVWSRAAPECKVVKCRFPVVENGKQISGFGKKFYYKATVMFECDKGFYLDGSDTIVCDSNSTWDPPVPKCLKGYPKPEEGILDSLDVWVIAVIVIAIVVGVAVICVVPYRYLQRRKKKGKADGGAEYATYQTKSTTPAEQRG

SEQ ID NO: 40572 - protein, 385 aa, Homo sapiens
MEPPGRRECPFPSWRFPGLLLAAMVLLLYSFSDACEEPPTFEAMELIGKPKPYYEIGERVDYKCKKGYFYIPPLATHTICDRNHTWLPVSDDACYRETCPYIRDPLNGQAVPANGTYEFGYQMHFICNEGYYLIGEEILYCELKGSVAIWSGKPPICEKVLCTPPPKIKNGKHTFSEVEVFEYLDAVTYSCDPAPGPDPFSLIGESTIYCGDNSVWSRAAPECKVVKCRFPVVENGKQISGFGKKFYYKATVMFECDKGFYLDGSDTIVCDSNSTWDPPVPKCLKVLPPSSTKPPALSHSVSTSSTTKSPASSASGYPKPEEGILDSLDVWVIAVIVIAIVVGVAVICVVPYRYLQRRKKKGKADGGAEYATYQTKSTTPAEQRG

SEQ ID NO: 40573 - protein, 362 aa, Homo sapiens
MEPPGRRECPFPSWRFPGLLLAAMVLLLYSFSDACEEPPTFEAMELIGKPKPYYEIGERVDYKCKKGYFYIPPLATHTICDRNHTWLPVSDDACYRETCPYIRDPLNGQAVPANGTYEFGYQMHFICNEGYYLIGEEILYCELKGSVAIWSGKPPICEKVLCTPPPKIKNGKHTFSEVEVFEYLDAVTYSCDPAPGPDPFSLIGESTIYCGDNSVWSRAAPECKVVKCRFPVVENGKQISGFGKKFYYKATVMFECDKGFYLDGSDTIVCDSNSTWDPPVPKCLKGPRPTYKPPVSNYPGYPKPEEGILDSLDVWVIAVIVIAIVVGVAVICVVPYRYLQRRKKKGTYLTDETHREVKFTSL

SEQ ID NO: 40574 - protein, 377 aa, Homo sapiens
MEPPGRRECPFPSWRFPGLLLAAMVLLLYSFSDACEEPPTFEAMELIGKPKPYYEIGERVDYKCKKGYFYIPPLATHTICDRNHTWLPVSDDACYRETCPYIRDPLNGQAVPANGTYEFGYQMHFICNEGYYLIGEEILYCELKGSVAIWSGKPPICEKVLCTPPPKIKNGKHTFSEVEVFEYLDAVTYSCDPAPGPDPFSLIGESTIYCGDNSVWSRAAPECKVVKCRFPVVENGKQISGFGKKFYYKATVMFECDKGFYLDGSDTIVCDSNSTWDPPVPKCLKVSTSSTTKSPASSASGPRPTYKPPVSNYPGYPKPEEGILDSLDVWVIAVIVIAIVVGVAVICVVPYRYLQRRKKKGTYLTDETHREVKFTSL

SEQ ID NO: 40575 - protein, 336 aa, Homo sapiens
MEPPGRRECPFPSWRFPGLLLAAMVLLLYSFSGETCPYIRDPLNGQAVPANGTYEFGYQMHFICNEGYYLIGEEILYCELKGSVAIWSGKPPICEKVLCTPPPKIKNGKHTFSEVEVFEYLDAVTYSCDPAPGPDPFSLIGESTIYCGDNSVWSRAAPECKVVKCRFPVVENGKQISGFGKKFYYKATVMFECDKGFYLDGSDTIVCDSNSTWDPPVPKCLKVLPPSSTKPPALSHSVSTSSTTKSPASSASGPRPTYKPPVSNYPGYPKPEEGILDSLDVWVIAVIVIAIVVGVAVICVVPYRYLQRRKKKGKADGGAEYATYQTKSTTPAEQRG

SEQ ID NO: 40576 - protein, 364 aa, Homo sapiens
MEPPGRRECPFPSWRFPGLLLAAMVLLLYSFSDACEEPPTFEAMELIGKPKPYYEIGERVDYKCKKGYFYIPPLATHTICDRNHTWLPVSDDACYRETCPYIRDPLNGQAVPANGTYEFGYQMHFICNEGYYLIGEEILYCELKGSVAIWSGKPPICEKVLCTPPPKIKNGKHTFSEVEVFEYLDAVTYSCDPAPGPDPFSLIGESTIYCGDNSVWSRAAPECKVVKCRFPVVENGKQISGFGKKFYYKATVMFECDKGFYLDGSDTIVCDSNSTWDPPVPKCLKVSTSSTTKSPASSASGPRPTYKPPVSNYPGYPKPEEGILDSLDVWVIAVIVIAIGKQMVELNMPLTRLNQPLQQSREAE

SEQ ID NO: 40577 - protein, 370 aa, Homo sapiens
MEPPGRRECPFPSWRFPGLLLAAMVLLLYSFSDACEEPPTFEAMELIGKPKPYYEIGERVDYKCKKGYFYIPPLATHTICDRNHTWLPVSDDACYRETCPYIRDPLNGQAVPANGTYEFGYQMHFICNEGYYLIGEEILYCELKGSVAIWSGKPPICEKVLCTPPPKIKNGKHTFSEVEVFEYLDAVTYSCDPAPGPDPFSLIGESTIYCGDNSVWSRAAPECKVVKCRFPVVENGKQISGFGKKFYYKATVMFECDKGFYLDGSDTIVCDSNSTWDPPVPKCLKVSTSSTTKSPASSASGYPKPEEGILDSLDVWVIAVIVIAIVVGVAVICVVPYRYLQRRKKKGKADGGAEYATYQTKSTTPAEQRG

SEQ ID NO: 40578 - protein, 169 aa, Homo sapiens
MCSRGWDSCLALELLLLPLSLLVTSIQGHLVHMTVVSGSNVTLNISESLPENYKQLTWFYTFDQKIVEWDSRKSKYFESKFKGRVRLDPQSGALYISKVQKEDNSTYIMRVLKKTGNEQEWKIKLQVLGESGEPKSKSPLQWPQMDHCRASWEAWGTLGEEERKTSGQV

SEQ ID NO: 40579 - protein, 243 aa, Homo sapiens
MCSRGWDSCLALELLLLPLSLLVTSIQGHLVHMTVVSGSNVTLNISESLPENYKQLTWFYTFDQKIVEWDSRKSKYFESKFKGRVRLDPQSGALYISKVQKEDNSTYIMRVLKKTGNEQEWKIKLQVLDPVPKPVIKIEKIEDMDDNCYLKLSCVIPGESVNYTWYGDKRPFPKELQNSVLETTLMPHNYSRCYTCQVSNSVSSKNGTVCLSPPCTLARSFGVEWIASWLVVTVPTILGLLLT

SEQ ID NO: 40580 - protein, 347 aa, Homo sapiens
MALLFSLILAICTRPGFLASPSGVRLVGGLHRCEGRVEVEQKGQWGTVCDDGWDIKDVAVLCRELGCGAASGTPSGILYEPPAEKEQKVLIQSVSCTGTEDTLAQCEQEEVYDCSHDEDAGASCENPESSFSPVPEGVRLADGPGHCKGRVEVKHQNQWYTVCQTGWSLRAAKVVCRQLGCGRAVLTQKRCNKHAYGRKPIWLSQMSCSGREATLQDCPSGPWGKNTCNHDEDTWVECEDPFDLRLVGGDNLCSGRLEVLHKGVWGSVCDDNWGEKEDQVVCKQLGCGKSLSPSFRDRKCYGPGVGRIWLDNVRCSGEEQSLEQCQHRFWGFHDCTHQEDVAVICSG

SEQ ID NO: 40581 - protein, 219 aa, Homo sapiens
MGMSSLKLLKYVLFFFNLLFWICGCCILGFGIYLLIHNNFGVLFHNLPSLTLGNVFVIVGSIIMVVAFLGCMGSIKENKCLLMSFFILLLIILLAEVTLAILLFVYEQKLNEYVAKGLTDSIHRYHSDNSTKAAWDSIQSFLQCCGINGTSDWTSGPPASCPSDRKVEGCYAKARLWFHSNFLYIGIITICVCVIEVLGMSFALTLNCQIDKTSQTIGL

SEQ ID NO: 40582 - protein, 160 aa, Homo sapiens
MGMSSLKLLKYVLFFFNLLFWICGCCILGFGIYLLIHNNFGVLFHNLPSLTLGNVFVIVGSIIMVVAFLGCMGSIKENKCLLMSFFILLLIILLAEVTLAILLFVYEQKGCYAKARLWFHSNFLYIGIITICVCVIEVLGMSFALTLNCQIDKTSQTIGL

SEQ ID NO: 40583 - protein, 440 aa, Homo sapiens
MTVARPSVPAALPLLGELPRLLLLVLLCLPAVWGDCGLPPDVPNAQPALEGRTSFPEDTVITYKCEESFVKIPGEKDSVICLKGSQWSDIEEFCNRSCEVPTRLNSASLKQPYITQNYFPVGTVVEYECRPGYRREPSLSPKLTCLQNLKWSTAVEFCKKKSCPNPGEIRNGQIDVPGGILFGATISFSCNTGYKLFGSTSSFCLISGSSVQWSDPLPECREIYCPAPPQIDNGIIQGERDHYGYRQSVTYACNKGFTMIGEHSIYCTVNNDEGEWSGPPPECRGKSLTSKVPPTVQKPTTVNVPTTEVSPTSQKTTTKTTTPNAQATRSTPVSRTTKHFHETTPNKGSGTTSGTTRLLSGSRPVTQAGMRWCDRSSLQSRTPGFKRSFHFSLPSSWYYRAHVFHVDRFAWDASNHGLADLAKEELRRKYTQVYRLFLVS

SEQ ID NO: 40584 - protein, 364 aa, Homo sapiens
MTVARPSVPAALPLLGELPRLLLLVLLCLPAVWGDCGLPPDVPNAQPALEGRTSFPEDTVITYKCEESFVKIPGEKDSVICLKGSQWSDIEEFCNRSCEVPTRLNSASLKQPYITQNYFPVGTVVEYECRPGYRREPSLSPKLTCLQNLKWSTAVEFCKKKSCPNPGEIRNGQIDVPGGILFGATISFSCNTGYKLFGSTSSFCLISGSSVQWSDPLPECREIYCPAPPQIDNGIIQGERDHYGYRQSVTYACNKGFTMIGEHSIYCTVNNDEGEWSGPPPECRGKSLTSKVPPTVQKPTTVNVPTTEVSPTSQKTTTKTTTPNAQATRSTPVSRTTKHFHETTPNKGSGTTSGTTRLLSVLFM

SEQ ID NO: 40585 - protein, 381 aa, Homo sapiens
MTVARPSVPAALPLLGELPRLLLLVLLCLPAVWGDCGLPPDVPNAQPALEGRTSFPEDTVITYKCEESFVKIPGEKDSVICLKGSQWSDIEEFCNRSCEVPTRLNSASLKQPYITQNYFPVGTVVEYECRPGYRREPSLSPKLTCLQNLKWSTAVEFCKKKSCPNPGEIRNGQIDVPGGILFGATISFSCNTGYKLFGSTSSFCLISGSSVQWSDPLPECREIYCPAPPQIDNGIIQGERDHYGYRQSVTYACNKGFTMIGEHSIYCTVNNDEGEWSGPPPECRGKSLTSKVPPTVQKPTTVNVPTTEVSPTSQKTTTKTTTPNAQATRSTPVSRTTKHFHETTPNKGSGTTSGTTRLLSGHTCFTLTGLLGTLVTMGLLT

SEQ ID NO: 40586 - protein, 439 aa, Homo sapiens
MTVARPSVPAALPLLGELPRLLLLVLLCLPAVWGDCGLPPDVPNAQPALEGRTSFPEDTVITYKCEESFVKIPGEKDSVICLKGSQWSDIEEFCNRSCEVPTRLNSASLKQPYITQNYFPVGTVVEYECRPGYRREPSLSPKLTCLQNLKWSTAVEFCKKKSCPNPGEIRNGQIDVPGGILFGATISFSCNTGYKLFGSTSSFCLISGSSVQWSDPLPECREIYCPAPPQIDNGIIQGERDHYGYRQSVTYACNKGFTMIGEHSIYCTVNNDEGEWSGPPPECRGKSLTSKVPPTVQKPTTVNVPTTEVSPTSQKTTTKTTTPNAQATRSTPVSRTTKHFHETTPNKGSGTTSGTTRLLSETVFHRVIQDGLDLLASRSACLGLPKCWDYRREPPHLARAHVFHVDRFAWDASNHGLADLAKEELRRKYTQVYRLFLVS

SEQ ID NO: 40587 - protein, 129 aa, Homo sapiens
MTVARPSVPAALPLLGELPRLLLLVLLCLPAVWGDCGLPPDVPNAQPALEGRTSFPEDTVITYKCEESFVKIPGEKDSVICLKGSQWSDIEEFCNRSCEVPTRLQKRTFSITKTNLPSEFKMVHSSRIL

SEQ ID NO: 40588 - protein, 384 aa, Homo sapiens
MTVARPSVPAALPLLGELPRLLLLVLLCLPAVWGDCGLPPDVPNAQPALEGRTSFPEDTVITYKCEESFVKIPGEKDSVICLKGSQWSDIEEFCNRSCEVPTRLNSASLKQPYITQNYFPVGTVVEYECRPGYRREPSLSPKLTCLQNLKWSTAVEFCKKKSCPNPGEIRNGQIDVPGGILFGATISFSCNTGYKLFGSTSSFCLISGSSVQWSDPLPECREIYCPAPPQIDNGIIQGERDHYGYRQSVTYACNKGFTMIGEHSIYCTVNNDEGEWSGPPPECRGKSLTSKVPPTVQKPTTVNVPTTEVSPTSQKTTTKTTTPNAQATRSTPVSRTTKHFHETTPNKGSGTTSGTTRLLSALQVRPFEVSGSSHISSKKMMCIL

SEQ ID NO: 40589 - protein, 317 aa, Homo sapiens
MTVARPSVPAALPLLGELPRLLLLVLLCLPAVWGDCGLPPDVPNAQPALEGRTSFPEDTVITYKCEESFVKIPGEKDSVICLKGSQWSDIEEFCNQKSCPNPGEIRNGQIDVPGGILFGATISFSCNTGYKLFGSTSSFCLISGSSVQWSDPLPECREIYCPAPPQIDNGIIQGERDHYGYRQSVTYACNKGFTMIGEHSIYCTVNNDEGEWSGPPPECRGKSLTSKVPPTVQKPTTVNVPTTEVSPTSQKTTTKTTTPNAQATRSTPVSRTTKHFHETTPNKGSGTTSGQLTLFSGHTCFTLTGLLGTLVTMGLLT

SEQ ID NO: 40590 - protein, 250 aa, Homo sapiens
MVAGSDAGRALGVLSVVCLLHCFGFISCFSQQIYGVVYGNVTFHVPSNVPLKEVLWKKQKDKVAELENSEFRAFSSFKNRVYLDTVSGSLTIYNLTSSDEDEYEMESPNITDTMKFFLYVLESLPSPTLTCALTNGSIEVQCMIPEHYNSHRGLIMYSWDCPMEQCKRNSTSIYFKMENDLPQKIQCTLSNPLFNTTSSIILTTCIPSSGHSRHRYALIPIPLAVITTCIVLYMNGILKCDRKPDRTNSN

SEQ ID NO: 40591 - protein, 248 aa, Homo sapiens
MVAGSDAGRALGVLSVVCLLHCFGFISCFSQQIYGVVYGNVTFHVPSNVPLKEVLWKKQKDKVAELENSEFRAFSSFKNRVYLDTVSGSLTIYNLTSSDEDEYEMESPNITDTMKFFLYVLESLPSPTLTCALTNGSIEVQCMIPEHYNSHRGLIMYSWDCPMEQCKRNSTSIYFKMENDLPQKIQCTLSNPLFNTTSSIILTTCIPSSGHSRHRYALIPIPLAVITTCIVLYMNGILKCDRKPDRTK

SEQ ID NO: 40592 - protein, 128 aa, Homo sapiens
MGIQGGSVLFGLLLVLAVFCHSGHSLQCYNCPNPTADCKTAVNCSSDFDACLITKAGLQVYNKCWKFEHCNFNDVTTRLRENELTYYCCKKDLCNFNEQLENGGTSLSEKTVLLLVTPFLAAAWSLHP

SEQ ID NO: 40593 - protein, 128 aa, Homo sapiens; identical to SEQ ID NO: 40592

SEQ ID NO: 40594 - protein, 128 aa, Homo sapiens; identical to SEQ ID NO: 40592

SEQ ID NO: 40595 - protein, 128 aa, Homo sapiens; identical to SEQ ID NO: 40592

SEQ ID NO: 40596 - protein, 128 aa, Homo sapiens; identical to SEQ ID NO: 40592

SEQ ID NO: 40597 - protein, 128 aa, Homo sapiens; identical to SEQ ID NO: 40592

SEQ ID NO: 40598 - protein, 128 aa, Homo sapiens; identical to SEQ ID NO: 40592

SEQ ID NO: 40599 - protein, 128 aa, Homo sapiens; identical to SEQ ID NO: 40592

SEQ ID NO: 40600 - protein, 128 aa, Homo sapiens; identical to SEQ ID NO: 40592

SEQ ID NO: 40601 - protein, 668 aa, Homo sapiens
MWLFFGITGLLTAALSGHPSPAPPDQLNTSSAESELWEPGERLPVRLTNGSSSCSGTVEVRLEASWEPACGALWDSRAAEAVCRALGCGGAEAASQLAPPTPELPPPPAAGNTSVAANATLAGAPALLCSGAEWRLCEVVEHACRSDGRRARVTCAENRALRLVDGGGACAGRVEMLEHGEWGSVCDDTWDLEDAHVVCRQLGCGWAVQALPGLHFTPGRGPIHRDQVNCSGAEAYLWDCPGLPGQHYCGHKEDAGAVCSEHQSWRLTGGADRCEGQVEVHFRGVWNTVCDSEWYPSEAKVLCQSLGCGTAVERPKGLPHSLSGRMYYSCNGEELTLSNCSWRFNNSNLCSQSLAARVLCSASRSLHNLSTPEVPASVQTVTIESSVTVKIENKESRELMLLIPSIVLGILLLGSLIFIAFILLRIKGKYALPVMVNHQHLPTTIPAGSNSYQPVPITIPKEVFMLPIQVQAPPPEDSDSGSDSDYEHYDFSAQPPVALTTFYNSQRHRVTDEEVQQSRFQMPPLEEGLEELHASHIPTANPGHCITDPPSLGPQYHPRSNSESSTSSGEDYCNSPKSKLPPWNPQVFSSERSSFLEQPPNLELAGTQPAFSAGPPADDSSSTSSGEWYQNFQPPPQPPSEEQFGCPGSPSPQPDSTDNDDYDDISAA

SEQ ID NO: 40602 - protein, 636 aa, Homo sapiens
MWLFFGITGLLTAALSGHPSPAPPDQLNTSSAESELWEPGERLPVRLTNGSSSCSGTVEVRLEASWEPACGALWDSRAAEAVCRALGCGGAEAASQLAPPTPELPPPPAAGNTSVAANATLAGAPALLCSGAEWRLCEVVEHACRSDGRRARVTCAENRALRLVDGGGACAGRVEMLEHGEWGSVCDDTWDLEDAHVVCRQLGCGWAVQALPGLHFTPGRGPIHRDQVNCSGAEAYLWDCPGLPGQHYCGHKEDAGAVCSEHQSWRLTGGADRCEGQVEVHFRGVWNTVCDSEWYPSEAKVLCQSLGCGTAVERPKGLPHSLSGRMYYSCNGEELTLSNCSWRFNNSNLCSQSLAARVLCSASRSLHNLSTPEVPASVQTVTIESSVTVKIENKESRELMLLIPSIVLGILLLGSLIFIAFILLRIKGKYVFMLPIQVQAPPPEDSDSGSDSDYEHYDFSAQPPVALTTFYNSQRHRVTDEEVQQSRFQMPPLEEGLEELHASHIPTANPGHCITDPPSLGPQYHPRSNSESSTSSGEDYCNSPKSKLPPWNPQVFSSERSSFLEQPPNLELAGTQPAFSAGPPADDSSSTSSGEWYQNFQPPPQPPSEEQFGCPGSPSPQPDSTDNDDYDDISAA

SEQ ID NO: 40603 - protein, 595 aa, Homo sapiens
MWLFFGITGLLTAALSGHPSPAPPDQLNTSSAESELWEPGERLPVRLTNGSSSCSGTVEVRLEASWEPACGALWDSRAAEAVCRALGCGGAEAASQLAPPTPELPPPPAAGNTSVAANATLAGAPALLCSGAEWRLCEVVEHACRSDGRRARVTCAENRALRLVDGGGACAGRVEMLEHGEWGSVCDDTWDLEDAHVVCRQLGCGWAVQALPGLHFTPGRGPIHRDQVNCSGAEAYLWDCPGLPGQHYCGHKEDAGAVCSEHQSWRLTGGADRCEGQVEVHFRGVWNTVCDSEWYPSEAKVLCQSLGCGTAVERPKGLPHSLSGRMYYSCNGEELTLSNCSWRFNNSNLCSQSLAARVLCSASRSLHNLSTPEVPASVQTVTIESSVTVKIENKESRELMLLIPSIVLGILLLGSLIFIAFILLRIKGKYDSQRHRVTDEEVQQSRFQMPPLEEGLEELHASHIPTANPGHCITDPPSLGPQYHPRSNSESSTSSGEDYCNSPKSKLPPWNPQVFSSERSSFLEQPPNLELAGTQPAFSAGPPADDSSSTSSGEWYQNFQPPPQPPSEEQFGCPGSPSPQPDSTDNDDYDDISAA

SEQ ID NO: 40604 - protein, 601 aa, Homo sapiens
MWLFFGITGLLTAALSGHPSPAPPDQLNTSSAESELWEPGERLPVRLTNGSSSCSGTVEVRLEASWEPACGALWDSRAAEAVCRALGCGGAEAASQLAPPTPELPPPPAAGNTSVAANATLAGAPALLCSGAEWRLCEVVEHACRSDGRRARVTCAENRALRLVDGGGACAGRVEMLEHGEWGSVCDDTWDLEDAHVVCRQLGCGWAVQALPGLHFTPGRGPIHRDQVNCSGAEAYLWDCPGLPGQHYCGHKEDAGAVCSEHQSWRLTGGADRCEGQVEVHFRGVWNTVCDSEWYPSEAKVLCQSLGCGTAVERPKGLPHSLSGRMYYSCNGEELTLSNCSWRFNNSNLCSQSLAARVLCSASRSLHNLSTPEVPASVQTVTIESSVTVKIENKESRELMLLIPSIVLGILLLGSLIFIAFILLRIKGKYVFMLPIQVQAPPPEDSDSGSDSDYEHYDFSAQPPVALTTFYNSQRHRVTDEEVQQSRFQMPPLEEGLEELHASHIPTANPGHCITDPPSLGPQYHPRSNSESSTSSGEDYCNSPKSKLPPWNPQVFSSERSSFLEQPPNLELAGTQPAFSGSPSPQPDSTDNDDYDDISAA

SEQ ID NO: 40605 - protein, 592 aa, Homo sapiens
MWLFFGITGLLTAALSGHPSPAPPDQLNTSSAESELWEPGERLPVRLTNGSSSCSGTVEVRLEASWEPACGALWDSRAAEAVCRALGCGGAEAASQLAPPTPELPPPPAAGNTSVAANATLAGAPALLCSGAEWRLCEVVEHACRSDGRRARVTCAENRALRLVDGGGACAGRVEMLEHGEWGSVCDDTWDLEDAHVVCRQLGCGWAVQALPGLHFTPGRGPIHRDQVNCSGAEAYLWDCPGLPGQHYCGHKEDAGAVCSEHQSWRLTGGADRCEGQVEVHFRGVWNTVCDSEWYPSEAKVLCQSLGCGTAVERPKGLPHSLSGRMYYSCNGEELTLSNCSWRFNNSNLCSQSLAARVLCSASRSLHNLSTPEVPASVQTVTIESSVTVKIENKESRELMLLIPSIVLGILLLGSLIFIAFILLRIKGKYALPVMVNHQHLPTTIPAGSNSYQPVPITIPKEDSQRHRVTDEEVQQSRFQMPPLEEGLEELHASHIPTANPGHCITDPPSLGPQYHPRSNSESSTSSGEDYCNSPKSKLPPWNPQVFSSERSSFLEQPPNLELAGTQPAFSGSPSPQPDSTDNDDYDDISAA

SEQ ID NO: 40606 - protein, 238 aa, Homo sapiens
MAVEGGMKCVKFLLYVLLLAFCACAVGLIAVGVGAQLVLSQTIIQGATPGSLLPVVIIAVGVFLFLVAFVGCCGACKENYCLMITFAIFLSLIMLVEVAAAIAGYVFRDKVMSEFNNNFRQQMENYPKNNHTASILDRMQADFKCCGAANYTDWEKIPSMSKNRVPDSCCINVTVGCGINFNEKAIHKEGCVEKIGGWLRKNVLVVAAAALGIAFVEVLGIVFACCLVKSIRSGYEVM

SEQ ID NO: 40607 - protein, 236 aa, Homo sapiens
MAVEGGMKCVKFLLYVLLLAFCACAVGLIAVGVGAQLVLSQTIIQGATPGSLLPVVIIAVGVFLFLVAFVGCCGACKENYCLMITFAIFLSLIMLVEVAAAIAGYVFRDKVMSEFNNNFRQQMENYPKNNHTASILDRMQADFKCCGAANYTDWEKIPSMSKNRVPDSCCINVTVGCGINFNEKAIHKEGCVEKIGGWLRKNVLVVAAAALGIAFVLGIVFACCLVKSIRSGYEVM

SEQ ID NO: 40608 - protein, 133 aa, Homo sapiens
MAVEGGMKCVKFLLYVLLLAFCACAVGLIAVGVGAQLVLSQTIIQGATPGSLLPVVIIAVGVFLFLVAFVGCCGACKENYCLMITFAIFLSLIMLVEVAAAIAGYVFRDKVMSEFNNNFRQQMENYPKNNHTA

SEQ ID NO: 40609 - protein, 238 aa, Homo sapiens; identical to SEQ ID NO: 40606

SEQ ID NO: 40610 - protein, 215 aa, Homo sapiens
MAVEGGMKCVKFLLYVLLLAFCACAVGLIAVGVGAQLVLSQTIIQGATPGSLLPVVIIAVGVFLFLVAFVGCCGACKENYCLMITFAIFLSLIMLVEVAAAIAGYVFRDKVMSEFNNNFRQQMENYPKNNHTASILDRMQADFKCCGAANYTDWEKIPSMSKNRVPDSCCINVTVGCGINFNEKAIHKEGCVEKIGGWLRKNVLVVAAAALGIAF

SEQ ID NO: 40611 - protein, 217 aa, Homo sapiens
MAVEGGMKCVKFLLYVLLLAFCACAVGLIAVGVGAQLVLSQTIIQGATPGSLLPVVIIAVGVFLFLVAFVGCCGACKENYCLMITFAIFLSLIMLVEVAAAIAGYVFRDKVMSEFNNNFRQQMENYPKNNHTASILDRMQADFKCCGAANYTDWEKIPSMSKNRVPDSCCINVTVGCGINFNEKAIHKEGCVEKIGGWLRKNVLVVAAAALGIAFVE

SEQ ID NO: 40612 - protein, 238 aa, Homo sapiens; identical to SEQ ID NO: 40606

SEQ ID NO: 40613 - protein, 215 aa, Homo sapiens
MAVEGGMKCVKFLLYVLLLAFCGATPGSLLPVVIIAVGVFLFLVAFVGCCGACKENYCLMITFAIFLSLIMLVEVAAAIAGYVFRDKVMSEFNNNFRQQMENYPKNNHTASILDRMQADFKCCGAANYTDWEKIPSMSKNRVPDSCCINVTVGCGINFNEKAIHKEGCVEKIGGWLRKNVLVVAAAALGIAFVEVLGIVFACCLVKSIRSGYEVM

SEQ ID NO: 40614 - protein, 156 aa, Homo sapiens
MITFAIFLSLIMLVEVAAAIAGYVFRDKVMSEFNNNFRQQMENYPKNNHTASILDRMQADFKCCGAANYTDWEKIPSMSKNRVPDSCCINVTVGCGINFNEKAIHKEGCVEKIGGWLRKNVLVVAAAALGIAFVEVLGIVFACCLVKSIRSGYEVM

SEQ ID NO: 40615 - protein, 156 aa, Homo sapiens; identical to SEQ ID NO: 40614

SEQ ID NO: 40616 - protein, 354 aa, Homo sapiens
MRLAVLFSGALLGLLAAQGTGNDCPHKKSATLLPSFTVTPTVTESTGTTSHRTTKSHKTTTHRTTTTGTTSHGPTTATHNPTTTSHGNVTVHPTSNSTATSQGPSTATHSPATTSHGNATVHPTSNSTATSPGFTSSAHPEPPPPSPSPSPTSKETIGDYTWTNGSQPCVHLQAQIQIRVMYTTQGGGEAWGISVLNPNKTKVQGSCEGAHPHLLLSFPYGHLSFGFMQDLQQKVVYLSYMAVEYNVSFPHAAQWTFSAQNASLRDLQAPLGQSFSCSNSSIILSPAVHLDLLSLRLQAAQLPHTGVFGQSFSCPSDRSILLPLIIGLILLGLLALVLIAFCIIRRRPSAYQAL

SEQ ID NO: 40617 - protein, 297 aa, Homo sapiens
MRLAVLFSGALLGLLAESTGTTSHRTTKSHKTTTHRTTTTGTTSHGPTTATHNPTTTSHGNATVHPTSNSTATSPGFTSSAHPEPPPPSPSPSPTSKETIGDYTWTNGSQPCVHLQAQIQIRVMYTTQGGGEAWGISVLNPNKTKVQGSCEGAHPHLLLSFPYGHLSFGFMQDLQQKVVYLSYMAVEYNVSFPHAAQWTFSAQNASLRDLQAPLGQSFSCSNSSIILSPAVHLDLLSLRLQAAQLPHTGVFGQSFSCPSDRSILLPLIIGLILLGLLALVLIAFCIIRRRPSAYQAL

SEQ ID NO: 40618 - protein, 199 aa, Homo sapiens
MSSENCFVAENSSLHPESGQENDATSPHFSTRHEGSFQVPVLCAVMNVVFITILIIALIALSVGQYNCPGQYTFSMPSDSHVSSCSEDWVGYQRKCYFISTVKRSWTSAQNACSEHGATLAVIDSEKDMNFLKRYAGREEHWVGLKKEPGHPWKWSNGKEFNNWFNVTGSDKCVFLKNTEVSSMECEKNLYWICNKPYK

SEQ ID NO: 40619 - protein, 164 aa, Homo sapiens
MSSENCFVAENSSLHPESGQENDATSPHFSTRHEGSFQVPVLCAVMNVVFITILIIALIALSVGQYNCPGQYTFSMPSDSHVSSCSEDWVGYQRKCYFISTVKRSWTSAQNACSEHGATLAVIDSEKDMNFLKRYAGREEHWVGLKKEPGHPWKWSNGKEFNNW

SEQ ID NO: 40620 - protein, 240 aa, Homo sapiens
MAGPPRLLLLPLLLALARGLPGALAAQEVQQSPHCTTVPVGASVNITCSTSGGLRGIYLRQLGPQPQDIIYYEDGVVPTTDRRFRGRIDFSGSQDNLTITMHRLQLSDTGTYTCQAITEVNVYGSGTLVLVTEEQSQGWHRCSDAPPRASALPAPPTGSALPDPQTASALPDPPAASALPAALAVISFLLGLGLGVACVLARTQIKKLCSWRDKNSAACVVYEDMSHSRCNTLSSPNQYQ

SEQ ID NO: 40621 - protein, 359 aa, Homo sapiens
MAEAITYADLRFVKAPLKKSISSRLGQDPGADDDGEITYENVQVPAVLGVPSSLASSVLGDKAAVKSEQPTASWRAVTSPAVGRILPCRTTCLRYLLLGLLLTCLLLGVTAICLGVRYLQVSQQLQQTNRVLEVTNSSLRQQLRLKITQLGQSAEDLQGSRRELAQSQEALQVEQRAHQAAEGQLQACQADRQKTKETLQSEEQQRRALEQKLSNMENRLKPFFTCGSADTCCPSGWIMHQKSCFYISLTSKNWQESQKQCETLSSKLATFSEIYPQSHSYYFLNSLLPNGGSGNSYWTGLSSNKDWKLTDDTQRTRTYAQSSKCNKVHKTWSWWTLESESCRSSLPYICEMTAFRFPD

SEQ ID NO: 40622 - protein, 120 aa, Homo sapiens
MAEAITYADLRFVKAPLKKSISSRLGQDPGADDDGEITYENVQVPAVLGVPSSLASSVLGDKAAVKSEQPTASWRAVTSPAVGRILPCECACAGQPRGQVLAPVPAADGAGPRGVQLLPG

SEQ ID NO: 40623 - protein, 119 aa, Homo sapiens
MAEAITYADLRFVKAPLKKSISSRLGQDPGADDDGEITYENVQVPAVLGVPSSLASSVLGDKAAVKSEQPTASWRAVTSPAVGRILPCRTTCLRYLLLGLLLTCLLLGVTAICLGVRCE

SEQ ID NO: 40624 - protein, 359 aa, Homo sapiens; identical to SEQ ID NO: 40621

SEQ ID NO: 40625 - protein, 359 aa, Homo sapiens [sequence omitted]

SEQ ID NO: 40626 - protein, 296 aa, Homo sapiens
MHRRRSRSCREDQKPVMDDQRDLISNNEQLPMLGRRPGAPESKCSRGALYTGFSILVTLLLAGQATTAYFLYQQQGRLDKLTVTSQNLQLENLRMKLPKPPKPVSKMRMATPLLMQALPMGALPQGPMQNATKYGNMTEDHVMHLLQNADPLKVYPPLKGSFPENLRHLKNTMETIDWKVFESWMHHWLLFEMSRHSLEQKPTDAPPKVLTKCQEEVSHIPAVHPGSFRPKCDENGNYLPLQCYGSIGYCWCVFPNGTEVPNTRSRGHHNCSESLELEDPSSGLGVTKQDLGPVPM

SEQ ID NO: 40627 - protein, 232 aa, Homo sapiens
MHRRRSRSCREDQKPVMDDQRDLISNNEQLPMLGRRPGAPESKCSRGALYTGFSILVTLLLAGQATTAYFLYQQQGRLDKLTVTSQNLQLENLRMKLPKPPKPVSKMRMATPLLMQALPMGALPQGPMQNATKYGNMTEDHVMHLLQNADPLKVYPPLKGSFPENLRHLKNTMETIDWKVFESWMHHWLLFEMSRHSLEQKPTDAPPKESLELEDPSSGLGVTKQDLGPVPM

SEQ ID NO: 40628 - protein, 160 aa, Homo sapiens
MHRRRSRSCREDQKPVMDDQRDLISNNEQLPMLGRRPGAPESKCSRGALYTGFSILVTLLLAGQATTAYFLYQQQGRLDKLTVTSQNLQLENLRMKLPKPPKPVSKMRMATPLLMQALPMGALPQGPMQNATKYGNMTEDHVMHLLQSHWNWRTRLLGWV

SEQ ID NO: 40629 - protein, 316 aa, Homo sapiens
  VARIANT 1: note = MOD_RES - Any amino acid
XRSCREDQKPVMDDQRDLISNNEQLPMLGRRPGAPESKCSRGALYTGFSILVTLLLAGQATTAYFLYQQQGRLDKLTVTSQNLQLENLRMKLPKPPKPVSKMRMATPLLMQALPMGALPQGPMQNATKYGNMTEDHVMHLLQNADPLKVYPPLKGSFPENLRHLKNTMETIDWKVFESWMHHWLLFEMSRHSLEQKPTDAPPKVLTKCQEEVSHIPAVHPGSFRPKCDENGNYLPLQCYGSIGYCWCVFPNGTEVPNTRSRGHHNCSESLELEDPSSGLGVTKQDLGPGKGLAEGHLVTSSSSPAGPAPLWAGEGV

SEQ ID NO: 40630 - protein, 122 aa, Homo sapiens
MHRRRSRSCREDQKPVMDDQRDLISNNEQLPMLGRRPGAPESKCSRGALYTGFSILVTLLLAGQATTAYFLYQQQGRLDKLTVTSQNLQLENLRMKLPKPHAECHQVWQHDRGPCDAPAPEC

SEQ ID NO: 40631 - protein, 152 aa, Homo sapiens [sequence omitted]

SEQ ID NO: 40632 - protein, 229 aa, Homo sapiens
MARLALSPVPSHWMVALLLLLSAEPVPAARSEDRYRNPKGSACSRIWQSPRFIARKRGFTVKMHCYMNSASGNVSWLWKQEMDENPQQLKLEKGRMEESQNESLATLTIQGIRFEDNGIYFCQQKCNNTSEVYQGCGTELRVMGFSTLAQLKQRNTLKDGIIMIQTLLIILFIIVPIFLLLDKDDSKAGMEEDHTYEGLDIDQTATYEDIVTLRTGEVKWSVGEHPGQE

SEQ ID NO: 40633 - protein, 125 aa, Homo sapiens
MARLALSPVPSHWMVALLLLLSAEPVPAARSEDRYRNPKGFSTLAQLKQRNTLKDGIIMIQTLLIILFIIVPIFLLLDKDDSKAGMEEDHTYEGLDIDQTATYEDIVTLRTGEVKWSVGEHPGQE

SEQ ID NO: 40634 - protein, 230 aa, Homo sapiens
MARLALSPVPSHWMVALLLLLSAAEPVPAARSEDRYRNPKGSACSRIWQSPRFIARKRGFTVKMHCYMNSASGNVSWLWKQEMDENPQQLKLEKGRMEESQNESLATLTIQGIRFEDNGIYFCQQKCNNTSEVYQGCGTELRVMGFSTLAQLKQRNTLKDGIIMIQTLLIILFIIVPIFLLLDKDDSKAGMEEDHTYEGLDIDQTATYEDIVTLRTGEVKWSVGEHPGQE

SEQ ID NO: 40635 - protein, 236 aa, Homo sapiens
MGVEGCTKCIKYLLFVFNFVFWLAGGVILGVALWLRHDPQTTNLLYLELGDKPAPNTFYVGIYILIAVGAVMMFVGFLGCYGAIQESQCLLGTFFTCLVILFACEVAAGIWGFVNKDQIAKDVKQFYDQALQQAVVDDDANNAKAVVKTFHETLDCCGSSTLTALTTSVLKNNLCPSGSNIISNLFKEDCHQKIDDLFSGKLYLIGIAAIVVAVIMIFEMILSMVLCCGIRNSSVY

SEQ ID NO: 40636 - protein, 205 aa, Homo sapiens
MSRGLQLLLLSCAYSLAPATPEVKVACSEDVDLPCTAPWDPQVPYTVSWVKLLEGGEERMETPQEDHLRGQHYHQKGQNGSFDAPNERPYSLKIRNTTSCNSGTYRCTLQDPDGQRNLSGKVILRVTGCPAQRKEETFKKYRAEIVLLLALVIFYLTLIIFTCKFARLQSIFPDFSKAGMERAFLPVTSPNKHLGLVTPHKTELV

SEQ ID NO: 40637 - protein, 116 aa, Homo sapiens
MDPQCTMGLSNILFVMAFLLSELEDPQPPPDHIPWITAVLPTVIICVMVFCLILWKWKKKKRPRNSYKCGTNTMEREESEQTKKREKIHIPERSDEAQRVFKSSKTSSCDKSDTCF

SEQ ID NO: 40638 - protein, 329 aa, Homo sapiens
MDPQCTMGLSNILFVMAFLLSGAAPLKIQAYFNETADLPCQFANSQNQSLSELVVFWQDQENLVLNEVYLGKEKFDSVHSKYMGRTSFDSDSWTLRLHNLQIKDKGLYQCIIHHKKPTGMIRIHQMNSELSVLANFSQPEIVPISNITENVYINLTCSSIHGYPEPKKMSVLLRTKNSTIEYDGVMQKSQDNVTELYDVSISLSVSFPDVTSNMTIFCILETDKTRLLSSPFSIELEDPQPPPDHIPWITAVLPTVIICVMVFCLILWKWKKKKRPRNSYKCGTNTMEREESEQTKKREKIHIPERSDEAQRVFKSSKTSSCDKSDTCF

SEQ ID NO: 40639 - protein, 323 aa, Homo sapiens
MGLSNILFVMAFLLSGAAPLKIQAYFNETADLPCQFANSQNQSLSELVVFWQDQENLVLNEVYLGKEKFDSVHSKYMGRTSFDSDSWTLRLHNLQIKDKGLYQCIIHHKKPTGMIRIHQMNSELSVLANFSQPEIVPISNITENVYINLTCSSIHGYPEPKKMSVLLRTKNSTIEYDGVMQKSQDNVTELYDVSISLSVSFPDVTSNMTIFCILETDKTRLLSSPFSIELEDPQPPPDHIPWITAVLPTVIICVMVFCLILWKWKKKKRPRNSYKCGTNTMEREESEQTKKREKIHIPERSDEAQRVFKSSKTSSCDKSDTCF

SEQ ID NO: 40640 - protein, 167 aa, Homo sapiens
MGLSNILFVMAFLLSGAAPLKIQAYFNETADLPCQFANSQNQSLSELVVFWQDQENLVLNEVYLGKEKFDSVHSKYMGRTSFDSDSWTLRLHNLQIKDKGLYQCIIHHKKPTGMIRIHQMNSELSVLANFSQPEIVPISNITENVYINLTCSSIHGYPEPKKMSVLL

SEQ ID NO: 40641 - protein, 247 aa, Homo sapiens
MGRTSFDSDSWTLRLHNLQIKDKGLYQCIIHHKKPTGMIRIHQMNSELSVLANFSQPEIVPISNITENVYINLTCSSIHGYPEPKKMSVLLRTKNSTIEYDGVMQKSQDNVTELYDVSISLSVSFPDVTSNMTIFCILETDKTRLLSSPFSIELEDPQPPPDHIPWITAVLPTVIICVMVFCLILWKWKKKKRPRNSYKCGTNTMEREESEQTKKREKIHIPERSDEAQRVFKSSKTSSCDKSDTCF

SEQ ID NO: 40642 - protein, 217 aa, Homo sapiens
MDPQCTMGLSNILFVMAFLLSANFSQPEIVPISNITENVYINLTCSSIHGYPEPKKMSVLLRTKNSTIEYDGVMQKSQDNVTELYDVSISLSVSFPDVTSNMTIFCILETDKTRLLSSPFSIELEDPQPPPDHIPWITAVLPTVIICVMVFCLILWKWKKKKRPRNSYKCGTNTMEREESEQTKKREKIHIPERSDEAQRVFKSSKTSSCDKSDTCF

SEQ ID NO: 40643 - protein, 243 aa, Homo sapiens
MRPRLWLLLAAQLTVLHGNSVLQQTPAYIKVQTNKMVMLSCEAKISLSNMRIYWLRQRQAPSSDSHHEFLALWDSAKGTIHGEEVEQEKIAVFRDASRFILNLTSVKPEDSGIYFCMIVGSPELTFGKGTQLSVVDFLPTTAQPTKKSTLKKRVCRLPRPETQKGPLCSPITLGLLVAGVLVLLVSLGVAIHLCCRRRRARLRFMKQPQGEGISGTFVPQCLHGYYSNTTTSQKLLNPWILKT

SEQ ID NO: 40644 - protein, 213 aa, Homo sapiens
MRPRLWLLLAAQLTVLHGNSVLQQTPAYIKVQTNKMVMLSCEAKISLSNMRIYWLRQRQAPSSDSHHEFLALWDSAKGTIHGEEVEQEKIAVFRDASRFILNLTSVKPEDSGIYFCMIVGSPELTFGKGTQLSVVDFLPTTAQPTKKSTLKKRVCRLPRPETQKGRRRRARLRFMKQPQGEGISGTFVPQCLHGYYSNTTTSQKLLNPWILKT

SEQ ID NO: 40645 - protein, 210 aa, Homo sapiens
MRPRLWLLLAAQLTVLHGNSVLQQTPAYIKVQTNKMVMLSCEAKISLSNMRIYWLRQRQAPSSDSHHEFLALWDSAKGTIHGEEVEQEKIAVFRDASRFILNLTSVKPEDSGIYFCMIVGSPELTFGKGTQLSVVDFLPTTAQPTKKSTLKKRVCRLPRPETQKGPLCSPITLGLLVAGVLVLLVSLGVAIHLCCRRRRARLRFMKQFYK

SEQ ID NO: 40646 - protein, 221 aa, Homo sapiens
MRPRLWLLLAAQLTVLHGNSVLQQTPAYIKVQTNKMVMLSCEAKISLSNMRIYWLRQRQAPSSDSHHEFLALWDSAKGTIHGEEVEQEKIAVFRDASRFILNLTSVKPEDSGIYFCMIVGSPELTFGKGTQLSVVDFLPTTAQPTKKSTLKKRVCRLPRPETQKGPLCSPITLGLLVAGVLVLLVSLGVAIHLCCRRRRARLRFMKQLRLHPLEKCSRMDY

SEQ ID NO: 40647 - protein, 198 aa, Homo sapiens
MRPRLWLLLAAQLTVLHGNSVLQQTPAYIKVQTNKMVMLSCEAKISLSNMRIYWLRQRQAPSSDSHHEFLALWDSAKGTIHGEEVEQEKIAVFRDASRFILNLTSVKPEDSGIYFCMIVGSPELTFGKGTQLSVVDFLPTTAQPTKKSTLKKRVCRLPRPETQKGLKGKVYQEPLSPNACMDTTAILQPHRSCLTHGS

SEQ ID NO: 40648 - protein, 30 aa, Homo sapiens
MRPRLWLLLAAQLTGRRRRARLRFMKQLYK

SEQ ID NO: 40649 - protein, 207 aa, Homo sapiens
MRPRLWLLLAAQLTVLHGNSVLQQTPAYIKVQTNKMVMLSCEAKISLSNMRIYWLRQRQAPSSDSHHEFLALWDSAKGTIHGEEVEQEKIAVFRDASRFILNLTSVKPEDSGIYFCMIVGSPELTFGKGTQLSVVDFLPTTAQPTKKSTLKKRVCRLPRPETQKGPLCSPITLGLLVAGVLVLLVSLGVAIHLCCRRRRARLRFMKQ

SEQ ID NO: 40650 - protein, 50 aa, Homo sapiens
ERGRERRVKLRFSARPQGEGISGTFVPQCLHGYYSNTTTSQKLLNPWILK

SEQ ID NO: 40651 - protein, 228 aa, Homo sapiens
MPVKGGTKCIKYLLFGFNFIFWLAGIAVLAIGLWLRFDSQTKSIFEQETNNNNSSFYTGVYILIGAGALMMLVGFLGCCGAVQESQCMLGLFFGFLLVIFAIEIAAAIWGYSHKDEVIKEVQEFYKDTYNKLKTKDEPQRETLKAIHYALNCCGLAGGVEQFISDICPKKDVLETFTVKSCPDAIKEVFDNKFHIIGAVGIGIAVVMIFGMIFSMILCCAIRRNREMV

SEQ ID NO: 40652 - protein, 159 aa, Homo sapiens
MMLVGFLGCCGAVQESQCMLGLFFGFLLVIFAIEIAAAIWGYSHKDEVIKEVQEFYKDTYNKLKTKDEPQRETLKAIHYALNCCGLAGGVEQFISDICPKKDVLETFTVKSCPDAIKEVFDNKFHIIGAVGIGIAVVMIFGMIFSMILCCAIRRNREMV

SEQ ID NO: 40653 - protein, 228 aa, Homo sapiens; identical to SEQ ID NO: 40651

SEQ ID NO: 40654 - protein, 228 aa, Homo sapiens
MPVKGGTKCIKYLLFGFNFIFWLAGIAVLAIGLWLRFDSQTKSIFEQETNNNNSSFYTGVYILIGAGALMMLVGFLGCCGAVQESQCMLGLATKRTMFPPFLEDHVCFFSLNPQFFGFLLVIFAIEIAAAIWGYSHKDEVIKEVQEFYKDTYNKLKTKDEPQRETLKAIHYALNCCGLAGGVEQFISDICPKKDVLETFTVKSCPDAIKEVFDNKFHIIGAVGIGIAV

SEQ ID NO: 40655 - protein, 181 aa, Homo sapiens
MPVKGGTKCIKYLLFGFNFIFWLAGIAVLAIGLWLRFDSQTKSIFEQETNNNNSSFYTGVYILIGAGALMMLVGFLGCCGAVQESQCMLGLFFGFLLVIFAIEIAAAIWGYSHKDEVIKEVQEFYKDTYNKLKTKDEPQRETLKAIHYALNLWFGWGRGTVYLRHLPQEGRTRNLHREVLS

SEQ ID NO: 40656 - protein, 141 aa, Homo sapiens
MLGLFFGFLLVIFAIEIAAAIWGYSHKDEVIKEVQEFYKDTYNKLKTKDEPQRETLKAIHYALNCCGLAGGVEQFISDICPKKDVLETFTVKSCPDAIKEVFDNKFHIIGAVGIGIAVVMIFGMIFSMILCCAIRRNREMV

SEQ ID NO: 40657 - protein, 585 aa, Homo sapiens
MEKKWKYCAVYYIIQIHFVKGVWEKTVNTEENVYATLGSDVNLTCQTQTVGFFVQMQWSKVTNKIDLIAVYHPQYGFYCAYGRPCESLVTFTETPENGSKWTLHLRNMSCSVSGRYECMLVLYPEGIQTKIYNLLIQTHVTADEWNSNHTIEIEINQTLEIPCFQNSSSKISSEFTYAWSVENSSTDSWVLLSKGIKEDNGTQETLISQNHLISNSTLLKDRVKLGTDYRLHLSPVQIFDDGRKFSCHIRVGPNKILRSSTTVKVFAKPEIPVIVENNSTDVLVERRFTCLLKNVFPKANITWFIDGSFLHDEKEGIYITNEERKGKDGFLELKSVLTRVHSNKPAQSDNLTIWCMALSPVPGNKVWNISSEKITFLLGSEISSTDPPLSVTESTLDTQPSPASSVSPARYPATSSVTLVDVSALRPNTTPQPSNSSMTTRGFNYPWTSSGTDTKKSVSRIPSETYSSSPSGAGSTLHDNVFTSTARAFSEVPTTANGSTKTNHVHITGIVVNKPKDGMSWPVIVAALLFCCMILFGLGVRKWCQYQKEIMERPPPFKPPPPPIKYTCIQEPNESDLPYHEMETL

SEQ ID NO: 40658 - protein, 569 aa, Homo sapiens
MEKKWKYCAVYYIIQIHFVKGVWEKTVNTEENVYATLGSDVNLTCQTQTVGFFVQMQWSKVTNKIDLIAVYHPQYGFYCAYGRPCESLVTFTETPENGSKWTLHLRNMSCSVSGRYECMLVLYPEGIQTKIYNLLIQTHVTADEWNSNHTIEIEINQTLEIPCFQNSSSKISSEFTYAWSVEDNGTQETLISQNHLISNSTLLKDRVKLGTDYRLHLSPVQIFDDGRKFSCHIRVGPNKILRSSTTVKVFAKPEIPVIVENNSTDVLVERRFTCLLKNVFPKANITWFIDGSFLHDEKEGIYITNEERKGKDGFLELKSVLTRVHSNKPAQSDNLTIWCMALSPVPGNKVWNISSEKITFLLGSEISSTDPPLSVTESTLDTQPSPASSVSPARYPATSSVTLVDVSALRPNTTPQPSNSSMTTRGFNYPWTSSGTDTKKSVSRIPSETYSSSPSGAGSTLHDNVFTSTARAFSEVPTTANGSTKTNHVHITGIVVNKPKDGMSWPVIVAALLFCCMILFGLGVRKWCQYQKEIMERPPPFKPPPPPIKYTCIQEPNESDLPYHEMETL

SEQ ID NO: 40659 - protein, 835 aa, Homo sapiens
MGGRVFLAFCVWLTLPGAETQDSRGCARWCPQNSSCVNATACRCNPGFSSFSEIITTPTETCDDINECATPSKVSCGKFSDCWNTEGSYDCVCSPGYEPVSGAKTFKNESENTCQDVDECQQNPRLCKSYGTCVNTLGSYTCQCLPGFKFIPEDPKVCTDVNECTSGQNPCHSSTHCLNNVGSYQCRCRPGWQPIPGSPNGPNNTVCEDVDECSSGQHQCDSSTVCFNTVGSYSCRCRPGWKPRHGIPNNQKDTVCEDMTFSTWTPPPGVHSQTLSRFFDKVQDLGRDSKTSSAEVTIQNVIKLVDELMEAPGDVEALAPPVRHLIATQLLSNLEDIMRILAKSLPKGPFTYISPSNTELTLMIQERGDKNVTMGQSSARMKLNWAVAAGAEDPGPAVAGILSIQNMTTLLANASLNLHSKKQAELEEIYESSIRGVQLRRLSAVNSIFLSHNNTKELNSPILFAFSHLESSDGEAGRDPPAKDVMPGPRQELLCAFWKSDSDRGGHWATEGCQVLGSKNGSTTCQCSHLSSFAILMAHYDVEDWKLTLITRVGLALSLFCLLLCILTFLLVRPIQGSRTTIHLHLCICLFVGSTIFLAGIENEGGQVGLRCRLVAGLLHYCFLAAFCWMSLEGLELYFLVVRVFQGQGLSTRWLCLIGYGVPLLIVGVSAAIYSKGYGRPRYCWLDFEQGFLWSFLGPVTFIILCNAVIFVTTVWKLTQKFSEINPDMKKLKKARALTITAIAQLFLLGCTWVFGLFIFDDRSLVLTYVFTILNCLQGAFLYLLHCLLNKKVREEYRKWACLVAGGSKYSEFTSTTSGTGHNQTRALRASESGI

SEQ ID NO: 40660 - protein, 786 aa, Homo sapiens
MGGRVFLAFCVWLTLPGAETQDSRGCARWCPQNSSCVNATACRCNPGFSSFSEIITTPTETCDDINECATPSKVSCGKFSDCWNTEGSYDCVCSPGYEPVSGAKTFKNESENTCQDVDECQQNPRLCKSYGTCVNTLGSYTCQCLPGFKFIPEDPKVCTDVDECSSGQHQCDSSTVCFNTVGSYSCRCRPGWKPRHGIPNNQKDTVCEDMTFSTWTPPPGVHSQTLSRFFDKVQDLGRDSKTSSAEVTIQNVIKLVDELMEAPGDVEALAPPVRHLIATQLLSNLEDIMRILAKSLPKGPFTYISPSNTELTLMIQERGDKNVTMGQSSARMKLNWAVAAGAEDPGPAVAGILSIQNMTTLLANASLNLHSKKQAELEEIYESSIRGVQLRRLSAVNSIFLSHNNTKELNSPILFAFSHLESSDGEAGRDPPAKDVMPGPRQELLCAFWKSDSDRGGHWATEGCQVLGSKNGSTTCQCSHLSSFAILMAHYDVEDWKLTLITRVGLALSLFCLLLCILTFLLVRPIQGSRTTIHLHLCICLFVGSTIFLAGIENEGGQVGLRCRLVAGLLHYCFLAAFCWMSLEGLELYFLVVRVFQGQGLSTRWLCLIGYGVPLLIVGVSAAIYSKGYGRPRYCWLDFEQGFLWSFLGPVTFIILCNAVIFVTTVWKLTQKFSEINPDMKKLKKARALTITAIAQLFLLGCTWVFGLFIFDDRSLVLTYVFTILNCLQGAFLYLLHCLLNKKVREEYRKWACLVAGGSKYSEFTSTTSGTGHNQTRALRASESGI

SEQ ID NO: 40661 - protein, 742 aa, Homo sapiens
MGGRVFLAFCVWLTLPGAETQDSRGCARWCPQNSSCVNATACRCNPGFSSFSEIITTPTETCDDINECATPSKVSCGKFSDCWNTEGSYDCVCSPGYEPVSGAKTFKNESENTCQDVDECSSGQHQCDSSTVCFNTVGSYSCRCRPGWKPRHGIPNNQKDTVCEDMTFSTWTPPPGVHSQTLSRFFDKVQDLGRDSKTSSAEVTIQNVIKLVDELMEAPGDVEALAPPVRHLIATQLLSNLEDIMRILAKSLPKGPFTYISPSNTELTLMIQERGDKNVTMGQSSARMKLNWAVAAGAEDPGPAVAGILSIQNMTTLLANASLNLHSKKQAELEEIYESSIRGVQLRRLSAVNSIFLSHNNTKELNSPILFAFSHLESSDGEAGRDPPAKDVMPGPRQELLCAFWKSDSDRGGHWATEGCQVLGSKNGSTTCQCSHLSSFAILMAHYDVEDWKLTLITRVGLALSLFCLLLCILTFLLVRPIQGSRTTIHLHLCICLFVGSTIFLAGIENEGGQVGLRCRLVAGLLHYCFLAAFCWMSLEGLELYFLVVRVFQGQGLSTRWLCLIGYGVPLLIVGVSAAIYSKGYGRPRYCWLDFEQGFLWSFLGPVTFIILCNAVIFVTTVWKLTQKFSEINPDMKKLKKARALTITAIAQLFLLGCTWVFGLFIFDDRSLVLTYVFTILNCLQGAFLYLLHCLLNKKVREEYRKWACLVAGGSKYSEFTSTTSGTGHNQTRALRASESGI

SEQ ID NO: 40662 - protein, 785 aa, Homo sapiens
GGRIMRAFCVWLTLPGAETQDSRGCARWCPQNSSCVNATACRCNPGFSSFSEIITTPTETCDDINECATPSKVSCGKFSDCWNTEGSYDCVCSPGYEPVSGAKTFKNESENTCQDVDECQQNPRLCKSYGTCVNTLGSYTCQCLPGFKFIPEDPKVCTDVDECSSGQHQCDSSTVCFNTVGSYSCRCRPGWKPRHGIPNNQKDTVCEDMTFSTWTPPPGVHSQTLSRFFDKVQDLGRDSKTSSAEVTIQNVIKLVDELMEAPGDVEALAPPVRHLIATQLLSNLEDIMRILAKSLPKGPFTYISPSNTELTLMIQERGDKNVTMGQSSARMKLNWAVAAGAEDPGPAVAGILSIQNMTTLLANASLNLHSKKQAELEEIYESSIRGVQLRRLSAVNSIFLSHNNTKELNSPILFAFSHLESSDGEAGRDPPAKDVMPGPRQELLCAFWKSDSDRGGHWATEGCQVLGSKNGSTTCQCSHLSSFAILMAHYDVEDWKLTLITRVGLALSLFCLLLCILTFLLVRPIQGSRTTIHLHLCICLFVGSTIFLAGIENEGGQVGLRCRLVAGLLHYCFLAAFCWMSLEGLELYFLVVRVFQGQGLSTRWLCLIGYGVPLLIVGVSAAIYSKGYGRPRYCWLDFEQGFLWSFLGPVTFIILCNAVIFVTTVWKLTQKFSEINPDMKKLKKARALTITAIAQLFLLGCTWVFGLFIFDDRSLVLTYVFTILNCLQGAFLYLLHCLLNKKVREEYRKWACLVAGGSKYSEFTSTTSGTGHNQTRALRASESGI

SEQ ID NO: 40663 - protein, 98 aa, Homo sapiens
MSVRLHVPSGSRGSELSALIQAIGASTSGKPKCFVCILRSGLSVALSLSVYFLLLFSRTRGGGHGEPPECQRRASCSAYSFREIEDCRQKQPRRWQQG

SEQ ID NO: 40664 - protein, 76 aa, Homo sapiens
MARGAALALLLFGLLGVLVAAPGFGDLRLQAARGGRPGVACHSHALRPGPKFGIARSLRPGWWGEGKEKLEKNFEP

SEQ ID NO: 40665 - protein, 177 aa, Homo sapiens
MARGAALALLLFGLLGVLVAAPDGGFDLSDALPDNENKKPTAIPKKPSAGDDFDLGDAVVDGENDDPRPPNPPKPMPNPNPNHPSSSGSFSDADLADGVSGGEGKGGSDGGGSHRKEGEEADAPGVIPGIVGAVVVAVAGAISSFIAYQKKKLCFKENGQLAGSLGPCIGIRREADG

SEQ ID NO: 40666 - protein, 169 aa, Homo sapiens
MARGAALALLLFGLLGVLVAAPDGGFDLSDALPGDDFDLGDAVVDGENDDPRPPNPPKPMPNPNPNHPSSSGSFSDADLADGVSGGEGKGGSDGGGSHRKEGEEADAPGVIPGIVGAVVVAVAGAISSFIAYQKKKLCFKENAEQGEVDMESHRNANAEPAVQRTLLEK

SEQ ID NO: 40667 - protein, 185 aa, Homo sapiens
MARGAALALLLFGLLGVLVAAPDGGFDLSDALPDNENKKPTAIPKKPSAGDDFDLGDAVVDGENDDPRPPNPPKPMPNPNPNHPSSSGSFSDADLADGVSGGEGKGGSDGGGSHRKEGEEADAPGVIPGIVGAVVVAVAGAISSFIAYQKKKLCFKENAEQGEVDMESHRNANAEPAVQRTLLEK

SEQ ID NO: 40668 - protein, 201 aa, Homo sapiens
RRWGRPAGTPGASSLPGRTRCAHGGPGPEEAPTFSPTLFLEPFQREKSAFVVGVANSYMWGGLGRDGGFDLSDALPDNENKKPTAIPKKPSAGDDFDLGDAVVDGENDDPRPPNPPKPMPNPNPNHPSSSGSFSDADLADGVSGGEGKGGSDGGGSHRKEGEEADAPGVIPGIVGAVVVAVAGAISSFIAYQKKKLCFKEN

SEQ ID NO: 40669 - protein, 145 aa, Homo sapiens
MVAWRSAFLVCLAFSLATLVQRGSGDFDDFNLEDAVKETSSVKPALGMYHKLDGLKQQNFILSLFWMLEVLYQGVGWATFSLKALGKNLSLTFPTSGGSRCSLVCGCITPISASVVTWCSPFCVSLLSLTKMLVSGFKAHLDNPG

SEQ ID NO: 40670 - protein, 190 aa, Homo sapiens
MVAWRSAFLVCLAFSLATLVQRGSGDFDDFNLEDAVKETSSVKRNDFDLADALDDRNDRDDGRRKPIAGGGGFSDKDLEDIVGGGEYKPDKGKGDGRYGSNDDPGSGMVAEPGTIAGVASALAMALIGAVSSYISYQQKKFCFSIQQGLNADYVKGENLEAVVCEEPQVKYSTLHTQSAEPPPPPEPARI

SEQ ID NO: 40671 - protein, 262 aa, Homo sapiens
MVAWRSAFLVCLAFSLATLVQRGSGDFDDFNLEDAVKETSSVKQPWDHTTTTTTNRPGTTRAPAKPPGSGLDLADALDDQDDGRRKPGIGGRERWNHVTTTTKRPVTTRAPANTLGNDFDLADALDDRNDRDDGRRKPIAGGGGFSDKDLEDIVGGGEYKPDKGKGDGRYGSNDDPGSGMVAEPGTIAGVASALAMALIGAVSSYISYQQKKFCFSIQQGLNADYVKGENLEAVVCEEPQVKYSTLHTQSAEPPPPPEPARI

SEQ ID NO: 40672 - protein, 157 aa, Homo sapiens
ETSSVKQPWDHTTTTTTNRPGTTRAPAKPPGSGLDLADALDDQDDGRRKPGIGGRERWNHVTTTTKRPVTTRAPANTLGNDFDLADALDDRNDRDDGRRKPIAGGGGFSDKDLEDIVGGGEYKPDKGKGDGRYGSNDDPGSGGFLNPEAPVGHVKGK

SEQ ID NO: 40673 - protein, 189 aa, Homo sapiens
MVAWRSAFLVCLAFSLATLVQRGSGDFDDFNLEDAVKETSSVKQPWDHTTTTTTNRPGTTRAPAKPPGSGLDLADALDDQDDGRRKPGIGGRGDGRYGSNDDPGSGMVAEPGTIAGVASALAMALIGAVSSYISYQQKKFCFSIQQGLNADYVKGENLEAVVCEEPQVKYSTLHTQSAEPPPPPEPARI

SEQ ID NO: 40674 - protein, 272 aa, Homo sapiens
MVAWRSAFLVCLAFSLATLVQRGSGDFDDFNLEDAVKETSSVKQPWDHTTTTTTNRPGTTRAPAKPPGPTEGSGLDLADALDDQDDGRRKPGIGGRERWNHVTTTTKRPVTTRAPANTLGNDFDLADALDDRNDRDDGRRKPIAGGGGFSDKDLEDIVGGGEYKPDKGKGDGRYGSNDDPGSGMVAEPGTIAGVASALAMALIGAVSSYISYQQKKFCFSIQHAAAGQEGLNADYVKGENLEAVVCEEPQVKYSTLHTQSAEPPPPPEPARI

SEQ ID NO: 40675 - protein, 213 aa, Homo sapiens
MVAWRSAFLVCLAFSLATLVQRGSGDFDDFNLEDAVKETSSVKQRWNHVTTTTKRPVTTRAPANTLGNDFDLADALDDRNDRDDGRRKPIAGGGGFSDKDLEDIVGGGEYKPDKGKGDGRYGSNDDPGSGMVAEPGTIAGVASALAMALIGAVSSYISYQQKKFCFSIQQGLNADYVKGENLEAVVCEEPQVKYSTLHTQSAEPPPPPEPARI

SEQ ID NO: 40676 - protein, 594 aa, Homo sapiens
MAAESGELIGACEFMKDRLYFATLRNRPKSTVNTHYFSIDEELVYENFYADFGPLNLAMVYRYCCKLNKKLKSYSLSRKKIVHYTCFDQRKRANAAFLIGAYAVIYLKKTPEEAYRALLSGSNPPYLPFRDASFGNCTYNLTILDCLQGIRKGLQHGFFDFETFDVDEYEHYERVENGDFNWIVPGKFLAFSGPHPKSKIENGYPLHAPEAYFPYFKKHNVTAVVRLNKKIYEAKRFTDAGFEHYDLFFIDGSTPSDNIVRRFLNICENTEGAIAVHCKAGLGRTGTLIACYVMKHYRFTHAEIIAWIRICRPGSIIGPQQHFLEEKQASLWVQGDIFRSKLKNRPSSEGSINKILSGLDDMSIGGNLSKTQNMERFGEDNLEDDDVEMKNGITQGDKLRALKSQRQPRTSPSCAFRSDDTKGHPRAVSQPFRLSSSLQGSAVTLKTSKMALSPSATAKRINRTSLSSGATVRSFSINSRLASSLGNLNAATDDPENKKTSSSSKAGFTASPFTNLLNGSSQPTTRNYPELNNNQYNRSSNSNGGNLNSPPGPHSAKTEEHTTILRPSYTGLSSSSARFLSRSIPSLQSEYVHY

SEQ ID NO: 40677 - protein, 623 aa, Homo sapiens
MAAESGELIGACEFMKDRLYFATLRNRPKSTVNTHYFSIDEELVYENFYADFGPLNLAMVYRYCCKLNKKLKSYSLSRKKIVHYTCFDQRKRANAAFLIGAYAVIYLKKTPEEAYRALLSGSNPPYLPFRDASFGNCTYNLTILDCLQGIRKGLQHGFFDFETFDVDEYEHYERVENGDFNWIVPGKFLAFSGPHPKSKIENGYPLHAPEAYFPYFKKHNVTAVVRLNKKIYEAKRFTDAGFEHYDLFFIDGSTPSDNIVRRFLNICENTEGAIAVHCKAGLGRTGTLIACYVMKHYRFTHAEIIAWIRICRPGSIIGPQQHFLEEKQASLWVQGDIFRSKLKNRPSSEGSINKILSGLDDMSIGGNLSKTQNMERFGEDNLEDDDVEMKNGITQGDKLRALKSQRQPRTSPSCAFRSDDTKGHPRAVSQPFRLSSSLQGSAVTLKTSKMALSPSATAKRINRTSLSSGATVRSFSINSRLASSLGNLNAATDDPENKKTSSSSKAGFTASPFTNLLNGSSQPTTRNYPELNNNQYNRSSNSNGGNLNSPPGPHSAKTEEHTTILRPSYTGLSSSSARFLSRSIPVSAQTPPPGPQNPECNFCALPSQPRLPPKKFNSAKEAF

SEQ ID NO: 40678 - protein, 383 aa, Homo sapiens
MAAESGELIGACEFMKDRLYFATLRNRPKSTVNTHYFSIDEELVYENFYADFGPLNLAMVYRYCCKLNKKLKSYSLSRKKIVHYTCFDQRKRANAAFLIGAYAVIYLKKTPEEAYRALLSGSNPPYLPFRDASFGNCTYNLTILDCLQGIRKGLQHGFFDFETFDVDEYEHYERVENGDFNWIVPGKFLAFSGPHPKSKIENGYPLHAPEAYFPYFKKHNVTAVVRLNKKIYEAKRFTDAGFEHYDLFFIDGSTPSDNIVRRFLNICENTEGAIAVHCKAGLGRTGTLIACYVMKHYRFTHAEIIAWIRICRPGSIIGPQQHFLEEKQASLWVQGDIFRSKLKNRPSSEGSINKILSGLDDMSIGGNLSKTQNMERFGEVSFP

SEQ ID NO: 40679 - protein, 191 aa, Homo sapiens
MAAESGELIGACEFMKDRLYFATLRNRPKSTVNTHYFSIDEELVYENFYADFGPLNLAMVYRYCCKLNKKLKSYSLSRKKIVHYTCFDQRKRANAAFLIGAYAVIYLKKTPEEAYRALLSGSNPPYLPFRDASFGNCTYNLTILDCLQGIRKGLQHGFFDFETFDVDEYEHYEVILFTPLKPTFLISKSIM

SEQ ID NO: 40680 - protein, 273 aa, Homo sapiens
MGNFLSRENKVQVISESDRLYFATLRNRPKSTVNTHYFSIDEELVYENFYADFGPLNLAMVYRYCCKLNKKLKSYSLSRKKIVHYTCFDQRKRANAAFLIGAYAVIYLKKTPEEAYRALLSGSNPPYLPFRDASFGNCTYNLTILDCLQGIRKGLQHGFFDFETFDVDEYEHYERVENGDFNWIVPGKFLAFSGPHPKSKIENGYPLHAPEAYFPYFKKHNVTAVVRLNKKIYEAKRFTDAGFEHYDLFFIDGSTPSDNIVRRFLNICENTEG

SEQ ID NO: 40681 - protein, 565 aa, Homo sapiens
MVYRYCCKLNKKLKSYSLSRKKIVHYTCFDQRKRANAAFLIGAYAVIYLKKTPEEAYRALLSGSNPPYLPFRDASFGNCTYNLTILDCLQGIRKGLQHGFFDFETFDVDEYEHYERVENGDFNWIVPGKFLAFSGPHPKSKIENGYPLHAPEAYFPYFKKHNVTAVVRLNKKIYEAKRFTDAGFEHYDLFFIDGSTPSDNIVRRFLNICENTEGAIAVHCKAGLGRTGTLIACYVMKHYRFTHAEIIAWIRICRPGSIIGPQQHFLEEKQASLWVQGDIFRSKLKNRPSSEGSINKILSGLDDMSIGGNLSKTQNMERFGEDNLEDDDVEMKNGITQGDKLRALKSQRQPRTSPSCAFRSDDTKGHPRAVSQPFRLSSSLQGSAVTLKTSKMALSPSATAKRINRTSLSSGATVRSFSINSRLASSLGNLNAATDDPENKKTSSSSKAGFTASPFTNLLNGSSQPTTRNYPELNNNQYNRSSNSNGGNLNSPPGPHSAKTEEHTTILRPSYTGLSSSSARFLSRSIPVSAQTPPPGPQNPECNFCALPSQPRLPPKKFNSAKEAF

SEQ ID NO: 40682 - protein, 610 aa, Homo sapiens
MAAESGELIGACEFMKDRLYFATLRNRPKSTVNTHYFSIDEELVYENFYADFGPLNLAMVYRYCCKLNKKLKSYSLSRKKIVHYTCFDQRKRANAAFLIGAYAVIYLKKTPEEAYRALLSGSNPPYLPFRDASFGNCTYNLTILDCLQGIRKGLQHGFFDFETFDVDEYEHYERVENGDFNWIVPGKFLAFSGPHPKSKIENGYPLHAPEAYFPYFKKHNVTAVVRLNKKIYEAKRFTDAGFEHYDLFFIDGSTPSDNIVRRFLNICENTEGAIAVHCKAGLGRTGTLIACYVMKHYRFTHAEIIAWIRICRPGSIIGPQQHFLEEKQASLWVQGDIFRSKLKNRPSSEGSINKILSGLDDMSIGGNLSKTQNMERFGEDNLEDDDVEMKNGITQGDKLRALKSQRQPRTSPSCAFRSDDTKGHPRAVSQPFRLSSSLQGSAVTLKTSKMALSPSATAKRINRTSLSSGATVRSFSINSRLASSLGNLNAATDDPENKKTSSSSKAGFTASPFTNLLNGSSQPTTRNYPELNNNQYNRSSNSNGGNLNSPPGPHSAKTEEHTTILRPSYTGLSSSSARFLSRSIPCSCLLLVFRKPFLGSPLLSLPISHL

SEQ ID NO: 40683 - protein, 471 aa, Homo sapiens
MKRKSERRSSWAAAPPCSRRCSSTSPGVKKIRSSTQQDPRRRDPQDDVYLDITDRLCFAILYSRPKSASNVHYFSIDNELEYENFYADFGPLNLAMVYRYCCKINKKLKSITMLRKKIVHFTGSDQRKQANAAFLVGCYMVIYLGRTPEEAYRILIFGETSYIPFRDAAYGSCNFYITLLDCFHAVKKAMQYGFLNFNSFNLDEYEHYEKAENGDLNWIIPDRFIAFCGPHSRARLESGYHQHSPETYIQYFKNHNVTTIIRLNKRMYDAKRFTDAGFDHHDLFFADGSTPTDAIVKEFLDICENAEGAIAVHCKAGLGRTGTLIACYIMKHYRMTAAETIAWVRICRPGSVIGPQQQFLVMKQTNLWLEGDYFRQKLKGQENGQHRAAFSKLLSGVDDISINGVENQDQQEPEPYSDDDEINGVTQGDRLRALKSRRQSKTNAIPLTDGWLSQAVTFLDRLLIWLGIHKD

SEQ ID NO: 40684 - protein, 485 aa, Homo sapiens
MKRKSERRSSWAAAPPCSRRCSSTSPGVKKIRSSTQQDPRRRDPQDDVYLDITDRLCFAILYSRPKSASNVHYFSIDNELEYENFYADFGPLNLAMVYRYCCKINKKLKSITMLRKKIVHFTGSDQRKQANAAFLVGCYMVIYLGRTPEEAYRILIFGETSYIPFRDAAYGSCNFYITLLDCFHAVKKAMQYGFLNFNSFNLDEYEHYEKAENGDLNWIIPDRFIAFCGPHSRARLESGYHQHSPETYIQYFKNHNVTTIIRLNKRMYDAKRFTDAGFDHHDLFFADGSTPTDAIVKEFLDICENAEGAIAVHCKAGLGRTGTLIACYIMKHYRMTAAETIAWVRICRPGSVIGPQQQFLVMKQTNLWLEGDYFRQKLKGQENGQHRAAFSKLLSGVDDISINGVENQDQQEPEPYSDDDEINGVTQGDRLRALKSRRQSKTNAIPLTCPLAVLTSALCSVVIWWIVCDYILPILLFCLDGFRTQ

SEQ ID NO: 40685 - protein, 459 aa, Homo sapiens
MKRKSERRSSWAAAPPCSRRCSSTSPGVKKIRSSTQQDPRRRDPQDDVYLDITDRLCFAILYSRPKSASNVHYFSIDNELEYENFYADFGPLNLAMVYRYCCKINKKLKSITMLRKKIVHFTGSDQRKQANAAFLVGCYMVIYLGRTPEEAYRILIFGETSYIPFRDAAYGSCNFYITLLDCFHAVKKAMQYGFLNFNSFNLDEYEHYEKAENGDLNWIIPDRFIAFCGPHSRARLESGYHQHSPETYIQYFKNHNVTTIIRLNKRMYDAKRFTDAGFDHHDLFFADGSTPTDAIVKEFLDICENAEGAIAVHCKAGLGRTGTLIACYIMKHYRMTAAETIAWVRICRPGSVIGPQQQFLVMKQTNLWLEGDYFRQKLKGQENGQHRAAFSKLLSGVDDISINGVENQDQQEPEPYSDDDEINGVTQGDRLRALKSRRQSKTNAIPLTLSISRTKTVLR

SEQ ID NO: 40686 - protein, 498 aa, Homo sapiens
MKRKSERRSSWAAAPPCSRRCSSTSPGVKKIRSSTQQDPRRRDPQDDVYLDITDRLCFAILYSRPKSASNVHYFSIDNELEYENFYADFGPLNLAMVYRYCCKINKKLKSITMLRKKIVHFTGSDQRKQANAAFLVGCYMVIYLGRTPEEAYRILIFGETSYIPFRDAAYGSCNFYITLLDCFHAVKKAMQYGFLNFNSFNLDEYEHYEKAENGDLNWIIPDRFIAFCGPHSRARLESGYHQHSPETYIQYFKNHNVTTIIRLNKRMYDAKRFTDAGFDHHDLFFADGSTPTDAIVKEFLDICENAEGAIAVHCKAGLGRTGTLIACYIMKHYRMTAAETIAWVRICRPGSVIGPQQQFLVMKQTNLWLEGDYFRQKLKGQENGQHRAAFSKLLSGVDDISINGVENQDQQEPEPYSDDDEINGVTQGDRLRALKSRRQSKTNAIPLTVILQSSVQSCKTSEPNISGSAGITKRTTRSASRKSSVKSLSISRTKTVLR

SEQ ID NO: 40687 - protein, 461 aa, Homo sapiens
MSREGAGAALVAEVIKDRLCFAILYSRPKSASNVHYFSIDNELEYENFYADFGPLNLAMVYRYCCKINKKLKSITMLRKKIVHFTGSDQRKQANAAFLVGCYMVIYLGRTPEEAYRILIFGETSYIPFRDAAYGSCNFYITLLDCFHAVKKAMQYGFLNFNSFNLDEYEHYEKAENGDLNWIIPDRFIAFCGPHSRARLESGYHQHSPETYIQYFKNHNVTTIIRLNKRMYDAKRFTDAGFDHHDLFFADGSTPTDAIVKEFLDICENAEGAIAVHCKAGLGRTGTLIACYIMKHYRMTAAETIAWVRICRPGSVIGPQQQFLVMKQTNLWLEGDYFRQKLKGQENGQHRAAFSKLLSGVDDISINGVENQDQQEPEPYSDDDEINGVTQGDRLRALKSRRQSKTNAIPLTVILQSSVQSCKTSEPNISGSAGITKRTTRSASRKSSVKSLSISRTKTVLR

SEQ ID NO: 40688 - protein, 485 aa, Homo sapiens; identical to SEQ ID NO: 40684

SEQ ID NO: 40689 - protein, 1781 aa, Homo sapiens
MSGEVRLRQLEQFILDGPAQTNGQCFSVETLLDILICLYDECNNSPLRREKNILEYLEWAKPFTSKVKQMRLHREDFEILKVIGRGAFGEVAVVKLKNADKVFAMKILNKWEMLKRAETACFREERDVLVNGDNKWITTLHYAFQDDNNLYLVMDYYVGGDLLTLLSKFEDRLPEDMARFYLAEMVIAIDSVHQLHYVHRDIKPDNILMDMNGHIRLADFGSCLKLMEDGTVQSSVAVGTPDYISPEILQAMEDGKGRYGPECDWWSLGVCMYEMLYGETPFYAESLVETYGKIMNHKERFQFPAQVTDVSENAKDLIRRLICSREHRLGQNGIEDFKKHPFFSGIDWDNIRNCEAPYIPEVSSPTDTSNFDVDDDCLKNSETMPPPTHTAFSGHHLPFVGFTYTSSCVLSDRSCLRVTAGPTSLDLDVNVQRTLDNNLATEAYERRIKRLEQEKLELSRKLQESTQTVQALQYSTVDGPLTASKDLEIKNLKEEIEKLRKQVTESSHLEQQLEEANAVRQELDDAFRQIKAYEKQIKTLQQEREDLNKELVQASERLKNQSKELKDAHCQRKLAMQEFMEINERLTELHTQKQKLARHVRDKEEEVDLVMQKVESLRQELRRTERAKKELEVHTEALAAEASKDRKLREQSEHYSKQLENELEGLKQKQISYSPGVCSIEHQQEITKLKTDLEKKSIFYEEELSKREGIHANEIKNLKKELHDSEGQQLALNKEIMILKDKLEKTRRESQSEREEFESEFKQQYEREKVLLTEENKKLTSELDKLTTLYENLSIHNQQLEEEVKDLADKKESVAHWEAQITEIIQWVSDEKDARGYLQALASKMTEELEALRNSSLGTRATDMPWKMRRFAKLDMSARLELQSALDAEIRAKQAIQEELNKVKASNIITECKLKDSEKKNLELLSEIEQLIKDTEELRSEKGIEHQDSQHSFLAFLNTPTDALDQFETVDSTPLSVHTPTLRKKGCPGSTGFPPKRKTHQFFVKSFTTPTKCHQCTSLMVGLIRQGCSCEVCGFSCHITCVNKAPTTCPVPPEQTKGPLGIDPQKGIGTAYEGHVRIPKPAGVKKGWQRALAIVCDFKLFLYDIAEGKASQPSVVISQVIDMRDEEFSVSSVLASDVIHASRKDIPCIFRVTASQLSASNNKCSILMLADTENEKNKWVGVLSELHKILKKNKFRDRSVYVPKEAYDSTLPLIKTTQAAAIIDHERIALGNEEGLFVVHVTKDEIIRVGDNKKIHQIELIPNDQLVAVISGRNRHVRLFPMSALDGRETDFYKLSETKGCQTVTSGKVRHGALTCLCVAMKRQVLCYELFQSKTRHRKFKEIQVPYNVQWMAIFSEQLCVGFQSGFLRYPLNGEGNPYSMLHSNDHTLSFIAHQPMDAICAVEISSKEYLLCFNSIGIYTDCQGRRSRQQELMWPANPSSCCYNAPYLSVYSENAVDIFDVNSMEWIQTLPLKKVRPLNNEGSLNLLGLETIRLIYFKNKMAEGDELVVPETSDNSRKQMVRNINNKRRYSFRVPEEERMQQRREMLRDPEMRNKLISNPTNFNHIAHMGPGDGIQILKDLPMPGFPYPSPHHHSGLISSPINFEHIYHMTVNSAEKFLSPDSINPEYSPSLRSVPGTPSFMTLRNPRPQESRTVFSGSVSIPSITKSRPEPGRSMSASSGLSARSSAQNGSALKREFSGGSYSAKRQPMPSPSEGSLSSGGMDQGSDAPARDFDGEDSDSPRHSTASNSSNLSSPPSPASPRKTKSLSLESTDRGSWDP

SEQ ID NO: 40690 - protein, 818 aa, Homo sapiens
MILKDKLEKTRRESQSEREEFESEFKQQYEREKVLLTEENKKLTSELDKLTTLYENLSIHNQQLEEEVKDLADKKESVAHWEAQITEIIQWVSDEKDARGYLQALASKMTEELEALRNSSLGTRATDMPWKMRRFAKLDMSARLELQSALDAEIRAKQAIQEELNKVKASNIITECKLKDSEKKNLELLSEIEQLIKDTEELRSEKGIEHQDSQHSFLAFLNTPTDALDQFEDSFSSSSSSLIDFLDDTDPVENTYVWNPSVKFHIQSRSTSPSTSSEAEPVKTVDSTPLSVHTPTLRKKGCPGSTGFPPKRKTHQFFVKSFTTPTKCHQCTSLMVGLIRQGCSCEVCGFSCHITCVNKAPTTCPVPPEQTKGPLGIDPQKGIGTAYEGHVRIPKPAGVKKGWQRALAIVCDFKLFLYDIAEGKASQPSVVISQVIDMRDEEFSVSSVLASDVIHASRKDIPCIFRVTASQLSASNNKCSILMLADTENEKNKWVGVLSELHKILKKNKFRDRSVYVPKEAYDSTLPLIKTTQAAAIIDHERIALGNEEGLFVVHVTKDEIIRVGDNKKIHQIELIPNDQLVAVISGRNRHVRLFPMSALDGRETDFYKLSETKGCQTVTSGKVRHGALTCLCVAMKRQVLCYELFQSKTRHRKFKEIQVPYNVQWMAIFSEQLCVGFQSGFLRYPLNGEGNPYSMLHSNDHTLSFIAHQPMDAICAVEISSKEYLLCFNSIGIYTDCQGRRSRQQELMWPANPSSCCYNAPYLSVYSENAVDIFDVNSMEWIQTLPLKKVRPLNNEGSLNLLGLETIRLIYFKNKMA

SEQ ID NO: 40691 - protein, 1691 aa, Homo sapiens
MSGEVRLRQLEQFILDGPAQTNGQCFSVETLLDILICLYDECNNSPLRREKNILEYLEWAKPFTSKVKQMRLHREDFEILKVIGRGAFGEVAVVKLKNADKVFAMKILNKWEMLKRAETACFREERDVLVNGDNKWITTLHYAFQDDNNLYLVMDYYVGGDLLTLLSKFEDRLPEDMARFYLAEMVIAIDSVHQLHYVHRDIKPDNILMDMNGHIRLADFGSCLKLMEDGTVQSSVAVGTPDYISPEILQAMEDGKGRYGPECDWWSLGVCMYEMLYGETPFYAESLVETYGKIMNHKERFQFPAQVTDVSENAKDLIRRLICSREHRLGQNGIEDFKKHPFFSGIDWDNIRNCEAPYIPEVSSPTDTSNFDVDDDCLKNSETMPPPTHTAFSGHHLPFVGFTYTSSCVLSDRSCLRVTAGPTSLDLDVNVQRTLDNNLATEAYERRIKRLEQEKLELSRKLQESTQTVQALQYSTVDGPLTASKDLEIKNLKEEIEKLRKQVTESSHLEQQLEEANAVRQELDDAFRQIKAYEKQIKTLQQEREDLNKELVQASERLKNQSKELKDAHCQRKLAMQEFMEINERLTELHTQKQKLARHVRDKEEEVDLVMQKVESLRQELRRTERAKKELEVHTEALAAEASKDRKLREQSEHYSKQLENELEGLKQKQISYSPGVCSIEHQQEITKLKTDLEKKSIFYEEELSKREGIHANEIKNLKKELHDSEGQQLALNKEIMILKDKLEKTRRESQSEREEFESEFKQQYEREKVLLTEENKKLTSELDKLTTLYENLSIHNQQLEEEVKDLADKKESVAHWEAQITEIIQWVSDEKDARGYLQALASKMTEELEALRNSSLGTRATDMPWKMRRFAKLDMSARLELQSALDAEIRAKQAIQEELNKVKASNIITECKLKDSEKKNLELLSEIEQLIKDTEELRSEKGIEHQDSQHSFLAFLNTPTDALDQFERKTHQFFVKSFTTPTKCHQCTSLMVGLIRQGCSCEVCGFSCHITCVNKAPTTCPVPPEQTKGPLGIDPQKGIGTAYEGHVRIPKPAGVKKGWQRALAIVCDFKLFLYDIAEGKASQPSVVISQVIDMRDEEFSVSSVLASDVIHASRKDIPCIFRVTASQLSASNNKCSILMLADTENEKNKWVGVLSELHKILKKNKFRDRSVYVPKEAYDSTLPLIKTTQAAAIIDHERIALGNEEGLFVVHVTKDEIIRVGDNKKIHQIELIPNDQLVAVISGRNRHVRLFPMSALDGRETDFYKLSETKGCQTVTSGKVRHGALTCLCVAMKRQVLCYELFQSKTRHRKFKEIQVPYNVQWMAIFSEQLCVGFQSGFLRYPLNGEGNPYSMLHSNDHTLSFIAHQPMDAICAVEISSKEYLLCFNSIGIYTDCQGRRSRQQELMWPANPSSCCYNAPYLSVYSENAVDIFDVNSMEWIQTLPLKKVRPLNNEGSLNLLGLETIRLIYFKNKMAEGDELVVPETSDNSRKQMVRNINNKRRYSFRVPEEERMQQRREMLRDPEMRNKLISNPTNFNHIAHMGPGDGIQILKDLPMNPRPQESRTVFSGSVSIPSITKSRPEPGRSMSASSGLSARSSAQNGSALKREFSGGSYSAKRQPMPSPSEGSLSSGGMDQGSDAPARDFDGEDSDSPRHSTASNSSNLSSPPSPASPRKTKSLSLESTDRGSWDP

SEQ ID NO: 40692 - protein, 1732 aa, Homo sapiens
MSGEVRLRQLEQFILDGPAQTNGQCFSVETLLDILICLYDECNNSPLRREKNILEYLEWAKPFTSKVKQMRLHREDFEILKVIGRGAFGEVAVVKLKNADKVFAMKILNKWEMLKRAETACFREERDVLVNGDNKWITTLHYAFQDDNNLYLVMDYYVGGDLLTLLSKFEDRLPEDMARFYLAEMVIAIDSVHQLHYVHRDIKPDNILMDMNGHIRLADFGSCLKLMEDGTVQSSVAVGTPDYISPEILQAMEDGKGRYGPECDWWSLGVCMYEMLYGETPFYAESLVETYGKIMNHKERFQFPAQVTDVSENAKDLIRRLICSREHRLGQNGIEDFKKHPFFSGIDWDNIRNCEAPYIPEVSSPTDTSNFDVDDDCLKNSETMPPPTHTAFSGHHLPFVGFTYTSSCVLSDRSCLRVTAGPTSLDLDVNVQRTLDNNLATEAYERRIKRLEQEKLELSRKLQESTQTVQALQYSTVDGPLTASKDLEIKNLKEEIEKLRKQVTESSHLEQQLEEANAVRQELDDAFRQIKAYEKQIKTLQQEREDLNKELVQASERLKNQSKELKDAHCQRKLAMQEFMEINERLTELHTQKQKLARHVRDKEEEVDLVMQKVESLRQELRRTERAKKELEVHTEALAAEASKDRKLREQSEHYSKQLENELEGLKQKQISYSPGVCSIEHQQEITKLKTDLEKKSIFYEEELSKREGIHANEIKNLKKELHDSEGQQLALNKEIMILKDKLEKTRRESQSEREEFESEFKQQYEREKVLLTEENKKLTSELDKLTTLYENLSIHNQQLEEEVKDLADKKESVAHWEAQITEIIQWVSDEKDARGYLQALASKMTEELEALRNSSLGTRATDMPWKMRRFAKLDMSARLELQSALDAEIRAKQAIQEELNKVKASNIITECKLKDSEKKNLELLSEIEQLIKDTEELRSEKGIEHQDSQHSFLAFLNTPTDALDQFERSPSCTPASKGRRTVDSTPLSVHTPTLRKKGCPGSTGFPPKRKTHQFFVKSFTTPTKCHQCTSLMVGLIRQGCSCEVCGFSCHITCVNKAPTTCPVPPEQTKGPLGIDPQKGIGTAYEGHVRIPKPAGVKKGWQRALAIVCDFKLFLYDIAEGKASQPSVVISQVIDMRDEEFSVSSVLASDVIHASRKDIPCIFRVTASQLSASNNKCSILMLADTENEKNKWVGVLSELHKILKKNKFRDRSVYVPKEAYDSTLPLIKTTQAAAIIDHERIALGNEEGLFVVHVTKDEIIRVGDNKKIHQIELIPNDQLVAVISGRNRHVRLFPMSALDGRETDFYKLSETKGCQTVTSGKVRHGALTCLCVAMKRQVLCYELFQSKTRHRKFKEIQVPYNVQWMAIFSEQLCVGFQSGFLRYPLNGEGNPYSMLHSNDHTLSFIAHQPMDAICAVEISSKEYLLCFNSIGIYTDCQGRRSRQQELMWPANPSSCCYNAPYLSVYSENAVDIFDVNSMEWIQTLPLKKVRPLNNEGSLNLLGLETIRLIYFKNKMAEGDELVVPETSDNSRKQMVRNINNKRRYSFRVPEEERMQQRREMLRDPEMRNKLISNPTNFNHIAHMGPGDGIQILKDLPMNPRPQESRTVFSGSVSIPSITKSRPEPGRSMSASSGLSARSSAQNGSALKREFSGGSYSAKRQPMPSPSEGSLSSGGMDQGSDAPARDFDGEDSDSPRHSTASNSSNLSSPPSPASPRKTKSLSLESTDRGSWDP

SEQ ID NO: 40693 - protein, 1754 aa, Homo sapiens
MSGEVRLRQLEQFILDGPAQTNGQCFSVETLLDILICLYDECNNSPLRREKNILEYLEWAKPFTSKVKQMRLHREDFEILKVIGRGAFGEVAVVKLKNADKVFAMKILNKWEMLKRAETACFREERDVLVNGDNKWITTLHYAFQDDNNLYLVMDYYVGGDLLTLLSKFEDRLPEDMARFYLAEMVIAIDSVHQLHYVHRDIKPDNILMDMNGHIRLADFGSCLKLMEDGTVQSSVAVGTPDYISPEILQAMEDGKGRYGPECDWWSLGVCMYEMLYGETPFYAESLVETYGKIMNHKERFQFPAQVTDVSENAKDLIRRLICSREHRLGQNGIEDFKKHPFFSGIDWDNIRNCEAPYIPEVSSPTDTSNFDVDDDCLKNSETMPPPTHTAFSGHHLPFVGFTYTSSCVLSDRSCLRVTAGPTSLDLDVNVQRTLDNNLATEAYERRIKRLEQEKLELSRKLQESTQTVQALQYSTVDGPLTASKDLEIKNLKEEIEKLRKQVTESSHLEQQLEEANAVRQELDDAFRQIKAYEKQIKTLQQEREDLNKELVQASERLKNQSKELKDAHCQRKLAMQEFMEINERLTELHTQKQKLARHVRDKEEEVDLVMQKVESLRQELRRTERAKKELEVHTEALAAEASKDRKLREQSEHYSKQLENELEGLKQKQISYSPGVCSIEHQQEITKLKTDLEKKSIFYEEELSKREGIHANEIKNLKKELHDSEGQQLALNKEIMILKDKLEKTRRESQSEREEFESEFKQQYEREKVLLTEENKKLTSELDKLTTLYENLSIHNQQLEEEVKDLADKKESVAHWEAQITEIIQWVSDEKDARGYLQALASKMTEELEALRNSSLGTRATDMPWKMRRFAKLDMSARLELQSALDAEIRAKQAIQEELNKVKASNIITECKLKDSEKKNLELLSEIEQLIKDTEELRSEKGIEHQDSQHSFLAFLNTPTDALDQFETDPVENTYVWNPSVKFHIQSRSTSPSTSSEAEPVKTVDSTPLSVHTPTLRKKGCPGSTGFPPKRKTHQFFVKSFTTPTKCHQCTSLMVGLIRQGCSCEVCGFSCHITCVNKAPTTCPVPPEQTKGPLGIDPQKGIGTAYEGHVRIPKPAGVKKGWQRALAIVCDFKLFLYDIAEGKASQPSVVISQVIDMRDEEFSVSSVLASDVIHASRKDIPCIFRVTASQLSASNNKCSILMLADTENEKNKWVGVLSELHKILKKNKFRDRSVYVPKEAYDSTLPLIKTTQAAAIIDHERIALGNEEGLFVVHVTKDEIIRVGDNKKIHQIELIPNDQLVAVISGRNRHVRLFPMSALDGRETDFYKLSETKGCQTVTSGKVRHGALTCLCVAMKRQVLCYELFQSKTRHRKFKEIQVPYNVQWMAIFSEQLCVGFQSGFLRYPLNGEGNPYSMLHSNDHTLSFIAHQPMDAICAVEISSKEYLLCFNSIGIYTDCQGRRSRQQELMWPANPSSCCYNAPYLSVYSENAVDIFDVNSMEWIQTLPLKKVRPLNNEGSLNLLGLETIRLIYFKNKMAEGDELVVPETSDNSRKQMVRNINNKRRYSFRVPEEERMQQRREMLRDPEMRNKLISNPTNFNHIAHMGPGDGIQILKDLPMNPRPQESRTVFSGSVSIPSITKSRPEPGRSMSASSGLSARSSAQNGSALKREFSGGSYSAKRQPMPSPSEGSLSSGGMDQGSDAPARDFDGEDSDSPRHSTASNSSNLSSPPSPASPRKTKSLSLESTDRGSWDP

SEQ ID NO: 40694 - protein, 1638 aa, Homo sapiens
MSGEVRLRQLEQFILDGPAQTNGQCFSVETLLDILICLYDECNNSPLRREKNILEYLEWAKPFTSKVKQMRLHREDFEILKVIGRGAFGEVAVVKLKNADKVFAMKILNKWEMLKRAETACFREERDVLVNGDNKWITTLHYAFQDDNNLYLVMDYYVGGDLLTLLSKFEDRLPEDMARFYLAEMVIAIDSVHQLHYVHRDIKPDNILMDMNGHIRLADFGSCLKLMEDGTVQSSVAVGTPDYISPEILQAMEDGKGRYGPECDWWSLGVCMYEMLYGETPFYAESLVETYGKIMNHKERFQFPAQVTDVSENAKDLIRRLICSREHRLGQNGIEDFKKHPFFSGIDWDNIRNCEAPYIPEVSSPTDTSNFDVDDDCLKNSETMPPPTHTAFSGHHLPFVGFTYTSSCVLSDRSCLRVTAGPTSLDLDVNVQRTLDNNLATEAYERRIKRLEQEKLELSRKLQESTQTVQALQYSTVDGPLTASKDLEIKNLKEEIEKLRKQVTESSHLEQQLEEANAVRQELDDAFRQIKAYEKQIKTLQQEREDLNKLEVHTEALAAEASKDRKLREQSEHYSKQLENELEGLKQKQISYSPGVCSIEHQQEITKLKTDLEKKSIFYEEELSKREGIHANEIKNLKKELHDSEGQQLALNKEIMILKDKLEKTRRESQSEREEFESEFKQQYEREKVLLTEENKKLTSELDKLTTLYENLSIHNQQLEEEVKDLADKKESVAHWEAQITEIIQWVSDEKDARGYLQALASKMTEELEALRNSSLGTRATDMPWKMRRFAKLDMSARLELQSALDAEIRAKQAIQEELNKVKASNIITECKLKDSEKKNLELLSEIEQLIKDTEELRSEKGIEHQDSQHSFLAFLNTPTDALDQFETVDSTPLSVHTPTLRKKGCPGSTGFPPKRKTHQFFVKSFTTPTKCHQCTSLMVGLIRQGCSCEVCGFSCHITCVNKAPTTCPVPPEQTKGPLGIDPQKGIGTAYEGHVRIPKPAGVKKGWQRALAIVCDFKLFLYDIAEGKASQPSVVISQVIDMRDEEFSVSSVLASDVIHASRKDIPCIFRVTASQLSASNNKCSILMLADTENEKNKWVGVLSELHKILKKNKFRDRSVYVPKEAYDSTLPLIKTTQAAAIIDHERIALGNEEGLFVVHVTKDEIIRVGDNKKIHQIELIPNDQLVAVISGRNRHVRLFPMSALDGRETDFYKLSETKGCQTVTSGKVRHGALTCLCVAMKRQVLCYELFQSKTRHRKFKEIQVPYNVQWMAIFSEQLCVGFQSGFLRYPLNGEGNPYSMLHSNDHTLSFIAHQPMDAICAVEISSKEYLLCFNSIGIYTDCQGRRSRQQELMWPANPSSCCYNAPYLSVYSENAVDIFDVNSMEWIQTLPLKKVRPLNNEGSLNLLGLETIRLIYFKNKMAEGDELVVPETSDNSRKQMVRNINNKRRYSFRVPEEERMQQRREMLRDPEMRNKLISNPTNFNHIAHMGPGDGIQILKDLPMNPRPQESRTVFSGSVSIPSITKSRPEPGRSMSASSGLSARSSAQNGSALKREFSGGSYSAKRQPMPSPSEGSLSSGGMDQGSDAPARDFDGEDSDSPRHSTASNSSNLSSPPSPASPRKTKSLSLESTDRGSWDP

SEQ ID NO: 40695 - protein, 1719 aa, Homo sapiens
MSGEVRLRQLEQFILDGPAQTNGQCFSVETLLDILICLYDECNNSPLRREKNILEYLEWAKPFTSKVKQMRLHREDFEILKVIGRGAFGEVAVVKLKNADKVFAMKILNKWEMLKRAETACFREERDVLVNGDNKWITTLHYAFQDDNNLYLVMDYYVGGDLLTLLSKFEDRLPEDMARFYLAEMVIAIDSVHQLHYVHRDIKPDNILMDMNGHIRLADFGSCLKLMEDGTVQSSVAVGTPDYISPEILQAMEDGKGRYGPECDWWSLGVCMYEMLYGETPFYAESLVETYGKIMNHKERFQFPAQVTDVSENAKDLIRRLICSREHRLGQNGIEDFKKHPFFSGIDWDNIRNCEAPYIPEVSSPTDTSNFDVDDDCLKNSETMPPPTHTAFSGHHLPFVGFTYTSSCVLSDRSCLRVTAGPTSLDLDVNVQRTLDNNLATEAYERRIKRLEQEKLELSRKLQESTQTVQALQYSTVDGPLTASKDLEIKNLKEEIEKLRKQVTESSHLEQQLEEANAVRQELDDAFRQIKAYEKQIKTLQQEREDLNKELVQASERLKNQSKELKDAHCQRKLAMQEFMEINERLTELHTQKQKLARHVRDKEEEVDLVMQKVESLRQELRRTERAKKELEVHTEALAAEASKDRKLREQSEHYSKQLENELEGLKQKQISYSPGVCSIEHQQEITKLKTDLEKKSIFYEEELSKREGIHANEIKNLKKELHDSEGQQLALNKEIMILKDKLEKTRRESQSEREEFESEFKQQYEREKVLLTEENKKLTSELDKLTTLYENLSIHNQQLEEEVKDLADKKESVAHWEAQITEIIQWVSDEKDARGYLQALASKMTEELEALRNSSLGTRATDMPWKMRRFAKLDMSARLELQSALDAEIRAKQAIQEELNKVKASNIITECKLKDSEKKNLELLSEIEQLIKDTEELRSEKGIEHQDSQHSFLAFLNTPTDALDQFETVDSTPLSVHTPTLRKKGCPGSTGFPPKRKTHQFFVKSFTTPTKCHQCTSLMVGLIRQGCSCEVCGFSCHITCVNKAPTTCPVPPEQTKGPLGIDPQKGIGTAYEGHVRIPKPAGVKKGWQRALAIVCDFKLFLYDIAEGKASQPSVVISQVIDMRDEEFSVSSVLASDVIHASRKDIPCIFRVTASQLSASNNKCSILMLADTENEKNKWVGVLSELHKILKKNKFRDRSVYVPKEAYDSTLPLIKTTQAAAIIDHERIALGNEEGLFVVHVTKDEIIRVGDNKKIHQIELIPNDQLVAVISGRNRHVRLFPMSALDGRETDFYKLSETKGCQTVTSGKVRHGALTCLCVAMKRQVLCYELFQSKTRHRKFKEIQVPYNVQWMAIFSEQLCVGFQSGFLRYPLNGEGNPYSMLHSNDHTLSFIAHQPMDAICAVEISSKEYLLCFNSIGIYTDCQGRRSRQQELMWPANPSSCCYNAPYLSVYSENAVDIFDVNSMEWIQTLPLKKVRPLNNEGSLNLLGLETIRLIYFKNKMAEGDELVVPETSDNSRKQMVRNINNKRRYSFRVPEEERMQQRREMLRDPEMRNKLISNPTNFNHIAHMGPGDGIQILKDLPMNPRPQESRTVFSGSVSIPSITKSRPEPGRSMSASSGLSARSSAQNGSALKREFSGGSYSAKRQPMPSPSEGSLSSGGMDQGSDAPARDFDGEDSDSPRHSTASNSSNLSSPPSPASPRKTKSLSLESTDRGSWDP

SEQ ID NO: 40696 - protein, 546 aa, Homo sapiens
  VARIANT 1: note = MOD_RES - Any amino acid
XDIAEGKASQPSVVISQVIDMRDEEFSVSSVLASDVIHASRKDIPCIFRVTASQLSASNNKCSILMLADTENEKNKWVGVLSELHKILKKNKFRDRSVYVPKEAYDSTLPLIKTTQAAAIIDHERIALGNEEGLFVVHVTKDEIIRVGDNKKIHQIELIPNDQLVAVISGRNRHVRLFPMSALDGRETDFYKLSETKGCQTVTSGKVRHGALTCLCVAMKRQVLCYELFQSKTRHRKFKEIQVPYNVQWMAIFSEQLCVGFQSGFLRYPLNGEGNPYSMLHSNDHTLSFIAHQPMDAICAVEISSKEYLLCFNSIGIYTDCQGRRSRQQELMWPANPSSCCYNAPYLSVYSENAVDIFDVNSMEWIQTLPLKKVRPLNNEGSLNLLGLETIRLIYFKNKMAEGDELVVPETSDNSRKQMVRNINNKRRYSFRVPEEERMQQRREMLRDPEMRNKLISNPTNFNHIAHMGPGDGIQILKDLPMNPRPQESRTVFSGSVSIPSITKSRPEPGRSMSASSGLSASKCRGYRKVPLRQGDPQLPPLLSRG

SEQ ID NO: 40697 - protein, 728 aa, Homo sapiens
  VARIANT 1: note = MOD_RES - Any amino acid
XVSDEKDARGYLQALASKMTEELEALRNSSLGTRATDMPWKMRRFAKLDMSARLELQSALDAEIRAKQAIQEELNKVKASNIITECKLKDSEKKNLELLSEIEQLIKDTEELRSEKGIEHQDSQHSFLAFLNTPTDALDQFEDSFSSSSSSLIDFLDDTDPVENTYVWNPSVKFHIQSRSTSPSTSSEAEPVKTVDSTPLSVHTPTLRKKGCPGSTGFPPKRKTHQFFVKSFTTPTKCHQCTSLMVGLIRQGCSCEVCGFSCHITCVNKAPTTCPVPPEQTKGPLGIDPQKGIGTAYEGHVRIPKPAGVKKGWQRALAIVCDFKLFLYDIAEGKASQPSVVISQVIDMRDEEFSVSSVLASDVIHASRKDIPCIFRVTASQLSASNNKCSILMLADTENEKNKWVGVLSELHKILKKNKFRDRSVYVPKEAYDSTLPLIKTTQAAAIIDHERIALGNEEGLFVVHVTKDEIIRVGDNKKIHQIELIPNDQLVAVISGRNRHVRLFPMSALDGRETDFYKLSETKGCQTVTSGKVRHGALTCLCVAMKRQVLCYELFQSKTRHRKFKEIQVPYNVQWMAIFSEQLCVGFQSGFLRYPLNGEGNPYSMLHSNDHTLSFIAHQPMDAICAVEISSKEYLLCFNSIGIYTDCQGRRSRQQELMWPANPSSCCYNAPYLSVYSENAVDIFDVNSMEWIQTLPLKKVRPLNNEGSLNLLGLETIRLIYFKNKMA

SEQ ID NO: 40698 - protein, 1048 aa, Homo sapiens
  VARIANT 1: note = MOD_RES - Any amino acid
XEGIHANEIKNLKKELHDSEGQQLALNKEIMILKDKLEKTRRESQSEREEFESEFKQQYEREKVLLTEENKKLTSELDKLTTLYENLSIHNQQLEEEVKDLADKKESVAHWEAQITEIIQWVSDEKDARGYLQALASKMTEELEALRNSSLGTRATDMPWKMRRFAKLDMSARLELQSALDAEIRAKQAIQEELNKVKASNIITECKLKDSEKKNLELLSEIEQLIKDTEELRSEKGIEHQDSQHSFLAFLNTPTDALDQFETDPVENTYVWNPSVKFHIQSRSTSPSTSSEAEPVKTVDSTPLSVHTPTLRKKGCPGSTGFPPKRKTHQFFVKSFTTPTKCHQCTSLMVGLIRQGCSCEVCGFSCHITCVNKAPTTCPVPPEQTKGPLGIDPQKGIGTAYEGHVRIPKPAGVKKGWQRALAIVCDFKLFLYDIAEGKASQPSVVISQVIDMRDEEFSVSSVLASDVIHASRKDIPCIFRVTASQLSASNNKCSILMLADTENEKNKWVGVLSELHKILKKNKFRDRSVYVPKEAYDSTLPLIKTTQAAAIIDHERIALGNEEGLFVVHVTKDEIIRVGDNKKIHQIELIPNDQLVAVISGRNRHVRLFPMSALDGRETDFYKLSETKGCQTVTSGKVRHGALTCLCVAMKRQVLCYELFQSKTRHRKFKEIQVPYNVQWMAIFSEQLCVGFQSGFLRYPLNGEGNPYSMLHSNDHTLSFIAHQPMDAICAVEISSKEYLLCFNSIGIYTDCQGRRSRQQELMWPANPSSCCYNAPYLSVYSENAVDIFDVNSMEWIQTLPLKKVRPLNNEGSLNLLGLETIRLIYFKNKMAEGDELVVPETSDNSRKQMVRNINNKRRYSFRVPEEERMQQRREMLRDPEMRNKLISNPTNFNHIAHMGPGDGIQILKDLPMNPRPQESRTVFSGSVSIPSITKSRPEPGRSMSASSGLSARSSAQNGSALKREFSGGSYSAKRQPMPSPSEGSLSSGGMDQGSDAPARDFDGEDSDSPRHSTASNSSNLSSPPSPASPRKTKSLSLESTDRGSWDP

SEQ ID NO: 40699 - protein, 984 aa, Homo sapiens
  VARIANT 1: note = MOD_RES - Any amino acid
XQLEEEVKDLADKKESVAHWEAQITEIIQWVSDEKDARGYLQALASKMTEELEALRNSSLGTRATDMPWKMRRFAKLDMSARLELQSALDAEIRAKQAIQEELNKVKASNIITECKLKDSEKKNLELLSEIEQLIKDTEELRSEKGIEHQDSQHSFLAFLNTPTDALDQFETVDSTPLSVHTPTLRKKGCPGSTGFPPKRKTHQFFVKSFTTPTKCHQCTSLMVGLIRQGCSCEVCGFSCHITCVNKAPTTCPVPPEQTKGPLGIDPQKGIGTAYEGHVRIPKPAGVKKGWQRALAIVCDFKLFLYDIAEGKASQPSVVISQVIDMRDEEFSVSSVLASDVIHASRKDIPCIFRVTASQLSASNNKCSILMLADTENEKNKWVGVLSELHKILKKNKFRDRSVYVPKEAYDSTLPLIKTTQAAAIIDHERIALGNEEGLFVVHVTKDEIIRVGDNKKIHQIELIPNDQLVAVISGRNRHVRLFPMSALDGRETDFYKLSETKGCQTVTSGKVRHGALTCLCVAMKRQVLCYELFQSKTRHRKFKEIQVPYNVQWMAIFSEQLCVGFQSGFLRYPLNGEGNPYSMLHSNDHTLSFIAHQPMDAICAVEISSKEYLLCFNSIGIYTDCQGRRSRQQELMWPANPSSCCYNAPYLSVYSENAVDIFDVNSMEWIQTLPLKKVRPLNNEGSLNLLGLETIRLIYFKNKMAEGDELVVPETSDNSRKQMVRNINNKRRYSFRVPEEERMQQRREMLRDPEMRNKLISNPTNFNHIAHMGPGDGIQILKDLPMPGFPYPSPHHHSGLISSPINFEHIYHMTVNSAEKFLSPDSINPEYSPSLRSVPGTPSFMTLRNPRPQESRTVFSGSVSIPSITKSRPEPGRSMSASSGLSARSSAQNGSALKREFSGGSYSAKRQPMPSPSEGSLSSGGMDQGSDAPARDFDGEDSDSPRHSTASNSSNLSSPPSPASPRKTKSLSLESTDRGSWDP

SEQ ID NO: 40700 - protein, 1699 aa, Homo sapiens
MSGEVRLRQLEQFILDGPAQTNGQCFSVETLLDILICLYDECNNSPLRREKNILEYLEWAKPFTSKVKQMRLHREDFEILKVIGRGAFGEVAVVKLKNADKVFAMKILNKWEMLKRAETACFREERDVLVNGDNKWITTLHYAFQDDNNLYLVMDYYVGGDLLTLLSKFEDRLPEDMARFYLAEMVIAIDSVHQLHYVHRDIKPDNILMDMNGHIRLADFGSCLKLMEDGTVQSSVAVGTPDYISPEILQAMEDGKGRYGPECDWWSLGVCMYEMLYGETPFYAESLVETYGKIMNHKERFQFPAQVTDVSENAKDLIRRLICSREHRLGQNGIEDFKKHPFFSGIDWDNIRNCEAPYIPEVSSPTDTSNFDVDDDCLKNSETMPPPTHTAFSGHHLPFVGFTYTSSCVLSDRSCLRVTAGPTSLDLDVNVQRTLDNNLATEAYERRIKRLEQEKLELSRKLQESTQTVQALQYSTVDGPLTASKDLEIKNLKEEIEKLRKQVTESSHLEQQLEEANAVRQELDDAFRQIKAYEKQIKTLQQEREDLNKELVQASERLKNQSKELKDAHCQRKLAMQEFMEINERLTELHTQKQKLARHVRDKEEEVDLVMQKVESLRQELRRTERAKKELEVHTEALAAEASKDRKLREQSEHYSKQLENELEGLKQKQISYSPGVCSIEHQQEITKLKTDLEKKSIFYEEELSKREGIHANEIKNLKKELHDSEGQQLALNKEIMILKDKLEKTRRESQSEREEFESEFKQQYEREKVLLTEENKKLTSELDKLTTLYENLSIHNQQLEEEVKDLADKKESVAHWEAQITEIIQWVSDEKDARGYLQALASKMTEELEALRNSSLGTRATDMPWKMRRFAKLDMSARLELQSALDAEIRAKQAIQEELNKVKASNIITECKLKDSEKKNLELLSEIEQLIKDTEELRSEKASKGRRTVDSTPLSVHTPTLRKKGCPGSTGFPPKRKTHQFFVKSFTTPTKCHQCTSLMVGLIRQGCSCEVCGFSCHITCVNKAPTTCPVPPEQTKGPLGIDPQKGIGTAYEGHVRIPKPAGVKKGWQRALAIVCDFKLFLYDIAEGKASQPSVVISQVIDMRDEEFSVSSVLASDVIHASRKDIPCIFRVTASQLSASNNKCSILMLADTENEKNKWVGVLSELHKILKKNKFRDRSVYVPKEAYDSTLPLIKTTQAAAIIDHERIALGNEEGLFVVHVTKDEIIRVGDNKKIHQIELIPNDQLVAVISGRNRHVRLFPMSALDGRETDFYKLSETKGCQTVTSGKVRHGALTCLCVAMKRQVLCYELFQSKTRHRKFKEIQVPYNVQWMAIFSEQLCVGFQSGFLRYPLNGEGNPYSMLHSNDHTLSFIAHQPMDAICAVEISSKEYLLCFNSIGIYTDCQGRRSRQQELMWPANPSSCCYNAPYLSVYSENAVDIFDVNSMEWIQTLPLKKVRPLNNEGSLNLLGLETIRLIYFKNKMAEGDELVVPETSDNSRKQMVRNINNKRRYSFRVPEEERMQQRREMLRDPEMRNKLISNPTNFNHIAHMGPGDGIQILKDLPMNPRPQESRTVFSGSVSIPSITKSRPEPGRSMSASSGLSARSSAQNGSALKREFSGGSYSAKRQPMPSPSEGSLSSGGMDQGSDAPARDFDGEDSDSPRHSTASNSSNLSSPPSPASPRKTKSLSLESTDRGSWDP

SEQ ID NO: 40701 - protein, 1711 aa, Homo sapiens
MSAKVRLKKLEQLLLDGPWRNESALSVETLLDVLVCLYTECSHSALRRDKYVAEFLEWAKPFTQLVKEMQLHREDFEIIKVIGRGAFGEVAVVKMKNTERIYAMKILNKWEMLKRAETACFREERDVLVNGDCQWITALHYAFQDENHLYLVMDYYVGGDLLTLLSKFEDKLPEDMARFYIGEMVLAIDSIHQLHYVHRDIKPDNVLLDVNGHIRLADFGSCLKMNDDGTVQSSVAVGTPDYISPEILQAMEDGMGKYGPECDWWSLGVCMYEMLYGETPFYAESLVETYGKIMNHEERFQFPSHVTDVSEEAKDLIQRLICSRERRLGQNGIEDFKKHAFFEGLNWENIRNLEAPYIPDVSSPSDTSNFDVDDDVLRNTEILPPGSHTGFSGLHLPFIGFTFTTESCFSDRGSLKSIMQSNTLTKDEDVQRDLEHSLQMEAYERRIRRLEQEKLELSRKLQESTQTVQSLHGSSRALSNSNRDKEIKKLNEEIERLKNKIADSNRLERQLEDTVALRQEREDSTQRLRGLEKQHRVVRQEKEELHKQLVEASERLKSQAKELKDAHQQRKLALQEFSELNERMAELRAQKQKVSRQLRDKEEEMEVATQKVDAMRQEMRRAEKLRKELEAQLDDAVAEASKERKLREHSENFCKQMESELEALKVKQGGRGAGATLEHQQEISKIKSELEKKVLFYEEELVRREASHVLEVKNVKKEVHDSESHQLALQKEILMLKDKLEKSKRERHNEMEEAVGTIKDKYERERAMLFDENKKLTAENEKLCSFVDKLTAQNRQLEDELQDLAAKKESVAHWEAQIAEIIQWVSDEKDARGYLQALASKMTEELEALRSSSLGSRTLDPLWKVRRSQKLDMSARLELQSALEAEIRAKQLVQEELRKVKDANLTLESKLKDSEAKNRELLEEMEILKKKMEEKFRADTGLKLPDFQDSIFEYFNTAPLAHDLTFRTSSASEQETQAPKPEASPSMSVAASEQQEDMARPPQRPSAVPLPTTQALALAGPKPKAHQFSIKSFSSPTQCSHCTSLMVGLIRQGYACEVCSFACHVSCKDGAPQVCPIPPEQSKRPLGVDVQRGIGTAYKGHVKVPKPTGVKKGWQRAYAVVCDCKLFLYDLPEGKSTQPGVIASQVLDLRDDEFSVSSVLASDVIHATRRDIPCIFRVTASLLGAPSKTSSLLILTENENEKRKWVGILEGLQSILHKNRLRNQVVHVPLEAYDSSLPLIKAILTAAIVDADRIAVGLEEGLYVIEVTRDVIVRAADCKKVHQIELAPREKIVILLCGRNHHVHLYPWSSLDGAEGSFDIKLPETKGCQLMATATLKRNSGTCLFVAVKRLILCYEIQRTKPFHRKFNEIVAPGSVQCLAVLRDRLCVGYPSGFCLLSIQGDGQPLNLVNPNDPSLAFLSQQSFDALCAVELESEEYLLCFSHMGLYVDPQGRRARAQELMWPAAPVACSCSPTHVTVYSEYGVDVFDVRTMEWVQTIGLRRIRPLNSEGTLNLLNCEPPRLIYFKSKFSGAVLNVPDTSDNSKKQMLRTRSKRRFVFKVPEEERLQQRREMLRDPELRSKMISNPTNFNHVAHMGPGDGMQVLMDLPLSAVPPSQEERPGPAPTNLARQPPSRNKPYISWPSSGGSEPSVTVPLRSMSDPDQDFDKEPDSDSTKHSTPSNSSNPSGPPSPNSPHRSQLPLEGLEQPACDT

SEQ ID NO: 40702 - protein, 530 aa, Homo sapiens
KVRRSQKLDMSARLELQSALEAEIRAKQLVQEELRKVKDANLTLESKLKDSEAKNRELLEEMEILKKKMEEKFRADTGLKLPDFQDSIFEYFNTAPLAHDLTFRTSSASEQETQAPKPEASPSMSVAASEQQEPKAHQFSIKSFSSPTQCSHCTSLMVGLIRQGYACEVCSFACHVSCKDGAPQVCPIPPEQSKRPLGVDVQRGIGTAYKGHVKVPKPTGVKKGWQRAYAVVCDCKLFLYDLPEGKSTQPGVIASQVLDLRDDEFSVSSVLASDVIHATRRDIPCIFRVTASLLGAPSKTSSLLILTENENEKRKWVGILEGLQSILHKNRLRNQVVHVPLEAYDSSLPLIKAILTAAIVDADRIAVGLEEGLYVIEVTRDVIVRAADCKKVHQIELAPREKIVILLCGRNHHVHLYPWSSLDGAEGSFDIKLPETKGCQLMATATLKRNSGTCLFVAVKRLILCYEIQRTKPFHRKFNEIVAPGSVQCLAVLRDRLCVGYPSGFCLLSIQGDGQPLNLVNPNDPSLAFL

SEQ ID NO: 40703 - protein, 1551 aa, Homo sapiens
MERRLRALEQLARGEAGGCPGLDGLLDLLLALHHELSSGPLRRERSVAQFLSWASPFVSKVKELRLQRDDFEILKVIGRGAFGEVTVVRQRDTGQIFAMKMLHKWEMLKRAETACFREERDVLVKGDSRWVTTLHYAFQDEEYLYLVMDYYAGGDLLTLLSRFEDRLPPELAQFYLAEMVLAIHSLHQLGYVHRDVKPDNVLLDVNGHIRLADFGSCLRLNTNGMVDSSVAVGTPDYISPEILQAMEEGKGHYGPQCDWWSLGVCAYELLFGETPFYAESLVETYGKIMNHEDHLQFPPDVPDVPASAQDLIRQLLCRQEERLGRGGLDDFRNHPFFEGVDWERLASSTAPYIPELRGPMDTSNFDVDDDTLNHPGTLPPPSHGAFSGHHLPFVGFTYTSGSHSPESSSEAWAALERKLQCLEQEKVELSRKHQEALHAPTDHRELEQLRKEVQTLRDRLPEMLRDKASLSQTDGPPAGSPGQDSDLRQELDRLHRELAEGRAGLQAQEQELCRAQGQQEELLQRLQEAQEREAATASQTRALSSQLEEARAAQRELEAQVSSLSRQVTQLQGQWEQRLEESSQAKTIHTASETNGMGPPEGGPQEAQLRKEVAALREQLEQAHSHRPSGKEEALCQLQEENRRLSREQERLEAELAQEQESKQRLEGERRETESNWEAQLADILSWVNDEKVSRGYLQALATKMAEELESLRNVGTQTLPARPLDHQWKARRLQKMEASARLELQSALEAEIRAKQGLQERLTQVQEAQLQAERRLQEAEKQSQALQQELAMLREELRARGPVDTKPSNSLIPFLSFRSSEKDSAKDPGISGEATRHGGEPDLRPEGRRSLRMGAVFPRAPTANTASTEGLPAKPGSHTLRPRSFPSPTKCLRCTSLMLGLGRQGLGCDACGYFCHTTCAPQAPPCPVPPDLLRTALGVHPETGTGTAYEGFLSVPRPSGVRRGWQRVFAALSDSRLLLFDAPDLRLSPPSGALLQVLDLRDPQFSATPVLASDVIHAQSRDLPRIFRVTTSQLAVPPTTCTVLLLAESEGERERWLQVLGELQRLLLDARPRPRPVYTLKEAYDNGLPLLPHTLCAAILDQDRLALGTEEGLFVIHLRSNDIFQVGECRRVQQLTLSPSAGLLVVLCGRGPSVRLFALAELENIEVAGAKIPESRGCQVLAAGSILQARTPVLCVAVKRQVLCYQLGPGPGPWQRRIRELQAPATVQSLGLLGDRLCVGAAGGFALYPLLNEAAPLALGAGLVPEELPPSRGGLGEALGAVELSLSEFLLLFTTAGIYVDGAGRKSRGHELLWPAAPMGWGYAAPYLTVFSENSIDVFDVRRAEWVQTVPLKKVRPLNPEGSLFLYGTEKVRLTYLRNQLAEKDEFDIPDLTDNSRRQLFRTKSKRRFFFRVSEEQQKQQRREMLKDPFVRSKLISPPTNFNHLVHVGPANGRPGARDKSPAPEEKGRVARGSGPQRPHSFSEALRRPASMGSEGLGGDADPMKRKPWTSLSSESVSCPQGSLSPATSLMQVSERPRSLPLSPELESSP

SEQ ID NO: 40704 - protein, 391 aa, Homo sapiens
MPGPQGGRGAATMSLGKLSPVGWVSSSQGKRRLTADMISHPLGDFRHTMHVGRGGDVFGDTSFLSNHGGSSGSTHRSPRSFLAKKLQLVRRVGAPPRRMASPPAPSPAPPAISPIIKNAISLPQLNQAAYDSLVVGKLSFDSSPTSSTDGHSSYGLDSGFCTISRLPRSEKPHDRDRDGSFPSEPGLRRSDSLLSFRLDLDLGPSLLSELLGVMSLPEAPAAETPAPAANPPAPTANPTGPAANPPATTANPPAPAANPSAPAATPTGPAANPPAPAASSTPHGHCPNGVTAGLGPVAEVKSSPVGGGPRGPAGPALGRHWGAGWDGGHHYPEMDARQERVEVLPQARASWESLDEEWRAPQAGSRTPVPSTVQANTFEFADAEEDDEVKV

SEQ ID NO: 40705 - protein, 60 aa, Homo sapiens
MPGPQGGRGAATMSLGKLSPVGWVSSSQGKRRLTADMISHPLGDFRHTMHVGRGGDVFGD

SEQ ID NO: 40706 - protein, 70 aa, Homo sapiens
MPGPQGGRGAATMSLGKLSPVGWVSSSQGKRRLTADMISHPLGDFRHTMHVGRGGDVFGDTSFLSNHGGS

SEQ ID NO: 40707 - protein, 48 aa, Homo sapiens
MPGPQGGRGAATMSLGKLSPVGWVSSSQGKRRLTADMISHPLGDFRHT

SEQ ID NO: 40708 - protein, 210 aa, Homo sapiens
MSTKVPIYLKRGSRKGKKEKLRDLLSSDMISPPLGDFRHTIHIGSGGGSDMFGDISFLQGKFHLLPGTMVEGPEEDGTFDLPFQFTRTATVCGRELPDGPSPLLKNAISLPVIGGPQALTLPTAQAPPKPPRLHLETPQPSPQEGGSVDIWRIPETGSPNSGLTPESGAEEPFLSNASSLLSLHVDLGPSILDDVLQIMDQDLDSMQIPT

SEQ ID NO: 40709 - protein, 210 aa, Homo sapiens; identical to SEQ ID NO: 40708

SEQ ID NO: 40710 - protein, 210 aa, Homo sapiens; identical to SEQ ID NO: 40708

SEQ ID NO: 40711 - protein, 254 aa, Homo sapiens
MPAKTPIYLKAANNKKGKKFKLRDILSPDMISPPLGDFRHTIHIGKEGQHDVFGDISFLQGNYELLPGNQEKAHLGQFPGHNEFFRANSTSDSVFTETPSPVLKNAISLPTIGGSQALMLPLLSPVTFNSKQESFGPAKLPRLSCEPVMEEKAQEKSSLLENGTVHQGDTSWGSSGSASQSSQGRDSHSSSLSEQYPDWPAEDMFDHPTPCELIKGKTKSEESLSDLTGSLLSLQLDLGPSLLDEVLNVMDKNK

SEQ ID NO: 40712 - protein, 14 aa, Homo sapiens
MPAKTPIYLKAANN

SEQ ID NO: 40713 - protein, 35 aa, Homo sapiens
MPAKTPIYLKAANNKKGKKFKLRDILSPDMISPPL

SEQ ID NO: 40714 - protein, 216 aa, Homo sapiens
MPAKTPIYLKAANNKKGKKFKLRDILSPDMISPPLGDFRHTIHIGKEGQHDVFGDISFLQGNYELLPGNQEKAHLGQFPGHNEFFRANSTSDSVFTETPSPVLKNAISLPTIGGSQALMLPLLSPVTFNSKQESFGPAKLPRLSCEPVMEEKAQEKSSLLENGTVHQGDTSWGSSGSASQSSQGRDSHSSSLSEQYPDWPAEDMFDHPTPCELIKG

SEQ ID NO: 40715 - protein, 356 aa, Homo sapiens
MPILKQLVSSSVHSKRRSRADLTAEMISAPLGDFRHTMHVGRAGDAFGDTSFLNSKAGEPDGESLDEQPSSSSSKRSLLSRKFRGSKRSQSVTRGEREQRDMLGSLRDSALFVKNAMSLPQLNEKEAAEKGTSKLPKSLSSSPVKKANDGEGGDEEAGTEEAVPRRNGAAGPHSPDPLLDEQAFGDLTDLPVVPKATYGLKHAESIMSFHIDLGPSMLGDVLSIMDKEEWDPEEGEGGYHGDEGAAGTITQAPPYAVAAPPLARQEGKAGPDLPSLPSHALEDEGWAAAAPSPGSARSMGSHTTRDSSSLSSCTSGILEERSPAFRGPDRARAAVSRQPDKEFSFMDEEEEDEIRV

SEQ ID NO: 40716 - protein, 286 aa, Homo sapiens
MPILKQLVSSSVHSKRRSRADLTAEMISAPLGDFRHTMHVGRAGDAFGDTSFLNSKAAEKGTSKLPKSLSSSPVKKANDGEGGDEEAGTEEAVPRRNGAAGPHSPDPLLDEQAFGDLTDLPVVPKATYGLKHAESIMSFHIDLGPSMLGDVLSIMDKEEWDPEEGEGGYHGDEGAAGTITQAPPYAVAAPPLARQEGKAGPDLPSLPSHALEDEGWAAAAPSPGSARSMGSHTTRDSSSLSSCTSGILEERSPAFRGPDRARAAVSRQPDKEFSFMDEEEEDEIRV

SEQ ID NO: 40717 - protein, 516 aa, Homo sapiens
MTLLITGDSIVSAEAVWDHVTMANRELAFKAGDVIKVLDASNKDWWWGQIDDEEGWFPASFVRLWVNQEDEVEEGPSDVQNGHLDPNSDCLCLGRPLQNRDQMRANVINEIMSTERHYIKHLKDICEGYLKQCRKRRDMFSDEQLKVIFGNIEDIYRFQMGFVRDLEKQYNNDDPHLSEIGPCFLEHQDGFWIYSEYCNNHLDACMELSKLMKDSRYQHFFEACRLLQQMIDIAIDGFLLTPVQKICKYPLQLAELLKYTAQDHSDYRYVAAALAVMRNVTQQINERKRRLENIDKIAQWQASVLDWEGEDILDRSSELIYTGEMAWIYQPYGRNQQRVFFLFDHQMVLCKKDLIRRDILYYKGRIDMDKYEVVDIEDGRDDDFNVSMKNAFKLHNKETEEIHLFFAKKLEEKIRWLRAFREERKMVQEDEKIGFEISENQKRQAAMTVRKVPKQKGVNSARSVPPSYPPPQDPLNHGQYLVPDGIAQSQVFEFTEPKRSQSPFWQNFSRLTPFKK

SEQ ID NO: 40718 - protein, 414 aa, Homo sapiens
MRANVINEIMSTERHYIKHLKDICEGYLKQCRKRRDMFSDEQLKVIFGNIEDIYRFQMGFVRDLEKQYNNDDPHLSEIGPCFLEHQDGFWIYSEYCNNHLDACMELSKLMKDSRYQHFFEACRLLQQMIDIAIDGFLLTPVQKICKYPLQLAELLKYTAQDHSDYRYVAAALAVMRNVTQQINERKRRLENIDKIAQWQASVLDWEGEDILDRSSELIYTGEMAWIYQPYGRNQQRVFFLFDHQMVLCKKDLIRRDILYYKGRIDMDKYEVVDIEDGRDDDFNVSMKNAFKLHNKETEEIHLFFAKKLEEKIRWLRAFREERKMVQEDEKIGFEISENQKRQAAMTVRKVPKQKGVNSARSVPPSYPPPQDPLNHGQYLVPDGIAQSQVFEFTEPKRSQSPFWQNFSRLTPFKK

SEQ ID NO: 40719 - protein, 495 aa, Homo sapiens
MANRELAFKAGDVIKVLDASNKDWWWGQIDDEEGWFPASFVRLWVNQEDEVEEGPSDVQNGHLDPNSDCLCLGRPLQNRDQMRANVINEIMSTERHYIKHLKDICEGYLKQCRKRRDMFSDEQLKVIFGNIEDIYRFQMGFVRDLEKQYNNDDPHLSEIGPCFLEHQDGFWIYSEYCNNHLDACMELSKLMKDSRYQHFFEACRLLQQMIDIAIDGFLLTPVQKICKYPLQLAELLKYTAQDHSDYRYVAAALAVMRNVTQQINERKRRLENIDKIAQWQASVLDWEGEDILDRSSELIYTGEMAWIYQPYGRNQQRVFFLFDHQMVLCKKDLIRRDILYYKGRIDMDKYEVVDIEDGRDDDFNVSMKNAFKLHNKETEEIHLFFAKKLEEKIRWLRAFREERKMVQEDEKIGFEISENQKRQAAMTVRKVPKQKGVNSARSVPPSYPPPQDPLNHGQYLVPDGIAQSQVFEFTEPKRSQSPFWQNFSRLTPFKK

SEQ ID NO: 40720 - protein, 478 aa, Homo sapiens
MLITGDSIVSAEAVWDHVTMANRELAFKAGDVIKVLDASNKDWWWGQIDDEEGWFPASFVRLWVNQEDEVEEGPSDVQNGHLDPNSDCLCLGRPLQNRDQMRANVINEIMSTERHYIKHLKDICEGYLKQCRKRRDMFSDEQLKVIFGNIEDIYRFQMGFVRDLEKQYNNDDPHLSEIGPCFLEHQDGFWIYSEYCNNHLDACMELSKLMKDSRYQHFFEACRLLQQMIDIAIDGFLLTPVQKICKYPLQLAELLKYTAQDHSDYRYVAAALAVMRNVTQQINERKRRLENIDKIAQWQASVLDWEGEDILDRSSELIYTGEMAWIYQPYGRNQQRVFFLFDHQMVLCKKDLIRRDILYYKGRIDMDKYEVVDIEDGRDDDFNVSMKNAFKLHNKETEEIHLFFAKKLEEKIRWLRAFREERKMVQEDEKIGFEISENQKRQAAMTVRKLPFPQLSEARICSPKGFASVFNGTCCGES

SEQ ID NO: 40721 - protein, 243 aa, Homo sapiens
MIDIAIDGFLLTPVQKICKYPLQLAELLKYTAQDHSDYRYVAAALAVMRNVTQQINERKRRLENIDKIAQWQASVLDWEDLIRRDILYYKGRIDMDKYEVVDIEDGRDDDFNVSMKNAFKLHNKETEEIHLFFAKKLEEKIRWLRAFREERKMVQEDEKIGFEISENQKRQAAMTVRKVPKQKGVNSARSVPPSYPPPQDPLNHGQYLVPDGIAQSQVFEFTEPKRSQSPFWQNFSRLTPFKK

SEQ ID NO: 40722 - protein, 463 aa, Homo sapiens
MQWIRGGSGMLWVNQEDEVEEGPSDVQNGHLDPNSDCLCLGRPLQNRDQMRANVINEIMSTERHYIKHLKDICEGYLKQCRKRRDMFSDEQLKVIFGNIEDIYRFQMGFVRDLEKQYNNDDPHLSEIGPCFLEHQDGFWIYSEYCNNHLDACMELSKLMKDSRYQHFFEACRLLQQMIDIAIDGFLLTPVQKICKYPLQLAELLKYTAQDHSDYRYVAAALAVMRNVTQQINERKRRLENIDKIAQWQASVLDWEGEDILDRSSELIYTGEMAWIYQPYGRNQQRVFFLFDHQMVLCKKDLIRRDILYYKGRIDMDKYEVVDIEDGRDDDFNVSMKNAFKLHNKETEEIHLFFAKKLEEKIRWLRAFREERKMVQEDEKIGFEISENQKRQAAMTVRKVPKQKGVNSARSVPPSYPPPQDPLNHGQYLVPDGIAQSQVFEFTEPKRSQSPFWQNFSRLTPFKK

SEQ ID NO: 40723 - protein, 802 aa, Homo sapiens
MPRIMIKGGVWRNTEDEILKAAVMKYGKNQWSRIASLLHRKSAKQCKARWYEWLDPSIKKTEWSREEEEKLLHLAKLMPTQWRTIAPIIGRTAAQCLEHYEFLLDKAAQRDNEEETTDDPRKLKPGEIDPNPETKPARPDPIDMDEDELEMLSEARARLANTQGKKAKRKAREKQLEEARRLAALQKRRELRAAGIEIQKKRKRKRGVDYNAEIPFEKKPALGFYDTSEENYQALDADFRKLRQQDLDGELRSEKEGRDRKKDKQHLKRKKESDLPSAILQTSGVSEFTKKRSKLVLPAPQISDAELQEVVKVGQASEIARQTAEESGITNSASSTLLSEYNVTNNSVALRTPRTPASQDRILQEAQNLMALTNVDTPLKGGLNTPLHESDFSGVTPQRQVVQTPNTVLSTPFRTPSNGAEGLTPRSGTTPKPVINSTPGRTPLRDKLNINPEDGMADYSDPSYVKQMERESREHLRLGLLGLPAPKNDFEIVLPENAEKELEEREIDDTYIEDAADVDARKQAIRDAERVKEMKRMHKAVQKDLPRPSEVNETILRPLNVEPPLTDLQKSEELIKKEMITMLHYDLLHHPYEPSGNKKGKTVGFGTNNSEHITYLEHNPYEKFSKEELKKAQDVLVQEMEVVKQGMSHGELSSEAYNQVWEECYSQVLYLPGQSRYTRANLASKKDRIESLEKRLEINRGHMTTEAKRAAKMEKKMKILLGGYQSRAMGLMKQLNDLWDQIEQAHLELRTFEELKKHEDSAIPRRLECLKEDVQRQQEREKELQHRYADLLLEKETLKSKF

SEQ ID NO: 40724 - protein, 484 aa, Homo sapiens
MRHSKRTYCPDWDDKDWDYGKWRSSSSHKRRKRSHSSAQENKRCKYNHSKMCDSHYLESRSINEKDYHSRRYIDEYRNDYTQGCEPGHRQRDHESRYQNHSSKSSGRSGRSSYKSKHRIHHSTSHRRSHGKSHRRKRTRSVEDDEEGHLICQSGDVLSARYEIVDTLGEGAFGKVVECIDHKAGGRHVAVKIVKNVDRYCEAARSEIQVLEHLNTTDPNSTFRCVQMLEWFEHHGHICIVFELLGLSTYDFIKENGFLPFRLDHIRKMAYQICKSVNFLHSNKLTHTDLKPENILFVQSDYTEAYNPKIKRDERTLINPDIKVVDFGSATYDDEHHSTLVSTRHYRAPEVILALGWSQPCDVWSIGCILIEYYLGFTVFPTHDSKEHLAMMERILGPLPKHMIQKTRKRKYFHHDRLDWDEHSSAGRYVSRRCKPLKEFMLSQDVEHERLFDLIQKMLEYDPAKRITLREALKHPFFDLLKKSI

SEQ ID NO: 40725 - protein, 454 aa, Homo sapiens
MRHSKRTYCPDWDDKDWDYGKWRSSSSHKRRKRSHSSAQENKRCKYNHSKMCDSHYLESRSINEKDYHSRRYIDEYRNDYTQGCEPGHRQRDHESRYQNHSSKSSGRSGRSSYKSKHRIHHSTSHRRSHGDEIVDTLGEGAFGKVVECIDHKAGGRHVAVKIVKNVDRYCEAARSEIQVLEHLNTTDPNSTFRCVQMLEWFEHHGHICIVFELLGLSTYDFIKENGFLPFRLDHIRKMAYQICKSVNFLHSNKLTHTDLKPENILFVQSDYTEAYNPKIKRDERTLINPDIKVVDFGSATYDDEHHSTLVSTRHYRAPEVILALGWSQPCDVWSIGCILIEYYLGFTVFPTHDSKEHLAMMERILGPLPKHMIQKTRKRKYFHHDRLDWDEHSSAGRYVSRRCKPLKEFMLSQDVEHERLFDLIQKMLEYDPAKRITLREALKHPFFDLLKKSI

SEQ ID NO: 40726 - protein, 526 aa, Homo sapiens
MAAGRRPASALWPERRGSPLRGDLLGFQNVREPSSCGETLSGMRHSKRTYCPDWDDKDWDYGKWRSSSSHKRRKRSHSSAQENKRCKYNHSKMCDSHYLESRSINEKDYHSRRYIDEYRNDYTQGCEPGHRQRDHESRYQNHSSKSSGRSGRSSYKSKHRIHHSTSHRRSHGKSHRRKRTRSVEDDEEGHLICQSGDVLSARYEIVDTLGEGAFGKVVECIDHKAGGRHVAVKIVKNVDRYCEAARSEIQVLEHLNTTDPNSTFRCVQMLEWFEHHGHICIVFELLGLSTYDFIKENGFLPFRLDHIRKMAYQICKSVNFLHSNKLTHTDLKPENILFVQSDYTEAYNPKIKRDERTLINPDIKVVDFGSATYDDEHHSTLVSTRHYRAPEVILALGWSQPCDVWSIGCILIEYYLGFTVFPTHDSKEHLAMMERILGPLPKHMIQKTRKRKYFHHDRLDWDEHSSAGRYVSRRCKPLKEFMLSQDVEHERLFDLIQKMLEYDPAKRITLREALKHPFFDLLKKSI

SEQ ID NO: 40727 - protein, 497 aa, Homo sapiens
MPHPRRYHSSERGSRGSYREHYRSRKHKRRRSRSWSSSSDRTRRRRREDSYHVRSRSYDDRSSDRRVYDRRYCGSYRRNDYSRDRGDAYYDTDYRHSYEYQRENSSYRSQRSSRRKHRRRRRRSRTFSRSSSHSSRRAKSVEDDAEGHLIYHVGDWLQERYEIVSTLGEGTFGRVVQCVDHRRGGARVALKIIKNVEKYKEAARLEINVLEKINEKDPDNKNLCVQMFDWFDYHGHMCISFELLGLSTFDFLKDNNYLPYPIHQVRHMAFQLCQAVKFLHDNKLTHTDLKPENILFVNSDYELTYNLEKKRDERSVKSTAVRVVDFGSATFDHEHHSTIVSTRHYRAPEVILELGWSQPCDVWSIGCIIFEYYVGFTLFQTHDNREHLAMMERILGPIPSRMIRKTRKQKYFYRGRLDWDENTSAGRYVRENCKPLRRYLTSEAEEHHQLFDLIESMLEYEPAKRLTLGEALQHPFFARLRAEPPNKLWDSSRDISR

SEQ ID NO: 40728 - protein, 498 aa, Homo sapiens
MPHPRRYHSSERGSRGSYREHYRSRKHKRRRSRSWSSSSDRTRRRRREDSYHVRSRSSYDDRSSDRRVYDRRYCGSYRRNDYSRDRGDAYYDTDYRHSYEYQRENSSYRSQRSSRRKHRRRRRRSRTFSRSSSHSSRRAKSVEDDAEGHLIYHVGDWLQERYEIVSTLGEGTFGRVVQCVDHRRGGARVALKIIKNVEKYKEAARLEINVLEKINEKDPDNKNLCVQMFDWFDYHGHMCISFELLGLSTFDFLKDNNYLPYPIHQVRHMAFQLCQAVKFLHDNKLTHTDLKPENILFVNSDYELTYNLEKKRDERSVKSTAVRVVDFGSATFDHEHHSTIVSTRHYRAPEVILELGWSQPCDVWSIGCIIFEYYVGFTLFQTHDNREHLAMMERILGPIPSRMIRKTRKQKYFYRGRLDWDENTSAGRYVRENCKPLRRYLTSEAEEHHQLFDLIESMLEYEPAKRLTLGEALQHPFFARLRAEPPNKLWDSSRDISR

SEQ ID NO: 40729 - protein, 499 aa, Homo sapiens
MPHPRRYHSSERGSRGSYREHYRSRKHKRRRSRSWSSSSDRTRRRRREDSYHVRSRSSYDDRSSDRRVYDRRYCGSYRRNDYSRDRGDAYYDTDYRHSYEYQRENSSYRSQRSSRRKHRRRRRRSRTFSRSSSQHSSRRAKSVEDDAEGHLIYHVGDWLQERYEIVSTLGEGTFGRVVQCVDHRRGGARVALKIIKNVEKYKEAARLEINVLEKINEKDPDNKNLCVQMFDWFDYHGHMCISFELLGLSTFDFLKDNNYLPYPIHQVRHMAFQLCQAVKFLHDNKLTHTDLKPENILFVNSDYELTYNLEKKRDERSVKSTAVRVVDFGSATFDHEHHSTIVSTRHYRAPEVILELGWSQPCDVWSIGCIIFEYYVGFTLFQTHDNREHLAMMERILGPIPSRMIRKTRKQKYFYRGRLDWDENTSAGRYVRENCKPLRRYLTSEAEEHHQLFDLIESMLEYEPAKRLTLGEALQHPFFARLRAEPPNKLWDSSRDISR

SEQ ID NO: 40730 - protein, 271 aa, Homo sapiens
MFDWFDYHGHMCISFELLGLSTFDFLKDNNYLPYPIHQVRHMAFQLCQAVKFLHDNKLTHTDLKPENILFVNSDYELTYNLEKKRDERSVKSTAVRVVDFGSATFDHEHHSTIVSTRHYRAPEVILELGWSQPCDVWSIGCIIFEYYVGFTLFQTHDNREHLAMMERILGPIPSRMIRKTRKQKYFYRGRLDWDENTSAGRYVRENCKPLRRYLTSEAEEHHQLFDLIESMLEYEPAKRLTLGEALQHPFFARLRAEPPNKLWDSSRDISR

SEQ ID NO: 40731 - protein, 499 aa, Homo sapiens; identical to SEQ ID NO: 40729

SEQ ID NO: 40732 - protein, 490 aa, Homo sapiens
MHHCKRYRSPEPDPYLSYRWKRRRSYSREHEGRLRYPSRREPPPRRSRSRSHDRLPYQRRYRERRDSDTYRCEERSPSFGEDYYGPSRSRHRRRSRERGPYRTRKHAHHCHKRRTRSCSSASSRSQQSSKRSSRSVEDDKEGHLVCRIGDWLQERYEIVGNLGEGTFGKVVECLDHARGKSQVALKIIRNVGKYREAARLEINVLKKIKEKDKENKFLCVLMSDWFNFHGHMCIAFELLGKNTFEFLKENNFQPYPLPHVRHMAYQLCHALRFLHENQLTHTDLKPENILFVNSEFETLYNEHKSCEEKSVKNTSIRVADFGSATFDHEHHTTIVATRHYRPPEVILELGWAQPCDVWSIGCILFEYYRGFTLFQTHENREHLVMMEKILGPIPSHMIHRTRKQKYFYKGGLVWDENSSDGRYVKENCKPLKSYMLQDSLEHVQLFDLMRRMLEFDPAQRITLAEALLHPFFAGLTPEERSFHTSRNPSR

SEQ ID NO: 40733 - protein, 152 aa, Homo sapiens
MHHCKRYRSPEPDPYLSYRWKRRRSYSREHEGRLRYPSRREPPPRRSRSRSHDRLPYQRRYRERRDSDTYRCEERSPSFGEDYYGPSRSRHRRRSRERGPYRTRKHAHHCHKRRTRSCSSASSMRLWGTWVKAPLARWWSAWTMPEGSLRLP

SEQ ID NO: 40734 - protein, 467 aa, Homo sapiens [sequence omitted]

SEQ ID NO: 40735 - protein, 490 aa, Homo sapiens; identical to SEQ ID NO: 40732

SEQ ID NO: 40736 - protein, 638 aa, Homo sapiens
MPVLSARRRELADHAGSGRRSGPSPTARSGPHLSALRAQPARAAHLSGRGTYVRRDTAGGGPGQARPLGPPGTSLLGRGARRSGEGWCPGAFESGARAARPPSRVEPRLATAASREGAGLPRAEVAAGSGRGARSGEWGLAAAGAWETMHHCKRYRSPEPDPYLSYRWKRRRSYSREHEGRLRYPSRREPPPRRSRSRSHDRLPYQRRYRERRDSDTYRCEERSPSFGEDYYGPSRSRHRRRSRERGPYRTRKHAHHCHKRRTRSCSSASSRSQQSSKRSSRSVEDDKEGHLVCRIGDWLQERYEIVGNLGEGTFGKVVECLDHARGKSQVALKIIRNVGKYREAARLEINVLKKIKEKDKENKFLCVLMSDWFNFHGHMCIAFELLGKNTFEFLKENNFQPYPLPHVRHMAYQLCHALRFLHENQLTHTDLKPENILFVNSEFETLYNEHKSCEEKSVKNTSIRVADFGSATFDHEHHTTIVATRHYRPPEVILELGWAQPCDVWSIGCILFEYYRGFTLFQTHENREHLVMMEKILGPIPSHMIHRTRKQKYFYKGGLVWDENSSDGRYVKENCKPLKSYMLQDSLEHVQLFDLMRRMLEFDPAQRITLAEALLHPFFAGLTPEERSFHTSRNPSR

SEQ ID NO: 40737 - protein, 108 aa, Homo sapiens
MSLTSSSSVRVEWIAAVTIAAGTAAIGYLAYKRFYVKDHRNKAMINLHIQKDNPKIVHAFDMEDLGDKAVYCRCWRSKKFPFCDGAHTKHNEETGDNVGPLIIKKKET

SEQ ID NO: 40738 - protein, 135 aa, Homo sapiens
MVLESVARIVKVQLPAYLKRLPVPESITGFARLTVSEWLRLLPFLGVLALLGYLAVRPFLPKKKQQKDSLINLKIQKENPKVVNEINIEDLCLTKAAYCRCWRSKTFPACDGSHNKHNELTGDNVGPLILKKKEV

SEQ ID NO: 40739 - protein, 127 aa, Homo sapiens
MRGAGAILRPAARGARDLNPRRDISSWLAQWFPRTPARSVVALKTPIKVELVAGKTYRWCVCGRSKKQPFCDGSHFFQRTGLSPLKFKAQETRMVALCTCKATQRPPYCDGTHRSERVQKAEVGSPL

SEQ ID NO: 40740 - protein, 579 aa, Homo sapiens
MPSASCDTLLDDIEDIVSQEDSKPQDRHFVRKDVVPKVRRRNTQKYLQEEENSPPSDSTIPGIQKIWIRTWGCSHNNSDGEYMAGQLAAYGYKITENASDADLWLLNSCTVKNPAEDHFRNSIKKAQEENKKIVLAGCVPQAQPRQDYLKGLSIIGVQQIDRVVEVVEETIKGHSVRLLGQKKDNGRRLGGARLDLPKIRKNPLIEIISINTGCLNACTYCKTKHARGNLASYPIDELVDRAKQSFQEGVCEIWLTSEDTGAYGRDIGTNLPTLLWKLVEVIPEGAMLRLGMTNPPYILEHLEEMAKILNHPRVYAFLHIPVQSASDSVLMEMKREYCVADFKRVVDFLKEKVPGITIATDIICGFPGETDQDFQETVKLVEEYKFPSLFINQFYPRPGTPAAKMEQVPAQVKKQRTKDLSRVFHSYSPYDHKIGERQQVLVTEESFDSKFYVAHNQFYEQVLVPKNPAFMGKMVEVDIYESGKHFMKGQPVSDAKVYTPSISKPLAKGEVSGLTKDFRNGLGNQLSSGSHTSAASQCDSASSRMVLPMPRLHQDCALRMSVGLALLGLLFAFFVKVYN

SEQ ID NO: 40741 - protein, 579 aa, Homo sapiens; identical to SEQ ID NO: 40740

SEQ ID NO: 40742 - protein, 488 aa, Homo sapiens
MLSRRYEGEIPKNICKRKKTVHQVTENASDADLWLLNSCTVKNPAEDHFRNSIKKAQEENKKIVLAGCVPQAQPRQDYLKGLSIIGVQQIDRVVEVVEETIKGHSVRLLGQKKDNGRRLGGARLDLPKIRKNPLIEIISINTGCLNACTYCKTKHARGNLASYPIDELVDRAKQSFQEGVCEIWLTSEDTGAYGRDIGTNLPTLLWKLVEVIPEGAMLRLGMTNPPYILEHLEEMAKILNHPRVYAFLHIPVQSASDSVLMEMKREYCVADFKRVVDFLKEKVPGITIATDIICGFPGETDQDFQETVKLVEEYKFPSLFINQFYPRPGTPAAKMEQVPAQVIGERQQVLVTEESFDSKFYVAHNQFYEQVLVPKNPAFMGKMVEVDIYESGKHFMKGQPVSDAKVYTPSISKPLAKGEVSGLTKDFRNGLGNQLSSGSHTSAASQCDSASSRMVLPMPRLHQDCALRMSVGLALLGLLFAFFVKVYN

SEQ ID NO: 40743 - protein, 1607 aa, Homo sapiens
MMDLVLEEDVTVPGTLSGCSGLVPSVPDDLDGINPNAGLGNGLLPNVSEETVSPTRARNMKDFENQITELKKENFNLKLRIYFLEERMQQEFHGPTEHIYKTNIELKVEVESLKRELQEREQLLIKASKAVESLAEAGGSEIQRVKEDARKKVQQVEDLLTKRILLLEKAKDVTAAQAELEKAFAGTETEKALRLRLESKLSEMKKMHEGDLAMALVLDEKDRLIEELKLSLKSKEALIQCLKEEKSQMACPDENVSSGELRGLCAAPREEKERETEAAQMEHQKERNSFEERIQALEEDLREKEREIATEKKNSLKRDKAIQGLTMALKSKEKKVEELNSEIEKLSAAFAKAREALQKAQTQEFQGSEDYETALSGKEALSAALRSQNLTKSTENHRLRRSIKKITQELSDLQQERERLEKDLEEAHREKSKGDCTIRDLRNEVEKLRNEVNEREKAMENRYKSLLSESNKKLHNQEQVIKHLTESTNQKDVLLQKFNEKDLEVIQQNCYLMAAEDLELRSEGLITEKCSSQQPPGSKTIFSKEKKQSSDYEELIQVLKKEQDIYTHLVKSLQESDSINNLQAELNKIFALRKQLEQDVLSYQNLRKTLEEQISEIRRREESFSLYSDQTSYLSICLEENNRFQVEHFSQEELKKKVSDLIQLVKELYTDNQHLKKTIFDLSCMGFQGNGFPDRLASTEQTEEAKKSRLPILIKPSRSLGNMYRLPATQEVVTQLQSQILELQGELKEFKTCNKQLHQKLILAEAVMEGRPTPDKTLLNAQPPVGAAYQDSPGEQKGIKTTSSVWRDKEMDSDQQRSYEIDSEICPPDDLASLPSCKENPEDVLSPTSVATYLSSKSQPSAKVSVMGTDQSESINTSNETEYLKQKIHDLETELEGYQNFIFQLQKHSQCSEAIITVLCGTEGAQDGLSKPKNGSDGEEMTFSSLHQVRYVKHVKILGPLAPEMIDSRVLENLKQQLEEQEYKLQKEQNLNMQLFSEIHNLQNKFRDLSPPRYDSLVQSQARELSLQRQQIKDGHGICVISRQHMNTMIKAFEELLQASDVDYCVAEGFQEQLNQCAELLEKLEKLFLNGKSVGVEMNTQNELMERIEEDNLTYQHLLPESPEPSASHALSDYETSEKSFFSRDQKQDNETEKTSVMVNSFSQDLLMEHIQEIRTLRKRLEESIKTNEKLRKQLERQGSEFVQGSTSIFASGSELHSSLTSEIHFLRKQNQALNAMLIKGSRDKQKENDKLRESLSRKTVSLEHLQREYASVKEENERLQKEGSEKERHNQQLIQEVRCSGQELSRVQEEVKLRQQLLSQNDKLLQSLRVELKAYEKLDEEHRRLREASGEGWKGQDPFRDLHSLLMEIQALRLQLERSIETSSTLQSRLKEQLARGAEKAQEGALTLAVQAVSIPEVPLQPDKHDGDKYPMESDNSFDLFDSSQAVTPKSVSETPPLSGNDTDSLSCDSGSSATSTPCVSRLVTGHHLWASKNGRHVLGLIEDYEALLKQISQGQRLLAEMDIQTQEAPSSTSQELGTKGPHPAPLSKFVSSVSTAKLTLEEAYRRLKLLWRVSLPEDGQCPLHCEQIGEMKAEVTKLHKKLKKS

SEQ ID NO: 40744 - protein, 1893 aa, Homo sapiens
MMDLVLEEDVTVPGTLSGCSGLVPSVPDDLDGINPNAGLGNGLLPNVSEETVSPTRARNMKDFENQITELKKENFNLKLRIYFLEERMQQEFHGPTEHIYKTNIELKVEVESLKRELQEREQLLIKASKAVESLAEAGGSEIQRVKEDARKKVQQVEDLLTKRILLLEKDVTAAQAELEKAFAGTETEKALRLRLESKLSEMKKMHEGDLAMALVLDEKDRLIEELKLSLKSKEALIQCLKEEKSQMACPDENVSSGELRGLCAAPREEKERETEAAQMEHQKERNSFEERIQALEEDLREKEREIATEKKNSLKRDKAIQGLTMALKSKEKKVEELNSEIEKLSAAFAKAREALQKAQTQEFQGSEDYETALSGKEALSAALRSQNLTKSTENHRLRRSIKKITQELSDLQQERERLEKDLEEAHREKSKGDCTIRDLRNEVEKLRNEVNEREKAMENRYKSLLSESNKKLHNQEQVIKHLTESTNQKDVLLQKFNEKDLEVIQQNCYLMAAEDLELRSEGLITEKCSSQQPPGSKTIFSKEKKQSSDYEELIQVLKKEQDIYTHLVKSLQESDSINNLQAELNKIFALRKQLEQDVLSYQNLRKTLEEQISEIRRREEESFSLYSDQTSYLSICLEENNRFQVEHFSQEELKKKVSDLIQLVKELYTDNQHLKKTIFDLSCMGFQGNGFPDRLASTEQTELLASKEDEDTIKIGEDDEINFLSDQHLQQSNEIMKDLSKGGCKNGYLRHTESKISDCDGAHAPGCLEEGAFINLLAPLFNEKATLLLESRPDLLKVVRELLLGQLFLTEQEVSGEHLDGKTEKTPKQKGELVHFVQTNSFSKPHDELKLSCEAQLVKAGEVPKVGLKDASVQTVATEGDLLRFKHEATREAWEEKPINTALSAEHRPENLHGVPGWQAALLSLPGITNREAKKSRLPILIKPSRSLGNMYRLPATQEVVTQLQSQILELQGELKEFKTCNKQLHQKLILAEAVMEGRPTPDKTLLNAQPPVGAAYQDSPGEQKGIKTTSSVWRDKEMDSDQQRSYEIDSEICPPDDLASLPSCKENPEDVLSPTSVATYLSSKSQPSAKVSVMGTDQSESINTSNETEYLKQKIHDLETELEGYQNFIFQLQKHSQCSEAIITVLCGTEGAQDGLSKPKNGSDGEEMTFSSLHQVRYVKHVKILGPLAPEMIDSRVLENLKQQLEEQEYKLQKEQNLNMQLFSEIHNLQNKFRDLSPPRYDSLVQSQARELSLQRQQIKDGHGICVISRQHMNTMIKAFEELLQASDVDYCVAEGFQEQLNQCAELLEKLEKLFLNGKSVGVEMNTQNELMERIEEDNLTYQHLLPESPEPSASHALSDYETSEKSFFSRDQKQDNETEKTSVMVNSFSQDLLMEHIQEIRTLRKRLEESIKTNEKLRKQLERQGSEFVQGSTSIFASGSELHSSLTSEIHFLRKQNQALNAMLIKGSRDKQKENDKLRESLSRKTVSLEHLQREYASVKEENERLQKEGSEKERHNQQLIQEVRCSGQELSRVQEEVKLRQQLLSQNDKLLQSLRVELKAYEKLDEEHRRLREASGEGWKGQDPFRDLHSLLMEIQALRLQLERSIETSSTLQSRLKEQLARGAEKAQEGALTLAVQAVSIPEVPLQPDKHDGDKYPMESDNSFDLFDSSQAVTPKSVSETPPLSGNDTDSLSCDSGSSATSTPCVSRLVTGHHLWASKNGRHVLGLIEDYEALLKQISQGQRLLAEMDIQTQEAPSSTSQELGTKGPHPAPLSKFVSSVSTAKLTLEEAYRRLKLLWRVSLPEDGQCPLHCEQIGEMKAEVTKLHKKLFEQEKKLQNTMKLLQLSKRQEKVIFDQLVVTHKILRKARGNLELRPGGAHPGTCSPSRPGS

SEQ ID NO: 40745 - protein, 1852 aa, Homo sapiens
MMDLVLEEDVTVPGTLSGCSGLVPSVPDDLDGINPNAGLGNGLLPNVSEETVSPTRARNMKDFENQITELKKENFNLKLRIYFLEERMQQEFHGPTEHIYKTNIELKVEVESLKRELQEREQLLIKASKAVESLAEAGGSEIQRVKEDARKKVQQVEDLLTKRILLLEKDVTAAQAELEKAFAGTETEKALRLRLESKLSEMKKMHEGDLAMALVLDEKDRLIEELKLSLKSKEALIQCLKEEKSQMACPDENVSSGELRGLCAAPREEKERETEAAQMEHQKERNSFEERIQALEEDLREKEREIATEKKNSLKRDKAIQGLTMALKSKEKKVEELNSEIEKLSAAFAKAREALQKAQTQEFQGSEDYETALSGKEALSAALRSQNLTKSTENHRLRRSIKKITQELSDLQQERERLEKDLEEAHREKSKGDCTIRDLRNEVEKLRNEVNEREKAMENRYKSLLSESNKKLHNQEQVIKHLTESTNQKDVLLQKFNEKDLEVIQQNCYLMAAEDLELRSEGLITEKCSSQQPPGSKTIFSKEKKQSSDYEELIQVLKKEQDIYTHLVKSLQESDSINNLQAELNKIFALRKQLEQDVLSYQNLRKTLEEQISEIRRREEESFSLYSDQTSYLSICLEENNRFQVEHFSQEELKKKVSDLIQLVKELYTDNQHLKKTIFDLSCMGFQGNGFPDRLASTEQTELLASKEDEDTIKIGEDDEINFLSDQHLQQSNEIMKDLSKGGCKNGYLRHTESKISDCDGAHAPGCLEEGAFINLLAPLFNEKATLLLESRPDLLKVVRELLLGQLFLTEQEVSGEHLDGKTEKTPKQKGELVHFVQTNSFSKPHDELKLSCEAQLVKAGEVPKVGLKDASVQTVATEGDLLRFKHEATREAWEEKPINTALSAEHRPENLHGVPGWQAALLSLPGITNREAKKSRLPILIKPSRSLGNMYRLPATQEVVTQLQSQILELQGELKEFKTCNKQLHQKLILAEAVMEGRPTPDKTLLNDSEICPPDDLASLPSCKENPEDVLSPTSVATYLSSKSQPSAKVSVMGTDQSESINTSNETEYLKQKIHDLETELEGYQNFIFQLQKHSQCSEAIITVLCGTEGAQDGLSKPKNGSDGEEMTFSSLHQVRYVKHVKILGPLAPEMIDSRVLENLKQQLEEQEYKLQKEQNLNMQLFSEIHNLQNKFRDLSPPRYDSLVQSQARELSLQRQQIKDGHGICVISRQHMNTMIKAFEELLQASDVDYCVAEGFQEQLNQCAELLEKLEKLFLNGKSVGVEMNTQNELMERIEEDNLTYQHLLPESPEPSASHALSDYETSEKSFFSRDQKQDNETEKTSVMVNSFSQDLLMEHIQEIRTLRKRLEESIKTNEKLRKQLERQGSEFVQGSTSIFASGSELHSSLTSEIHFLRKQNQALNAMLIKGSRDKQKENDKLRESLSRKTVSLEHLQREYASVKEENERLQKEGSEKERHNQQLIQEVRCSGQELSRVQEEVKLRQQLLSQNDKLLQSLRVELKAYEKLDEEHRRLREASGEGWKGQDPFRDLHSLLMEIQALRLQLERSIETSSTLQSRLKEQLARGAEKAQEGALTLAVQAVSIPEVPLQPDKHDGDKYPMESDNSFDLFDSSQAVTPKSVSETPPLSGNDTDSLSCDSGSSATSTPCVSRLVTGHHLWASKNGRHVLGLIEDYEALLKQISQGQRLLAEMDIQTQEAPSSTSQELGTKGPHPAPLSKFVSSVSTAKLTLEEAYRRLKLLWRVSLPEDGQCPLHCEQIGEMKAEVTKLHKKLFEQEKKLQNTMKLLQLSKRQEKVIFDQLVVTHKILRKARGNLELRPGGAHPGTCSPSRPGS

SEQ ID NO: 40746 - protein, 1814 aa, Homo sapiens
MMDLVLEEDVTVPGTLSGCSGLVPSVPDDLDGINPNAGLGNGLLPNVSEETVSPTRARNMKDFENQITELKKENFNLKLRIYFLEERMQQEFHGPTEHIYKTNIELKVEVESLKRELQEREQLLIKASKAVESLAEAGGSEIQRVKEDARKKVQQVEDLLTKRILLLEKDVTAAQAELEKAFAGTETEKALRLRLESKLSEMKKMHEGDLAMALVLDEKDRLIEELKLSLKSKEALIQCLKEEKSQMACPDENVSSGELRGLCAAPREEKERETEAAQMEHQKERNSFEERIQALEEDLREKEREIATEKKNSLKRDKAIQGLTMALKSKEKKVEELNSEIEKLSAAFAKAREALQKAQTQEFQGSEDYETALSGKEALSAALRSQNLTKSTENHRLRRSIKKITQELSDLQQERERLEKDLEEAHREKSKGDCTIRDLRNEVEKLRNEVNEREKAMENRYKSLLSESNKKLHNQEQVIKHLTESTNQKDVLLQKFNEKDLEVIQQNCYLMAAEDLELRSEGLITEKCSSQQPPGSKTIFSKEKKQSSDYEELIQVLKKEQDIYTHLVKSLQESDSINNLQAELNKIFALRKQLEQDVLSYQNLRKTLEEQISEIRRREEESFSLYSDQTSYLSICLEENNRFQVEHFSQEELKKKVSDLIQLVKELYTDNQHLKKTIFDLSCMGFQGNGFPDRLASTEQTELLASKEDEDTIKIGEDDEINFLSDQHLQQSNEIMKDLSKGGCKNGYLRHTESKISDCDGAHAPGCLEEGAFINLLAPLFNEKATLLLESRPDLLKVVRELLLGQLFLTEQEVSGEHLDGKTEKTPKQKGELVHFVQTNSFSKPHDELKLSCEAQLVKAGEVPKVGLKDASVQTVATEGDLLRFKHEATREAWEEKPINTALSAEHRPENLHGVPGWQAALLSLPGITNREAKKSRLPILIKPSRSLGNMYRLPATQEVVTQLQSQILELQGELKEFKTCNKQLHQKLILAEAVMEGRPTPDKTLLNAQPPVGAAYQDSPGEQKGIKTTSSVWRDKEMDSDQQRSYEIDSEICPPDDLASLPSCKENPEDVLSPTSVATYLSSKSQPSAKVSVMGTDQSESINTSNETEYLKQKIHDLETELEGYQNFIFQLQKHSQCSEAIITVLCGTEGAQDGLSKPKNGSDGEEMTFSSLHQVRYVKHVKILGPLAPEMIDSRVLENLKQQLEEQEYKLQKEQNLNMQLFSEIHNLQNKFRDLSPPRYDSLVQSQARELSLQRQQIKDGHGICVISRQHMNTMIKAFEELLQASDVDYCVAEGFQEQLNQCAELLEKLEKLFLNGKSVGVEMNTQNELMERIEEDNLTYQHLLPESPEPSASHALSDYETSEKSFFSRDQKQDNETEKTSVMVNSFSQDLLMEHIQEIRTLRKRLEESIKTNEKLRKQLERQGSEFVQGSTSIFASGSELHSSLTSEIHFLRKQNQALNAMLIKGSRDKQKENDKLRESLSRKTVSLEHLQREYASVKEENERLQKEGSEKERHNQQLIQEVRCSGQELSRVQEEVKLRQQLLSQNDKLLQSLRVELKAYEKLDEEHRRLRDGDKYPMESDNSFDLFDSSQAVTPKSVSETPPLSGNDTDSLSCDSGSSATSTPCVSRLVTGHHLWASKNGRHVLGLIEDYEALLKQISQGQRLLAEMDIQTQEAPSSTSQELGTKGPHPAPLSKFVSSVSTAKLTLEEAYRRLKLLWRVSLPEDGQCPLHCEQIGEMKAEVTKLHKKLFEQEKKLQNTMKLLQLSKRQEKVIFDQLVVTHKILRKARGNLELRPGGAHPGTCSPSRPGS

SEQ ID NO: 40747 - protein, 1861 aa, Homo sapiens
MMDLVLEEDVTVPGTLSGCSGLVPSVPDDLDGINPNAGLGNGLLPNVSEETVSPTRARNMKDFENQITELKKENFNLKLRIYFLEERMQQEFHGPTEHIYKTNIELKVEVESLKRELQEREQLLIKASKAVESLAEAGGSEIQRVKEDARKKVQQVEDLLTKRILLLEKDVTAAQAELEKAFAGTETEKALRLRLESKLSEMKKMHEGDLAMALVLDEKDRLIEELKLSLKSKEALIQCLKEEKSQMACPDENVSSGELRGLCAAPREEKERETEAAQMEHQKERNSFEERIQALEEDLREKEREIATEKKNSLKRDKAIQGLTMALKSKEKKVEELNSEIEKLSAAFAKAREALQKAQTQEFQGSEDYETALSGKEALSAALRSQNLTKSTENHRLRRSIKKITQELSDLQQERERLEKDLEEAHREKSKGDCTIRDLRNEVEKLRNEVNEREKAMENRYKSLLSESNKKLHNQEQVIKHLTESTNQKDVLLQKFNEKDLEVIQQNCYLMAAEDLELRSEGLITEKCSSQQPPGSKTIFSKEKKQSSDYEELIQVLKKEQDIYTHLVKSLQESDSINNLQAELNKIFALRKQLEQDVLSYQNLRKTLEEQISEIRRREEESFSLYSDQTSYLSICLEENNRFQVEHFSQEELKKKVSDLIQLVKELYTDNQHLKKTIFDLSCMGFQGNGFPDRLASTEQTEIMKDLSKGGCKNGYLRHTESKISDCDGAHAPGCLEEGAFINLLAPLFNEKATLLLESRPDLLKVVRELLLGQLFLTEQEVSGEHLDGKTEKTPKQKGELVHFVQTNSFSKPHDELKLSCEAQLVKAGEVPKVGLKDASVQTVATEGDLLRFKHEATREAWEEKPINTALSAEHRPENLHGVPGWQAALLSLPGITNREAKKSRLPILIKPSRSLGNMYRLPATQEVVTQLQSQILELQGELKEFKTCNKQLHQKLILAEAVMEGRPTPDKTLLNAQPPVGAAYQDSPGEQKGIKTTSSVWRDKEMDSDQQRSYEIDSEICPPDDLASLPSCKENPEDVLSPTSVATYLSSKSQPSAKVSVMGTDQSESINTSNETEYLKQKIHDLETELEGYQNFIFQLQKHSQCSEAIITVLCGTEGAQDGLSKPKNGSDGEEMTFSSLHQVRYVKHVKILGPLAPEMIDSRVLENLKQQLEEQEYKLQKEQNLNMQLFSEIHNLQNKFRDLSPPRYDSLVQSQARELSLQRQQIKDGHGICVISRQHMNTMIKAFEELLQASDVDYCVAEGFQEQLNQCAELLEKLEKLFLNGKSVGVEMNTQNELMERIEEDNLTYQHLLPESPEPSASHALSDYETSEKSFFSRDQKQDNETEKTSVMVNSFSQDLLMEHIQEIRTLRKRLEESIKTNEKLRKQLERQGSEFVQGSTSIFASGSELHSSLTSEIHFLRKQNQALNAMLIKGSRDKQKENDKLRESLSRKTVSLEHLQREYASVKEENERLQKEGSEKERHNQQLIQEVRCSGQELSRVQEEVKLRQQLLSQNDKLLQSLRVELKAYEKLDEEHRRLREASGEGWKGQDPFRDLHSLLMEIQALRLQLERSIETSSTLQSRLKEQLARGAEKAQEGALTLAVQAVSIPEVPLQPDKHDGDKYPMESDNSFDLFDSSQAVTPKSVSETPPLSGNDTDSLSCDSGSSATSTPCVSRLVTGHHLWASKNGRHVLGLIEDYEALLKQISQGQRLLAEMDIQTQEAPSSTSQELGTKGPHPAPLSKFVSSVSTAKLTLEEAYRRLKLLWRVSLPEDGQCPLHCEQIGEMKAEVTKLHKKLFEQEKKLQNTMKLLQLSKRQEKVIFDQLVVTHKILRKARGNLELRPGGAHPGTCSPSRPGS

SEQ ID NO: 40748 - protein, 506 aa, Homo sapiens
MEDHQHVPIDIQTSKLLDWLVDRRHCSLKWQSLVLTIREKINAAIQDMPESEEIAQLLSGSYIHYFHCLRILDLLKGTEASTKNIFGRYSSQRMKDWQEIIALYEKDNTYLVELSSLLVRNVNYEIPSLKKQIAKCQQLQQEYSRKEEECQAGAAEMREQFYHSCKQYGITGENVRGELLALVKDLPSQLAEIGAAAQQSLGEAIDVYQASVGFVCESPTEQVLPMLRFVQKRGNSTVYEWRTGTEPSVVERPHLEELPEQVAEDAIDWGDFGVEAVSEGTDSGISAEAAGIDWGIFPESDSKDPGGDGIDWGDDAVALQITVLEAGTQAPEGVARGPDALTLLEYTETRNQFLDELMELEIFLAQRAVELSEEADVLSVSQFQLAPAILQGQTKEKMVTMVSVLEDLIGKLTSLQLQHLFMILASPRYVDRVTEFLQQKLKQSQLLALKKELMVQKQQEALEEQAALEPKLDLLLEKTKELQKLIEADISKRYSGRPVNLMGTSL

SEQ ID NO: 40749 - protein, 531 aa, Homo sapiens
MRRQSMTSATRDLHTALDGKATQGGKKDHQHVPIDIQTSKLLDWLVDRRHCSLKWQSLVLTIREKINAAIQDMPESEEIAQLLSGSYIHYFHCLRILDLLKGTEASTKNIFGRYSSQRMKDWQEIIALYEKDNTYLVELSSLLVRNVNYEIPSLKKQIAKCQQLQQEYSRKEEECQAGAAEMREQFYHSCKQYGITGENVRGELLALVKDLPSQLAEIGAAAQQSLGEAIDVYQASVGFVCESPTEQVLPMLRFVQKRGNSTVYEWRTGTEPSVVERPHLEELPEQVAEDAIDWGDFGVEAVSEGTDSGISAEAAGIDWGIFPESDSKDPGGDGIDWGDDAVALQITVLEAGTQAPEGVARGPDALTLLEYTETRNQFLDELMELEIFLAQRAVELSEEADVLSVSQFQLAPAILQGQTKEKMVTMVSVLEDLIGKLTSLQLQHLFMILASPRYVDRVTEFLQQKLKQSQLLALKKELMVQKQQEALEEQAALEPKLDLLLEKTKELQKLIEADISKRYSGRPVNLMGTSL

SEQ ID NO: 40750 - protein, 1287 aa, Homo sapiens
MHPDLGPLCTLLYVTLTILCSSVSSDLAPYFTSEPLSAVQKLGGPVVLHCSAQPVTTRISWLHNGKTLDGNLEHVKIHQGTLTILSLNSSLLGYYQCLANNSIGAIVSGPATVSVAVLGDFGSSTKHVITAEEKSAGFIGCRVPESNPKAEVRYKIRGKWLEHSTENYLILPSGNLQILNVSLEDKGSYKCAAYNPVTHQLKVEPIGRKLLVSRPSSDDVHILHPTHSQALAVLSRSPVTLECVVSGVPAPQVYWLKDGQDIAPGSNWRRLYSHLATDSVDPADSGNYSCMAGNKSGDVKYVTYMVNVLEHASISKGLQDQIVSLGATVHFTCDVHGNPAPNCTWFHNAQPIHPSARHLTAGNGLKISGVTVEDVGMYQCVADNGIGFMHSTGRLEIENDGGFKPVIITAPVSAKVADGDFVTLSCNASGLPVPVIRWYDSHGLITSHPSQVLRSKSRKSQLSRPEGLNLEPVYFVLSQAGASSLHIQAVTQEHAGKYICEAANEHGTTQAEASLMVVPFETNTKAETVTLPDAAQNDDRSKRDGSETGLLSSFPVKVHPSAVESAPEKNASGISVPDAPIILSPPQTHTPDTYNLVWRAGKDGGLPINAYFVKYRKLDDGVGMLGSWHTVRVPGSENELHLAELEPSSLYEVLMVARSAAGEGQPAMLTFRTSKEKTASSKNTQASSPPVGIPKYPVVSEAANNNFGVVLTDSSRHSGVPEAPDRPTISTASETSVYVTWIPRANGGSPITAFKVEYKRMRTSNWLVAAEDIPPSKLSVEVRSLEPGSTYKFRVIAINHYGESFRSSASRPYQVVGFPNRFSSRPITGPHIAYTEAVSDTQIMLKWTYIPSSNNNTPIQGFYIYYRPTDSDNDSDYKRDVVEGSKQWHMIGHLQPETSYDIKMQCFNEGGESEFSNVMICETKVKRVPGASEYPVKDLSTPPNSLGSGGNVGPATSPARSSDMLYLIVGCVLGVMVLILMVFIAMCLWKNRQQNTIQKYDPPGYLYQGSDMNGQMVDYTTLSGASQINGNVHGGFLTNGGLSSGYSHLHHKVPNAVNGIVNGSLNGGLYSGHSNSLTRTHVDFEHPHHLVNGGGMYTAVPQIDPLECVNCRNCRNNNRCFTKTNSTFSSSPPPVVPVVAPYPQDGLEMKPLSHVKVPVCLTSAVPDCGQLPEESVKDNVEPVPTQRTCCQDIVNDVSSDGSEDPAEFSRGQEGMINLRIPDHLQLAKSCVWEGDSCAHSETEINIVSWNALILPPVPEGCAEKTMWSPPGIPLDSPTEVLQQPRET

SEQ ID NO: 40751 - protein, 1264 aa, Homo sapiens
MHPDLGPLCTLLYVTLTILCSSVSSDLAPYFTSEPLSAVQKLGGPVVLHCSAQPVTTRISWLHNGKTLDGNLEHVKIHQGTLTILSLNSSLLGYYQCLANNSIGAIVSGPATVSVAVLGDFGSSTKHVITAEEKSAGFIGCRVPESNPKAEVRYKIRGKWLEHSTENYLILPSGNLQILNVSLEDKGSYKCAAYNPVTHQLKVEPIGRKLLVSRPSSDDVHILHPTHSQALAVLSRSPVTLECVVSGVPAPQVYWLKDGQDIAPGSNWRRLYSHLATDSVDPADSGNYSCMAGNKSGDVKYVTYMVNVLEHASISKGLQDQIVSLGATVHFTCDVHGNPAPNCTWFHNAQPIHPSARHLTAGNGLKISGVTVEDVGMYQCVADNGIGFMHSTGRLEIENDGGFKPVIITAPVSAKVADGDFVTLSCNASGLPVPVIRWYDSHGLITSHPSQVLRSKSRKSQLSRPEGLNLEPVYFVLSQAGASSLHIQAVTQEHAGKYICEAANEHGTTQAEASLMVVPFETNTKAETVTLPDAAQNDDRSKRDGSETGLLSSFPVKVHPSAVESAPEKNASGISVPDAPIILSPPQTHTPDTYNLVWRAGKDGGLPINAYFVKYRKLDDGVGMLGSWHTVRVPGSENELHLAELEPSSLYEVLMVARSAAGEGQPAMLTFRTSKEKTASSKNTQASSPPVGIPKYPVVSEAANNNFGVVLTDSSRHSGVPEAPDRPTISTASETSVYVTWIPRANGGSPITAFKVEYKRMRTSNWLVAAEDIPPSKLSVEVRSLEPGSTYKFRVIAINHYGESFRSSASRPYQVVGFPNRFSSRPITGPHIAYTEAVSDTQIMLKWTYIPSSNNNTPIQGFYIYYRPTDSDNDSDYKRDVVEGSKQWHMIGHLQPETSYDIKMQCFNEGGESEFSNVMICETKVKRVPGASEYPVKDLSTPPNSLGSGGNVGPATSPARSSDMLYLIVGCVLGVMVLILMVFIAMCLWKNRQQNTIQKYDPPGYLYQGSDMNGQMVDYTTLSGASQINGNVHGGFLTNGGLSSGYSHLHHKVPNAVNGIVNGSLNGGLYSGHSNSLTRTHVDFEHPHHLVNGGGMYTAVPQIDPLECVNCRNCRNNNRCFTKTNSTFSSSPPPVVPVVAPYPQDGLEMKPLSHVKVPVCLTSAVPDCGQLPEESVKDNVEPVPTQRTCCQDIVNDVSSDGSEDPAEFSRGDSCAHSETEINIVSWNALILPPVPEGCAEKTMWSPPGIPLDSPTEVLQQPRET

SEQ ID NO: 40752 - protein, 461 aa, Homo sapiens
MLELRHRGSCPGPREAVSPPHREGEAAGGDHETESTSDKETDIDDRYGDLDSRTDSDIPEIPPSSDRTPEILKKALSGLSSRWKNWWIRGILTLTMISLFFLIIYMGSFMLMLLVLGIQVKCFHEIITIGYRVYHSYDLPWFRTLSWYFLLCVNYFFYGETVADYFATFVQREEQLQFLIRYHRFISFALYLAGFCMFVLSLVKKHYRLQFYMFAWTHVTLLITVTQSHLVIQNLFEGMIWFLVPISSVICNDITAYLFGFFFGRTPLIKLSPKKTWEGFIGGFFSTVVFGFIAAYVLSKYQYFVCPVEYRSDVNSFVTECEPSELFQLQTYSLPPFLKAVLRQERVSLYPFQIHSIALSTFASLIGPFGGFFASGFKRAFKIKDFANTIPGHGGIMDRFDCQYLMATFVHVYITSFIRGPNPSKVLQQLLVLQPEQQLNIYKTLKTHLIEKGILQPTLKV

SEQ ID NO: 40753 - protein, 325 aa, Homo sapiens
MSRLRHPRTRYFLLCVNYFFYGETVTDYFFTLVQREEPLRILSKYHRFISFTLYLIGFCMFVLSLVKKHYRLQFYMFGWTHVTLLIVVTQSHLVIHNLFEGMIWFIVPISCVICNDIMAYMFGFFFGRTPLIKLSPKKTWEGFIGGFFATVVFGLLLSYVMSGYRCFVCPVEYNNDTNSFTVDCEPSDLFRLQEYNIPGVIQSVIGWKTVRMYPFQIHSIALSTFASLIGPFGGFFASGFKRAFKIKDFANTIPGHGGIMDRFDCQYLMATFVNVYIASFIRGPNPSKLIQQFLTLRPDQQLHIFNTLRSHLIDKGMLTSTTEDE

SEQ ID NO: 40754 - protein, 250 aa, Homo sapiens
MSRLRHPRTRWKNWWVRGILTLAMIAFFFIIIYLGPMVLMIIVMCVQIKCFHEIITIGYNVYHSYDLPWFRTLSWYFLLCVNYFFYGETVTDYFFTLVQREEPLRILSKYHRFISFTLYLIGFCMFVLSLVKKHYRLQFYMFGWTHVTLLIVVTQSHLVIHNLFEGMIWFIVPISCVICNDIMAYMFGFFFGRTPLIKLSPKKTWEGFIGGFFATVVFGLLLSYVMSGYRCFVCPVEYNNDTNSFTVDCE

SEQ ID NO: 40755 - protein, 445 aa, Homo sapiens
MTELRQRVAHEPVAPPEDKESESEAKVDGETASDSESRAESAPLPVSADDTPEVLNRALSNLSSRWKNWWVRGILTLAMIAFFFIIIYLGPMVLMIIVMCVQIKCFHEIITIGYNVYHSYDLPWFRTLSWYFLLCVNYFFYGETVTDYFFTLVQREEPLRILSKYHRFISFTLYLIGFCMFVLSLVKKHYRLQFYMFGWTHVTLLIVVTQSHLVIHNLFEGMIWFIVPISCVICNDIMAYMFGFFFGRTPLIKLSPKKTWEGFIGGFFATVVFGLLLSYVMSGYRCFVCPVEYNNDTNSFTVDCEPSDLFRLQEYNIPGVIQSVIGWKTVRMYPFQIHSIALSTFASLIGPFGGFFASGFKRAFKIKDFANTIPGHGGIMDRFDCQYLMATFVNVYIASFIRGPNPSKLIQQFLTLRPDQQLHIFNTLRSHLIDKGMLTSTTEDE

SEQ ID NO: 40756 - protein, 215 aa, Homo sapiens
MFVLSLVKKHYRLQFYMFGWTHVTLLIVVTQSHLVIHNLFEGMIWFIVPISCVICNDIMAYMFGFFFGRTPLIKLSPKKTWEGFIGGFFATVVFGLLKTVRMYPFQIHSIALSTFASLIGPFGGFFASGFKRAFKIKDFANTIPGHGGIMDRFDCQYLMATFVNVYIASFIRGPNPSKLIQQFLTLRPDQQLHIFNTLRSHLIDKGMLTSTTEDE

SEQ ID NO: 40757 - protein, 1224 aa, Homo sapiens
MEPLLLGRGLIVYLMFLLLKFSKAIEIPSSVQQVPTIIKQSKVQVAFPFDEYFQIECEAKGNPEPTFSWTKDGNPFYFTDHRIIPSNNSGTFRIPNEGHISHFQGKYRCFASNKLGIAMSEEIEFIVPSVPKFPKEKIDPLEVEEGDPIVLPCNPPKGLPPLHIYWMNIELEHIEQDERVYMSQKGDLYFANVEEKDSRNDYCCFAAFPRLRTIVQKMPMKLTVNSLKHANDSSSSTEIGSKANSIKQRKPKLLLPPTESGSESSITILKGEILLLECFAEGLPTPQVDWNKIGGDLPKGRETKENYGKTLKIENVSYQDKGNYRCTASNFLGTATHDFHVIVEEPPRWTKKPQSAVYSTGSNGILLCEAEGEPQPTIKWRVNGSPVDNHPFAGDVVFPREISFTNLQPNHTAVYQCEASNVHGTILANANIDVVDVRPLIQTKDGENYATVVGYSAFLHCEFFASPEAVVSWQKVEEVKPLEGRRYHIYENGTLQINRTTEEDAGSYSCWVENAIGKTAVTANLDIRNATKLRVSPKNPRIPKLHMLELHCESKCDSHLKHSLKLSWSKDGEAFEINGTEDGRIIIDGANLTISNVTLEDQGIYCCSAHTALDSAADITQVTVLDVPDPPENLHLSERQNRSVRLTWEAGADHNSNISEYIVEFEGNKEEPGRWEELTRVQGKKTTVILPLAPFVRYQFRVIAVNEVGRSQPSQPSDHHETPPAAPDRNPQNIRVQASQPKEMIIKWEPLKSMEQNGPGLEYRVTWKPQGAPVEWEEETVTNHTLRVMTPAVYAPYDVKVQAINQLGSGPDPQSVTLYSGEDYPDTAPVIHGVDVINSTLVKVTWSTVPKDRVHGRLKGYQINWWKTKSLLDGRTHPKEVNILRFSGQRNSGMVPSLDAFSEFHLTVLAYNSKGAGPESEPYIFQTPEGVPEQPTFLKVIKVDKDTATLSWGLPKKLNGNLTGYLLQYQIINDTYEIGELNDINITTPSKPSWHLSNLNATTKYKFYLRACTSQGCGKPITEESSTLGEGSKGIGKISGVNLTQKTHPIEVFEPGAEHIVRLMTKNWGDNDSIFQDVIETRGREYAGLYDDISTQGWFIGLMCAIALLTLLLLTVCFVKRNRGGKYSVKEKEDLHPDPEIQSVKDETFGEYSDSDEKPLKGSLRSLNRDMQPTESADSLVEYGEGDHGLFSEDGSFIGAYAGSKEKGSVESNGSSTATFPLRA

SEQ ID NO: 40758 - protein, 1208 aa, Homo sapiens
MEPLLLGRGLIVYLMFLLLKFSKAIEIPSSVQQVPTIIKQSKVQVAFPFDEYFQIECEAKGNPEPTFSWTKDGNPFYFTDHRIIPSNNSGTFRIPNEGHISHFQGKYRCFASNKLGIAMSEEIEFIVPSVPKFPKEKIDPLEVEEGDPIVLPCNPPKGLPPLHIYWMNIELEHIEQDERVYMSQKGDLYFANVEEKDSRNDYCCFAAFPRLRTIVQKMPMKLTVNSSNSIKQRKPKLLLPPTESGSESSITILKGEILLLECFAEGLPTPQVDWNKIGGDLPKGRETKENYGKTLKIENVSYQDKGNYRCTASNFLGTATHDFHVIVEEPPRWTKKPQSAVYSTGSNGILLCEAEGEPQPTIKWRVNGSPVDNHPFAGDVVFPREISFTNLQPNHTAVYQCEASNVHGTILANANIDVVDVRPLIQTKDGENYATVVGYSAFLHCEFFASPEAVVSWQKVEEVKPLEGRRYHIYENGTLQINRTTEEDAGSYSCWVENAIGKTAVTANLDIRNATKLRVSPKNPRIPKLHMLELHCESKCDSHLKHSLKLSWSKDGEAFEINGTEDGRIIIDGANLTISNVTLEDQGIYCCSAHTALDSAADITQVTVLDVPDPPENLHLSERQNRSVRLTWEAGADHNSNISEYIVEFEGNKEEPGRWEELTRVQGKKTTVILPLAPFVRYQFRVIAVNEVGRSQPSQPSDHHETPPAAPDRNPQNIRVQASQPKEMIIKWEPLKSMEQNGPGLEYRVTWKPQGAPVEWEEETVTNHTLRVMTPAVYAPYDVKVQAINQLGSGPDPQSVTLYSGEDYPDTAPVIHGVDVINSTLVKVTWSTVPKDRVHGRLKGYQINWWKTKSLLDGRTHPKEVNILRFSGQRNSGMVPSLDAFSEFHLTVLAYNSKGAGPESEPYIFQTPEGVPEQPTFLKVIKVDKDTATLSWGLPKKLNGNLTGYLLQYQIINDTYEIGELNDINITTPSKPSWHLSNLNATTKYKFYLRACTSQGCGKPITEESSTLGEGSKGIGKISGVNLTQKTHPIEVFEPGAEHIVRLMTKNWGDNDSIFQDVIETRGREYAGLYDDISTQGWFIGLMCAIALLTLLLLTVCFVKRNRGGKYSVKEKEDLHPDPEIQSVKDETFGEYSDSDEKPLKGSLRSLNRDMQPTESADSLVEYGEGDHGLFSEDGSFIGAYAGSKEKGSVESNGSSTATFPLRA

SEQ ID NO: 40759 - protein, 96 aa, Homo sapiens
MEPLLLGRGLIVYLMFLLLKFSKAIEIPSSVQQVPTIIKQSKVQVAFPFDEYFQIECEAKGNPEPTFSWTKDGNPFYFTDHRIIPSNNSGTFRIPN

SEQ ID NO: 40760 - protein, 66 aa, Homo sapiens
MEPLLLGRGLIVYLMFLLLKFSKAIEIPSSVQQVPTIIKQSKVQVAFPFDEYFQIECEAKGNPEPT

SEQ ID NO: 40761 - protein, 181 aa, Homo sapiens
MEPLLLGRGLIVYLMFLLLKFSKAIEIPSSVQQVPTIIKQSKVQVAFPFDEYFQIECEAKGNPEPTFSWTKDGNPFYFTDHRIIPSNNSGTFRIPNEGHISHFQGKYRCFASNKLGIAMSEEIEFIVPSVPKFPKEKIDPLEVEEGDPIVLPCNPPKGLPPLHIYWMNIELEHIEQDERVY

SEQ ID NO: 40762 - protein, 317 aa, Homo sapiens
  VARIANT 1: note = MOD_RES - Any amino acid
XSVTLYSGEDYPDTAPVIHGVDVINSTLVKVTWSTVPKDRVHGRLKGYQINWWKTKSLLDGRTHPKEVNILRFSGQRNSGMVPSLDAFSEFHLTVLAYNSKGAGPESEPYIFQTPEGVPEQPTFLKVIKVDKDTATLSWGLPKKLNGNLTGYLLQYQIINDTYEIGELNDINITTPSKPSWHLSNLNATTKYKFYLRACTSQGCGKPITEESSTLGEGKYAGLYDDISTQGWFIGLMCAIALLTLLLLTVCFVKRNRGGKYSVKEKEDLHPDPEIQSVKDETFGEYSDSDEKPLKGSLRSLNRDMQPTESADSLVEY

SEQ ID NO: 40763 - protein, 85 aa, Homo sapiens
MEPLLLGRGLIVYLMFLLLKFSKAIEIPSSVQQVPTIIKQSKVQVAFPFDEYFQIECEAKGNPEPTFSWTKDGNPFYFTDHRIIP

SEQ ID NO: 40764 - protein, 149 aa, Homo sapiens [sequence omitted]

SEQ ID NO: 40765 - protein, 208 aa, Homo sapiens
MSSEPPPPYPGGPTAPLLEEKSGAPPTPGRSSPAVMQPPPGMPLPPADIGPPPYEPPGHPMPQPGFIPPHMSADGTYMPPGFYPPPGPHPPMGYYPPGPYTPGPYPGPGGHTATVLVPSGAATTVTVLQGEIFEGAPVQTVCPHCQQAITTKISYEIGLMNFVLGFFCCFMGCDLGCCLIPCLINDFKDVTHTCPSCKAYIYTYKRLC

SEQ ID NO: 40766 - protein, 151 aa, Homo sapiens
MAASTSMVPVAVTAAVAPVLSINSDFSDLREIKKQLLLIAGLTRERGLLHSSKWSAELAFSLPALPLAELQPPPPITEEDAQDMDAYTLAKAYFDVKEYDRAAHFLHGCNSKKAYFLYMYSRYLVRAILKCHSAFSETSIFRTNGKVKSFK

SEQ ID NO: 40767 - protein, 597 aa, Homo sapiens
MAASTSMVPVAVTAAVAPVLSINSDFSDLREIKKQLLLIAGLTRERGLLHSSKWSAELAFSLPALPLAELQPPPPITEEDAQDMDAYTLAKAYFDVKEYDRAAHFLHGCNSKKAYFLYMYSRYLSGEKKKDDETVDSLGPLEKGQVKNEALRELRVELSKKHQARELDGFGLYLYGVVLRKLDLVKEAIDVFVEATHVLPLHWGAWLELCNLITDKEMLKFLSLPDTWMKEFFLAHIYTELQLIEEALQKYQNLIDVGFSKSSYIVSQIAVAYHNIRDIDKALSIFNELRKQDPYRIENMDTFSNLLYVRSMKSELSYLAHNLCEIDKYRVETCCVIGNYYSLRSQHEKAALYFQRALKLNPRYLGAWTLMGHEYMEMKNTSAAIQAYRHAIEVNKRDYRAWYGLGQTYEILKMPFYCLYYYRRAHQLRPNDSRMLVALGECYEKLNQLVEAKKCYWRAYAVGDVEKMALVKLAKLHEQLTESEQAAQCYIKYIQDIYSCGEIVEHLEESTAFRYLAQYYFKCKLWDEASTCAQKCCAFNDTREEGKALLRQILQLRNQGETPTTEVPAPFFLPASLSANNTPTRRVSPLNLSSVTP

SEQ ID NO: 40768 - protein, 524 aa, Homo sapiens
MELGPEPPHRRRLLFACSPPPASQPVVKALFGASAAGGLSPVTNLTVTMDQLQGLGSDYEQPLEVKNNSNLQRMGSSESTDSGFCLDSPGPLDSKENLENPMRRIHSLPQKLLGCSPALKRSHSDSLDHDIFQLIDPDENKENEAFEFKKPVRPVSRGCLHSHGLQEGKDLFTQRQNSAPARMLSSNERDSSEPGNFIPLFTPQSPVTATLSDEDDGFVDLLDGENLKNEEETPSCMASLWTAPLVMRTTNLDNRCKLFDSPSLCSSSTRSVLKRPERSQEESPPGSTKRRKSMSGASPKESTNPEKAHETLHQSLSLASSPKGTIENILDNDPRDLIGDFSKGYLFHTVAGKHQDLKYISPEIMASVLNGKFANLIKEFVIIDCRYPYEYEGGHIKGAVNLHMEEEVEDFLLKKPIVPTDGKRVIVVFHCEFSSERGPRMCRYVRERDRLGNEYPKLHYPELYVLKGGYKEFFMKCQSYCEPPSYRPMHHEDFKEDLKKFRTKSRTWAGEKSKREMYSRLKKL

SEQ ID NO: 40769 - protein, 484 aa, Homo sapiens
MELGPEPPHRRRLLFACSPPPASQPVVKALFGASAAGGLSPVTNLTVTMDQLQGLGSDYEQPLEVKNNSNLQRMGSSESTDSGFCLDSPGPLDSKENLENPMRRIHSLPQKLLGCSPALKRSHSDSLDHDIFQLIDPDENKENLSSNERDSSEPGNFIPLFTPQSPVTATLSDEDDGFVDLLDGENLKNEEETPSCMASLWTAPLVMRTTNLDNRCKLFDSPSLCSSSTRSVLKRPERSQEESPPGSTKRRKSMSGASPKESTNPEKAHETLHQSLSLASSPKGTIENILDNDPRDLIGDFSKGYLFHTVAGKHQDLKYISPEIMASVLNGKFANLIKEFVIIDCRYPYEYEGGHIKGAVNLHMEEEVEDFLLKKPIVPTDGKRVIVVFHCEFSSERGPRMCRYVRERDRLGNEYPKLHYPELYVLKGGYKEFFMKCQSYCEPPSYRPMHHEDFKEDLKKFRTKSRTWAGEKSKREMYSRLKKL

SEQ ID NO: 40770 - protein, 143 aa, Homo sapiens
MELGPEPPHRRRLLFACSPPPASQPVVKALFGASAAGGLSPVTNLTVTMDQLQGLGSDYEQPLEVKNNSNLQRMGSSESTDSGFCLDSPGPLDSKENLENPMRRIHSLPQKLLGCSPALKRSHSDSLDHDIFQLIDPDENKEN

SEQ ID NO: 40771 - protein, 580 aa, Homo sapiens
MEVPQPEPAPGSALSPAGVCGGAQRPGHLPGLLLGSHGLLGSPVRAAASSPVTTLTQTMHDLAGLGSETPKSQVGTLLFRSRSRLTHLSLSRRASESSLSSESSESSDAGLCMDSPSPMDPHMAEQTFEQAIQAASRIIRNEQFAIRRFQSMPVRLLGHSPVLRNITNSQAPDGRRKSEAGSGAASSSGEDKENDGFVFKMPWKPTHPSSTHALAEWASRREAFAQRPSSAPDLMCLSPDRKMEVEELSPLALGRFSLTPAEGDTEEDDGFVDILESDLKDDDAVPPGMESLISAPLVKTLEKEEEKDLVMYSKCQRLFRSPSMPCSVIRPILKRLERPQDRDTPVQNKRRRSVTPPEEQQEAEEPKARVLRSKSLCHDEIENLLDSDHRELIGDYSKAFLLQTVDGKHQDLKYISPETMVALLTGKFSNIVDKFVIVDCRYPYEYEGGHIKTAVNLPLERDAESFLLKSPIAPCSLDKRVILIFHCEFSSERGPRMCRFIRERDRAVNDYPSLYYPEMYILKGGYKEFFPQHPNFCEPQDYRPMNHEAFKDELKTFRLKTRSWAGERSRRELCSRLQDQ

SEQ ID NO: 40772 - protein, 539 aa, Homo sapiens
MEVPQPEPAPGSALSPAGVCGGAQRPGHLPGLLLGSHGLLGSPVRAAASSPVTTLTQTMHDLAGLGSETPKSQVGTLLFRSRSRLTHLSLSRRASESSLSSESSESSDAGLCMDSPSPMDPHMAEQTFEQAIQAASRIIRNEQFAIRRFQSMPDGFVFKMPWKPTHPSSTHALAEWASRREAFAQRPSSAPDLMCLSPDRKMEVEELSPLALGRFSLTPAEGDTEEDDGFVDILESDLKDDDAVPPGMESLISAPLVKTLEKEEEKDLVMYSKCQRLFRSPSMPCSVIRPILKRLERPQDRDTPVQNKRRRSVTPPEEQQEAEEPKARVLRSKSLCHDEIENLLDSDHRELIGDYSKAFLLQTVDGKHQDLKYISPETMVALLTGKFSNIVDKFVIVDCRYPYEYEGGHIKTAVNLPLERDAESFLLKSPIAPCSLDKRVILIFHCEFSSERGPRMCRFIRERDRAVNDYPSLYYPEMYILKGGYKEFFPQHPNFCEPQDYRPMNHEAFKDELKTFRLKTRSWAGERSRRELCSRLQDQ

SEQ ID NO: 40773 - protein, 516 aa, Homo sapiens
MHSETPKSQVGTLLFRSRSRLTHLSLSRRASESSLSSESSESSDAGLCMDSPSPMDPHMAEQTFEQAIQAASRIIRNEQFAIRRFQSMPVRLLGHSPVLRNITNSQAPDGRRKSEAGSGAASSSGEDKENDGFVFKMPWKPTHPSSTHALAEWASRREAFAQRPSSAPDLMCLSPDRKMEVEELSPLALGRFSLTPAEGDTEEDDGFVDILESDLKDDDAVPPGMESLISAPLVKTLEKEEEKDLVMYSKCQRLFRSPSMPCSVIRPILKRLERPQDRDTPVQNKRRRSVTPPEEQQEAEEPKARVLRSKSLCHDEIENLLDSDHRELIGDYSKAFLLQTVDGKHQDLKYISPETMVALLTGKFSNIVDKFVIVDCRYPYEYEGGHIKTAVNLPLERDAESFLLKSPIAPCSLDKRVILIFHCEFSSERGPRMCRFIRERDRAVNDYPSLYYPEMYILKGGYKEFFPQHPNFCEPQDYRPMNHEAFKDELKTFRLKTRSWAGERSRRELCSRLQDQ

SEQ ID NO: 40774 - protein, 489 aa, Homo sapiens
MHSETPKSQVGTLLFRSRSRLTHLSLSRRASESSLSSESSESSDAGLCMDSPSPMDPHMAEQTFEQAIQAASRIIRNEQFAIRRFQSMPVRLLGHSPVLRNITNSQAPDGRRKSEAGSGAASSSGEDKENDGFVFKMPWKPTHPSSTHALAEWASRREAFAQRPSSAPDLMCLSPDRKMEVEELSPLALGRFSLTPAEGDTEEDDGFVDILESDLKDLVMYSKCQRLFRSPSMPCSVIRPILKRLERPQDRDTPVQNKRRRSVTPPEEQQEAEEPKARVLRSKSLCHDEIENLLDSDHRELIGDYSKAFLLQTVDGKHQDLKYISPETMVALLTGKFSNIVDKFVIVDCRYPYEYEGGHIKTAVNLPLERDAESFLLKSPIAPCSLDKRVILIFHCEFSSERGPRMCRFIRERDRAVNDYPSLYYPEMYILKGGYKEFFPQHPNFCEPQDYRPMNHEAFKDELKTFRLKTRSWAGERSRRELCSRLQDQ

SEQ ID NO: 40775 - protein, 566 aa, Homo sapiens
MEVPQPEPAPGSALSPAGVCGGAQRPGHLPGLLLGSHGLLGSPVRAAASSPVTTLTQTMHDLAGLGSRSRLTHLSLSRRASESSLSSESSESSDAGLCMDSPSPMDPHMAEQTFEQAIQAASRIIRNEQFAIRRFQSMPVRLLGHSPVLRNITNSQAPDGRRKSEAGSGAASSSGEDKENDGFVFKMPWKPTHPSSTHALAEWASRREAFAQRPSSAPDLMCLSPDRKMEVEELSPLALGRFSLTPAEGDTEEDDGFVDILESDLKDDDAVPPGMESLISAPLVKTLEKEEEKDLVMYSKCQRLFRSPSMPCSVIRPILKRLERPQDRDTPVQNKRRRSVTPPEEQQEAEEPKARVLRSKSLCHDEIENLLDSDHRELIGDYSKAFLLQTVDGKHQDLKYISPETMVALLTGKFSNIVDKFVIVDCRYPYEYEGGHIKTAVNLPLERDAESFLLKSPIAPCSLDKRVILIFHCEFSSERGPRMCRFIRERDRAVNDYPSLYYPEMYILKGGYKEFFPQHPNFCEPQDYRPMNHEAFKDELKTFRLKTRSWAGERSRRELCSRLQDQ

SEQ ID NO: 40776 - protein, 824 aa, Homo sapiens
MTVLQEPVQAAIWQALNHYAYRDAVFLAERLYAEVHSEEALFLLATCYYRSGKAYKAYRLLKGHSCTTPQCKYLLAKCCVDLSKLAEGEQILSGGVFNKQKSHDDIVTEFGDSACFTLSLLGHVYCKTDRLAKGSECYQKSLSLNPFLWSPFESLCEIGEKPDPDQTFKFTSLQNFSNCLPNSCTTQVPNHSLSHRQPETVLTETPQDTIELNRLNLESSNSKYSLNTDSSVSYIDSAVISPDTVPLGTGTSILSKQVQNKPKTGRSLLGGPAALSPLTPSFGILPLETPSPGDGSYLQNYTNTPPVIDVPSTGAPSKKSVARIGQTGTKSVFSQSGNSREVTPILAQTQSSGPQTSTTPQVLSPTITSPPNALPRRSSRLFTSDSSTTKENSKKLKMKFPPKIPNRKTKSKTNKGGITQPNINDSLEITKLDSSIISEGKISTITPQIQAFNLQKAAAEGLMSLLREMGKGYLALCSYNCKEAINILSHLPSHHYNTGWVLCQIGRAYFELSEYMQAERIFSEVRRIENYRVEGMEIYSTTLWHLQKDVALSVLSKDLTDMDKNSPEAWCAAGNCFSLQREHDIAIKFFQRAIQVDPNYAYAYTLLGHEFVLTEELDKALACFRNAIRVNPRHYNAWYGLGMIYYKQEKFSLAEMHFQKALDINPQSSVLLCHIGVVQHALKKSEKALDTLNKAIVIDPKNPLCKFHRASVLFANEKYKSALQELEELKQIVPKESLVYFLIGKVYKKLGQTHLALMNFSWAMDLDPKGANNQIKEAIDKRYLPDDEEPITQEEQIMGTDESQESSMTDADDTQLHAAESDEF

SEQ ID NO: 40777 - protein, 763 aa, Homo sapiens
MASTKPLCLPRCGFPRRTPLCRRLAEGEQILSGGVFNKQKSHDDIVTEFGDSACFTLSLLGHVYCKTDRLAKGSECYQKSLSLNPFLWSPFESLCEIGEKPDPDQTFKFTSLQNFSNCLPNSCTTQVPNHSLSHRQPETVLTETPQDTIELNRLNLESSNSKYSLNTDSSVSYIDSAVISPDTVPLGTGTSILSKQVQNKPKTGRSLLGGPAALSPLTPSFGILPLETPSPGDGSYLQNYTNTPPVIDVPSTGAPSKKSVARIGQTGTKSVFSQSGNSREVTPILAQTQSSGPQTSTTPQVLSPTITSPPNALPRRSSRLFTSDSSTTKENSKKLKMKFPPKIPNRKTKSKTNKGGITQPNINDSLEITKLDSSIISEGKISTITPQIQAFNLQKAAAEGLMSLLREMGKGYLALCSYNCKEAINILSHLPSHHYNTGWVLCQIGRAYFELSEYMQAERIFSEVRRIENYRVEGMEIYSTTLWHLQKDVALSVLSKDLTDMDKNSPEAWCAAGNCFSLQREHDIAIKFFQRAIQVDPNYAYAYTLLGHEFVLTEELDKALACFRNAIRVNPRHYNAWYGLGMIYYKQEKFSLAEMHFQKALDINPQSSVLLCHIGVVQHALKKSEKALDTLNKAIVIDPKNPLCKFHRASVLFANEKYKSALQELEELKQIVPKESLVYFLIGKVYKKLGQTHLALMNFSWAMDLDPKGANNQIKEAIDKRYLPDDEEPITQEEQIMGTDESQESSMTDADDTQLHAAESDEF

SEQ ID NO: 40778 - protein, 823 aa, Homo sapiens
MTVLQEPVQAAIWQALNHYAYRDAVFLAERLYAEVHSEEALFLLATCYYRSGKAYKAYRLLKGHSCTTPQCKYLLAKCCVDLSKLAEGEQILSGGVFNKQKSHDDIVTEFGDSACFTLSLLGHVYCKTDRLAKGSECYQKSLSLNPFLWSPFESLCEIGEKPDPDQTFKFTSLQNFSNCLPNSCTTQVPNHSLSHRQPETVLTETPQDTIELNRLNLESSNSKYSLNTDSSVSYIDSAVISPDTVPLGTGTSILSKQVQNKPKTGRSLLGGPAALSPLTPSFGILPLETPSPGDGSYLQNYTNTPPVIDVPSTGAPSKKSVARIGQTGTKSVFSQSGNSREVTPILAQTQSSGPQTSTTPQVLSPTITSPPNALPRRSSRLFTSDSSTTKENSKKLKMKFPPKIPNRKTKSKTNKGGITQPNINDSLEITKLDSSIISEGKISTITPQIQAFNLQKAAAGLMSLLREMGKGYLALCSYNCKEAINILSHLPSHHYNTGWVLCQIGRAYFELSEYMQAERIFSEVRRIENYRVEGMEIYSTTLWHLQKDVALSVLSKDLTDMDKNSPEAWCAAGNCFSLQREHDIAIKFFQRAIQVDPNYAYAYTLLGHEFVLTEELDKALACFRNAIRVNPRHYNAWYGLGMIYYKQEKFSLAEMHFQKALDINPQSSVLLCHIGVVQHALKKSEKALDTLNKAIVIDPKNPLCKFHRASVLFANEKYKSALQELEELKQIVPKESLVYFLIGKVYKKLGQTHLALMNFSWAMDLDPKGANNQIKEAIDKRYLPDDEEPITQEEQIMGTDESQESSMTDADDTQLHAAESDEF

SEQ ID NO: 40779 - protein, 830 aa, Homo sapiens
MTVLQEPVQAAIWQALNHYAYRDAVFLAERLYAEVHSEEALFLLATCYYRSGKAYKAYRLLKGHSCTTPQCKYLLAKCCVDLSKLAEGEQILSGGVFNKQKSHDDIVTEFGDSACFTLSLLGHVYCKTDRLAKGSECYQKSLSLNPFLWSPFESLCEIGEKPDPDQTFKFTSLQNFSNCLPNSCTTQVPNHSLSHRQPETVLTETPQDTIELNRLNLESSNSKYSLNTDSSVSYIDSAVISPDTVPLGTGTSILSKQVQNKPKTGRSLLGGPAALSPLTPSFGILPLETPSPGDGSYLQNYTNTPPVIDVPSTGAPSKKTFRVLQSVARIGQTGTKSVFSQSGNSREVTPILAQTQSSGPQTSTTPQVLSPTITSPPNALPRRSSRLFTSDSSTTKENSKKLKMKFPPKIPNRKTKSKTNKGGITQPNINDSLEITKLDSSIISEGKISTITPQIQAFNLQKAAAEGLMSLLREMGKGYLALCSYNCKEAINILSHLPSHHYNTGWVLCQIGRAYFELSEYMQAERIFSEVRRIENYRVEGMEIYSTTLWHLQKDVALSVLSKDLTDMDKNSPEAWCAAGNCFSLQREHDIAIKFFQRAIQVDPNYAYAYTLLGHEFVLTEELDKALACFRNAIRVNPRHYNAWYGLGMIYYKQEKFSLAEMHFQKALDINPQSSVLLCHIGVVQHALKKSEKALDTLNKAIVIDPKNPLCKFHRASVLFANEKYKSALQELEELKQIVPKESLVYFLIGKVYKKLGQTHLALMNFSWAMDLDPKGANNQIKEAIDKRYLPDDEEPITQEEQIMGTDESQESSMTDADDTQLHAAESDEF

SEQ ID NO: 40780 - protein, 579 aa, Homo sapiens
MSAAIAALAASYGSGSGSESDSDSESSRCPLPAADSLMHLTKSPSSKPSLAVAVDSAPEVAVKEDLETGVHLDPAVKEVQYNPTYETMFAPEFGPENPFRTQQMAAPRNMLSGYAEPAHINDFMFEQQRRTFATYGYALDPSLDNHQVSAKYIGSVEEAEKNQGLTVFETGQKKTEKRKKFKENDASNIDGFLGPWAKYVDEKDVAKPSEEEQKELDEITAKRQKKGKQEEEKPGEEKTILHVKEMYDYQGRSYLHIPQDVGVNLRSTMPPEKCYLPKKQIHVWSGHTKGVSAVRLFPLSGHLLLSCSMDCKIKLWEVYGERRCLRTFIGHSKAVRDICFNTAGTQFLSAAYDRYLKLWDTETGQCISRFTNRKVPYCVKFNPDEDKQNLFVAGMSDKKIVQWDIRSGEIVQEYDRHLGAVNTIVFVDENRRFVSTSDDKSLRVWEWDIPVDFKYIAEPSMHSMPAVTLSPNGKWLACQSMDNQILIFGAQNRFRLNKKKIFKGHMVAGYACQVDFSPDMSYVISGDGNGKLNIWDWKTTKLYSRFKAHDKVCIGAVWHPHETSKVITCGWDGLIKLWD

SEQ ID NO: 40781 - protein, 539 aa, Homo sapiens
MSAAIAALAASYGSGSGSESDSDSESSRCPLPAADSLMHLTKSPSSKPSLAVAVDSAPEVAVKEDLETGVHLDPAVKEVQYNPTYETMFAPEFGPENPFRTQQMAAPRNMLSGYAEPAHINDFMFEQQRRTFATYGYALDPSLDNHQVSAKYIGSVEEAEKNQGLTVFETGQKKTEKRKKFKENDASNIDGFLGPWAKYVDEKDVAKPSEEEQKELDEITAKRQKKGKQEEEKPGEEKTILHVKEMYDYQGRSYLHIPQDVGVNLRSTMPPEKCYLPKKQIHVWSGHTKGVSAVRLFPLSGHLLLSCSMDCKIKLWEVYGERRCLRTFIGHSKAVRDICFNTAGTQFLSAAYDRYLKLWDTETGQCISRFTNRKVPYCVKFNPDEDKQNLFVAGMSDKKIVQWDIRSGEIVQEYDRHLGAVNTIVFVDENRRFVSTSDDKSLRVWEWDIPVDFKYIAEPSMHSMPAVTLSPNGKWLACQSMDNQILIFGAQNRFRLNKKKIFKGHMVAGYACQVDFSPDMRVPQSFQNLKEVTAGPQEG

SEQ ID NO: 40782 - protein, 579 aa, Homo sapiens; identical to SEQ ID NO: 40780

SEQ ID NO: 40783 - protein, 539 aa, Homo sapiens; identical to SEQ ID NO: 40781

SEQ ID NO: 40784 - protein, 125 aa, Homo sapiens
  VARIANT 1: note = MOD_RES - Any amino acid
XNMLSGYAEPAHINDFMFEQQRRTFATYGYALDPSLDNHQVSAKYIGSVEEAEKNQGLTVFETGQKKTEKRKKFKENDASNIDGFLGPWAKYVDEKDVAKPSEVSFDVFNCQFRYTLYLYEGYLH

SEQ ID NO: 40785 - protein, 164 aa, Homo sapiens [sequence omitted]

SEQ ID NO: 40786 - protein, 70 aa, Homo sapiens
MAAPRNMLSGYAEPAHINDFMFEQQRRTFATYGYALDPSLDNHQVSAKYIGSVEEAEKNQGLTVFETGQK

SEQ ID NO: 40787 - protein, 574 aa, Homo sapiens
MEASLGIQMDEPMAFSPQRDRFQAEGSLKKNEQNFKLAGVKKDIEKLYEAVPQLSNVFKIEDKIGEGTFSSVYLATAQLQVGPEEKIALKHLIPTSHPIRIAAELQCLTVAGGQDNVMGVKYCFRKNDHVVIAMPYLEHESFLDILNSLSFQEVREYMLNLFKALKRIHQFGIVHRDVKPSNFLYNRRLKKYALVDFGLAQGTHDTKIELLKFVQSEAQQERCSQNKSHIITGNKIPLSGPVPKELDQQSTTKASVKRPYTNAQIQIKQGKDGKEGSVGLSVQRSVFGERNFNIHSSISHESPAVKLMKQSKTVDVLSRKLATKKKAISTKVMNSAVMRKTASSCPASLTCDCYATDKVCSICLSRRQQVAPRAGTPGFRAPEVLTKCPNQTTAIDMWSAGVIFLSLLSGRYPFYKASDDLTALAQIMTIRGSRETIQAAKTFGKSILCSKEVPAQDLRKLCERLRGMDSSTPKLTSDIQGHASHQPAISEKTDHKASCLVQTPPGQYSGNSFKKGDSNSCEHCFDEYNTNLEGWNEVPDEAYDLLDKLLDLNPASRITAEEALLHPFFKDMSL

SEQ ID NO: 40788 - protein, 119 aa, Homo sapiens
MRKTASSCPASLTCDCYATDKVCSICLSRRQQVAPRAGTPGFRAPEVLTKCPNQTTGKSILCSKEVPAQDLRKLCERLRGMDSSTPKLTSDIQGHASHQPAISEKTDHKASCLVQTPPG

SEQ ID NO: 40789 - protein, 157 aa, Homo sapiens
MEASLGIQMDEPMAFSPQRDRFQAEGSLKKNEQNFKLAGVKKDIEKLYEAVPQLSNVFKIEDKIGEGTFSSVYLATAQLQVGPEEKIALKHLIPTSHPIRIAAELQCLTVAGGQDNVMGVKYCFRKNDHVVIAMPYLEHESFLDILNSLSFQEVREY

SEQ ID NO: 40790 - protein, 574 aa, Homo sapiens; identical to SEQ ID NO: 40787

SEQ ID NO: 40791 - protein, 546 aa, Homo sapiens
MEASLGIQMDEPMAFSPQRDRFQAEGSLKKNEQNFKLAGTFSSVYLATAQLQVGPEEKIALKHLIPTSHPIRIAAELQCLTVAGGQDNVMGVKYCFRKNDHVVIAMPYLEHESFLDILNSLSFQEVREYMLNLFKALKRIHQFGIVHRDVKPSNFLYNRRLKKYALVDFGLAQGTHDTKIELLKFVQSEAQQERCSQNKSHIITGNKIPLSGPVPKELDQQSTTKASVKRPYTNAQIQIKQGKDGKEGSVGLSVQRSVFGERNFNIHSSISHESPAVKLMKQSKTVDVLSRKLATKKKAISTKVMNSAVMRKTASSCPASLTCDCYATDKVCSICLSRRQQVAPRAGTPGFRAPEVLTKCPNQTTAIDMWSAGVIFLSLLSGRYPFYKASDDLTALAQIMTIRGSRETIQAAKTFGKSILCSKEVPAQDLRKLCERLRGMDSSTPKLTSDIQGHASHQPAISEKTDHKASCLVQTPPGQYSGNSFKKGDSNSCEHCFDEYNTNLEGWNEVPDEAYDLLDKLLDLNPASRITAEEALLHPFFKDMSL

SEQ ID NO: 40792 - protein, 1150 aa, Homo sapiens
MAQFGGQKNPPWATQFTATAVSQPAALGVQQPSLLGASPTIYTQQTALAAAGLTTQTPANYQLTQTAALQQQAAAAAAALQQQYSQPQQALYSVQQQLQQPQQTLLTQPAVALPTSLSLSTPQPTAQITVSYPTPRSSQQQTQPQKQRVFTGVVTKLHDTFGFVDEDVFFQLSAVKGKTPQVGDRVLVEATYNPNMPFKWNAQRIQTLPNQNQSQTQPLLKTPPAVLQPIAPQTTFGVQTQPQPQSLLQAQISAASITPLLQTQPQPLLQQPQQKAGLLQPPVRIVSQPQPARRLDPPSRFSGRNDRGDQVPNRKDDRSRERERERRRSRERSPQRKRSRERSPRRERERSPRRVRRVVPRYTVQFSKFSLDCPSCDMMELRRRYQNLYIPSDFFDAQFTWVDAFPLSRPFQLGNYCNFYVMHREVESLEKNMAILDPPDADHLYSAKVMLMASPSMEDLYHKSCALAEDPQELRDGFQHPARLVKFLVGMKGKDEAMAIGGHWSPSLDGPDPEKDPSVLIKTAIRCCKALTGIDLSVCTQWYRFAEIRYHRPEETHKGRTVPAHVETVVLFFPDVWHCLPTRSEWETLSRGYKQQLVEKLQGERKEADGEQDEEEKDDGEAKEISTPTHWSKLDPKTMKVNDLRKELESRALSSKGLKSQLIARLTKQLKVEEQKEEQKELEKSEKEEDEDDDRKSEDDKEEEERKRQEEIERQRRERRYILPDEPAIIVHPNWAAKSGKFDCSIMSLSVLLDYRLEDNKEHSFEVSLFAELFNEMLQRDFGVRIYKSLLSLPEKEDKKEKDKKSKKDERKDKKEERDDETDEPKPKRRKSGDDKDKKEDRDERKKEDKRKDDSKDDDETEEDNNQDEYDPMEAEEAEDEEDDRDEEEMTKRDDKRDINRYCKERPSKDKEKEKTQMITINRDLLMAFVYFDQSHCGYLLEKDLEEILYTLGLHLSRAQVKKLLNKVVLRESCFYRKLTDTSKDEENHEESESLQEDMLGNRLLLPTPTVKQESKDVEENVGLIVYNGAMVDVGSLLQKLEKSEKVRAEVEQKLQLLEEKTDEDEKTILNLENSNKSLSGELREVKKDLSQLQENLKISENMNLQFENQMNKTIRNLSTVMDEIHTVLKKDNVKNEDKDQKSKENGASV

SEQ ID NO: 40793 - protein, 1135 aa, Homo sapiens
MAQFGGQKNPPWATQFTATAVSQPAALGVQQPSLLGASPTIYTQQTALAAAGLTTQTPANYQLTQTAALQQQAAAAAAALQQLQQPQQTLLTQPAVALPTSLSLSTPQPTAQITVSYPTPRSSQQQTQPQKQRVFTGVVTKLHDTFGFVDEDVFFQLSAVKGKTPQVGDRVLVEATYNPNMPFKWNAQRIQTLPNQNQSQTQPLLKTPPAVLQPIAPQTTFGVQTQPQPQSLLQAQISAASITPLLQTQPQPLLQQPQQKAGLLQPPVRIVSQPQPARRLDPPSRFSGRNDRGDQVPNRKDDRSRERERERRRSRERSPQRKRSRERSPRRERERSPRRVRRVVPRYTVQFSKFSLDCPSCDMMELRRRYQNLYIPSDFFDAQFTWVDAFPLSRPFQLGNYCNFYVMHREVESLEKNMAILDPPDADHLYSAKVMLMASPSMEDLYHKSCALAEDPQELRDGFQHPARLVKFLVGMKGKDEAMAIGGHWSPSLDGPDPEKDPSVLIKTAIRCCKALTGIDLSVCTQWYRFAEIRYHRPEETHKGRTVPAHVETVVLFFPDVWHCLPTRSEWETLSRGYKQQLVEKLQGERKEADGEQDEEEKDDGEAKEISTPTHWSKLDPKTMKVNDLRKELESRALSSKGLKSQLIARLTKQLKVEEQKEEQKELEKSEKEEDEDDDRKSEDDKEEEERKRQEEIERQRRERRYILPDEPAIIVHPNWAAKSGKFDCSIMSLSVLLDYRLEDNKEHSFEVSLFAELFNEMLQRDFGVRIYKSLLSLPEKEDKKEKDKKSKKDERKDKKEERDDETDEPKPKRRKSGDDKDKKEDRDERKKEDKRKDDSKDDDETEEDNNQDEYDPMEAEEAEDEEDDRDEEEMTKRDDKRDINRYCKERPSKDKEKEKTQMITINRDLLMAFVYFDQSHCGYLLEKDLEEILYTLGLHLSRAQVKKLLNKVVLRESCFYRKLTDTSKDEENHEESESLQEDMLGNRLLLPTPTVKQESKDVEENVGLIVYNGAMVDVGSLLQKLEKSEKVRAEVEQKLQLLEEKTDEDEKTILNLENSNKSLSGELREVKKDLSQLQENLKISENMNLQFENQMNKTIRNLSTVMDEIHTVLKKDNVKNEDKDQKSKENGASV

SEQ ID NO: 40794 - protein, 119 aa, Homo sapiens
MAQFGGQKNPPWATQFTATAVSQPAALGVQQPSLLGASPTIYTQQTALAAAGLTTQTPANYQLTQTAALQQQAAAAAAALQQQYSQPQQALYSVQQQLQQPQQTLLTQPAVALPTSLSL

SEQ ID NO: 40795 - protein, 171 aa, Homo sapiens
MAQFGGQKNPPWATQFTATAVSQPAALGVQQPSLLGASPTIYTQQTALAAAGLTTQTPANYQLTQTAALQQQAAAAAAALQQQYSQPQQALYSVQQQLQQPQQTLLTQPAVALPTSLSLSTPQPTAQITVSYPTPRSSQQQTQPQKQRVFTGVVTKLHDTFGFVDEDVFFQ

SEQ ID NO: 40796 - protein, 1043 aa, Homo sapiens
MAQFGGQKNPPWATQFTATAVSQPAALGVQQPSLLGASPTIYTQQTALAAAGLTTQTPANYQLTQTAALQQQAAAAAAALQQLQQPQQTLLTQPAVALPTSLSLSTPQPTAQITVSYPTPRSSQQQTQPQKQRVFTGVVTKLHDTFGFVDEDVFFQLSAVKGKTPQVGDRVLVEATYNPNMPFKWNAQRIQTLPNQNQSQTQPLLKTPPAVLQPIAPQTTFGVQTQPQPQSLLQAQISAASITPLLQTQPQPLLQQPQQKAGLLQPPVRIVSQPQPARRLDPPSRFSGRNDRGDQVPNRKDDRSRERERERRRSRERSPQRKRSRERSPRRERERSPRRVRRVVPRYTVQFSKFSLDCPSCDMMELRRRYQNLYIPSDFFDAQFTWVDAFPLSRPFQLGNYCNFYVMHREVESLEKNMAILDPPDADHLYSAKVMLMASPSMEDLYHKSCALAEDPQELRDGFQHPARLVKFLVGMKGKDEAMAIGGHWSPSLDGPDPEKDPSVLIKTAIRCCKALTGIDLSVCTQWYRFAEIRYHRPEETHKGRTVPAHVETVVLFFPDVWHCLPTRSEWETLSRGYKQQLVEKLQGERKEADGEQDEEEKDDGEAKEISTPTHWSKLDPKTMKVNDLRKELESRALSSKGLKSQLIARLTKQLKVEEQKEEQKELEKSEKEEDEDDDRKSEDDKEEEERKRQEEIERQRRERRYILPDEPAIIVHPNWAAKSGKFDCSIMSLSVLLDYRLEDNKEHSFEVSLFAELFNEMLQRDFGVRIYKSLLSLPEKEDKKEKDKKSKKDERKDKKEERDDETDEPKPKRRKSGDDKDKKEDRDERKKEDKRKDDSKDDDETEEDNNQDEYDPMEAEEAEDEEDDRDEEEMTKRDDKRDINRYCKERPSKDKEKEKTQMITINRDLLMAFVYFDQSHCGYLLEKDLEEILYTLGLHLSRAQVKKLLNKVVLRESCFYRKLTDTSKDEENHEESESLQEDMLGNRLLLPTPTVKQESKDVEENVGLIVYNGAMVDVGSLLQKLEKSEKVRAEVEQKLQLL

SEQ ID NO: 40797 - protein, 241 aa, Homo sapiens
MFARGLKRKCVGHEEDVEGALAGLKTVSSYSLQRQSLLDMSLVKLQLCHMLVEPNLCRSVLIANTVRQIQEEMTQDGTWRTVAPQAAERAPLDRLVSTEILCRAAWGQEGAHPAPGLGDGHTQGPVSDLCPVTSAQAPRHLQSSAWEMDGPRENRGSFHKSLDQIFETLETKNPSCMEELFSDVDSPYYDLDTVLTGMMGGARPGPCEGLEGLAPATPGPSSSCKSDLGELDHVVEILVET

SEQ ID NO: 40798 - protein, 241 aa, Homo sapiens; identical to SEQ ID NO: 40797

SEQ ID NO: 40799 - protein, 252 aa, Homo sapiens
MSGRRTRSGGAAQRSGPRAPSPTKPLRRSQRKSGSELPSILPEIWPKTPSAAAVRKPIVLKRIVAHAVEVPAVQSPRRSPRISFFLEKENEPPGRELTKEDLFKTHSVPATPTSTPVPNPEAESSSKEGELDARDLEMSKKVRRSYSRLETLGSASTSTPGRRSCFGFEGLLGAEDLSGVSPVVCSKLTEVPRVCAKPWAPDMTLPGISPPPEKQKRKKKKMPEILKTELDEWAAAMNAEFEAAEQFDLLVE

SEQ ID NO: 40800 - protein, 71 aa, Homo sapiens
QFLDQEDWGPQRTSKEIRQLQNDCMRLRESLNTTQVHNLALGEKLQNLPTLLYKSLKEGAQAIQEEAQAIQ

SEQ ID NO: 40801 - protein, 450 aa, Homo sapiens
MDARRVPQKDLRVKKNLKKFRYVKLISMETSSSSDDSCDSFASDNFANTKPKFRSDISEELANVFYEDSDNESFCGFSESEVQDVLDHCGFLQKPRPDVTNELAGIFHADSDDESFCGFSESEIQDGMRLQSVREGCRTRSQCRHSGPLRVAMKFPARSTRGATNKKAESRQPSENSVTDSNSDSEDESGMNFLEKRALNIKQNKAMLAKLMSELESFPGSFRGRHPLPGSDSQSRRPRRRTFPGVASRRNPERRARPLTRSRSRILGSLDALPMEEEEEEDKYMLVRKRKTVDGYMNEDDLPRSRRSRSSVTLPHIIRPVEEITEEELENVCSNSREKIYNRSLGSTCHQCRQKTIDTKTNCRNPDCWGVRGQFCGPCLRNRYGEEVRDALLDPNWHCPPCRGICNCSFCRQRDGRCATGVLVYLAKYHGFGNVHAYLKSLKQEFEMQA

SEQ ID NO: 40802 - protein, 371 aa, Homo sapiens
MDARRVPQKDLRVKKNLKKFRYVKLISMETSSSSDDSCDSFASDNFANTRLQSVREGCRTRSQCRHSGPLRVAMKFPARSTRGATNKKAESRQPSENSVTDSNSDSEDESGMNFLEKRALNIKQNKAMLAKLMSELESFPGSFRGRHPLPGSDSQSRRPRRRTFPGVASRRNPERRARPLTRSRSRILGSLDALPMEEEEEEDKYMLVRKRKTVDGYMNEDDLPRSRRSRSSVTLPHIIRPVEEITEEELENVCSNSREKIYNRSLGSTCHQCRQKTIDTKTNCRNPDCWGVRGQFCGPCLRNRYGEEVRDALLDPNWHCPPCRGICNCSFCRQRDGRCATGVLVYLAKYHGFGNVHAYLKSLKQEFEMQA

SEQ ID NO: 40803 - protein, 321 aa, Homo sapiens
MDARRVPQKDLRVKKNLKKFRYVKLISMETSSSSDDSCDSFASDNFANTRLQSVREGCRTRSQCRHSGPLRVAMKFPARSTRGATNKKAESRQPSENSVTDSNSDSEDESGMNFLEKRALNIKQNKAMLAKLMSELESFPGSFRGRHPLPGSDSQSRRPRRRTFPGVASRRNPERRARPLTRSRSRILGSLDALPMEEEEEEDKYMLVRKRKTVDGYMNEDDLPRSRRSRSSVTLPHIIRPVEEITEEELENVCSNSREKIYNRSLNWHCPPCRGICNCSFCRQRDGRCATGVLVYLAKYHGFGNVHAYLKSLKQEFEMQA

SEQ ID NO: 40804 - protein, 420 aa, Homo sapiens
METLSSEESCDSFDSLESGKQQDVRFHSKYFTEELRRIFIEDTDSETEDFAGFTQSDLNGKTNPEVMVVESDLSDDGKASLVSEEEEDEEEDKATPRRSRSRRSSIGLRVAFQFPTKKLANKPDKNSSSEQLFSSARLQNEKKTILERKKDCRQVIQREDSTSESEDDSRDESQESSDALLKRTMNIKENKAMLAQLLAELNSMPDFFPVRTPTSASRKKTVRRAFSEGQITRRMNPTRSARPPEKFALENFTVSAAKFAEEFYSFRRRKTIGGKCREYRRRHRISSFRPVEDITEEDLENVAITVRDKIYDKVLGNTCHQCRQKTIDTKTVCRNQGCCGVRGQFCGPCLRNRYGEDVRSALLDPDWVCPPCRGICNCSYCRKRDGRCATGILIHLAKFYGYDNVKEYLESLQKELVEDN

SEQ ID NO: 40805 - protein, 408 aa, Homo sapiens
MELATRYQIPKEVADIFNAPSDDEEFVGFRDDVPMETLSSEESCDSFDSLESGKQVVESDLSDDGKASLVSEEEEDEEEDKATPRRSRSRRSSIGLRVAFQFPTKKLANKPDKNSSSEQLFSSARLQNEKKTILERKKDCRQVIQREDSTSESEDDSRDESQESSDALLKRTMNIKENKAMLAQLLAELNSMPDFFPVRTPTSASRKKTVRRAFSEGQITRRMNPTRSARPPEKFALENFTVSAAKFAEEFYSFRRRKTIGGKCREYRRRHRISSFRPVEDITEEDLENVAITVRDKIYDKVLGNTCHQCRQKTIDTKTVCRNQGCCGVRGQFCGPCLRNRYGEDVRSALLDPDWVCPPCRGICNCSYCRKRDGRCATGILIHLAKFYGYDNVKEYLESLQKELVEDN

SEQ ID NO: 40806 - protein, 454 aa, Homo sapiens
MELATRYQIPKEVADIFNAPSDDEEFVGFRDDVPMETLSSEESCDSFDSLESGKQQDVRFHSKYFTEELRRIFIEDTDSETEDFAGFTQSDLNGKTNPEVMVVESDLSDDGKASLVSEEEEDEEEDKATPRRSRSRRSSIGLRVAFQFPTKKLANKPDKNSSSEQLFSSARLQNEKKTILERKKDCRQVIQREDSTSESEDDSRDESQESSDALLKRTMNIKENKAMLAQLLAELNSMPDFFPVRTPTSASRKKTVRRAFSEGQITRRMNPTRSARPPEKFALENFTVSAAKFAEEFYSFRRRKTIGGKCREYRRRHRISSFRPVEDITEEDLENVAITVRDKIYDKVLGNTCHQCRQKTIDTKTVCRNQGCCGVRGQFCGPCLRNRYGEDVRSALLDPDWVCPPCRGICNCSYCRKRDGRCATGILIHLAKFYGYDNVKEYLESLQKELVEDN

SEQ ID NO: 40807 - protein, 96 aa, Homo sapiens
METLSSEESCDSFDSLESGKQQDVRFHSKYFTEELRRIFIEDTDSETEDFAGFTQSDLNGKTNPEVMVVESDLSDDGKASLVSEEEEDEEEDKATP

SEQ ID NO: 40808 - protein, 280 aa, Homo sapiens
MAPRKGSSRVAKTNSLRRRKLASFLKDFDREVEIRIKQIESDRQNLLKEVDNLYNIEILRLPKALREMNWLDYFALGGNKQALEEAATADLDITEINKLTAEAIQTPLKSAKTRKVIQVDEMIVEEEEEEENERKNLQTARVKRCPPSKKRTQSIQGKGKGKRSSRANTVTPAVGRLEVSMVKPTPGLTPRFDSRVFKTPGLRTPAAGERIYNISGNGSPLADSKEIFLTVPVGGGESLRLLASDLQRHSIAQLDPEALGNIKKLSNRLAQICSSIRTHK

SEQ ID NO: 40809 - protein, 280 aa, Homo sapiens; identical to SEQ ID NO: 40808

SEQ ID NO: 40810 - protein, 137 aa, Homo sapiens
MPNFAGTWKMRSSENFDELLKALGVNAMLRKVAVAAASKPHVEIRQDGDQFYIKTSTTVRTTEINFKVGEGFEEETVDGRKCRSLATWENENKIHCTQTLLEGDGPKTYWTRELANDELILTFGADDVVCTRIYVRE

SEQ ID NO: 40811 - protein, 82 aa, Homo sapiens
MPNFSGNWKIIRSENFEELLKVLGVNVMLRKIAVAAASKPAVEIKQEGDTFYIKTSTTVRTTEINFKVGEEFEEQTVDGRPC

SEQ ID NO: 40812 - protein, 138 aa, Homo sapiens
MPNFSGNWKIIRSENFEELLKVLGVNVMLRKIAVAAASKPAVEIKQEGDTFYIKTSTTVRTTEINFKVGEEFEEQTVDGRPCKSLVKWESENKMVCEQKLLKGEGPKTSWTRELTNDGELILTMTADDVVCTRVYVRE

SEQ ID NO: 40813 - protein, 138 aa, Homo sapiens; identical to SEQ ID NO: 40812

SEQ ID NO: 40814 - protein, 247 aa, Homo sapiens
MGTSSTDSQQAGHRRCSTSNTSAENLTCLSLPGSPGKTAPLPGPAQAGAGQPLPKGCAAVKAEVGIPAPHTSQEVRIHIRRLLSWAAPGACGLRSTPCALPQALPQARPCPGRWFFPGCSLPTGGAQTILSLWTWRHFLNWALQQREENSGRARRVPPVPRTAPVSKGEGSHPPQNSNGEKVKTITPDVGLHQSLTSDPTVAVLRAKRAPEAHPPRSCSGSLTARVCHMGVCQGQGDTEDGRMTLMG

SEQ ID NO: 40815 - protein, 247 aa, Homo sapiens; identical to SEQ ID NO: 40814

SEQ ID NO: 40816 - protein, 1405 aa, Homo sapiens
MAARSPPSPHPSPPARQLGPRSPRVGRGAEVHAMRSEASGFAGAAREVVADESDKIWVGEEGSGGRRGPGGAAPAHAPLLSAPMGSRRLEGISVEEAMVTRTQLLEEELSSLKEELALCQADKEFVWSLWKRLQVTNPDLTQVVSLVVEREKQKSEAKDRKVLEILQVKDAKIQEFEQRESVLKQEINDLVKRKIAVDEENAFLRKEFSDLEKKFKDKSQEIKDTKECVQNKEEQNRLVIKNLEEENKKLSTRCTDLLNDLEKLRKQEAHLRKEKYSTDAKIKTFEDNLIEARKEVEVSQSKYNALSLQLSNKQTELIQKDMDITLVRQELQELQNLYKQNSTHTAQQAELIQQLQVLNMDTQKVLRNQEDVHTAESISYQKLYNELHICFETTKSNEAMLRQSVTNLQDQLLQKEQENAKLKEKLQESQGAPLPLPQESDPDYSAQVPHRPSLSSLETLMVSQKSEIEYLQEKLKIANEKLSENISANKGFSRKSIMTSAEGKHKEPPVKRSRSLSPKSSFTDSEELQKLRKAERKIENLEKALQLKSQENDELRDAHEKRKERLQMLQTNYRAVKEQLKQWEEGSGMTEIRKIKRADPQQLRQEDSDAVWNELAYFKRENQELMIQKMNLEEELDELKVHISIDKAAIQELNRCVAERREEQLFRSGEDDEVKRSTPEKNGKEMLEQTLQKVTELENRLKSFEKRSRKLKEGNKKLMKENDFLKSLLKQQQEDTETREKELEQIIKGSKDVEKENTELQVKISELETEVTSLRRQVAEANALRNENEELINPMEKSHQSADRAKSEMATMKVRSGRYDCKTTMTKVKFKAAKKNCSVGRHHTVLNHSIKVMSNVFENLSKDGWEDVSESSSDSEAQTSQTLGTIIVETSQKISPTEDGKDQKESDPTEDSQTQGKEIVQTYLNIDGKTPKDYFHDKNAKKPTFQKKNCKMQKSSHTAVPTRVNREKYKNITAQKSSSNIILLRERIISLQQQNSVLQNAKKTAELSVKEYKEVNEKLLHQQQVSDQRFQTSRQTIKKLNLDLAGLRKEKEDLLKKLESSSEITSLAEENSQVTFPRIQVTSLSPSRSMDLEMKQLQYKLKNATNELTKQSSNVKTLKFELLAKEEHIKEMHEKISRMERDITMKRHLIEDLKFRQKVNLESNKSFSEMLQNLDKKVKTLTEECSNKKVSIDSLKQRLNVAVKEKSQYEQMYQKSKEELEKKDLKLTLLVSRISETESAMAEIETAASKQLQELALQSEQVLEGAQKTLLLANEKVEEFTTFVKALAKELQNDVHVVRRQIRELKKMKKNRDACKTSTHKAQTLAASILNISRSDLEEILDTEDQVEIEKTKIDAENDKEWMLYIQKLLEGQSLALSPRLKCNGAIVAHQNLRLPDSSSSASAS

SEQ ID NO: 40817 - protein, 391 aa, Homo sapiens
MAARSPPSPHPSPPARQLGPRSPRVGRGAEVHAMRSEASGFAGAAREVVADESDKIWVGEEGSGGRRGPGGAAPAHAPLLSAPMGSRRLEGISVEEAMVTRTQLLEEELSSLKEELALCQADKEFVWSLWKRLQVTNPDLTQVVSLVVEREKQKSEAKDRKVLEILQVKDAKIQEFEQRESVLKQEINDLVKRKIAVDEENAFLRKEFSDLEKKFKDKSQEIKDTKECVQNKEEQNRLVIKNLEEENKKLSTRCTDLLNDLEKLRKQEAHLRKEKYSTDAKIKTFEDNLIEARKEVEVSQSKYNALSLQLSNKQTELIQKDMDITLVRKELQELQNLYKQNSTHTAQQAELIQQLQVLNMDTQKVLRNQEDVHTAESISYQKVCFYSVIKM

SEQ ID NO: 40818 - protein, 1406 aa, Homo sapiens
MAARSPPSPHPSPPARQLGPRSPRVGRGAEVHAMRSEASGFAGAAREVVADESDKIWVGEEGSGGRRGPGGAAPAHAPLLSAPMGSRRLEGISVEEAMVTRTQLLEEELSSLKEELALCQADKEFVWSLWKRLQVTNPDLTQVVSLVVEREKQKSEAKDRKVLEILQVKDAKIQEFEQRESVLKQEINDLVKRKIAVDEENAFLRKEFSDLEKKFKDKSQEIKDTKECVQNKEEQNRLVIKNLEEENKKLSTRCTDLLNDLEKLRKQEAHLRKEKYSTDAKIKTFEDNLIEARKEVEVSQSKYNALSLQLSNKQTELIQKDMDITLVRKELQELQNLYKQNSTHTAQQAELIQQLQVLNMDTQKVLRNQEDVHTAESISYQKLYNELHICFETTKSNEAMLRQSVTNLQDQLLQKEQENAKLKEKLQESQGAPLPLPQESDPDYSAQVPHRPSLSSLETLMVSQKSEIEYLQEKLKIANEKLSENISANKGFSRKSIMTSAEGKHKEPPVKRSRSLSPKSSFTDSEELQKLRKAERKIENLEKALQLKSQENDELRDAHEKRKERLQMLQTNYRAVKEQLKQWEEGSGMTEIRKIKRADPQQLRQEDSDAVWNELAYFKRENQELMIQKMNLEEELDELKVHISIDKAAIQELNRCVAERREEQLFRSGEDDEVKRSTPEKNGKEMLEQTLQKVTELENRLKSFEKRSRKLKEGNKKLMKENDFLKSLLKQQQEDTETREKELEQIIKGSKDVEKENTELQVKISELETEVTSLRRQVAEANALRNENEELINPMEKSHQSADRAKSEMATMKVRSGRYDCKTTMTKVKFKAAKKNCSVGRHHTVLNHSIKVMSNVFENLSKDGWEDVSESSSDSEAQTSQTLGTIIVETSQKISPTEDGKDQKESDPTEDSQTQGKEIVQTYLNIDGKTPKDYFHDKNAKKPTFQKKNCKMQKSSHTAVPTRVNREKYKNITAQKSSSNIILLRERIISLQQQNSVLQNAKKTAELSVKEYKEVNEKLLHQQQVSDQRFQTSRQTIKKLNLDLAGLRKEKEDLLKKLESSSEITSLAEENSQVTFPRIQVTSLSPSRSMDLEMKQLQYKLKNATNELTKQSSNVKTLKFELLAKEEHIKEMHEKISRMERDITMKRHLIEDLKFRQKVNLESNKSFSEMLQNLDKKVKTLTEECSNKKVSIDSLKQRLNVAVKEKSQYEQMYQKSKEELEKKDLKLTLLVSRISETESAMAEIETAASKQLQELALQSEQVLEGAQKTLLLANEKVEEFTTFVKALAKELQNDVHVVRRQIRELKKMKKNRDACKTSTHKAQTLAASILNISRSDLEEILDTEDQVEIEKTKIDAENDKEWMLYIQKLLEGQLPFASYLLEAVLEKINEKKKLVEGYFTIMKDIR

SEQ ID NO: 40819 - protein, 1406 aa, Homo sapiens
MAARSPPSPHPSPPARQLGPRSPRVGRGAEVHAMRSEASGFAGAAREVVADESDKIWVGEEGSGGRRGPGGAAPAHAPLLSAPMGSRRLEGISVEEAMVTRTQLLEEELSSLKEELALCQADKEFVWSLWKRLQVTNPDLTQVVSLVVEREKQKSEAKDRKVLEILQVKDAKIQEFEQRESVLKQEINDLVKRKIAVDEENAFLRKEFSDLEKKFKDKSQEIKDTKECVQNKEEQNRLVIKNLEEENKKLSTRCTDLLNDLEKLRKQEAHLRKEKYSTDAKIKTFEDNLIEARKEVEVSQSKYNALSLQLSNKQTELIQKDMDITLVRQELQELQNLYKQNSTHTAQQAELIQQLQVLNMDTQKVLRNQEDVHTAESISYQKLYNELHICFETTKSNEAMLRQSVTNLQDQLLQKEQENAKLKEKLQESQGAPLPLPQESDPDYSAQVPHRPSLSSLETLMVSQKSEIEYLQEKLKIANEKLSENISANKGFSRKSIMTSAEGKHKEPPVKRSRSLSPKSSFTDSEELQKLRKAERKIENLEKALQLKSQENDELRDAHEKRKERLQMLQTNYRAVKEQLKQWEEGSGMTEIRKIKRADPQQLRQEDSDAVWNELAYFKRENQELMIQKMNLEEELDELKVHISIDKAAIQELNRCVAERREEQLFRSGEDDEVKRSTPEKNGKEMLEQTLQKVTELENRLKSFEKRSRKLKEGNKKLMKENDFLKSLLKQQQEDTETREKELEQIIKGSKDVEKENTELQVKISELETEVTSLRRQVAEANALRNENEELINPMEKSHQSADRAKSEMATMKVRSGRYDCKTTMTKVKFKAAKKNCSVGRHHTVLNHSIKVMSNVFENLSKDGWEDVSESSSDSEAQTSQTLGTIIVETSQKISPTEDGKDQKESDPTEDSQTQGKEIVQTYLNIDGKTPKDYFHDKNAKKPTFQKKNCKMQKSSHTAVPTRVNREKYKNITAQKSSSNIILLRERIISLQQQNSVLQNAKKTAELSVKEYKEVNEKLLHQQQVSDQRFQTSRQTIKKLNLDLAGLRKEKEDLLKKLESSSEITSLAEENSQVTFPRIQVTSLSPSRSMDLEMKQLQYKLKNATNELTKQSSNVKTLKFELLAKEEHIKEMHEKISRMERDITMKRHLIEDLKFRQKVNLESNKSFSEMLQNLDKKVKTLTEECSNKKVSIDSLKQRLNVAVKEKSQYEQMYQKSKEELEKKDLKLTLLVSRISETESAMAEIETAASKQLQELALQSEQVLEGAQKTLLLANEKVEEFTTFVKALAKELQNDVHVVRRQIRELKKMKKNRDACKTSTHKAQTLAASILNISRSDLEEILDTEDQVEIEKTKIDAENDKEWMLYIQKLLEGQLPFASYLLEAVLEKINEKKKLVEGYFTIMKDIR

SEQ ID NO: 40820 - protein, 172 aa, Homo sapiens
MASGFKKPSAASTGQKRKVAPKPELTEDQKQEVREAFDLFDVDGSGTIDAKELKVAMRALGFEPRKEEMKKMISEVDREGTGKISFNDFLAVMTQKMSEKDTKEEILKAFRLFDDDETGKISFKNLKRVANELGENLTDEELQEMIDEADRDGDGEVNEEEFLRIMKKTSLY

SEQ ID NO: 40821 - protein, 172 aa, Homo sapiens
MASNFKKANMASSSQRKRMSPKPELTEEQKQEIREAFDLFDADGTGTIDVKELKVAMRALGFEPKKEEIKKMISEIDKEGTGKMNFGDFLTVMTQKMSEKDTKEEILKAFKLFDDDETGKISFKNLKRVAKELGENLTDEELQEMIDEADRDGDGEVSEQEFLRIMKKTSLY

SEQ ID NO: 40822 - protein, 114 aa, Homo sapiens
MGPRRRSRKPEAPRRRSPSPTPTPGPSRRGPSLGASSHQHSRRRQGWLKEIRKLQKSTHLLIRKLPFSRLAAEAFLVHLFEDAYLLTLHAGRVTLFPKDVQLARRIRGLEEGLG

SEQ ID NO: 40823 - protein, 140 aa, Homo sapiens
MGPRRRSRKPEAPRRRSPSPTPTPGPSRRGPSLGASSHQHSRRRQGWLKEIRKLQKSTHLLIRKLPFSRLAREICVKFTRGVDFNWQAQALLALQEAAEAFLVHLFEDAYLLTLHAGRVTLFPKDVQLARRIRGLEEGLG

SEQ ID NO: 40824 - protein, 599 aa, Homo sapiens
MGPKRRQLTFREKSRIIQEVEENPDLRKGEIARRFNIPPSTLSTILKNKRAILASERKYGVASTCRKTNKLSPYDKLEGLLIAWFQQIRAAGLPVKGIILKEKALRIAEELGMDDFTASNGWLDRFRRRHGVVSCSGVARARARNAAPRTPAAPASPAAVPSEGSGGSTTGWRAREEQPPSVAEGYASQDVFSATETSLWYDFLPDQAAGLCGGDGRPRQATQRLSVLLCANADGSEKLPPLVAGKSAKPRAGQAGLPCDYTANSKGGVTTQALAKYLKALDTRMAAESRRVLLLAGRLAAQSLDTSGLRHVQLAFFPPGTVHPLERGVVQQVKGHYRQAMLLKAMAALEGQDPSGLQLGLTEALHFVAAAWQAVEPSDIAACFREAGFGGGPNATITTSLKSEGEEEEEEEEEEEEEEGEGEEEEEEGEEEEEEGGEGEELGEEEEVEEEGDVDSDEEEEEDEESSSEGLEAEDWAQGVVEAGGSFGAYGAQEEAQCPTLHFLEGGEDSDSDSEEEDDEEEDDEDEDDDDDEEDGDEVPVPSFGEAMAYFAMVKRYLTSFPIDDRVQSHILHLEHDLVHVTRKNHARQAGVRGLGHQS

SEQ ID NO: 40825 - protein, 138 aa, Homo sapiens
EDEESSSEGLEAEDWAQGVVEAGGSFGAYGAQEEAQCPTLHFLEGGEDSDSDSEEEDDEEEDDEDEDDDDDEEDGDEVPVPSFGEAMAYFAMVKRYLTSFPIDDRVQSHILHLEHDLVHVTRKNHARQAGVRGLGHQS

SEQ ID NO: 40826 - protein, 943 aa, Homo sapiens
MAASGLDHLKNGYRRRFCRPSRARDINTEQGQNVLEILQDCFEEKSLANDFSTNSTKSVPNSTRKIKDTCIQSPSKECQKSHPKSVPVSSKKKEASLQFVVEPSEATNRSVQAHEVHQKILATDVSSKNTPDSKKISSRNINDHHSEADEEFYLSVGSPSVLLDAKTSVSQNVIPSSAQKRETYTFENSVNMLPSSTEVSVKTKKRLNFDDKVMLKKIEIDNKVSDEEDKTSEGQERKPSGSSQNRIRDSEYEIQRQAKKSFSTLFLETVKRKSESSPIVRHAATAPPHSCPPDDTKLIEDEFIIDESDQSFASRSWITIPRKAGSLKQRTISPAESTALLQGRKSREKHHNILPKTLANDKHSHKPHPVETSQPSDKTVLDTSYALIGETVNNYRSTKYEMYSKNAEKPSRSKRTIKQKQRRKFMAKPAEEQLDVGQSKDENIHTSHITQDEFQRNSDRNMEEHEEMGNDCVSKKQMPPVGSKKSSTRKDKEESKKKRFSSESKNKLVPEEVTSTVTKSRRISRRPSDWWVVKSEESPVYSNSSVRNELPMHHNSSRKSTKKTNQSSKNIRKKTIPLKRQKTATKGNQRVQKFLNAEGSGGIVGHDEISRCSLSEPLESDEADLAKKKNLDCSRSTRSSKNEDNIMTAQNVPLKPQTSGYTCNIPTESNLDSGEHKTSVLEESGPSRLNNNYLMSGKNDVDDEEVHGSSDDSKQSKVIPKNRIHHKLVLPSNTPNVRRTKRTRLKPLEYWRGERIDYQGRPSGGFVISGVLSPDTISSKRKAKENIGKVNKKSNKKRICLDNDERKTNLMVNLGIPLGDPLQPTRVKDPETREIILMDLVRPQDTYQFFVKHGELKVYKTLDTPFFSTGKLILGPQEEKGKQHVGQDILVFYVNFGDLLCTLHETPYILSTGDSFYVPSGNYYNIKNLRNEESVLLFTQIKR

SEQ ID NO: 40827 - protein, 2701 aa, Homo sapiens
MAEEGAVAVCVRVRPLNSREESLGETAQVYWKTDNNVIYQVDGSKSFNFDRVFHGNETTKNVYEEIAAPIIDSAIQGYNGTIFAYGQTASGKTYTMMGSEDHLGVIPRAIHDIFQKIKKFPDREFLLRVSYMEIYNETITDLLCGTQKMKPLIIREDVNRNVYVADLTEEVVYTSEMALKWITKGEKSRHYGETKMNQRSSRSHTIFRMILESREKGEPSNCEGSVKVSHLNLVDLAGSERAAQTGAAGVRLKEGCNINRSLFILGQVIKKLSDGQVGGFINYRDSKLTRILQNSLGGNAKTRIICTITPVSFDETLTALQFASTAKYMKNTPYVNEVSTDEALLKRYRKEIMDLKKQLEEVSLETRAQAMEKDQLAQLLEEKDLLQKVQNEKIENLTRMLVTSSSLTLQQELKAKRKRRVTWCLGKINKMKNSNYADQFNIPTNITTKTHKLSINLLREIDESVCSESDVFSNTLDTLSEIEWNPATKLLNQENIESELNSLRADYDNLVLDYEQLRTEKEEMELKLKEKNDLDEFEALERKTKKDQEMQLIHEISNLKNLVKHAEVYNQDLENELSSKVELLREKEDQIKKLQEYIDSQKLENIKMDLSYSLESIEDPKQMKQTLFDAETVALDAKRESAFLRSENLELKEKMKELATTYKQMENDIQLYQSQLEAKKKMQVDLEKELQSAFNEITKLTSLIDGKVPKDLLCNLELEGKITDLQKELNKEVEENEALREEVILLSELKSLPSEVERLRKEIQDKSEELHIITSEKDKLFSEVVHKESRVQGLLEEIGKTKDDLATTQSNYKSTDQEFQNFKTLHMDFEQKYKMVLEENERMNQEIVNLSKEAQKFDSSLGALKTELSYKTQELQEKTREVQERLNEMEQLKEQLENRDSTLQTVEREKTLITEKLQQTLEEVKTLTQEKDDLKQLQESLQIERDQLKSDIHDTVNMNIDTQEQLRNALESLKQHQETINTLKSKISEEVSRNLHMEENTGETKDEFQQKMVGIDKKQDLEAKNTQTLTADVKDNEIIEQQRKIFSLIQEKNELQQMLESVIAEKEQLKTDLKENIEMTIENQEELRLLGDELKKQQEIVAQEKNHAIKKEGELSRTCDRLAEVEEKLKEKSQQLQEKQQQLLNVQEEMSEMQKKINEIENLKNELKNKELTLEHMETERLELAQKLNENYEEVKSITKERKVLKELQKSFETERDHLRGYIREIEATGLQTKEELKIAHIHLKEHQETIDELRRSVSEKTAQIINTQDLEKSHTKLQEEIPVLHEEQELLPNVKEVSETQETMNELELLTEQSTTKDSTTLARIEMERLRLNEKFQESQEEIKSLTKERDNLKTIKEALEVKHDQLKEHIRETLAKIQESQSKQEQSLNMKEKDNETTKIVSEMEQFKPKDSALLRIEIEMLGLSKRLQESHDEMKSVAKEKDDLQRLQEVLQSESDQLKENIKEIVAKHLETEEELKVAHCCLKEQEETINELRVNLSEKETEISTIQKQLEAINDKLQNKIQEIYEKEEQFNIKQISEVQEKVNELKQFKEHRKAKDSALQSIESKMLELTNRLQESQEEIQIMIKEKEEMKRVQEALQIERDQLKENTKEIVAKMKESQEKEYQFLKMTAVNETQEKMCEIEHLKEQFETQKLNLENIETENIRLTQILHENLEEMRSVTKERDDLRSVEETLKVERDQLKENLRETITRDLEKQEELKIVHMHLKEHQETIDKLRGIVSEKTNEISNMQKDLEHSNDALKAQDLKIQEELRIAHMHLKEQQETIDKLRGIVSEKTDKLSNMQKDLENSNAKLQEKIQELKANEHQLITLKKDVNETQKKVSEMEQLKKQIKDQSLTLSKLEIENLNLAQKLHENLEEMKSVMKERDNLRRVEETLKLERDQLKESLQETKARDLEIQQELKTARMLSKEHKETVDKLREKISEKTIQISDIQKDLDKSKDELQKKIQELQKKELQLLRVKEDVNMSHKKINEMEQLKKQFEAQNLSMQSVRMDNFQLTKKLHESLEEIRIVAKERDELRRIKESLKMERDQFIATLREMIARDRQNHQVKPEKRLLSDGQQHLTESLREKCSRIKELLKRYSEMDDHYECLNRLSLDLEKEIEFQKELSMRVKANLSLPYLQTKHIEKLFTANQRCSMEFHRIMKKLKYVLSYVTKIKEEQHESINKFEMDFIDEVEKQKELLIKIQHLQQDCDVPSRELRDLKLNQNMDLHIEEILKDFSESEFPSIKTEFQQVLSNRKEMTQFLEEWLNTRFDIEKLKNGIQKENDRICQVNNFFNNRIIAIMNESTEFEERSATISKEWEQDLKSLKEKNEKLFKNYQTLKTSLASGAQVNPTTQDNKNPHVTSRATQLTTEKIRELENSLHEAKESAMHKESKIIKMQKELEVTNDIIAKLQAKVHESNKCLEKTKETIQVLQDKVALGAKPYKEEIEDLKMKLVKIDLEKMKNAKEFEKEISATKATVEYQKEVIRLLRENLRRSQQAQDTSVISEHTDPQPSNKPLTCGGGSGIVQNTKALILKSEHIRLEKEISKLKQQNEQLIKQKNELLSNNQHLSNEVKTWKERTLKREAHKQVTCENSPKSPKVTGTASKKKQITPSQCKERNLQDPVPKESPKSCFFDSRSKSLPSPHPVRYFDNSSLGLCPEVQNAGAESVDSQPGPWHASSGKDVPECKTQ

SEQ ID NO: 40828 - protein, 2580 aa, Homo sapiens
MAEEGAVAVCVRVRPLNSREESLGETAQVYWKTDNNVIYQVDGSKSFNFDRVFHGNETTKNVYEEIAAPIIDSAIQGYNGTIFAYGQTASGKTYTMMGSEDHLGVIPRAIHDIFQKIKKFPDREFLLRVSYMEIYNETITDLLCGTQKMKPLIIREDVNRNVYVADLTEEVVYTSEMALKWITKGEKSRHYGETKMNQRSSRSHTIFRMILESREKGEPSNCEGSVKVSHLNLVDLAGSERAAQTGAAGVRLKEGCNINRSLFILGQVIKKLSDGQVGGFINYRDSKLTRILQNSLGGNAKTRIICTITPVSFDETLTALQFASTAKYMKNTPYVNEVSTDEALLKRYRKEIMDLKKQLEEVSLETRAQAMEKDQLAQLLEEKDLLQKVQNEKIENLTRMLVTSSSLTLQQELKAKRKRRVTWCLGKINKMKNSNYADQFNIPTNITTKTHKLSINLLREIDESVCSESDVFSNTLDTLSEIEWNPATKLLNQENIESELNSLRADYDNLVLDYEQLRTEKEEMELKLKEKNDLDEFEALERKTKKDQENELSSKVELLREKEDQIKKLQEYIDSQKLENIKMDLSYSLESIEDPKQMKQTLFDAETVALDAKRESAFLRSENLELKEKMKELATTYKQMENDIQLYQSQLEAKKKMQVDLEKELQSAFNEITKLTSLIDGKVPKDLLCNLELEGKITDLQKELNKEVEENEALREEVILLSELKSLPSEVERLRKEIQDKSEELHIITSEKDKLFSEVVHKESRVQGLLEEIGKTKDDLATTQSNYKSTDQEFQNFKTLHMDFEQKYKMVLEENERMNQEIVNLSKEAQKFDSSLGALKTELSYKTQELQEKTREVQERLNEMEQLKEQLENRDSTLQTVEREKTLITEKLQQTLEEVKTLTQEKDDLKQLQESLQIERDQLKSDIHDTVNMNIDTQEQLRNALESLKQHQETINTLKSKISEEVSRNLHMEENTGETKDEFQQKMVGIDKKQDLEAKNTQTLTADVKDNEIIEQQRKIFSLIQEKNELQQMLESVIAEKEQLKTDLKENIEMTIENQEELRLLGDELKKQQEIVAQEKNHAIKKEGELSRTCDRLAEVEEKLKEKSQQLQEKQQQLLNVQEEMSEMQKKINEIENLKNELKNKELTLEHMETERLELAQKLNENYEEVKSITKERKVLKELQKSFETERDHLRGYIREIEATGLQTKEELKIAHIHLKEHQETIDELRRSVSEKTAQIINTQDLEKSHTKLQEEIPVLHEEQELLPNVKEVSETQETMNELELLTEQSTTKDSTTLARIEMERLRLNEKFQESQEEIKSLTKERDNLKTIKEALEVKHDQLKEHIRETLAKIQESQSKQEQSLNMKEKDNETTKIVSEMEQFKPKDSALLRIEIEMLGLSKRLQESHDEMKSVAKEKDDLQRLQEVLQSESDQLKENIKEIVAKHLETEEELKVAHCCLKEQEETINELRVNLSEKETEISTIQKQLEAINDKLQNKIQEIYEKEEQFNIKQISEVQEKVNELKQFKEHRKAKDSALQSIESKMLELTNRLQESQEEIQIMIKEKEEMKRVQEALQIERDQLKENTKEIVAKMKESQEKEYQFLKMTAVNETQEKMCEIEHLKEQFETQKLNLENIETENIRLTQILHENLEEMRSVTKERDDLRSVEETLKVERDQLKENLRETITRDLEKQEELKIVHMHLKEHQETIDKLRGIVSEKTNEISNMQKDLEHSNDALKAQDLKIQEELRIAHMHLKEQQETIDKLRGIVSEKTDKLSNMQKDLENSNAKLQEKIQELKANEHQLITLKKDVNETQKKVSEMEQLKKQIKDQSLTLSKLEIENLNLAQKLHENLEEMKSVMKERDNLRRVEETLKLERDQLKESLQETKARDLEIQQELKTARMLSKEHKETVDKLREKISEKTIQISDIQKDLDKSKDELQKKQDRQNHQVKPEKRLLSDGQQHLTESLREKCSRIKELLKRYSEMDDHYECLNRLSLDLEKEIEFQKELSMRVKANLSLPYLQTKHIEKLFTANQRCSMEFHRIMKKLKYVLSYVTKIKEEQHESINKFEMDFIDEVEKQKELLIKIQHLQQDCDVPSRELRDLKLNQNMDLHIEEILKDFSESEFPSIKTEFQQVLSNRKEMTQFLEEWLNTRFDIEKLKNGIQKENDRICQVNNFFNNRIIAIMNESTEFEERSATISKEWEQDLKSLKEKNEKLFKNYQTLKTSLASGAQVNPTTQDNKNPHVTSRATQLTTEKIRELENSLHEAKESAMHKESKIIKMQKELEVTNDIIAKLQAKVHESNKCLEKTKETIQVLQDKVALGAKPYKEEIEDLKMKLVKIDLEKMKNAKEFEKEISATKATVEYQKEVIRLLRENLRRSQQAQDTSVISEHTDPQPSNKPLTCGGGSGIVQNTKALILKSEHIRLEKEISKLKQQNEQLIKQKNELLSNNQHLSNEVKTWKERTLKREAHKQVTCENSPKSPKVTGTASKKKQITPSQCKERNLQDPVPKESPKSCFFDSRSKSLPSPHPVRYFDNSSLGLCPEVQNAGAESVDSQPGPWHASSGKDVPECKTQ

SEQ ID NO: 40829 - protein, 2345 aa, Homo sapiens
MAEEGAVAVCVRVRPLNSREESLGETAQVYWKTDNNVIYQVDGSKSFNFDRVFHGNETTKNVYEEIAAPIIDSAIQGYNGTIFAYGQTASGKTYTMMGSEDHLGVIPRAIHDIFQKIKKFPDREFLLRVSYMEIYNETITDLLCGTQKMKPLIIREDVNRNVYVADLTEEVVYTSEMALKWITKGEKSRHYGETKMNQRSSRSHTIFRMILESREKGEPSNCEGSVKVSHLNLVDLAGSERAAQTGAAGVRLKEGCNINRSLFILGQVIKKLSDGQVGGFINYRDSKLTRILQNSLGGNAKTRIICTITPVSFDETLTALQFASTAKYMKNTPYVNEVSTDEALLKRYRKEIMDLKKQLEEVSLETRAQAMEKDQLAQLLEEKDLLQKVQNEKIENLTRMLVTSSSLTLQQELKAKRKRRVTWCLGKINKMKNSNYADQFNIPTNITTKTHKLSINLLREIDESVCSESDVFSNTLDTLSEIEWNPATKLLNQENIESELNSLRADYDNLVLDYEQLRTEKEEMELKLKEKNDLDEFEALERKTKKDQEMQLIHEISNLKNLVKHAEVYNQDLENELSSKVELLREKEDQIKKLQEYIDSQKLENIKMDLSYSLESIEDPKQMKQTLFDAETVALDAKRESAFLRSENLELKEKMKELATTYKQMENDIQLYQSQLEAKKKMQVDLEKELQSAFNEITKLTSLIDGKVPKDLLCNLELEGKITDLQKELNKEVEENEALREEVILLSELKSLPSEVERLRKEIQDKSEELHIITSEKDKLFSEVVHKESRVQGLLEEIGKTKDDLATTQSNYKSTDQEFQNFKTLHMDFEQKYKMVLEENERMNQEIVNLSKEAQKFDSSLGALKTELSYKTQELQEKTREVQERLNEMEQLKEQLENRDSTLQTVEREKTLITEKLQQTLEEVKTLTQEKDDLKQLQESLQIERDQLKSDIHDTVNMNIDTQEQLRNALESLKQHQETINTLKSKISEEVSRNLHMEENTGETKDEFQQKMVGIDKKQDLEAKNTQTLTADVKDNEIIEQQRKIFSLIQEKNELQQMLESVIAEKEQLKTDLKENIEMTIENQEELRLLGDELKKQQEIVAQEKNHAIKKEGELSRTCDRLAEVEEKLKEKSQQLQEKQQQLLNVQEEMSEMQKKINEIENLKNELKNKELTLEHMETERLELAQKLNENYEEVKSITKERKVLKELQKSFETERDHLRGYIREIEATGLQTKEELKIAHIHLKEHQETIDELRRSVSEKTAQIINTQDLEKSHTKLQEEIPVLHEEQELLPNVKEVSETQETMNELELLTEQSTTKDSTTLARIEMERLRLNEKFQESQEEIKSLTKERDNLKTIKEALEVKHDQLKEHIRETLAKIQESQSKQEQSLNMKEKDNETTKIVSEMEQFKPKDSALLRIEIEMLGLSKRLQESHDEMKSVAKEKDDLQRLQEVLQSESDQLKENIKEIVAKHLETEEELKVAHCCLKEQEETINELRVNLSEKETEISTIQKQLEAINDKLQNKIQEIYEKEEQFNIKQISEVQEKVNELKQFKEHRKAKDSALQSIESKMLELTNRLQESQEEIQIMIKEKEEMKRVQEALQIERDQLKENTKEIVAKMKESQEKEYQFLKMTAVNETQEKMCEIEHLKEQFETQKLNLENIETENIRLTQILHENLEEMRSVTKERDDLRSVEETLKVERDQLKENLRETITRDLEKQEELKIVHMHLKEHQETIDKLRGIVSEKTNEISNMQKDLEHSNDALKAQDLKIQEELRIAHMHLKEQQETIDKLRGIVSEKTDKLSNMQKDLENSNAKLQEKIQELKANEHQLITLKKDVNETQKKVSEMEQLKKQIKDQSLTLSKLEIENLNLAQKLHENLEEMKSVMKERDNLRRVEETLKLERDQLKESLQETKARDLEIQQELKTARMLSKEHKETVDKLREKISEKTIQISDIQKDLDKSKDELQKKIQELQKKELQLLRVKEDVNMSHKKINEMEQLKKQFEAQNLSMQSVRMDNFQLTKKLHESLEEIRIVAKERDELRRIKESLKMERDQFIATLREMIARDRQNHQVKPEKRLLSDGQQHLTESLREKCSRIKELLKRYSEMDDHYECLNRLSLDLEKEIEFHRIMKKLKYVLSYVTKIKEEQHESINKFEMDFIDEVEKQKELLIKIQHLQQDCDVPSRELRDLKLNQNMDLHIEEILKDFSESEFPSIKTEFQQVLSNRKEMTQFLEEWLNTRFDIEKLKNGIQKENDRICQVNNFFNNRIIAIMNESTEFEERSATISKEWEQDLKSLKEKNEKLFKNYQTLKTSLASGAQVNPTTQDNKNPHVTSRATQLTTE

SEQ ID NO: 40830 - protein, 3114 aa, Homo sapiens
MSWALEEWKEGLPTRALQKIQELEGQLDKLKKEKQQRQFQLDSLEAALQKQKQKVENEKTEGTNLKRENQRLMEICESLEKTKQKISHELQVKESQVNFQEGQLNSGKKQIEKLEQELKRCKSELERSQQAAQSADVSLNPCNTPQKIFTTPLTPSQYYSGSKYEDLKEKYNKEVEERKRLEAEVKALQAKKASQTLPQATMNHRDIARHQASSSVFSWQQEKTPSHLSSNSQRTPIRRDFSASYFSGEQEVTPSRSTLQIGKRDANSSFFDNSSSPHLLDQLKAQNQELRNKINELELRLQGHEKEMKGQVNKFQELQLQLEKAKVELIEKEKVLNKCRDELVRTTAQYDQASTKYTALEQKLKKLTEDLSCQRQNAESARCSLEQKIKEKEKEFQEELSRQQRSFQTLDQECIQMKARLTQELQQAKNMHNVLQAELDKLTSVKQQLENNLEEFKQKLCRAEQAFQASQIKENELRRSMEEMKKENNLLKSHSEQKAREVCHLEAELKNIKQCLNQSQNFAEEMKAKNTSQETMLRDLQEKINQQENSLTLEKLKLAVADLEKQRDCSQDLLKKREHHIEQLNDKLSKTEKESKALLSALELKKKEYEELKEEKTLFSCWKSENEKLLTQMESEKENLQSKINHLETCLKTQQIKSHEYNERVRTLEMDRENLSVEIRNLHNVLDSKSVEVETQKLAYMELQQKAEFSDQKHQKEIENMCLKTSQLTGQVEDLEHKLQLLSNEIMDKDRCYQDLHAEYESLRDLLKSKDASLVTNEDHQRSLLAFDQQPAMHHSFANIIGEQGSMPSERSECRLEADQSPKNSAILQNRVDSLEFSLESQKQMNSDLQKQCEELVQIKGEIEENLMKAEQMHQSFVAETSQRISKLQEDTSAHQNVVAETLSALENKEKELQLLNDKVETEQAEIQELKKSNHLLEDSLKELQLLSETLSLEKKEMSSIISLNKREIEELTQENGTLKEINASLNQEKMNLIQKSESFANYIDEREKSISELSDQYKQEKLILLQRCEETGNAYEDLSQKYKAAQEKNSKLECLLNECTSLCENRKNELEQLKEAFAKEHQEFLTKLAFAEERNQNLMLELETVQQALRSEMTDNQNNSKSEAGGLKQEIMTLKEEQNKMQKEVNDLLQENEQLMKVMKTKHECQNLESEPIRNSVKERESERNQCNFKPQMDLEVKEISLDSYNAQLVQLEAMLRNKELKLQESEKEKECLQHELQTIRGDLETSNLQDMQSQEISGLKDCEIDAEEKYISGPHELSTSQNDNAHLQCSLQTTMNKLNELEKICEILQAEKYELVTELNDSRSECITATRKMAEEVGKLLNEVKILNDDSGLLHGELVEDIPGGEFGEQPNEQHPVSLAPLDESNSYEHLTLSDKEVQMHFAELQEKFLSLQSEHKILHDQHCQMSSKMSELQTYVDSLKAENLVLSTNLRNFQGDLVKEMQLGLEEGLVPSLSSSCVPDSSSLSSLGDSSFYRALLEQTGDMSLLSNLEGAVSANQCSVDEVFCSSLQEENLTRKETPSAPAKGVEELESLCEVYRQSLEKLEEKMESQGIMKNKEIQELEQLLSSERQELDCLRKQYLSENEQWQQKLTSVTLEMESKLAAEKKQTEQLSLELEVARLQLQGLDLSSRSLLGIDTEDAIQGRNESCDISKEHTSETTERTPKHDVHQICDKDAQQDLNLDIEKITETGAVKPTGECSGEQSPDTNYEPPGEDKTQGSSECISELSFSGPNALVPMDFLGNQEDIHNLQLRVKETSNENLRLLHVIEDRDRKVESLLNEMKELDSKLHLQEVQLMTKIEACIELEKIVGELKKENSDLSEKLEYFSCDHQELLQRVETSEGLNSDLEMHADKSSREDIGDNVAKVNDSWKERFLDVENELSRIRSEKASIEHEALYLEADLEVVQTEKLCLEKDNENKQKVIVCLEEELSVVTSERNQLRGELDTMSKKTTALDQLSEKMKEKTQELESHQSECLHCIQVAEAEVKEKTELLQTLSSDVSELLKDKTHLQEKLQSLEKDSQALSLTKCELENQIAQLNKEKELLVKESESLQARLSESDYEKLNVSKALEAALVEKGEFALRLSSTQEEVHQLRRGIEKLRVRIEADEKKQLHIAEKLKERERENDSLKDKVENLERELQMSEENQELVILDAENSKAEVETLKTQIEEMARSLKVFELDLVTLRSEKENLTKQIQEKQGQLSELDKLLSSFKSLLEEKEQAEIQIKEESKTAVEMLQNQLKELNEAVAALCGDQEIMKATEQSLDPPIEEEHQLRNSIEKLRARLEADEKKQLCVLQQLKESEHHADLLKGRVENLERELEIARTNQEHAALEAENSKGEVETLKAKIEGMTQSLRGLELDVVTIRSEKENLTNELQKEQERISELEIINSSFENILQEKEQEKVQMKEKSSTAMEMLQTQLKELNERVAALHNDQEACKAKEQNLSSQVECLELEKAQLLQGLDEAKNNYIVLQSSVNGLIQEVEDGKQKLEKKDEEISRLKNQIQDQEQLVSKLSQVEGEHQLWKEQNLELRNLTVELEQKIQVLQSKNASLQDTLEVLQSSYKNLENELELTKMDKMSFVEKVNKMTAKETELQREMHEMAQKTAELQEELSGEKNRLAGELQLLLEEIKSSKDQLKELTLENSELKKSLDCMHKDQVEKEGKVREEIAEYQLRLHEAEKKHQALLLDTNKQYEVEIQTYREKLTSKEECLSSQKLEIDLLKSSKEELNNSLKATTQILEELKKTKMDNLKYVNQLKKENERAQGKMKLLIKSCKQLEEEKEILQKELSQLQAAQEKQKTGTVMDTKVDELTTEIKELKETLEEKTKEADEYLDKYCSLLISHEKLEKAKEMLETQVAHLCSQQSKQDSRGSPLLGPVVPGPSPIPSVTEKRLSSGQNKASGKRQRSSGIWENGRGPTPATPESFSKKSKKAVMSGIHPAEDTEGTEFEPEGLPEVVKKGFADIPTGKTSPYILRRTTMATRTSPRLAAQKLALSPLSLGKENLAESSKPTAGGSRSQKVKVAQRSPVDSGTILREPTTKSVPVNNLPERSPTDSPREGLRVKRGRLVPSPKAGLESNGSENCKVQ

SEQ ID NO: 40831 - protein, 175 aa, Homo sapiens
LMIKGRKGKVNKMTAKETELQREMHEMAQKTAELQEELSGEKNRLAGELQLLLEEIKSSKDQLKELTLENSELKKSLDCMHKDQVEKEGKVREEIAEYQLRLHEAEKKHQALLLDTNKQYEVEIQTYREKLTSKEECLSSQKLEIDLLKSSKEELNNSLKATTQILEELKKTKEN

SEQ ID NO: 40832 - protein, 1338 aa, Homo sapiens
MFLMPTSSELNSGQNFLTQWMTNPSRAGVILNRGFPILEADKEKRAAVDISTSFPIKGTHFSDSFSFINEEDSLLEEQKLESNNPYKPQSDKSETHTAFPCIKKGPQVAACHSAPGHQEENKNDFIPDLASEFKEGAYKDPLFKKLEQLKEVQQKKQEQLKRQQLEQLQRLMEEQEKLLTMVSGQCTLPGLSLLPDDQSQKHRSPGNTTTGERATCCFPSYVYPDPTQEETYPSNILSHEQSNFCRTAHGDFVLTSKRASPNLFSEAQYQEAPVEKNNLKEENRNHPTGESILCWEKVTEQIQEANDKNLQKHDDSSEVANIEERPIKAAIGERKQTFEDYLEEQIQLEEQELKQKQLKEAEGPLPIKAKPKQPFLKRGEGLARFTNAKSKFQKGKESKLVTNQSTSEDQPLFKMDRQQLQRKTALKNKELCADNPILKKDSKARTKSGSVTLSQKPKMLKCSNRKSLSPSGLKIQTGKKCDGQFRDQIKFENKVTSNNKENVTECPKPCDTGCTGWNKTQGKDRLPLSTGPASRLAAKSPIRETMKESESSLDVSLQKKLETWEREKEKENLELDEFLFLEQAADEISFSSNSSFVLKILERDQQICKGHRMSSTPVKAVPQKTNPADPISHCNRSEDLDHTAREKESECEVAPKQLHSLSSADELREQPCKIRKAVQKSTSENQTEWNARDDEGVPNSDSSTDSEEQLDVTIKPSTEDRERGISSREDSPQVCDDKGPFKDTRTQEDKRRDVDLDLSDKDYSSDESIMESIKHKVSEPSRSSSLSLSKMDFDDERTWTDLEENLCNHDVVLGNESTYGTPQTCYPNNEIGILDKTIKRKIAPVKRGEDLSKSRRSRSPPTSELMMKFFPSLKPKPKSDSHLGNELKLNISQDQPPGDNARSQVLREKIIELETEIEKFKAENASLAKLRIERESALEKLRKEIADFEQQKAKELARIEEFKKEEMRKLQKERKVFEKYTTAARTFPDKKEREEIQTLKQQIADLREDLKRKETKWSSTHSRLRSQIQMLVRENTDLREEIKVMERFRLDAWKRAEAIESSLEVEKKDKLANTSVRFQNSQISSGTQVEKYKKNYLPMQGNPPRRSKSAPPRDLGNLDKGQAASPREPLEPLNFPDPEYKEEEEDQDIQGEISHPDGKVEKVYKNGCRVILFPNGTRKEVSADGKTITVTFFNGDVKQVMPDQRVIYYYAAAQTTHTTYPEGLEVLHFSSGQIEKHYPDGRKEITFPDQTVKNLFPDGQEESIFPDGTIVRVQRDGNKLIEFNNGQRELHTAQFKRREYPDGTVKTVYANGHQETKYRSGRIRVKDKEGNVLMDTEL

SEQ ID NO: 40833 - protein, 1136 aa, Homo sapiens
MFLMPTSSELNSGQNFLTQWMTNPSRAGVILNRGFPILEADKEKRAAVDISTSFPIKGTHFSDSFSFINEEDSLLEEQKLESNNPYKPQSDKSETHTAFPCIKKGPQVAACHSAPGHQEENKNDFIPDLASEFKEGAYKDPLFKKLEQLKEVQQKKQEQLKRQQLEQLQRLMEEQEKLLTMVSGQCTLPGLSLLPDDQSQKHRSPGNTTTGERATCCFPSYVYPDPTQEETYPSNILSHEQSNFCRTAHGDFVLTSKRASPNLFSEAQYQEAPVEKNNLKEENRNHPTGESILCWEKVTEQIQEANDKNLQKHDDSSEVANIEERPIKAAIGERKQTFEDYLEEQIQLEEQELKQKQLKEAEGPLPIKAKPKQPFLKRGEGLARFTNAKSKFQKGKESKLVTNQSTSEDQPLFKMDRQQLQRKTALKNKELCADNPILKKDSKARTKSGSVTLSQKPKMLKCSNRKSLSPSGLKIQTGKKCDGQFRDQIKFENKVTSNNKENVTECPKPCDTGCTGWNKTQGKDRLPLSTGPASRLAAKSPIRETMKESESSLDVSLQKKLETWEREKEKENLELDEFLFLEQAADEISFSSNSSFVLKILERDQQICKGHRMSSTPVKAVPQKTNPADPISHCNRSEDLDHTAREKESECEVAPKQLHSLSSADELREQPCKIRKAVQKSTSENQTEWNARDDEGVPNSDSSTDSEEQLDVTIKPSTEDRERGISSREDSPQVCDDKGPFKDTRTQEDKRRDVDLDLSDKDYSSDESIMESIKHKVSEPSRSSSLSLSKMDFDDERTWTDLEENLCNHDVVLGNESTYGTPQTCYPNNEIGILDKTIKRKIAPVKRGEDLSKSRRSRSPPTSELMMKFFPSLKPKPKSDSHLGNELKLNISQDQPPGDNARSQVLREKIIELETEIEKFKAENASLAKLRIERESALEKLRKEIADFEQQKAKELARIEEFKKEEMRKLQKERKVFEKYTTAARTFPDKKEREEIQTLKQQIADLREDLKRKETKWSSTHSRLRSQIQMLVRENTDLREEIKVMERFRLDAWKRAEAIESSLEVEKKDKLANTSVRFQNSQISSGTQVEKYKKNYLPMQGTAQPPHTPSSLLADHLPPLSSFRPFSRNIQLCYTF

SEQ ID NO: 40834 - protein, 1086 aa, Homo sapiens
MFLMPTSSELNSGQNFLTQWMTNPSRAGVILNRGFPILEADKEKRAAVDISTSFPIKGTHFSDSFSFINEEDSLLEEQKLESNNPYKPQSDKSETHTAFPCIKKGPQVAACHSAPGHQEENKNDFIPDLASEFKEGAYKDPLFKKLEQLKEVQQKKQEQLKRQQLEQLQRLMEEQEKLLTMVSGQCTLPGLSLLPDDQSQKHRSPGNTTTGERATCCFPSYVYPDPTQEETYPSNILSHEQSNFCRTAHGDFVLTSKRASPNLFSEAQYQEAPVEKNNLKEENRNHPTGESILCWEKVTEQIQEANDKNLQKHDDSSEVANIEERPIKAAIGERKQTFEDYLEEQIQLEEQELKQKQLKEAEGPLPIKAKPKQPFLKRGEGLARFTNAKSKFQKGKESKLVTNQSTSEDQPLFKMDRQQLQRKTALKNKELCADNPILKKDSKARTKSGSVTLSQKPKMLKCSNRKSLSPSGLKIQTGKKCDGQFRDQIKFENKVTSNNKENVTECPKPCDTGCTGWNKTQGKDRLPLSTGPASRLAAKSPIRETMKESESSLDVSLQKKLETWEREKEKENLELDEFLFLEQAADEISFSSNSSFVLKILERDQQICKGHRMSSTPVKAVPQKTNPADPISHCNRSEDLDHTAREKESECEVAPKQLHSLSSADELREQPCKIRKAVQKSTSENQTEWNARDDEGVPNSDSSTDSEEQLDVTIKPSTEDRERGISSREDSPQVCDDKGPFKDTRTQEDKRRDVDLDLSDKDYSSDESIMESIKHKVSEPSRSSSLSLSKMDFDDERTWTDLEENLCNHDVVLGNESTYGTPQTCYPNNEIGILDKTIKRKIAPVKRGEDLSKSRRSRSPPTSELMMKFFPSLKPKPKSDSHLGNELKLNISQDQPPGDNARSQVLREKIIELETEIEKFKAENASLAKLRIERESALEKLRKEIADFEQQKAKELARIEEFKKEEMRKLQKERKVFEKYTTAARTFPDKKEREEIQTLKQQIADLREDLKRKETKWSSTHSRLRSQIQMLVRENTDLREEIKVMERFRLDAWKRAEAIESSLEVEKKDKLAAIHLEDPSLHLLVI

SEQ ID NO: 40835 - protein, 344 aa, Homo sapiens
MDSYSAPESTPSASSRPEDYFIGATPLQKRLESVRKQSSFILTPPRRKIPQCSQLQEDVDPQKVAFLLHKQWTLYSLTPLYKFSYSNLKEYSRLLNAFIVAEKQKGLAVEVGEDFNIKVIFSTLLGMKGTQRDPEAFLVQIVSKSQLPSENREGKVLWTGWFCCVFGDSLLETVSEDFTCLPLFLANGAESNTAIIGTWFQKTFDCYFSPLAINAFNLSWMAAMWTACKMDHYVATTEFLWSVPCSPQSLDISFAIHPEDAKALWDSVHKTPGEVTQEEVDLFMDCLYSHFHRHFKIHLSATRLVRVSTSVASAHTDGKIKILCHKYLIGVLAYLTELAIFQIE

SEQ ID NO: 40836 - protein, 390 aa, Homo sapiens
MDSYSAPESTPSASSRPEDYFIGATPLQKRLESVRKQSSFILTPPRRKIPQCSQLQEDVDPQKVAFLLHKQWTLYSLTPLYKFSYSNLKEYSRLLNAFIVAEKQKGLAVEVGEDFNIKVIFSTLLGMKGTQRDPEAFLVQGLILSPRLEYSGTILVDCNLCLLGSSDPSTLAFQVAGTAGACHHTRIVSKSQLPSENREGKVLWTGWFCCVFGDSLLETVSEDFTCLPLFLANGAESNTAIIGTWFQKTFDCYFSPLAINAFNLSWMAAMWTACKMDHYVATTEFLWSVPCSPQSLDISFAIHPEDAKALWDSVHKTPGEVTQEEVDLFMDCLYSHFHRHFKIHLSATRLVRVSTSVASAHTDGKIKILCHKYLIGVLAYLTELAIFQIE

SEQ ID NO: 40837 - protein, 344 aa, Homo sapiens; identical to SEQ ID NO: 40835

SEQ ID NO: 40838 - protein, 204 aa, Homo sapiens
MDETVAEFIKRTILKIPMNELTTILKAWDFLSENQLQTVNFRQRKESVVQHLIHLCEEKRASISDAALLDIIYMQFHQHQKVWEVFQMSKGPGEDVDLFDMKQFKNSFKKILQRALKNVTVSFRETEENAVWIRIAWGTQYTKPNQYKPTYVVYYSQTPYAFTSSSMLRRNTPLLGQELEATGKIYLRQEEIILDITEMKKACN

SEQ ID NO: 40839 - protein, 339 aa, Homo sapiens
MDETVAEFIKRTILKIPMNELTTILKAWDFLSENQLQTVNFRQRKESVVQHLIHLCEEKRASISDAALLDIIYMQFHQHQKVWEVFQMSKGPGEDVDLFDMKQFKNSFKKILQRALKNVTVSFRETEENAVWIRIAWGTQYTKPNQYKPTYVVYYSQTPYAFTSSSMLRRNTPLLGQALTIASKHHQIVKMDLRSRYLDSLKAIVFKQYNQTFETHNSTTPLQERSLGLDINMDSRIIHENIVEKERVQRITQETFGDYPQPQLEFAQYKLETKFKSGLNGSILAEREEPLRCLIKFSSPHLLEALKSLAPAGIADAPLSPLLTCIPNKRMNYFKIRDK

SEQ ID NO: 40840 - protein, 305 aa, Homo sapiens
MDETVAEFIKRTILKIPMNELTTILKAWDFLSENQLQTVNFRQRKESVVQHLIHLCEEKRASISDAALLDIIYMQFHQHQKVWEVFQMSKGPGEDVDLFDMKQFKNSFKKILQRALKNVTVSFRETEENAVWIRIAWGTQYTKPNQYKPTYVVYYSQTPYAFTSSSMLRRNTPLLGQTFETHNSTTPLQERSLGLDINMDSRIIHENIVEKERVQRITQETFGDYPQPQLEFAQYKLETKFKSGLNGSILAEREEPLRCLIKFSSPHLLEALKSLAPAGIADAPLSPLLTCIPNKRMNYFKIRDK

SEQ ID NO: 40841 - protein, 319 aa, Homo sapiens
MDETVAEFIKRTILKIPMNELTTILKAWDFLSENQLQTVNFRQRKESVVQHLIHLCEEKRASISDAALLDIICEDVDLFDMKQFKNSFKKILQRALKNVTVSFRETEENAVWIRIAWGTQYTKPNQYKPTYVVYYSQTPYAFTSSSMLRRNTPLLGQALTIASKHHQIVKMDLRSRYLDSLKAIVFKQYNQTFETHNSTTPLQERSLGLDINMDSRIIHENIVEKERVQRITQETFGDYPQPQLEFAQYKLETKFKSGLNGSILAEREEPLRCLIKFSSPHLLEALKSLAPAGIADAPLSPLLTCIPNKRMNYFKIRDK

SEQ ID NO: 40842 - protein, 353 aa, Homo sapiens
MDETVAEFIKRTILKIPMNELTTILKAWDFLSENQLQTVNFRQRKESVVQHLIHLCEEKRASISDAALLDIIYMQFHQHQKVWEVFQMSKGPGEDVDLFDMKQFKNSFKKILQRALKNVTVSFRETEENAVWIRIAWGTQYTKPNQYKPTYVVYYSQTPYAFTSSSMLRRNTPLLGQALTIASKHHQIVKMDLRSRYLDSLKAIVFKQYNQTFETHNSTTPLQERSLGLDINMDSRIIHENIVEKERVQRITQETFGDYPQPQLEFAQYKLETKFKSGLNGSILAEREEPLRCLIKFSSPHLLEALKSLAPAALVCRIQKLLCYSGSHSQGTQDPSSWQKDLYLLFVPLYPRC

SEQ ID NO: 40843 - protein, 300 aa, Homo sapiens
MEQANPLRPDGESKGGVLAHLERLETQVSRSRKQSEELQSVQAQEGALGTKIHKLRRLRDELRAVVRHRRASVKACIANVEPNQTVEINEQEALEEKLENVKAILQAYHFTGLSGKLTSRGVCVCISTAFEGNLLDSYFVDLVIQKPLRIHHHSVPVFIPLEEIAAKYLQTNIQHFLFSLCEYLNAYSGRKYQADRLQSDFAALLTGPLQRNPLCNLLSFTYKLDPGGQSFPFCARLLYKDLTATLPTDVTVTCQGVEVLSTSWEEQRASHETLFCTKPLHQVFASFTRKGEKLDMSLVS

SEQ ID NO: 40844 - protein, 300 aa, Homo sapiens; identical to SEQ ID NO: 40843

SEQ ID NO: 40845 - protein, 294 aa, Homo sapiens
MAGILASGLGVLAHLERLETQVSRSRKQSEELQSVQAQEGALGTKIHKLRRLRDELRAVVRHRRASVKACIANVEPNQTVEINEQEALEEKLENVKAILQAYHFTGLSGKLTSRGVCVCISTAFEGNLLDSYFVDLVIQKPLRIHHHSVPVFIPLEEIAAKYLQTNIQHFLFSLCEYLNAYSGRKYQADRLQSDFAALLTGPLQRNPLCNLLSFTYKLDPGGQSFPFCARLLYKDLTATLPTDVTVTCQGVEVLSTSWEEQRASHETLFCTKPLHQVFASFTRKGEKLDMSLVS

SEQ ID NO: 40846 - protein, 102 aa, Homo sapiens
MQEKYPDAVYLSEGPSSCSMGIRSASRPGFELVIVWRIQIDEDGKVFPKLDLLTKVPQRALELDKNRAIETAPLSFRTLVGLLGIEAALESLIKSLCAEENN

SEQ ID NO: 40847 - protein, 115 aa, Homo sapiens
MEAPSWSVLQRSGDEEKYPDAVYLSEGPSSCSMGIRSASRPGFELVIVWRIQIDEDGKVFPKLDLLTKVPQRALELDKNRAIETAPLSFRTLVGLLGIEAALESLIKSLCAEENN

SEQ ID NO: 40848 - protein, 288 aa, Homo sapiens
MDAELAEVRALQAEIAALRRACEDPPAPWEEKSRVQKSFQAIHQFNLEGWKSSKDLKNQLGHLESELSFLSTLTGINIRNHSKQTEDLTSTEMTEKSIRKVLQRHRLSGNCHMVTFQLEFQILEIQNKERLSSAVTDLNIIMEPTECSELSEFVSRAEERKDLFMFFRSLHFFVEWFEYRKRTFKHLKEKYPDAVYLSEGPSSCSMGIRSASRPGFELVIVWRIQIDEDGKVFPKLDLLTKVPQRALELDKNRAIETAPLSFRTLVGLLGIEAALESLIKSLCAEENN

SEQ ID NO: 40849 - protein, 247 aa, Homo sapiens
KRAGRSDSCAAGPAAVSNAPWTQSWQRCAPCKLRSRPCGERVRTHRRPGKRSPESSIRKVLQRHRLSGNCHMVTFQLEFQILEIQNKERLSSAVTDLNIIMEPTECSELSEFVSRAEERKDLFMFFRSLHFFVEWFEYRKRTFKHLKEKYPDAVYLSEGPSSCSMGIRSASRPGFELVIVWRIQIDEDGKVFPKLDLLTKVPQRALELDKNRAIETAPLSFRTLVGLLGIEAALESLIKSLCAEENN

SEQ ID NO: 40850 - protein, 268 aa, Homo sapiens
MSGKANASKKNAQQLKRNPKRKKDNEEVVLSENKVRNTVKKNKNHLKDLSSEGQTKHTNLKHGKTAASKRKTWQPLSKSTRDHLQTMMESVIMTILSNSIKEKEEIQYHLNFLKKRLLQQCETLKVPPKKMEDLTNVSSLLNMERARDKANEEGLALLQEEIDKMVETTELMTGNIQSLKNKIQILASEVEEEEERVKQMHQINSSGVLSLPELSQKTLKAPTLQKEILALIPNQNALLKDLDILHNSSQMKSMSTFIEEAYKKLDAS

SEQ ID NO: 40851 - protein, 268 aa, Homo sapiens; identical to SEQ ID NO: 40850

SEQ ID NO: 40852 - protein, 561 aa, Homo sapiens
MADHNPDSDSTPRTLLRRVLDTADPRTPRRPRSARAGARRALLETASPRKLSGQTRTIARGRSHGARSVGRSAHIQASGHLEEQTPRTLLKNILLTAPESSILMPESVVKPVPAPQAVQPSRQESSCGSLELQLPELEPPTTLAPGLLAPGRRKQRLRLSVFQQGVDQGLSLSQEPQGNADASSLTRSLNLTFATPLQPQSVQRPGLARRPPARRAVDVGAFLRDLRDTSLAPPNIVLEDTQPFSQPMVGSPNVYHSLPCTPHTGAEDAEQAAGRKTQSSGPGLQKNSPGKPAQFLAGEAEEVNAFALGFLSTSSGVSGEDEVEPLHDGVEEAEKKMEEEGVSVSEMEATGAQGPSRVEEAEGHTEVTEAEGSQGTAEADGPGASSGDEDASGRAASPESASSTPESLQARRHHQFLEPAPAPGAAVLSSEPAEPLLVRHPPRPRTTGPRPRQDPHKAGLSHYVKLFSFYAKMPMERKALEMVEKCLDKYFQHLCDDLEVFAAHAGRKTVKPEDLELLMRRQGLVTDQVSLHVLVERHLPLEYRQLLIPCAYSGNSVFPAQ

SEQ ID NO: 40853 - protein, 261 aa, Homo sapiens
MSWCCLWLCLSSVGRTGSAGPSLPFSELCSLGLLRLRPVFSPLHSGPGKPAQFLAGEAEEVNAFALGFLSTSSGVSGEDEVEPLHDGVEEAEKKMEEEGVSVSEMEATGAQGPSRVEEAEGHTEVTEAEGSQGTAEADGPGASSGDEDASGRAASPESASSTPESLQARRHHQFLEPAPAPGAAVLSSEPAEPLLVRHPPRPRTTGPRPRQDPHKAGLSHYVKLFSFYAKMPMERKALEMVEKCIFVMIWRYLLLMLAARL

SEQ ID NO: 40854 - protein, 561 aa, Homo sapiens; identical to SEQ ID NO: 40852

SEQ ID NO: 40855 - protein, 148 aa, Homo sapiens
MPESVVKPVPAPQAVQPSRQESSCGSLELQLPELEPPTTLAPGLLAPGRRKQRLRLSVFQQGVDQGLSLSQEPQGNADASSLTRSLNLTFATPLQPQSVQRPGLARRPPARRAVDVGAFLRDLRDTSLAPPSKVGFSPAGLWGKLSPL

SEQ ID NO: 40856 - protein, 561 aa, Homo sapiens; identical to SEQ ID NO: 40852

SEQ ID NO: 40857 - protein, 272 aa, Homo sapiens
MRRSRSSAAAKLRGQKRSGASAAPAASAAAALAPSATRTRRSASQAGSKSQAVEKPPSEKPRLRRSSPRAQEEGPGEPPPPELALLPPPPPPPPTPATPTSSASNLDLGEQRERWETFQKRQKLTSEGAAKLLLDTFEYQGLVKHTGGCHCGAVRFEVWASADLHIFDCNCSICKKKQNRHFIVPASRFKLLKGAEHITTYTFNTHKAQHTFCKRCGVQSFYTPRSNPGGFGIAPHCLDEGTVRSMVTEEFNGSDWEKAMKEHKTIKNMSKE

SEQ ID NO: 40858 - protein, 986 aa, Homo sapiens
MVSKSDQLLIVVSILEGRHFPKRPKHMLVVEAKFDGEQLATDPVDHTDQPEFATELAWEIDRKALHQHRLQRTPIKLQCFALDPVTSAKETIGYIVLDLRTAQETKQAPKWYQLLSNKYTKFKSEIQISIALETDTKPPVDSFKAKGAPPRDGKVPAILAGLDPRDIVAVLNEEGGYHQIGPAEYCTDSFIMSVTIAFATQLEQLIPCTMKLPERQPEFFFYYSLLGNDVTNEPFNDLINPNFEPERASVRIRSSVEILRVYLALQSKLQIHLCCGDQSLGSTEIPLTGLLKKGSTEINQHPVTVEGAFTLDPPNRAKQKLAPIPVELAPTVGVSVALQREGIDSQSLIELKTQNEHEPEHSKKKVLTPIKEKTLTGPKSPTVSPVPSHNQSPPTKDDATESEVESLQYDKDTKPNPKASSSVPASLAQLVTTSNASEVASGQKIAVPATSHHFCFSIDLRSIHALEIGFPINCILRYSYPFFGSAAPIMTNPPVEVRKNMEVFLPQSYCAFDFATMPHQLQDTFLRIPLLVELWHKDKMSKDLLLGIARIQLSNILSSEKTRFLGSNGEQCWRQTYSESVPVIAAQGSNNRIADLSYTVTLEDYGLVKMREIFISDSSQGVSAVQQKPSSLPPAPCPSEIQTEPRETLEYKAALELEMWKEMQEDIFENQLKQKELAHMQALAEEWKKRDRERESLVKKKVAEYTILEGKLQKTLIDLEKREQQLASVESELQREKKELQSERQRNLQELQDSIRRAKEDCIHQVELERLKIKQLEEDKHRLQQQLNDAENKYKILEKEFQQFKDQQNNKPEIRLQSEINLLTLEKVELERKLESATKSKLHYKQQWGRALKELARLKQREQESQMARLKKQQEELEQMRLRYLAAEEKDTVKTERQELLDIRNELNRLRQQEQKQYQDSTEIASGKKDGPHGSVLEEGLDDYLTRLIEERDTLMRTGVYNHEDRIISELDRQIREILAKSNASN

SEQ ID NO: 40859 - protein, 960 aa, Homo sapiens
MLVVEAKFDGEQLATDPVDHTDQPEFATELAWEIDRKALHQHRLQRTPIKLQCFALDPVTSAKETIGYIVLDLRTAQETKQAPKWYQLLSNKYTKFKSEIQISIALETDTKPPVDSFKAKGAPPRDGKVPAILAGLDPRDIVAVLNEEGGYHQIGPAEYCTDSFIMSVTIAFATQLEQLIPCTMKLPERQPEFFFYYSLLGNDVTNEPFNDLINPNFEPERASVRIRSSVEILRVYLALQSKLQIHLCCGDQSLGSTEIPLTGLLKKGSTEINQHPVTVEGAFTLDPPNRAKQKLAPIPVELAPTVGVSVALQREGIDSQSLIELKTQNEHEPEHSKKKVLTPIKEKTLTGPKSPTVSPVPSHNQSPPTKDDATESEVESLQYDKDTKPNPKASSSVPASLAQLVTTSNASEVASGQKIAVPATSHHFCFSIDLRSIHALEIGFPINCILRYSYPFFGSAAPIMTNPPVEVRKNMEVFLPQSYCAFDFATMPHQLQDTFLRIPLLVELWHKDKMSKDLLLGIARIQLSNILSSEKTRFLGSNGEQCWRQTYSESVPVIAAQGSNNRIADLSYTVTLEDYGLVKMREIFISDSSQGVSAVQQKPSSLPPAPCPSEIQTEPRETLEYKAALELEMWKEMQEDIFENQLKQKELAHMQALAEEWKKRDRERESLVKKKVAEYTILEGKLQKTLIDLEKREQQLASVESELQREKKELQSERQRNLQELQDSIRRAKEDCIHQVELERLKIKQLEEDKHRLQQQLNDAENKYKILEKEFQQFKDQQNNKPEIRLQSEINLLTLEKVELERKLESATKSKLHYKQQWGRALKELARLKQREQESQMARLKKQQEELEQMRLRYLAAEEKDTVKTERQELLDIRNELNRLRQQEQKQYQDSTEIASGKKDGPHGSVLEEGLDDYLTRLIEERDTLMRTGVYNHEDRIISELDRQIREILAKSNASN

SEQ ID NO: 40860 - protein, 986 aa, Homo sapiens; identical to SEQ ID NO: 40858

SEQ ID NO: 40861 - protein, 380 aa, Homo sapiens
MVSKSDQLLIVVSILEGRHFPKRPKHMLVVEAKFDGEQLATDPVDHTDQPEFATELAWEIDRKALHQHRLQRTPIKLQCFALDPVTSAKETIGYIVLDLRTAQETKQAPKWYQLLSNKYTKFKSEIQISIALETDTKPPVDSFKAKGAPPRDGKVPAILAGLDPRDIVAVLNEEGGYHQIGPAEYCTDSFIMSVTIAFATQLEQLIPCTMKLPERQPEFFFYYSLLGNDVTNEPFNDLINPNFEPERASVRIRSSVEILRVYLALQSKLQIHLCCGDQSLGSTEIPLTGLLKKGSTEINQHPVTVEGAFTLDPPNRAKQKLAPIPVELAPTVGVSVALQREGIDSQDAFWYSALDIIFPLFIFLFLVLDAIRKFANYEEK

SEQ ID NO: 40862 - protein, 1275 aa, Homo sapiens
MSLDFGSVALPVQNEDEEYDEEDYEREKELQQLLTDLPHDMLDDDLSSPELQYSDCSEDGTDGQPHHPEQLEMSWNEQMLPKSQSVNGPSCQGLEPYNKVTYKPYQSSAQNNGSPAQEITGSDTFEGLQQQFLGANENSAENMQIIQLQVLNKAKERQLENLIEKLNESERQIRYLNHQLVIIKDEKDGLTLSLRESQKLFQNGKEREIQLEAQIKALETQIQALKVNEEQMIKKSRTTEMALESLKQQLVDLHHSESLQRAREQHESIVMGLTKKYEEQVLSLQKNLDATVTALKEQEDICSRLKDHVKQLERNQEAIKLEKTEIINKLTRSLEESQKQCAHLLQSGSVQEVAQLQFQLQQAQKAHAMSANMNKALQEELTELKDEISLYESAAKLGIHPSDSEGELNIELTESYVDLGIKKVNWKKSKVTSIVQEEDPNEELSKDEFILKLKAEVQRLLGSNSMKRHLVSQLQNDLKDCHKKIEDLHQVKKDEKSIEVETKTDTSEKPKNQLWPESSTSDVVRDDILLLKNEIQVLQQQNQELKETEGKLRNTNQDLCNQMRQMVQDFDHDKQEAVDRCERTYQQHHEAMKTQIRESLLAKHALEKQQLFEAYERTHLQLRSELDKLNKEVTAVQECYLEVCREKDNLELTLRKTTEKEQQTQEKIKEKLIQQLEKEWQSKLDQTIKAMKKKTLDCGSQTDQVTTSDVISKKEMAIMIEEQKCTIQQNLEQEKDIAIKGAMKKLEIELELKHCENITKQVEIAVQNAHQRWLGELPELAEYQALVKAEQKKWEEQHEVSVNKRISFAVSEAKEKWKSELENMRKNILPGKELEEKIHSLQKELELKNEEVPVVIRAELAKARSEWNKEKQEEIHRIQEQNEQDYRQFLDDHRNKINEVLAAAKEDFMKQKTELLLQKETELQTCLDQSRREWTMQEAKRIQLEIYQYEEDILTVLGVLLSDTQKEHISDSEDKQLLEIMSTCSSKWMSVQYFEKLKGCIQKAFQDTLPLLVENADPEWKKRNMAELSKDSASQGTGQGDPGPAAGHHAQPLALQATEAEADKKKVLEIKDLCCGHCFQELEKAKQECQDLKGKLEKCCRHLQHLERKHKAVVEKIGEENNKVVEELIEENNDMKNKLEELQTLCKTPPRSLSAGAIENACLPCSGGALEELRGQYIKAVKKIKCDMLRYIQESKERAAEMVKAEVLRERQETARKMRKYYLICLQQILQDDGKEGAEKKIMNAASKLATMAKLLETPISSKSQSKTTQSGMSK

SEQ ID NO: 40863 - protein, 1710 aa, Homo sapiens
MSLDFGSVALPVQNEDEEYDEEDYEREKELQQLLTDLPHDMLDDDLSSPELQYSDCSEDGTDGQPHHPEQLEMSWNEQMLPKSQSVNGYNEIQSLYAGEKCGNVWEENRSKTEDRHPVYHPEEGGDEGGSGYSPPSKCEQTDLYHLPENFRPYTNGQKQEFNNQATNVIKFSDPQWNHFQGPSCQGLEPYNKVTYKPYQSSAQNNGSPAQEITGSDTFEGLQQQFLGANENSAENMQIIQLQVLNKAKERQLENLIEKLNESERQIRYLNHQLVIIKDEKDGLTLSLRESQKLFQNGKEREIQLEAQIKALETQIQALKVNEEQMIKKSRTTEMALESLKQQLVDLHHSESLQRAREQHESIVMGLTKKYEEQVLSLQKNLDATVTALKEQEDICSRLKDHVKQLERNQEAIKLEKTEIINKLTRSLEESQKQCAHLLQSGSVQEVAQLQFQLQQAQKAHAMSANMNKALQEELTELKDEISLYESAAKLGIHPSDSEGELNIELTESYVDLGIKKVNWKKSKVTSIVQEEDPNEELSKDEFILKLKAEVQRLLGSNSMKRHLVSQLQNDLKDCHKKIEDLHQVKKDEKSIEVETKTDTSEKPKNQLWPESSTSDVVRDDILLLKNEIQVLQQQNQELKETEGKLRNTNQDLCNQMRQMVQDFDHDKQEAVDRCERTYQQHHEAMKTQIRESLLAKHALEKQQLFEAYERTHLQLRSELDKLNKEVTAVQECYLEVCREKDNLELTLRKTTEKEQQTQEKIKEKLIQQLEKEWQSKLDQTIKAMKKKTLDCGSQTDQVTTSDVISKKEMAIMIEEQKCTIQQNLEQEKDIAIKGAMKKLEIELELKHCENITKQVEIAVQNAHQRWLGELPELAEYQALVKAEQKKWEEQHEVSVNKRISFAVSEAKEKWKSELENMRKNILPGKELEEKIHSLQKELELKNEEVPVVIRAELAKARSEWNKEKQEEIHRIQEQNEQDYRQFLDDHRNKINEVLAAAKEDFMKQKTELLLQKETELQTCLDQSRREWTMQEAKRIQLEIYQYEEDILTVLGVLLSDTQKEHISDSEDKQLLEIMSTCSSKWMSVQYFEKLKGCIQKAFQDTLPLLVENADPEWKKRNMAELSKDSASQGTGQGDPGPAAGHHAQPLALQATEAEADKKKVLEIKDLCCGHCFQELEKAKQECQDLKGKLEKCCRHLQHLERKHKAVVEKIGEENNKVVEELIEENNDMKNKLEELQTLCKTPPRSLSAGAIENACLPCSGGALEELRGQYIKAVKKIKCDMLRYIQESKERAAEMVKAEVLRERQETARKMRKYYLICLQQILQDDGKEGAEKKIMNAASKLATMAKLLETPISSKSQSKTTQSALPLTSEMLIAVKKSKRNDVNQKIPCCIESKSNSVNTITRTLCEQAPKRRAACNLQRLLENSEHQSIKHVGSKETHLEFQFGDGSCKHLNSLPRNVSPEFVPCEGEGGFGLHKKKDLLSDNGSESLPHSAAYPFLGTLGNKPSPRCTPGPSESGCMHITFRDSNERLGLKVYKCNPLMESENAASEKSQGLDVQEPPVKDGGDLSDCLGWPSSSATLSFDSREASFVHGRPQGTLEIPSESVKSKQFSPSGYLSDTEESNMICQTMKCQRYQTPYLSEETTYLEPGKISVNCGHPSRHKADRLKSDFKKLSSTLPSSVCQQPSRKLIVPLSSQQDSGFDSPFVNLD

SEQ ID NO: 40864 - protein, 1654 aa, Homo sapiens
MSLDFGSVALPVQNEDEEYDEEDYEREKELQQLLTDLPHDMLDDDLSSPELQYSDCSEDGTDGQPHHPEQLEMSWNEQMLPKSQSVNGYNEIQSLYAGEKCGNVWEENRSKTEDRHPVYHPEEGGDEGGSGYSPPSKCEQTDLYHLPENFRPYTNGQKQEFNNQATNVIKFSDPQWNHFQGPSCQGLEPYNKVTYKPYQSSAQNNGSPAQEITGSDTFEGLQQQFLGANENSAENMQIIQLQVLNKAKERQLENLIEKLNESERQIRYLNHQLVIIKDEKDGLTLSLRESQKLFQNGKEREIQLEAQIKALETQIQALKVNEEQMIKKSRTTEMALESLKQQLVDLHHSESLQRAREQHESIVMGLTKKYEEQVLSLQKNLDATVTALKEQEDICSRLKDHVKQLERNQEAIKLEKTEIINKLTRSLEESQKQCAHLLQSGSVQEVAQLQFQLQQAQKAHAMSANMNKALQEELTELKDEISLYESAAKLGIHPSDSEGELNIELTESYVDLGIKKVNWKKSKVTSIVQEEDPNEELSKDEFILKLKAEVQRLLGSNSMKRHLVSQLQNDLKDCHKKIEDLHQVKKDEKSIEVETKTDTSEKPKNQLWPESSTSDVVRDDILLLKNEIQVLQQQNQELKETEGKLRNTNQDLCNQMRQMVQDFDHDKQEAVDRCERTYQQHHEAMKTQIRESLLAKHALEKQQLFEAYERTHLQLRSELDKLNKEVTAVQECYLEVCREKDNLELTLRKTTEKEQQTQEKIKEKLIQQLEKEWQSKLDQTIKAMKKKTLDCGSQTDQVTTSDVISKKEMAIMIEEQKCTIQQNLEQEKDIAIKGAMKKLEIELELKHCENITKQVEIAVQNAHQRWLGELPELAEYQALVKAEQKKWEEQHEVSVNKRISFAVSEAKEKWKSELENMRKNILPGKELEEKIHSLQKELELKNEEVPVVIRAELAKARSEWNKEKQEEIHRIQEQNEQDYRQFLDDHRNKINEVLAAAKEDFMKQKTELLLQKETELQTCLDQSRREWTMQEAKRIQLEIYQYEEDILTVLGVLLSDTQKEHISDSEDKQLLEIMSTCSSKWMSVQYFEKLKGCIQKAFQDTLPLLVENADPEWKKRNMAELSKDSASQGTGQGDPGPAAGHHAQPLALQATEAEAEENNKVVEELIEENNDMKNKLEELQTLCKTPPRSLSAGAIENACLPCSGGALEELRGQYIKAVKKIKCDMLRYIQESKERAAEMVKAEVLRERQETARKMRKYYLICLQQILQDDGKEGAEKKIMNAASKLATMAKLLETPISSKSQSKTTQSALPLTSEMLIAVKKSKRNDVNQKIPCCIESKSNSVNTITRTLCEQAPKRRAACNLQRLLENSEHQSIKHVGSKETHLEFQFGDGSCKHLNSLPRNVSPEFVPCEGEGGFGLHKKKDLLSDNGSESLPHSAAYPFLGTLGNKPSPRCTPGPSESGCMHITFRDSNERLGLKVYKCNPLMESENAASEKSQGLDVQEPPVKDGGDLSDCLGWPSSSATLSFDSREASFVHGRPQGTLEIPSESVKSKQFSPSGYLSDTEESNMICQTMKCQRYQTPYLSEETTYLEPGKISVNCGHPSRHKADRLKSDFKKLSSTLPSSVCQQPSRKLIVPLSSQQDSGFDSPFVNLD

SEQ ID NO: 40865 - protein, 592 aa, Homo sapiens
MSLDFGSVALPVQNEDEEYDEEDYEREKELQQLLTDLPHDMLDDDLSSPELQYSDCSEDGTDGQPHHPEQLEMSWNEQMLPKSQSVNGYNEIQSLYAGEKCGNVWEENRSKTEDRHPVYHPEEGGDEGGSGYSPPSKCEQTDLYHLPENFRPYTNGQKQEFNNQATNVIKFSDPQWNHFQGPSCQGLEPYNKVTYKPYQSSAQNNGSPAQEITGSDTFEGLQQQFLGANENSAENMQIIQLQVLNKAKERQLENLIEKLNESERQIRYLNHQLVIIKDEKDGLTLSLRESQKLFQNGKEREIQLEAQIKALETQIQALKVNEEQMIKKSRTTEMALESLKQQLVDLHHSESLQRAREQHESIVMGLTKKYEEQVLSLQKNLDATVTALKEQEDICSRLKDHVKQLERNQEAIKLEKTEIINKLTRSLEESQKQCAHLLQSGSVQEVAQLQFQLQQAQKAHAMSANMNKALQEELTELKDEISLYESAAKLGIHPSDSEGELNIELTESYVDLGIKKVNWKKSKVTSIVQEEDPNEELSKDEFILKLKAEVQRLLGSNSMKRHLVSQLQNDLKDCHKKIEDLHQVKKKKKKKK

SEQ ID NO: 40866 - protein, 68 aa, Homo sapiens
MSLDFGSVALPVQNEDEEYDEEDYEREKELQQLLTDLPHDMLDDDLSSPELQYSDCSEDGTDGQPHHP

SEQ ID NO: 40867 - protein, 1584 aa, Homo sapiens
MSLTSWFLVSSGGTRHRLPREMIFVGRDDCELMLQSRSVDKQHAVINYDASTDEHLVKDLGSLNGTFVNDVRIPEQTYITLKLEDKLRFGYDTNLFTVVQGEMRVPEEALKHEKFTIQLQLSQKSSESELSKSASAKSIDSKVADAATEVQHKTTEALKSEEKAMDISAMPRGTPLYGQPSWWGDDEVDEKRAFKTNGKPEEKNHEAGTSGCGIDAKQVEEQSAAANEEVLFPFCREPSYFEIPTKEFQQPSQITESTIHEIPTKDTPSSHITGAGHASFTIEFDDSTPGKVTIRDHVTKFTSDQRHKSKKSSPGTQDLLGIQTGMMAPENKVADWLAQNNPPQMLWERTEEDSKSIKSDVPVYLKRLKGNKHDDGTQSDSENAGAHRRCSKRATLEEHLRRHHSEHKKLQKVQATEKHQDQAVTSSAHHRGGHGVPHGKLLKQKSEEPSVSIPFLQTALLRSSGSLGHRPSQEMDKMLKNQATSATSEKDNDDDQSDKGTYTIELENPNSEEVEARKMIDKVFGVDDNQDYNRPVINEKHKDLIKDWALSSAAAVMEERKPLTTSGFHHSEEGTSSSGSKRWVSQWASLAANHTRHDQEERIMEFSAPLPLENETEISESGMTVRSTGSATSLASQGERRRRTLPQLPNEEKSLESHRAKVVTQRSEIGEKQDTELQEKETPTQVYQKDKQDADRPLSKMNRAVNGETLKTGGDNKTLLHLGSSAPGKEKSETDKETSLVKQTLAKLQQQEQREEAQWTPTKLSSKNVSGQTDKCREETFKQESQPPEKNSGHSTSKGDRVAQSESKRRKAEEILKSQTPKGGDKKESSKSLVRQGSFTIEKPSPNIPIELIPHINKQTSSTPSSLALTSASRIRERSESLDPDSSMDTTLILKDTEAVMAFLEAKLREDNKTDEGPDTPSYNRDNSISPESDVDTASTISLVTGETERKSTQKRKSFTSLYKDRCSTGSPSKDVTKSSSSGAREKMEKKTKSRSTDVGSRADGRKFVQSSGRIRQPSVDLTDDDQTSSVPHSAISDIMSSDQETYSCKPHGRTPLTSADEHVHSKLEGSKVTKSKTSPVVSGSSSKSTTLPRPRPTRTSLLRRARLGEASDSELADADKASVASEVSTTSSTSKPPTGRRNISRIDLLAQPRRTRLGSLSARSDSEATISRSSASSRTAEAIIRSGARLVPSDKFSPRIRANSISRLSDSKVKSMTSAHGSASVNSRWRRFPTDYASTSEDEFGSNRNSPKHTRLRTSPALKTTRLQSAGSAMPTSSSFKHRIKEQEDYIRDWTAHREEIARISQDLALIAREINDVAGEIDSVTSSGTAPSTTVSTAATTPGSAIDTREELVDRVFDESLNFRKIPPLVHSKTPEGNNGRSGDPRPQAAEPPDHLTITRRRTWSRDEVMGDNLLLSSVFQFSKKIRQSIDKTAGKIRILFKDKDRNWDDIESKLRAESEVPIVKTSSMEISSILQELKRVEKQLQAINAMIDPDGTLEALNNMGFPSAMLPSPPKQKSSPVNNHHSPGQTPTLGQPEARALHPAAVSAAAEFENAESEADFSIHFNRFNPDGEEEDVTVQE

SEQ ID NO: 40868 - protein, 1460 aa, Homo sapiens
MSLTSWFLVSSGGTRHRLPREMIFVGRDDCELMLQSRSVDKQHAVINYDASTDEHLVKDLGSLNGTFVNDVRIPEQTYITLKLEDKLRFGYDTNLFTVVQGEMRVPEEALKHEKFTIQLQLSQKSSESELSKSASAKSIDSKVADAATEVQHKTTEALKSEEKAMDISAMPRGTPLYGQPSWWGDDEVDEKRAFKTNGKPEEKNHEAGTSGCGIDAKQVEEQSAAANEEVLFPFCREPSYFEIPTKEFQQPSQITESTIHEIPTKDTPSSHITGAGHASFTIEFDDSTPGKVTIRDHVTKFTSDQRHKSKKSSPGTQDLLGIQTGMMAPENKVADWLAQNNPPQMLWERTEEDSKSIKSDVPVYLKRLKGNKHDDGTQSDSENAGAHRRCSKRATLEEHLRRHHSEHKKLQKVQATEKHQDQAVVFGVDDNQDYNRPVINEKHKDLIKDWALSSAAAVMEERKPLTTSGFHHSEEGTSSSGSKRWVSQWASLAANHTRHDQEERIMEFSAPLPLENETEISESGMTVRSTGSATSLASQGERRRRTLPQLPNEEKSLESHRAKVVTQRSEIGEKQDTELQEKETPTQVYQKDKQDADRPLSKMNRAVNGETLKTGGDNKTLLHLGSSAPGKEKSETDKETSLVKQTLAKLQQQEQREEAQWTPTKLSSKNVSGQTDKCREETFKQESQPPEKNSGHSTSKGDRVAQSESKRRKAEEILKSQTPKGGDKKESSKSLVRQGSFTIEKPSPNIPIELIPHINKQTSSTPSSLALTSASRIRERSESLDPDSSMDTTLILKDTEAVMAFLEAKLREDNKTDEGPDTPSYNRDNSISPESDVDTASTISLVTGETERKSTQKRKSFTSLYKDRCSTGSPSKDVTKSSSSGAREKMEKKTKSRSTDVGSRADGRKFVQSSGRIRQPSVDLTDDDQTSSVPHSAISDIMSSDQETYSCKPHGRTPLTSADEHVHSKLEGSKVTKSKTSPVVSGSSSKSTTLPRPRPTRTSLLRRARLGEASDSELADADKASVASEVSTTSSTSKPPTGRRNISRIDLLAQPRRTRLGSLSARSDSEATISRSSASSRTAEAIIRSGARLVPSDKFSPRIRANSISRLSDSKVKSMTSAHGSASALKTTRLQSAGSAMPTSSSFKHRIKEQEDYIRDWTAHREEIARISQDLALIAREINDVAGEIDSVTSSGTAPSTTVSTAATTPGSAIDTREEVGDLHGEMHKLVDRVFDESLNFRKIPPLVHSKTPEGNNGRSGDPRPQAAEPPDHLTITRRRTWSRDEVMGDNLLLSSVFQFSKKIRQSIDKTAGKIRILFKDKDRNWDDIESKLRAESEVPIVKTSSMEISSILQELKRVEKQLQAINAMIDPDGTLEALNNMGFPSAMLPSPPKQKSSPVNNHHSPGQTPTLGQPEARALHPAAVSAAAEFENAESEADFSIHFNRFNPDGEEEDVTVQE

SEQ ID NO: 40869 - protein, 1486 aa, Homo sapiens
MSLTSWFLVSSGGTRHRLPREMIFVGRDDCELMLQSRSVDKQHAVINYDASTDEHLVKDLGSLNGTFVNDVRIPEQTYITLKLEDKLRFGYDTNLFTVVQGEMRVPEEALKHEKFTIQLQLSQKSSESELSKSASAKSIDSKVADAATEVQHKTTEALKSEEKAMDISAMPRGTPLYGQPSWWGDDEVDEKRAFKTNGKPEEKNHEAGTSGCGIDAKQVEEQSAAANEEVLFPFCREPSYFEIPTKEFQQPSQITESTIHEIPTKDTPSSHITGAGHASFTIEFDDSTPGKVTIRDHVTKFTSDQRHKSKKSSPGTQDLLGIQTGMMAPENKVADWLAQNNPPQMLWERTEEDSKSIKSDVPVYLKRLKGNKHDDGTQSDSENAGAHRRCSKRATLEEHLRRHHSEHKKLQKVQATEKHQDQAVVFGVDDNQDYNRPVINEKHKDLIKDWALSSAAAVMEERKPLTTSGFHHSEEGTSSSGSKRWVSQWASLAANHTRHDQEERIMEFSAPLPLENETEISESGMTVRSTGSATSLASQGERRRRTLPQLPNEEKSLESHRAKVVTQRSEIGEKQDTELQEKETPTQVYQKDKQDADRPLSKMNRAVNGETLKTGGDNKTLLHLGSSAPGKEKSETDKETSLVKQTLAKLQQQEQREEAQWTPTKLSSKNVSGQTDKCREETFKQESQPPEKNSGHSTSKGDRVAQSESKRRKAEEILKSQTPKGGDKKESSKSLVRQGSFTIEKPSPNIPIELIPHINKQTSSTPSSLALTSASRIRERSESLDPDSSMDTTLILKDTEAVMAFLEAKLREDNKTDEGPDTPSYNRDNSISPESDVDTASTISLVTGETERKSTQKRKSFTSLYKDRCSTGSPSKDVTKSSSSGAREKMEKKTKSRSTDVGSRADGRKFVQSSGRIRQPSVDLTDDDQTSSVPHSAISDIMSSDQETYSCKPHGRTPLTSADEHVHSKLEGSKVTKSKTSPVVSGSSSKSTTLPRPRPTRTSLLRRARLGEASDSELADADKASVASEVSTTSSTSKPPTGRRNISRIDLLAQPRRTRLGSLSARSDSEATISRSSASSRTAEAIIRSGARLVPSDKFSPRIRANSISRLSDSKVKSMTSAHGSASVNSRWRRFPTDYASTSEDEFGSNRNSPKHTRLRTSPALKTTRLQSAGSAMPTSSSFKHRIKEQEDYIRDWTAHREEIARISQDLALIAREINDVAGEIDSVTSSGTAPSTTVSTAATTPGSAIDTREELVDRVFDESLNFRKIPPLVHSKTPEGNNGRSGDPRPQAAEPPDHLTITRRRTWSRDEVMGDNLLLSSVFQFSKKIRQSIDKTAGKIRILFKDKDRNWDDIESKLRAESEVPIVKTSSMEISSILQELKRVEKQLQAINAMIDPDGTLEALNNMGFPSAMLPSPPKQKSSPVNNHHSPGQTPTLGQPEARALHPAAVSAAAEFENAESEADFSIHFNRFNPDGEEEDVTVQE

SEQ ID NO: 40870 - protein, 412 aa, Homo sapiens
MRVPEEALKHEKFTIQLQLSQKSSESELSKSASAKSIDSKVADAATEVQHKTTEALKSEEKAMDISAMPRGTPLYGQPSWWGDDEVDEKRAFKTNGKPEEKNHEAGTSGCGIDAKQVEEQSAAANEEVLFPFCREPSYFEIPTKEFQQPSQITESTIHEIPTKDTPSSHITGAGHASFTIEFDDSTPGKVTIRDHVTKFTSDQRHKSKKSSPGTQDLLGIQTGMMAPENKVADWLAQNNPPQMLWERTEEDSKSIKSDVPVYLKRLKGNKHDDGTQSDSENAGAHRRCSKRATLEEHLRRHHSEHKKLQKVQATEKHQDQAVTSSAHHRGGHGVPHGKLLKQKSEEPSVSIPFLQTALLRSSGSLGHRPSQEMDKMLKNQADCGSVAFCGFMIFKLNLMITPFPFIDLFSFF

SEQ ID NO: 40871 - protein, 133 aa, Homo sapiens
MSLTSWFLVSSGGTRHRLPREMIFVGRDDCELMLQSRSVDKQHAVINYDASTDEHLVKDLGSLNGTFVNDVRIPEQTYITLKLEDKLRFGYDTNLFTVVQGEMRVPEEALKHEKFTIQLQLSQKSSESELSKS

SEQ ID NO: 40872 - protein, 88 aa, Homo sapiens
MSLTSWFLVSSGGTRHRLPREMIFVGRDDCELMLQSRSVDKQHAVINYDASTDEHLVKDLGSLNGTFVNDVRIPEQTYITLKLEDKLR

SEQ ID NO: 40873 - protein, 111 aa, Homo sapiens
MSLTSWFLVSSGGTRHRLPREMIFVGRDDCELMLQSRSVDKQHAVINYDASTDEHLVKDLGSLNGTFVNDVRIPEQTYITLKLEDKLRFGYDTNLFTVVQGEMRVPEEALK

SEQ ID NO: 40874 - protein, 468 aa, Homo sapiens
MSSDQETYSCKPHGRTPLTSADEHVHSKLEGSKVTKSKTSPVVSGSSSKSTTLPRPRPTRTSLLRRARLGEASDSELADADKASVASEVSTTSSTSKPPTGRRNISRIDLLAQPRRTRLGSLSARSDSEATISRSSASSRTAEAIIRSGARLVPSDKFSPRIRANSISRLSDSKVKSMTSAHGSASALKTTRLQSAGSAMPTSSSFKHRIKEQEDYIRDWTAHREEIARISQDLALIAREINDVAGEIDSVTSSGTAPSTTVSTAATTPGSAIDTREEVGDLHGEMHKLVDRVFDESLNFRKIPPLVHSKTPEGNNGRSGDPRPQAAEPPDHLTITRRRTWSRDEVMGDNLLLSSVFQFSKKIRQSIDKTAGKIRILFKDKDRNWDDIESKLRAESEVPIVKTSSMEISSILQELKRVEKQLQAINAMIDPDGTLEALNNMGFPSAMLPSPPKQKSSPVNNHHSPAML

SEQ ID NO: 40875 - protein, 2386 aa, Homo sapiens
METRSPGLNNMKPQSLQLVLEEQVLALQQQMAENQAASWRKLKNSQEAQQRQATLVRKLQAKVLQYRSWCQELEKRLEATGGPIPQRWENVEEPNLDELLVRLEEEQQRCESLAEVNTQLRLHMEKADVVNKALREDVEKLTVDWSRARDELMRKESQWQMEQEFFKGYLKGEHGRLLSLWREVVTFRRHFLEMKSATDRDLMELKAEHVRLSGSLLTCCLRLTVGAQSREPNGSGRMDGREPAQLLLLLAKTQELEKEAHERSQELIQLKSQGDLEKAELQDRVTELSALLTQSQKQNEDYEKMIKALRETVEILETNHTELMEHEASLSRNAQEEKLSLQQVIKDITQVMVEEGDNIAQGSGHENSLELDSSIFSQFDYQDADKALTLVRSVLTRRRQAVQDLRQQLAGCQEAVNLLQQQHDQWEEEGKALRQRLQKLTGERDTLAGQTVDLQGEVDSLSKERELLQKAREELRQQLEVLEQEAWRLRRVNVELQLQGDSAQGQKEEQQEELHLAVRERERLQEMLMGLEAKQSESLSELITLREALESSHLEGELLRQEQTEVTAALARAEQSIAELSSSENTLKTEVADLRAAAVKLSALNEALALDKVGLNQQLLQLEEENQSVCSRMEAAEQARNALQVDLAEAEKRREALWEKNTHLEAQLQKAEEAGAELQADLRDIQEEKEEIQKKLSESRHQQEAATTQLEQLHQEAKRQEEVLARAVQEKEALVREKAALEVRLQAVERDRQDLAEQLQGLSSAKELLESSLFEAQQQNSVIEVTKGQLEVQIQTVTQAKEVIQGEVRCLKLELDTERSQAEQERDAAARQLAQAEQEGKTALEQQKAAHEKEVNQLREKWMQLETEKERVSLLETLLQTQKELADASQQLERLRQDMKVQKLKEQETTGILQTQLQEAQRELKEAARQHRDDLAALQEESSSLLQDKMDLQKQVEDLKSQLVAQDDSQRLVEQEVQEKLRETQEYNRIQKELEREKASLTLSLMEKEQRLLVLQEADSIRQQELSALRQDMQEAQGEQKELSAQMELLRQEVKEKEADFLAQEAQLLEELEASHITEQQLRASLWAQEAKAAQLQLRLRSTESQLEALAAEQQPGNQAQAQAQLASLYSALQQALGSVCESRPELSGGGDSAPSVWGLEPDQNGARSLFKRGPLLTALSAEAVASALHKLHQDLWKTQQTRDVLRDQVQKLEERLTDTEAEKSQVHTELQDLQRQLSQNQEEKSKWEGKQNSLESELMELHETMASLQSRLRRAELQRMEAQGERELLQAAKENLTAQVEHLQAAVVEARAQASAAGILEEDLRTARSALKLKNEEVESERERAQALQEQGELKVAQGKALQENLALLTQTLAEREEEVETLRGQIQELEKQREMQKAALELLSLDLKKRNQEVDLQQEQIQELEKCRSVLEHLPMAVQEREQKLTVQREQIRELEKDRETQRNVLEHQLLELEKKDQMIESQRGQVQDLKKQLVTLECLALELEENHHKMECQQKLIKELEGQRETQRVALTHLTLDLEERSQELQAQSSQIHDLESHSTVLARELQERDQEVKSQREQIEELQRQKEHLTQDLERRDQELMLQKERIQVLEDQRTRQTKILEEDLEQIKLSLRERGRELTTQRQLMQERAEEGKGPSKAQRGSLEHMKLILRDKEKEVECQQEHIHELQELKDQLEQQLQGLHRKVGETSLLLSQREQEIVVLQQQLQEAREQGELKEQSLQSQLDEAQRALAQRDQELEALQQEQQQAQGQEERVKEKADALQGALEQAHMTLKERHGELQDHKEQARRLEEELAVEGRRVQALEEVLGDLRAESREQEKALLALQQQCAEQAQEHEVETRALQDSWLQAQAVLKERDQELEALRAESQSSRHQEEAARARAEALQEALGKAHAALQGKEQHLLEQAELSRSLEASTATLQASLDACQAHSRQLEEALRIQEGEIQDQDLRYQEDVQQLQQALAQRDEELRHQQEREQLLEKSLAQRVQENMIQEKQNLGQEREEEEIRGLHQSVRELQLTLAQKEQEILELRETQQRNNLEALPHSHKTSPMEEQSLKLDSLEPRLQRELERLQAALRQTEAREIEWREKAQDLALSLAQTKASVSSLQEVAMFLQASVLERDSEQQRLQDELELTRRALEKERLHSPGATSTAELGSRGEQGVQLGEVSGVEAEPSPDGMEKQSWRQRLEHLQQAVARLEIDRSRLQRHNVQLRSTLEQVERERRKLKREAMRAAQAGSLEISKATASSPTQQDGRGQKNSDAKCVAELQKEVVLLQAQLTLERKQKQDYITRSAQTSRELAGLHHSLSHSLLAVAQAPEATVLEAETRRLDESLTQSLTSPGPVLLHPSPSTTQAASR

SEQ ID NO: 40876 - protein, 339 aa, Homo sapiens
METRSPGLNNMKPQSLQLVLEEQVLALQQQMAENQAASWRKLKNSQEAQQRQATLVRKLQAKVLQYRSWCQELEKRLEATGGPIPQRWENVEEPNLDELLVRLEEEQQRCESLAEVNTQLRLHMEKADVVNKALREDVEKLTVDWSRARDELMRKESQWQMEQEFFKGYLKGEHGRLLSLWREVVTFRRHFLEMKSATDRDLMELKAEHVRLSGSLLTCCLRLTVGAQSREPNGSGRMDGREPAQLLLLLAKTQELEKEAHERSQELIQLKSQGDLEKAELQDRVTELSALLTQSQKQNEDYEKMIKALRETVEILVHDPLLWKGVGRGLVGSLCFMDR

SEQ ID NO: 40877 - protein, 2442 aa, Homo sapiens
METRSPGLNNMKPQSLQLVLEEQVLALQQQMAENQAASWRKLKNSQEAQQRQATLVRKLQAKVLQYRSWCQELEKRLEATGGPIPQRWENVEEPNLDELLVRLEEEQQRCESLAEVNTQLRLHMEKADVVNKALREDVEKLTVDWSRARDELMRKESQWQMEQEFFKGYLKGEHGRLLSLWREVVTFRRHFLEMKSATDRDLMELKAEHVRLSGSLLTCCLRLTVGAQSREPNGSGRMDGREPAQLLLLLAKTQELEKEAHERSQELIQLKSQGDLEKAELQDRVTELSALLTQSQKQNEDYEKMIKALRETVEILETNHTELMEHEASLSRNAQEEKLSLQQVIKDITQVMVEEGDNIAQGSGHENSLELDSSIFSQFDYQDADKALTLVRSVLTRRRQAVQDLRQQLAGCQEAVNLLQQQHDQWEEEGKALRQRLQKLTGERDTLAGQTVDLQGEVDSLSKERELLQKAREELRQQLEVLEQEAWRLRRVNVELQLQGDSAQGQKEEQQEELHLAVRERERLQEMLMGLEAKQSESLSELITLREALESSHLEGELLRQEQTEVTAALARAEQSIAELSSSENTLKTEVADLRAAAVKLSALNEALALDKVGLNQQLLQLEEENQSVCSRMEAAEQARNALQVDLAEAEKRREALWEKNTHLEAQLQKAEEAGAELQADLRDIQEEKEEIQKKLSESRHQQEAATTQLEQLHQEAKRQEEVLARAVQEKEALVREKAALEVRLQAVERDRQDLAEQLQGLSSAKELLESSLFEAQQQNSVIEVTKGQLEVQIQTVTQAKEVIQGEVRCLKLELDTERSQAEQERDAAARQLAQAEQEGKTALEQQKAAHEKEVNQLREKWEKERSWHQQELAKALESLEREKMELEMRLKEQQTEMEAIQAQREEERTQAESALCQMQLETEKERVSLLETLLQTQKELADASQQLERLRQDMKVQKLKEQETTGILQTQLQEAQRELKEAARQHRDDLAALQEESSSLLQDKMDLQKQVEDLKSQLVAQDDSQRLVEQEVQEKLRETQEYNRIQKELEREKASLTLSLMEKEQRLLVLQEADSIRQQELSALRQDMQEAQGEQKELSAQMELLRQEVKEKEADFLAQEAQLLEELEASHITEQQLRASLWAQEAKAAQLQLRLRSTESQLEALAAEQQPGNQAQAQAQLASLYSALQQALGSVCESRPELSGGGDSAPSVWGLEPDQNGARSLFKRGPLLTALSAEAVASALHKLHQDLWKTQQTRDVLRDQVQKLEERLTDTEAEKSQVHTELQDLQRQLSQNQEEKSKWEGKQNSLESELMELHETMASLQSRLRRAELQRMEAQGERELLQAAKENLTAQVEHLQAAVVEARAQASAAGILEEDLRTARSALKLKNEEVESERERAQALQEQGELKVAQGKALQENLALLTQTLAEREEEVETLRGQIQELEKQREMQKAALELLSLDLKKRNQEVDLQQEQIQELEKCRSVLEHLPMAVQEREQKLTVQREQIRELEKDRETQRNVLEHQLLELEKKDQMIESQRGQVQDLKKQLVTLECLALELEENHHKMECQQKLIKELEGQRETQRVALTHLTLDLEERSQELQAQSSQIHDLESHSTVLARELQERDQEVKSQREQIEELQRQKEHLTQDLERRDQELMLQKERIQVLEDQRTRQTKILEEDLEQIKLSLRERGRELTTQRQLMQERAEEGKGPSKAQRGSLEHMKLILRDKEKEVECQQEHIHELQELKDQLEQQLQGLHRKVGETSLLLSQREQEIVVLQQQLQEAREQGELKEQSLQSQLDEAQRALAQRDQELEALQQEQQQAQGQEERVKEKADALQGALEQAHMTLKERHGELQDHKEQARRLEEELAVEGRRVQALEEVLGDLRAESREQEKALLALQQQCAEQAQEHEVETRALQDSWLQAQAVLKERDQELEALRAESQSSRHQEEAARARAEALQEALGKAHAALQGKEQHLLEQAELSRSLEASTATLQASLDACQAHSRQLEEALRIQEGEIQDQDLRYQEDVQQLQQALAQRDEELRHQQEREQLLEKSLAQRVQENMIQEKQNLGQEREEEEIRGLHQSVRELQLTLAQKEQEILELRETQQRNNLEALPHSHKTSPMEEQSLKLDSLEPRLQRELERLQAALRQTEAREIEWREKAQDLALSLAQTKASVSSLQEVAMFLQASVLERDSEQQRLQDELELTRRALEKERLHSPGATSTAELGSRGEQGVQLGEVSGVEAEPSPDGMEKQSWRQRLEHLQQAVARLEIDRSRLQRHNVQLRSTLEQVERERRKLKREAMRAAQAGSLEISKATASSPTQQDGRGQKNSDAKCVAELQKEVVLLQAQLTLERKQKQDYITRSAQTSRELAGLHHSLSHSLLAVAQAPEATVLEAETRRLDESLTQSLTSPGPVLLHPSPSTTQAASR

SEQ ID NO: 40878 - protein, 114 aa, Homo sapiens
METRSPGLNNMKPQSLQLVLEEQVLALQQQMAENQAASWRKLKNSQEAQQRQATLVRKLQAKVLQYRSWCQELEKRLEATGGPIPQRWENVEEPNLDELLVRLEEEQQRCESLA

SEQ ID NO: 40879 - protein, 684 aa, Homo sapiens
METRSPGLNNMKPQSLQLVLEEQVLALQQQMAENQAASWRKLKNSQEAQQRQATLVRKLQAKVLQYRSWCQELEKRLEATGGPIPQRWENVEEPNLDELLVRLEEEQQRCESLAEVNTQLRLHMEKADVVNKALREDVEKLTVDWSRARDELMRKESQWQMEQEFFKGYLKGEHGRLLSLWREVVTFRRHFLEMKSATDRDLMELKAEHVRLSGSLLTCCLRLTVGAQSREPNGSGRMDGREPAQLLLLLAKTQELEKEAHERSQELIQLKSQGDLEKAELQDRVTELSALLTQSQKQNEDYEKMIKALRETVEILTNHTELMEHEASLSRNAQEEKLSLQQVIKDITQVMVEEGDNIAQGSGHENSLELDSSIFSQFDYQDADKALTLVRSVLTRRRQAVQDLRQQLAGCQEAVNLLQQQHDQWEEEGKALRQRLQKLTGERDTLAGQTVDLQGEVDSLSKERELLQKAREELRQQLEVLEQEAWRLRRVNVELQLQGDSAQGQKEEQQEELHLAVRERERLQEMLMGLEAKQSESLSELITLREALESSHLEGELLRQEQTEVTAALARAEQSIAELSSSENTLKTEVADLRAAAVKLSALNEALALDKVGLNQQLLQLEEENQSVCSRMEAAEQARNALQVDLAEAEKRREALWEKNTHLEAQLQKAEEAGAELQADLRDI

SEQ ID NO: 40880 - protein, 164 aa, Homo sapiens
METRSPGLNNMKPQSLQLVLEEQVLALQQQMAENQAASWRKLKNSQEAQQRQATLVRKLQAKVLQYRSWCQELEKRLEATGGPIPQRWENVEEPNLDELLVRLEEEQQRCESLAEVNTQLRLHMEKADVVNKALREDVEKLTVDWSRARDELMRKESQWQMEQE

SEQ ID NO: 40881 - protein, 538 aa, Homo sapiens
METRSPGLNNMKPQSLQLVLEEQVLALQQQMAENQAASWRKLKNSQEAQQRQATLVRKLQAKVLQYRSWCQELEKRLEATGGPIPQRWENVEEPNLDELLVRLEEEQQRCESLAEVNTQLRLHMEKADVVNKALREDVEKLTVDWSRARDELMRKESQWQMEQEFFKGYLKGEHGRLLSLWREVVTFRRHFLEMKSATDRDLMELKAEHVRLSGSLLTCCLRLTVGAQSREPNGSGRMDGREPAQLLLLLAKTQELEKEAHERSQELIQLKSQGDLEKAELQDRVTELSALLTQSQKQNEDYEKMIKALRETVEILETNHTELMEHEASLSRNAQEEKLSLQQVIKDITQVMVEEGDNIAQGSGHENSLELDSSIFSQFDYQDADKALTLVRSVLTRRRQAVQDLRQQLAGCQEAVNLLQQQHDQWEEEGKALRQRLQKLTGERDTLAGQTVDLQGEVDSLSKERELLQKAREELRQQLEVLEQEAWRLRRVNVELQLQGDSAQGQKEEQQEELHLAVRERERLQSSQLQSCRVLKTP

SEQ ID NO: 40882 - protein, 2481 aa, Homo sapiens
MPPNINWKEIMKVDPDDLPRQEELADNLLISLSKVEVNELKSEKQENVIHLFRITQSLMKMKAQEVELALEEVEKAGEEQAKFENQLKTKVMKLENELEMAQQSAGGRDTRFLRNEICQLEKQLEQKDRELEDMEKELEKEKKVNEQLALRNEEAENENSKLRRENKRLKKKNEQLCQDIIDYQKQIDSQKETLLSRRGEDSDYRSQLSKKNYELIQYLDEIQTLTEANEKIEVQNQEMRKNLEESVQEMEKMTDEYNRMKAIVHQTDNVIDQLKKENDHYQLQVQELTDLLKSKNEEDDPIMVAVNAKVEEWKLILSSKDDEIIEYQQMLHNLREKLKNAQLDADKSNVMALQQGIQERDSQIKMLTEQVEQYTKEMEKNTCIIEDLKNELQRNKGASTLSQQTHMKIQSTLDILKEKTKEAERTAELAEADAREKDKELVEALKRLKDYESGVYGLEDAVVEIKNCKNQIKIRDREIEILTKEINKLELKISDFLDENEALRERVGLEPKTMIDLTEFRNSKHLKQQQYRAENQILLKEASIESLEEERLDLKKKIRQMAQERGKRSATSGLTTEDLNLTENISQGDRISERKLDLLSLKNMSEAQSKNEFLSRELIEKERDLERSRTVIAKFQNKLKELVEENKQLEEGMKEILQAIKEMQKDPDVKGGETSLIIPSLERLVNAIESKNAEGIFDASLHLKAQVDQLTGRNEELRQELRESRKEAINYSQQLAKANLKIDHLEKETSLLRQSEGSNVVFKGIDLPDGIAPSSASIINSQNEYLIHLLQELENKEKKLKNLEDSLEDYNRKFAVIRHQQSLLYKEYLSEKETWKTESKTIKEEKRKLEDQVQQDAIKVKEYNNLLNALQMDSDEMKKILAENSRKITVLQVNEKSLIRQYTTLVELERQLRKENEKQKNELLSMEAEVCEKIGCLQRFKEMAIFKIAALQKVVDNSVSLSELELANKQYNELTAKYRDILQKDNMLVQRTSNLEHLECENISLKEQVESINKELEITKEKLHTIEQAWEQETKLGNESSMDKAKKSITNSDIVSISKKITMLEMKELNERQRAEHCQKMYEHLRTSLKQMEERNFELETKFAELTKINLDAQKVEQMLRDELADSVSKAVSDADRQRILELEKNEMELKVEVSKLREISDIARRQVEILNAQQQSRDKEVESLRMQLLDYQAQSDEKSLIAKLHQHNVSLQLSEATALGKLESITSKLQKMEAYNLRLEQKLDEKEQALYYARLEGRNRAKHLRQTIQSLRRQFSGALPLAQQEKFSKTMIQLQNDKLKIMQEMKNSQQEHRNMENKTLEMELKLKGLEELISTLKDTKGAQKVINWHMKIEELRLQELKLNRELVKDKEEIKYLNNIISEYERTISSLEEEIVQQNKFHEERQMAWDQREVDLERQLDIFDRQQNEILNAAQKFEEATGSIPDPSLPLPNQLEIALRKIKENIRIILETRATCKSLEEKLKEKESALRLAEQNILSRDKVINELRLRLPATAEREKLIAELGRKEMEPKSHHTLKIAHQTIANMQARLNQKEEVLKKYQRLLEKAREEQREIVKKHEEDLHILHHRLELQADSSLNKFKQTAWDLMKQSPTPVPTNKHFIRLAEMEQTVAEQDDSLSSLLVKLKKVSQDLERQREITELKVKEFENIKLQLQENHEDEVKKVKAEVEDLKYLLDQSQKESQCLKSELQAQKEANSRAPTTTMRNLVERLKSQLALKEKQQKALSRALLELRAEMTAAAEERIISATSQKEAHLNVQQIVDRHTRELKTQVEDLNENLLKLKEALKTSKNRENSLTDNLNDLNNELQKKQKAYNKILREKEEIDQENDELKRQIKRLTSGLQGKPLTDNKQSLIEELQRKVKKLENQLEGKVEEVDLKPMKEKNAKEELIRWEEGKKWQAKIEGIRNKLKEKEGEVFTLTKQLNTLKDLFAKADKEKLTLQRKLKTTGMTVDQVLGIRALESEKELEELKKRNLDLENDILYMRAHQALPRDSVVEDLHLQNRYLQEKLHALEKQFSKDTYSKPSISGIESDDHCQREQELQKENLKLSSENIELKFQLEQANKDLPRLKNQVRDLKEMCEFLKKEKAEVQRKLGHVRGSGRSGKTIPELEKTIGLMKKVVEKVQRENEQLKKASGILTSEKMANIEQENEKLKAELEKLKAHLGHQLSMHYESKTKGTEKIIAENERLRKELKKETDAAEKLRIAKNNLEILNEKMTVQLEETGKRLQFAESRGPQLEGADSKSWKSIVVTRMYETKLKELETDIAKKNQSITDLKQLVKEATEREQKVNKYNEDLEQQIKILKHVPEGAETEQGLKRELQVLRLANHQLDKEKAELIHQIEANKDQSGAESTIPDADQLKEKIKDLETQLKMSDLEKQHLKEEIKKLKKELENFDPSFFEEIEDLKYNYKEEVKKNILLEEKVKKLSEQLGVELTSPVAASEEFEDEEESPVNFPIY

SEQ ID NO: 40883 - protein, 1539 aa, Homo sapiens
MAIFKIAALQKVVDNSVSLSELELANKQYNELTAKYRDILQKDNMLVQRTSNLEHLECENISLKEQVESINKELEITKEKLHTIEQAWEQETKLGNESSMDKAKKSITNSDIVSISKKITMLEMKELNERQRAEHCQKMYEHLRTSLKQMEERNFELETKFAELTKINLDAQKVEQMLRDELADSVSKAVSDADRQRILELEKNEMELKVEVSKLREISDIARRQVEILNAQQQSRDKEVESLRMQLLDYQAQSDEKSLIAKLHQHNVSLQLSEATALGKLESITSKLQKMEAYNLRLEQKLDEKEQALYYARLEGRNRAKHLRQTIQSLRRQFSGALPLAQQEKFSKTMIQLQNDKLKIMQEMKNSQQEHRNMENKTLEMELKLKGLEELISTLKDTKGAQKVINWHMKIEELRLQELKLNRELVKDKEEIKYLNNIISEYERTISSLEEEIVQQNKFHEERQMAWDQREVDLERQLDIFDRQQNEILNAAQKFEEATGSIPDPSLPLPNQLEIALRKIKENIRIILETRATCKSLEEKLKEKESALRLAEQNILSRDKVINELRLRLPATAEREKLIAELGRKEMEPKSHHTLKIAHQTIANMQARLNQKEEVLKKYQRLLEKAREEQREIVKKHEEDLHILHHRLELQADSSLNKFKQTAWDLMKQSPTPVPTNKHFIRLAEMEQTVAEQDDSLSSLLVKLKKVSQDLERQREITELKVKEFENIKLQLQENHEDEVKKVKAEVEDLKYLLDQSQKESQCLKSELQAQKEANSRAPTTTMRNLVERLKSQLALKEKQQKALSRALLELRAEMTAAAEERIISATSQKEAHLNVQQIVDRHTRELKTQVEDLNENLLKLKEALKTSKNRENSLTDNLNDLNNELQKKQKAYNKILREKEEIDQENDELKRQIKRLTSGLQGKPLTDNKQSLIEELQRKVKKLENQLEGKVEEVDLKPMKEKNAKEELIRWEEGKKWQAKIEGIRNKLKEKEGEVFTLTKQLNTLKDLFAKADKEKLTLQRKLKTTGMTVDQVLGIRALESEKELEELKKRNLDLENDILYMRAHQALPRDSVVEDLHLQNRYLQEKLHALEKQFSKDTYSKPSISGIESDDHCQREQELQKENLKLSSENIELKFQLEQANKDLPRLKNQVRDLKEMCEFLKKEKAEVQRKLGHVRGSGRSGKTIPELEKTIGLMKKVVEKVQRENEQLKKASGILTSEKMANIEQENEKLKAELEKLKAHLGHQLSMHYESKTKGTEKIIAENERLRKELKKETDAAEKLRIAKNNLEILNEKMTVQLEETGKRLQFAESRGPQLEGADSKSWKSIVVTRMYETKLKELETDIAKKNQSITDLKQLVKEATEREQKVNKYNEDLEQQIKILKHVPEGAETEQGLKRELQVLRLANHQLDKEKAELIHQIEANKDQSGAESTIPDADQLKEKIKDLETQLKMSDLEKQHLKEEIKKLKKELENFDPSFFEEIEDLKYNYKEEVKKNILLEEKVKKLSEQLGVELTSPVAASEEFEDEEESPVNFPIY

SEQ ID NO: 40884 - protein, 804 aa, Homo sapiens
MPPNINWKEIMKVDPDDLPRQEELADNLLISLSKVEVNELKSEKQENVIHLFRITQSLMKMKAQEVELALEEVEKAGEEQAKFENQLKTKVMKLENELEMAQQSAGGRDTRFLRNEICQLEKQLEQKDRELEDMEKELEKEKKVNEQLALRNEEAENENSKLRRENKRLKKKNEQLCQDIIDYQKQIDSQKETLLSRRGEDSDYRSQLSKKNYELIQYLDEIQTLTEANEKIEVQNQEMRKNLEESVQEMEKMTDEYNRMKAIVHQTDNVIDQLKKENDHYQLQVQELTDLLKSKNEEDDPIMVAVNAKVEEWKLILSSKDDEIIEYQQMLHNLREKLKNAQLDADKSNVMALQQGIQERDSQIKMLTEQVEQYTKEMEKNTCIIEDLKNELQRNKGASTLSQQTHMKIQSTLDILKEKTKEAERTAELAEADAREKDKELVEALKRLKDYESGVYGLEDAVVEIKNCKNQIKIRDREIEILTKEINKLELKISDFLDENEALRERVGLEPKTMIDLTEFRNSKHLKQQQYRAENQILLKEIESLEEERLDLKKKIRQMAQERGKRSATSGLTTEDLNLTENISQGDRISERKLDLLSLKNMSEAQSKNEFLSRELIEKERDLERSRTVIAKFQNKLKELVEENKQLEEGMKEILQAIKEMQKDPDVKGGETSLIIPSLERLVNAIESKNAEGIFDASLHLKAQVDQLTGRNEELRQELRESRKEAINYSQQLAKANLKIDHLEKETSLLRQSEGSNVVFKGIDLPDGIAPSSASIINSQNEYLIHLLQELENKEKVKEFRRFS

SEQ ID NO: 40885 - protein, 549 aa, Homo sapiens
KMAQQSAGGRDTRFLRNEICQLEKQLEQKDRELEDMEKELEKEKKVNEQLALRNEEAENENSKLRRENKRLKKKNEQLCQDIIDYQKQIDSQKETLLSRRGEDSDYRSQLSKKNYELIQYLDEIQTLTEANEKIEVQNQEMRKNLEESVQEMEKMTDEYNRMKAIVHQTDNVIDQLKKENDHYQLQVQELTDLLKSKNEEDDPIMVAVNAKVEEWKLILSSKDDEIIEYQQMLHNLREKLKNAQLDADKSNVMALQQGIQERDSQIKMLTEQVEQYTKEMEKNTCIIEDLKNELQRNKGASTLSQQTHMKIQSTLDILKEKTKEAERTAELAEADAREKDKELVEALKRLKDYESGVYGLEDAVVEIKNCKNQIKIRDREIEILTKEINKLELKISDFLDENEALRERVGLEPKTMIDLTEFRNSKHLKQQQYRAENQILLKEIESLEEERLDLKKKIRQMAQERGKRSATSGLTTEDLNLTENISQGDRISERKLDLLSLKNMSEAQSKNEFLSRELIEKERDLERSRTVIAKFQNKCYRIKECRRNL

SEQ ID NO: 40886 - protein, 1539 aa, Homo sapiens; identical to SEQ ID NO: 40883

SEQ ID NO: 40887 - protein, 2479 aa, Homo sapiens
MPPNINWKEIMKVDPDDLPRQEELADNLLISLSKVEVNELKSEKQENVIHLFRITQSLMKMKAQEVELALEEVEKAGEEQAKFENQLKTKVMKLENELEMAQQSAGGRDTRFLRNEICQLEKQLEQKDRELEDMEKELEKEKKVNEQLALRNEEAENENSKLRRENKRLKKKNEQLCQDIIDYQKQIDSQKETLLSRRGEDSDYRSQLSKKNYELIQYLDEIQTLTEANEKIEVQNQEMRKNLEESVQEMEKMTDEYNRMKAIVHQTDNVIDQLKKENDHYQLQVQELTDLLKSKNEEDDPIMVAVNAKVEEWKLILSSKDDEIIEYQQMLHNLREKLKNAQLDADKSNVMALQQGIQERDSQIKMLTEQVEQYTKEMEKNTCIIEDLKNELQRNKGASTLSQQTHMKIQSTLDILKEKTKEAERTAELAEADAREKDKELVEALKRLKDYESGVYGLEDAVVEIKNCKNQIKIRDREIEILTKEINKLELKISDFLDENEALRERVGLEPKTMIDLTEFRNSKHLKQQQYRAENQILLKEIESLEEERLDLKKKIRQMAQERGKRSATSGLTTEDLNLTENISQGDRISERKLDLLSLKNMSEAQSKNEFLSRELIEKERDLERSRTVIAKFQNKLKELVEENKQLEEGMKEILQAIKEMQKDPDVKGGETSLIIPSLERLVNAIESKNAEGIFDASLHLKAQVDQLTGRNEELRQELRESRKEAINYSQQLAKANLKIDHLEKETSLLRQSEGSNVVFKGIDLPDGIAPSSASIINSQNEYLIHLLQELENKEKKLKNLEDSLEDYNRKFAVIRHQQSLLYKEYLSEKETWKTESKTIKEEKRKLEDQVQQDAIKVKEYNNLLNALQMDSDEMKKILAENSRKITVLQVNEKSLIRQYTTLVELERQLRKENEKQKNELLSMEAEVCEKIGCLQRFKEMAIFKIAALQKVVDNSVSLSELELANKQYNELTAKYRDILQKDNMLVQRTSNLEHLECENISLKEQVESINKELEITKEKLHTIEQAWEQETKLGNESSMDKAKKSITNSDIVSISKKITMLEMKELNERQRAEHCQKMYEHLRTSLKQMEERNFELETKFAELTKINLDAQKVEQMLRDELADSVSKAVSDADRQRILELEKNEMELKVEVSKLREISDIARRQVEILNAQQQSRDKEVESLRMQLLDYQAQSDEKSLIAKLHQHNVSLQLSEATALGKLESITSKLQKMEAYNLRLEQKLDEKEQALYYARLEGRNRAKHLRQTIQSLRRQFSGALPLAQQEKFSKTMIQLQNDKLKIMQEMKNSQQEHRNMENKTLEMELKLKGLEELISTLKDTKGAQKVINWHMKIEELRLQELKLNRELVKDKEEIKYLNNIISEYERTISSLEEEIVQQNKFHEERQMAWDQREVDLERQLDIFDRQQNEILNAAQKFEEATGSIPDPSLPLPNQLEIALRKIKENIRIILETRATCKSLEEKLKEKESALRLAEQNILSRDKVINELRLRLPATAEREKLIAELGRKEMEPKSHHTLKIAHQTIANMQARLNQKEEVLKKYQRLLEKAREEQREIVKKHEEDLHILHHRLELQADSSLNKFKQTAWDLMKQSPTPVPTNKHFIRLAEMEQTVAEQDDSLSSLLVKLKKVSQDLERQREITELKVKEFENIKLQLQENHEDEVKKVKAEVEDLKYLLDQSQKESQCLKSELQAQKEANSRAPTTTMRNLVERLKSQLALKEKQQKALSRALLELRAEMTAAAEERIISATSQKEAHLNVQQIVDRHTRELKTQVEDLNENLLKLKEALKTSKNRENSLTDNLNDLNNELQKKQKAYNKILREKEEIDQENDELKRQIKRLTSGLQGKPLTDNKQSLIEELQRKVKKLENQLEGKVEEVDLKPMKEKNAKEELIRWEEGKKWQAKIEGIRNKLKEKEGEVFTLTKQLNTLKDLFAKADKEKLTLQRKLKTTGMTVDQVLGIRALESEKELEELKKRNLDLENDILYMRAHQALPRDSVVEDLHLQNRYLQEKLHALEKQFSKDTYSKPSISGIESDDHCQREQELQKENLKLSSENIELKFQLEQANKDLPRLKNQVRDLKEMCEFLKKEKAEVQRKLGHVRGSGRSGKTIPELEKTIGLMKKVVEKVQRENEQLKKASGILTSEKMANIEQENEKLKAELEKLKAHLGHQLSMHYESKTKGTEKIIAENERLRKELKKETDAAEKLRIAKNNLEILNEKMTVQLEETGKRLQFAESRGPQLEGADSKSWKSIVVTRMYETKLKELETDIAKKNQSITDLKQLVKEATEREQKVNKYNEDLEQQIKILKHVPEGAETEQGLKRELQVLRLANHQLDKEKAELIHQIEANKDQSGAESTIPDADQLKEKIKDLETQLKMSDLEKQHLKEEIKKLKKELENFDPSFFEEIEDLKYNYKEEVKKNILLEEKVKKLSEQLGVELTSPVAASEEFEDEEESPVNFPIY

SEQ ID NO: 40888 - protein, 373 aa, Homo sapiens
MSLRRHIGNPEYLMKRIPQNPRYQHIKSRLDTGNSMTKYTEKLEEIKKNYRYKKDELFKRLKVTTFAQLIIQVASLSDQTLEVTAEEIQRLEDNDSAASDPDAETTARTNGKGNPGEQSPSPEQFINNAGAGDSSRSTLQSVISGVGELDLDKGPVKKAEPHTKDKPYPDCPFLLLDVRDRDSYQQCHIVGAYSYPIATLSRTMNPYSNDILEYKNAHGKIIILYDDDERLASQAATTMCERGFENLFMLSGGLKVLAQKFPEGLITGSLPASCQQALPPGSARKRSSPKGPPLPAENKWRFTPEDLKKIEYYLEEEQGPADHPSRLNQANSSGRESKVPGARSAQNLPGGGPASHSNPRSLSSGHLQGKPWK

SEQ ID NO: 40889 - protein, 301 aa, Homo sapiens
MSLRRHIGNPEYLMKRIPQNPRYQHIKSRLDTGNSMTKYTEKLEEIKKNYRYKKDELFKRLKVTTFAQLIIQVASLSDQTLEVTAEEIQRLEDNDSAASDPDAETTARTNGKGNPGEQSPSPEQFINNAGAGDSSRSTLQSVISGVGELDLDKGPVKKAEPHTKDKPYPDCPFLLLDVRDRDSYQQCHIVGAYSYPIATLSRTMNPYSNDILEYKNAHGKIIILYDDDERLASQAATTMCERGFENLFMLSGGRLNQANSSGRESKVPGARSAQNLPGGGPASHSNPRSLSSGHLQGKPWK

SEQ ID NO: 40890 - protein, 54 aa, Homo sapiens
MSLRRHIGNPEYLMKRIPQNPRYQHIKSRLDTGACVYLTSSPALPDCAMNGLCF

SEQ ID NO: 40891 - protein, 285 aa, Homo sapiens
MSLRRHIGNPEYLMKRIPQNPRYQHIKSRLDTDYRYKKDELFKRLKVTTFAQLIIQVASLSDQTLEVTAEEIQRLEDNDSAASDPDAETTARTNGKGNPGEQSPSPEQFINNAGAGDSSRSTLQSVISGVGELDLDKGPVKKAEPHTKDKPYPDCPFLLLDVRDRDSYQQCHIVGAYSYPIATLSRTMNPYSNDILEYKNAHGKIIILYDDDERLASQAATTMCERGFENLFMLSGGRLNQANSSGRESKVPGARSAQNLPGGGPASHSNPRSLSSGHLQGKPWK

SEQ ID NO: 40892 - protein, 399 aa, Homo sapiens
MSSRSTKDLIKSKWGSKPSNSKSETTLEKLKGEIAHLKTSVDEITSGKGKLTDKERHRLLEKIRVLEAEKEKNAYQLTEKDKEIQRLRDQLKARYSTTTLLEQLEETTREGERREQVLKALSEEKDVLKQQLSAATSRIAELESKTNTLRLSQTVAPNCFNSSINNIHEMEIQLKDALEKNQQWLVYDQQREVYVKGLLAKIFELEKKTETAAHSLPQQTKKPESEGYLQEEKQKCYNDLLASAKKDLEVERQTITQLSFELSEFRRKYEETQKEVHNLNQLLYSQRRADVQHLEDDRHKTEKIQKLREENDIARGKLEEEKKRSEELLSQVQFLYTSLLKQQEEQTRVALLEQQMQACTLDFENEKLDRQHVQHQLHVILKELRKARNNTVGILDTKS

SEQ ID NO: 40893 - protein, 464 aa, Homo sapiens
MSSRSTKDLIKSKWGSKPSNSKSETTLEKLKGEIAHLKTSVDEITSGKGKLTDKERHRLLEKIRVLEAEKEKNAYQLTEKDKEIQRLRDQLKARYSTTTLLEQLEETTREGERREQVLKALSEEKDVLKQQLSAATSRIAELESKTNTLRLSQTVAPNCFNSSINNIHEMEIQLKDALEKNQQWLVYDQQREVYVKGLLAKIFELEKKTETAAHSLPQQTKKPESEGYLQEEKQKCYNDLLASAKKDLEVERQTITQLSFELSEFRRKYEETQKEVHNLNQLLYSQRRADVQHLEDDRHKTEKIQKLREENDIARGKLEEEKKRSEELLSQVQFLYTSLLKQQEEQTRVALLEQQMQACTLDFENEKLDRQHVQHQLHVILKELRKARNQITQLESLKQLHEFAITEPLVTFQGETENREKVAASPKSPTAALNESLVECPKCNIQYPATEHRDLLVHVEYCSK

SEQ ID NO: 40894 - protein, 208 aa, Homo sapiens
  VARIANT 1: note = MOD_RES - Any amino acid
XSSINNIHEMEIQLKDALEKNQQWLVYDQQREVYVKGLLAKIFELEKKTETAAHSLPQQTKKPESEGYLQEEKQKCYNDLLASAKKDLEVERQTITQLSFELSEFRRKYEETQKEVHNLNQLLYSQRRADVQHLEDDRHKTEKIQKLREENDIARGKLEEEKKRSEELLSQVQFLYTSLLKQQEEQTRVALLEQQVLIRVASKFNSAC

SEQ ID NO: 40895 - protein, 474 aa, Homo sapiens
MAAASVSAASGSHLSNSFAEPSRSNGSMVRHSSSPYVVYPSDKPFLNSDLRRSPSKPTLAYPESNSRAIFSALKNLQDKIRRLELERIQAEESVKTLSRETIEYKKVLDEQIQERENSKNEESKHNQELTSQLLAAENKCNLLEKQLEYMRNMIKHAEMERTSVLEKQVSLERERQHDQTHVQSQLEKLDLLEQEYNKLTTMQALAEKKMQELEAKLHEEEQERKRMQAKAAELQTGLETNRLIFEDKATPCVPNARRIKKKKSKPPEKSTSPSHAVVANVQLVLHLMKQHSKALCNDRVINSIPLAKQVSSRGGKSKKLSVTPPSSNGINEELSEVLQTLQDEFGQMSFDHQQLAKLIQESPTVELKDKLECELEALVGRMEAKANQITKVRKYQAQLEKQKLEKQKKELKATKKTLDEERNSSSRSGITGTTNKKDFMKLRPGEKRRKNLQLLKDMQSIQNSLQSSSLCWDY

SEQ ID NO: 40896 - protein, 500 aa, Homo sapiens
MAAASVSAASGSHLSNSFAEPSRSNGSMVRHSSSPYVVYPSDKPFLNSDLRRSPSKPTLAYPESNSRAIFSALKNLQDKIRRLELERIQAEESVKTLSRETIEYKKVLDEQIQERENSKNEESKHNQELTSQLLAAENKCNLLEKQLEYMRNMIKHAEMERTSVLEKQVSLERERQHDQTHVQSQLEKLDLLEQEYNKLTTMQALAEKKMQELEAKLHEEEQERKRMQAKAAELQTGLETNRLIFEDKATPCVPNARRIKKKKSKPPEKKSSRNYFGAQPHYRLCLGDMPFVAGKSTSPSHAVVANVQLVLHLMKQHSKALCNDRVINSIPLAKQVSSRGGKSKKLSVTPPSSNGINEELSEVLQTLQDEFGQMSFDHQQLAKLIQESPTVELKDKLECELEALVGRMEAKANQITKVRKYQAQLEKQKLEKQKKELKATKKTLDEERNSSSRSGITGTTNKKDFMKLRPGEKRRKNLQLLKDMQSIQNSLQSSSLCWDY

SEQ ID NO: 40897 - protein, 270 aa, Homo sapiens
MAAASVSAASGSHLSNSFAEPSRSNGSMVRHSSSPYVVYPSDKPFLNSDLRRSPSKPTLAYPESNSRAIFSALKNLQDKIRRLELERIQAEESVKTLSRETIEYKKVLDEQIQERENSKNEESKHNQELTSQLLAAENKCNLLEKQLEYMRNMIKHAEMERTSVLEKQVSLERERQHDQTHVQSQLEKLDLLEQEYNKLTTMQALAEKKMQELEAKLHEEEQERKRMQAKAAELQTGLETNRLIFEDKATPCVPNARRIKKKKSKPPEKV

SEQ ID NO: 40898 - protein, 491 aa, Homo sapiens
MLTRIDNSFAEPSRSNGSMVRHSSSPYVVYPSDKPFLNSDLRRSPSKPTLAYPESNSRAIFSALKNLQDKIRRLELERIQAEESVKTLSRETIEYKKVLDEQIQERENSKNEESKHNQELTSQLLAAENKCNLLEKQLEYMRNMIKHAEMERTSVLEKQVSLERERQHDQTHVQSQLEKLDLLEQEYNKLTTMQALAEKKMQELEAKLHEEEQERKRMQAKAAELQTGLETNRLIFEDKATPCVPNARRIKKKKSKPPEKKSSRNYFGAQPHYRLCLGDMPFVAGKSTSPSHAVVANVQLVLHLMKQHSKALCNDRVINSIPLAKQVSSRGGKSKKLSVTPPSSNGINEELSEVLQTLQDEFGQMSFDHQQLAKLIQESPTVELKDKLECELEALVGRMEAKANQITKVRKYQAQLEKQKLEKQKKELKATKKTLDEERNSSSRSGITGTTNKKDFMKLRPGEKRRKNLQLLKDMQSIQNSLQSSSLCWDY

SEQ ID NO: 40899 - protein, 597 aa, Homo sapiens
MFPVAPKPQDSSQPSDRLMTEKQQEEAEWESINVLLMMHGLKPLSLVKRTDLKDLIIFDKQSSQRMRQNLKLLVEETSCQQNMIQELIETNQQLRNELQLEQSRAANQEQRANDLEQIMESVKSKIGELEDESLSRACHQQNKIKDLQKEQKTLQVKCQHYKKKRTEQEETIASLQMEVCRLKKEEEDRIVTQNRVFAYLCKRVPHTVLDRQLLCLIDYYESKIRKIHTQRQYKEDESQSEEENDYRNLDASPTYKGLLMSLQNQLKESKSKIDALSSEKLNLQKDLETRPTQHELRLYKQQVKKLEKALKKNVKLQELINHKKAEDTEKKDEPSKYNQQQALIDQRYFQVLCSINSIIHNPRAPVIIYKQTKGGVQNFNKDLVQDCGFEHLVPVIEMWADQLTSLKDLYKSLKTLSAELVPWLNLKKQDENEGIKVEDLLFIVDTMLEEVENKEKDSNMPHFQTLQAIVSHFQKLFDVPSLNGVYPRMNEVYTRLGEMNNAVRNLQELLELDSSSSLCVLVSTVGKLCRLINEDVNEQVMQVLGPEDLQSIIYKLEEHEEFFPAFQAFTNDLLEILEIDDLDAIVPAVKKLKVLSY

SEQ ID NO: 40900 - protein, 212 aa, Homo sapiens
MFPVAPKPQDSSQPSDRLMTEKQQEEAEWESINVLLMMHGLKPLSLVKRTDLKDLIIFDKQSSQRMRQNLKLLVEETSCQQNMIQELIETNQQLRNELQLEQSRAANQEQRANDLEQIMESVKSKIGELEDESLSRACHQQNKIKDLQKEQKTLQVKCQHYKKKRTEQEETIASLQMEVCRLKKEEEDRIVTQNRVFAYLCKRVPHTVLDRQ

SEQ ID NO: 40901 - protein, 116 aa, Homo sapiens
MFPVAPKPQDSSQPSDRLMTEKQQEEAEWESINVLLMMHGLKPLSLVKRTDLKDLIIFDKQSSQRMRQNLKLLVEETSCQQNMIQELIETNQQLRNELQLEQSRAANQEQRANDLE

SEQ ID NO: 40902 - protein, 554 aa, Homo sapiens
MFPVAPKPQDSSQPSDRLMTEKQQEEAEWESINVLLMMHGLKPLSLVKRTDLKDLIIFDKQSSQRMRQNLKLLVEETSCQQNMIQELIETNQQLRNELQLEQSRAANQEQRANDLEQIMESVKSKIGELEDESLSRACHQQNKIKDLQKEQKTLQVKCQHYKKKRTEQEETIASLQMEVCRLKKEEEDRIVTQNRVFAYLCKRVPHTVLDRQLLCLIDYYESKIRKIHTQRQYKEDESQSEEENDYRNLDASPTYKGLLMSLQNQLKESKSKIDALSSEKLNLQKDLETRPTQHELRLYKQQVKKLEKALKKNVKLQELINHKKAEDTEKKDEPSKYNQQQALIDQRYFQVLCSINSIIHNPRAPVIIYKQTKGGVQNFNKDLVQDCGFEHLVPVIEMWADQLTSLKDLYKSLKTLSAELVPWLNLKKQDENEGIKVEDLLFIVDTMLEEVENKEKDSNMPHFQTLQAIVSHFQKLFDVPSLNGVYPRMNEVYTRLGEMNNAVRNLQELLELDSSSSLCVLVSTVGKLCRLINEDVNEQVMQVLGPEDLQRYLF

SEQ ID NO: 40903 - protein, 597 aa, Homo sapiens; identical to SEQ ID NO: 40899

SEQ ID NO: 40904 - protein, 23 aa, Homo sapiens
MFPVAPKPQDSSQPSDRLMTEKQ

SEQ ID NO: 40905 - protein, 577 aa, Homo sapiens
MTEQEEAEWESINVLLMMHGLKPLSLVKRTDLKDLIIFDKQSSQRMRQNLKLLVEETSCQQNMIQELIETNQQLRNELQLEQSRAANQEQRANDLEQIMESVKSKIGELEDESLSRACHQQNKIKDLQKEQKTLQVKCQHYKKKRTEQEETIASLQMEVCRLKKEEEDRIVTQNRVFAYLCKRVPHTVLDRQLLCLIDYYESKIRKIHTQRQYKEDESQSEEENDYRNLDASPTYKGLLMSLQNQLKESKSKIDALSSEKLNLQKDLETRPTQHELRLYKQQVKKLEKALKKNVKLQELINHKKAEDTEKKDEPSKYNQQQALIDQRYFQVLCSINSIIHNPRAPVIIYKQTKGGVQNFNKDLVQDCGFEHLVPVIEMWADQLTSLKDLYKSLKTLSAELVPWLNLKKQDENEGIKVEDLLFIVDTMLEEVENKEKDSNMPHFQTLQAIVSHFQKLFDVPSLNGVYPRMNEVYTRLGEMNNAVRNLQELLELDSSSSLCVLVSTVGKLCRLINEDVNEQVMQVLGPEDLQSIIYKLEEHEEFFPAFQAFTNDLLEILEIDDLDAIVPAVKKLKVLSY

SEQ ID NO: 40906 - protein, 1221 aa, Homo sapiens
MLFPLQVAAVTSSVRDDPLEHCVSPRTRARSPEICKMADNLDEFIEEQKARLAEDKAELESDPPYMEMKGKLSAKLSENSKILISMAKENIPPNSQQTRGSLGIDYGLSLPLGEDYERKKHKLKEELRQDYRRYLTQERLKLERNKEYNQFLRGKEESSEKFRQVEKSTEPKSQRNKKPIGQVKPDLTSQIQTSCENSEGPRKDVLTPSEAYEELLNQRRLEEDRYRQLDDEIELRNRRIIKKANEEVGISNLKHQRFASKAGIPDRRFHRFNEDRVFDRRYHRPDQDPEVSEEMDERFRYESDFDRRLSRVYTNDRMHRNKRGNMPPMEHDGDVIEQSNIRISSAENKSAPDNETSKSANQDTCSPFAGMLFGGEDRELIQRRKEKYRLELLEQMAEQQRNKRREKDLELRVAASGAQDPEKSPDRLKQFSVAPRHFEEMIPPERPRIAFQTPLPPLSAPSVPPIPSVHPVPSQNEDLRSGLSSALGEMVSPRIAPLPPPPLLPPLATNYRTPYDDAYYFYGSRNTFDPSLAYYGSGMMGVQPAAYVSAPVTHQLAQPVVNTVGQNELKITSDQVINSGLIFEDKPKPSKQSLQSYQEALQQQIREREERRKKEREEKEEYEAKLEAEMRTYNPWGKGGGGAPLRDAKGNLITDLNRMHRQNIDAYHNPDARTYEDKRAVVSLDPNLATSNAENLEDAANKSSGHMQTQSSPFARGNVFGEPPTELQIKQQELYKNFLRFQIEEKKQREEAERERLRIAEEKEERRLAEQRARIQQEYEEEQEKKREKEEEQRLKNEEHIRLAEERQKEAERKKKEEEEKYNLQLQHYCERDNLIGEETKHMRQPSPIVPALQNKIASKLQRPPSVDSIIRSFIHESSMSRAQSPPVPARKNQLRAEEEKKNVIMELSEMRKQLRSEERRLQERLLHMDSDDEIPIRKKERNPMDIFDMARHRLQAPVRRQSPKGLDAATFQNVHDFNELKDRDSETRVDLKFMYLDPPRDHHTLEIQQQALLREQQKRLNRIKMQEGAKVDLDAIPSAKVREQRMPRDDTSDFLKNSLLESDSAFIGAYGETYPAIEDDVLPPPSQLPSARERRRNKWKGLDIDSSRPNVAPDGLSLKSISSVNVDELRVRNEERMRRLNEFHNKPINTDDESSLVDPDDIMKHIGDDGSNSVATEPWLRPGTSETLKRFMAEQLNQEQQQIPGKPGTFTWQGLSTAHG

SEQ ID NO: 40907 - protein, 1256 aa, Homo sapiens
MLFPLQVAAVTSSVRDDPLEHCVSPRTRARSPEICKMADNLDEFIEEQKARLAEDKAELESDPPYMEMKGKLSAKLSENSKILISMAKENIPPNSQQTRGSLGIDYGLSLPLGEDYERKKHKLKEELRQDYRRYLTQKVFSGTSKKNFLSTSETDPSTLGVSLPIGERLSAKERLKLERNKEYNQFLRGKEESSEKFRQVEKSTEPKSQRNKKPIGQVKPDLTSQIQTSCENSEGPRKDVLTPSEAYEELLNQRRLEEDRYRQLDDEIELRNRRIIKKANEEVGISNLKHQRFASKAGIPDRRFHRFNEDRVFDRRYHRPDQDPEVSEEMDERFRYESDFDRRLSRVYTNDRMHRNKRGNMPPMEHDGDVIEQSNIRISSAENKSAPDNETSKSANQDTCSPFAGMLFGGEDRELIQRRKEKYRLELLEQMAEQQRNKRREKDLELRVAASGAQDPEKSPDRLKQFSVAPRHFEEMIPPERPRIAFQTPLPPLSAPSVPPIPSVHPVPSQNEDLRSGLSSALGEMVSPRIAPLPPPPLLPPLATNYRTPYDDAYYFYGSRNTFDPSLAYYGSGMMGVQPAAYVSAPVTHQLAQPVVNTVGQNELKITSDQVINSGLIFEDKPKPSKQSLQSYQEALQQQIREREERRKKEREEKEEYEAKLEAEMRTYNPWGKGGGGAPLRDAKGNLITDLNRMHRQNIDAYHNPDARTYEDKRAVVSLDPNLATSNAENLEDAANKSSGHMQTQSSPFARGNVFGEPPTELQIKQQELYKNFLRFQIEEKKQREEAERERLRIAEEKEERRLAEQRARIQQEYEEEQEKKREKEEEQRLKNEEHIRLAEERQKEAERKKKEEEEKYNLQLQHYCERDNLIGEETKHMRQPSPIVPALQNKIASKLQRPPSVDSIIRSFIHESSMSRAQSPPVPARKNQLRAEEEKKNVIMELSEMRKQLRSEERRLQERLLHMDSDDEIPIRKKERNPMDIFDMARHRLQAPVRRQSPKGLDAATFQNVHDFNELKDRDSETRVDLKFMYLDPPRDHHTLEIQQQALLREQQKRLNRIKMQEGAKVDLDAIPSAKVREQRMPRDDTSDFLKNSLLESDSAFIGAYGETYPAIEDDVLPPPSQLPSARERRRNKWKGLDIDSSRPNVAPDGLSLKSISSVNVDELRVRNEERMRRLNEFHNKPINTDDESSLVDPDDIMKHIGDDGSNSVATEPWLRPGTSETLKRFMAEQLNQEQQQIPGKPGTFTWQGLSTAHG

SEQ ID NO: 40908 - protein, 876 aa, Homo sapiens
MDERFRYESDFDRRLSRVYTNDRMHRNKRGNMPPMEHDGDVIEQSNIRISSAENKSAPDNETSKSANQDTCSPFAGMLFGGEDRELIQRRKEKYRLELLEQMAEQQRNKRREKDLELRVAASGAQDPEKSPDRLKQFSVAPRHFEEMIPPERPRIAFQTPLPPLSAPSVPPIPSVHPVPSQNEDLRSGLSSALGEMVSPRIAPLPPPPLLPPLATNYRTPYDDAYYFYGSRNTFDPSLAYYGSGMMGVQPAAYVSAPVTHQLAQPVVNTVGQNELKITSDQVINSGLIFEDKPKPSKQSLQSYQEALQQQIREREERRKKEREEKEEYEAKLEAEMRTYNPWGKGGGGAPLRDAKGNLISHMQTQSSPFARGNVFGEPPTELQIKQQELYKNFLRFQIEEKKQREEAERERLRIAEEKEERRLAEQRARIQQEYEEEQEKKREKEEEQRLKNEEHIRLAEERQKEAERKKKEEEEKYNLQLQHYCERDNLIGEETKHMRQPSPIVPALQNKIASKLQRPPSVDSIIRSFIHESSMSRAQSPPVPARKNQLRAEEEKKNVIMELSEMRKQLRSEERRLQERLLHMDSDDEIPIRKKERNPMDIFDMARHRLQAPVRRQSPKGLDAATFQNVHDFNELKDRDSETRVDLKFMYLDPPRDHHTLEIQQQALLREQQKRLNRIKMQEGAKVDLDAIPSAKVREQRMPRDDTSDFLKNSLLESDSAFIGAYGETYPAIEDDVLPPPSQLPSARERRRNKWKGLDIDSSRPNVAPDGLSLKSISSVNVDELRVRNEERMRRLNEFHNKPINTDDESSLVDPDDIMKHIGDDGSNSVATEPWLRPGTSETLKRFMAEQLNQEQQQIPGKPGTFTWQGLSTAHG

SEQ ID NO: 40909 - protein, 876 aa, Homo sapiens; identical to SEQ ID NO: 40908

SEQ ID NO: 40910 - protein, 558 aa, Homo sapiens
MPWRRRRNRVSALEGGREEEAPPEAAAVPPALLTSPQQTEAAAERILLRGIFEIGRDSCDVVLSERALRWRPIQPERPAGDSKYDLLCKEEFIELKDIFSVKLKRRCSVKQQRSGTLLGITLFICLKKEQNKLKNSTLDLINLSEDHCDIWFRQFKKILAGFPNRPKSLKILLNPQSHKKEATQVYYEKVEPLLKLAGIKTDVTIMEYEGHALSLLKECELQGFDGGHRKPLFAIHWSVQRLFTGMQTLEPSVVCVGGDGSASEVAHALLLRAQKNAGMETDRILTPVRAQLPLGLIPAGSTNVLAHSLHGVPHVITATLHIIMGHVQLVDVCTFSTAGKLLRFGFSAMFGFGGRTLALAEKYRWMSPNQRRDFAVVKALAKLKAEDCEISFLPFNSSDDVQERRAQGSPKSDCNDQWQMIQGQFLNVSIMAIPCLCSVAPRGLAPNTRLNNGSMALIIARNTSRPEFIKHLKRYASVKNQFNFPFVETYTVEEVKVHPRNNTGGYNPEEEEDETASENCFPWNVDGDLMEVASEVHIRLHPRLISLYGGSMEEMIPK

SEQ ID NO: 40911 - protein, 419 aa, Homo sapiens
MPWRRRRNRVSALEGGREEEAPPEAAAVPPALLTSPQQTEAAAERILLRGIFEIGRDSCDVVLSERALRWRPIQPERPAGDSKYDLLCKEEFIELKDIFSVKLKRRCSVKQQRSGTLLGITLFICLKKEQNKLKNSTLDLINLSEDHCDIWFRQFKKILAGSTNVLAHSLHGVPHVITATLHIIMGHVQLVDVCTFSTAGKLLRFGFSAMFGFGGRTLALAEKYRWMSPNQRRDFAVVKALAKLKAEDCEISFLPFNSSDDVQERRAQGSPKSDCNDQWQMIQGQFLNVSIMAIPCLCSVAPRGLAPNTRLNNGSMALIIARNTSRPEFIKHLKRYASVKNQFNFPFVETYTVEEVKVHPRNNTGGYNPEEEEDETASENCFPWNVDGDLMEVASEVHIRLHPRLISLYGGSMEEMIPK

SEQ ID NO: 40912 - protein, 463 aa, Homo sapiens
MPWRRRRNRVSALEGGREEEAPPEAAAVPPALLTSPQQTEAAAERILLRGIFEIGRDSCDVVLSERALRWRPIQPERPAGDSKYDLLCKEEFIELKDIFSVKLKRRCSVKQQRSGTLLGITLFICLKKEQNKLKNSTLDLINLSEDHCDIWFRQFKKILAGFPNRPKSLKILLNPQSHKKEATQVYYEKVEPLLKLAGIKTDVTRSTNVLAHSLHGVPHVITATLHIIMGHVQLVDVCTFSTAGKLLRFGFSAMFGFGGRTLALAEKYRWMSPNQRRDFAVVKALAKLKAEDCEISFLPFNSSDDVQERRAQGSPKSDCNDQWQMIQGQFLNVSIMAIPCLCSVAPRGLAPNTRLNNGSMALIIARNTSRPEFIKHLKRYASVKNQFNFPFVETYTVEEVKVHPRNNTGGYNPEEEEDETASENCFPWNVDGDLMEVASEVHIRLHPRLISLYGGSMEEMIPK

SEQ ID NO: 40913 - protein, 532 aa, Homo sapiens
MPWRRRRNRVSALEGGREEEAPPEAAAVPPALLTSPQQTEAAAERILLRGIFEIGRDSCDVVLSERALRWRPIQPERPAGDSKYDLLCKEEFIELKDIFSVKLKRRCSVKQQRSGTLLGITLFICLKKEQNKLKNSTLDLINLSEDHCDIWFRQFKKILAGFPNRPKSLKILLNPQSHKKEATQVYYEKVEPLLKLAGIKTDVTIMEYEGHALSLLKECELQGFDGVVCVGGDGSASEVAHALLLRAQKNAGMETDRILTPVRAQLPLGLIPAGSTNVLAHSLHGVPHVITATLHIIMGHVQLVDVCTFSTAGKLLRFGFSAMFGFGGRTLALAEKYRWMSPNQRRDFAVVKALAKLKAEDCEISFLPFNSSDDVQERRAQGSPKSDCNDQWQMIQGQFLNVSIMAIPCLCSVAPRGLAPNTRLNNGSMALIIARNTSRPEFIKHLKRYASVKNQFNFPFVETYTVEEVKVHPRNNTGGYNPEEEEDETASENCFPWNVDGDLMEVASEVHIRLHPRLISLYGGSMEEMIPK

SEQ ID NO: 40914 - protein, 514 aa, Homo sapiens
MPWRRRRNRVSALEGGREEEAPPEAAAVPPALLTSPQQTEAAAERILLRGIFEIGRDSCDVVLSERALRWRPIQPERPAGDSKYDLLCKEEFIELKDIFSVKLKRRCSVKQQRSGTLLGITLFICLKKEQNKLKNSTLDLINLSEDHCDIWFRQFKKILAVMEYEGHALSLLKECELQGFDGGHRKPLFAIHWSVQRLFTGMQTLEPSVVCVGGDGSASEVAHALLLRAQKNAGMETDRILTPVRAQLPLGLIPAGSTNVLAHSLHGVPHVITATLHIIMGHVQLVDVCTFSTAGKLLRFGFSAMFGFGGRTLALAEKYRWMSPNQRRDFAVVKALAKLKAEDCEISFLPFNSSDDVQERRAQGSPKSDCNDQWQMIQGQFLNVSIMAIPCLCSVAPRGLAPNTRLNNGSMALIIARNTSRPEFIKHLKRYASVKNQFNFPFVETYTVEEVKVHPRNNTGGYNPEEEEDETASENCFPWNVDGDLMEVASEVHIRLHPRLISLYGGSMEEMIPK

SEQ ID NO: 40915 - protein, 267 aa, Homo sapiens
MHLLLFQLLVLLPLGKTTRHQDGRQNQSSLSPVLLPRNQRELPTGNHEEAEEKPDLFVAVPHLVATSPAGEGQRQREKMLSRFGRFWKKPEREMHPSRDSDSEPFPPGTQSLIQPIDGMKMEKSPLREEAKKFWHHFMFRKTPASQGVILPIKSHEVHWETCRTVPFSQTITHEGCEKVVVQNNLCFGKCGSVHFPGAAQHSHTSCSHCLPAKFTTMHLPLNCTELSSVIKVVMLVEECQCKVKTEHEDGHILHAGSQDSFIPGVSA

SEQ ID NO: 40916 - protein, 262 aa, Homo sapiens
MAWLEDVDFLEDVPLLEDIPLLEDVPLLEDVPLLEDTSRLEDINLMEDMALLEDVDLLEDTDFLEDLDFSEAMDLREDKDFLEDMDSLEDMALLEDVDLLEDTDFLEDPDFLEAIDLREDKDFLEDMDSLEDLEAIGRCGFSGRHGFFGRRRFSGRPKLSGRLGLLGRRGFSGRLGGYWKTWIFWKTWIFWKTWIFRKTYIGWKTWIFSGRCGLTGRPGFGGRRRFFWKTLTDWKTWISFWKTLIDWKTWISFWKTLIDWKI

SEQ ID NO: 40917 - protein, 454 aa, Homo sapiens
MLAENLVEEFEMKEDEPWYDHQDLQQDLQLAAELGKTLLDRNTELEDSVQQMYTTNQEQLQEIEYLTKQVELLRQMNEQHAKVYEQLDVTARELEETNQKLVADSKASQQKILSLTETIECLQTNIDHLQSQVEELKSSGQGRRSPGKCDQEKPAPSFACLKELYDLRQHFVYDHVFAEKITSLQGQPSPDEEENEHLKKTVTMLQAQLSLERQKRVTMEEEYGLVLKENSELEQQLGATGAYRARALELEAEVAEMRQMLQSEHPFVNGVEKLVPDSLYVPFKEPSQSLLEEMFLTVPESHRKPLKRSSSETILSSLAGSDIVKGHEETCIRRAKAVKQRGISLLHEVDTQYSALKVKYEELLKKCQEEQDSLSHKAVQTSRAAAKDLTGVNAQSEPVASGWELASVNPEPVSSPTTPPEYKALFKEIFSCIKKTKQEIDEQRTKYRSLSSHS

SEQ ID NO: 40918 - protein, 205 aa, Homo sapiens
MLGAKPHWLPGPLHSPGLPLVLVLLALGAGWAQEGSEPVLLEGECLVVCEPGRAAAGGPGGAALGEAPPGRVAFAAVRSHHHEPAGETGNGTSGAIYFDQVLVNEGGGFDRASGSFVAPVRGVYSFRFHVVKVYNRQTVQVSLMLNTWPVISAFANDPDVTREAATSSVLLPLDPGDRVSLRLRRGNLLGGWKYSSFSGFLIFPL

SEQ ID NO: 40919 - protein, 442 aa, Homo sapiens [sequence omitted]

SEQ ID NO: 40920 - protein, 376 aa, Homo sapiens
MEEFHGRTLHDDDSCQVIPVLPQVMMILIPGQTLPLQLFHPQEVSMVRNLIQKDRTFAVLAYSNVQEREAQFGTTAEIYAYREEQDFGIEIVKVKAIGRQRFKVLELRTQSDGIQQAKVQILPECVLPSTMSAVQLESLNKCQIFPSKPVSREDQCSYKWWQKYQKRKFHCANLTSWPRWLYSLYDAETLMDRIKKQLREWDENLKDDSLPSNFSYRVAACLPIDDVLRIQLLKIGSAIQRLRCELDIMNKCTSLCCKQCQETEITTKNEIFSLSLCGPMAAYVNPHGYVHETLTVYKACNLNLIGRPSTEHSWFPGYAWTVAQCKICASHIGWKFTATKKDMSPQKFWGLTRSALLPTIPDTEDEISPDKVILCL

SEQ ID NO: 40921 - protein, 441 aa, Homo sapiens
MAGEGDQQDAAHNMGNHLPLLPESEEEDEMEVEDQDSKEAKKPNIINFDTSLPTSHTYLGADMEEFHGRTLHDDDSCQVIPVLPQVMMILIPGQTLPLQLFHPQEVSMVRNLIQKDRTFAVLAYSNVQEREAQFGTTAEIYAYREEQDFGIEIVKVKAIGRQRFKVLELRTQSDGIQQAKVQILPECVLPSTMSAVQLESLNKCQIFPSKPVSREDQCSYKWWQKYQKRKFHCANLTSWPRWLYSLYDAETLMDRIKKQLREWDENLKDDSLPSNPIDFSYRVAACLPIDDVLRIQLLKIGSAIQRLRCELDIMNKCTSLCCKQCQETEITTKNEIFSLSLCGPMAAYVNPHGYVHETLTVYKACNLNLIGRPSTEHSWFPGYAWTVAQCKICASHIGWKFTATKKDMSPQKFWGLTRSALLPTIPDTEDEISPDKVILCL

SEQ ID NO: 40922 - protein, 444 aa, Homo sapiens
MEEEGKKGKKPGIVSPFKRVFLKGEKSRDKKAHEKVTERRPLHTVVLSLPERVEPDRLLSDYIEKEVKYLGQLTSIPGYLNPSSRTEILHFIDNAKRAHQLPGHLTQEHDAVLSLSAYNVKLAWRDGEDIILRVPIHDIAAVSYVRDDAAHLVVLKTAQDPGISPSQSLCAESSRGLSAGSLSESAVGPVEACCLVILAAESKVAAEELCCLLGQVFQVVYTESTIDFLDRAIFDGASTPTHHLSLHSDDSSTKVDIKETYEVEASTFCFPESVDVGGASPHSKTISESELSASATELLQDYMLTLRTKLSSQEIQQFAALLHEYRNGASIHEFCINLRQLYGDSRKFLLLGLRPFIPEKDSQHFENFLETIGVKDGRGIITDSFGRHRRALSTTSSSTTNGNRATGSSDDRSAPSEGDEWDRMISDISSDIEALGCSMDQDSA

SEQ ID NO: 40923 - protein, 465 aa, Homo sapiens
MHSSCRQRRNQNLSKEIPQTEFHTGYSMENEPGIVSPFKRVFLKGEKSRDKKAHEKVTERRPLHTVVLSLPERVEPDRLLSDYIEKEVKYLGQLTSIPGYLNPSSRTEILHFIDNAKRAHQLPGHLTQEHDAVLSLSAYNVKLAWRDGEDIILRVPIHDIAAVSYVRDDAAHLVVLKTAQDPGISPSQSLCAESSRGLSAGSLSESAVGPVEACCLVILAAESKVAAEELCCLLGQVFQVVYTESTIDFLDRAIFDGASTPTHHLSLHSDDSSTKVDIKETYEVEASTFCFPESVDVGGASPHSKTISESELSASATELLQDYMLTLRTKLSSQEIQQFAALLHEYRNGASIHEFCINLRQLYGDSRKFLLLGLRPFIPEKDSQHFENFLETIGVKDGRGIITDSFGRHRRALSTTSSSTTNGNRATGSSDDRSAPSEGDEWDRMISDISSDIEALGCSMDQDSA

SEQ ID NO: 40924 - protein, 438 aa, Homo sapiens
MENEPGIVSPFKRVFLKGEKSRDKKAHEKVTERRPLHTVVLSLPERVEPDRLLSDYIEKEVKYLGQLTSIPGYLNPSSRTEILHFIDNAKRAHQLPGHLTQEHDAVLSLSAYNVKLAWRDGEDIILRVPIHDIAAVSYVRDDAAHLVVLKTAQDPGISPSQSLCAESSRGLSAGSLSESAVGPVEACCLVILAAESKVAAEELCCLLGQVFQVVYTESTIDFLDRAIFDGASTPTHHLSLHSDDSSTKVDIKETYEVEASTFCFPESVDVGGASPHSKTISESELSASATELLQDYMLTLRTKLSSQEIQQFAALLHEYRNGASIHEFCINLRQLYGDSRKFLLLGLRPFIPEKDSQHFENFLETIGVKDGRGIITDSFGRHRRALSTTSSSTTNGNRATGSSDDRSAPSEGDEWDRMISDISSDIEALGCSMDQDSA

SEQ ID NO: 40925 - protein, 386 aa, Homo sapiens
MEEEGKKGKKYLGQLTSIPGYLNPSSRTEILHFIDNAKRAHQLPGHLTQEHDAVLSLSAYNVKLAWRDGEDIILRVPIHDIAAVSYVRDDAAHLVVLKTAQDPGISPSQSLCAESSRGLSAGSLSESAVGPVEACCLVILAAESKVAAEELCCLLGQVFQVVYTESTIDFLDRAIFDGASTPTHHLSLHSDDSSTKVDIKETYEVEASTFCFPESVDVGGASPHSKTISESELSASATELLQDYMLTLRTKLSSQEIQQFAALLHEYRNGASIHEFCINLRQLYGDSRKFLLLGLRPFIPEKDSQHFENFLETIGVKDGRGIITDSFGRHRRALSTTSSSTTNGNRATGSSDDRSAPSEGDEWDRMISDISSDIEALGCSMDQDSA

SEQ ID NO: 40926 - protein, 71 aa, Homo sapiens [sequence omitted]

SEQ ID NO: 40927 - protein, 353 aa, Homo sapiens
MEEEGKKGKKPGIVSPFKRVFLKGEKSRDKKAHEKVTERRPLHTVVLSLPERVEPDRLLSDYIEKEVKYLGQLTSIPGYLNPSSRTEILHFIDNAKRAHQLPGHLTQEHDAVLSLSAYNVKLAWRDGEDIILRVPIHDIAAVSYVRDDAAHLVVLKTDDSSTKVDIKETYEVEASTFCFPESVDVGGASPHSKTISESELSASATELLQDYMLTLRTKLSSQEIQQFAALLHEYRNGASIHEFCINLRQLYGDSRKFLLLGLRPFIPEKDSQHFENFLETIGVKDGRGIITDSFGRHRRALSTTSSSTTNGNRATGSSDDRSAPSEGDEWDRMISDISSDIEALGCSMDQDSA

SEQ ID NO: 40928 - protein, 407 aa, Homo sapiens
MRRNLRLGPSSGADAQGQGAPRPGLAAPRMLLPPASQASRGSGSTGCSLMAQEVDTAQGAEMRRGAGAARGRASWCWALALLWLAVVPGWSRVSGIPSRRHWPVPYKRFDFRPKPDPYCQAKYTFCPTGSPIPVMEGDDDIEVFRLQAPVWEFKYGDLLGHLKIMHDAIGFRSTLTGKNYTMEWYELFQLGNCTFPHLRPEMDAPFWCNQGAACFFEGIDDVHWKENGTLVQVATISGNMFNQMAKWVKQDNETGIYYETWNVKASPEKGAETWFDSYDCSKFVLRTFNKLAEFGAEFKNIETNYTRIFLYSGEPTYLGNETSVFGPTGNKTLGLAIKRFYYPFKPHLPTKEFLLSLLQIFDAVIVHKQFYLFYNFEYWFLPMKFPFIKITYEEIPLPIRNKTLSGL

SEQ ID NO: 40929 - protein, 273 aa, Homo sapiens
MEGDDDIEVFRLQAPVWEFKYGDLLGHLKIMHDAIGFRSTLTGKNYTMEWYELFQLGNCTFPHLRPEMDAPFWCNQGAACFFEGIDDVHWKENGTLVQVATISGNMFNQMAKWVKQDNETGIYYETWNVKASPEKGAETWFDSYDCSKFVLRTFNKLAEFGAEFKNIETNYTRIFLYSGEPTYLGNETSVFGPTGNKTLGLAIKRFYYPFKPHLPTKEFLLSLLQIFDAVIVHKQFYLFYNFEYWFLPMKFPFIKITYEEIPLPIRNKTLSGL

SEQ ID NO: 40930 - protein, 358 aa, Homo sapiens
MAQEVDTAQGAEMRRGAGAARGRASWCWALALLWLAVVPGWSRVSGIPSRRHWPVPYKRFDFRPKPDPYCQAKYTFCPTGSPIPVMEGDDDIEVFRLQAPVWEFKYGDLLGHLKIMHDAIGFRSTLTGKNYTMEWYELFQLGNCTFPHLRPEMDAPFWCNQGAACFFEGIDDVHWKENGTLVQVATISGNMFNQMAKWVKQDNETGIYYETWNVKASPEKGAETWFDSYDCSKFVLRTFNKLAEFGAEFKNIETNYTRIFLYSGEPTYLGNETSVFGPTGNKTLGLAIKRFYYPFKPHLPTKEFLLSLLQIFDAVIVHKQFYLFYNFEYWFLPMKFPFIKITYEEIPLPIRNKTLSGL

SEQ ID NO: 40931 - protein, 311 aa, Homo sapiens
MEATRRRQHLGATGGPGAQLGASFLQARHGSVSADEAARTAPFHLDLWFYFTLQNWVLDFGRPIAMLVFPLEWFPLNKPSVGDYFHMAYNVITPFLLLKLIERSPRTLPRSITYVSIIIFIMGASIHLVGDSVNHRLLFSGYQHHLSVRENPIIKNLKPETLIDSFELLYYYDEYLGHCMWYIPFFLILFMYFSGCFTASKAESLIPGPALLLVAPSGLYYWYLVTEGQIFILFIFTFFAMLALVLHQKRKRLFLDSNGLFLFSSFALTLLLVALWVAWLWNDPVLRKKYPGVIYVPEPWAFYTLHVSSRH

SEQ ID NO: 40932 - protein, 182 aa, Homo sapiens
MRLPARLPSTSTSGSTSHCRTGFWTLGVPLPCWYSLSSGFHSTSPVLGTTSTWPTTSSRPFSCSSGCFTASKAESLIPGPALLLVAPSGLYYWYLVTEGQIFILFIFTFFAMLALVLHQKRKRLFLDSNGLFLFSSFALTLLLVALWVAWLWNDPVLRKKYPGVIYVPEPWAFYTLHVSSRH

SEQ ID NO: 40933 - protein, 343 aa, Homo sapiens
MAAVAGKERRARGRPRPETLGAIPRREGGEAGLSRAFKPLAQAPLSCETSLRKLKFKGKKHGSVSADEAARTAPFHLDLWFYFTLQNWVLDFGRPIAMLVFPLEWFPLNKPSVGDYFHMAYNVITPFLLLKLIERSPRTLPRSITYVSIIIFIMGASIHLVGDSVNHRLLFSGYQHHLSVRENPIIKNLKPETLIDSFELLYYYDEYLGHCMWYIPFFLILFMYFSGCFTASKAESLIPGPALLLVAPSGLYYWYLVTEGQIFILFIFTFFAMLALVLHQKRKRLFLDSNGLFLFSSFALTLLLVALWVAWLWNDPVLRKKYPGVIYVPEPWAFYTLHVSSRH

SEQ ID NO: 40934 - protein, 286 aa, Homo sapiens
MNPASDGGTSESIFDLDYASWGIRSTLMVAGFVFYLGVFVVCHQLSSSLNATYRSLVAREKVFWDLAATRAVFGVQSTAAGLWALLGDPVLHADKARGQQNWCWFHITTATGFFCFENVAVHLSNLIFRTFDLFLVIHHLFAFLGFLGCLVNLQAGHYLAMTTLLLEMSTPFTCVSWMLLKAGWSESLFWKLNQWLMIHMFHCRMVLTYHMWWVCFWHWDGLVSSLYLPHLTLFLVGLALLTLIINPYWTHKKTQQLLNPVDWNFAQPEAKSRPEGNGQLLRKKRP

SEQ ID NO: 40935 - protein, 354 aa, Homo sapiens
MYREWVVVNVFMMLYVQLVQGSSNEHGPVKRSSQSTLERSEQQIRAASSLEELLRITHSEDWKLWRCRLRLKSFTSMDSRSASHRSTRFAATFYDIETLKVIDEEWQRTQCSPRETCVEVASELGKSTNTFFKPPCVNVFRCGGCCNEESLICMNTSTSYISKQLFEISVPLTSVPELVPVKVANHTGCKCLPTAPRHPYSIIRRSIQIPEEDRCSHSKKLCPIDMLWDSNKCKCVLQEENPLAGTEDHSHLQEPALCGPHMMFDEDRCECVCKTPCPKDLIQHPKNCSCFECKESLETCCQKHKLFHPDTCSCEDRCPFHTRPCASGKTACAKHCRFPKEKRAAQGPHSRKNP

SEQ ID NO: 40936 - protein, 167 aa, Homo sapiens
MERFVVTAPPARNRSKTALYVTPLDRVTEFGGELHEDGGKLFCTSCNVVLNHVRKSAISDHLKSKTHTKRKAEFEEQNVRKKQRPLTASLQCNSTAQTEKVSVIQDFVKMCLEANIPLEKADHPAVRAFLSRHVKNGGSIPKSDQLRRAYLPDGYENENQLLNSQDC

SEQ ID NO: 40937 - protein, 167 aa, Homo sapiens; identical to SEQ ID NO: 40936

SEQ ID NO: 40938 - protein, 167 aa, Homo sapiens; identical to SEQ ID NO: 40936

SEQ ID NO: 40939 - protein, 106 aa, Homo sapiens
MERFVVTAPPARNRSKTALYVTPLDRVTEFGGELHEDGGKLFCTSCNVVLNHVRKSAISDHLKSKTHTKRKAEFEEQNVRKKQRPLTASLQCNSTAQTEKVSVIQD

SEQ ID NO: 40940 - protein, 167 aa, Homo sapiens; identical to SEQ ID NO: 40936

SEQ ID NO: 40941 - protein, 535 aa, Homo sapiens
MASLSLAPVNIFKAGADEERAETARLTSFIGAIAIGDLVKSTLGPKGMDKILLSSGRDASLMVTNDGATILKNIGVDNPAAKVLVDMSRVQDDEVGDGTTSVTVLAAELLREAESLIAKKIHPQTIIAGWREATKAAREALLSSAVDHGSDEVKFRQDLMNIAGTTLSSKLLTHHKDHFTKLAVEAVLRLKGSGNLEAIHIIKKLGGSLADSYLDEGFLLDKKIGVNQPKRIENAKILIANTGMDTDKIKIFGSRVRVDSTAKVAEIEHAEKEKMKEKVERILKHGINCFINRQLIYNYPEQLFGAAGVMAIEHADFAGVERLALVTGGEIASTFDHPELVKLGSCKLIEEVMIGEDKLIHFSGVALGEACTIVLRGATQQILDEAERSLHDALCVLAQTVKDSRTVYGGGCSEMLMAHAVTQLANRTPGKEAVAMESYAKALRMLPTIIADNAGYDSADLVAQLRAAHSEGNTTAGLDMREGTIGDMAILGITESFQVKRQVLLSAAEAAEVILRVDNIIKAAPRKRVPDHHPC

SEQ ID NO: 40942 - protein, 488 aa, Homo sapiens
MDKILLSSGRDASLMVTNDGATILKNIGVDNPAAKVLVDMSRVQDDEVGDGTTSVTVLAAELLREAESLIAKKIHPQTIIAGWREATKAAREALLSSAVDHGSDEVKFRQDLMNIAGTTLSSKLLTHHKDHFTKLAVEAVLRLKGSGNLEAIHIIKKLGGSLADSYLDEGFLLDKKIGVNQPKRIENAKILIANTGMDTDKIKIFGSRVRVDSTAKVAEIEHAEKEKMKEKVERILKHGINCFINRQLIYNYPEQLFGAAGVMAIEHADFAGVERLALVTGGEIASTFDHPELVKLGSCKLIEEVMIGEDKLIHFSGVALGEACTIVLRGATQQILDEAERSLHDALCVLAQTVKDSRTVYGGGCSEMLMAHAVTQLANRTPGKEAVAMESYAKALRMLPTIIADNAGYDSADLVAQLRAAHSEGNTTAGLDMREGTIGDMAILGITESFQVKRQVLLSAAEAAEVILRVDNIIKAAPRKRVPDHHPC

SEQ ID NO: 40943 - protein, 545 aa, Homo sapiens
MMGHRPVLVLSQNTKRESGRKVQSGNINAAKTIADIIRTCLGPKSMMKMLLDPMGGIVMTNDGNAILREIQVQHPAAKSMIEISRTQDEEVGDGTTSVIILAGEMLSVAEHFLEQQMHPTVVISAYRKALDDMISTLKKISIPVDISDSDMMLNIINSSITTKAISRWSSLACNIALDAVKMVQFEENGRKEIDIKKYARVEKIPGGIIEDSCVLRGVMINKDVTHPRMRRYIKNPRIVLLDSSLEYKKGESQTDIEITREEDFTRILQMEEEYIQQLCEDIIQLKPDVVITEKGISDLAQHYLMRANITAIRRVRKTDNNRIARACGARIVSRPEELREDDVGTGAGLLEIKKIGDEYFTFITDCKDPKACTILLRGASKEILSEVERNLQDAMQVCRNVLLDPQLVPGGGASEMAVAHALTEKSKAMTGVEQWPYRAVAQALEVIPRTLIQNCGASTIRLLTSLRAKHTQENCETWGVNGETGTLVDMKELGIWEPLAVKLQTYKTAVETAVLLLRIDDIVSGHKKKGDDQSRQGGAPDAGQE

SEQ ID NO: 40944 - protein, 507 aa, Homo sapiens
MMGHRPVLVLSQNTKRESGRKVQSGNINAAKIQVQHPAAKSMIEISRTQDEEVGDGTTSVIILAGEMLSVAEHFLEQQMHPTVVISAYRKALDDMISTLKKISIPVDISDSDMMLNIINSSITTKAISRWSSLACNIALDAVKMVQFEENGRKEIDIKKYARVEKIPGGIIEDSCVLRGVMINKDVTHPRMRRYIKNPRIVLLDSSLEYKKGESQTDIEITREEDFTRILQMEEEYIQQLCEDIIQLKPDVVITEKGISDLAQHYLMRANITAIRRVRKTDNNRIARACGARIVSRPEELREDDVGTGAGLLEIKKIGDEYFTFITDCKDPKACTILLRGASKEILSEVERNLQDAMQVCRNVLLDPQLVPGGGASEMAVAHALTEKSKAMTGVEQWPYRAVAQALEVIPRTLIQNCGASTIRLLTSLRAKHTQENCETWGVNGETGTLVDMKELGIWEPLAVKLQTYKTAVETAVLLLRIDDIVSGHKKKGDDQSRQGGAPDAGQE

SEQ ID NO: 40945 - protein, 500 aa, Homo sapiens
MMKMLLDPMGGIVMTNDGNAILREIQVQHPAAKSMIEISRTQDEEVGDGTTSVIILAGEMLSVAEHFLEQQMHPTVVISAYRKALDDMISTLKKISIPVDISDSDMMLNIINSSITTKAISRWSSLACNIALDAVKMVQFEENGRKEIDIKKYARVEKIPGGIIEDSCVLRGVMINKDVTHPRMRRYIKNPRIVLLDSSLEYKKGESQTDIEITREEDFTRILQMEEEYIQQLCEDIIQLKPDVVITEKGISDLAQHYLMRANITAIRRVRKTDNNRIARACGARIVSRPEELREDDVGTGAGLLEIKKIGDEYFTFITDCKDPKACTILLRGASKEILSEVERNLQDAMQVCRNVLLDPQLVPGGGASEMAVAHALTEKSKAMTGVEQWPYRAVAQALEVIPRTLIQNCGASTIRLLTSLRAKHTQENCETWGVNGETGTLVDMKELGIWEPLAVKLQTYKTAVETAVLLLRIDDIVSGHKKKGDDQSRQGGAPDAGQE

SEQ ID NO: 40946 - protein, 276 aa, Homo sapiens
MYEGDLEGQSMNWTSEEGRGDIIRSGTNIDRAWQCQNTKRESGRKVQSGNINAAKTIADIIRTCLGPKSMMKMLLDPMGGIVMTNDGNAILREIQVQHPAAKSMIEISRTQDEEVGDGTTSVIILAGEMLSVAEHFLEQQMHPTVVISAYRKALDDMISTLKKISIPVDISDSDMMLNIINSSITTKAISRWSSLACNIALDAVKMVQFEENGRKEIDIKKYARVEKIPGGIIEDSCVLRGVMINKDVTHPRMRRYIKNPRIVLLDSSLEYKKGES

SEQ ID NO: 40947 - protein, 161 aa, Homo sapiens
MMGHRPVLVLSQNTKRESGRKVQSGNINAAKTIADIIRTCLGPKSMMKMLLDPMGGIVMTNDGNAILREIQVQHPAAKSMIEISRTQDEEVGDGTTSVIILESHSVTMLECGGAILAHCNLCLPAGEMLSVAEHFLEQQMHPTVVISAYRKALDDMISTLK

SEQ ID NO: 40948 - protein, 188 aa, Homo sapiens
MYEGDLEGQSMNWTSEEGRGDIIRSGTNIDRAWQCQNTKRESGRKVQSGNINAAKIQVQHPAAKSMIEISRTQDEEVGDGTTSVIILAGEMLSVAEHFLEQQMHPTVVISAYRKALDDMISTLKKISIPVDISDSDMMLNIINSSITTKAISRWSSLACNIALDAVKMVQFEENGRKEIDIKKYARVE

SEQ ID NO: 40949 - protein, 500 aa, Homo sapiens; identical to SEQ ID NO: 40945

SEQ ID NO: 40950 - protein, 539 aa, Homo sapiens
MPENVAPRSGATAGAAGGRGKGAYQDRDKPAQIRFSNISAAKAVADAIRTSLGPKGMDKMIQDGKGDVTITNDGATILKQMQVLHPAARMLVELSKAQDIEAGDGTTSVVIIAGSLLDSCTKLLQKGIHPTIISESFQKALEKGIEILTDMSRPVELSDRETLLNSATTSLNSKVVSQYSSLLSPMSVNAVMKVIDPATATSVDLRDIKIVKKLGGTIDDCELVEGLVLTQKVSNSGITRVEKAKIGLIQFCLSAPKTDMDNQIVVSDYAQMDRVLREERAYILNLVKQIKKTGCNVLLIQKSILRDALSDLALHFLNKMKIMVIKDIEREDIEFICKTIGTKPVAHIDQFTADMLGSAELAEEVNLNGSGKLLKITGCASPGKTVTIVVRGSNKLVIEEAERSIHDALCVIRCLVKKRALIAGGGAPEIELALRLTEYSRTLSGMESYCVRAFADAMEVIPSTLAENAGLNPISTVTELRNRHAQGEKTAGINVRKGGISNILEELVVQPLLVSVSALTLATETVRSILKIDDVVNTR

SEQ ID NO: 40951 - protein, 483 aa, Homo sapiens
MDKMIQDGKGDVTITNDGATILKQMQVLHPAARMLVELSKAQDIEAGDGTTSVVIIAGSLLDSCTKLLQKGIHPTIISESFQKALEKGIEILTDMSRPVELSDRETLLNSATTSLNSKVVSQYSSLLSPMSVNAVMKVIDPATATSVDLRDIKIVKKLGGTIDDCELVEGLVLTQKVSNSGITRVEKAKIGLIQFCLSAPKTDMDNQIVVSDYAQMDRVLREERAYILNLVKQIKKTGCNVLLIQKSILRDALSDLALHFLNKMKIMVIKDIEREDIEFICKTIGTKPVAHIDQFTADMLGSAELAEEVNLNGSGKLLKITGCASPGKTVTIVVRGSNKLVIEEAERSIHDALCVIRCLVKKRALIAGGGAPEIELALRLTEYSRTLSGMESYCVRAFADAMEVIPSTLAENAGLNPISTVTELRNRHAQGEKTAGINVRKGGISNILEELVVQPLLVSVSALTLATETVRSILKIDDVVNTR

SEQ ID NO: 40952 - protein, 509 aa, Homo sapiens
MPENVAPRSGATAGAAGGRGKGAYQDRDKPAQIRFSNISAAKAVADAIRTSLGPKGMDKMLVELSKAQDIEAGDGTTSVVIIAGSLLDSCTKLLQKGIHPTIISESFQKALEKGIEILTDMSRPVELSDRETLLNSATTSLNSKVVSQYSSLLSPMSVNAVMKVIDPATATSVDLRDIKIVKKLGGTIDDCELVEGLVLTQKVSNSGITRVEKAKIGLIQFCLSAPKTDMDNQIVVSDYAQMDRVLREERAYILNLVKQIKKTGCNVLLIQKSILRDALSDLALHFLNKMKIMVIKDIEREDIEFICKTIGTKPVAHIDQFTADMLGSAELAEEVNLNGSGKLLKITGCASPGKTVTIVVRGSNKLVIEEAERSIHDALCVIRCLVKKRALIAGGGAPEIELALRLTEYSRTLSGMESYCVRAFADAMEVIPSTLAENAGLNPISTVTELRNRHAQGEKTAGINVRKGGISNILEELVVQPLLVSVSALTLATETVRSILKIDDVVNTR

SEQ ID NO: 40953 - protein, 389 aa, Homo sapiens
MSRPVELSDRETLLNSATTSLNSKVVSQYSSLLSPMSVNAVMKVIDPATATSVDLRDIKIVKKLGGTIDDCELVEGLVLTQKVSNSGITRVEKAKIGLIQFCLSAPKTDMDNQIVVSDYAQMDRVLREERAYILNLVKQIKKTGCNVLLIQKSILRDALSDLALHFLNKMKIMVIKDIEREDIEFICKTIGTKPVAHIDQFTADMLGSAELAEEVNLNGSGKLLKITGCASPGKTVTIVVRGSNKLVIEEAERSIHDALCVIRCLVKKRALIAGGGAPEIELALRLTEYSRTLSGMESYCVRAFADAMEVIPSTLAENAGLNPISTVTELRNRHAQGEKTAGINVRKGGISNILEELVVQPLLVSVSALTLATETVRSILKIDDVVNTR

SEQ ID NO: 40954 - protein, 541 aa, Homo sapiens
MASMGTLAFDEYGRPFLIIKDQDRKSRLMGLEALKSHIMAAKAVANTMRTSLGPNGLDKMMVDKDGDVTVTNDGATILSMMDVDHQIAKLMVELSKSQDDEIGDGTTGVVVLAGALLEEAEQLLDRGIHPIRIADGYEQAARVAIEHLDKISDSVLVDIKDTEPLIQTAKTTLGSKVVNSCHRQMAEIAVNAVLTVADMERRDVDFELIKVEGKVGGRLEDTKLIKGVIVDKDFSHPQMPKKVEDAKIAILTCPFEPPKPKTKHKLDVTSVEDYKALQKYEKEKFEEMIQQIKETGANLAICQWGFDDEANHLLLQNNLPAVRWVGGPEIELIAIATGGRIVPRFSELTAEKLGFAGLVQEISFGTTKDKMLVIEQCKNSRAVTIFIRGGNKMIIEEAKRSLHDALCVIRNLIRDNRVVYGGGAAEISCALAVSQEADKCPTLEQYAMRAFADALEVIPMALSENSGMNPIQTMTEVRARQVKEMNPALGIDCLHKGTNDMKQQHVIETLIGKKQQISLATQMVRMILKIDDIRKPGESEE

SEQ ID NO: 40955 - protein, 514 aa, Homo sapiens
MASMGTLAFDEYGRPFLIIKDQDRKSRLMGLEALKSHIMAAKAVANTMRTSLGPNGLDKMMVDKDGDVTVTNDEIGDGTTGVVVLAGALLEEAEQLLDRGIHPIRIADGYEQAARVAIEHLDKISDSVLVDIKDTEPLIQTAKTTLGSKVVNSCHRQMAEIAVNAVLTVADMERRDVDFELIKVEGKVGGRLEDTKLIKGVIVDKDFSHPQMPKKVEDAKIAILTCPFEPPKPKTKHKLDVTSVEDYKALQKYEKEKFEEMIQQIKETGANLAICQWGFDDEANHLLLQNNLPAVRWVGGPEIELIAIATGGRIVPRFSELTAEKLGFAGLVQEISFGTTKDKMLVIEQCKNSRAVTIFIRGGNKMIIEEAKRSLHDALCVIRNLIRDNRVVYGGGAAEISCALAVSQEADKCPTLEQYAMRAFADALEVIPMALSENSGMNPIQTMTEVRARQVKEMNPALGIDCLHKGTNDMKQQHVIETLIGKKQQISLATQMVRMILKIDDIRKPGESEE

SEQ ID NO: 40956 - protein, 520 aa, Homo sapiens
MNSSLGPTIEKLSVSHIMAAKAVANTMRTSLGPNGLDKMMVDKDGDVTVTNDGATILSMMDVDHQIAKLMVELSKSQDDEIGDGTTGVVVLAGALLEEAEQLLDRGIHPIRIADGYEQAARVAIEHLDKISDSVLVDIKDTEPLIQTAKTTLGSKVVNSCHRQMAEIAVNAVLTVADMERRDVDFELIKVEGKVGGRLEDTKLIKGVIVDKDFSHPQMPKKVEDAKIAILTCPFEPPKPKTKHKLDVTSVEDYKALQKYEKEKFEEMIQQIKETGANLAICQWGFDDEANHLLLQNNLPAVRWVGGPEIELIAIATGGRIVPRFSELTAEKLGFAGLVQEISFGTTKDKMLVIEQCKNSRAVTIFIRGGNKMIIEEAKRSLHDALCVIRNLIRDNRVVYGGGAAEISCALAVSQEADKCPTLEQYAMRAFADALEVIPMALSENSGMNPIQTMTEVRARQVKEMNPALGIDCLHKGTNDMKQQHVIETLIGKKQQISLATQMVRMILKIDDIRKPGESEE

SEQ ID NO: 40957 - protein, 448 aa, Homo sapiens
MAAKAVANTMRTSLGPNVLAGALLEEAEQLLDRGIHPIRIADGYEQAARVAIEHLDKISDSVLVDIKDTEPLIQTAKTTLGSKVVNSCHRQMAEIAVNAVLTVADMERRDVDFELIKVEGKVGGRLEDTKLIKGVIVDKDFSHPQMPKKVEDAKIAILTCPFEPPKPKTKHKLDVTSVEDYKALQKYEKEKFEEMIQQIKETGANLAICQWGFDDEANHLLLQNNLPAVRWVGGPEIELIAIATGGRIVPRFSELTAEKLGFAGLVQEISFGTTKDKMLVIEQCKNSRAVTIFIRGGNKMIIEEAKRSLHDALCVIRNLIRDNRVVYGGGAAEISCALAVSQEADKCPTLEQYAMRAFADALEVIPMALSENSGMNPIQTMTEVRARQVKEMNPALGIDCLHKGTNDMKQQHVIETLIGKKQQISLATQMVRMILKIDDIRKPGESEE

SEQ ID NO: 40958 - protein, 486 aa, Homo sapiens
MASMGTLAFDEYGRPFLIIKDQDRKSRLMGLEALKSHIMAAKAVANTMRTSLGPNVLAGALLEEAEQLLDRGIHPIRIADGYEQAARVAIEHLDKISDSVLVDIKDTEPLIQTAKTTLGSKVVNSCHRQMAEIAVNAVLTVADMERRDVDFELIKVEGKVGGRLEDTKLIKGVIVDKDFSHPQMPKKVEDAKIAILTCPFEPPKPKTKHKLDVTSVEDYKALQKYEKEKFEEMIQQIKETGANLAICQWGFDDEANHLLLQNNLPAVRWVGGPEIELIAIATGGRIVPRFSELTAEKLGFAGLVQEISFGTTKDKMLVIEQCKNSRAVTIFIRGGNKMIIEEAKRSLHDALCVIRNLIRDNRVVYGGGAAEISCALAVSQEADKCPTLEQYAMRAFADALEVIPMALSENSGMNPIQTMTEVRARQVKEMNPALGIDCLHKGTNDMKQQHVIETLIGKKQQISLATQMVRMILKIDDIRKPGESEE

SEQ ID NO: 40959 - protein, 503 aa, Homo sapiens
MAAKAVANTMRTSLGPNGLDKMMVDKDGDVTVTNDGATILSMMDVDHQIAKLMVELSKSQDDEIGDGTTGVVVLAGALLEEAEQLLDRGIHPIRIADGYEQAARVAIEHLDKISDSVLVDIKDTEPLIQTAKTTLGSKVVNSCHRQMAEIAVNAVLTVADMERRDVDFELIKVEGKVGGRLEDTKLIKGVIVDKDFSHPQMPKKVEDAKIAILTCPFEPPKPKTKHKLDVTSVEDYKALQKYEKEKFEEMIQQIKETGANLAICQWGFDDEANHLLLQNNLPAVRWVGGPEIELIAIATGGRIVPRFSELTAEKLGFAGLVQEISFGTTKDKMLVIEQCKNSRAVTIFIRGGNKMIIEEAKRSLHDALCVIRNLIRDNRVVYGGGAAEISCALAVSQEADKCPTLEQYAMRAFADALEVIPMALSENSGMNPIQTMTEVRARQVKEMNPALGIDCLHKGTNDMKQQHVIETLIGKKQQISLATQMVRMILKIDDIRKPGESEE

SEQ ID NO: 40960 - protein, 530 aa, Homo sapiens
MAAIKAVNSKAEVARARAALAVNICAARGLQDVLRTNLGPKGTMKMLVSGAGDIKLTKDGNVLLDEMQIQHPTASLIAKVATAQDDVTGDGTTSNVLIIGELLKQADLYISEGLHPRIIAEGFEAAKIKALEVLEEVKVTKEMKRKILLDVARTSLQTKVHAELADVLTEVVVDSVLAVRRPGYPIDLFMVEIMEMKHKLGTDTKLIQGLVLDHGARHPDMKKRVEDAFILICNVSLEYEKTEVNSGFFYKTAEEKEKLVKAERKFIEDRVQKIIDLKDKVCAQSNKGFVVINQKGIDPFSLDSLAKHGIVALRRAKRRNMERLSLACGGMAVNSFEDLTVDCLGHAGLVYEYTLGEEKFTFIEECVNPCSVTLLVKGPNKHTLTQVKDAIRDGLRAIKNAIEDGCMVPGAGAIEVAMAEALVTYKNSIKGRARLGVQAFADALLIIPKVLAQNAGYDPQETLVKVQAEHVESKQLVGVDLNTGEPMVAADAGVWDNYCVKKQLLHSCTVIATNILLVDEIMRAGMSSLK

SEQ ID NO: 40961 - protein, 493 aa, Homo sapiens
MAAIKAVNSKAEVARARAALAVNICAARGLQDVLRTNLGPKGTMKMLVSGAGDIKLTKDGNVLLDEMQIQHPTASLIAKVATAQDDVTGDGTTSNVLIIGELLKQADLYISEGLHPRIIAEGFEAAKIKALEVLEEVKVTKEMKRKILLDVARTSLQTKVHAELADVLTEVVVDSVLAVRRPGYPIDLFMVEIMEMKHKLGTDTKEVNSGFFYKTAEEKEKLVKAERKFIEDRVQKIIDLKDKVCAQSNKGFVVINQKGIDPFSLDSLAKHGIVALRRAKRRNMERLSLACGGMAVNSFEDLTVDCLGHAGLVYEYTLGEEKFTFIEECVNPCSVTLLVKGPNKHTLTQVKDAIRDGLRAIKNAIEDGCMVPGAGAIEVAMAEALVTYKNSIKGRARLGVQAFADALLIIPKVLAQNAGYDPQETLVKVQAEHVESKQLVGVDLNTGEPMVAADAGVWDNYCVKKQLLHSCTVIATNILLVDEIMRAGMSSLK

SEQ ID NO: 40962 - protein, 485 aa, Homo sapiens
MAAIKAVNSKAEVARARAALAVNICAARGLQDVLRTNLGPKGTMKMLVSGAGDIKLTKDGNVLLDEMGLHPRIIAEGFEAAKIKALEVLEEVKVTKEMKRKILLDVARTSLQTKVHAELADVLTEVVVDSVLAVRRPGYPIDLFMVEIMEMKHKLGTDTKLIQGLVLDHGARHPDMKKRVEDAFILICNVSLEYEKTEVNSGFFYKTAEEKEKLVKAERKFIEDRVQKIIDLKDKVCAQSNKGFVVINQKGIDPFSLDSLAKHGIVALRRAKRRNMERLSLACGGMAVNSFEDLTVDCLGHAGLVYEYTLGEEKFTFIEECVNPCSVTLLVKGPNKHTLTQVKDAIRDGLRAIKNAIEDGCMVPGAGAIEVAMAEALVTYKNSIKGRARLGVQAFADALLIIPKVLAQNAGYDPQETLVKVQAEHVESKQLVGVDLNTGEPMVAADAGVWDNYCVKKQLLHSCTVIATNILLVDEIMRAGMSSLK

SEQ ID NO: 40963 - protein, 142 aa, Homo sapiens
MSLLPVPYTEAASLSTGSTVTIKGRPLACFLNEPYLQVDFHTEMKEESDIVFHFQVCFGRRVVMNSREYGAWKQQVESKNMPFQDGQEFELSISVLPDKYQVMVNGQSSYTFDHRIKPEAVKMVQVWRDISLTKFNVSYLKR

SEQ ID NO: 40964 - protein, 240 aa, Homo sapiens
MDVHGEAAGEAGQEGGEGLQGGAGQSEEGPSAEKCRVCPCVCRERHPQEERRCELASDGVPRRRSGLQGADSCDYEGGDQEYGPGDQSPGQGPEHHGPAEGLLSDGQVRAAGAEPGRPYIGDGGLHELGHHPDHAAGAGGQPHHADRRGEWPGGAGPAQPAARGRLCRGRELCAQPGGPAVTEVGRLEELAVPRRCAPPLPRDVLEGSCPLPTASCLCADPAGLRPAATLRLSPARPAWP

SEQ ID NO: 40965 - protein, 196 aa, Homo sapiens
MDDTLFQLKFTAKQLEKLAKKAEKDSKAEQAKVKKALLQKNVECARVYAENAIRKKNEGVNWLRMASRVDAVASKVQTAVTMKGVTKNMAQVTKALDKALSTMDLQKVSSVMDRFEQQVQNLDVHTSVMEDSMSSATTLTTPQEQVDSLIMQIAEENGLEVLDQLSQLPEGASAVGESSVRSQEDQLSRRLAALRN

SEQ ID NO: 40966 - protein, 199 aa, Homo sapiens
MSNMEKHLFNLKFAAKELSRSAKKCDKEEKAEKAKIKKAIQKGNMEVARIHAENAIRQKNQAVNFLRMSARVDAVAARVQTAVTMGKVTKSMAGVVKSMDATLKTMNLEKISALMDKFEHQFETLDVQTQQMEDTMSSTTTLTTPQNQVDMLLQEMADEAGLDLNMELPQGQTGSVGTSVASAEQDELSQRLARLRDQV

SEQ ID NO: 40967 - protein, 222 aa, Homo sapiens
MDLLFGRRKTPEELLRQNQRALNRAMRELDRERQKLETQEKKIIADIKKMAKQGQMDAVRIMAKDLVRTRRYVRKFVLMRANIQAVSLKIQTLKSNNSMAQAMKGVTKAMGTMNRQLKLPQIQKIMMEFERQAEIMDMKEEMMNDAIDDAMGDEEDEEESDAVVSQVLDELGLSLTDELSNLPSTGGSLSVAAGGKKAEAAASALADADADLEERLKNLRRD

SEQ ID NO: 40968 - protein, 222 aa, Homo sapiens; identical to SEQ ID NO: 40967

SEQ ID NO: 40969 - protein, 213 aa, Homo sapiens
MASLFKKKTVDDVIKEQNRELRGTQRAIIRDRAALEKQEKQLELEIKKMAKIGNKEACKVLAKQLVHLRKQKTRTFAVSSKVTSMSTQTKVMNSQMKMAGAMSTTAKTMQAVNKKMDPQKTLQTMQNFQKENMKMEMTEEMINDTLDDIFDGSDDEEESQDIVNQVLDEIGIEISGKMAKAPSAARSLPSASTSKATISDEEIERQLKALGVD

SEQ ID NO: 40970 - protein, 172 aa, Homo sapiens
MELEIKKMAKIGNKEACKVLAKQLVHLRKQKTRTFAVSSKVTSMSTQTKVMNSQMKMAGAMSTTAKTMQAVNKKMDPQKTLQTMQNFQKENMKMEMTEEMINDTLDDIFDGSDDEEESQDIVNQVLDEIGIEISGKMAKAPSAARSLPSASTSKATISDEEIERQLKALGVD

SEQ ID NO: 40971 - protein, 222 aa, Homo sapiens
MGLFGKTQEKPPKELVNEWSLKIRKEMRVVDRQIRDIQREEEKVKRSVKDAAKKGQKDVCIVLAKEMIRSRKAVSKLYASKAHMNSVLMGMKNQLAVLRVAGSLQKSTEVMKAMQSLVKIPEIQATMRELSKEMMKAGIIEEMLEDTFESMDDQEEMEEEAEMEIDRILFEITAGALGKAPSKVTDALPEPEPPGAMAASEDEEEEEEALEAMQSRLATLRS

SEQ ID NO: 40972 - protein, 156 aa, Homo sapiens
MIRSRKAVSKLYASKAHMNSVLMGMKNQLAVLRVAGSLQKSTEVMKAMQSLVKIPEIQATMRELSKEMMKAGIIEEMLEDTFESMDDQEEMEEEAEMEIDRILFEITAGALGKAPSKVTDALPEPEPPGAMAASEDEEEEEEALEAMQSRLATLRS

SEQ ID NO: 40973 - protein, 251 aa, Homo sapiens
MEGELYSALKEEEASESVSSTNFSGEMHFYELVEDTKDGIWLVQVNEWSLKIRKEMRVVDRQIRDIQREEEKVKRSVKDAAKKGQKDVCIVLAKEMIRSRKAVSKLYASKAHMNSVLMGMKNQLAVLRVAGSLQKSTEVMKAMQSLVKIPEIQATMRELSKEMMKAGIIEEMLEDTFESMDDQEEMEEEAEMEIDRILFEITAGALGKAPSKVTDALPEPEPPGAMAASEDEEEEEEALEAMQSRLATLRS

SEQ ID NO: 40974 - protein, 182 aa, Homo sapiens
MGLFGKTQEKPPKELVNEWSLKIRKEMRVVDRQIRDIQREEEKVKRSVKDAAKKGQKDVCIVLAKEMIRSRKAMQSLVKIPEIQATMRELSKEMMKAGIIEEMLEDTFESMDDQEEMEEEAEMEIDRILFEITAGALGKAPSKVTDALPEPEPPGAMAASEDEEEEEEALEAMQSRLATLRS

SEQ ID NO: 40975 - protein, 265 aa, Homo sapiens
MSRRRPEDGLGKAGPCVMRHHPPRSKAEVWRTLRGGGGRGELAMSGLGRLFGKGKKEKGPTPEEAIQKLKETEKILIKKQEFLEQKIQQELQTAKKYGTKNKRAALQALRRKKRFEQQLAQTDGTLSTLEFQREAIENATTNAEVLRTMELAAQSMKKAYQDMDIDKVDELMTDITEQQEVAQQISDAISRPMGFGDDVDEDELLEELEELEQEELAQELLNVGDKEEEPSVKLPSVPSTHLPAGPAPKVDEDEEALKQLAEWVS

SEQ ID NO: 40976 - protein, 224 aa, Homo sapiens
MSVFGKLFGAGGGKAGKGGPTPQEAIQRLRDTEEMLSKKQEFLEKKIEQELTAAKKHGTKNKRAALQALKRKKRYEKQLAQIDGTLSTIEFQREALENANTNTEVLKNMGYAAKAMKAAHDNMDIDKVDELMQDIADQQELAEEISTAISKPVGFGEEFDEDELMAELEELEQEELDKNLLEISGPETVPLPNVPSIALPSKPAKKKEEEDDDMKELENWAGSM

SEQ ID NO: 40977 - protein, 219 aa, Homo sapiens
MNRLFGKAKPKAPPPSLTDCIGTVDSRAESIDKKISRLDAELVKYKDQIKKMREGPAKNMVKQKALRVLKQKRMYEQQRDNLAQQSFNMEQANYTIQSLKDTKTTVDAMKLGVKEMKKAYKQVKIDQIEDLQDQLEDMMEDANEIQEALSRSYGTPELDEDDLEAELDALGDELLADEDSSYLDEAASAPAIPEGVPTDTKNKDGVLVDEFGLPQIPAS

SEQ ID NO: 40978 - protein, 171 aa, Homo sapiens
MNRLFGKAKPKAPPPSLTDCIGTVDSRAESIDKKISRLDAELVKYKDQIKKMREGPAKNMVKQKALRVLKQKRMYEQQRDNLAQQSFNMEQANYTIQSLKDTKTTVDAMKLGVKEMKKAYKQVKIDQIEDLQDQLEDMMEDANEIQEALSRSYGTPELDEDDLEAGWSSGG

SEQ ID NO: 40979 - protein, 201 aa, Homo sapiens
MGNLFGRKKQSRVTEQDKAILQLKQQRDKLRQYQKRIAQQLERERALARQLLRDGRKERAKLLLKKKRYQEQLLDRTENQISSLEAMVQSIEFTQIEMKVMEGLQFGNECLNKMHQVMSIEEVERILDETQEAVEYQRQIDELLAGSFTQEDEDAILEELSAITQEQIELPEVPSEPLPEKIPENVPVKARPRQAELVAAS

SEQ ID NO: 40980 - protein, 453 aa, Homo sapiens
MWSPEREAEAPAGGDPAGLLPPEWEEDEERMSFLFSAFKRSREVNSTDWDSKMGFWAPLVLSHSRRQGVVRLRLRDLQEAFQRKGSVPLGLATVLQDLLRRGELQRESDFMASVDSSWISWGVGVFLLKPLKWTLSNMLGDNKVPAEEVLVAVELLKEKAEEVYRLYQNSPLSSHPVVALSELSTLCANSCPDERTFYLVLLQLQKEKRVTVLEQNGEKIVKFARGPRAKVSPVNDVDVGVYQLMQSEQLLSRKVESLSQEAERCKEEARRACRAGKKQLALRSLKAKQRTEKRIEALHAKLDTVQGILDRIYASQTDQMVFNAYQAGVGALKLSMKDVTVEKAESLVDQIQELCDTQDEVSQTLAGGVTNGLDFDSEELEKELDILLQDTTKEPLDLPDNPRNRHFTNSVPNPRISDAELEAELEKLSLSEGGLVPSSKSPKRQLEPTLKPL

SEQ ID NO: 40981 - protein, 453 aa, Homo sapiens; identical to SEQ ID NO: 40980

SEQ ID NO: 40982 - protein, 663 aa, Homo sapiens
MERPEEGKQSPPPQPWGRLLRLGAEEGEPHVLLRKREWTIGRRRGCDLSFPSNKLVSGDHCRIVVDEKSGQVTLEDTSTSGTVINKLKVVKKQTCPLQTGDVIYLVYRKNEPEHNVAYLYESLSEKQGMTQESFEANKENVFHGTKDTSGAGAGRGADPRVPPSSPATQVCFEEPQPSTSTSDLFPTASASSTEPSPAGRERSSSCGSGGGGISPKGSGPSVASDEVSSFASALPDRKTASFSSLEPQDQEDLEPVKKKMRGDGDLDLNGQLLVAQPRRNAQTVHEDVRAAAGKPDKMEETLTCIICQDLLHDCVSLQPCMHTFCAACYSGWMERSSLCPTCRCPVERICKNHILNNLVEAYLIQHPGNSRSEEDVQSMDARNKITQDMLQPKVRRSFSDEEGSSEDLLELSDVDSESSDISQPYVVCRQCPEYRRQAAQPPHCPAPEGEPGAPQALGDAPSTSVSLTTVQDYVCPLQGSHALCTCCFQPMPDRRAEREQDPRVAPQQCAVCLQPFCHLYWGCTRTGCYGCLAPFCELNLGDKCLDGVLNNNSYESDILKNYLATRGLTWKNMLTESLVALQRGVFLLSDYRVTGDTVLCYCCGLRSFRELTYQYRQNIPASELPVAVTSRPDCYWGRNCRTQVKAHHAMKFNHICEQTRFKN

SEQ ID NO: 40983 - protein, 623 aa, Homo sapiens
MERPEEGKQSPPPQPWGRLLRLGAEEGEPHVLLRKREWTIGRRRGCDLSFPSNKLVSGDHCRIVVDEKSGQVTLEDTSTSGTVINKLKVVKKQTCPLQTGDVIYLVYRKNEPEHNVAYLYESLSEKQGMTQESFEMVPCCVAQAGLKLLGSSDPPTLASQSIVITGSGGGGISPKGSGPSVASDEVSSFASALPDRKTASFSSLEPQDQEDLEPVKKKMRGDGDLDLNGQLLVAQPRRNAQTVHEDVRAAAGKPDKMEETLTCIICQDLLHDCVSLQPCMHTFCAACYSGWMERSSLCPTCRCPVERICKNHILNNLVEAYLIQHPDKSRSEEDVQSMDARNKITQDMLQPKVRRSFSDEEGSSEDLLELSDVDSESSDISQPYVVCRQCPEYRRQAAQPPHCPAPEGEPGAPQALGDAPSTSVSLTTAVQDYVCPLQGSHALCTCCFQPMPDRRAEREQDPRVAPQQCAVCLQPFCHLYWGCTRTGCYGCLAPFCELNLGDKCLDGVLNNNSYESDILKNYLATRGLTWKNMLTESLVALQRGVFLLSDYRVTGDTVLCYCCGLRSFRELTYQYRQNIPASELPVAVTSRPDCYWGRNCRTQVKAHHAMKFNHICEQTRFKN

SEQ ID NO: 40984 - protein, 664 aa, Homo sapiens
MERPEEGKQSPPPQPWGRLLRLGAEEGEPHVLLRKREWTIGRRRGCDLSFPSNKLVSGDHCRIVVDEKSGQVTLEDTSTSGTVINKLKVVKKQTCPLQTGDVIYLVYRKNEPEHNVAYLYESLSEKQGMTQESFEANKENVFHGTKDTSGAGAGRGADPRVPPSSPATQVCFEEPQPSTSTSDLFPTASASSTEPSPAGRERSSSCGSGGGGISPKGSGPSVASDEVSSFASALPDRKTASFSSLEPQDQEDLEPVKKKMRGDGDLDLNGQLLVAQPRRNAQTVHEDVRAAAGKPDKMEETLTCIICQDLLHDCVSLQPCMHTFCAACYSGWMERSSLCPTCRCPVERICKNHILNNLVEAYLIQHPDKSRSEEDVQSMDARNKITQDMLQPKVRRSFSDEEGSSEDLLELSDVDSESSDISQPYVVCRQCPEYRRQAAQPPHCPAPEGEPGAPQALGDAPSTSVSLTTAVQDYVCPLQGSHALCTCCFQPMPDRRAEREQDPRVAPQQCAVCLQPFCHLYWGCTRTGCYGCLAPFCELNLGDKCLDGVLNNNSYESDILKNYLATRGLTWKNMLTESLVALQRGVFLLSDYRVTGDTVLCYCCGLRSFRELTYQYRQNIPASELPVAVTSRPDCYWGRNCRTQVKAHHAMKFNHICEQTRFKN

SEQ ID NO: 40985 - protein, 652 aa, Homo sapiens
MERPEEGKQSPPPQPWGRLLRLGAEEGEPHVLLRKREWTIGRRRGCDLSFPSNKLVSGDHCRIVVDEKSGQVTLEDTSTSGTVINKLKVVKKQTCPLQTGDVIYLVYRKNEPEHNVAYLYESLSEKQGMTQESFDTSGAGAGRGADPRVPPSSPATQVCFEEPQPSTSTSDLFPTASASSTEPSPAGRERSSSCGSGGGGISPKGSGPSVASDEVSSFASALPDRKTASFSSLEPQDQEDLEPVKKKMRGDGDLDLNGQLLVAQPRRNAQTVHEDVRAAAGKPDKMEETLTCIICQDLLHDCVSLQPCMHTFCAACYSGWMERSSLCPTCRCPVERICKNHILNNLVEAYLIQHPDKSRSEEDVQSMDARNKITQDMLQPKVRRSFSDEEGSSEDLLELSDVDSESSDISQPYVVCRQCPEYRRQAAQPPHCPAPEGEPGAPQALGDAPSTSVSLTTAVQDYVCPLQGSHALCTCCFQPMPDRRAEREQDPRVAPQQCAVCLQPFCHLYWGCTRTGCYGCLAPFCELNLGDKCLDGVLNNNSYESDILKNYLATRGLTWKNMLTESLVALQRGVFLLSDYRVTGDTVLCYCCGLRSFRELTYQYRQNIPASELPVAVTSRPDCYWGRNCRTQVKAHHAMKFNHICEQTRFKN

SEQ ID NO: 40986 - protein, 223 aa, Homo sapiens
MERPEEGKQSPPPQPWGRLLRLGAEEGEPHVLLRKREWTIGRRRGCDLSFPSNKLVSGDHCRIVVDEKSGQVTLEDTSTSGTVINKLKVVKKQTCPLQTGDVIYLVYRKNEPEHNVAYLYESLSEKQGMTQESFDTSGAGAGRGADPRVPPSSPATQVCFEEPQPSTSTSDLFPTASASSTEPSPAGRERSSSCGSGGGGISPKGSGPSVASDEVSSFASALP

SEQ ID NO: 40987 - protein, 349 aa, Homo sapiens
MTQESFGSGGGGISPKGSGPSVASDEVSSFASALPDRKTASFSSLEPQDQEDLEPVKKKMRGDGDLDLNGQLLVAQPRRNAQTVHEDVRAAAGKPDKMEETLTCIICQDLLHDCVSLQPCMHTFCAACYSGWMERSSLCPTCRCPVERICKNHILNNLVEAYLIQHPDKSRSEEDVQSMDARNKITQDMLQPKVRRSFSDEEGSSEDLLELSDVDSESSDISQPYVVCRQCPEYRRQAAQPPHCPAPEGEPGAPQALGDAPSTSVSLTTAVQDYVCPLQGSHALCTCCFQPMPDRRAEREQDPRVAPQQCAVCLQPFCHLYWGCTRTGCYGCLAPFCVSGRQCFPATSL

SEQ ID NO: 40988 - protein, 572 aa, Homo sapiens
MERPEEGKQSPPPQPWGRLLRLGAEEGEPHVLLRKREWTIGRRRGCDLSFPSNKLVSGDHCRIVVDEKSGQVTLEDTSTSGTVINKLKVVKKQTCPLQTGDVIYLVYRKNEPEHRSGGGGISPKGSGPSVASDEVSSFASALPDRKTASFSSLEPQDQEDLEPVKKKMRGDGDLDLNGQLLVAQPRRNAQTVHEDVRAAAGKPDKMEETLTCIICQDLLHDCVSLQPCMHTFCAACYSGWMERSSLCPTCRCPVERICKNHILNNLVEAYLIQHPDKSRSEEDVQSMDARNKITQDMLQPKVRRSFSDEEGSSEDLLELSDVDSESSDISQPYVVCRQCPEYRRQAAQPPHCPAPEGEPGAPQALGDAPSTSVSLTTAVQDYVCPLQGSHALCTCCFQPMPDRRAEREQDPRVAPQQCAVCLQPFCHLYWGCTRTGCYGCLAPFCELNLGDKCLDGVLNNNSYESDILKNYLATRGLTWKNMLTESLVALQRGVFLLSDYRVTGDTVLCYCCGLRSFRELTYQYRQNIPASELPVAVTSRPDCYWGRNCRTQVKAHHAMKFNHICEQTRFKN

SEQ ID NO: 40989 - protein, 114 aa, Homo sapiens
MRLLILALLGICSLTAYIVEGVGSEVSDKRTCVSLTTQRLPVSRIKTYTITEGSLRAVIFITKRGLKVCADPQATWVRDVVRSMDRKSNTRNNMIQTKPTGTQQSTNTAVTLTG

SEQ ID NO: 40990 - protein, 114 aa, Homo sapiens
MRLLILALLGICSLTAYIVEGVGSEVSHRRTCVSLTTQRLPVSRIKTYTITEGSLRAVIFITKRGLKVCADPQATWVRDVVRSMDRKSNTRNNMIQTKPTGTQQSTNTAVTLTG

SEQ ID NO: 40991 - protein, 333 aa, Homo sapiens
MESSGNPESTTFFYYDLQSQPCENQAWVFATLATTVLYCLVFLLSLVGNSLVLWVLVKYESLESLTNIFILNLCLSDLVFACLLPVWISPYHWGWVLGDFLCKLLNMIFSISLYSSIFFLTIMTIHRYLSVVSPLSTLRVPTLRCRVLVTMAVWVASILSSILDTIFHKVLSSGCDYSELTWYLTSVYQHNLFFLLSLGIILFCYVEILRTLFRSRSKRRHRTVKLIFAIVVAYFLSWGPYNFTLFLQTLFRTQIIRSCEAKQQLEYALLICRNLAFSHCCFNPVLYVFVGVKFRTHLKHVLRQFWFCRLQAPSPASIPHSPGAFAYEGASFY

SEQ ID NO: 40992 - protein, 36 aa, Homo sapiens
MESSGNPESTTFFYYDLQSQPCENQAWVFATLATTV

SEQ ID NO: 40993 - protein, 333 aa, Homo sapiens; identical to SEQ ID NO: 40991

SEQ ID NO: 40994 - protein, 96 aa, Homo sapiens
MQIITTALVCLLLAGMWPEDVDSKSMQVPFSRCCFSFAEQEIPLRAILCYRNTSSICSNEGLIFKLKRGKEACALDTVGWVQRHRKMLRHCPSKRK

SEQ ID NO: 40995 - protein, 98 aa, Homo sapiens
MKVSAVLLCLLLMTAAFNPQGLAQPDALNVPSTCCFTFSSKKISLQRLKSYVITTSRCPQKAVIFRTKLGKEICADPKEKWVQNYMKHLGRKAHTLKT

SEQ ID NO: 40996 - protein, 93 aa, Homo sapiens
MKISVAAIPFFLLITIALGTKTESSSRGPYHPSECCFTYTTYKIPRQRIMDYYETNSQCSKPGIVFITKRGHSVCTNPSDKWVQDYIKDMKEN

SEQ ID NO: 40997 - protein, 109 aa, Homo sapiens
MKISVAAIPFFLLITIALGTKTESSSQTGGKPKVVKIQLKLVGGPYHPSECCFTYTTYKIPRQRIMDYYETNSQCSKPGIVFITKRGHSVCTNPSDKWVQDYIKDMKEN

SEQ ID NO: 40998 - protein, 109 aa, Homo sapiens; identical to SEQ ID NO: 40997

SEQ ID NO: 40999 - protein, 113 aa, Homo sapiens
MKVSVAALSCLMLVAVLGSQAQFINDAETELMMSKLPLENPVVLNSFHFAADCCTSYISQSIPCSLMKSYFETSSECSKPGVIFLTKKGRQVCAKPSGPGVQDCMKKLKPYSI

SEQ ID NO: 41000 - protein, 61 aa, Homo sapiens
  VARIANT 1: note = MOD_RES - Any amino acid
XCTSYISQSIPCSLMKSYFETSSECSKPGVIFLTKKGRQVCAKPSGPGVQDCMKKLKPYSI

SEQ ID NO: 41001 - protein, 113 aa, Homo sapiens; identical to SEQ ID NO: 40999

SEQ ID NO: 41002 - protein, 113 aa, Homo sapiens; identical to SEQ ID NO: 40999

SEQ ID NO: 41003 - protein, 120 aa, Homo sapiens
MKVSEAALSLLVLILIITSASRSQPKVPEWVNTPSTCCLKYYEKVLPRRLVVGYRKALNCHLPAIIFVTKRNREVCTNPNDDWVQEYIKDPNLPLLPTRNLSTVKIITAKNGQPQLLNSQ

SEQ ID NO: 41004 - protein, 94 aa, Homo sapiens
MAPLKMLALVTLLLGASLQHIHAARGTNVGRECCLEYFKGAIPLRKLKTWYQTSEDCSRDAIVFVTVQGRAICSDPNNKRVKNAVKYLQSLERS

SEQ ID NO: 41005 - protein, 89 aa, Homo sapiens
MKGLAAALLVLVCTMALCSCAQVGTNKELCCLVYTSWQIPQKFIVDYSETSPQCPKPGVILLTKRGRQICADPNKKWVQKYISDLKLNA

SEQ ID NO: 41006 - protein, 98 aa, Homo sapiens
MALLLALSLLVLWTSPAPTLSGTNDAEDCCLSVTQKPIPGYIVRNFHYLLIKDGCRVPAVVFTTLRGRQLCAPPDQPWVERIIQRLQRTSAKMKRRSS

SEQ ID NO: 41007 - protein, 104 aa, Homo sapiens
MALLLALSLLVLWTSPAPTLSGTNDAEDCCLSVTQKPIPGYIVRNFHYLLIKDGCRVPAVVFTTLRGRQLCAPPDQPWVERIIQRLQRTSAKASLALPGPVSSL

SEQ ID NO: 41008 - protein, 96 aa, Homo sapiens
MCCTKSLLLAALMSVLLLHLCGESEAASNFDCCLGYTDRILHPKFIVGFTRQLANEGCDINAIIFHTKKKLSVCANPKQTWVKYIVRLLSKKVKNM

SEQ ID NO: 41009 - protein, 95 aa, Homo sapiens
MCCTKSLLLAALMSVLLLHLCGESEASNFDCCLGYTDRILHPKFIVGFTRQLANEGCDINAIIFHTKKKLSVCANPKQTWVKYIVRLLSKKVKNM

SEQ ID NO: 41010 - protein, 134 aa, Homo sapiens
MAQSLALSLLILVLAFGIPRTQGSDGGAQDCCLKYSQRKIPAKVVRSYRKQEPSLGCSIPAILFLPRKRSQAELCADPKELWVQQLMQHLDKTPSPQKPAQGCRKDRGASKTGKKGKGSKGCKRTERSQTPKGP

SEQ ID NO: 41011 - protein, 124 aa, Homo sapiens
MAQSLALSLLILVLAFGIPRTQGSDGGAQDCCLKYSQRKIPAKVVRSYRKQEPSLGCSIPAILFLPRKRSQAELCADPKELWVQQLMQHLDKTPSPQKPAQGCRKDRGASKTGKKGKGSKGCKR

SEQ ID NO: 41012 - protein, 93 aa, Homo sapiens
MDRLQTALLVVLVLLAVALQATEAGPYGANMEDSVCCRDYVRYRLPLRVVKHFYWTSDSCPRPGVVLLTFRDKEICADPRVPWVKMILNKLSQ

SEQ ID NO: 41013 - protein, 137 aa, Homo sapiens
MKVSVAALSCLMLVTALGSQARVTKDAETEFMMSKLPLENPVLLDMLWRRKIGPQMTLSHAAGFHATSADCCISYTPRSIPCSLLESYFETNSECSKPGVIFLTKKGRRFCANPSDKQVQVCVRMLKLDTRIKTRKN

SEQ ID NO: 41014 - protein, 120 aa, Homo sapiens
MKVSVAALSCLMLVTALGSQARVTKDAETEFMMSKLPLENPVLLDRFHATSADCCISYTPRSIPCSLLESYFETNSECSKPGVIFLTKKGRRFCANPSDKQVQVCVRMLKLDTRIKTRKN

SEQ ID NO: 41015 - protein, 119 aa, Homo sapiens
MAGLMTIVTSLLFLGVCAHHIIPTGSVVIPSPCCMFFVSKRIPENRVVSYQLSSRSTCLKAGVIFTTKKGQQFCGDPKQEWVQRYMKNLDAKQKKASPRARAVAVKGPVQRYPGNQTTC

SEQ ID NO: 41016 - protein, 119 aa, Homo sapiens; identical to SEQ ID NO: 41015

SEQ ID NO: 41017 - protein, 149 aa, Homo sapiens
MNLWLLACLVAGFLGAWAPAVHTQGVFEDCCLAYHYPIGWAVLRRAWTYRIQEVSGSCNLPAAIFYLPKRHRKVCGNPKSREVQRAMKLLDARNKVFAKLHHNTQTFQGPHAVKKLSSGNSKLSSSKFSNPISSSKRNVSLLISANSGL

SEQ ID NO: 41018 - protein, 84 aa, Homo sapiens
MNLWLLACLVAGFLGAWAPAVHTQGVFEDCCLAYHYPIGWAVLRRAWTYRIQEVSGSCNLPAAIRPSCCKEVEFWKLQVIIVQV

SEQ ID NO: 41019 - protein, 150 aa, Homo sapiens
MNLWLLACLVAGFLGAWAPAVHTQGVFEDCCLAYHYPIGWAVLRRAWTYRIQEVSGSCNLPAAIFYLPKRHRKVCGNPKSREVQRAMKLLDARNKVFAKLHHNTQTFQAGPHAVKKLSSGNSKLSSSKFSNPISSSKRNVSLLISANSGL

SEQ ID NO: 41020 - protein, 94 aa, Homo sapiens
MMGLSLASAVLLASLLSLHLGTATRGSDISKTCCFQYSHKPLPWTWVRSYEFTSNSCSQRAVIFTTKRGKKVCTHPRKKWVQKYISLLKTPKQL

SEQ ID NO: 41021 - protein, 94 aa, Homo sapiens; identical to SEQ ID NO: 41020

SEQ ID NO: 41022 - protein, 112 aa, Homo sapiens
MKGPPTFCSLLLLSLLLSPDPTAAFLLPPSTACCTQLYRKPLSDKLLRKVIQVELQEADGDCHLQAFVLHLAQRSICIHPQNPSLSQWFEHQERKLHGTLPKLNFGMLRKMG

SEQ ID NO: 41023 - protein, 127 aa, Homo sapiens
MQQRGLAIVALAVCAALHASEAILPIASSCCTEVSHHISRRLLERVNMCRIQRADGDCDLAAVILHVKRRRICVSPHNHTVKQWMKVQAAKKNGKGNVCHRKKHHGKRNSNRAHQGKHETYGHKTPY

SEQ ID NO: 41024 - protein, 127 aa, Homo sapiens; identical to SEQ ID NO: 41023

SEQ ID NO: 41025 - protein, 80 aa, Homo sapiens
MCRIQRADGDCDLAAVILHVKRRRICVSPHNHTVKQWMKVQAAKKNGKGNVCHRKKHHGKRNSNRAHQGKHETYGHKTPY

SEQ ID NO: 41026 - protein, 117 aa, Homo sapiens
MQQRGLAIVALAVCAALHASEAILPIASSCCTEVSHHISRRLLERVNMCRIQRADGDCDLAAVMLECSDMISAHYNLHLPGSNDSPTSAFQVAGITAFMSSAEESVSARTTILLSSG

SEQ ID NO: 41027 - protein, 93 aa, Homo sapiens
MQVSTAALAVLLCTMALCNQVLSAPLAADTPTACCFSYTSRQIPQNFIADYFETSSQCSKPSVIFLTKRGRQVCADPSEEWVQKYVSDLELSA

SEQ ID NO: 41028 - protein, 52 aa, Homo sapiens
MQVSTAALAVLLCTMALCNQVLSAPLSRPREAGRSVLTPVRSGSRNTSVTWS

SEQ ID NO: 41029 - protein, 47 aa, Homo sapiens
MQVSTAALAVLLCTMALCNQVLSAPQAGRSVLTPVRSGSRNTSVTWS

SEQ ID NO: 41030 - protein, 92 aa, Homo sapiens
MKLCVTVLSLLMLVAAFCSPALSAPMGSDPPTACCFSYTARKLPRNFVVDYYETSSLCSQPAVVFQTKRSKQVCADPSESWVQEYVYDLELN

SEQ ID NO: 41031 - protein, 52 aa, Homo sapiens
MKLCVTVLSLLMLVAAFCSPALSAPNSKPKEASKSVLIPVNPGSRSTCMTWN

SEQ ID NO: 41032 - protein, 52 aa, Homo sapiens
MKLCVTVLSLLVLVAAFCSLALSAPNSKPKEASKSALTPVSPGSRSTCMTWN

SEQ ID NO: 41033 - protein, 68 aa, Homo sapiens [sequence omitted]

SEQ ID NO: 41034 - protein, 86 aa, Homo sapiens
MKLCVTVLSLLVLVAAFCSLALSAPMGSDPPTACCFSYTARKLPRNFVVDYYETSSLCSQPAVVAAPHGPWSGRGRCLPQARDKAR

SEQ ID NO: 41035 - protein, 92 aa, Homo sapiens
MKLCVTVLSLLVLVAAFCSLALSAPMGSDPPTACCFSYTARKLPRNFVVDYYETSSLCSQPAVVFQTKRGKQVCADPSESWVQEYVYDLELN

SEQ ID NO: 41036 - protein, 99 aa, Homo sapiens
MKVSAALLCLLLMAATFSPQGLAQPDSVSIPITCCFNVINRKIPIQRLESYTRITNIQCPKEAVIFKTKRGKEVCADPKERWVRDSMKHLDQIFQNLKP

SEQ ID NO: 41037 - protein, 109 aa, Homo sapiens
MLKLTPLPSKMKVSAALLCLLLMAATFSPQGLAQPDSVSIPITCCFNVINRKIPIQRLESYTRITNIQCPKEAVIFKTKRGKEVCADPKERWVRDSMKHLDQIFQNLKP

SEQ ID NO: 41038 - protein, 355 aa, Homo sapiens
METPNTTEDYDTTTEFDYGDATPCQKVNERAFGAQLLPPLYSLVFVIGLVGNILVVLVLVQYKRLKNMTSIYLLNLAISDLLFLFTLPFWIDYKLKDDWVFGDAMCKILSGFYYTGLYSEIFFIILLTIDRYLAIVHAVFALRARTVTFGVITSIIIWALAILASMPGLYFSKTQWEFTHHTCSLHFPHESLREWKLFQALKLNLFGLVLPLLVMIICYTGIIKILLRRPNEKKSKAVRLIFVIMIIFFLFWTPYNLTILISVFQDFLFTHECEQSRHLDLAVQVTEVIAYTHCCVNPVIYAFVGERFRKYLRQLFHRRVAVHLVKWLPFLSVDRLERVSSTSPSTGEHELSAGF

SEQ ID NO: 41039 - protein, 362 aa, Homo sapiens
MGTEATEQVSWGHYSGDEEDAYSAEPLPELCYKADVQAFSRAFQPSVSLTVAALGLAGNGLVLATHLAARRAARSPTSAHLLQLALADLLLALTLPFAAAGALQGWSLGSATCRTISGLYSASFHAGFLFLACISADRYVAIARALPAGPRPSTPGRAHLVSVIVWLLSLLLALPALLFSQDGQREGQRRCRLIFPEGLTQTVKGASAVAQVALGFALPLGVMVACYALLGRTLLAARGPERRRALRVVVALVAAFVVLQLPYSLALLLDTADLLAARERSCPASKRKDVALLVTSGLALARCGLNPVLYAFLGLRFRQDLRRLLRGGSCPSGPQPRRGCPRRPRLSSCSAPTETHSLSWDN

SEQ ID NO: 41040 - protein, 374 aa, Homo sapiens
MLSTSRSRFIRNTNESGEEVTTFFDYDYGAPCHKFDVKQIGAQLLPPLYSLVFIFGFVGNMLVVLILINCKKLKCLTDIYLLNLAISDLLFLITLPLWAHSAANEWVFGNAMCKLFTGLYHIGYFGGIFFIILLTIDRYLAIVHAVFALKARTVTFGVVTSVITWLVAVFASVPGIIFTKCQKEDSVYVCGPYFPRGWNNFHTIMRNILGLVLPLLIMVICYSGILKTLLRCRNEKKRHRAVRVIFTIMIVYFLFWTPYNIVILLNTFQEFFGLSNCESTSQLDQATQVTETLGMTHCCINPIIYAFVGEKFRSLFHIALGCRIAPLQKPVCGGPGVRPGKNVKVTTQGLLDGRGKGKSIGRAPEASLQDKEGA

SEQ ID NO: 41041 - protein, 374 aa, Homo sapiens; identical to SEQ ID NO: 41040

SEQ ID NO: 41042 - protein, 121 aa, Homo sapiens
MLSTSRSRFIRNTNESGEEVTTFFDYDYGAPCHKFDVKQIGAQLLPPLYSLVFIFGFVGNMLVVLILINCKKLKCLTDIYLLNLAISDLLFLITLPLWAHSAANEWVFGNAMCKLFTGLYH

SEQ ID NO: 41043 - protein, 360 aa, Homo sapiens
MLSTSRSRFIRNTNESGEEVTTFFDYDYGAPCHKFDVKQIGAQLLPPLYSLVFIFGFVGNMLVVLILINCKKLKCLTDIYLLNLAISDLLFLITLPLWAHSAANEWVFGNAMCKLFTGLYHIGYFGGIFFIILLTIDRYLAIVHAVFALKARTVTFGVVTSVITWLVAVFASVPGIIFTKCQKEDSVYVCGPYFPRGWNNFHTIMRNILGLVLPLLIMVICYSGILKTLLRCRNEKKRHRAVRVIFTIMIVYFLFWTPYNIVILLNTFQEFFGLSNCESTSQLDQATQVTETLGMTHCCINPIIYAFVGEKFRRYLSVFFRKHITKRFCKQCPVFYRETVDGVTSTNTPSTGEQEVSAGL

SEQ ID NO: 41044 - protein, 355 aa, Homo sapiens
MTTSLDTVETFGTTSYYDDVGLLCEKADTRALMAQFVPPLYSLVFTVGLLGNVVVVMILIKYRRLRIMTNIYLLNLAISDLLFLVTLPFWIHYVRGHNWVFGHGMCKLLSGFYHTGLYSEIFFIILLTIDRYLAIVHAVFALRARTVTFGVITSIVTWGLAVLAALPEFIFYETEELFEETLCSALYPEDTVYSWRHFHTLRMTIFCLVLPLLVMAICYTGIIKTLLRCPSKKKYKAIRLIFVIMAVFFIFWTPYNVAILLSSYQSILFGNDCERSKHLDLVMLVTEVIAYSHCCMNPVIYAFVGERFRKYLRHFFHRHLLMHLGRYIPFLPSEKLERTSSVSPSTAEPELSIVF

SEQ ID NO: 41045 - protein, 355 aa, Homo sapiens; identical to SEQ ID NO: 41044

SEQ ID NO: 41046 - protein, 355 aa, Homo sapiens; identical to SEQ ID NO: 41044

SEQ ID NO: 41047 - protein, 80 aa, Homo sapiens
MTTSLDTVETFGTTSYYDDVGLLCEKADTRALMAQFVPPLYSLVFTVGLLGNVVVVMILIKYRRLRIMTNIYLLNLAISD

SEQ ID NO: 41048 - protein, 21 aa, Homo sapiens
MTTSLDTVETFGTTSYYDDVG

SEQ ID NO: 41049 - protein, 355 aa, Homo sapiens; identical to SEQ ID NO: 41044

SEQ ID NO: 41050 - protein, 376 aa, Homo sapiens
MPFGIRMLLRAHKPGSSRRSEMTTSLDTVETFGTTSYYDDVGLLCEKADTRALMAQFVPPLYSLVFTVGLLGNVVVVMILIKYRRLRIMTNIYLLNLAISDLLFLVTLPFWIHYVRGHNWVFGHGMCKLLSGFYHTGLYSEIFFIILLTIDRYLAIVHAVFALRARTVTFGVITSIVTWGLAVLAALPEFIFYETEELFEETLCSALYPEDTVYSWRHFHTLRMTIFCLVLPLLVMAICYTGIIKTLLRCPSKKKYKAIRLIFVIMAVFFIFWTPYNVAILLSSYQSILFGNDCERSKHLDLVMLVTEVIAYSHCCMNPVIYAFVGERFRKYLRHFFHRHLLMHLGRYIPFLPSEKLERTSSVSPSTAEPELSIVF

SEQ ID NO: 41051 - protein, 360 aa, Homo sapiens
MNPTDIADTTLDESIYSNYYLYESIPKPCTKEGIKAFGELFLPPLYSLVFVFGLLGNSVVVLVLFKYKRLRSMTDVYLLNLAISDLLFVFSLPFWGYYAADQWVFGLGLCKMISWMYLVGFYSGIFFVMLMSIDRYLAIVHAVFSLRARTLTYGVITSLATWSVAVFASLPGFLFSTCYTERNHTYCKTKYSLNSTTWKVLSSLEINILGLVIPLGIMLFCYSMIIRTLQHCKNEKKNKAVKMIFAVVVLFLGFWTPYNIVLFLETLVELEVLQDCTFERYLDYAIQATETLAFVHCCLNPIIYFFLGEKFRKYILQLFKTCRGLFVLCQYCGLLQIYSADTPSSSYTQSTMDHDLHDAL

SEQ ID NO: 41052 - protein, 352 aa, Homo sapiens [sequence omitted]

SEQ ID NO: 41053 - protein, 352 aa, Homo sapiens [sequence omitted]

SEQ ID NO: 41054 - protein, 332 aa, Homo sapiens
LPKNQCEANRSPPPASALLTGVHLWFCNMLVILILINCKRLKSMTDIYLLNLAISDLFFLLTVPFWAHYAAAQWDFGNTMCQLLTGLYFIGFFSGIFFIILLTIDRYLAVVHAVFALKARTVTFGVVTSVITWVVAVFASLPGIIFTRSQKEGLHYTCSSHFPYSQYQFWKNFQTLKIVILGLVLPLLVMVICYSGILKTLLRCRNEKKRHRAVRLIFTIMIVYFLFWAPYNIVLLLNTFQEFFGLNNCSSSNRLDQAMQVTETLGMTHCCINPIIYAFVGEKFRNYLLVFFQKHIAKRFCKCCSIFQQEAPERASSVYTRSTGEQEISVGL

SEQ ID NO: 41055 - protein, 352 aa, Homo sapiens [sequence omitted]

SEQ ID NO: 41056 - protein, 374 aa, Homo sapiens
MSGESMNFSDVFDSSEDYFVSVNTSYYSVDSEMLLCSLQEVRQFSRLFVPIAYSLICVFGLLGNILVVITFAFYKKARSMTDVYLLNMAIADILFVLTLPFWAVSHATGAWVFSNATCKLLKGIYAINFNCGMLLLTCISMDRYIAIVQATKSFRLRSRTLPRSKIICLVVWGLSVIISSSTFVFNQKYNTQGSDVCEPKYQTVSEPIRWKLLMLGLELLFGFFIPLMFMIFCYTFIVKTLVQAQNSKRHKAIRVIIAVVLVFLACQIPHNMVLLVTAANLGKMNRSCQSEKLIGYTKTVTEVLAFLHCCLNPVLYAFIGQKFRNYFLKILKDLWCVRRKYKSSGFSCAGRYSENISRQTSETADNDNASSFTM

SEQ ID NO: 41057 - protein, 374 aa, Homo sapiens; identical to SEQ ID NO: 41056

SEQ ID NO: 41058 - protein, 374 aa, Homo sapiens; identical to SEQ ID NO: 41056

SEQ ID NO: 41059 - protein, 378 aa, Homo sapiens
MDLGKPMKSVLVVALLVIFQVCLCQDEVTDDYIGDNTTVDYTLFESLCSKKDVRNFKAWFLPIMYSIICFVGLLGNGLVVLTYIYFKRLKTMTDTYLLNLAVADILFLLTLPFWAYSAAKSWVFGVHFCKLIFAIYKMSFFSGMLLLLCISIDRYVAIVQAVSAHRHRARVLLISKLSCVGIWILATVLSIPELLYSDLQRSSSEQAMRCSLITEHVEAFITIQVAQMVIGFLVPLLAMSFCYLVIIRTLLQARNFERNKAIKVIIAVVVVFIVFQLPYNGVVLAQTVANFNITSSTCELSKQLNIAYDVTYSLACVRCCVNPFLYAFIGVKFRNDLFKLFKDLGCLSQEQLRQWSSCRHIRRSSMSVEAETTTTFSP

SEQ ID NO: 41060 - protein, 355 aa, Homo sapiens
MDYTLDLSVTTVTDYYYPDIFSSPCDAELIQTNGKLLLAVFYCLLFVFSLLGNSLVILVLVVCKKLRSITDVYLLNLALSDLLFVFSFPFQTYYLLDQWVFGTVMCKVVSGFYYIGFYSSMFFITLMSVDRYLAVVHAVYALKVRTIRMGTTLCLAVWLTAIMATIPLLVFYQVASEDGVLQCYSFYNQQTLKWKIFTNFKMNILGLLIPFTIFMFCYIKILHQLKRCQNHNKTKAIRLVLIVVIASLLFWVPFNVVLFLTSLHSMHILDGCSISQQLTYATHVTEIISFTHCCVNPVIYAFVGEKFKKHLSEIFQKSCSQIFNYLGRQMPRESCEKSSSCQQHSSRSSSVDYIL

SEQ ID NO: 41061 - protein, 272 aa, Homo sapiens
MRNLFRQMTYYLLDQWVFGTVMCKVVSGFYYIGFYSSMFFITLMSVDRYLAVVHAVYALKVRTIRMGTTLCLAVWLTAIMATIPLLVFYQVASEDGVLQCYSFYNQQTLKWKIFTNFKMNILGLLIPFTIFMFCYIKILHQLKRCQNHNKTKAIRLVLIVVIASLLFWVPFNVVLFLTSLHSMHILDGCSISQQLTYATHVTEIISFTHCCVNPVIYAFVGEKFKKHLSEIFQKSCSQIFNYLGRQMPRESCEKSSSCQQHSSRSSSVDYIL

SEQ ID NO: 41062 - protein, 357 aa, Homo sapiens
MADDYGSESTSSMEDYVNFNFTDFYCEKNNVRQFASHFLPPLYWLVFIVGALGNSLVILVYWYCTRVKTMTDMFLLNLAIADLLFLVTLPFWAIAAADQWKFQTFMCKVVNSMYKMNFYSCVLLIMCISVDRYIAIAQAMRAHTWREKRLLYSKMVCFTIWVLAAALCIPEILYSQIKEESGIAICTMVYPSDESTKLKSAVLTLKVILGFFLPFVVMACCYTIIIHTLIQAKKSSKHKALKVTITVLTVFVLSQFPYNCILLVQTIDAYAMFISNCAVSTNIDICFQVTQTIAFFHSCLNPVLYVFVGERFRRDLVKTLKNLGCISQAQWVSFTRREGSLKLSSMLLETTSGALSL

SEQ ID NO: 41063 - protein, 369 aa, Homo sapiens
MTPTDFTSPIPNMADDYGSESTSSMEDYVNFNFTDFYCEKNNVRQFASHFLPPLYWLVFIVGALGNSLVILVYWYCTRVKTMTDMFLLNLAIADLLFLVTLPFWAIAAADQWKFQTFMCKVVNSMYKMNFYSCVLLIMCISVDRYIAIAQAMRAHTWREKRLLYSKMVCFTIWVLAAALCIPEILYSQIKEESGIAICTMVYPSDESTKLKSAVLTLKVILGFFLPFVVMACCYTIIIHTLIQAKKSSKHKALKVTITVLTVFVLSQFPYNCILLVQTIDAYAMFISNCAVSTNIDICFQVTQTIAFFHSCLNPVLYVFVGERFRRDLVKTLKNLGCISQAQWVSFTRREGSLKLSSMLLETTSGALSL

SEQ ID NO: 41064 - protein, 357 aa, Homo sapiens; identical to SEQ ID NO: 41062

SEQ ID NO: 41065 - protein, 350 aa, Homo sapiens
MALEQNQSTDYYYEENEMNGTYDYSQYELICIKEDVREFAKVFLPVFLTIVFVIGLAGNSMVVAIYAYYKKQRTKTDVYILNLAVADLLLLFTLPFWAVNAVHGWVLGKIMCKITSALYTLNFVSGMQFLACISIDRYVAVTKVPSQSGVGKPCWIICFCVWMAAILLSIPQLVFYTVNDNARCIPIFPRYLGTSMKALIQMLEICIGFVVPFLIMGVCYFITARTLMKMPNIKISRPLKVLLTVVIVFIVTQLPYNIVKFCRAIDIIYSLITSCNMSKRMDIAIQVTESIALFHSCLNPILYVFMGASFKNYVMKVAKKYGSWRRQRQSVEEFPFDSEGPTEPTSTFSI

SEQ ID NO: 41066 - protein, 274 aa, Homo sapiens
MALEQNQSTDYYYEENEMNGTYDYSQYELICIKEDVREFAKVFLPVFLTIVFVIGLAGNSMVVAIYAYYKKQRTKTDVYILNLAVADLLLLFTLPFWAVNAVHGWVLGKIMCKITSALYTLNFVSGMQFLACISIDRYVAVTKVPSQSGVGKPCWIICFCVWMAAILLSIPQLVFYTVNDNARCIPIFPRYLGTSMKALIQMLEICIGFVVPFLIMGVCYFITARTLMKMPNIKISRPLKVLLTVVIVFIVTQLPFAWIHMNDAFPSNKTSALF

SEQ ID NO: 41067 - protein, 356 aa, Homo sapiens
MIYTRFLKGSLKMANYTLAPEDEYDVLIEGELESDEAEQCDKYDAQALSAQLVPSLCSAVFVIGVLDNLLVVLILVKYKGLKRVENIYLLNLAVSNLCFLLTLPFWAHAGGDPMCKILIGLYFVGLYSETFFNCLLTVQRYLVFLHKGNFFSARRRVPCGIITSVLAWVTAILATLPEFVVYKPQMEDQKYKCAFSRTPFLPADETFWKHFLTLKMNISVLVLPLFIFTFLYVQMRKTLRFREQRYSLFKLVFAIMVVFLLMWAPYNIAFFLSTFKEHFSLSDCKSSYNLDKSVHITKLIATTHCCINPLLYAFLDGTFSKYLCRCFHLRSNTPLQPRGQSAQGTSREEPDHSTEV

SEQ ID NO: 41068 - protein, 344 aa, Homo sapiens
MANYTLAPEDEYDVLIEGELESDEAEQCDKYDAQALSAQLVPSLCSAVFVIGVLDNLLVVLILVKYKGLKRVENIYLLNLAVSNLCFLLTLPFWAHAGGDPMCKILIGLYFVGLYSETFFNCLLTVQRYLVFLHKGNFFSARRRVPCGIITSVLAWVTAILATLPEFVVYKPQMEDQKYKCAFSRTPFLPADETFWKHFLTLKMNISVLVLPLFIFTFLYVQMRKTLRFREQRYSLFKLVFAIMVVFLLMWAPYNIAFFLSTFKEHFSLSDCKSSYNLDKSVHITKLIATTHCCINPLLYAFLDGTFSKYLCRCFHLRSNTPLQPRGQSAQGTSREEPDHSTEV

SEQ ID NO: 41069 - protein, 344 aa, Homo sapiens; identical to SEQ ID NO: 41068

SEQ ID NO: 41070 - protein, 344 aa, Homo sapiens; identical to SEQ ID NO: 41068

SEQ ID NO: 41071 - protein, 217 aa, Homo sapiens
MANYTLAPEDEYDVLIEGELESDEAEQCDKYDAQALSAQLVPSLCSAVFVIGVLDNLLVVLILVKYKGLKRVENIYLLNLAVSNLCFLLTLPFWAHAGGDPMCKILIGLYFVGLYSETFFNCLLTVQRYLVFLHKGNFFSARRRVPCGIITSVLAWVTAILATLPEFVVYKPQMEDQKYKCAFSRTPFLPADETFWKHFLTLKMNISVLVLPLFIFT

SEQ ID NO: 41072 - protein, 397 aa, Homo sapiens
MAPISLSWLLRLATFCHLTVLLAGQHHGVTKCNITCSKMTSKIPVALLIHYQQNQASCGKRAIILETRQHRLFCADPKEQWVKDAMQHLDRQAAALTRNGGTFEKQIGEVKPRTTPAAGGMDESVVLEPEATGESSSLEPTPSSQEAQRALGTSPELPTGVTGSSGTRLPPTPKAQDGGPVGTELFRVPPVSTAATWQSSAPHQPGPSLWAEAKTSEAPSTQDPSTQASTASSPAPEENAPSEGQRVWGQGQSPRPENSLEREEMGPVPAHTDAFQDWGPGSMAHVSVVPVSSEGTPSREPVASGSWTPKAEEPIHATMDPQRLGVLITPVPDAQAATRRQAVGLLAFLGLLFCLGVAMFTYQSLQGCPRKMAGEMAEGLRYIPRSCGSNSYVLVPV

SEQ ID NO: 41073 - protein, 387 aa, Homo sapiens
MREPLEAFKLADLDFRKSSLASGWRMASGAFTMDQFPESVTENFEYDDLAEACYIGDIVVFGTVFLSIFYSVIFAIGLVGNLLVVFALTNSKKPKSVTDIYLLNLALSDLLFVATLPFWTHYLINEKGLHNAMCKFTTAFFFIGFFGSIFFITVISIDRYLAIVLAANSMNNRTVQHGVTISLGVWAAAILVAAPQFMFTKQKENECLGDYPEVLQEIWPVLRNVETNFLGFLLPLLIMSYCYFRIIQTLFSCKNHKKAKAIKLILLVVIVFFLFWTPYNVMIFLETLKLYDFFPSCDMRKDLRLALSVTETVAFSHCCLNPLIYAFAGEKFRRYLYHLYGKCLAVLCGRSVHVDFSSSESQRSRHGSVLSSNFTYHTSDGDALLLL

SEQ ID NO: 41074 - protein, 355 aa, Homo sapiens
MDQFPESVTENFEYDDLAEACYIGDIVVFGTVFLSIFYSVIFAIGLVGNLLVVFALTNSKKPKSVTDIYLLNLALSDLLFVATLPFWTHYLINEKGLHNAMCKFTTAFFFIGFFGSIFFITVISIDRYLAIVLAANSMNNRTVQHGVTISLGVWAAAILVAAPQFMFTKQKENECLGDYPEVLQEIWPVLRNVETNFLGFLLPLLIMSYCYFRIIQTLFSCKNHKKAKAIKLILLVVIVFFLFWTPYNVMIFLETLKLYDFFPSCDMRKDLRLALSVTETVAFSHCCLNPLIYAFAGEKFRRYLYHLYGKCLAVLCGRSVHVDFSSSESQRSRHGSVLSSNFTYHTSDGDALLLL

SEQ ID NO: 41075 - protein, 106 aa, Homo sapiens
MDQFPESVTENFEYDDLAEACYIGDIVVFGTVFLSIFYSVIFAIGLVGNLLVVFALTNSKKPKSVTDIYLLNLALSDLLFVATLPFWTHYLINEKGLHNAMCKFTT

SEQ ID NO: 41076 - protein, 166 aa, Homo sapiens
MDQFPESVTENFEYDDLAEACYIGDIVVFGTVFLSIFYSVIFAIGLVGNLLVVFALTNSKKPKSVTDIYLLNLALSDLLFVATLPFWTHYLINEKGLHNAMCKFTTAFFFIGFFGSIFFITVISIDRYLAIVLAANSMNNRTVQHGVTISLGVWAAAILVAAPQFM

SEQ ID NO: 41077 - protein, 363 aa, Homo sapiens
MASGKAFTMDQFPESVTENFEYDDLAEACYIGDIVVFGTVFLSIFYSVIFAIGLVGNLLVVFALTNSKKPKSVTDIYLLNLALSDLLFVATLPFWTHYLINEKGLHNAMCKFTTAFFFIGFFGSIFFITVISIDRYLAIVLAANSMNNRTVQHGVTISLGVWAAAILVAAPQFMFTKQKENECLGDYPEVLQEIWPVLRNVETNFLGFLLPLLIMSYCYFRIIQTLFSCKNHKKAKAIKLILLVVIVFFLFWTPYNVMIFLETLKLYDFFPSCDMRKDLRLALSVTETVAFSHCCLNPLIYAFAGEKFRRYLYHLYGKCLAVLCGRSVHVDFSSSESQRSRHGSVLSSNFTYHTSDGDALLLL

SEQ ID NO: 41078 - protein, 355 aa, Homo sapiens; identical to SEQ ID NO: 41074

SEQ ID NO: 41079 - protein, 355 aa, Homo sapiens; identical to SEQ ID NO: 41074

SEQ ID NO: 41080 - protein, 107 aa, Homo sapiens
MARAALSAAPSNPRLLRVALLLLLLVAAGRRAAGASVATELRCQCLQTLQGIHPKNIQSVNVKSPGPHCAQTEVIATLKNGRKACLNPASPIVKKIIEKMLNSDKSN

SEQ ID NO: 41081 - protein, 94 aa, Homo sapiens
MSVKGMAIALAVILCATVVQGFPMFKRGRCLCIGPGVKAVKVADIEKASIMYPSNNCDKIEVIITLKENKGQRCLNPKSKQARLIIKKVERKNF

SEQ ID NO: 41082 - protein, 94 aa, Homo sapiens; identical to SEQ ID NO: 41081

SEQ ID NO: 41083 - protein, 111 aa, Homo sapiens
MSLLPRRAPPVSMRLLAAALLLLLLALYTARVDGSKCKCSRKGPKIRYSDVKKLEMKPKYPHCEEKMVIITTKSVSRYRGQEHCLHPKLQSTKRFIKWYNAWNEKRRVYEE

SEQ ID NO: 41084 - protein, 99 aa, Homo sapiens
MRLLAAALLLLLLALYTARVDGSKCKCSRKGPKIRYSDVKKLEMKPKYPHCEEKMVIITTKSVSRYRGQEHCLHPKLQSTKRFIKWYNAWNEKRRVYEE

SEQ ID NO: 41085 - protein, 273 aa, Homo sapiens
MSGSQSEVAPSPQSPRSPEMGRDLRPGSRVLLLLLLLLLVYLTQPGNGNEGSVTGSCYCGKRISSDSPPSVQFMNRLRKHLRAYHRCLYYTRFQLLSWSVCGGNKDPWVQELMSCLDLKECGHAYSGIVAHQKHLLPTSPPISQASEGASSDIHTPAQMLLSTLQSTQRPTLPVGSLSSDKELTRPNETTIHTAGHSLAAGPEAGENQKQPEKNAGPTARTSATVPVLCLLAIIFILTAALSYVLCKRRRGQSPQSSPDLPVHYIPVAPDSNT

SEQ ID NO: 41086 - protein, 273 aa, Homo sapiens; identical to SEQ ID NO: 41085

SEQ ID NO: 41087 - protein, 119 aa, Homo sapiens
MKVLISSLLLLLPLMLMSMVSSSLNPGVARGHRDRGQASRRWLQEGGQECECKDWFLRAPRRKFMTVSGLPKKQCPCDHFKGNVKKTRHQRHHRKPNKHSRACQQFLKQCQLRSFALPL

SEQ ID NO: 41088 - protein, 119 aa, Homo sapiens; identical to SEQ ID NO: 41087

SEQ ID NO: 41089 - protein, 107 aa, Homo sapiens
MARATLSAAPSNPRLLRVALLLLLLVAASRRAAGAPLATELRCQCLQTLQGIHLKNIQSVKVKSPGPHCAQTEVIATLKNGQKACLNPASPMVKKIIEKMLKNGKSN

SEQ ID NO: 41090 - protein, 107 aa, Homo sapiens
MAHATLSAAPSNPRLLRVALLLLLLVAASRRAAGASVVTELRCQCLQTLQGIHLKNIQSVNVRSPGPHCAQTEVIATLKNGKKACLNPASPMVQKIIEKILNKGSTN

SEQ ID NO: 41091 - protein, 114 aa, Homo sapiens
MSLLSSRAARVPGPSSSLCALLVLLLLLTQPGPIASAGPAAAVLRELRCVCLQTTQGVHPKMISNLQVFAIGPQCSKVEVVASLKNGKEICLDPEAPFLKKVIQKILDGGNKEN

SEQ ID NO: 41092 - protein, 350 aa, Homo sapiens
MSNITDPQMWDFDDLNFTGMPPADEDYSPCMLETETLNKYVVIIAYALVFLLSLLGNSLVMLVILYSRVGRSVTDVYLLNLALADLLFALTLPIWAASKVNGWIFGTFLCKVVSLLKEVNFYSGILLLACISVDRYLAIVHATRTLTQKRHLVKFVCLGCWGLSMNLSLPFFLFRQAYHPNNSSPVCYEVLGNDTAKWRMVLRILPHTFGFIVPLFVMLFCYGFTLRTLFKAHMGQKHRAMRVIFAVVLIFLLCWLPYNLVLLADTLMRTQVIQESCERRNNIGRALDATEILGFLHSCLNPIIYAFIGQNFRHGFLKILAMHGLVSKEFLARHRVTSYTSSSVNVSSNL

SEQ ID NO: 41093 - protein, 294 aa, Homo sapiens
MSNITDPQMWDFDDLNFTGMPPADEDYSPCMLETETLNKYVVIIAYALVFLLSLLGNSLVMLVILYSRVGRSVTDVYLLNLAIVHATRTLTQKRHLVKFVCLGCWGLSMNLSLPFFLFRQAYHPNNSSPVCYEVLGNDTAKWRMVLRILPHTFGFIVPLFVMLFCYGFTLRTLFKAHMGQKHRAMRVIFAVVLIFLLCWLPYNLVLLADTLMRTQVIQESCERRNNIGRALDATEILGFLHSCLNPIIYAFIGQNFRHGFLKILAMHGLVSKEFLARHRVTSYTSSSVNVSSNL

SEQ ID NO: 41094 - protein, 267 aa, Homo sapiens
MVLEVSDHQVLNDAEVAALLENFSSSYDYGENESDSCCTSPPCPQDFSLNFDRAFLPALYSLLFLLGLLGNGAVAAVLLSRRTALSSTDTFLLHLAVADTLLVLTLPLWAVDAAVQWVFGSGLCKVAGALFNINFYAGALLLACISFDRYLNIVHATQLYRRGPPARVTLTCLAVWGLCLLFALPDFIFLSAHHDERLNATHCQYNFPQGSSSGSGCGCCSCAWAAPTREGSRGSHRLPAGIHPGLRPQRPPTRACEAGIRAPLSPT

SEQ ID NO: 41095 - protein, 415 aa, Homo sapiens
MELRKYGPGRLAGTVIGGAAQSKSQTKSDSITKEFLPGLYTAPSSPFPPSQVSDHQVLNDAEVAALLENFSSSYDYGENESDSCCTSPPCPQDFSLNFDRAFLPALYSLLFLLGLLGNGAVAAVLLSRRTALSSTDTFLLHLAVADTLLVLTLPLWAVDAAVQWVFGSGLCKVAGALFNINFYAGALLLACISFDRYLNIVHATQLYRRGPPARVTLTCLAVWGLCLLFALPDFIFLSAHHDERLNATHCQYNFPQVGRTALRVLQLVAGFLLPLLVMAYCYAHILAVLLVSRGQRRLRAMRLVVVVVVAFALCWTPYHLVVLVDILMDLGALARNCGRESRVDVAKSVTSGLGYMHCCLNPLLYAFVGVKFRERMWMLLLRLGCPNQRGLQRQPSSSRRDSSWSETSEASYSGL

SEQ ID NO: 41096 - protein, 368 aa, Homo sapiens
MVLEVSDHQVLNDAEVAALLENFSSSYDYGENESDSCCTSPPCPQDFSLNFDRAFLPALYSLLFLLGLLGNGAVAAVLLSRRTALSSTDTFLLHLAVADTLLVLTLPLWAVDAAVQWVFGSGLCKVAGALFNINFYAGALLLACISFDRYLNIVHATQLYRRGPPARVTLTCLAVWGLCLLFALPDFIFLSAHHDERLNATHCQYNFPQVGRTALRVLQLVAGFLLPLLVMAYCYAHILAVLLVSRGQRRLRAMRLVVVVVVAFALCWTPYHLVVLVDILMDLGALARNCGRESRVDVAKSVTSGLGYMHCCLNPLLYAFVGVKFRERMWMLLLRLGCPNQRGLQRQPSSSRRDSSWSETSEASYSGL

SEQ ID NO: 41097 - protein, 372 aa, Homo sapiens
MNYPLTLEMDLENLEDLFWELDRLDNYNDTSLVENHLCPATEGPLMASFKAVFVPVAYSLIFLLGVIGNVLVLVILERHRQTRSSTETFLFHLAVADLLLVFILPFAVAEGSVGWVLGTFLCKTVIALHKVNFYCSSLLLACIAVDRYLAIVHAVHAYRHRRLLSIHITCGTIWLVGFLLALPEILFAKVSQGHHNNSLPRCTFSQENQAETHAWFTSRFLYHVAGFLLPMLVMGWCYVGVVHRLRQAQRRPQRQKAVRVAILVTSIFFLCWSPYHIVIFLDTLARLKAVDNTCKLNGSLPVAITMCEFLGLAHCCLNPMLYTFAGVKFRSDLSRLLTKLGCTGPASLCQLFPSWRRSSLSESENATSLTTF

SEQ ID NO: 41098 - protein, 342 aa, Homo sapiens
MAEHDYHEDYGFSSFNDSSQEEHQDFLQFSKVFLPCMYLVVFVCGLVGNSLVLVISIFYHKLQSLTDVFLVNLPLADLVFVCTLPFWAYAGIHEWVFGQVMCKSLLGIYTINFYTSMLILTCITVDRFIVVVKATKAYNQQAKRMTWGKVTSLLIWVISLLVSLPQIIYGNVFNLDKLICGYHDEAISTVVLATQMTLGFFLPLLTMIVCYSVIIKTLLHAGGFQKHRSLKIIFLVMAVFLLTQMPFNLMKFIRSTHWEYYAMTSFHYTIMVTEAIAYLRACLNPVLYAFVSLKFRKNFWKLVKDIGCLPYLGVSHQWKSSEDNSKTFSASHNVEATSMFQL

SEQ ID NO: 41099 - protein, 342 aa, Homo sapiens; identical to SEQ ID NO: 41098

SEQ ID NO: 41100 - protein, 342 aa, Homo sapiens; identical to SEQ ID NO: 41098

SEQ ID NO: 41101 - protein, 342 aa, Homo sapiens; identical to SEQ ID NO: 41098

SEQ ID NO: 41102 - protein, 362 aa, Homo sapiens
MDLHLFDYSEPGNFSDISWPCNSSDCIVVDTVMCPNMPNKSVLLYTLSFIYIFIFVIGMIANSVVVWVNIQAKTTGYDTHCYILNLAIADLWVVLTIPVWVVSLVQHNQWPMGELTCKVTHLIFSINLFGSIFFLTCMSVDRYLSITYFTNTPSSRKKMVRRVVCILVWLLAFCVSLPDTYYLKTVTSASNNETYCRSFYPEHSIKEWLIGMELVSVVLGFAVPFSIIAVFYFLLARAISASSDQEKHSSRKIIFSYVVVFLVCWLPYHVAVLLDIFSILHYIPFTCRLEHALFTALHVTQCLSLVHCCVNPVLYSFINRNYRYELMKAFIFKYSAKTGLTKLIDASRVSETEYSALEQSTK

SEQ ID NO: 41103 - protein, 211 aa, Homo sapiens
MDLHLFDYSEPGNFSDISWPCNSSDCIVVDTVMCPNMPNKSVLLYTLSFIYIFIFVIGMIANSVVVWVNIQAKTTGYDTHCYILNLAIADLWVVLTIPVWVVSLVQHNQWPMGELTCKVTHLIFSINLFGSIFFLTCMSVDRYLSITYFTNTPSSRKKMVRRVVCILVWLLAFCVSLPDTYYLKTVTSASNNETYCRSFYPEHSIKEWLIG

SEQ ID NO: 41104 - protein, 384 aa, Homo sapiens
MAATASPQPLATEDADSENSSFYYYDYLDEVAFMLCRKDAVVSFGKVFLPVFYSLIFVLGLSGNLLLLMVLLRYVPRRRMVEIYLLNLAISNLLFLVTLPFWGISVAWHWVFGSFLCKMVSTLYTINFYSGIFFISCMSLDKYLEIVHAQPYHRLRTRAKSLLLATIVWAVSLAVSIPDMVFVQTHENPKGVWNCHADFGGHGTIWKLFLRFQQNLLGFLLPLLAMIFFYSRIGCVLVRLRPAGQGRALKIAAALVVAFFVLWFPYNLTLFLHTLLDLQVFGNCEVSQHLDYALQVTESIAFLHCCFSPILYAFSSHRFRQYLKAFLAAVLGWHLAPGTAQASLSSCSESSILTAQEEMTGMNDLGERQSENYPNKEDVGNKSA

SEQ ID NO: 41105 - protein, 384 aa, Homo sapiens; identical to SEQ ID NO: 41104

SEQ ID NO: 41106 - protein, 384 aa, Homo sapiens; identical to SEQ ID NO: 41104

SEQ ID NO: 41107 - protein, 373 aa, Homo sapiens
MRMEDEDYNTSISYGDEYPDYLDSIVVLEDLSPLEARVTRIFLVVVYSIVCFLGILGNGLVIIIATFKMKKTVNMVWFLNLAVADFLFNVFLPIHITYAAMDYHWVFGTAMCKISNFLLIHNMFTSVFLLTIISSDRCISVLLPVWSQNHRSVRLAYMACMVIWVLAFFLSSPSLVFRDTANLHGKISCFNNFSLSTPGSSSWPTHSQMDPVGYSRHMVVTVTRFLCGFLVPVLIITACYLTIVCKLQRNRLAKTKKPFKIIVTIIITFFLCWCPYHTLNLLELHHTAMPGSVFSLGLPLATALAIANSCMNPILYVFMGQDFKKFKVALFSRLVNALSEDTGHSSYPSHRSFTKMSSMNERTSMNERETGML

SEQ ID NO: 41108 - protein, 371 aa, Homo sapiens
MEDEDYNTSISYGDEYPDYLDSIVVLEDLSPLEARVTRIFLVVVYSIVCFLGILGNGLVIIIATFKMKKTVNMVWFLNLAVADFLFNVFLPIHITYAAMDYHWVFGTAMCKISNFLLIHNMFTSVFLLTIISSDRCISVLLPVWSQNHRSVRLAYMACMVIWVLAFFLSSPSLVFRDTANLHGKISCFNNFSLSTPGSSSWPTHSQMDPVGYSRHMVVTVTRFLCGFLVPVLIITACYLTIVCKLQRNRLAKTKKPFKIIVTIIITFFLCWCPYHTLNLLELHHTAMPGSVFSLGLPLATALAIANSCMNPILYVFMGQDFKKFKVALFSRLVNALSEDTGHSSYPSHRSFTKMSSMNERTSMNERETGML

SEQ ID NO: 41109 - protein, 373 aa, Homo sapiens; identical to SEQ ID NO: 41107

SEQ ID NO: 41110 - protein, 143 aa, Homo sapiens
MRMEDEDYNTSISYGDEYPDYLDSIVVLEDLSPLEARVTRIFLVVVYSIVCFLGILGNGLVIIIATFKMKKTVNMVWFLNLAVADFLFNVFLPIHITYAAMDYHWVFGTAMCKISNFLLIHNMFTSVFLLTIISSDRCISVLL

SEQ ID NO: 41111 - protein, 373 aa, Homo sapiens; identical to SEQ ID NO: 41107

SEQ ID NO: 41112 - protein, 147 aa, Homo sapiens
MRMEDEDYNTSISYGDEYPDYLDSIVVLEDLSPLEARVTRIFLVVVYSIVCFLGILGNGLVIIIATFKMKKTVNMVWFLNLAVADFLFNVFLPIHITYAAMDYHWVFGTAMCKISNFLLIHNMFTSVFLLTIISSDRCISVLLPVWS

SEQ ID NO: 41113 - protein, 371 aa, Homo sapiens; identical to SEQ ID NO: 41108

SEQ ID NO: 41114 - protein, 334 aa, Homo sapiens
MPSKESWSGRKTNRAAVHKSKQEGRQQDLLIAALGMKLGSPKSSVTIWQPLKLFAYSQLTSLVRRATLKENEQIPKYEKIHNFKVHTFRGPHWCEYCANFMWGLIAQGVKCADCGLNVHKQCSKMVPNDCKPDLKHVKKVYSCDLTTLVKAHTTKRPMVVDMCIREIESRGLNSEGLYRVSGFSDLIEDVKMAFDRDGEKADISVNMYEDINIITGALKLYFRDLPIPLITYDAYPKFIESAKIMDPDEQLETLHEALKLLPPAHCETLRYLMAHLKRVTLHEKENLMNAENLGIVFGPTLMRSPELDAMAALNDIRYQRLVVELLIKNEDILF

SEQ ID NO: 41115 - protein, 433 aa, Homo sapiens
MALTLFDTDEYRPPVWKSYLYQLQQEAPHPRRITCTCEVENRPKYYGREFHGMISREAADQLLIVAEGSYLIRESQRQPGTYTLALRFGSQTRNFRLYYDGKHFVGEKRFESIHDLVTDGLITLYIETKAAEYIAKMTINPIYEHVGYTTLNREPAYKKHMPVLKETHDERDSTGQDGVSEKRVHTFRGPHWCEYCANFMWGLIAQGVKCADCGLNVHKQCSKMVPNDCKPDLKHVKKVYSCDLTTLVKAHTTKRPMVVDMCIREIESRGLNSEGLYRVSGFSDLIEDVKMAFDRDGEKADISVNMYEDINIITGALKLYFRDLPIPLITYDAYPKFIESAKIMDPDEQLETLHEALKLLPPAHCETLRYLMAHLKRVTLHEKENLMNAENLGIVFGPTLMRSPELDAMAALNDIRYQRLVVELLIKNEDILF

SEQ ID NO: 41116 - protein, 459 aa, Homo sapiens
MALTLFDTDEYRPPVWKSYLYQLQQEAPHPRRITCTCEVENRPKYYGREFHGMISREAADQLLIVAEGSYLIRESQRQPGTYTLALRFGSQTRNFRLYYDGKHFVGEKRFESIHDLVTDGLITLYIETKAAEYIAKMTINPIYEHVGYTTLNREPAYKKHMPVLKETHDERDSTGQDGVSEKRLTSLVRRATLKENEQIPKYEKIHNFKVHTFRGPHWCEYCANFMWGLIAQGVKCADCGLNVHKQCSKMVPNDCKPDLKHVKKVYSCDLTTLVKAHTTKRPMVVDMCIREIESRGLNSEGLYRVSGFSDLIEDVKMAFDRDGEKADISVNMYEDINIITGALKLYFRDLPIPLITYDAYPKFIESAKIMDPDEQLETLHEALKLLPPAHCETLRYLMAHLKRVTLHEKENLMNAENLGIVFGPTLMRSPELDAMAALNDIRYQRLVVELLIKNEDILF

SEQ ID NO: 41117 - protein, 468 aa, Homo sapiens
MAASSNSSLSGSSVSSDAEEYQPPIWKSYLYQLQQEAPRPKRIICPREVENRPKYYGREFHGIISREQADELLGGVEGAYILRESQRQPGCYTLALRFGNQTLNYRLFHDGKHFVGEKRFESIHDLVTDGLITLYIETKAAEYISKMTTNPIYEHIGYATLLREKVSRRLSRSKNEPRKTNVTHEEHTAVEKISSLVRRAALTHNDNHFNYEKTHNFKVHTFRGPHWCEYCANFMWGLIAQGVRCSDCGLNVHKQCSKHVPNDCQPDLKRIKKVYCCDLTTLVKAHNTQRPMVVDICIREIEARGLKSEGLYRVSGFTEHIEDVKMAFDRDGEKADISANVYPDINIITGALKLYFRDLPIPVITYDTYSKFIDAAKISNADERLEAVHEVLMLLPPAHYETLRYLMIHLKKVTMNEKDNFMNAENLGIVFGPTLMRPPEDSTLTTLHDMRYQKLIVQILIENEDVLF

SEQ ID NO: 41118 - protein, 332 aa, Homo sapiens
MFSEELWLENEKKCAVVRKSKQGRKRQELLAVAFGVKVGVKGGFLWPPLKLFACSQISSLVRRAALTHNDNHFNYEKTHNFKVHTFRGPHWCEYCANFMWGLIAQGVRCSDCGLNVHKQCSKHVPNDCQPDLKRIKKVYCCDLTTLVKAHNTQRPMVVDICIREIEARGLKSEGLYRVSGFTEHIEDVKMAFDRDGEKADISANVYPDINIITGALKLYFRDLPIPVITYDTYSKFIDAAKISNADERLEAVHEVLMLLPPAHYETLRYLMIHLKKVTMNEKDNFMNAENLGIVFGPTLMRPPEDSTLTTLHDMRYQKLIVQILIENEDVLF

SEQ ID NO: 41119 - protein, 174 aa, Homo sapiens
MAASSNSSLSGSSVSSVYSEPRSPRELPKYAEEYQPPIWKSYLYQLQQEAPRPKRIICPREVENRPKYYGREFHGIISREQADELLGGVEGAYILRESQRQPGCYTLALRFGNQTLNYRLFHDGKHFVGEKRFESIHDLVTDGLITLYIETKAAEYISKMTTNPIYEHIGYATL

SEQ ID NO: 41120 - protein, 274 aa, Homo sapiens
MFSEELWLENEKKCAVVRKSKQGRKRQELLAVAFGVKVGVKGGFLWPPLKLFACSQISSLVRRAALTHNDNHFNYEKTHNFKVHTFRGPHWCEYCANFMWGLIAQGVRCSGLKSEGLYRVSGFTEHIEDVKMAFDRDGEKADISANVYPDINIITGALKLYFRDLPIPVITYDTYSKFIDAAKISNADERLEAVHEVLMLLPPAHYETLRYLMIHLKKVTMNEKDNFMNAENLGIVFGPTLMRPPEDSTLTTLHDMRYQKLIVQILIENEDVLF

SEQ ID NO: 41121 - protein, 287 aa, Homo sapiens
MFSEELWLENEKKCAVVRKSKQGRKRQELLAVAFGVKVHTFRGPHWCEYCANFMWGLIAQGVRCSDCGLNVHKQCSKHVPNDCQPDLKRIKKVYCCDLTTLVKAHNTQRPMVVDICIREIEARGLKSEGLYRVSGFTEHIEDVKMAFDRDGEKADISANVYPDINIITGALKLYFRDLPIPVITYDTYSKFIDAAKISNADERLEAVHEVLMLLPPAHYETLRYLMIHLKKVTMNEKDNFMNAENLGIVFGPTLMRPPEDSTLTTLHDMRYQKLIVQILIENEDVLF

SEQ ID NO: 41122 - protein, 192 aa, Homo sapiens
MAASSNSSLSGSSVSSDAEEYQPPIWKSYLYQLQQEAPRPKRIICPREVENRPKYYGREFHGIISREQADELLGGVEGAYILRESQRQPGCYTLALRNPTKISNADERLEAVHEVLMLLPPAHYETLRYLMIHLKKVTMNEKDNFMNAENLGIVFGPTLMRPPEDSTLTTLHDMRYQKLIVQILIENEDVLF

SEQ ID NO: 41123 - protein, 286 aa, Homo sapiens
MFSEELWLENEKKCAVVRKSKQGRKRQELLAVAFGVKVGVKGGFLWPPLKLFACSQISSLVRRAALTHNDNHFNYEKTHNFKVHTFRGPHWCEYCANFMWGLIAQGVRCSDCGLNVHKQCSKHVPNDCQPDLKRIKKVYCCDLTTLVKAHNTQRPMVVDICIREIEARGLKSEGLYRVSGFTEHIEDVKMAFDREISNADERLEAVHEVLMLLPPAHYETLRYLMIHLKKVTMNEKDNFMNAENLGIVFGPTLMRPPEDSTLTTLHDMRYQKLIVQILIENEDVLF

SEQ ID NO: 41124 - protein, 481 aa, Homo sapiens
MAASSNSSLSGSSVSSVYSEPRSPRELPKYAEEYQPPIWKSYLYQLQQEAPRPKRIICPREVENRPKYYGREFHGIISREQADELLGGVEGAYILRESQRQPGCYTLALRFGNQTLNYRLFHDGKHFVGEKRFESIHDLVTDGLITLYIETKAAEYISKMTTNPIYEHIGYATLLREKVSRRLSRSKNEPRKTNVTHEEHTAVEKISSLVRRAALTHNDNHFNYEKTHNFKVHTFRGPHWCEYCANFMWGLIAQGVRCSDCGLNVHKQCSKHVPNDCQPDLKRIKKVYCCDLTTLVKAHNTQRPMVVDICIREIEARGLKSEGLYRVSGFTEHIEDVKMAFDRDGEKADISANVYPDINIITGALKLYFRDLPIPVITYDTYSKFIDAAKISNADERLEAVHEVLMLLPPAHYETLRYLMIHLKKVTMNEKDNFMNAENLGIVFGPTLMRPPEDSTLTTLHDMRYQKLIVQILIENEDVLF

SEQ ID NO: 41125 - protein, 324 aa, Homo sapiens
MAASSNSSLSGSSVSSDAEEYQPPIWKSYLYQLQQEAPRPKRIICPREISSLVRRAALTHNDNHFNYEKTHNFKVHTFRGPHWCEYCANFMWGLIAQGVRCSDCGLNVHKQCSKHVPNDCQPDLKRIKKVYCCDLTTLVKAHNTQRPMVVDICIREIEARGLKSEGLYRVSGFTEHIEDVKMAFDRDGEKADISANVYPDINIITGALKLYFRDLPIPVITYDTYSKFIDAAKISNADERLEAVHEVLMLLPPAHYETLRYLMIHLKKVTMNEKDNFMNAENLGIVFGPTLMRPPEDSTLTTLHDMRYQKLIVQILIENEDVLF

SEQ ID NO: 41126 - protein, 543 aa, Homo sapiens [sequence omitted]

SEQ ID NO: 41127 - protein, 453 aa, Homo sapiens
MDAEEYQPPIWKSYLYQLQQEAPRPKRIICPREVENRPKYYGREFHGIISREQADELLGGVEGAYILRESQRQPGCYTLALRFGNQTLNYRLFHDGKHFVGEKRFESIHDLVTDGLITLYIETKAAEYISKMTTNPIYEHIGYATLLREKVSRRLSRSKNEPRKTNVTHEEHTAVEKISSLVRRAALTHNDNHFNYEKTHNFKVHTFRGPHWCEYCANFMWGLIAQGVRCSDCGLNVHKQCSKHVPNDCQPDLKRIKKVYCCDLTTLVKAHNTQRPMVVDICIREIEARGLKSEGLYRVSGFTEHIEDVKMAFDRDGEKADISANVYPDINIITGALKLYFRDLPIPVITYDTYSKFIDAAKISNADERLEAVHEVLMLLPPAHYETLRYLMIHLKKVTMNEKDNFMNAENLGIVFGPTLMRPPEDSTLTTLHDMRYQKLIVQILIENEDVLF

SEQ ID NO: 41128 - protein, 383 aa, Homo sapiens
MGVKASQTGFVVLVLLQCCSAYKLVCYYTSWSQYREGDGSCFPDALDRFLCTHIIYSFANISNDHIDTWEWNDVTLYGMLNTLKNRNPNLKTLLSVGGWNFGSQRFSKIASNTQSRRTFIKSVPPFLRTHGFDGLDLAWLYPGRRDKQHFTTLIKEMKAEFIKEAQPGKKQLLLSAALSAGKVTIDSSYDIAKISQHLDFISIMTYDFHGAWRGTTGHHSPLFRGQEDASPDRFSNTDYAVGYMLRLGAPASKLVMGIPTFGRSFTLASSETGVGAPISGPGIPGRFTKEAGTLAYYEICDFLRGATVHRILGQQVPYATKGNQWVGYDDQESVKSKVQYLKDRQLAGAMVWALDLDDFQGSFCGQDLRFPLTNAIKDALAAT

SEQ ID NO: 41129 - protein, 152 aa, Homo sapiens
  VARIANT 1: note = MOD_RES - Any amino acid
XLLLSAALSAGKVTIDSSYDIAKISQHLDFISIMTYDFHGAWRGTTGHHSPLFRGQEDASPDRFSNTICDFLRGATVHRILGQQVPYATKGNQWVGYDDQESVKSKVQYLKDRQLAGAMVWALDLDDFQGSFCGQDLRFPLTNAIKDALAAT

SEQ ID NO: 41130 - protein, 101 aa, Homo sapiens
MVSTPENRQTFITSVIKFLRQYEFDGLDFDWEYPGSRGSPPQDKHLFTVLVQMRKLKYREDLSNLPKITQLVGIITSSAVWPQSPLLLSITLGCPLLLRNA

SEQ ID NO: 41131 - protein, 476 aa, Homo sapiens [sequence omitted]

SEQ ID NO: 41132 - protein, 315 aa, Homo sapiens
MREAFEQEAKQINKPRLMVTAAVAAGISNIQSGYEIPQLSQYLDYIHVMTYDLHGSWEGYTGENSPLYKYPTDTGSNAYLNVDYVMNYWKDNGAPAEKLIVGFPTYGHNFILSNPSNTGIGAPTSGAGPAGPYAKESGIWAYYEICTFLKNGATQGWDAPQEVPYAYQGNVWVGYDNIKSFDIKAQWLKHNKFGGAMVWAIDLDDFTGTFCNQGKFPLISTLKKALGLQSASCTAPAQPIEPITAAPSGSGNGSGSSSSGGSSGGSGFCAVRANGLYPVANNRNAFWHCVNGVTYQQNCQAGLVFDTSCDCCNWA

SEQ ID NO: 41133 - protein, 476 aa, Homo sapiens [sequence omitted]

SEQ ID NO: 41134 - protein, 420 aa, Homo sapiens
ETSSSVHEQVADSGAQAVAFQSGGESSIVWNSQLKTLLAIGGWNFGTAPFTAMVSTPENRQTFITSVIKFLRQYEFDGLDFDWEYPGSRGSPPQDKHLFTVLVQEMREAFEQEAKQINKPRLMVTAAVAAGISNIQSGYEIPQLSQYLDYIHVMTYDLHGSWEGYTGENSPLYKYPTDTGSNAYLNVDYVMNYWKDNGAPAEKLIVGFPTYGHNFILSNPSNTGIGAPTSGAGPAGPYAKESGIWAYYEICTFLKNGATQGWDAPQEVPYAYQGNVWVGYDNIKSFDIKAQWLKHNKFGGAMVWAIDLDDFTGTFCNQGKFPLISTLKKALGLQSASCTAPAQPIEPITAAPSGSGNGSGSSSSGGSSGGSGFCAVRANGLYPVANNRNAFWHCVNGVTYQQNCQAGLVFDTSCDCCNWA

SEQ ID NO: 41135 - protein, 368 aa, Homo sapiens
MVSTPENRQTFITSVIKFLRQYEFDGLDFDWEYPGSRGSPPQDKHLFTVLVQEMREAFEQEAKQINKPRLMVTAAVAAGISNIQSGYEIPQLSQYLDYIHVMTYDLHGSWEGYTGENSPLYKYPTDTGSNAYLNVDYVMNYWKDNGAPAEKLIVGFPTYGHNFILSNPSNTGIGAPTSGAGPAGPYAKESGIWAYYEICTFLKNGATQGWDAPQEVPYAYQGNVWVGYDNIKSFDIKAQWLKHNKFGGAMVWAIDLDDFTGTFCNQGKFPLISTLKKALGLQSASCTAPAQPIEPITAAPSGSGNGSGSSSSGGSSGGSGFCAVRANGLYPVANNRNAFWHCVNGVTYQQNCQAGLVFDTSCDCCNWA

SEQ ID NO: 41136 - protein, 315 aa, Homo sapiens; identical to SEQ ID NO: 41132

SEQ ID NO: 41137 - protein, 315 aa, Homo sapiens; identical to SEQ ID NO: 41132

SEQ ID NO: 41138 - protein, 287 aa, Homo sapiens
MREAFEQEAKQINKPRLMVTAAVAAGISNIQSGYEIPQLSQYLDYIHVMTYDLHGSWEGYTGENSPLYKYPTDTGSNAYLNVDYVMNYWKDNGAPAEKLIVGFPTYGHNFILSNPSNTGIGAPTSGAGPAGPYAKESGIWAYYEICTFLKNGATQGWDAPQEVPYAYQGNVWVGYDNIKSFDIKAQWLKHNKFGGAMVWAIDLDDFTGTFCNQGKFPLISTLKKALGLQSASCTAPAQPIEPITAAPSGSGNGSGSSSSGGSSGGSGFCAVRANGLYPVANNRNAFW

SEQ ID NO: 41139 - protein, 385 aa, Homo sapiens
MSRPQLRRWRLVSSPPSGVPGLALLALLALLALRLAAGTDCPCPEPELCRPIRHHPDFEVFVFDVGQKTWKSYDWSQITTVATFGKYDSELMCYAHSKGARVVLKGDVSLKDIIDPAFRASWIAQKLNLAKTQYMDGINIDIEQEVNCLSPEYDALTALVKETTDSFHREIEGSQVTFDVAWSPKNIDRRCYNYTGIADACDFLFVMSYDEQSQIWSECIAAANAPYNQTLTGYNDYIKMSINPKKLVMGVPWYGYDYTCLNLSEDHVCTIAKVPFRGAPCSDAAGRQVPYKTIMKQINSSISGNLWDKDQRAPYYNYKDPAGHFHQVWYDNPQSISLKATYIQNYRLRGIGMWNANCLDYSGDAVAKQQTEEMWEVLKPKLLQR

SEQ ID NO: 41140 - protein, 988 aa, Homo sapiens
MEQSRSQQRGGEQSWWGSDPQYQYMPFEHCTSYGLPSENGGLQHRLRKDAGPRHNVHPTQIYGHHKEQFSDREQDIGMPKKTGSSSTVDSKDEDHYSKCQDCIHRLGQVVRRKLGEDGIFLVLLGLLMALVSWSMDYVSAKSLQAYKWSYAQMQPSLPLQFLVWVTFPLVLILFSALFCHLISPQAVGSGIPEMKTILRGVVLKEYLTMKAFVAKVVALTAGLGSGIPVGKEGPFVHIASICAAVLSKFMSVFCGVYEQPYYYSDILTVGCAVGVGCCFGTPLGGVLFSIEVTSTYFAVRNYWRGFFAATFSAFVFRVLAVWNKDAVTITALFRTNFRMDFPFDLKELPAFAAIGICCGLLGAVFVYLHRQVMLGVRKHKALSQFLAKHRLLYPGIVTFVIASFTFPPGMGQFMAGELMPREAISTLFDNNTWVKHAGDPESLGQSAVWIHPRVNVVIIIFLFFVMKFWMSIVATTMPIPCGGFMPVFVLGAAFGRLVGEIMAMLFPDGILFDDIIYKILPGGYAVIGAAALTGAVSHTVSTAVICFELTGQIAHILPMMVAVILANMVAQSLQPSLYDSIIQVKKLPYLPDLGWNQLSKYTIFVEDIMVRDVKFVSASYTYGELRTLLQTTTVKTLPLVDSKDSMILLGSVERSELQALLQRHLCPERRLRAAQEMARKLSELPYDGKARLAGEGLPGAPPGRPESFAFVDEDEDEDLSGKSELPPSLALHPSTTAPLSPEEPNGPLPGHKQQPEAPEPAGQRPSIFQSLLHCLLGRARPTKKKTTQDSTDLVDNMSPEEIEAWEQEQLSQPVCFDSCCIDQSPFQLVEQTTLHKTHTLFSLLGLHLAYVTSMGKLRGVLALEELQKAIEGHTKSGVQLRPPLASFRNTTSTRKSTGAPPSSAENWNLPEDRPGATGTGDVIAASPETPVPSPSPEPPLSLAPGKVEGELEELELVESPGLEEELADILQGPSLRSTDEEDEDELIL

SEQ ID NO: 41141 - protein, 898 aa, Homo sapiens
MAAAAAEEGMEPRALQYEQTLMYGRYTQDLGAFAKEEAARIRLGGPEPWKGPPSSRAAPELLEYGRSRCARCRVCSVRCHKFLVSRVGEDWIFLVLLGLLMALVSWVMDYAIAACLQAQQWMSRGLNTSILLQYLAWVTYPVVLITFSAGFTQILAPQAVGSGIPEMKTILRGVVLKEYLTLKTFIAKVIGLTCALGSGMPLGKEGPFVHIASMCAALLSKFLSLFGGIYENESRNTEMLAAACAVGVGCCFAAPIGGVLFSIEVTSTFFAVRNYWRGFFAATFSAFIFRVLAVWNRDEETITALFKTRFRLDFPFDLQELPAFAVIGIASGFGGALFVYLNRKIVQVMRKQKTINRFLMRKRLLFPALVTLLISTLTFPPGFGQFMAGQLSQKETLVTLFDNRTWVRQGLVEELEPPSTSQAWNPPRANVFLTLVIFILMKFWMSALATTIPVPCGAFMPVFVIGAAFGRLVGESMAAWFPDGIHTDSSTYRIVPGGYAVVGAAALAGAVTHTVSTAVIVFELTGQIAHILPVMIAVILANAVAQSLQPSLYDSIIRIKKLPYLPELGWGRHQQYRVRVEDIMVRDVPHVALSCTFRDLRLALHRTKGRMLALVESPESMILLGSIERSQVVALLGAQLSPARRRQHMQERRATQTSPLSDQEGPPTPEASVCFQVNTEDSAFPAARGETHKPLKPALKRGPSVTRNLGESPTGSAESAGIALRSLFCGSPPPEAASEKLESCEKRKLKRVRISLASDADLEGEMSPEEILEWEEQQLDEPVNFSDCKIDPAPFQLVERTSLHKTHTIFSLLGVDHAYVTSIGRLIGIVTLKELRKAIEGSVTAQGVKVRPPLASFRDSATSSSDTETTEVHALWGPHSRHGLPREGSPSDSDDKCQ

SEQ ID NO: 41142 - protein, 126 aa, Homo sapiens
MRKRLLFPALVTLLISTLTFPPGFGQFMAGQLSQKETLVTLFDNRTWVRQGLVEELEPPSTSQAWNPPRANVFLTLVIFILMKHLGVWWVKAWLPGSQMEFIRTAAPTGLCLGATLWSGQLRWQER

SEQ ID NO: 41143 - protein, 866 aa, Homo sapiens
MESEQLFHRGYYRNSYNSITSASSDEELLDGAGVIMDFQTSEDDNLLDGDTAVGTHYTMTNGGSINSSTHLLDLLDEPIPGVGTYDDFHTIDWVREKCKDRERHRRINSKKKESAWEMTKSLYDAWSGWLVVTLTGLASGALAGLIDIAADWMTDLKEGICLSALWYNHEQCCWGSNETTFEERDKCPQWKTWAELIIGQAEGPGSYIMNYIMYIFWALSFAFLAVSLVKVFAPYACGSGIPEIKTILSGFIIRGYLGKWTLMIKTITLVLAVASGLSLGKEGPLVHVACCCGNIFSYLFPKYSTNEAKKREVLSAASAAGVSVAFGAPIGGVLFSLEEVSYYFPLKTLWRSFFAALVAAFVLRSINPFGNSRLVLFYVEYHTPWYLFELFPFILLGVFGGLWGAFFIRANIAWCRRRKSTKFGKYPVLEVIIVAAITAVIAFPNPYTRLNTSELIKELFTDCGPLESSSLCDYRNDMNASKIVDDIPDRPAGIGVYSAIWQLCLALIFKIIMTVFTFGIKVPSGLFIPSMAIGAIAGRIVGIAVEQLAYYHHDWFIFKEWCEVGADCITPGLYAMVGAAACLGGVTRMTVSLVVIVFELTGGLEYIVPLMAAVMTSKWVGDAFGREGIYEAHIRLNGYPFLDAKEEFTHTTLAADVMRPRRNDPPLAVLTQDNMTVDDIENMINETSYNGFPVIMSKESQRLVGFALRRDLTIAIESARKKQEGIVGSSRVCFAQHTPSLPAESPRPLKLRSILDMSPFTVTDHTPMEIVVDIFRKLGLRQCLVTHNGIVLGIITKKNILEHLEQLKQHVEPLAPPWHYNKKRYPPAYGPDGKPRPRFNNVQLNLTDEEREETEEEVYLLNSTTL

SEQ ID NO: 41144 - protein, 791 aa, Homo sapiens
MESEQLFHRGYYRNSYNSITSASSDEELLDGAGVIMDFQTSEDDNLLDGDTAVGTHYTMTNGGSINSSTHLLDLLDEPIPGVGTYDDFHTIDWVREKCKDRERHRRINSKKKESAWEMTKSLYDAWSGWLVVTLTGLASGALAGLIDIAADWMTDLKEGICLSALWYNHEQCCWGSNETTFEERDKCPQWKTWAELIIGQAEGPGSYIMNYIMYIFWALSFAFLAVSLVKVFAPYACGSGIPEIKTILSGFIIRGYLGKWTLMIKTITLVLAVASGLSLGKEGPLVHVACCCGNIFSYLFPKYSTNEAKKREVSYYFPLKTLWRSFFAALVAAFVLRSINPFGNSRLVLFYVEYHTPWYLFELFPFILLGVFGGLWGAFFIRANIAWCRRRKSTKFGKYPVLEVIIVAAITAVIAFPNPYTRLNTSELIKELFTDCGPLESSSLCDYRNDMNASKIVDDIPDRPAGIGVYSAIWQLCLALIFKIIMTVFTFGIKVPSGLFIPSMAIGAIAGRIVGIAVEQLAYYHHDWFIFKEWCEVGADCITPGLYAMVGAAACLGGVTRMTVSLVVIVFELTGGLEYIVPLMAAVMTSKWVGDAFGREGIYEAHIRLNGYPFLDAKEEFTHTTLAADVMRPRRNDPPLAVLTQDNMTVDDIENMINETSYNGFPVIMSKESQRLVGFALRRDLTIAIESARKKQEGIVGSSRVCFAQHTPSLPAESPRPLKLRSILDMSPFTVTDHTPMEIVVDIFRKLGLRQCLVTHNGRLLGIITKKDILRHMAQTANQDPASIMFN

SEQ ID NO: 41145 - protein, 801 aa, Homo sapiens
MVTLQLGESHYVVQAGLQLLGSSNPPALASQVAEITGTHYTMTNGGSINSSTHLLDLLDEPIPGVGTYDDFHTIDWVREKCKDRERHRRINSKKKESAWEMTKSLYDAWSGWLVVTLTGLASGALAGLIDIAADWMTDLKEGICLSALWYNHEQCCWGSNETTFEERDKCPQWKTWAELIIGQAEGPGSYIMNYIMYIFWALSFAFLAVSLVKVFAPYACGSGIPEIKTILSGFIIRGYLGKWTLMIKTITLVLAVASGLSLGKEGPLVHVACCCGNIFSYLFPKYSTNEAKKREVLSAASAAGVSVAFGAPIGGVLFSLEEVSYYFPLKTLWRSFFAALVAAFVLRSINPFGNSRLVLFYVEYHTPWYLFELFPFILLGVFGGLWGAFFIRANIAWCRRRKSTKFGKYPVLEVIIVAAITAVIAFPNPYTRLNTSELIKELFTDCGPLESSSLCDYRNDMNASKIVDDIPDRPAGIGVYSAIWQLCLALIFKIIMTVFTFGIKVPSGLFIPSMAIGAIAGRIVGIAVEQLAYYHHDWFIFKEWCEVGADCITPGLYAMVGAAACLGGVTRMTVSLVVIVFELTGGLEYIVPLMAAVMTSKWVGDAFGREGIYEAHIRLNGYPFLDAKEEFTHTTLAADVMRPRRNDPPLAVLTQDNMTVDDIENMINETSYNGFPVIMSKESQRLVGFALRRDLTIAIESARKKQEGIVGSSRVCFAQHTPSLPAESPRPLKLRSILDMSPFTVTDHTPMEIVVDIFRKLGLRQCLVTHNGRLLGIITKKDILRHMAQTANQDPASIMFN

SEQ ID NO: 41146 - protein, 173 aa, Homo sapiens
MESEQLFHRGYYRNSYNSITSASSDEELLDGAGVIMDFQTSEDDNLLDGDTAVGTHYTMTNGGSINSSTHLLDLLDEPIPGVGTYDDFHTIDWVREKCKDRERHRRINSKKKESAWEMTKSLYDAWSGWLVVTLTGLASGALAGLIDIAADWMTDLKEGICLSALWYNHEQCC

SEQ ID NO: 41147 - protein, 139 aa, Homo sapiens
MESEQLFHRGYYRNSYNSITSASSDEELLDGAGVIMDFQTSEDDNLLDGDTAVGTHYTMTNGGSINSSTHLLDLLDEPIPGVGTYDDFHTIDWVREKCKDRERHRRINSKKKESAWEMTKSLYDAWSGWLVVTLTGLAS

SEQ ID NO: 41148 - protein, 818 aa, Homo sapiens
MESEQLFHRGYYRNSYNSITSASSDEELLDGAGVIMDFQTSEDDNLLDGDTAVGTHYTMTNGGSINSSTHLLDLLDEPIPGVGTYDDFHTIDWVREKCKDRERHRRINSKKKESAWEMTKSLYDAWSGWLVVTLTGLASGALAGLIDIAADWMTDLKEGICLSALWYNHEQCCWGSNETTFEERDKCPQWKTWAELIIGQAEGPGSYIMNYIMYIFWALSFAFLAVSLVKVFAPYACGSGIPEIKTILSGFIIRGYLGKWTLMIKTITLVLAVASGLSLGKEGPLVHVACCCGNIFSYLFPKYSTNEAKKREVLSAASAAGVSVAFGAPIGGVLFSLEEVSYYFPLKTLWRSFFAALVAAFVLRSINPFGNSRLVLFYVEYHTPWYLFELFPFILLGVFGGLWGAFFIRANIAWCRRRKSTKFGKYPVLEVIIVAAITAVIAFPNPYTRLNTSELIKELFTDCGPLESSSLCDYRNDMNASKIVDDIPDRPAGIGVYSAIWQLCLALIFKIIMTVFTFGIKVPSGLFIPSMAIGAIAGRIVGIAVEQLAYYHHDWFIFKEWCEVGADCITPGLYAMVGAAACLGGVTRMTVSLVVIVFELTGGLEYIVPLMAAVMTSKWVGDAFGREGIYEAHIRLNGYPFLDAKEEFTHTTLAADVMRPRRNDPPLAVLTQDNMTVDDIENMINETSYNGFPVIMSKESQRLVGFALRRDLTIAIESARKKQEGIVGSSRVCFAQHTPSLPAESPRPLKLRSILDMSPFTVTDHTPMEIVVDIFRKLGLRQCLVTHNGRLLGIITKKDILRHMAQTANQDPASIMFN

SEQ ID NO: 41149 - protein, 191 aa, Homo sapiens
MESEQLFHRGYYRNSYNSITSASSDEELLDGAGVIMDFQTSEDDNLLDGDTAVGTHYTMTNGGSINSSTHLLDLLDEPIPGVGTYDDFHTIDWVREKCKDRERHRRINSKKKESAWEMTKSLYDAWSGWLVVTLTGLASGALAGLIDIAADWMTDLKEGICLSALWYNHEQCCWGSNETTFEKKKKKKKKA

SEQ ID NO: 41150 - protein, 729 aa, Homo sapiens
MVNAGAMSGSGNLMDFLDEPFPDVGTYEDFHTIDWLREKSRDTDRHRKITSKSKESIWEFIKSLLDAWSGWVVMLLIGLLAGTLAGVIDLAVDWMTDLKEGVCLSAFWYSHEQCCWTSNETTFEDRDKCPLWQKWSELLVNQSEGASAYILNYLMYILWALLFAFLAVSLVRVFAPYACGSGIPEIKTILSGFIIRGYLGKWTLLIKTVTLVLVVSSGLSLGKEGPLVHVACCCGNFFSSLFSKYSKNEGKRREVLSAAAAAGVSVAFGAPIGGVLFSLEEVSYYFPLKTLWRSFFAALVAAFTLRSINPFGNSRLVLFYVEYHTPWRRKTTRLGKYPVLEVIVVTAITAIIAYPNPYTRQSTSELISELFNDCGALESSQLCDYINDPNMTRPVDDIPDRPAGVGVYTAMWQLALALIFKIVVTIFTFGMKIPSGLFIPSMAVGAIAGRMVGIGVEQLAYHHHDWIIFRNWCRPGADCVTPGLYAMVGAAACLGGVTRMTVSLVVIMFELTGGLEYIVPLMAAAVTSKWVADAFGKEGIYEAHIHLNGYPFLDVKDEFTHRTLATDVMRPRRGEPPLSVLTQDSMTVEDVETLIKETDYNGFPVVVSRDSERLIGFAQRRELILAIKNARQRQEGIVSNSIMYFTEEPPELPANSPHPLKLRRILNLSPFTVTDHTPMETVVDIFRKLGLRQCLVTRSGRLLGIITKKDVLRHMAQMANQDPESIMFN

SEQ ID NO: 41151 - protein, 760 aa, Homo sapiens
MVNAGAMSGSGNLMDFLDEPFPDVGTYEDFHTIDWLREKSRDTDRHRKITSKSKESIWEFIKSLLDAWSGWVVMLLIGLLAGTLAGVIDLAVDWMTDLKEGVCLSAFWYSHEQCCWTSNETTFEDRDKCPLWQKWSELLVNQSEGASAYILNYLMYILWALLFAFLAVSLVRVFAPYACGSGIPEIKTILSGFIIRGYLGKWTLLIKTVTLVLVVSSGLSLGKEGPLVHVACCCGNFFSSLFSKYSKNEGKRREVLSAAAAAGVSVAFGAPIGGVLFSLEEVSYYFPLKTLWRSFFAALVAAFTLRSINPFGNSRLVLFYVEYHTPWYMAELFPFILLGVFGGLWGTLFIRCNIAWCRRRKTTRLGKYPVLEVIVVTAITAIIAYPNPYTRQSTSELISELFNDCGALESSQLCDYINDPNMTRPVDDIPDRPAGVGVYTAMWQLALALIFKIVVTIFTFGMKIPSGLFIPSMAVGAIAGRMVGIGVEQLAYHHHDWIIFRNWCRPGADCVTPGLYAMVGAAACLGGVTRMTVSLVVIMFELTGGLEYIVPLMAAAVTSKWVADAFGKEGIYEAHIHLNGYPFLDVKDEFTHRTLATDVMRPRRGEPPLSVLTQDSMTVEDVETLIKETDYNGFPVVVSRDSERLIGFAQRRELILAIKNARQRQEGIVSNSIMYFTEEPPELPANSPHPLKLRRILNLSPFTVTDHTPMETVVDIFRKLGLRQCLVTRSGRLLGIITKKDVLRHMAQMANQDPESIMFN

SEQ ID NO: 41152 - protein, 666 aa, Homo sapiens
MTDLKEGVCLSAFWYSHEQCCWTSNETTFEDRDKCPLWQKWSELLVNQSEGASAYILNYLMYILWALLFAFLAVSLVRVFAPYACGSGIPEIKTILSGFIIRGYLGKWTLLIKTVTLVLVVSSGLSLGKEGPLVHVACCCGNFFSSLFSKYSKNEGKRREVLSAAAAAGVSVAFGAPIGGVLFSLEEVSYYFPLKTLWRSFFAALVAAFTLRSINPFGNSRLVLFYVEYHTPWYMAELFPFILLGVFGGLWGTLFIRCNIAWCRRRKTTRLGKYPVLEVIVVTAITAIIAYPNPYTRQSTSELISELFNDCGALESSQLCDYINDPNMTRPVDDIPDRPAGVGVYTAMWQLALALIFKIVVTIFTFGMKIPSGLFIPSMAVGAIAGRMVGIGVEQLAYHHHDWIIFRNWCRPGADCVTPGLYAMVGAAACLGGVTRMTVSLVVIMFELTGGLEYIVPLMAAAVTSKWVADAFGKEGIYEAHIHLNGYPFLDVKDEFTHRTLATDVMRPRRGEPPLSVLTQDSMTVEDVETLIKETDYNGFPVVVSRDSERLIGFAQRRELILAIKNARQRQEGIVSNSIMYFTEEPPELPANSPHPLKLRRILNLSPFTVTDHTPMETVVDIFRKLGLRQCLVTRSGRLLGIITKKDVLRHMAQMANQDPESIMFN

SEQ ID NO: 41153 - protein, 152 aa, Homo sapiens
MVNAGAMSGSGNLMDFLDEPFPDVGTYEDFHTIDWLREKSRDTDRHRKITSKSKESIWEFIKSLLDAWSGWVVMLLIGLLAGTLAGVIDLAVDWMTDLKEGVCLSAFWYSHEQCCWTSNETTFEDRDKCPLWQKWSELLVNQSEVLSAAAAA

SEQ ID NO: 41154 - protein, 746 aa, Homo sapiens
MDFLEEPIPGVGTYDDFNTIDWVREKSRDRDRHREITNKSKESTWALIHSVSDAFSGWLLMLLIGLLSGSLAGLIDISAHWMTDLKEGICTGGFWFNHEHCCWNSEHVTFEERDKCPEWNSWSQLIISTDEGAFAYIVNYFMYVLWALLFAFLAVSLVKVFAPYACGSGIPEIKTILSGFIIRGYLGKWTLVIKTITLVLAVSSGLSLGKEGPLVHVACCCGNILCHCFNKYRKNEAKRREVLSAAAAAGVSVAFGAPIGGVLFSLEEVSYYFPLKTLWRSFFAALVAAFTLRSINPFGNSRLVLFYVEFHTPWHLFELVPFILLGIFGGLWGALFIRTNIAWCRKRKTTQLGKYPVIEVLVVTAITAILAFPNEYTRMSTSELISELFNDCGLLDSSKLCDYENRFNTSKGGELPDRPAGVGVYSAMWQLALTLILKIVITIFTFGMKIPSGLFIPSMAVGAIAGRLLGVGMEQLAYYHQEWTVFNSWCSQGADCITPGLYAMVGAAACLGGVTRMTVSLVVIMFELTGGLEYIVPLMAAAMTSKWVADALGREGIYDAHIRLNGYPFLEAKEEFAHKTLAMDVMKPRRNDPLLTVLTQDSMTVEDVETIISETTYSGFPVVVSRESQRLVGFVLRRDLIISIENARKKQDGVVSTSIIYFTEHSPPLPPYTPPTLKLRNILDLSPFTVTDLTPMEIVVDIFRKLGLRQCLVTHNGRLLGIITKKDVLKHIAQMANQDPDSILFN

SEQ ID NO: 41155 - protein, 816 aa, Homo sapiens
MAMWQGAMDNRGFQQGSFSSFQNSSSDEDLMDIPATAMDFSMRDDVPPLDREVGEDKSYNGGGIGSSNRIMDFLEEPIPGVGTYDDFNTIDWVREKSRDRDRHREITNKSKESTWALIHSVSDAFSGWLLMLLIGLLSGSLAGLIDISAHWMTDLKEGICTGGFWFNHEHCCWNSEHVTFEERDKCPEWNSWSQLIISTDEGAFAYIVNYFMYVLWALLFAFLAVSLVKVFAPYACGSGIPEIKTILSGFIIRGYLGKWTLVIKTITLVLAVSSGLSLGKEGPLVHVACCCGNILCHCFNKYRKNEAKRREVLSAAAAAGVSVAFGAPIGGVLFSLEEVSYYFPLKTLWRSFFAALVAAFTLRSINPFGNSRLVLFYVEFHTPWHLFELVPFILLGIFGGLWGALFIRTNIAWCRKRKTTQLGKYPVIEVLVVTAITAILAFPNEYTRMSTSELISELFNDCGLLDSSKLCDYENRFNTSKGGELPDRPAGVGVYSAMWQLALTLILKIVITIFTFGMKIPSGLFIPSMAVGAIAGRLLGVGMEQLAYYHQEWTVFNSWCSQGADCITPGLYAMVGAAACLGGVTRMTVSLVVIMFELTGGLEYIVPLMAAAMTSKWVADALGREGIYDAHIRLNGYPFLEAKEEFAHKTLAMDVMKPRRNDPLLTVLTQDSMTVEDVETIISETTYSGFPVVVSRESQRLVGFVLRRDLIISIENARKKQDGVVSTSIIYFTEHSPPLPPYTPPTLKLRNILDLSPFTVTDLTPMEIVVDIFRKLGLRQCLVTHNGRLLGIITKKDVLKHIAQMANQDPDSILFN

SEQ ID NO: 41156 - protein, 816 aa, Homo sapiens; identical to SEQ ID NO: 41155

SEQ ID NO: 41157 - protein, 746 aa, Homo sapiens; identical to SEQ ID NO: 41154

SEQ ID NO: 41158 - protein, 648 aa, Homo sapiens
MNIVAGTLSMSPLKRDKCPEWNSWSQLIISTDEGAFAYIVNYFMYVLWALLFAFLAVSLVKVFAPYACGSGIPEIKTILSGFIIRGYLGKWTLVIKTITLVLAVSSGLSLGKEGPLVHVACCCGNILCHCFNKYRKNEAKRREVLSAAAAAGVSVAFGAPIGGVLFSLEEVSYYFPLKTLWRSFFAALVAAFTLRSINPFGNSRLVLFYVEFHTPWHLFELVPFILLGIFGGLWGALFIRTNIAWCRKRKTTQLGKYPVIEVLVVTAITAILAFPNEYTRMSTSELISELFNDCGLLDSSKLCDYENRFNTSKGGELPDRPAGVGVYSAMWQLALTLILKIVITIFTFGMKIPSGLFIPSMAVGAIAGRLLGVGMEQLAYYHQEWTVFNSWCSQGADCITPGLYAMVGAAACLGGVTRMTVSLVVIMFELTGGLEYIVPLMAAAMTSKWVADALGREGIYDAHIRLNGYPFLEAKEEFAHKTLAMDVMKPRRNDPLLTVLTQDSMTVEDVETIISETTYSGFPVVVSRESQRLVGFVLRRDLIISIENARKKQDGVVSTSIIYFTEHSPPLPPYTPPTLKLRNILDLSPFTVTDLTPMEIVVDIFRKLGLRQCLVTHNGRLLGIITKKDVLKHIAQMANQDPDSILFN

SEQ ID NO: 41159 - protein, 353 aa, Homo sapiens
MAGCRGSLCCCCRWCCCCGERETRTPEELTILGETQEEEDEILPRKDYESLDYDRCINDPYLEVLETMDNKKGRRYEAVKWMVVFAIGVCTGLVGLFVDFFVRLFTQLKFGVVQTSVEECSQKGCLALSLLELLGFNLTFVFLASLLVLIEPVAAGSGIPEVKCYLNGVKVPGIVRLRTLLCKVLGVLFSVAGGLFVEKEGPMIHSGSVVGAGLPQFQSISLRKIQFNFPYFRSDRDKRDFVSAGAAAGVAAAFGAPIGGTLFSLEEGSSFWNQGLTWKVLFCSMSATFTLNFFRSGIQFGSWGSFQLPGLLNFGEFKSLREPPCVSGNHRGGVCGLDGVRRMPTDVLFESNR

SEQ ID NO: 41160 - protein, 869 aa, Homo sapiens
MAGCRGSLCCCCRWCCCCGERETRTPEELTILGETQEEEDEILPRKDYESLDYDRCINDPYLEVLETMDNKKGRRYEAVKWMVVFAIGVCTGLVGLFVDFFVRLFTQLKFGVVQTSVEECSQKGCLALSLLELLGFNLTFVFLASLLVLIEPVAAGSGIPEVKCYLNGVKVPGIVRLRTLLCKVLGVLFSVAGGLFVEKEGPMIHSGSVVGAGLPQFQSISLRKIQFNFPYFRSDRDKRDFVSAGAAAGVAAAFGAPIGGTLFSLEEGSSFWNQGLTWKVLFCSMSATFTLNFFRSGIQFGSWGSFQLPGLLNFGEFKCSDSDKKCHLWTAMDLGFFVVMGVIGGLLGATFNCLNKRLAKYRMRNVHPKPKLVRVLESLLVSLVTTVVVFVASMVLGECRQMSSSSQIGNDSFQLQVTEDVNSSIKTFFCPNDTYNDMATLFFNPQESAILQLFHQDGTFSPVTLALFFVLYFLLACWTYGISVPSGLFVPSLLCGAAFGRLVANVLKSYIGLGHIYSGTFALIGAAAFLGGVVRMTISLTVILIESTNEITYGLPIMVTLMVAKWTGDFFNKGIYDIHVGLRGVPLLEWETEVEMDKLRASDIMEPNLTYVYPHTRIQSLVSILRTTVHHAFPVVTENRGNEKEFMKGNQLISNNIKFKKSSILTRAGEQRKRSQSMKSYPSSELRNMCDEHIASEEPAEKEDLLQQMLERRYTPYPNLYPDQSPSEDWTMEERFRPLTFHGLILRSQLVTLLVRGVCYSESQSSASQPRLSYAEMAEDYPRYPDIHDLDLTLLNPRMIVDVTPYMNPSPFTVSPNTHVSQVFNLFRTMGLRHLPVVNAVGEIVGIITRHNLTYEFLQARLRQHYQTI

SEQ ID NO: 41161 - protein, 847 aa, Homo sapiens
MAGCRGSLCCCCRWCCCCGERETRTPEELTILGETQEEEDEILPRKDYEKGRRYEAVKWMVVFAIGVCTGLVGLFVDFFVRLFTQLKFGVVQTSVEECSQKGCLALSLLELLGFNLTFVFLASLLVLIEPVAAGSGIPEVKCYLNGVKVPGIVRLRTLLCKVLGVLFSVAGGLFVEKEGPMIHSGSVVGAGLPQFQSISLRKIQFNFPYFRSDRDKRDFVSAGAAAGVAAAFGAPIGGTLFSLEEGSSFWNQGLTWKVLFCSMSATFTLNFFRSGIQFGSWGSFQLPGLLNFGEFKCSDSDKKCHLWTAMDLGFFVVMGVIGGLLGATFNCLNKRLAKYRMRNVHPKPKLVRVLESLLVSLVTTVVVFVASMVLGECRQMSSSSQIGNDSFQLQVTEDVNSSIKTFFCPNDTYNDMATLFFNPQESAILQLFHQDGTFSPVTLALFFVLYFLLACWTYGISVPSGLFVPSLLCGAAFGRLVANVLKSYIGLGHIYSGTFALIGAAAFLGGVVRMTISLTVILIESTNEITYGLPIMVTLMVAKWTGDFFNKGIYDIHVGLRGVPLLEWETEVEMDKLRASDIMEPNLTYVYPHTRIQSLVSILRTTVHHAFPVVTENRGNEKEFMKGNQLISNNIKFKKSSILTRAGEQRKRSQSMKSYPSSELRNMCDEHIASEEPAEKEDLLQQMLERRYTPYPNLYPDQSPSEDWTMEERFRPLTFHGLILRSQLVTLLVRGVCYSESQSSASQPRLSYAEMAEDYPRYPDIHDLDLTLLNPRMIVDVTPYMNPSPFTVSPNTHVSQVFNLFRTMGLRHLPVVNAVGEIVGIITRHNLTYEFLQARLRQHYQTI

SEQ ID NO: 41162 - protein, 320 aa, Homo sapiens
MAGCRGSLCCCCRWCCCCGERETRTPEELTILGETQEEEDEILPRKDYESLDYDRCINDPYLEVLETMDNKKGRRYEAVKWMVVFAIGVCTGLVGLFVDFFVRLFTQLKFGVVQTSVEECSQKGCLALSLLELLGFNLTFVFLASLLVLIEPVAAGSGIPEVKCYLNGVKVPGIVRLRTLLCKVLGVLFSVAGGLFVEKEGPMIHSGSVVGAGLPQFQSISLRKIQFNFPYFRSDRYGKRQERLCISRSGCWSCCSFRGANRGYLVQSRGGFVLLEPRAHVESALLFHVCHLHPQLLPFWDSVWKLGFLPAPWIAELWRV

SEQ ID NO: 41163 - protein, 308 aa, Homo sapiens
MAGCRGSLCCCCRWCCCCGERETRTPEELTILGETQEEEDEILPRKDYESLDYDRCINDPYLEVLETMDNKKGRRYEAVKWMVVFAIGVCTGLVGLFVDFFVRLFTQLKFGVVQTSVEECSQKGCLALSLLELLGFNLTFVFLASLLVLIEPVAAGSGIPEVKCYLNGVKVPGIVRLRTLLCKVLGVLFSVAGGLFVEKEGPMIHSGSVVGAGLPQFQSISLRKIQFNFPYFRSDRSGCWSCCSFRGANRGYLVQSRGGFVLLEPRAHVESALLFHVCHLHPQLLPFWDSVWKLGFLPAPWIAELWRV

SEQ ID NO: 41164 - protein, 353 aa, Homo sapiens; identical to SEQ ID NO: 41159

SEQ ID NO: 41165 - protein, 953 aa, Homo sapiens
MAGCRGSLCCCCRWCCCCGERETRTPEELTILGETQEEEDEILPRKDYESLDYDRCINDPYLEVLETMDNKKGRRYEAVKWMVVFAIGVCTGLVGLFVDFFVRLFTQLKFGVVQTSVEECSQKGCLALSLLELLGFNLTFVFLASLLVLIEPVAAGSGIPEVKCYLNGVKVPGIVRLRTLLCKVLGVLFSVAGGLFVEKEGPMIHSGSVVGAGLPQFQSISLRKIQFNFPYFRSDRDKRDFVSAGAAAGVAAAFGAPIGGTLFSLEEGSSFWNQGLTWKVLFCSMSATFTLNFFRSGIQFGSWGSFQLPGLLNFGEFKCSDSDKKCHLWTAMDLGFFVVMGVIGGLLGATFNCLNKRLAKYRMRNVHPKPKLVRVLESLLVSLVTTVVVFVASMVLGECRQMSSSSQIGNDSFQLQVTEDVNSSIKTFFCPNDTYNDMATLFFNPQESAILQLFHQDGTFSPVTLALFFVLYFLLACWTYGISVPSGLFVPSLLCGAAFGRLVANVLKSYIGLGHIYSGTFALIGAAAFLGGVVRMTISLTVILIESTNEITYGLPIMVTLMVAKWTGDFFNKGIYDIHVGLRGVPLLEWETEVEMDKLRASDIMEPNLTYVYPHTRIQSLVSILRTTVHHAFPVVTENRGNEKEFMKGNQLISNNIKFKKSSILTRAGEQRKRSQSMKSYPSSELRNMCDEHIASEEPAEKEDLLQQMLERRYTPYPNLYPDQSPSEDWTMEERFRPLTFHGLILRSQLVTLLVRGVCYSESQSSASQPRLSYAEMAEDYPRYPDIHDLDLTLLNPRMIVDVTPYMNPSPFTVSPNTHVSQVFNLFRTMGLRHLPVVNAVGEVSEAPALPPPLREDPLARCCLCTQASHQKRRHPTRRGECGPTLALNPARLPCTRDPFPCLPADGTSVPLAVLSSQSRASTRLCLPPEMLLFTPYHWCSLVLHLRRDLRIR

SEQ ID NO: 41166 - protein, 122 aa, Homo sapiens
MAGCRGSLCCCCRWCCCCGERETRTPEELTILGETQEEEDEILPRKDYESLDYDRCINDPYLEVLETMDNKKGRRYEAVKWMVVFAIGVCTGLVGLFVDFFVRLFTQLKFGVVQTYKFQMKM

SEQ ID NO: 41167 - protein, 758 aa, Homo sapiens
SPRSALFRVGHMSSVELDDELLDPDMDPPHPFPKEIPHNEKLLSLKYESLDYDNSENQLFLEEERRINHTAFRTVEIKRWVICALIGILTGLVACFIDIVVENLAGLKYRVIKGNIDKFTEKGGLSFSLLLWATLNAAFVLVGSVIVAFIEPVAAGSGIPQIKCFLNGVKIPHVVRLKTLVIKVSGVILSVVGGLAVGKEGPMIHSGSVIAAGISQGRSTSLKRDFKIFEYFRRDTEKRDFVSAGAAAGVSAAFGAPVGGVLFSLEEGASFWNQFLTWRIFFASMISTFTLNFVLSIYHGNMWDLSSPGLINFGRFDSEKMAYTIHEIPVFIAMGVVGGVLGAVFNALNYWLTMFRIRYIHRPCLQVIEAVLVAAVTATVAFVLIYSSRDCQPLQGGSMSYPLQLFCADGEYNSMAAAFFNTPEKSVVSLFHDPPGSYNPLTLGLFTLVYFFLACWTYGLTVSAGVFIPSLLIGAAWGRLFGISLSYLTGAAIWADPGKYALMGAAAQLGGIVRMTLSLTVIMMEATSNVTYGFPIMLVLMTAKIVGDVFIEGLYDMHIQLQSVPFLHWEAPVTSHSLTAREVMSTPVTCLRRREKVGVIVDVLSDTASNHNGFPVVEHADDTQPARLQGLILRSQLIVLLKHKVFVERSNLGLVQRRLRLKDFRDAYPRFPPIQSIHVSQDERECTMDLSEFMNPSPYTVPQEASLPRVFKLFRALGLRHLVVVDNRNQVVGLVTRKDLARYRLGKRGLEELSLAQT

SEQ ID NO: 41168 - protein, 805 aa, Homo sapiens
MANVSKKVSWSGRDRDDEEAAPLLRRTARPGGGTPLLNGAGPGAARQSPRSALFRVGHMSSVELDDELLDPDMDPPHPFPKEIPHNEKLLSLKYESLDYDNSENQLFLEEERRINHTAFRTVEIKRWVICALIGILTGLVACFIDIVVENLAGLKYRVIKGNIDKFTEKGGLSFSLLLWATLNAAFVLVGSVIVAFIEPVAAGSGIPQIKCFLNGVKIPHVVRLKTLVIKVSGVILSVVGGLAVGKEGPMIHSGSVIAAGISQGRSTSLKRDFKIFEYFRRDTEKRDFVSAGAAAGVSAAFGAPVGGVLFSLEEGASFWNQFLTWRIFFASMISTFTLNFVLSIYHGNMWDLSSPGLINFGRFDSEKMAYTIHEIPVFIAMGVVGGVLGAVFNALNYWLTMFRIRYIHRPCLQVIEAVLVAAVTATVAFVLIYSSRDCQPLQGGSMSYPLQLFCADGEYNSMAAAFFNTPEKSVVSLFHDPPGSYNPLTLGLFTLVYFFLACWTYGLTVSAGVFIPSLLIGAAWGRLFGISLSYLTGAAIWADPGKYALMGAAAQLGGIVRMTLSLTVIMMEATSNVTYGFPIMLVLMTAKIVGDVFIEGLYDMHIQLQSVPFLHWEAPVTSHSLTAREVMSTPVTCLRRREKVGVIVDVLSDTASNHNGFPVVEHADDTQPARLQGLILRSQLIVLLKHKVFVERSNLGLVQRRLRLKDFRDAYPRFPPIQSIHVSQDERECTMDLSEFMNPSPYTVPQEASLPRVFKLFRALGLRHLVVVDNRNQVVGLVTRKDLARYRLGKRGLEELSLAQT

SEQ ID NO: 41169 - protein, 747 aa, Homo sapiens
MSSVELDDELLDPDMDPPHPFPKEIPHNEKLLSLKYESLDYDNSENQLFLEEERRINHTAFRTVEIKRWVICALIGILTGLVACFIDIVVENLAGLKYRVIKGNIDKFTEKGGLSFSLLLWATLNAAFVLVGSVIVAFIEPVAAGSGIPQIKCFLNGVKIPHVVRLKTLVIKVSGVILSVVGGLAVGKEGPMIHSGSVIAAGISQGRSTSLKRDFKIFEYFRRDTEKRDFVSAGAAAGVSAAFGAPVGGVLFSLEEGASFWNQFLTWRIFFASMISTFTLNFVLSIYHGNMWDLSSPGLINFGRFDSEKMAYTIHEIPVFIAMGVVGGVLGAVFNALNYWLTMFRIRYIHRPCLQVIEAVLVAAVTATVAFVLIYSSRDCQPLQGGSMSYPLQLFCADGEYNSMAAAFFNTPEKSVVSLFHDPPGSYNPLTLGLFTLVYFFLACWTYGLTVSAGVFIPSLLIGAAWGRLFGISLSYLTGAAIWADPGKYALMGAAAQLGGIVRMTLSLTVIMMEATSNVTYGFPIMLVLMTAKIVGDVFIEGLYDMHIQLQSVPFLHWEAPVTSHSLTAREVMSTPVTCLRRREKVGVIVDVLSDTASNHNGFPVVEHADDTQPARLQGLILRSQLIVLLKHKVFVERSNLGLVQRRLRLKDFRDAYPRFPPIQSIHVSQDERECTMDLSEFMNPSPYTVPQEASLPRVFKLFRALGLRHLVVVDNRNQVVGLVTRKDLARYRLGKRGLEELSLAQT

SEQ ID NO: 41170 - protein, 781 aa, Homo sapiens
MANVSKKVSWSGRDRDDEEAAPLLRRTARPGGGTPLLNGAGPGAARQDMDPPHPFPKEIPHNEKLLSLKYESLDYDNSENQLFLEEERRINHTAFRTVEIKRWVICALIGILTGLVACFIDIVVENLAGLKYRVIKGNIDKFTEKGGLSFSLLLWATLNAAFVLVGSVIVAFIEPVAAGSGIPQIKCFLNGVKIPHVVRLKTLVIKVSGVILSVVGGLAVGKEGPMIHSGSVIAAGISQGRSTSLKRDFKIFEYFRRDTEKRDFVSAGAAAGVSAAFGAPVGGVLFSLEEGASFWNQFLTWRIFFASMISTFTLNFVLSIYHGNMWDLSSPGLINFGRFDSEKMAYTIHEIPVFIAMGVVGGVLGAVFNALNYWLTMFRIRYIHRPCLQVIEAVLVAAVTATVAFVLIYSSRDCQPLQGGSMSYPLQLFCADGEYNSMAAAFFNTPEKSVVSLFHDPPGSYNPLTLGLFTLVYFFLACWTYGLTVSAGVFIPSLLIGAAWGRLFGISLSYLTGAAIWADPGKYALMGAAAQLGGIVRMTLSLTVIMMEATSNVTYGFPIMLVLMTAKIVGDVFIEGLYDMHIQLQSVPFLHWEAPVTSHSLTAREVMSTPVTCLRRREKVGVIVDVLSDTASNHNGFPVVEHADDTQPARLQGLILRSQLIVLLKHKVFVERSNLGLVQRRLRLKDFRDAYPRFPPIQSIHVSQDERECTMDLSEFMNPSPYTVPQEASLPRVFKLFRALGLRHLVVVDNRNQVVGLVTRKDLARYRLGKRGLEELSLAQT

SEQ ID NO: 41171 - protein, 914 aa, Homo sapiens
MGPFKSSVFILILHLLEGALSNSLIQLNNNGYEGIVVAIDPNVPEDETLIQQIKDMVTQASLYLLEATGKRFYFKNVAILIPETWKTKADYVRPKLETYKNADVLVAESTPPGNDEPYTEQMGNCGEKGERIHLTPDFIAGKKLAEYGPQGRAFVHEWAHLRWGVFDEYNNDEKFYLSNGRIQAVRCSAGITGTNVVKKCQGGSCYTKRCTFNKVTGLYEKGCEFVLQSRQTEKASIMFAQHVDSIVEFCTEQNHNKEAPNKQNQKCNLRSTWEVIRDSEDFKKTTPMTTQPPNPTFSLLQIGQRIVCLVLDKSGSMATGNRLNRLNQAGQLFLLQTVELGSWVGMVTFDSAAHVQNELIQINSGSDRDTLAKRLPAAASGGTSICSGLRSAFTVIRKKYPTDGSEIVLLTDGEDNTISGCFNEVKQSGAIIHTVALGPSAAQELEELSKMTGGLQTYASDQVQNNGLIDAFGALSSGNGAVSQRSIQLESKGLTLQNSQWMNGTVIVDSTVGKDTLFLITWTMQPPQILLWDPSGQKQGGFVVDKNTKMAYLQIPGIAKVGTWKYSLQASSQTLTLTVTSRASNATLPPITVTSKTNKDTSKFPSPLVVYANIRQGASPILRASVTALIESVNGKTVTLELLDNGAGADATKDDGVYSRYFTTYDTNGRYSVKVRALGGVNAARRRVIPQQSGALYIPGWIENDEIQWNPPRPEINKDDVQHKQVCFSRTSSGGSFVASDVPNAPIPDLFPPGQITDLKAEIHGGSLINLTWTAPGDDYDHGTAHKYIIRISTSILDLRDKFNESLQVNTTALIPKEANSEEVFLFKPENITFENGTDLFIAIQAVDKVDLKSEISNIARVSLFIPPQTPPETPSPDETSAPCPNIHINSTIPGIHILKIMWKWIGELQLSIA

SEQ ID NO: 41172 - protein, 914 aa, Homo sapiens; identical to SEQ ID NO: 41171

SEQ ID NO: 41173 - protein, 328 aa, Homo sapiens
MTTQPPNPTFSLLQIGQRIVCLVLDKSGSMATGNRLNRLNQAGQLFLLQTVELGSWVGMVTFDSAAHVQNELIQINSGSDRDTLAKRLPAAASGGTSICSGLRSAFTVIRKKYPTDGSEIVLLTDGEDNTISGCFNEVKQSGAIIHTVALGPSAAQELEELSKMTGGLQTYASDQVQNNGLIDAFGALSSGNGAVSQRSIQLESKGLTLQNSQWMNGTVIVDSTVGKDTLFLITWTMQPPQILLWDPSGQKQGGFVVDKNTKMAYLQIPGIAKVGTWKYSLQASSQTLTLTVTSRASNATLPPITVTSKTNKDTSNLPNSQGQCHSPD

SEQ ID NO: 41174 - protein, 687 aa, Homo sapiens
MEELVGLREGFSGDPVTLQELWGPCPHIRRAIQGGLEWLKQKVFRLGEDWYFLMTLGVLMALVSYAMNFAIGCVVRAHQWLYREIGDSHLLRYLSWTVYPVALVSFSSGFSQSITPSSGGSGIPELKTMLAGVILEDYLDIKNFGAKVVGLSCTLATGSTLFLGKVGPFVHLSVMIAAYLGRVRTTTIGEPENKSKQNEMLVAAAAVGVATVFAAPFSGVLFSIEVMSSHFSVRDYWRGFFAATCGAFIFRLLAVFNSEQETITSLYKTSFRVDVPFDLPEIFFFVALGGICGVLSCAYLFCQRTFLSFIKTNRYSSKLLATSKPVYSALATLLLASITYPPGVGHFLASRLSMKQHLDSLFDNHSWALMTQNSSPPWPEELDPQHLWWEWYHPRFTIFGTLAFFLVMKFWMLILATTIPMPAGYFMPIFILGAAIGRLLGEALAVAFPEGIVTGGVTNPIMPGGYALAGAAAFSGAVTHTISTALLAFELTGQIVHALPVLMAVLAANAIAQSCQPSFYDGTIIVKKLPYLPRILGRNIGSHHVRVEHFMNHSITTLAKDTPLEEVVKVVTSTDVTEYPLVESTESQILVGIVQRAQLVQALQAEPPSRAPGHQQCLQDILARGCPTEPVTLTLFSETTLHQAQNLFKLLNLQSLFVTSRGRAVGCVSWVEMKKAISNLTNPPAPK

SEQ ID NO: 41175 - protein, 686 aa, Homo sapiens
MEELVGLREGFSGDPVTLQELWGPCPHIRRAIQGGLEWLKQKVFRLGEDWYFLMTLGVLMALVSYAMNFAIGCVVRAHQWLYREIGDSHLLRYLSWTVYPVALVSFSSGFSQSITPSSGGSGIPELKTMLAGVILEDYLDIKNFGAKVVGLSCTLATGSTLFLGKVGPFVHLSVMIAAYLGRVRTTTIGEPENKSKQNEMLVAAAAVGVATVFAAPFSGVLFSIEVMSSHFSVRDYWRGFFAATCGAFIFRLLAVFNSEQETITSLYKTSFRVDVPFDLPEIFFFVALGGICGVLSCAYLFCQRTFLSFIKTNRYSSKLLATSKPVYSALATLLLASITYPPGVGHFLASRLSMKQHLDSLFDNHSWALMTQNSSPPWPEELDPQHLWWEWYHPRFTIFGTLAFFLVMKFWMLILATTIPMPAGYFMPIFILGAAIGRLLGEALAVAFPEGIVTGGVTNPIMPGGYALAGAAAFSGAVTHTISTALLAFELTGQIVHALPVLMAVLAANAIAQSCQPSFYDGTIIVKKLPYLPRILGRNIGSHHVRVEHFMNHSITTLAKDTPLEEVVKVVTSTDVTEYPLVESTESQILVGIVQRAQLVQALQAEPPSRAPGHQCLQDILARGCPTEPVTLTLFSETTLHQAQNLFKLLNLQSLFVTSRGRAVGCVSWVEMKKAISNLTNPPAPK

SEQ ID NO: 41176 - protein, 686 aa, Homo sapiens; identical to SEQ ID NO: 41175

SEQ ID NO: 41177 - protein, 644 aa, Homo sapiens
MEELVGLREGFSGDPVTLQELWGPCPHIRRAIQGGLEWLKQKVFRLGEDWYFLMTLGVLMALVSYAMNFAIGCVVRGSGIPELKTMLAGVILEDYLDIKNFGAKVVGLSCTLATGSTLFLGKVGPFVHLSVMIAAYLGRVRTTTIGEPENKSKQNEMLVAAAAVGVATVFAAPFSGVLFSIEVMSSHFSVRDYWRGFFAATCGAFIFRLLAVFNSEQETITSLYKTSFRVDVPFDLPEIFFFVALGGICGVLSCAYLFCQRTFLSFIKTNRYSSKLLATSKPVYSALATLLLASITYPPGVGHFLASRLSMKQHLDSLFDNHSWALMTQNSSPPWPEELDPQHLWWEWYHPRFTIFGTLAFFLVMKFWMLILATTIPMPAGYFMPIFILGAAIGRLLGEALAVAFPEGIVTGGVTNPIMPGGYALAGAAAFSGAVTHTISTALLAFELTGQIVHALPVLMAVLAANAIAQSCQPSFYDGTIIVKKLPYLPRILGRNIGSHHVRVEHFMNHSITTLAKDTPLEEVVKVVTSTDVTEYPLVESTESQILVGIVQRAQLVQALQAEPPSRAPGHQQCLQDILARGCPTEPVTLTLFSETTLHQAQNLFKLLNLQSLFVTSRGRAVGCVSWVEMKKAISNLTNPPAPK

SEQ ID NO: 41178 - protein, 462 aa, Homo sapiens
MEEFVGLREGSSGNPVTLQELWGPCPRIRRGIRGGLEWLKQKLFRLGEDWYFLMTLGVLMALVSCAMDLAVESVVRAHQWLYREIGDSHLLRYLSWTVYPVALVSFSSGFSQSITPSSGGSGIPEVKTMLAGVVLEDYLDIKNFGAKVVGLSCTLACGSTLFLGKVGPFVHLSVMMAAYLGRVRTTTIGEPENKSKPVYSALATLVLASITYPPSAGRFLASRLSMKQHLDSLFDNHSWALMTQNSSPPWPEELDPQHLWWEWYHPRFTIFGTLAFFLVMKFWMLILATTIPMPAGYFMPIFVYGAAIGRLFGETLSFIFPEGIVAGGITNPIMPGGYALAGAAAFSGAVTHTISTALLAFEVTGQIVHALPVLMAVLAANAIAQSCQPSFYDGTVIVKKLPYLPRILGRNIGSHRVRVEHFMNHSITTLAITLMNDEIGVHCHQGQAQMPSGVVWFPVRGS

SEQ ID NO: 41179 - protein, 517 aa, Homo sapiens
MPCPPLLSVPVRAAGEQDRWVREEVTWGGGPTVTGGWGWRAHLRSVSPPGVLFSIEVMSSHFSVWDYWRGFFAATCGAFMFRLLAVFNSEQETITSLYKTSFRVDVPFDLPEIFFFVALGGLCGILGSAYLFCQRIFFGFIRNNRFSSKLLATSKPVYSALATLVLASITYPPSAGRFLASRLSMKQHLDSLFDNHSWALMTQNSSPPWPEELDPQHLWWEWYHPRFTIFGTLAFFLVMKFWMLILATTIPMPAGYFMPIFVYGAAIGRLFGETLSFIFPEGIVAGGITNPIMPGGYALAGAAAFSGAVTHTISTALLAFEVTGQIVHALPVLMAVLAANAIAQSCQPSFYDGTVIVKKLPYLPRILGRNIGSHRVRVEHFMNHSITTLAKDMPLEEVVKVVTSTDVAKYPLVESTESQILVGIVRRAQLVQALKAEPPSWAPGHQCLQDILAAGCPTEPVTLKLSPETSLHEAHNLFELLNLHSLFVTSRGRAVGCVSWVEMKKAISNLTNPPAPK

SEQ ID NO: 41180 - protein, 155 aa, Homo sapiens
MAVLAANAIAQSCQPSFYDGTVIVKKLPYLPRILGRNIGSHRVRVEHFMNHSITTLAKDMPLEEVVKVVTSTDVAKYPLVESTESQILVGIVRRAQLVQALKAEPPSWAPGHQCLQDILAAGCPTEPVTLKLSPETSLHEAQMPSGVVWFPVRGS

SEQ ID NO: 41181 - protein, 687 aa, Homo sapiens
MEEFVGLREGSSGNPVTLQELWGPCPRIRRGIRGGLEWLKQKLFRLGEDWYFLMTLGVLMALVSCAMDLAVESVVRAHQWLYREIGDSHLLRYLSWTVYPVALVSFSSGFSQSITPSSGGSGIPEVKTMLAGVVLEDYLDIKNFGAKVVGLSCTLACGSTLFLGKVGPFVHLSVMMAAYLGRVRTTTIGEPENKSKQNEMLVAAAAVGVATVFAAPFSGVLFSIEVMSSHFSVWDYWRGFFAATCGAFMFRLLAVFNSEQETITSLYKTSFRVDVPFDLPEIFFFVALGGLCGILGSAYLFCQRIFFGFIRNNRFSSKLLATSKPVYSALATLVLASITYPPSAGRFLASRLSMKQHLDSLFDNHSWALMTQNSSPPWPEELDPQHLWWEWYHPRFTIFGTLAFFLVMKFWMLILATTIPMPAGYFMPIFVYGAAIGRLFGETLSFIFPEGIVAGGITNPIMPGGYALAGAAAFSGAVTHTISTALLAFEVTGQIVHALPVLMAVLAANAIAQSCQPSFYDGTVIVKKLPYLPRILGRNIGSHRVRVEHFMNHSITTLAKDMPLEEVVKVVTSTDVAKYPLVESTESQILVGIVRRAQLVQALKAEPPSWAPGHQQCLQDILAAGCPTEPVTLKLSPETSLHEAHNLFELLNLHSLFVTSRGRAVGCVSWVEMKKAISNLTNPPAPK

SEQ ID NO: 41182 - protein, 146 aa, Homo sapiens
AQSCQPSFYDGTVIVKKLPYLPRILGRNIGSHRVRVEHFMNHSITTLAKDMPLEEVVKVVTSTDVAKYPLVESTESQILVGIVRRAQLVQALKAEPPSWAPGHQCLQDILAAGCPTEPVTLKLSPETSLHEAQMPSGVVWFPVRGS

SEQ ID NO: 41183 - protein, 881 aa, Homo sapiens
MAAAAAEEGMEPRALQYEQTLMYGRYTQDLGAFAKEEAARIRLGGPEPWKGPPSSRAAPELLEYGRSRCARCRVCSVRCHKFLVSRVGEDWIFLVLLGLLMALVSWVMDYAIAACLQAQQWMSRGLNTSILLQYLAWVTYPVVLITFSAGFTQILAPQAVGSGIPEMKTILRGVVLKEYLTLKTFIAKVIGLTCALGSGMPLGKEGPFVHIASMCAALLSKFLSLFGGIYENESRNTEMLAAACAVGVGCCFAAPIGGVLFSIEVTSTFFAVRNYWRGFFAATFSAFIFRVLAVWNRDEETITALFKTRFRLDFPFDLQELPAFAVIGIASGFGGALFVYLNRKIVQVMRKQKTINRFLMRKRLLFPALVTLLISTLTFPPGFGQFMAGQLSQKETLVTLFDNRTWVRQGLVEELEPPSTSQAWNPPRANVFLTLVIFILMKFWMSALATTIPVPCGAFMPVFVIDGIHTDSSTYRIVPGGYAVVGAAALAGAVTHTVSTAVIVFELTGQIAHILPVMIAVILANAVAQSLQPSLYDSIIRIKKLPYLPELGWGRHQQYRVRVEDIMVRDVPHVALSCTFRDLRLALHRTKGRMLALVESPESMILLGSIERSQVVALLGAQLSPARRRQHMQERRATQTSPLSDQEGPPTPEASVCFQVNTEDSAFPAARGETHKPLKPALKRGPSVTRNLGESPTGSAESAGIALRSLFCGSPPPEAASEKLESCEKRKLKRVRISLASDADLEGEMSPEEILEWEEQQLDEPVNFSDCKIDPAPFQLVERTSLHKTHTIFSLLGVDHAYVTSIGRLIGIVTLKELRKAIEGSVTAQGVKVRPPLASFRDSATSSSDTETTEVHALWGPHSRHGLPREGSPSDSDDKCQ

SEQ ID NO: 41184 - protein, 854 aa, Homo sapiens
MAAAAAEEGMEPRALQYEQTLMYGRYTQDLGAFAKEEAARIRLGGPEPWKGPPSSRAAPELLEYGRSRCARCRAQQWMSRGLNTSILLQYLAWVTYPVVLITFSAGFTQILAPQAVGSGIPEMKTILRGVVLKEYLTLKTFIAKVIGLTCALGSGMPLGKEGPFVHIASMCAALLSKFLSLFGGIYENESRNTEMLAAACAVGVGCCFAAPIGGVLFSIEVTSTFFAVRNYWRGFFAATFSAFIFRVLAVWNRDEETITALFKTRFRLDFPFDLQELPAFAVIGIASGFGGALFVYLNRKIVQVMRKQKTINRFLMRKRLLFPALVTLLISTLTFPPGFGQFMAGQLSQKETLVTLFDNRTWVRQGLVEELEPPSTSQAWNPPRANVFLTLVIFILMKFWMSALATTIPVPCGAFMPVFVIGAAFGRLVGESMAAWFPDGIHTDSSTYRIVPGGYAVVGAAALAGAVTHTVSTAVIVFELTGQIAHILPVMIAVILANAVAQSLQPSLYDSIIRIKKLPYLPELGWGRHQQYRVRVEDIMVRDVPHVALSCTFRDLRLALHRTKGRMLALVESPESMILLGSIERSQVVALLGAQLSPARRRQHMQERRATQTSPLSDQEGPPTPEASVCFQVNTEDSAFPAARGETHKPLKPALKRGPSVTRNLGESPTGSAESAGIALRSLFCGSPPPEAASEKLESCEKRKLKRVRISLASDADLEGEMSPEEILEWEEQQLDEPVNFSDCKIDPAPFQLVERTSLHKTHTIFSLLGVDHAYVTSIGRLIGIVTLKELRKAIEGSVTAQGVKVRPPLASFRDSATSSSDTETTEVHALWGPHSRHGLPREGSPSDSDDKCQ

SEQ ID NO: 41185 - protein, 869 aa, Homo sapiens
MAAAAAEEGMEPRALQYEQTLMYGRYTQDLGAFAKEEAARIRLGGPEPWKGPPSSRAAPELLEYGRSRCARCRVCSVRCHKFLVSRVGEDWIFLVLLGLLMALVSWVMDYAIAACLQAQQWMSRGLNTSILLQYLAWVTYPVVLITFSAGFTQILAPQAVGSGIPEMKTILRGVVLKEYLTLKTFIAKVIGLTCALGSGMPLGKEGPFVHIASMCAALLSKFLSLFGGIYENESRNTEMLAAACAVGVGCCFAAPIGGVLFSIEVTSTFFAVRNYWRGFFAATFSAFIFRVLAVWNRDEETITALFKTRFRLDFPFDLQELPAFAVIGIASGFGGALFVYLNRKIVQVMRKQKTINRFLMRKRLLFPALVTLLISTLTFPPGFGQFMAGQLSQKETLVTLFDNRTWVRQGLVEELEPPSTSQAWNPPRANVFLTLVIFILMKFWMSALATTIPVPCGAFMPVFVIGAAFGRLVGESMAAWFPDGIHTDSSTYRIVPGGYAVVGAAALAGAVTHTVSTAVIVFELTGQIAHILPVMIAVILANAVAQSLQPSLYDSIIRIKKLPYLPELGWGRHQQYRVRVEDIMVRDVPHVALSCTFRDLRLALHRTKGRMLALVESPESMILLGSIERSQVVALLGAQLSPARRRQHMQERRATQTSPLSDQEGPPTPEASVCFQVNTEDSAFPAARGETHKPLKPALKRGPSVTRNLGESPTGSAESAGIALRSLFCGSPPPEAASEKLESCEKRKLKRVRISLASDADLEGEMSPEEILEWEEQQLDEPVNFSDCKIDPAPFQLVERTSLHKLRKAIEGSVTAQGVKVRPPLASFRDSATSSSDTETTEVHALWGPHSRHGLPREGSPSDSDDKCQ

SEQ ID NO: 41186 - protein, 237 aa, Homo sapiens
MSFLKSFPPPGPAEGLLRQQPDTEAVLNGKGLGTGTLYIAESRLSWLDGSGLGFSLEYPTISLHALSRDRSDCLGEHLYVMVNAKFEEESKEPVADEEEEDSDDDVEPITEFRFVPSDKSALEAMFTAMCECQALHPDPEDEDSDDYDGEEYDVEAHEQGQGDIPTFYTYEEGLSHLTAEGQATLERLEGMLSQSVSSQYNMAGVRTEDSIRDYEDGMEVDTTPTVAGQFEDADVDH

SEQ ID NO: 41187 - protein, 237 aa, Homo sapiens; identical to SEQ ID NO: 41186

SEQ ID NO: 41188 - protein, 167 aa, Homo sapiens
MVLLLKGVPFTLTTVDTRRSPDVLKDFAPGSQLPILLYDSDAKTDTLQIEDFLEETLGPPDFPSLAPRYRESNTAGNDVFHKFSAFIKNPVPAQDEALYQQLLRALARLDSYLRAPLEHELAGEPQLRESRRRFLDGDRLTLADCSLLPKLHIVDTVCAHFRQAPIP

SEQ ID NO: 41189 - protein, 236 aa, Homo sapiens
MAETKLQLFVKASEDGESVGHCPSCQRLFMVLLLKGVPFTLTTVDTRRSPDVLKDFAPGSQLPILLYDSDAKTDTLQIEDFLEETLGPPDFPSLAPRYRESNTAGNDVFHKFSAFIKNPVPAQDEALYQQLLRALARLDSYLRAPLEHELAGEPQLRESRRRFLDGDRLTLADCSLLPKLHIVDTVCAHFRQAPIPAELRGVRRYLDSAMQEKEFKYTCPHSAEILAAYRPAVHPR

SEQ ID NO: 41190 - protein, 115 aa, Homo sapiens
MNSGVCLCVLMAVLAAGALTQPVPPADPAGSGLQRAEEAPRRQLRVSQRTDGESRAHLGALLARYIQQARKAPSGRMSIVKNLQNLDPSHRISDRDYMGWMDFGRRSAEEYEYPS

SEQ ID NO: 41191 - protein, 115 aa, Homo sapiens; identical to SEQ ID NO: 41190

SEQ ID NO: 41192 - protein, 115 aa, Homo sapiens; identical to SEQ ID NO: 41190

SEQ ID NO: 41193 - protein, 428 aa, Homo sapiens
MDVVDSLLVNGSNITPPCELGLENETLFCLDQPRPSKEWQPAVQILLYSLIFLLSVLGNTLVITVLIRNKRMRTVTNIFLLSLAVSDLMLCLFCMPFNLIPNLLKDFIFGSAVCKTTTYFMGTSVSVSTFNLVAISLERYGAICKPLQSRVWQTKSHALKVIAATWCLSFTIMTPYPIYSNLVPFTKNNNQTANMCRFLLPNDVMQQSWHTFLLLILFLIPGIVMMVAYGLISLELYQGIKFEASQKKSAKERKPSTTSSGKYEDSDGCYLQKTRPPRKLELRQLSTGSSSRANRIRSNSSAANLMAKKRVIRMLIVIVVLFFLCWMPIFSANAWRAYDTASAERRLSGTPISFILLLSYTSSCVNPIIYCFMNKRFRLGFMATFPCCPNPGPPGARGEVGEEEEGGTTGASLSRFSYSHMSASVPPQ

SEQ ID NO: 41194 - protein, 447 aa, Homo sapiens
MELLKLNRSVQGTGPGPGASLCRPGAPLLNSSSVGNLSCEPPRIRGAGTRELELAIRITLYAVIFLMSVGGNMLIIVVLGLSRRLRTVTNAFLLSLAVSDLLLAVACMPFTLLPNLMGTFIFGTVICKAVSYLMGVSVSVSTLSLVAIALERYSAICRPLQARVWQTRSHAARVIVATWLLSGLLMVPYPVYTVVQPVGPRVLQCVHRWPSARVRQTWSVLLLLLLFFIPGVVMAVAYGLISRELYLGLRFDGDSDSDSQSRVRNQGGLPGAVHQNGRCRPETGAVGEDSDGCYVQLPRSRPALELTALTAPGPGSGSRPTQAKLLAKKRVVRMLLVIVVLFFLCWLPVYSANTWRAFDGPGAHRALSGAPISFIHLLSYASACVNPLVYCFMHRRFRQACLETCARCCPRPPRARPRALPDEDPPTPSIASLSRLSYTTISTLGPG

SEQ ID NO: 41195 - protein, 516 aa, Homo sapiens
MELLKLNRSVQGTGPGPGASLCRPGAPLLNSSSVGNLSCEPPRIRGAGTRELELAIRITLYAVIFLMSVGGNMLIIVVLGLSRRLRTVTNAFLLSLAVSDLLLAVACMPFTLLPNLMGTFIFGTVICKAVSYLMGVSVSVSTLSLVAIALERYSAICRPLQARVWQTRSHAARVIVATWLLSGLLMVPYPVYTVVQPVGPRVLQCVHRWPSARVRQTWSVLLLLLLFFIPGVVMAVAYGLISRELYLGLRFDGDSDSDSQSRVRNQGGLPGGAGPREQNLGEAELWRATGPAGVGGTEMKVRVRRKLEMELSWERRSGGDWAGDWGDSPFSLTAHPLCSGAVHQNGRCRPETGAVGEDSDGCYVQLPRSRPALELTALTAPGPGSGSRPTQAKLLAKKRVVRMLLVIVVLFFLCWLPVYSANTWRAFDGPGAHRALSGAPISFIHLLSYASACVNPLVYCFMHRRFRQACLETCARCCPRPPRARPRALPDEDPPTPSIASLSRLSYTTISTLGPG

SEQ ID NO: 41196 - protein, 272 aa, Homo sapiens
MSCHNCSDPQVLCSSGQLFLQPLWDHLRSWEALLQSPFFPVIFSITTYVGFCLPFVVLDILCSWVPALRRYKIHPDFSPSAQQLLPCLGQTLYQHVMFVFPVTLLHWARSPALLPHEAPELLLLLHHILFCLLLFDMEFFVWHLLHHKVPWLYRTFHKVHHQNSSSFALATQYMSVWELFSLGFFDMMNVTLLGCHPLTTLTFHVVNIWLSVEDHSGYNFPWSTHRLVPFGWYGGVVHHDLHHSHFNCNFAPYFTHWDKILGTLRTASVPAR

SEQ ID NO: 41197 - protein, 493 aa, Homo sapiens [sequence omitted]

SEQ ID NO: 41198 - protein, 433 aa, Homo sapiens
MLAATVLTLALLGNAHACSKGTSHEAGIVCRITKPALLVLNHETAKVIQTAFQRASYPDITGEKAMMLLGQVKYGLHNIQISHLSIASSQVELVEAKSIDVSIQNVSVVFKGTLKYGYTTAWWLGIDQSIDFEIDSAIDLQINTQLTCDSGRVRTDAPDCYLSFHKLLLHLQGEREPGWIKQLFTNFISFTLKLVLKGQICKEINVISNIMADFVQTRAASILSDGDIGVDISLTGDPVITASYLESHHKAVLETWGFNTNQEIFQEVVGGFPSQAQVTVHCLKMPKISCQNKGVVVNSSVMVKFLFPRPDQQHSVAYTFEEDIVTTVQASYSKKKLFLSLLDFQITPKTVSNLTESSSESVQSFLQSMITAVGIPEVMSRLEVVFTALMNSKGVSLFDIINPEIITRDGFLLLQMDFGFPEHLLVDFLQSLS

SEQ ID NO: 41199 - protein, 457 aa, Homo sapiens
MKTKFCTGGEAEPSPLGLLLSCGSGSAAPAPGVGQQRDAASDLESKQLGGQQPPLALPPPPPLPLPLPLPQPPPPQPPADEQPEPRTRRRAYLWCKEFLPGAWRGLREDEFHISVIRGGLSNMLFQCSLPDTTATLGDEPRKVLLRLYGAILQMRSCNKEGSEQAQKENEFQGAEAMVLESVMFAILAERSLGPKLYGIFPQGRLEQFIPSRRLDTEELSLPDISAEIAEKMATFHGMKMPFNKEPKWLFGTMEKYLKEVLRIKFTEESRIKKLHKLLSYNLPLELENLRSLLESTPSPVVFCHNDCQEGNILLLEGRENSEKQKLMLIDFEYSSYNYRGFDIGNHFCEWMYDYSYEKYPFFRANIRKYPTKKQQLHFISSYLPAFQNDFENLSTEEKSIIKEEMLLEVNRFALASHFLWGLWSIVQAKISSIEFGYMDYAQARFDAYFHQKRKLGV

SEQ ID NO: 41200 - protein, 439 aa, Homo sapiens
MKTKFCTGGEAEPSPLGLLLSCGSGSAAPAPGVGQQRDAASDLESKQLGGQQPPLALPPPPPLPLPLPLPQPPPPQPPADEQPEPRTRRRAYLWCKEFLPGAWRGLREDEFHISVIRGGLSNMLFQCSLPDTTATLGDEPRKVLLRLYGAILQMGAEAMVLESVMFAILAERSLGPKLYGIFPQGRLEQFIPSRRLDTEELSLPDISAEIAEKMATFHGMKMPFNKEPKWLFGTMEKYLKEVLRIKFTEESRIKKLHKLLSYNLPLELENLRSLLESTPSPVVFCHNDCQEGNILLLEGRENSEKQKLMLIDFEYSSYNYRGFDIGNHFCEWMYDYSYEKYPFFRANIRKYPTKKQQLHFISSYLPAFQNDFENLSTEEKSIIKEEMLLEVNRFALASHFLWGLWSIVQAKISSIEFGYMDYAQARFDAYFHQKRKLGV

SEQ ID NO: 41201 - protein, 395 aa, Homo sapiens
MAAEATAVAGSGAVGGCLAKDGLQQSKCPDTTPKRRRASSLSRDAERRAYQWCREYLGGAWRRVQPEELRVYPVSGGLSNLLFRCSLPDHLPSVGEEPREVLLRLYGAILQGVDSLVLESVMFAILAERSLGPQLYGVFPEGRLEQYIPSRPLKTQELREPVLSAAIATKMAQFHGMEMPFTKEPHWLFGTMERYLKQIQDLPPTGLPEMNLLEMYSLKDEMGNLRKLLESTPSPVVFCHNDIQEGNILLLSEPENADSLMLVDFEYSSYNYRGFDIGNHFCEWVYDYTHEEWPFYKARPTDYPTQEQQLHFIRHYLAEAKKGETLSQEEQRKLEEDLLVEVSRYALASHFFWGLWSILQASMSTIEFGYLDYAQSRFQFYFQQKGQLTSVHSSS

SEQ ID NO: 41202 - protein, 748 aa, Homo sapiens
MGLRTAKKRGLGGGGKWKREEGGGTRGRREVRPACFLQSGGRGDPGDVGGPAGNPGCSPHPRAATRPPPLPAHTPAHTPEWCGAASAEAAEPRRAGPHLCIPAPGLTKTPILEKVPRKMAAKTPSSEESGLPKLPVPPLQQTLATYLQCMRHLVSEEQFRKSQAIVQQFGAPGGLGETLQQKLLERQEKTANWVSEYWLNDMYLNNRLALPVNSSPAVIFARQHFPGTDDQLRFAASLISGVLSYKALLDSHSIPTDCAKGQLSGQPLCMKQYYGLFSSYRLPGHTQDTLVAQNSSIMPEPEHVIVACCNQFFVLDVVINFRRLSEGDLFTQLRKIVKMASNEDERLPPIGLLTSDGRSEWAEARTVLVKDSTNRDSLDMIERCICLVCLDAPGGVELSDTHRALQLLHGGGYSKNGANRWYDKSLQFVVGRDGTCGVVCEHSPFDGIVLVQCTEHLLKHVTQSSRKLIRADSVSELPAPRRLRWKCSPEIQGHLASSAEKLQRIVKNLDFIVYKFDNYGKTFIKKQKCSPDAFIQVALQLAFYRLHRRLVPTYESASIRRFQEGRVDNIRSATPEALAFVRAVTDHKAAVPASEKLLLLKDAIRAQTAYTVMAITGMAIDNHLLALRELARAMCKELPEMFMDETYLMSNRFVLSTSQVPTTTEMFCCYGPVVPNGYGACYNPQPETILFCISSFHSCKETSSSKFAKAVEESLIDMRDLCSLLPPTESKPLATKEKATRPSQGHQP

SEQ ID NO: 41203 - protein, 630 aa, Homo sapiens
MAAKTPSSEESGLPKLPVPPLQQTLATYLQCMRHLVSEEQFRKSQAIVQQFGAPGGLGETLQQKLLERQEKTANWVSEYWLNDMYLNNRLALPVNSSPAVIFARQHFPGTDDQLRFAASLISGVLSYKALLDSHSIPTDCAKGQLSGQPLCMKQYYGLFSSYRLPGHTQDTLVAQNSSIMPEPEHVIVACCNQFFVLDVVINFRRLSEGDLFTQLRKIVKMASNEDERLPPIGLLTSDGRSEWAEARTVLVKDSTNRDSLDMIERCICLVCLDAPGGVELSDTHRALQLLHGGGYSKNGANRWYDKSLQFVVGRDGTCGVVCEHSPFDGIVLVQCTEHLLKHVTQSSRKLIRADSVSELPAPRRLRWKCSPEIQGHLASSAEKLQRIVKNLDFIVYKFDNYGKTFIKKQKCSPDAFIQVALQLAFYRLHRRLVPTYESASIRRFQEGRVDNIRSATPEALAFVRAVTDHKAAVPASEKLLLLKDAIRAQTAYTVMAITGMAIDNHLLALRELARAMCKELPEMFMDETYLMSNRFVLSTSQVPTTTEMFCCYGPVVPNGYGACYNPQPETILFCISSFHSCKETSSSKFAKAVEESLIDMRDLCSLLPPTESKPLATKEKATRPSQGHQP

SEQ ID NO: 41204 - protein, 630 aa, Homo sapiens; identical to SEQ ID NO: 41203

SEQ ID NO: 41205 - protein, 630 aa, Homo sapiens; identical to SEQ ID NO: 41203

SEQ ID NO: 41206 - protein, 666 aa, Homo sapiens
MWPECRDEALSTVGPHLCIPAPGLTKTPILEKVPRKMAAKTPSSEESGLPKLPVPPLQQTLATYLQCMRHLVSEEQFRKSQAIVQQFGAPGGLGETLQQKLLERQEKTANWVSEYWLNDMYLNNRLALPVNSSPAVIFARQHFPGTDDQLRFAASLISGVLSYKALLDSHSIPTDCAKGQLSGQPLCMKQYYGLFSSYRLPGHTQDTLVAQNSSIMPEPEHVIVACCNQFFVLDVVINFRRLSEGDLFTQLRKIVKMASNEDERLPPIGLLTSDGRSEWAEARTVLVKDSTNRDSLDMIERCICLVCLDAPGGVELSDTHRALQLLHGGGYSKNGANRWYDKSLQFVVGRDGTCGVVCEHSPFDGIVLVQCTEHLLKHVTQSSRKLIRADSVSELPAPRRLRWKCSPEIQGHLASSAEKLQRIVKNLDFIVYKFDNYGKTFIKKQKCSPDAFIQVALQLAFYRLHRRLVPTYESASIRRFQEGRVDNIRSATPEALAFVRAVTDHKAAVPASEKLLLLKDAIRAQTAYTVMAITGMAIDNHLLALRELARAMCKELPEMFMDETYLMSNRFVLSTSQVPTTTEMFCCYGPVVPNGYGACYNPQPETILFCISSFHSCKETSSSKFAKAVEESLIDMRDLCSLLPPTESKPLATKEKATRPSQGHQP

SEQ ID NO: 41207 - protein, 545 aa, Homo sapiens
MAAKTPSSEESGLPKLPVPPLQQTLATYLQCMRHLVSEEQFRKSQAIVQQFGAPGGLGETLQQKLLERQEKTANWVSEYWLNDMYLNNRLALPVNSSPAVIFARQHFPGTDDQLRFAASLISGVLSYKALLDSHSIPTDCAKGQLSGQPLCMKQYYGLFSSYRLPGHTQDTLVAQNSSIMPEPEHVIVACCNQFFVLDVVINFRRLSEGDLFTQLRKIVKMASNEDERLPPIGLLTSDGRSEWAEARTVLVKDSTNRDSLDMIERCICLVCLDAPGGVELSDTHRALQLLHGGGYSKNGANRWYDKSLQFVVGRDGTCGVVCEHSPFDGIVLVQCTEHLLKHVTQSSRKLIRADSVSELPAPRRLRWKCSPEIQGHLASSAEKLQRIVKNLDFIVYKFDNYGKTFIKKQKCSPDAFIQVALQLAFYRLHRRLVPTYESASIRRFQEGRVDNIRSATPEALAFVRAVTDHKAAVPASEKLLLLKDAIRAQTAYTVMAITGMAIDNHLLALRELARAMCKELPEMFMDETYLMSNRFVLSTSQLCWP

SEQ ID NO: 41208 - protein, 460 aa, Homo sapiens
MNTSAPPAVSPNITVLAPGKGPWQVAFIGITTGLLSLATVTGNLLVLISFKVNTELKTVNNYFLLSLACADLIIGTFSMNLYTTYLLMGHWALGTLACDLWLALDYVASNASVMNLLLISFDRYFSVTRPLSYRAKRTPRRAALMIGLAWLVSFVLWAPAILFWQYLVGERTVLAGQCYIQFLSQPIITFGTAMAAFYLPVTVMCTLYWRIYRETENRARELAALQGSETPGKGGGSSSSSERSQPGAEGSPETPPGRCCRCCRAPRLLQAYSWKEEEEEDEGSMESLTSSEGEEPGSEVVIKMPMVDPEAQAPTKQPPRSSPNTVKRPTKKGRDRAGKGQKPRGKEQLAKRKTFSLVKEKKAARTLSAILLAFILTWTPYNIMVLVSTFCKDCVPETLWELGYWLCYVNSTINPMCYALCNKAFRDTFRLLLLCRWDKRRWRKIPKRPGSVHRTPSRQC

SEQ ID NO: 41209 - protein, 134 aa, Homo sapiens
MNTSAPPAVSPNITVLAPGKGPWQVAFIGITTGLLSLATVTGNLLVLISFKVNTELKTVNNYFLLSLACADLIIGTFSMNLYTTYLLMGHWALGTLACDLWLALDYVASNASVMNLLLISFDRYFSVTRPLSYR

SEQ ID NO: 41210 - protein, 454 aa, Homo sapiens
MNTSAPPAVSPNITVLAPGKGPWQVAFIGITTGLLSLATVTGNLLVLISFKVNTELKTVNNYFLLSLACADLIIGTFSMNLYTTYLLMGHWALGTLACDLWLALDYVASNASVMNLLLISFDRYFSVTRPLSYRAKRTPRRAALMIGLAWLVSFVLWAPAILFWQYLVGERTVLAGQCYIQFLSQPIITFGTAMAAFYLPVTVMCTLYWRIYRETENRARELAALQGSETPGKGGGSSSSSERSQPGAEGSPETPPGRCCRCCRAPRLLQAYSWKEEEEEDEGSMESLTSSEGEEPGSEVVIKMPMVDPEAQAPTKQPPRSSPNTVKRPTKKGRDRAGKGQKPRGKEQLAKRKTFSLVKEKKAARTLSAILLAFILTWTPYNIMVLVSTFCKDCVPETLWELGYWLCYVNSTINPMCYALCNKAFRDTFRLLLLCRWDKRRWRKIPKRPGSVHR

SEQ ID NO: 41211 - protein, 466 aa, Homo sapiens
MNNSTNSSNNSLALTSPYKTFEVVFIVLVAGSLSLVTIIGNILVMVSIKVNRHLQTVNNYFLFSLACADLIIGVFSMNLYTLYTVIGYWPLGPVVCDLWLALDYVVSNASVMNLLIISFDRYFCVTKPLTYPVKRTTKMAGMMIAAAWVLSFILWAPAILFWQFIVGVRTVEDGECYIQFFSNAAVTFGTAIAAFYLPVIIMTVLYWHISRASKSRIKKDKKEPVANQDPVSPSLVQGRIVKPNNNNMPSSDDGLEHNKIQNGKAPRDPVTENCVQGEEKESSNDSTSVSAVASNMRDDEITQDENTVSTSLGHSKDENSKQTCIRIGTKTPKSDSCTPTNTTVEVVGSSGQNGDEKQNIVARKIVKMTKQPAKKKPPPSREKKVTRTILAILLAFIITWAPYNVMVLINTFCAPCIPNTVWTIGYWLCYINSTINPACYALCNATFKKTFKHLLMCHYKNIGATR

SEQ ID NO: 41212 - protein, 466 aa, Homo sapiens; identical to SEQ ID NO: 41211

SEQ ID NO: 41213 - protein, 466 aa, Homo sapiens; identical to SEQ ID NO: 41211

SEQ ID NO: 41214 - protein, 466 aa, Homo sapiens; identical to SEQ ID NO: 41211

SEQ ID NO: 41215 - protein, 466 aa, Homo sapiens; identical to SEQ ID NO: 41211

SEQ ID NO: 41216 - protein, 466 aa, Homo sapiens; identical to SEQ ID NO: 41211

SEQ ID NO: 41217 - protein, 590 aa, Homo sapiens
MTLHNNSTTSPLFPNISSSWIHSPSDAGLPPGTVTHFGSYNVSRAAGNFSSPDGTTDDPLGGHTVWQVVFIAFLTGILALVTIIGNILVIVSFKVNKQLKTVNNYFLLSLACADLIIGVISMNLFTTYIIMNRWALGNLACDLWLAIDYVASNASVMNLLVISFDRYFSITRPLTYRAKRTTKRAGVMIGLAWVISFVLWAPAILFWQYFVGKRTVPPGECFIQFLSEPTITFGTAIAAFYMPVTIMTILYWRIYKETEKRTKELAGLQASGTEAETENFVHPTGSSRSCSSYELQQQSMKRSNRRKYGRCHFWFTTKSWKPSSEQMDQDHSSSDSWNNNDAAASLENSASSDEEDIGSETRAIYSIVLKLPGHSTILNSTKLPSSDNLQVPEEELGMVDLERKADKLQAQKSVDDGGSFPKSFSKLPIQLESAVDTAKTSDVNSSVGKSTATLPLSFKEATLAKRFALKTRSQITKRKRMSLVKEKKAAQTLSAILLAFIITWTPYNIMVLVNTFCDSCIPKTFWNLGYWLCYINSTVNPVCYALCNKTFRTTFKMLLLCQCDKKKRRKQQYQQRQSVIFHKRAPEQAL

SEQ ID NO: 41218 - protein, 110 aa, Homo sapiens
MTLHNNSTTSPLFPNISSSWIHSPSDAGLPPGTVTHFGSYNVSRAAGNFSSPDGTTDDPLGGHTVWQVVFIAFLTGILALVTIIGNILVIVSFKVNKQLKTVNNYFLLSL

SEQ ID NO: 41219 - protein, 479 aa, Homo sapiens
MANFTPVNGSSGNQSVRLVTSSSHNRYETVEMVFIATVTGSLSLVTVVGNILVMLSIKVNRQLQTVNNYFLFSLACADLIIGAFSMNLYTVYIIKGYWPLGAVVCDLWLALDYVVSNASVMNLLIISFDRYFCVTKPLTYPARRTTKMAGLMIAAAWVLSFVLWAPAILFWQFVVGKRTVPDNQCFIQFLSNPAVTFGTAIAAFYLPVVIMTVLYIHISLASRSRVHKHRPEGPKEKKAKTLAFLKSPLMKQSVKKPPPGEAAREELRNGKLEEAPPPALPPPPRPVADKDTSNESSSGSATQNTKERPATELSTTEATTPAMPAPPLQPRALNPASRWSKIQIVTKQTGNECVTAIEIVPATPAGMRPAANVARKFASIARNQVRKKRQMAARERKVTRTIFAILLAFILTWTPYNVMVLVNTFCQSCIPDTVWSIGYWLCYVNSTINPACYALCNATFKKTFRHLLLCQYRNIGTAR

SEQ ID NO: 41220 - protein, 532 aa, Homo sapiens
MEGDSYHNATTVNGTPVNHQPLERHRLWEVITIAAVTAVVSLITIVGNVLVMISFKVNSQLKTVNNYYLLSLACADLIIGIFSMNLYTTYILMGRWALGSLACDLWLALDYVASNASVMNLLVISFDRYFSITRPLTYRAKRTPKRAGIMIGLAWLISFILWAPAILCWQYLVGKRTVPLDECQIQFLSEPTITFGTAIAAFYIPVSVMTILYCRIYRETEKRTKDLADLQGSDSVTKAEKRKPAHRALFRSCLRCPRPTLAQRERNQASWSSSRRSTSTTGKPSQATGPSANWAKAEQLTTCSSYPSSEDEDKPATDPVLQVVYKSQGKESPGEEFSAEETEETFVKAETEKSDYDTPNYLLSPAAAHRPKSQKCVAYKFRLVVKADGNQETNNGCHKVKIMPCPFPVAKEPSTKGLNPNPSHQMTKRKRVVLVKERKAAQTLSAILLAFIITWTPYNIMVLVSTFCDKCVPVTLWHLGYWLCYVNSTVNPICYALCNRTFRKTFKMLLLCRWKKKKVEEKLYWQGNSKLP

SEQ ID NO: 41221 - protein, 532 aa, Homo sapiens; identical to SEQ ID NO: 41220

SEQ ID NO: 41222 - protein, 22 aa, Homo sapiens
MEGDSYHNATTVNGTPVNHQPL

SEQ ID NO: 41223 - protein, 482 aa, Homo sapiens
MEPWPLLLLFSLCSAGLVLGSEHETRLVAKLFKDYSSVVRPVEDHRQVVEVTVGLQLIQLINVDEVNQIVTTNVRLKQGDMVDLPRPSCVTLGVPLFSHLQNEQWVDYNLKWNPDDYGGVKKIHIPSEKIWRPDLVLYNNADGDFAIVKFTKVLLQYTGHITWTPPAIFKSYCEIIVTHFPFDEQNCSMKLGTWTYDGSVVAINPESDQPDLSNFMESGEWVIKESRGWKHSVTYSCCPDTPYLDITYHFVMQRLPLYFIVNVIIPCLLFSFLTGLVFYLPTDSGEKMTLSISVLLSLTVFLLVIVELIPSTSSAVPLIGKYMLFTMVFVIASIIITVIVINTHHRSPSTHVMPNWVRKVFIDTIPNIMFFSTMKRPSREKQDKKIFTEDIDISDISGKPGPPPMGFHSPLIKHPEVKSAIEGIKYIAETMKSDQESNNAAAEWKYVAMVMDHILLGVFMLVCIIGTLAVFAGRLIELNQQG

SEQ ID NO: 41224 - protein, 457 aa, Homo sapiens
MEPWPLLLLFSLCSAGLVLGSEHETRLVAKLFKDYSSVVRPVEDHRQVVEVTVGLQLIQLINVDEVNQIVTTNVRLKQQWVDYNLKWNPDDYGGVKKIHIPSEKIWRPDLVLYNNADGDFAIVKFTKVLLQYTGHITWTPPAIFKSYCEIIVTHFPFDEQNCSMKLGTWTYDGSVVAINPESDQPDLSNFMESGEWVIKESRGWKHSVTYSCCPDTPYLDITYHFVMQRLPLYFIVNVIIPCLLFSFLTGLVFYLPTDSGEKMTLSISVLLSLTVFLLVIVELIPSTSSAVPLIGKYMLFTMVFVIASIIITVIVINTHHRSPSTHVMPNWVRKVFIDTIPNIMFFSTMKRPSREKQDKKIFTEDIDISDISGKPGPPPMGFHSPLIKHPEVKSAIEGIKYIAETMKSDQESNNAAAEWKYVAMVMDHILLGVFMLVCIIGTLAVFAGRLIELNQQG

SEQ ID NO: 41225 - protein, 450 aa, Homo sapiens
MGLRSHHLSLGLLLLFLLPAECLGAEGRLALKLFRDLFANYTSALRPVADTDQTLNVTLEVTLSQIIDMDERNQVLTLYLWIRQEWTDAYLRWDPNAYGGLDAIRIPSSLVWRPDIVLYNKADAQPPGSASTNVVLRHDGAVRWDAPAITRSSCRVDVAAFPFDAQHCGLTFGSWTHGGHQLDVRPRGAAASLADFVENVEWRVLGMPARRRVLTYGCCSEPYPDVTFTLLLRRRAAAYVCNLLLPCVLISLLAPLAFHLPADSGEKVSLGVTVLLALTVFQLLLAESMPPAESVPLIGKYYMATMTMVTFSTALTILIMNLHYCGPSVRPVPAWARALLLGHLARGLCVRERGEPCGQSRPPELSPSPQSPEGGAGPPAGPCHEPRCLCRQEALLHHVATIANTFRSHRAAQRCHEDWKRLARVMDRFFLAIFFSMALVMSLLVLVQAL

SEQ ID NO: 41226 - protein, 529 aa, Homo sapiens
MGPSCPVFLSFTKLSLWWLLLTPAGGEEAKRPPPRAPGDPLSSPSPTALPQGGSHTETEDRLFKHLFRGYNRWARPVPNTSDVVIVRFGLSIAQLIDVDEKNQMMTTNVWLKQEWSDYKLRWNPTDFGNITSLRVPSEMIWIPDIVLYNNADGEFAVTHMTKAHLFSTGTVHWVPPAIYKSSCSIDVTFFPFDQQNCKMKFGSWTYDKAKIDLEQMEQTVDLKDYWESGEWAIVNATGTYNSKKYDCCAEIYPDVTYAFVIRRLPLFYTINLIIPCLLISCLTVLVFYLPSDCGEKITLCISVLLSLTVFLLLITEIIPSTSLVIPLIGEYLLFTMIFVTLSIVITVFVLNVHHRSPSTHTMPHWVRGALLGCVPRWLLMNRPPPPVELCHPLRLKLSPSYHWLESNVDAEEREVVVEEEDRWACAGHVAPSVGTLCSHGHLHSGASGPKAEALLQEGELLLSPHMQKALEGVHYIADHLRSEDADSSVKEDWKYVAMVIDRIFLWLFIIVCFLGTIGLFLPPFLAGMI

SEQ ID NO: 41227 - protein, 529 aa, Homo sapiens; identical to SEQ ID NO: 41226

SEQ ID NO: 41228 - protein, 505 aa, Homo sapiens
MGSGPLSLPLALSPPRLLLLLLLSLLPVARASEAEHRLFERLFEDYNEIIRPVANVSDPVIIHFEVSMSQLVKVDEVNQIMETNLWLKQIWNDYKLKWNPSDYGGAEFMRVPAQKIWKPDIVLYNNAVGDFQVDDKTKALLKYTGEVTWIPPAIFKSSCKIDVTYFPFDYQNCTMKFGSWSYDKAKIDLVLIGSSMNLKDYWESGEWAIIKAPGYKHDIKYNCCEEIYPDITYSLYIRRLPLFYTINLIIPCLLISFLTVLVFYLPSDCGEKVTLCISVLLSLTVFLLVITETIPSTSLVIPLIGEYLLFTMIFVTLSIVITVFVLNVHYRTPTTHTMPSWVKTVFLNLLPRVMFMTRPTSNEGNAQKPRPLYGAELSNLNCFSRAESKGCKEGYPCQDGMCGYCHHRRIKISNFSANLTRSSSSESVDAVLSLSALSPEIKEAIQSVKYIAENMKAQNEAKEIQDDWKYVAMVIDRIFLWVFTLVCILGTAGLFLQPLMAREDA

SEQ ID NO: 41229 - protein, 312 aa, Homo sapiens
TKALLKYTGEVTWIPPAIFKSSCKIDVTYFPFDYQNCTMKFGSWSYDKAKIDLVLIGSSMNLKDYWESGEWAIIKAPGYKHDIKYNCCEEIYPDITYSLYIRRLPLFYTINLIIPCLLISFLTVLVFYLPSDCGEKVTLCISVLLSLTVFLLVITETIPSTSLVIPLIGEYLLFTMIFVTLSIVITVFVLNVHYRTPTTHTMPSWVKTVFLNLLPRVMFMTRPTSNEGNAQKPRPLYGASPKAARREIKEAIQSVKYIAENMKAQNEAKEIQDDWKYVAMVIDRIFLWVFTLVCILGTAGLFLQPLMAREDA

SEQ ID NO: 41230 - protein, 489 aa, Homo sapiens
MGSGPLSLPLALSPPRLLLLLLLSLLPVARASEAEHRLFERLFEDYNEIIRPVANVSDPVIIHFEVSMSQLVKVDEVNQIMETNLWLKQIWNDYKLKWNPSDYGGAEFMRVPAQKIWKPDIVLYNNAVGDFQVDDKTKALLKYTGEVTWIPPAIFKSSCKIDVTYFPFDYQNCTMKFGSWSYDKAKIDLVLIGSSMNLKDYWESGEWAIIKAPGYKHDIKYNCCEEIYPDITYSLYIRRLPLFYTINLIIPCLLISFLTVLVFYLPSDCGEKVTLCISVLLSLTVFLLVITETIPSTSLVIPLIGEYLLFTMIFVTLSIVITVFVLNVHYRTPTTHTMPSWVKTVFLNLLPRVMFMTRPTSNEGNAQKPRPLYGAELSNLNCFSRAESKGCKEGYPCQDGMCGYCHHRRIKISNFSANLTRSSSSESVDAVLSLSALSPEIKEAIQSVKYIAENMKAQNEAKEEQKAQEIQQLKRKEKSTETSDQEPGL

SEQ ID NO: 41231 - protein, 505 aa, Homo sapiens; identical to SEQ ID NO: 41228

SEQ ID NO: 41232 - protein, 533 aa, Homo sapiens
APEPGEAPRLDRAHPGCACAELSLLWLCCCTFTSADGDFAVTHLTKAHLFHDGRVQWTPPAIYKSSCSIDVTFFPFDQQNCTMKFGSWTYDKAKIDLVNMHSRVDQLDFWESGEWVIVDAVGTYNTRKYECCAEIYPDITYAFVIRRLPLFYTINLIIPCLLISCLTVLVFYLPSECGEKITLCISVLLSLTVFLLLITEIIPSTSLVIPLIGEYLLFTMIFVTLSIVITVFVLNVHHRSPRTHTMPTWVRRVFLDIVPRLLLMKRPSVVKDNCRRLIESMHKMASAPRFWPEPEGEPPATSGTQSLHPPSPSFCVPLDVPAEPGPSCKSPSDQLPPQQPLEAEKASPHPSPGPCRPPHGTQAPGLAKARSLSVQHMSSPGEAVEGGVRCRSRSIQYCVPRDDAAPEADGQAAGALASRNTHSAELPPPDQPSPCKCTCKKEPSSVSPSATVKTRSTKAPPPHLPLSPALTRAVEGVQYIADHLKAEDTDFSVKEDWKYVAMVIDRIFLWMFIIVCLLGTVGLFLPPWLAGMI

SEQ ID NO: 41233 - protein, 627 aa, Homo sapiens
MELGGPGAPRLLPPLLLLLGTGLLRASSHVETRAHAEERLLKKLFSGYNKWSRPVANISDVVLVRFGLSIAQLIDVDEKNQMMTTNVWVKQEWHDYKLRWDPADYENVTSIRIPSELIWRPDIVLYNNADGDFAVTHLTKAHLFHDGRVQWTPPAIYKSSCSIDVTFFPFDQQNCTMKFGSWTYDKAKIDLVNMHSRVDQLDFWESGEWVIVDAVGTYNTRKYECCAEIYPDITYAFVIRRLPLFYTINLIIPCLLISCLTVLVFYLPSECGEKITLCISVLLSLTVFLLLITEIIPSTSLVIPLIGEYLLFTMIFVTLSIVITVFVLNVHHRSPRTHTMPTWVRRVFLDIVPRLLLMKRPSVVKDNCRRLIESMHKMASAPRFWPEPEGEPPATSGTQSLHPPSPSFCVPLDVPAEPGPSCKSPSDQLPPQQPLEAEKASPHPSPGPCRPPHGTQAPGLAKARSLSVQHMSSPGEAVEGGVRCRSRSIQYCVPRDDAAPEADGQAAGALASRNTHSAELPPPDQPSPCKCTCKKEPSSVSPSATVKTRSTKAPPPHLPLSPALTRAVEGVQYIADHLKAEDTDFSVKEDWKYVAMVIDRIFLWMFIIVCLLGTVGLFLPPWLAGMI

SEQ ID NO: 41234 - protein, 556 aa, Homo sapiens
MRMSPPSASPPSSSGGRTSSSTTTAGEPFWAGVLFAIRPHPGLSGRIVWTAGCPGEGADGDFAVTHLTKAHLFHDGRVQWTPPAIYKSSCSIDVTFFPFDQQNCTMKFGSWTYDKAKIDLVNMHSRVDQLDFWESGEWVIVDAVGTYNTRKYECCAEIYPDITYAFVIRRLPLFYTINLIIPCLLISCLTVLVFYLPSECGEKITLCISVLLSLTVFLLLITEIIPSTSLVIPLIGEYLLFTMIFVTLSIVITVFVLNVHHRSPRTHTMPTWVRRVFLDIVPRLLLMKRPSVVKDNCRRLIESMHKMASAPRFWPEPEGEPPATSGTQSLHPPSPSFCVPLDVPAEPGPSCKSPSDQLPPQQPLEAEKASPHPSPGPCRPPHGTQAPGLAKARSLSVQHMSSPGEAVEGGVRCRSRSIQYCVPRDDAAPEADGQAAGALASRNTHSAELPPPDQPSPCKCTCKKEPSSVSPSATVKTRSTKAPPPHLPLSPALTRAVEGVQYIADHLKAEDTDFSVKEDWKYVAMVIDRIFLWMFIIVCLLGTVGLFLPPWLAGMI

SEQ ID NO: 41235 - protein, 468 aa, Homo sapiens
MAARGSGPRALRLLLLVQLVAGRCGLAGAAGGAQRGLSEPSSIAKHEDSLLKDLFQDYERWVRPVEHLNDKIKIKFGLAISQLVDVDEKNQLMTTNVWLKQEWIDVKLRWNPDDYGGIKVIRVPSDSVWTPDIVLFDNADGRFEGTSTKTVIRYNGTVTWTPPANYKSSCTIDVTFFPFDLQNCSMKFGSWTYDGSQVDIILEDQDVDKRDFFDNGEWEIVSATGSKGNRTDSCCWYPYVTYSFVIKRLPLFYTLFLIIPCIGLSFLTVLVFYLPSNEGEKICLCTSVLVSLTVFLLVIEEIIPSSSKVIPLIGEYLVFTMIFVTLSIMVTVFAINIHHRSSSTHNAMAPLVRKIFLHTLPKLLCMRSHVDRYFTQKEETESGSGPKSSRNTLEAALDSIRYITRHIMKENDVREVVEDWKFIAQVLDRMFLWTFLFVSIVGSLGLFVPVIYKWANILIPVHIGNANK

SEQ ID NO: 41236 - protein, 494 aa, Homo sapiens
MLTSKGQGFLHGGLCLWLCVFTPFFKGCVGCATEERLFHKLFSHYNQFIRPVENVSDPVTVHFEVAITQLANVDEVNQIMETNLWLRHIWNDYKLRWDPMEYDGIETLRVPADKIWKPDIVLYNNAVGDFQVEGKTKALLKYNGMITWTPPAIFKSSCPMDITFFPFDHQNCSLKFGSWTYDKAEIDLLIIGSKVDMNDFWENSEWEIIDASGYKHDIKYNCCEEIYTDITYSFYIRRLPMFYTINLIIPCLFISFLTVLVFYLPSDCGEKVTLCISVLLSLTVFLLVITETIPSTSLVVPLVGEYLLFTMIFVTLSIVVTVFVLNIHYRTPTTHTMPRWVKTVFLKLLPQVLLMRWPLDKTRGTGSDAVPRGLARRPAKGKLASHGEPRHLKECFHCHKSNELATSKRRLSHQPLQWVVENSEHSPEVEDVINSVQFIAENMKSHNETKEVEDDWKYVAMVVDRVFLWVFIIVCVFGTAGLFLQPLLGNTGKS

SEQ ID NO: 41237 - protein, 479 aa, Homo sapiens
MLTSKGQGFLHGGLCLWLCVFTPFFKGCVGCATEERLFHKLFSHYNQFIRPVENVSDPVTVHFEVAITQLANVIWNDYKLRWDPMEYDGIETLRVPADKIWKPDIVLYNNAVGDFQVEGKTKALLKYNGMITWTPPAIFKSSCPMDITFFPFDHQNCSLKFGSWTYDKAEIDLLIIGSKVDMNDFWENSEWEIIDASGYKHDIKYNCCEEIYTDITYSFYIRRLPMFYTINLIIPCLFISFLTVLVFYLPSDCGEKVTLCISVLLSLTVFLLVITETIPSTSLVVPLVGEYLLFTMIFVTLSIVVTVFVLNIHYRTPTTHTMPRWVKTVFLKLLPQVLLMRWPLDKTRGTGSDAVPRGLARRPAKGKLASHGEPRHLKECFHCHKSNELATSKRRLSHQPLQWVVENSEHSPEVEDVINSVQFIAENMKSHNETKEVEDDWKYVAMVVDRVFLWVFIIVCVFGTAGLFLQPLLGNTGKS

SEQ ID NO: 41238 - protein, 502 aa, Homo sapiens
MRCSPGGVWLALAASLLHVSLQGEFQRKLYKELVKNYNPLERPVANDSQPLTVYFSLSLLQIMDVDEKNQVLTTNIWLQMSWTDHYLQWNVSEYPGVKTVRFPDGQIWKPDILLYNSADERFDATFHTNVLVNSSGHCQYLPPGIFKSSCYIDVRWFPFDVQHCKLKFGSWSYGGWSLDLQMQEADISGYIPNGEWDLVGIPGKRSERFYECCKEPYPDVTFTVTMRRRTLYYGLNLLIPCVLISALALLVFLLPADSGEKISLGITVLLSLTVFMLLVAEIMPATSDSVPLIAQYFASTMIIVGLSVVVTVIVLQYHHHDPDGGKMPKWTRVILLNWCAWFLRMKRPGEDKVRPACQHKQRRCSLASVEMSAVAPPPASNGNLLYIGFRGLDGVHCVPTPDSGVVCGRMACSPTHDEHLLHGGQPPEGDPDLAKILEEVRYIANRFRCQDESEAVCSEWKFAACVVDRLCLMAFSVFTIICTIGILMSAPNFVEAVSKDFA

SEQ ID NO: 41239 - protein, 69 aa, Homo sapiens
MQKYCIYQHFQFQLLIQHLWIAANCDIWAKVARVIGLLASHKTDLQENTPVVEAFPNSPRTPTLPGVLT

SEQ ID NO: 41240 - protein, 412 aa, Homo sapiens
MQKYCIYQHFQFQLLIQHLWIAANCDIADERFDATFHTNVLVNSSGHCQYLPPGIFKSSCYIDVRWFPFDVQHCKLKFGSWSYGGWSLDLQMQEADISGYIPNGEWDLVGIPGKRSERFYECCKEPYPDVTFTVTMRRRTLYYGLNLLIPCVLISALALLVFLLPADSGEKISLGITVLLSLTVFMLLVAEIMPATSDSVPLIAQYFASTMIIVGLSVVVTVIVLQYHHHDPDGGKMPKWTRVILLNWCAWFLRMKRPGEDKVRPACQHKQRRCSLASVEMSAVAPPPASNGNLLYIGFRGLDGVHCVPTPDSGVVCGRMACSPTHDEHLLHGGQPPEGDPDLAKILEEVRYIANRFRCQDESEAVCSEWKFAACVVDRLCLMAFSVFTIICTIGILMSAPNFVEAVSKDFA

SEQ ID NO: 41241 - protein, 148 aa, Homo sapiens
MRCSPGGVWLALAASLLHVSLQGEFQRKLYKELVKNYNPLERPVANDSQPLTVYFSLSLLQIMDVDEKNQVLTTNIWLQMSWTDHYLQWNVSEYPGVKTVRFPDGQIWKPDILLYNSSYDQQQEVLAYGMHCWSPQFGPTSSSMFPVV

SEQ ID NO: 41242 - protein, 199 aa, Homo sapiens
MTNSRKCWPMGCTAGAHSLDPHPRLCSLLCIGEFCGRDGCSADERFDATFHTNVLVNSSGHCQYLPPGIFKSSCYIDVRWFPFDVQHCKLKFGSWSYGGWSLDLQMQEADISGYIPNGEWDLVGIPGKRSERFYECCKEPYPDVTFTVTMRRRTLYYGLNLLIPCVLISALALLVFLLPADSGEKISLGITVLLSLTVF

SEQ ID NO: 41243 - protein, 531 aa, Homo sapiens
MRCSPGGVWLALAASLLHGKATASPPSTPPWDPGHIPGASVRPAPGPVSLQGEFQRKLYKELVKNYNPLERPVANDSQPLTVYFSLSLLQIMDVDEKNQVLTTNIWLQMSWTDHYLQWNVSEYPGVKTVRFPDGQIWKPDILLYNSADERFDATFHTNVLVNSSGHCQYLPPGIFKSSCYIDVRWFPFDVQHCKLKFGSWSYGGWSLDLQMQEADISGYIPNGEWDLVGIPGKRSERFYECCKEPYPDVTFTVTMRRRTLYYGLNLLIPCVLISALALLVFLLPADSGEKISLGITVLLSLTVFMLLVAEIMPATSDSVPLIAQYFASTMIIVGLSVVVTVIVLQYHHHDPDGGKMPKWTRVILLNWCAWFLRMKRPGEDKVRPACQHKQRRCSLASVEMSAVAPPPASNGNLLYIGFRGLDGVHCVPTPDSGVVCGRMACSPTHDEHLLHGGQPPEGDPDLAKILEEVRYIANRFRCQDESEAVCSEWKFAACVVDRLCLMAFSVFTIICTIGILMSAPNFVEAVSKDFA

SEQ ID NO: 41244 - protein, 321 aa, Homo sapiens
MQEADISGYIPNGEWDLVGIPGKRSERFYECCKEPYPDVTFTVTMRRRTLYYGLNLLIPCVLISALALLVFLLPADSGEKISLGITVLLSLTVFMLLVAEIMPATSDSVPLIAQYFASTMIIVGLSVVVTVIVLQYHHHDPDGGKMPKWTRVILLNWCAWFLRMKRPGEDKVRPACQHKQRRCSLASVEMSAVAPPPASNGNLLYIGFRGLDGVHCVPTPDSGVVCGRMACSPTHDEHLLHGGQPPEGDPDLAKILEEVRYIANRFRCQDESEAVCSEWKFAACVVDRLCLMAFSVFTIICTIGILMSAPNFVEAVSKDFA

SEQ ID NO: 41245 - protein, 479 aa, Homo sapiens
MNWSHSCISFCWIYFAASRLRAAETADGKYAQKLFNDLFEDYSNALRPVEDTDKVLNVTLQITLSQIKDMDERNQILTAYLWIRQIWHDAYLTWDRDQYDGLDSIRIPSDLVWRPDIVLYNKADDESSEPVNTNVVLRYDGLITWDAPAITKSSCVVDVTYFPFDNQQCNLTFGSWTYNGNQVDIFNALDSGDLSDFIEDVEWEVHGMPAVKNVISYGCCSEPYPDVTFTLLLKRRSSFYIVNLLIPCVLISFLAPLSFYLPAASGEKVSLGVTILLAMTVFQLMVAEIMPASENVPLIGKYYIATMALITASTALTIMVMNIHFCGAEARPVPHWARVVILKYMSRVLFVYDVGESCLSPHHSRERDHLTKVYSKLPESNLKAARNKDLSRKKDMNKRLKNDLGCQGKNPQEAESYCAQYKVLTRNIEYIAKCLKDHKATNSKGSEWKKVAKVIDRFFMWIFFIMVFVMTILIIARAD

SEQ ID NO: 41246 - protein, 501 aa, Homo sapiens
MTPGALLMLLGALGAPLAPGVRGSEAEGRLREKLFSGYDSSVRPAREVGDRVRVSVGLILAQLISLNEKDEEMSTKVYLDLEWTDYRLSWDPAEHDGIDSLRITAESVWLPDVVLLNNNDGNFDVALDISVVVSSDGSVRWQPPGIYRSSCSIQVTYFPFDWQNCTMVFSSYSYDSSEVSLQTGLGPDGQGHQEIHIHEGTFIENGQWEIIHKPSRLIQPPGDPRGGREGQRQEVIFYLIIRRKPLFYLVNVIAPCILITLLAIFVFYLPPDAGEKMGLSIFALLTLTVFLLLLADKVPETSLSVPIIIKYLMFTMVLVTFSVILSVVVLNLHHRSPHTHQMPLWVRQIFIHKLPLYLRLKRPKPERDLMPEPPHCSSPGSGWGRGTDEYFIRKPPSDFLFPKPNRFQPELSAPDLRRFIDGPNRAVALLPELREVVSSISYIARQLQEQEDHDALKEDWQFVAMVVDRLFLWTFIIFTSVGTLVIFLDATYHLPPPDPFP

SEQ ID NO: 41247 - protein, 429 aa, Homo sapiens
MSTKVYLDLEWTDYRLSWDPAEHDGIDSLRITAESVWLPDVVLLNNNDGNFDVALDISVVVSSDGSVRWQPPGIYRSSCSIQVTYFPFDWQNCTMVFSSYSYDSSEVSLQTGLGPDGQGHQEIHIHEGTFIENGQWEIIHKPSRLIQPPGDPRGGREGQRQEVIFYLIIRRKPLFYLVNVIAPCILITLLAIFVFYLPPDAGEKMGLSIFALLTLTVFLLLLADKVPETSLSVPIIIKYLMFTMVLVTFSVILSVVVLNLHHRSPHTHQMPLWVRQIFIHKLPLYLRLKRPKPERDLMPEPPHCSSPGSGWGRGTDEYFIRKPPSDFLFPKPNRFQPELSAPDLRRFIDGPNRAVALLPELREVVSSISYIARQLQEQEDHDALKEDWQFVAMVVDRLFLWTFIIFTSVGTLVIFLDATYHLPPPDPFP

SEQ ID NO: 41248 - protein, 502 aa, Homo sapiens
MARRCGPVALLLGFGLLRLCSGVWGTDTEERLVEHLLDPSRYNKLIRPATNGSELVTVQLMVSLAQLISVHEREQIMTTNVWLTQEWEDYRLTWKPEEFDNMKKVRLPSKHIWLPDVVLYNNADGMYEVSFYSNAVVSYDGSIFWLPPAIYKSACKIEVKHFPFDQQNCTMKFRSWTYDRTEIDLVLKSEVASLDDFTPSGEWDIVALPGRRNENPDDSTYVDITYDFIIRRKPLFYTINLIIPCVLITSLAILVFYLPSDCGEKMTLCISVLLALTVFLLLISKIVPPTSLDVPLVGKYLMFTMVLVTFSIVTSVCVLNVHHRSPTTHTMAPWVKVVFLEKLPALLFMQQPRHHCARQRLRLRRRQREREGAGALFFREAPGADSCTCFVNRASVQGLAGAFGAEPAPVAGPGRSGEPCGCGLREAVDGVRFIADHMRSEDDDQSVSEDWKYVAMVIDRLFLWIFVFVCVFGTIGMFLQPLFQNYTTTTFLHSDHSAPSSK

SEQ ID NO: 41249 - protein, 458 aa, Homo sapiens
MLPDFMLVLIVLGIPSSATTGFNSIAENEDALLRHLFQGYQKWVRPVLHSNDTIKVYFGLKISQLVDVDEKNQLMTTNVWLKQEWTDHKLRWNPDDYGGIHSIKVPSESLWLPDIVLFENADGRFEGSLMTKVIVKSNGTVVWTPPASYKSSCTMDVTFFPFDRQNCSMKFGSWTYDGTMVDLILINENVDRKDFFDNGEWEILNAKGMKGNRRDGVYSYPFITYSFVLRRLPLFYTLFLIIPCLGLSFLTVLVFYLPSDEGEKLSLSTSVLVSLTVFLLVIEEIIPSSSKVIPLIGEYLLFIMIFVTLSIIVTVFVINVHHRSSSTYHPMAPWVKRLFLQKLPKLLCMKDHVDRYSSPEKEESQPVVKGKVLEKKKQKQLSDGEKVLVAFLEKAADSIRYISRHVKKEHFISQVVQDWKFVAQVLDRIFLWLFLIVSVTGSVLIFTPALKMWLHSYH

SEQ ID NO: 41250 - protein, 498 aa, Homo sapiens
MRRAPSLVLFFLVALCGRGNCRVANAEEKLMDDLLNKTRYNNLIRPATSSSQLISIKLQLSLAQLISVNEREQIMTTNVWLKQEWTDYRLTWNSSRYEGVNILRIPAKRIWLPDIVLYNNADGTYEVSVYTNLIVRSNGSVLWLPPAIYKSACKIEVKYFPFDQQNCTLKFRSWTYDHTEIDMVLMTPTASMDDFTPSGEWDIVALPGRRTVNPQDPSYVDVTYDFIIKRKPLFYTINLIIPCVLTTLLAILVFYLPSDCGEKMTLCISVLLALTFFLLLISKIVPPTSLDVPLIGKYLMFTMVLVTFSIVTSVCVLNVHHRSPSTHTMAPWVKRCFLHKLPTFLFMKRPGPDSSPARAFPPSKSCVTKPEATATSTSPSNFYGNSMYFVNPASAASKSPAGSTPVAIPRDFWLRSSGRFRQDVQEALEGVSFIAQHMKNDDEDQSVVEDWKYVAMVVDRLFLWVFMFVCVLGTVGLFLPPLFQTHAASEGPYAAQRD

SEQ ID NO: 41251 - protein, 231 aa, Homo sapiens
MRRAPSLVLFFLVALCGRGNCRVANAEEKLMDDLLNKTRYNNLIRPATSSSQLISIKLQLSLAQLISVNEREQIMTTNVWLKQEWTDYRLTWNSSRYEGVNILRIPAKRIWLPDIVLYNKSLRTGSTWLWWWTGCSCGCSCLCASWALWGSSYRPSSRPMQLLRGPTLPSVTEGPLGCGVRGCEWPGGHFAASFWVVADEALSKYVSIGHQPHQTSHSRGTGKDGGLGCPL

SEQ ID NO: 41252 - protein, 517 aa, Homo sapiens
MEGPVLTLGLLAALAVCGSWGLNEEERLIRHLFQEKGYNKELRPVAHKEESVDVALALTLSNLISLKEVEETLTTNVWIEHGWTDNRLKWNAEEFGNISVLRLPPDMVWLPEIVLENNNDGSFQISYSCNVLVYHYGFVYWLPPAIFRSSCPISVTYFPFDWQNCSLKFSSLKYTAKEITLSLKQDAKENRTYPVEWIIIDPEGFTENGEWEIVHRPARVNVDPRAPLDSPSRQDITFYLIIRRKPLFYIINILVPCVLISFMVNLVFYLPADSGEKTSVAISVLLAQSVFLLLISKRLPATSMAIPLIGKFLLFGMVLVTMVVVICVIVLNIHFRTPSTHVLSEGVKKLFLETLPELLHMSRPAEDGPSPGALVRRSSSLGYISKAEEYFLLKSRSDLMFEKQSERHGLARRLTTARRPPASSEQAQQELFNELKPAVDGANFIVNHMRDQNNYNEEKDSWNRVARTVDRLCLFVVTPVMVVGTAWIFLQGVYNQPPPQPFPGDPYSYNVQDKRFI

SEQ ID NO: 41253 - protein, 235 aa, Homo sapiens
MEGPVLTLGLLAALAVCGSWGLNEEERLIRHLFQEKGYNKELRPVAHKEESVDVALALTLSNLISLKEVEETLTTNVWIEHGWTDNRLKWNAEEFGNISVLRLPPDMVWLPEIVLENNNDGSFQISYSCNVLVYHYGFVYWLPPAIFRSSCPISVTYFPFDWQNCSLKFRERGVGDSPPAGQGQRGPQSPSGQPQPPGHHLLPHHPPQAPLLHHQHPGALRAHLLHGQPGLLPTG

SEQ ID NO: 41254 - protein, 323 aa, Homo sapiens
MLKNLETSVSCASPRTWCGSQRLCWRTTMTAPSRSPTPATCLSTTTASCTGCHLPSSAPPAPSLSPISPSTGRTAPSSSGGEKTSVAISVLLAQSVFLLLISKRLPATSMAIPLIGKFLLFGMVLVTMVVVICVIVLNIHFRTPSTHVLSEGVKKLFLETLPELLHMSRPAEDGPSPGALVRRSSSLGYISKAEEYFLLKSRSDLMFEKQSERHGLARRLTTARRPPASSEQAQQELFNELKPAVDGANFIVNHMRDQNNYNEEKDSWNRVARTVDRLCLFVVTPVMVVGTAWIFLQGVYNQPPPQPFPGDPYSYNVQDKRFI

SEQ ID NO: 41255 - protein, 235 aa, Homo sapiens; identical to SEQ ID NO: 41253

SEQ ID NO: 41256 - protein, 502 aa, Homo sapiens
MEGPVLTLGLLAALAVCGSWGLNEEERLIRHLFQEKGYNKELRPVAHKEESVDVALALTLSNLISLGWTDNRLKWNAEEFGNISVLRLPPDMVWLPEIVLENNNDGSFQISYSCNVLVYHYGFVYWLPPAIFRSSCPISVTYFPFDWQNCSLKFSSLKYTAKEITLSLKQDAKENRTYPVEWIIIDPEGFTENGEWEIVHRPARVNVDPRAPLDSPSRQDITFYLIIRRKPLFYIINILVPCVLISFMVNLVFYLPADSGEKTSVAISVLLAQSVFLLLISKRLPATSMAIPLIGKFLLFGMVLVTMVVVICVIVLNIHFRTPSTHVLSEGVKKLFLETLPELLHMSRPAEDGPSPGALVRRSSSLGYISKAEEYFLLKSRSDLMFEKQSERHGLARRLTTARRPPASSEQAQQELFNELKPAVDGANFIVNHMRDQNNYNEEKDSWNRVARTVDRLCLFVVTPVMVVGTAWIFLQGVYNQPPPQPFPGDPYSYNVQDKRFI

SEQ ID NO: 41257 - protein, 493 aa, Homo sapiens
MARAPLGVLLLLGLLGRGVGKNEELRLYHHLFNNYDPGSRPVREPEDTVTISLKVTLTNLISLNEKEETLTTSVWIGIDWQDYRLNYSKDDFGGIETLRVPSELVWLPEIVLENNIDGQFGVAYDANVLVYEGGSVTWLPPAIYRSVCAVEVTYFPFDWQNCSLIFRSQTYNAEEVEFTFAVDNDGKTINKIDIDTEAYTENGEWAIDFCPGVIRRHHGGATDGPGETDVIYSLIIRRKPLFYVINIIVPCVLISGLVLLAYFLPAQAGGQKCTVSINVLLAQTVFLFLIAQKIPETSLSVPLLGRFLIFVMVVATLIVMNCVIVLNVSQRTPTTHAMSPRLRHVLLELLPRLLGSPPPPEAPRAASPPRRASSVGLLLRAEELILKKPRSELVFEGQRHRQGTWTAAFCQSLGAAAPEVRCCVDAVNFVAESTRDQEATGEEVSDWVRMGNALDNICFWAALVLFSVGSSLIFLGAYFNRVPDLPYAPCIQP

SEQ ID NO: 41258 - protein, 517 aa, Homo sapiens
MHGGQGPLLLLLLLAVCLGAQGRNQEERLLADLMQNYDPNLRPAERDSDVVNVSLKLTLTNLISLNEREEALTTNVWIEMQWCDYRLRWDPRDYEGLWVLRVPSTMVWRPDIVLENNVDGVFEVALYCNVLVSPDGCIYWLPPAIFRSACSISVTYFPFDWQNCSLIFQSQTYSTNEIDLQLSQEDGQTIEWIFIDPEAFTENGEWAIQHRPAKMLLDPAAPAQEAGHQKVVFYLLIQRKPLFYVINIIAPCVLISSVAILIHFLPAKAGGQKCTVAINVLLAQTVFLFLVAKKVPETSQAVPLISKYLTFLLVVTILIVVNAVVVLNVSLRSPHTHSMARGVRKVFLRLLPQLLRMHVRPLAPAAVQDTQSRLQNGSSGWSITTGEEVALCLPRSELLFQQWQRQGLVAAALEKLEKGPELGLSQFCGSLKQAAPAIQACVEACNLIACARHQQSHFDNGNEEWFLVGRVLDRVCFLAMLSLFICGTAGIFLMAHYNRVPALPFPGDPRPYLPSPD

SEQ ID NO: 41259 - protein, 517 aa, Homo sapiens; identical to SEQ ID NO: 41258

SEQ ID NO: 41260 - protein, 359 aa, Homo sapiens
MVRPMLLLSLGLLAGLLPALAACPQNCHCHSDLQHVICDKVGLQKIPKVSEKTKLLNLQRNNFPVLAANSFRAMPNLVSLHLQHCQIREVAAGAFRGLKQLIYLYLSHNDIRVLRAGAFDDLTELTYLYLDHNKVTELPRGLLSPLVNLFILQLNNNKIRELRAGAFQGAKDLRWLYLSENALSSLQPGALDDVENLAKFHVDRNQLSSYPSAALSKLRVVEELKLSHNPLKSIPDNAFQSFGRYLETLWLDNTNLEKFSDGAFLGVTTLKHVHLENNRLNQLPSNFPFDSLETLALTNNPWKCTCQLRGLRRWLEAKASRPDATCASPAKFKGQHIRDTDAFRSCKFPTKRSKKAGRH

SEQ ID NO: 41261 - protein, 42 aa, Homo sapiens
  VARIANT 1: note = MOD_RES - Any amino acid
XASRPDATCASPAKFKGQHIRDTDAFRSCKFPTKRSKKAGRH

SEQ ID NO: 41262 - protein, 359 aa, Homo sapiens; identical to SEQ ID NO: 41260

SEQ ID NO: 41263 - protein, 775 aa, Homo sapiens
MRASLLLSVLRPAGPVAVGISLGFTLSLLSVTWVEEPCGPGPPQPGDSELPPRGNTNAARRPNSVQPGAEREKPGAGEGAGENWEPRVLPYHPAQPGQAAKKAVRTRYISTELGIRQRLLVAVLTSQTTLPTLGVAVNRTLGHRLERVVFLTGARGRRAPPGMAVVTLGEERPIGHLHLALRHLLEQHGDDFDWFFLVPDTTYTEAHGLARLTGHLSLASAAHLYLGRPQDFIGGEPTPGRYCHGGFGVLLSRMLLQQLRPHLEGCRNDIVSARPDEWLGRCILDATGVGCTGDHEGVHYSHLELSPGEPVQEGDPHFRSALTAHPVRDPVHMYQLHKAFARAELERTYQEIQELQWEIQNTSHLAVDGDQAAAWPVGIPAPSRPASRFEVLRWDYFTEQHAFSCADGSPRCPLRGADRADVADVLGTALEELNRRYHPALRLQKQQLVNGYRRFDPARGMEYTLDLQLEALTPQGGRRPLTRRVQLLRPLSRVEILPVPYVTEASRLTVLLPLAAAERDLAPGFLEAFATAALEPGDAAAALTLLLLYEPRQAQRVAHADVFAPVKAHVAELERRFPGARVPWLSVQTAAPSPLRLMDLLSKKHPLDTLFLLAGPDTVLTPDFLNRCRMHAISGWQAFFPMHFQAFHPAVAPPQGPGPPELGRDTGRFDRQAASEACFYNSDYVAARGRLAAASEQEEELLESLDVYELFLHFSSLHVLRAVEPALLQRYRAQTCSARLSEDLYHRCLQSVLEGLGSRTQLAMLLFEQEQGNST

SEQ ID NO: 41264 - protein, 613 aa, Homo sapiens
MAVVTLGEERPIGHLHLALRHLLEQHGDDFDWFFLVPDTTYTEAHGLARLTGHLSLASAAHLYLGRPQDFIGGEPTPGRYCHGGFGVLLSRMLLQQLRPHLEGCRNDIVSARPDEWLGRCILDATGVGCTGDHEGVHYSHLELSPGEPVQEGDPHFRSALTAHPVRDPVHMYQLHKAFARAELERTYQEIQELQWEIQNTSHLAVDGDQAAAWPVGIPAPSRPASRFEVLRWDYFTEQHAFSCADGSPRCPLRGADRADVADVLGTALEELNRRYHPALRLQKQQLVNGYRRFDPARGMEYTLDLQLEALTPQGGRRPLTRRVQLLRPLSRVEILPVPYVTEASRLTVLLPLAAAERDLAPGFLEAFATAALEPGDAAAALTLLLLYEPRQAQRVAHADVFAPVKAHVAELERRFPGARVPWLSVQTAAPSPLRLMDLLSKKHPLDTLFLLAGPDTVLTPDFLNRCRMHAISGWQAFFPMHFQAFHPAVAPPQGPGPPELGRDTGRFDRQAASEACFYNSDYVAARGRLAAASEQEEELLESLDVYELFLHFSSLHVLRAVEPALLQRYRAQTCSARLSEDLYHRCLQSVLEGLGSRTQLAMLLFEQEQGNST

SEQ ID NO: 41265 - protein, 772 aa, Homo sapiens
MRLSSLLALLRPALPLILGLSLGCSLSLLRVSWIQGEGEDPCVEAVGERGGPQNPDSRARLDQSDEDFKPRIVPYYRDPNKPYKKVLRTRYIQTELGSRERLLVAVLTSRATLSTLAVAVNRTVAHHFPRLLYFTGQRGARAPAGMQVVSHGDERPAWLMSETLRHLHTHFGADYDWFFIMQDDTYVQAPRLAALAGHLSINQDLYLGRAEEFIGAGEQARYCHGGFGYLLSRSLLLRLRPHLDGCRGDILSARPDEWLGRCLIDSLGVGCVSQHQGQQYRSFELAKNRDPEKEGSSAFLSAFAVHPVSEGTLMYRLHKRFSALELERAYSEIEQLQAQIRNLTVLTPEGEAGLSWPVGLPAPFTPHSRFEVLGWDYFTEQHTFSCADGAPKCPLQGASRADVGDALETALEQLNRRYQPRLRFQKQRLLNGYRRFDPARGMEYTLDLLLECVTQRGHRRALARRVSLLRPLSRVEILPMPYVTEATRVQLVLPLLVAEAAAAPAFLEAFAANVLEPREHALLTLLLVYGPREGGRGAPDPFLGVKAAAAELERRYPGTRLAWLAVRAEAPSQVRLMDVVSKKHPVDTLFFLTTVWTRPGPEVLNRCRMNAISGWQAFFPVHFQEFNPALSPQRSPPGPPGAGPDPPSPPGADPSRGAPIGGRFDRQASAEGCFYNADYLAARARLAGELAGQEEEEALEGLEVMDVFLRFSGLHLFRAVEPGLVQKFSLRDCSPRLSEELYHRCRLSNLEGLGGRAQLAMALFEQEQANST

SEQ ID NO: 41266 - protein, 667 aa, Homo sapiens
MRLSSLLALLRPALPLILGLSLGCSLSLLRVSWIQGEGEDPCVEAVGERGGPQNPDSRARLDQSDEDFKPRIVPYYRDPNKPYKKVLRTRYIQTELGSRERLLVAVLTSRATLSTLAVAVNRTVAHHFPRLLYFTGQRGARAPAGMQVVSHGDERPAWLMSETLRHLHTHFGADYDWFFIMQDDTYVQAPRLAALAGHLSINQDLYLGRAEEFIGAGEQARYCHGGFGYLLSRSLLLRLRPHLDGCRGDILSARPDEWLGRCLIDSLGVGCVSQHQGQQYRSFELAKNRDPEKEGSSAFLSAFAVHPVSEGTLMYRLHKRFSALELERAYSEIEQLQAQIRNLTVLTPEGEAGLSWPVGLPAPFTPHSRFEVLGWDYFTEQHTFSCADGAPKCPLQGASRADVGDALETALEQLNRRYQPRLRFQKQRLLNGYRRFDPARGMEYTLDLLLECVTQRGHRRALARRVSLLRPLSRVEILPMPYVTEATRVQLVLPLLVAEAAAAPAFLEAFAANVLEPREHALLTLLLVYGPREGGRGAPDPFLGVKAAAAELERRYPGTRLAWLAVRAEAPSQVRLMDVVSKKHPVDTLFFLTTVWTRPGPEVLNRCRMNAISGWQAFFPVHFQEFNPALSPQRSPPPNLITFPLSASAPGRARQDGGQIENCCCIF

SEQ ID NO: 41267 - protein, 2322 aa, Homo sapiens
MQSGPRPPLPAPGLALALTLTMLARLASAASFFGENHLEVPVATALTDIDLQLQFSTSQPEALLLLAAGPADHLLLQLYSGRLQVRLVLGQEELRLQTPAETLLSDSIPHTVVLTVVEGWATLSVDGFLNASSAVPGAPLEVPYGLFVGGTGTLGLPYLRGTSRPLRGCLHAATLNGRSLLRPLTPDVHEGCAEEFSASDDVALGFSGPHSLAAFPAWGTQDEGTLEFTLTTQSRQAPLAFQAGGRRGDFIYVDIFEGHLRAVVEKGQGTVLLHNSVPVADGQPHEVSVHINAHRLEISVDQYPTHTSNRGVLSYLEPRGSLLLGGLDAEASRHLQEHRLGLTPEATNASLLGCMEDLSVNGQRRGLREALLTRNMAAGCRLEEEEYEDDAYGHYEAFSTLAPEAWPAMELPEPCVPEPGLPPVFANFTQLLTISPLVVAEGGTAWLEWRHVQPTLDLMEAELRKSQVLFSVTRGARHGELELDIPGAQARKMFTLLDVVNRKARFIHDGSEDTSDQLVLEVSVTARVPMPSCLRRGQTYLLPIQVNPVNDPPHIIFPHGSLMVILEHTQKPLGPEVFQAYDPDSACEGLTFQVLGTSSGLPVERRDQPGEPATEFSCRELEAGSLVYVHRGGPAQDLTFRVSDGLQASPPATLKVVAIRPAIQIHRSTGLRLAQGSAMPILPANLSVETNAVGQDVSVLFRVTGALQFGELQKQGAGGVEGAEWWATQAFHQRDVEQGRVRYLSTDPQHHAYDTVENLALEVQVGQEILSNLSFPVTIQRATVWMLRLEPLHTQNTQQETLTTAHLEATLEEAGPSPPTFHYEVVQAPRKGNLQLQGTRLSDGQGFTQDDIQAGRVTYGATARASEAVEDTFRFRVTAPPYFSPLYTFPIHIGGDPDAPVLTNVLLVVPEGGEGVLSADHLFVKSLNSASYLYEVMERPRHGRLAWRGTQDKTTMVTSFTNEDLLRGRLVYQHDDSETTEDDIPFVATRQGESSGDMAWEEVRGVFRVAIQPVNDHAPVQTISRIFHVARGGRRLLTTDDVAFSDADSGFADAQLVLTRKDLLFGSIVAVDEPTRPIYRFTQEDLRKRRVLFVHSGADRGWIQLQVSDGQHQATALLEVQASEPYLRVANGSSLVVPQGGQGTIDTAVLHLDTNLDIRSGDEVHYHVTAGPRWGQLVRAGQPATAFSQQDLLDGAVLYSHNGSLSPRDTMAFSVEAGPVHTDATLQVTIALEGPLAPLKLVRHKKIYVFQGEAAEIRRDQLEAAQEAVPPADIVFSVKSPPSAGYLVMVSRGALADEPPSLDPVQSFSQEAVDTGRVLYLHSRPEAWSDAFSLDVASGLGAPLEGVLVELEVLPAAIPLEAQNFSVPEGGSLTLAPPLLRVSGPYFPTLLGLSLQVLEPPQHGALQKEDGPQARTLSAFSWRMVEEQLIRYVHDGSETLTDSFVLMANASEMDRQSHPVAFTVTVLPVNDQPPILTTNTGLQMWEGATAPIPAEALRSTDGDSGSEDLVYTIEQPSNGRVVLRGAPGTEVRSFTQAQLDGGLVLFSHRGTLDGGFRFRLSDGEHTSPGHFFRVTAQKQVLLSLKGSQTLTVCPGSVQPLSSQTLRASSSAGTDPQLLLYRVVRGPQLGRLFHAQQDSTGEALVNFTQAEVYAGNILYEHEMPPEPFWEAHDTLELQLSSPPARDVAATLAVAVSFEAACPQRPSHLWKNKGLWVPEGQRARITVAALDASNLLASVPSPQRSEHDVLFQVTQFPSRGQLLVSEEPLHAGQPHFLQSQLAAGQLVYAHGGGGTQQDGFHFRAHLQGPAGASVAGPQTSEAFAITVRDVNERPPQPQASVPLRLTRGSRAPISRAQLSVVDPDSAPGEIEYEVQRAPHNGFLSLVGGGLGPVTRFTQADVDSGRLAFVANGSSVAGIFQLSMSDGASPPLPMSLAVDILPSAIEVQLRAPLEVPQALGRSSLSQQQLRVVSDREEPEAAYRLIQGPQYGHLLVGGRPTSAFSQFQIDQGEVVFAFTNFSSSHDHFRVLALARGVNASAVVNVTVRALLHVWAGGPWPQGATLRLDPTVLDAGELANRTGSVPRFRLLEGPRHGRVVRVPRARTEPGGSQLVEQFTQQDLEDGRLGLEVGRPEGRAPGPAGDSLTLELWAQGVPPAVASLDFATEPYNAARPYSVALLSVPEAARTEAGKPESSTPTGEPGPMASSPEPAVAKGGFLSFLEANMFSVIIPMCLVLLLLALILPLLFYLRKRNKTGKHDVQVLTAKPRNGLAGDTETFRKVEPGQAIPLTAVPGQGPPPGGQPDPELLQFCRTPNPALKNGQYWV

SEQ ID NO: 41268 - protein, 327 aa, Homo sapiens
EQHREEPEAAYRLIQGPQYGHLLVGGRPTSAFSQFQIDQGEVVFAFTNFSSSHDHFRVLALARGVNASAVVNVTVRALLHVWAGGPWPQGATLRLDPTVLDAGELANRTGSVPRFRLLEGPRHGRVVRVPRARTEPGGSQLVEQFTQQDLEDGRLGLEVGRPEGRAPGPAGDSLTLELWAQGVPPAVASLDFATEPYNAARPYSVALLSVPEAARTEAGKPESSTPTGEPGPMASSPEPAVAKGGFLSFLEANMFSVIIPMCLVLLLLALILPLLFYLRKRNKTGKHDVQVLTAKPRNGLAGDTETFRKVEPGQAIPLTAVPGQGPP

SEQ ID NO: 41269 - protein, 802 aa, Homo sapiens
MAARGRRAWLSVLLGLVLGFVLASRLVLPRASELKRAGPRRRASPEGCRSGQAAASQAGGARGDARGAQLWPPGSDPDGGPRDRNFLFVGVMTAQKYLQTRAVAAYRTWSKTIPGKVQFFSSEGSDTSVPIPVVPLRGVDDSYPPQKKSFMMLKYMHDHYLDKYEWFMRADDDVYIKGDRLENFLRSLNSSEPLFLGQTGLGTTEEMGKLALEPGENFCMGGPGVIMSREVLRRMVPHIGKCLREMYTTHEDVEVGRCVRRFAGVQCVWSYEMQQLFYENYEQNKKGYIRDLHNSKIHQAITLHPNKNPPYQYRLHSYMLSRKISELRHRTIQLHREIVLMSKYSNTEIHKEDLQLGIPPSFMRFQPRQREEILEWEFLTGKYLYSAVDGQPPRRGMDSAQREALDDIVMQVMEMINANAKTRGRIIDFKEIQYGYRRVNPMYGAEYILDLLLLYKKHKGKKMTVPVRRHAYLQQTFSKIQFVEHEELDAQELAKRINQESGSLSFLSNSLKKLVPFQLPGSKSEHKEPKDKKINILIPLSGRFDMFVRFMGNFEKTCLIPNQNVKLVVLLFNSDSNPDKAKQVELMRDYRIKYPKADMQILPVSGEFSRALALEVGSSQFNNESLLFFCDVDLVFTTEFLQRCRANTVLGQQIYFPIIFSQYDPKIVYSGKVPSDNHFAFTQKTGFWRNYGFGITCIYKGDLVRVGGFDVSIQGWGLEDVDLFNKVVQAGLKTFRSQEVGVVHVHHPVFCDPNLDPKQYKMCLGSKASTYGSTQQLAEMWLEKNDPSYSKSSNNNGSVRTA

SEQ ID NO: 41270 - protein, 882 aa, Homo sapiens
MAVRSRRPWMSVALGLVLGFTAASWLIAPRVAELSERKRRGSSLCSYYGRSAAGPRAGAQQPLPQPQSRPRQEQSPPPARQDLQGPPLPEAAPGITSFRSSPWQQPPPLQQRRRGREPEGATGLPGAPAAEGEPEEEDGGAAGQRRDGRPGSSHNGSGDGGAAAPSARPRDFLYVGVMTAQKYLGSRALAAQRTWARFIPGRVEFFSSQQPPNAGQPPPPLPVIALPGVDDSYPPQKKSFMMIKYMHDHYLDKYEWFMRADDDVYIKGDKLEEFLRSLNSSKPLYLGQTGLGNIEELGKLGLEPGENFCMGGPGMIFSREVLRRMVPHIGECLREMYTTHEDVEVGRCVRRFGGTQCVWSYEMQQLFHENYEHNRKGYIQDLHNSKIHAAITLHPNKRPAYQYRLHNYMLSRKISELRYRTIQLHRESALMSKLSNTEVSKEDQQLGVIPSFNHFQPRERNEVIEWEFLTGKLLYSAAENQPPRQSLSSILRTALDDTVLQVMEMINENAKSRGRLIDFKEIQYGYRRVNPMHGVEYILDLLLLYKRHKGRKLTVPVRRHAYLQQLFSKPFFRETEELDVNSLVESINSETQSFSFISNSLKILSSFQGAKEMGGHNEKKVHILVPLIGRYDIFLRFMENFENMCLIPKQNVKLVIILFSRDSGQDSSKHIELIKGYQNKYPKAEMTLIPMKGEFSRGLGLEMASAQFDNDTLLLFCDVDLIFREDFLQRCRDNTIQGQQVYYPIIFSQYDPKVTNGGNPPTDDYFIFSKKTGFWRDYGYGITCIYKSDLLGAGGFDTSIQGWGLEDVDLYNKVILSGLRPFRSQEVGVVHIFHPVHCDPNLDPKQYKMCLGSKASTFASTMQLAELWLEKHLGVRYNRTLS

SEQ ID NO: 41271 - protein, 955 aa, Homo sapiens
MPSLPAPPAPLLLLGLLLLGSRPARGAGPEPPVLPIRSEKEPLPVRGAAGCTFGGKVYALDETWHPDLGEPFGVMRCVLCACEAPQWGRRTRGPGRVSCKNIKPECPTPACGQPRQLPGHCCQTCPQERSSSERQPSGLSFEYPRDPEHRSYSDRGEPGAEERARGDGHTDFVALLTGPRSQAVARARVSLLRSSLRFSISYRRLDRPTRIRFSDSNGSVLFEHPAAPTQDGLVCGVWRAVPRLSLRLLRAEQLHVALVTLTHPSGEVWGPLIRHRALAAETFSAILTLEGPPQQGVGGITLLTLSDTEDSLHFLLLFRGLLEPRSGGLTQVPLRLQILHQGQLLRELQANVSAQEPGFAEVLPNLTVQEMDWLVLGELQMALEWAGRPGLRISGHIAARKSCDVLQSVLCGADALIPVQTGAAGSASLTLLGNGSLIYQVQVVGTSSEVVAMTLETKPQRRDQRTVLCHMAGLQPGGHTAVGICPGLGARGAHMLLQNELFLNVGTKDFPDGELRGHVAALPYCGHSARHDTLPVPLAGALVLPPVKSQAAGHAWLSLDTHCHLHYEVLLAGLGGSEQGTVTAHLLGPPGTPGPRRLLKGFYGSEAQGVVKDLEPELLRHLAKGMASLMITTKGSPRGELRGQVHIANQCEVGGLRLEAAGAEGVRALGAPDTASAAPPVVPGLPALAPAKPGGPGRPRDPNTCFFEGQQRPHGARWAPNYDPLCSLCTCQRRTVICDPVVCPPPSCPHPVQAPDQCCPVCPEKQDVRDLPGLPRSRDPGEGCYFDGDRSWRAAGTRWHPVVPPFGLIKCAVCTCKGGTGEVHCEKVQCPRLACAQPVRVNPTDCCKQCPVGSGAHPQLGDPMQADGPRGCRFAGQWFPESQSWHPSVPPFGEMSCITCRCGAGVPHCERDDCSLPLSCGSGKESRCCSRCTAHRRPAPETRTDPELEKEAEGS

SEQ ID NO: 41272 - protein, 94 aa, Homo sapiens
MPSLPAPPAPLLLLGLLLLGSRPARGAGPEPPVLPIRSEKEPLPVRGAAGCTFGGKVYALDETWHPDLGEPFGVMRCVLCACEATGTLRPREMK

SEQ ID NO: 41273 - protein, 503 aa, Homo sapiens
GEHLSQKGPHVRPCRTNPGSLEAPDSTPGAATARTSGQCLSPGEWGSGSRCHLSWPLAIAHHTLLCPQEPGFAEVLPNLTVQEMDWLVLGELQMALEWAGRPGLRISGHIAARKSCDVLQSVLCGADALIPVQTGAAGSASLTLLGNGSLIYQVQVVGTSSEVVAMTLETKPQRRDQRTVLCHMAGLQPGGHTAVGICPGLGARGAHMLLQNELFLNVGTKDFPDGELRGHVAALPYCGHSARHDTLPVPLAGALVLPPVKSQAAGHAWLSLDTHCHLHYEVLLAGLGGSEQGTVTAHLLGPPGTPGPRRLLKGFYGSEAQGVVKDLEPELLRHLAKGMASLMITTKGSPRGELRGQVHIANQCEVGGLRLEAAGAEGVRALGAPDTASAAPPVVPGLPALAPAKPGGPGRPRDPNTCFFEGQQRPHGARWAPNYDPLCSLCTCQRRTVICDPVVCPPPSCPHPVQAPDQCCPVCPEKQDVRDLPGLPRSRDPGEGGHWRGAL

SEQ ID NO: 41274 - protein, 915 aa, Homo sapiens
MPSLPAPPAPLLLLGLLLLGSRPARGAGPEPPVLPIRSEKEPLPVRGAAGCTFGGKVYALDETWHPDLGEPFGVMRCVLCACEAPQWGRRTRGPGRVSCKNIKPECPTPACGQPRQLPGHCCQTCPQERSSSERQPSGLSFEYPRDPEHRSYSDRGEPGAEERARGDGHTDFVALLTGPRSQAVARARVSLLRSSLRFSISYRRLDRPTRIRFSDSNGSVLFEHPAAPTQDGLVCGVWRAVPRLSLRLLRAEQLHVALVTLTHPSGEVWGPLIRHRALAAETFSAILTLEGPPQQGVGGITLLTLSDTEDSLHFLLLFRGLLEPRSGGLTQVPLRLQILHQGQLLRELQANVSAQEPGFAEVLPNLTVQEMDWLVLGELQMALEWAGRPGLRISGHIAARKSCDVLQSVLCGADALIPVQTGAAGSASLTLLGNGSLIYQAVGICPGLGARGAHMLLQNELFLNVGTKDFPDGELRGHVAALPYCGHSARHDTLPVPLAGALVLPPVKSQAAGHAWLSLDTHCHLHYEVLLAGLGGSEQGTVTAHLLGPPGTPGPRRLLKGFYGSEAQGVVKDLEPELLRHLAKGMASLMITTKGSPRGELRGQVHIANQCEVGGLRLEAAGAEGVRALGAPDTASAAPPVVPGLPALAPAKPGGPGRPRDPNTCFFEGQQRPHGARWAPNYDPLCSLCTCQRRTVICDPVVCPPPSCPHPVQAPDQCCPVCPEKQDVRDLPGLPRSRDPGEGCYFDGDRSWRAAGTRWHPVVPPFGLIKCAVCTCKGGTGEVHCEKVQCPRLACAQPVRVNPTDCCKQCPVGSGAHPQLGDPMQADGPRGCRFAGQWFPESQSWHPSVPPFGEMSCITCRCGAGVPHCERDDCSLPLSCGSGKESRCCSRCTAHRRPAPETRTDPELEKEAEGS

SEQ ID NO: 41275 - protein, 497 aa, Homo sapiens
MDWLVLGELQMALEWAGRPGLRISGHIAARKSCDVLQSVLCGADALIPVQTGAAGSASLTLLGNGSLIYQVQVVGTSSEVVAMTLETKPQRRDQRTVLCHMAGLQPGGHTAVGICPGLGARGAHMLLQNELFLNVGTKDFPDGELRGHVAALPYCGHSARHDTLPVPLAGALVLPPVKSQAAGHAWLSLDTHCHLHYEVLLAGLGGSEQGTVTAHLLGPPGTPGPRRLLKGFYGSEAQGVVKDLEPELLRHLAKGMASLMITTKGSPRGELRGQRRTVICDPVVCPPPSCPHPVQAPDQCCPVCPEKQDVRDLPGLPRSRDPGEGCYFDGDRSWRAAGTRWHPVVPPFGLIKCAVCTCKGGTGEVHCEKVQCPRLACAQPVRVNPTDCCKQCPVGSGAHPQLGDPMQADGPRGCRFAGQWFPESQSWHPSVPPFGEMSCITCRCGAGVPHCERDDCSLPLSCGSGKESRCCSRCTAHRRPAPETRTDPELEKEAEGS

SEQ ID NO: 41276 - protein, 456 aa, Homo sapiens
MRKKWKMGGMKYIFSLLFFLLLEGGKTEQVKHSETYCMFQDKKYRVGERWHPYLEPYGLVYCVNCICSENGNVLCSRVRCPNVHCLSPVHIPHLCCPRCPDSLPPVNNKVTSKSCEYNGTTYQHGELFVAEGLFQNRQPNQCTQCSCSEGNVYCGLKTCPKLTCAFPVSVPDSCCRVCRGDGELSWEHSDGDIFRQPANREARHSYHRSHYDPPPSRQAGGLSRFPGARSHRGALMDSQQASGTIVQIVINNKHKHGQVCVSNGKTYSHGESWHPNLRAFGIVECVLCTCNVTKQECKKIHCPNRYPCKYPQKIDGKCCKVCPGKKAKELPGQSFDNKGYFCGEETMPVYESVFMEDGETTRKIALETERPPQVEVHVWTIRKGILQHFHIEKISKRMFEELPHFKLVTRTTLSQWKIFTEGEAQISQMCSSRVCRTELEDLVKVLYLERSEKGHC

SEQ ID NO: 41277 - protein, 458 aa, Homo sapiens
MRKKWKMGGMKYIFSLLFFLLLEGGKTEQVKHSETYCMFQDKKYRVGERWHPYLEPYGLVYCVNCICSENGNVLCSRVRCPNVHCLSPVHIPHLCCPRCPEDSLPPVNNKVTSKSCEYNGTTYQHGELFVAEGLFQNRQPNQCTQCSCSEGNVYCGLKTCPKLTCAFPVSVPDSCCRVCRGDGELSWEHSDGDIFRQPANREARHSYHRSHYDPPPSRQAGGLSRFPGARSHRGALMDSQQASGTIVQIVINNKHKHGQVCVSNGKTYSHGESWHPNLRAFGIVECVLCTCNVTKQECKKIHCPNRYPCKYPQKIDGKCCKVCPGKKAKEELPGQSFDNKGYFCGEETMPVYESVFMEDGETTRKIALETERPPQVEVHVWTIRKGILQHFHIEKISKRMFEELPHFKLVTRTTLSQWKIFTEGEAQISQMCSSRVCRTELEDLVKVLYLERSEKGHC

SEQ ID NO: 41278 - protein, 450 aa, Homo sapiens
MGGMKYIFSLLFFLLLEGGKTEQVKHSETYCMFQDKKYRVGERWHPYLEPYGLVYCVNCICSENGNVLCSRVRCPNVHCLSPVHIPHLCCPRCPDSLPPVNNKVTSKSCEYNGTTYQHGELFVAEGLFQNRQPNQCTQCSCSEGNVYCGLKTCPKLTCAFPVSVPDSCCRVCRGDGELSWEHSDGDIFRQPANREARHSYHRSHYDPPPSRQAGGLSRFPGARSHRGALMDSQQASGTIVQIVINNKHKHGQVCVSNGKTYSHGESWHPNLRAFGIVECVLCTCNVTKQECKKIHCPNRYPCKYPQKIDGKCCKVCPGKKAKELPGQSFDNKGYFCGEETMPVYESVFMEDGETTRKIALETERPPQVEVHVWTIRKGILQHFHIEKISKRMFEELPHFKLVTRTTLSQWKIFTEGEAQISQMCSSRVCRTELEDLVKVLYLERSEKGHC

SEQ ID NO: 41279 - protein, 456 aa, Homo sapiens; identical to SEQ ID NO: 41276

SEQ ID NO: 41280 - protein, 377 aa, Homo sapiens
MRKKWKMGGMKYIFSLLFFLLLEGGKTEQVKHSETYCMFQDKKYRVGERWHPYLEPYGLVYCVNCICSENGNVLCSRVRCPNVHCLSPVHIPHLCCPRCPGDGELSWEHSDGDIFRQPANREARHSYHRSHYDPPPSRQAGGLSRFPGARSHRGALMDSQQASGTIVQIVINNKHKHGQVCVSNGKTYSHGESWHPNLRAFGIVECVLCTCNVTKQECKKIHCPNRYPCKYPQKIDGKCCKVCPGKKAKELPGQSFDNKGYFCGEETMPVYESVFMEDGETTRKIALETERPPQVEVHVWTIRKGILQHFHIEKISKRMFEELPHFKLVTRTTLSQWKIFTEGEAQISQMCSSRVCRTELEDLVKVLYLERSEKGHC

SEQ ID NO: 41281 - protein, 457 aa, Homo sapiens
MRKKWKMGGMKYIFSLLFFLLLEGGKTEQVKHSETYCMFQDKKYRVGERWHPYLEPYGLVYCVNCICSENGNVLCSRVRCPNVHCLSPVHIPHLCCPRCPDSLPPVNNKVTSKSCEYNGTTYQHGELFVAEGLFQNRQPNQCTQCSCSEGNVYCGLKTCPKLTCAFPVSVPDSCCRVCRGDGELSWEHSDGDIFRQPANREARHSYHRSHYDPPPSRQAGGLSRFPGARSHRGALMDSQQASGTIVQIVINNKHKHGQVCVSNGKTYSHGESWHPNLRAFGIVECVLCTCNVTKQECKKIHCPNRYPCKYPQKIDGKCCKVCPGKKAKEELPGQSFDNKGYFCGEETMPVYESVFMEDGETTRKIALETERPPQVEVHVWTIRKGILQHFHIEKISKRMFEELPHFKLVTRTTLSQWKIFTEGEAQISQMCSSRVCRTELEDLVKVLYLERSEKGHC

SEQ ID NO: 41282 - protein, 378 aa, Homo sapiens
MRKKWKMGGMKYIFSLLFFLLLEGGKTEQVKHSETYCMFQDKKYRVGERWHPYLEPYGLVYCVNCICSENGNVLCSRVRCPNVHCLSPVHIPHLCCPRCPGDGELSWEHSDGDIFRQPANREARHSYHRSHYDPPPSRQAGGLSRFPGARSHRGALMDSQQASGTIVQIVINNKHKHGQVCVSNGKTYSHGESWHPNLRAFGIVECVLCTCNVTKQECKKIHCPNRYPCKYPQKIDGKCCKVCPGKKAKEELPGQSFDNKGYFCGEETMPVYESVFMEDGETTRKIALETERPPQVEVHVWTIRKGILQHFHIEKISKRMFEELPHFKLVTRTTLSQWKIFTEGEAQISQMCSSRVCRTELEDLVKVLYLERSEKGHC

SEQ ID NO: 41283 - protein, 451 aa, Homo sapiens
MVPEVRVLSSLLGLALLWFPLDSHARARPDMFCLFHGKRYSPGESWHPYLEPQGLMYCLRCTCSEGAHVSCYRLHCPPVHCPQPVTEPQQCCPKCVEPHTPSGLRAPPKSCQHNGTMYQHGEIFSAHELFPSRLPNQCVLCSCTEGQIYCGLTTCPEPGCPAPLPLPDSCCQACKDEASEQSDEEDSVQSLHGVRHPQDPCSSDAGRKRGPGTPAPTGLSAPLSFIPRHFRPKGAGSTTVKIVLKEKHKKACVHGGKTYSHGEVWHPAFRAFGPLPCILCTCEDGRQDCQRVTCPTEYPCRHPEKVAGKCCKICPEDKADPGHSEISSTRCPKAPGRVLVHTSVSPSPDNLRRFALEHEASDLVEIYLWKLVKDEETEAQRGEVPGPRPHSQNLPLDSDQESQEARLPERGTALPTARWPPRRSLERLPSPDPGAEGHGQSRQSDQDITKT

SEQ ID NO: 41284 - protein, 281 aa, Homo sapiens
MYQHGEIFSAHELFPSRLPNQCVLCSCTEGQIYCGLTTCPEPGCPAPLPLPDSCCQACKAGSSWGLLCSVSDFHPSCHLQRHPQDPCSSDAGRKRGPGTPAPTGLSAPLSFIPRHFRPKGAGSTTVKIVLKEKHKKACVHGGKTYSHGEVWHPAFRAFGPLPCILCTCEDGRQDCQRVTCPTEYPCRHPEKVAGKCCKICPEDKADPGHSEISSTRCPKAPGRVLVHTSVSPSPDNLRRFALEHEASDLVEIYLWKLVKGVFLAQTLELKVTASPDKVTKT

SEQ ID NO: 41285 - protein, 429 aa, Homo sapiens
MVPEVRVLSSLLGLALLWFPLDSHARARPDMFCLFHGKRYSPGESWHPYLEPQGLMYCLRCTCSEGAHVSCYRLHCPPVHCPQPVTEPQQCCPKCVEPHTPSGLRAPPKSCQHNGTMYQHGEIFSAHELFPSRLPNQCVLCSCTEGQIYCGLTTCPEPGCPAPLPLPDSCCQACKDEASEQSDEEDSVQSLHGVRHPQDPCSSDAGRKRGPGTPAPTGLSAPLSFIPRHFRPKGAGSTTVKIVLKEKHKKACVHGGKTYSHGEVWHPAFRAFGPLPCILCTCEDGRQDCQRVTCPTEYPCRHPEKVAGKCCKICPEDKADPGHSEISSTRCPKAPGRVLVHTSVSPSPDNLRRFALEHEASDLVEIYLWKLVKGIFHLTQIKKVRKQDFQKEAQHFRLLAGPHEGHWNVFLAQTLELKVTASPDKVTKT

SEQ ID NO: 41286 - protein, 279 aa, Homo sapiens
MYQHGEIFSAHELFPSRLPNQCVLCSCTEGQIYCGLTTCPEPGCPAPLPLPDSCCQACKDEASEQSDEEDSVQSLHGVRHPQDPCSSDAGRKRGPGTPAPTGLSAPLSFIPRHFRPKGAGSTTVKIVLKEKHKKACVHGGKTYSHGEVWHPAFRAFGPLPCILCTCEDGRQDCQRVTCPTEYPCRHPEKVAGKCCKICPEDKADPGHSEISSTRCPKAPGRVLVHTSVSPSPDNLRRFALEHEASDLVEIYLWKLVKDVFLAQTLELKVTASPDKVTKT

SEQ ID NO: 41287 - protein, 165 aa, Homo sapiens
MEMFQGLLLLLLLSMGGTWASKEPLRPRCRPINATLAVEKEGCPVCITVNTTICAGYCPTMTRVLQGVLPALPQVVCNYRDVRFESIRLPGCPRGVNPVVSYAVALSCQCALCRRSTTDCGGPKDHPLTCDDPRFQDSSSSKAPPPSLPSPSRLPGPSDTPILPQ

SEQ ID NO: 41288 - protein, 168 aa, Homo sapiens
APRMEMFQGLLLLLLLSMGGTWASKEPLRPRCRPINATLAVEKEGCPVCITVNTTICAGYCPTMTRVLQGVLPALPQVVCNYRDVRFESIRLPGCPRGVNPVVSYAVALSCQCALCRRSTTDCGGPKDHPLTCDDPRFQDSSSSKAPPPSLPSPSRLPGPSDTPILPQ

SEQ ID NO: 41289 - protein, 217 aa, Homo sapiens
MAPGSRTSLLLAFALLCLPWLQEAGAVQTVPLSRLFDHAMLQAHRAHQLAIDTYQEFEETYIPKDQKYSFLHDSQTSFCFSDSIPTPSNMEETQQKSNLELLRISLLLIESWLEPVRFLRSMFANNLVYDTSDSDDYHLLKDLEEGIQTLMGRLEDGSRRTGQILKQTYSKFDTNSHNHDALLKNYGLLYCFRKDMDKVETFLRMVQCRSVEGSCGF

SEQ ID NO: 41290 - protein, 256 aa, Homo sapiens
MAPGSRTSLLLAFALLCLPWLQEAGAVQTVPLSRLFDHAMLQAHRAHQLAIDTYQEFEETYIPKDQKYSFLHDSQTSFCFSDSIPTPSNMEETQQKSNLELLRISLLLIESWLEPVRFLRSMFANNLVYDTSDSDDYHLLKDLEEGIQTLMGVRVAPGVTNPGTPLASRAGGEKYCCPLFSSKALTQENSPYSSFRLVNPPGLSLHPEGEGGKWINERGREQCPSAWPLLLFLHFAEAGRRQPPDWADPQADLQQV

SEQ ID NO: 41291 - protein, 122 aa, Homo sapiens
MAPGSRTSLLLAFALLCLPWLQEAGAVQTVPLSRLFDHAMLQAHRAHQLAIDTYQEFRLEDGSRRTGQILKQTYSKFDTNSHNHDALLKNYGLLYCFRKDMDKVETFLRMVQCRSVEGSCGF

SEQ ID NO: 41292 - protein, 183 aa, Homo sapiens
MAPGSRTSLLLAFALLCLPWLQEAETYIPKDQKYSFLHDSQTSFCFSDSIPTPSNMEETQQKSNLELLRISLLLIESWLEPVRFLRSMFANNLVYDTSDSDDYHLLKDLEEGIQTLMGRLEDGSRRTGQILKQTYSKFDTNSHNHDALLKNYGLLYCFRKDMDKVETFLRMVQCRSVEGSCGF

SEQ ID NO: 41293 - protein, 167 aa, Homo sapiens
MAAGSRTSLLLAFALLCLPWLQEAGAVQTVPLSRLFDHAMLQAHRAHQLAIDTYQEFEETYIPKDQKYSFLHDSQTSFCFSDSIPTPSNMEETQQKSNLELLRISLLLIESWLEPVRFLRSMFANNLVYDTSDSDDYHLLKDLEEGIQTLMGVRVAPGVANPGTPLA

SEQ ID NO: 41294 - protein, 122 aa, Homo sapiens
MAAGSRTSLLLAFALLCLPWLQEAGAVQTVPLSRLFDHAMLQAHRAHQLAIDTYQEFRLEDGSRRTGQILKQTYSKFDTNSHNHDALLKNYGLLYCFRKDMDKVETFLRMVQCRSVEGSCGF

SEQ ID NO: 41295 - protein, 217 aa, Homo sapiens
MAAGSRTSLLLAFALLCLPWLQEAGAVQTVPLSRLFDHAMLQAHRAHQLAIDTYQEFEETYIPKDQKYSFLHDSQTSFCFSDSIPTPSNMEETQQKSNLELLRISLLLIESWLEPVRFLRSMFANNLVYDTSDSDDYHLLKDLEEGIQTLMGRLEDGSRRTGQILKQTYSKFDTNSHNHDALLKNYGLLYCFRKDMDKVETFLRMVQCRSVEGSCGF

SEQ ID NO: 41296 - protein, 160 aa, Homo sapiens
MAAGSRTSLLLAFALLCLPWLQEADSIPTPSNMEETQQKSNLELLRISLLLIESWLEPVRFLRSMFANNLVYDTSDSDDYHLLKDLEEGIQTLMGRLEDGSRRTGQILKQTYSKFDTNSHNHDALLKNYGLLYCFRKDMDKVETFLRMVQCRSVEGSCGF

SEQ ID NO: 41297 - protein, 165 aa, Homo sapiens
  VARIANT 1: note = MOD_RES - Any amino acid
XGSRTSLLLAFALLCLPWLQEAGAVQTVPLSRLFDHAMLQAHRAHQLAIDTYQEFEETYIPKDQKYSFLHDSQTSFCFSDSIPTPSNMEETQQKSNLELLRISLLLIESWLEPVRFLRSMFANNLVYDTSDSDDYHLLKDLEEGIQTLMGVRVAPGVANPGTPLA

SEQ ID NO: 41298 - protein, 222 aa, Homo sapiens
MAAGSRTSLLLAFALLCLPWLQEAGAVQTVPLSRLFKEAMLQAHRAHQLAIDTYQEFISSWGMEAYITKEQKYSFLHDSQTSFCFSDSIPTSSNMEETQQKSNLELLHISLLLIESRLEPVRFLRSTFTNNLVYDTSDSDDYHLLKDLEEGIQMLMGRLEDGSHLTGQTLKQTYSKFDTNSHNHDALLKNYGLLHCFRKDMDKVETFLRMVQCRSVEGSCGF

SEQ ID NO: 41299 - protein, 128 aa, Homo sapiens
MEETQQKSNLELLHISLLLIESRLEPVRFLRSTFTNNLVYDTSDSDDYHLLKDLEEGIQMLMGRLEDGSHLTGQTLKQTYSKFDTNSHNHDALLKNYGLLHCFRKDMDKVETFLRMVQCRSVEGSCGF

SEQ ID NO: 41300 - protein, 173 aa, Homo sapiens
MATGSRTSLLLAFALLCLPWLQEAGAVQTVPLSRLFKEAMLQAHRAHQLAIDTYQEFISSWGMGAGQGWQEGVTFPHWGSNGRRLRSSGLFSEAKMQADEHRLSQVPRRVTVGAGLQHRKQWSFLVGGPSPRKKPISQRNRSIHSCMTPRPPSASQTLFRHPPTWRKRSRNPT

SEQ ID NO: 41301 - protein, 139 aa, Homo sapiens
MAADSIPTSSNMEETQQKSNLELLHISLLLIESRLEPVRFLRSTFTNNLVYDTSDSDDYHLLKDLEEGIQMLMGRLEDGSHLTGQTLKQTYSKFDTNSHNHDALLKNYGLLHCFRKDMDKVETFLRMVQCRSVEGSCGF

SEQ ID NO: 41302 - protein, 653 aa, Homo sapiens
MADTLPSEFDVIVIGTGLPESIIAAACSRSGRRVLHVDSRSYYGGNWASFSFSGLLSWLKEYQENSDIVSDSPVWQDQILENEEAIALSRKDKTIQHVEVFCYASQDLHEDVEEAGALQKNHALVTSANSTEAADSAFLPTEDESLSTMSCEMLTEQTPSSDPENALEVNGAEVTGEKENHCDDKTCVPSTSAEDMSENVPIAEDTTEQPKKNRITYSQIIKEGRRFNIDLVSKLLYSRGLLIDLLIKSNVSRYAEFKNITRILAFREGRVEQVPCSRADVFNSKQLTMVEKRMLMKFLTFCMEYEKYPDEYKGYEEITFYEYLKTQKLTPNLQYIVMHSIAMTSETASSTIDGLKATKNFLHCLGRYGNTPFLFPLYGQGELPQCFCRMCAVFGGIYCLRHSVQCLVVDKESRKCKAIIDQFGQRIISEHFLVEDSYFPENMCSRVQYRQISRAVLITDRSVLKTDSDQQISILTVPAEEPGTFAVRVIELCSSTMTCMKGTYLVHLTCTSSKTAREDLESVVQKLFVPYTEMEIENEQVEKPRILWALYFNMRDSSDISRSCYNDLPSNVYVCSGPDCGLGNDNAVKQAETLFQEICPNEDFCPPPPNPEDIILDGDSLQPEASESSAIPEANSETFKESTNLGNLEESSE

SEQ ID NO: 41303 - protein, 110 aa, Homo sapiens
MADTLPSEFDVIVIGTGLPESIIAAACSRSGRRVLHVDSRSYYGGNWASFSFSGLLSWLKEYQENSDIVSDSPVWQDQILENEEAIALSRKDKTIQHVEVFCYARSTLLL

SEQ ID NO: 41304 - protein, 505 aa, Homo sapiens
MSCEMLTEQTPSSDPENALEVNGAEVTGEKENHCDDKTCVPSTSAEDMSENVPIAEDTTEQPKKNRITYSQIIKEGRRFNIDLVSKLLYSRGLLIDLLIKSNVSRYAEFKNITRILAFREGRVEQVPCSRADVFNSKQLTMVEKRMLMKFLTFCMEYEKYPDEYKGYEEITFYEYLKTQKLTPNLQYIVMHSIAMTSETASSTIDGLKATKNFLHCLGRYGNTPFLFPLYGQGELPQCFCRMCAVFGGIYCLRHSVQCLVVDKESRKCKAIIDQFGQRIISEHFLVEDSYFPENMCSRVQYRQISRAVLITDRSVLKTDSDQQISILTVPAEEPGTFAVRVIELCSSTMTCMKGTYLVHLTCTSSKTAREDLESVVQKLFVPYTEMEIENEQVEKPRILWALYFNMRDSSDISRSCYNDLPSNVYVCSGPDCGLGNDNAVKQAETLFQEICPNEDFCPPPPNPEDIILDGDSLQPEASESSAIPEANSETFKESTNLGNLEESSE

SEQ ID NO: 41305 - protein, 656 aa, Homo sapiens
MADNLPTEFDVVIIGTGLPESILAAACSRSGQRVLHIDSRSYYGGNWASFSFSGLLSWLKEYQQNNDIGEESTVVWQDLIHETEEAITLRKKDETIQHTEAFCYASQDMEDNVEEIGALQKNPSLGVSNTFTEVLDSALPEESQLSYFNSDEMPAKHTQKSDTEISLEVTDVEESVEKEKYCGDKTCMHTVSDKDGDKDESKSTVEDKADEPIRNRITYSQIVKEGRRFNIDLVSKLLYSQGLLIDLLIKSDVSRYVEFKNVTRILAFREGKVEQVPCSRADVFNSKELTMVEKRMLMKFLTFCLEYEQHPDEYQAFRQCSFSEYLKTKKLTPNLQHFVLHSIAMTSESSCTTIDGLNATKNFLQCLGRFGNTPFLFPLYGQGEIPQGFCRMCAVFGGIYCLRHKVQCFVVDKESGRCKAIIDHFGQRINAKYFIVEDSYLSEETCSNVQYKQISRAVLITDQSILKTDLDQQTSILIVPPAEPGACAVRVTELCSSTMTCMKDTYLVHLTCSSSKTAREDLESVVKKLFTPYTETEINEEELTKPRLLWALYFNMRDSSGISRSSYNGLPSNVYVCSGPDCGLGNEHAVKQAETLFQEIFPTEEFCPPPPNPEDIIFDGDDKQPEAPGTNNVVMAKLESSEESKNLESPEKHLQN

SEQ ID NO: 41306 - protein, 546 aa, Homo sapiens
MEQRRVTDFFARRRPGPPRIAPPKLACRTPSPARPALRAPASATSGSRKRARPPAAPGRDQARPPARRRLRLSVDEVSSPSTPEAPDIPACPSPGQKIKKSTPAAGQPPHLTSAQDQDTISELASCLQRARELGARVRALKASAQDAGESCTPEAEGRPEEPCGEKAPAYQRFHALAQPGLPGLVLPYKYQVLAEMFRSMDTIVGMLHNRSETPTFAKVQRGVQDMMRRRFEECNVGQIKTVYPASYRFRQERSVPTFKDGTRRSDYQLTIEPLLEQEADGAAPQLTASRLLQRRQIFSQKLVEHVKEHHKAFLASLSPAMVVPEDQLTRWHPRFNVDEVPDIEPAALPQPPATEKLTTAQEVLARARNLISPRMEKALSQLALRSAAPSSPGSPRPALPATPPATPPAASPSALKGVSQDLLERIRAKEAQKQLAQMTRCPEQEQRLQRLERLPELARVLRSVFVSERKPALSMEVACARMVGSCCTIMSPGEMEKHLLLLSELLPDWLSLHRIRTDTYVKLDKAADLAHITARLAHQTRAEEGL

SEQ ID NO: 41307 - protein, 101 aa, Homo sapiens
MQQQQQLASARNRRLAQQMENRPSVQAALKLKQKSLKQRLGKSNIQARLGRPIGALARGAIGGRGLPIIQRGLPRGGLRGGRATRTLLRGGMSLRGQCCVP

SEQ ID NO: 41308 - protein, 223 aa, Homo sapiens
MLKNKQPTPVNIRASMQQQQQLASARNRRLAQQMENRPSVQAALKLKQSLKQRLGKSNIQARLGRPIGALARGAIGGRGLPIIQRGLPRGGLRGGRATRTLLRGGMSLRGQNLLRGGRAVAPRMGLRRGGVRGRGGPGRGGLGRGAMGRGGIGGRGRGMIGRGRGGFGGRGRGRGRGRGALARPVLTKEQLDNQLDAYMSKTKGHLDAELDAYMAQTDPETND

SEQ ID NO: 41309 - protein, 202 aa, Homo sapiens
MAAQSAPKVVLKSTTKMSLNERFTNMLKNKQPTPVNIRASMQQQQQLASARNRRLAQQMENRPSVQAALKLKQSLKQRLGKSNIQARLGRPIGALARGAIGGRGLPIIQRGLPRGGLRGGRATRTLLRGGMSLRGRGMIGRGRGGFGGRGRGRGRGRGALARPVLTKEQLDNQLDAYMSKTKGHLDAELDAYMAQTDPETND

SEQ ID NO: 41310 - protein, 248 aa, Homo sapiens
MAAQSAPKVVLKSTTKMSLNERFTNMLKNKQPTPVNIRASMQQQQQLASARNRRLAQQMENRPSVQAALKLKQSLKQRLGKSNIQARLGRPIGALARGAIGGRGLPIIQRGLPRGGLRGGRATRTLLRGGMSLRGQNLLRGGRAVAPRMGLRRGGVRGRGGPGRGGLGRGAMGRGGIGGRGRGMIGRGRGGFGGRGRGRGRGRGALARPVLTKEQLDNQLDAYMSKTKGHLDAELDAYMAQTDPETND

SEQ ID NO: 41311 - protein, 202 aa, Homo sapiens; identical to SEQ ID NO: 41309

SEQ ID NO: 41312 - protein, 211 aa, Homo sapiens
MEELSSVGEQVFAAECILSKRLRKGKLEYLVKWRGWSSKHNSWEPEENILDPRLLLAFQKKEHEKEVQNRKRGKRPRGRPRKLTAMSSCSRRSKLKVGGCAGYADPTSQHPLGVGGRQREGLGPSGRGWHFCQQSVPLLGKQEPPFFLSLSFCCQGPQPAESSSPPLPGASCFSLSCTPLCWVAGSNCCRQALFPPRGSLGDGKEQEACVQ

SEQ ID NO: 41313 - protein, 532 aa, Homo sapiens
MEELSSVGEQVFAAECILSKRLRKGKLEYLVKWRGWSSKHNSWEPEENILDPRLLLAFQKKEHEKEVQNRKRGKRPRGRPRKLTAMSSCSRRSKLKEPDAPSKSKSSSSSSSSTSSSSSSDEEDDSDLDAKRGPRGRETHPVPQKKAQILVAKPELKDPIRKKRGRKPLPPEQKATRRPVSLAKVLKTARKDLGAPASKLPPPLSAPVAGLAALKAHAKEACGGPSAMATPENLASLMKGMASSPGRGGISWQSSIVHYMNRMTQSQAQAASRLALKAQATNKCGLGLDLKVRTQKGELGMSPPGSKIPKAPSGGAVEQKVGNTGGPPHTHGASRVPAGCPGPQPAPTQELSLQVLDLQSVKNGMPGVGLLARHATATKGVPATNPAPGKGTGSGLIGASGATMPTDTSKSEKLASRAVAPPTPASKRDCVKGSATPSGQESRTAPGEARKAATLPEMSAGEESSSSDSDPDSASPPSTGQNPSVSVQTSQDWKPTRSLIEHVFVTDVTANLITVTVKESPTSVGFFNLRHY

SEQ ID NO: 41314 - protein, 251 aa, Homo sapiens
MELSAIGEQVFAVESIRKKRVRKGKVEYLVKWKGWPPKYSTWEPEEHILDPRLVMAYEEKEERDRASGYRKRGPKPKRLLLQRLYSMDLRSSHKAKGKEKLCFSLTCPLGSGSPEGVVKAGAPELVDKGPLVPTLPFPLRKPRKAHKYLRLSRKKFPPRGPNLESHSHRRELFLQEPPAPDVLQAAGEWEPAAQPPEEEADADLAEGPPPWTPALPSSEVTVTDITANSITVTFREAQAAEGFFRDRSGKF

SEQ ID NO: 41315 - protein, 158 aa, Homo sapiens
MELSAIGEQVFAVESIRKKRVRKGKVEYLVKWKGWPPKYSTWEPEEHILDPRLVMAYEEKEERDRASGYRKRGPKPKRLLLQEPPAPDVLQAAGEWEPAAQPPEEEADADLAEGPPPWTPALPSSEVTVTDITANSITVTFREAQAAEGFFRDRSGKF

SEQ ID NO: 41316 - protein, 121 aa, Homo sapiens
MELSAIGEQVFAVESIRKKRVRKGKVEYLVKWKGWPPKEERDRASGYRKRGPKPKRLLLQRLYSMDLRSSHKAKGKEKLCFSLTCPLGSGSPEGVVKAGAPELVDKGPLVPTLPFPLRKPR

SEQ ID NO: 41317 - protein, 1710 aa, Homo sapiens
MNGHSDEESVRNSSGESSQSDDDSGSASGSGSGSSSGSSSDGSSSQSGSSDSDSGSESGSQSESESDTSRENKVQAKPPKVDGAEFWKSSPSILAVQRSAILKKQQQQQQQQQHQASSNSGSEEDSSSSEDSDDSSSEVKRKKHKDEDWQMSGSGSPSQSGSDSESEEEREKSSCDETESDYEPKNKVKSRKPQNRSKSKNGKKILGQKKRQIDSSEEDDDEEDYDNDKRSSRRQATVNVSYKEDEEMKTDSDDLLEVCGEDVPQPEEEEFETIERFMDCRIGRKGATGATTTIYAVEADGDPNAGFEKNKEPGEIQYLIKWKGWSHIHNTWETEETLKQQNVRGMKKLDNYKKKDQETKRWLKNASPEDVEYYNCQQELTDDLHKQYQIVERIIAHSNQKSAAGYPDYYCKWQGLPYSECSWEDGALISKKFQACIDEYFSRNQSKTTPFKDCKVLKQRPRFVALKKQPSYIGGHEGLELRDYQLNGLNWLAHSWCKGNSCILADEMGLGKTIQTISFLNYLFHEHQLYGPFLLVVPLSTLTSWQREIQTWASQMNAVVYLGDINSRNMIRTHEWTHHQTKRLKFNILLTTYEILLKDKAFLGGLNWAFIGVDEAHRLKNDDSLLYKTLIDFKSNHRLLITGTPLQNSLKELWSLLHFIMPEKFSSWEDFEEEHGKGREYGYASLHKELEPFLLRRVKKDVEKSLPAKVEQILRMEMSALQKQYYKWILTRNYKALSKGSKGSTSGFLNIMMELKKCCNHCYLIKPPDNNEFYNKQEALQHLIRSSGKLILLDKLLIRLRERGNRVLIFSQMVRMLDILAEYLKYRQFPFQRLDGSIKGELRKQALDHFNAEGSEDFCFLLSTRAGGLGINLASADTVVIFDSDWNPQNDLQAQARAHRIGQKKQVNIYRLVTKGSVEEDILERAKKKMVLDHLVIQRMDTTGKTVLHTGSAPSSSTPFNKEELSAILKFGAEELFKEPEGEEQEPQEMDIDEILKRAETHENEPGPLTVGDELLSQFKVANFSNMDEDDIELEPERNSKNWEEIIPEDQRRRLEEEERQKELEEIYMLPRMRNCAKQISFNGSEGRRSRSRRYSGSDSDSISEGKRPKKRGRPRTIPRENIKGFSDAEIRRFIKSYKKFGGPLERLDAIARDAELVDKSETDLRRLGELVHNGCIKALKDSSSGTERTGGRLGKVKGPTFRISGVQVNAKLVISHEEELIPLHKSIPSDPEERKQYTIPCHTKAAHFDIDWGKEDDSNLLIGIYEYGYGSWEMIKMDPDLSLTHKILPDDPDKKPQAKQLQTRADYLIKLLSRDLAKKEALSGAGSSKRRKARAKKNKAMKSIKVKEEIKSDSSPLPSEKSDEDDDKLSESKSDGRERSKKSSVSDAPVHITASGEPVPISEESEELDQKTFSICKERMRPVKAALKQLDRPEKGLSEREQLEHTRQCLIKIGDHITECLKEYTNPEQIKQWRKNLWIFVSKFTEFDARKLHKLYKHAIKKRQESQQNSDQNSNLNPHVIRNPDVERLKENTNHDDSSRDSYSSDRHLTQYHDHHKDRHQGDSYKKSDSRKRPYSSFSNGKDHRDWDHYKQDSRYYSDREKHRKLDDHRSRDHRSNLEGSLKDRSHSDHRSHSDHRLHSDHRSSSEYTHHKSSRDYRYHSDWQMDHRASSSGPRSPLDQRSPYGSRSPFEHSVEHKSTPEHTWSSRKT

SEQ ID NO: 41318 - protein, 300 aa, Homo sapiens
MFSFTGVLVIYEVLKKCIGKLISLRVCSIEGCVCVYVFVPGGKEFHEKLNIFHQTNLICLFLNSSRNLWIFVSKFTEFDARKLHKLYKHAIKKRQESQQNSDQNSNLNPHVIRNPDVERLKENTNHDDSSRDSYSSDRHLTQYHDHHKDRHQGDSYKKSDSRKRPYSSFSNGKDHRDWDHYKQDSRYYSDREKHRKLDDHRSRDHRSNLEGSLKDRSHSDHRSHSDHRLHSDHRSSSEYTHHKSSRDYRYHSDWQMDHRASSSGPRSPLDQRSPYGSRSPFEHSVEHKSTPEHTWSSRKT

SEQ ID NO: 41319 - protein, 207 aa, Homo sapiens
MNGHSDEESVRNSSGESSQSDDDSGSASGSGSGSSSGSSSDGSSSQSGSSDSDSGSESGSQSESESDTSRENKVQAKPPKVDGAEFWKSSPSILAVQRSAILKKQQQQQQQQQHQASSNSGSEEDSSSSEDSDDSSSEVKRKKHKDEDWQMSGSGSPSQSGSDSESEEEREKSSCDETESDYEPKNKVKSRKPQNRSKSKNEKKKKK

SEQ ID NO: 41320 - protein, 219 aa, Homo sapiens [sequence omitted]

SEQ ID NO: 41321 - protein, 616 aa, Homo sapiens
MSALQKKYYKAILMKDLDAFENETAKKVKLQNILSQLRKCVDHPYLFDGVEPEPFEVGDHLTEASGKLHLLDKLLAFLYSGGHRVLLFSQMTQMLDILQDYMDYRGYSYERVDGSVRGEERHLAIKNFGQQPIFVFLLSTRAGGVGMNLTAADTVIFVDSDFNPQNDLQAAARAHRIGQNKSVKVIRLIGRDTVEEIVYRKAASKLQLTNMIIEGGHFTLGAQKPAADADLQLSEILKFGLDKLLASEGSTMDEIDLESILGETKDGQWVSDALPAAEGGSRDQEEGKNHMYLFEGKDYSKEPSKEDRKSFEQLVNLQKTLLEKASQEGRSLRNKGSVLIPGLVEGSTKRKRVLSPEELEDRQKKRQEAAAKRRRLIEEKKRQKEEAEHKKKMAWWESNNYQSFCLPSEESEPEDLENGEESSAELDYQDPDATSLKYVSGDVTHPQAGAEDALIVHCVDDSGHWGRGGLFTALEKRSAEPRKIYELAGKMKDLSLGGVLLFPVDDKESRNKGQDLLALIVAQHRDRSNVLSGIKMAALEEGLKKIFLAAKKKKASVHLPRIGHATKGFNWYGTERLIRKHLAARGIPTYIYYFPRSKSAVLHAQSSSSSSRQLVP

SEQ ID NO: 41322 - protein, 897 aa, Homo sapiens
MERAGATSRGGQAPGFLLRLHTEGRAEAARVQEQDLRQWGLTGIHLRSYQLEGVNWLAQRFHCQNGCILGDEMGLGKTCQTIALFIYLAGRLNDEGPFLILCPLSVLSNWKEEMQRFAPGLSCVTYAGDKEERACLQQDLKQESRFHVLLTTYEICLKDASFLKSFPWSVLVVDEAHRLKNQSSLLHKTLSEFSVVFSLLLTGTPIQNSLQELYSLLSFVEPDLFSKEEVGDFIQRYQDIEKESESASELHKLLQPFLLRRVKAEVATELPKKTEVVIYHGMSALQKKYYKAILMKDLDAFENETAKKVKLQNILSQLRKCVDHPYLFDGVEPEPFEVGDHLTEASGKLHLLDKLLAFLYSGGHRVLLFSQMTQMLDILQDYMDYRGYSYERVDGSVRGEERHLAIKNFGQQPIFVFLLSTRAGGVGMNLTAADTVIFVDSDFNPQNDLQAAARAHRIGQNKSVKVIRLIGRDTVEEIVYRKAASKLQLTNMIIEGGHFTLGAQKPAADADLQLSEILKFGLDKLLASEGSTMDEIDLESILGETKDGQWVSDALPAAEGGSRDQEEGKNHMYLFEGKDYSKEPSKEDRKSFEQLVNLQKTLLEKASQEGRSLRNKGSVLIPGLVEGSTKRKRVLSPEELEDRQKKRQEAAAKRRRLIEEKKRQKEEAEHKKKMAWWESNNYQSFCLPSEESEPEDLENGEESSAELDYQDPDATSLKYVSGDVTHPQAGAEDALIVHCVDDSGHWGRGGLFTALEKRSAEPRKIYELAGKMKDLSLGGVLLFPVDDKESRNKGQDLLALIVAQHRDRSNVLSGIKMAALEEGLKKIFLAAKKKKASVHLPRIGHATKGFNWYGTERLIRKHLAARGIPTYIYYFPRSKSAVLHAQSSSSSSRQLVP

SEQ ID NO: 41323 - protein, 693 aa, Homo sapiens
MERAGATSRGGQAPGFLLRLHTEGRAEAARVQEQDLRQWGLTASELHKLLQPFLLRRVKAEVATELPKKTEVVIYHGMSALQKKYYKAILMKDLDAFENETAKKVKLQNILSQLRKCVDHPYLFDGVEPEPFEVGDHLTEASGKLHLLDKLLAFLYSGGHRVLLFSQMTQMLDILQDYMDYRGYSYERVDGSVRGEERHLAIKNFGQQPIFVFLLSTRAGGVGMNLTAADTVIFVDSDFNPQNDLQAAARAHRIGQNKSVKVIRLIGRDTVEEIVYRKAASKLQLTNMIIEGGHFTLGAQKPAADADLQLSEILKFGLDKLLASEGSTMDEIDLESILGETKDGQWVSDALPAAEGGSRDQEEGKNHMYLFEGKDYSKEPSKEDRKSFEQLVNLQKTLLEKASQEGRSLRNKGSVLIPGLVEGSTKRKRVLSPEELEDRQKKRQEAAAKRRRLIEEKKRQKEEAEHKKKMAWWESNNYQSFCLPSEESEPEDLENGEESSAELDYQDPDATSLKYVSGDVTHPQAGAEDALIVHCVDDSGHWGRGGLFTALEKRSAEPRKIYELAGKMKDLSLGGVLLFPVDDKESRNKGQDLLALIVAQHRDRSNVLSGIKMAALEEGLKKIFLAAKKKKASVHLPRIGHATKGFNWYGTERLIRKHLAARGIPTYIYYFPRSKSAVLHAQSSSSSSRQLVP

SEQ ID NO: 41324 - protein, 803 aa, Homo sapiens
MERAGATSRGGQAPGFLLRLHTEGRAEAARVQEQDLRQWGLTGIHLRSYQLEGVNWLAQRFHCQNGCILGDEMGLGKTCQTIALFIYLAGRLNDEGPFLILCPLSVLSNWKEEMQRFAPGLSCVTYAGDKEERACLQQDLKQESRFHVLLTTYEICLKDASFLKSFPWSVLVVDEAHRLKNQSSLLHKTLSEFSVVFSLLLTGTPIQNSLQELYSLLSFVEPDLFSKEEVGDFIQRYQDIEKESESASELHKLLQPFLLRRVKAEVATELPKKTEVVIYHGMSALQKKYYKAILMKDLDAFENETAKKVKLQNILSQLRKCVDHPYLFDGGVGMNLTAADTVIFVDSDFNPQNDLQAAARAHRIGQNKSVKVIRLIGRDTVEEIVYRKAASKLQLTNMIIEGGHFTLGAQKPAADADLQLSEILKFGLDKLLASEGSTMDEIDLESILGETKDGQWVSDALPAAEGGSRDQEEGKNHMYLFEGKDYSKEPSKEDRKSFEQLVNLQKTLLEKASQEGRSLRNKGSVLIPGLVEGSTKRKRVLSPEELEDRQKKRQEAAAKRRRLIEEKKRQKEEAEHKKKMAWWESNNYQSFCLPSEESEPEDLENGEESSAELDYQDPDATSLKYVSGDVTHPQAGAEDALIVHCVDDSGHWGRGGLFTALEKRSAEPRKIYELAGKMKDLSLGGVLLFPVDDKESRNKGQDLLALIVAQHRDRSNVLSGIKMAALEEGLKKIFLAAKKKKASVHLPRIGHATKGFNWYGTERLIRKHLAARGIPTYIYYFPRSKSAVLHAQSSSSSSRQLVP

SEQ ID NO: 41325 - protein, 434 aa, Homo sapiens
MAVSWEMRWAWGRPARFAPGLSCVTYAGDKEERACLQQDLKQESRFHVLLTTYEICLKDASFLKSFPWSVLVVDEAHRLKNQSSLLHKTLSEFSVVFSLLLTGTPIQNSLQELYSLLSFVEPDLFSKEEVGDFIQRYQDIEKESESASELHKLLQPFLLRRVKAEVATELPKKTEVVIYHGMSALQKKYYKAILMKDLDAFENETAKKVKLQNILSQLRKCVDHPYLFDGVEPEPFEVGDHLTEASGKLHLLDKLLAFLYSGGHRVLLFSQMTQMLDILQDYMDYRGYSYERVDGSVRGEERHLAIKNFGQQPIFVFLLSTRAGGVGMNLTAADTVIFVDSDFNPQNDLQAAARAHRIGQNKSVKVIRLIGRDTVEEIVYRKAASKLQLTNMIIEGGHFTLGAQKPAADADLQVRYSNLVWINCWPLRGAPWMK

SEQ ID NO: 41326 - protein, 1828 aa, Homo sapiens
MMRNKDKSQEEDSSLHSNASSHSASEEASGSDSGSQSESEQGSDPGSGHGSESNSSSESSESQSESESESAGSKSQPVLPEAKEKPASKKERIADVKKMWEEYPDVYGVRRSNRSRQEPSRFNIKEEASSGSESGSPKRRGQRQLKKQEKWKQEPSEDEQEQGTSAESEPEQKKVKARRPVPRRTVPKPRVKKQPKTQRGKRKKQDSSDEDDDDDEAPKRQTRRRAAKNVSYKEDDDFETDSDDLIEMTGEGVDEQQDNSETIEKVLDSRLGKKGATGASTTVYAIEANGDPSGDFDTEKDEGEIQYLIKWKGWSYIHSTWESEESLQQQKVKGLKKLENFKKKEDEIKQWLGKVSPEDVEYFNCQQELASELNKQYQIVERVIAVKTSKSTLGQTDFPAHSRKPAPSNEPEYLCKWMGLPYSECSWEDEALIGKKFQNCIDSFHSRNNSKTIPTRECKALKQRPRFVALKKQPAYLGGENLELRDYQLEGLNWLAHSWCKNNSVILADEMGLGKTIQTISFLSYLFHQHQLYGPFLIVVPLSTLTSWQREFEIWAPEINVVVYIGDLMSRNTIREYEWIHSQTKRLKFNALITTYEILLKDKTVLGSINWAFLGVDEAHRLKNDDSLLYKTLIDFKSNHRLLITGTPLQNSLKELWSLLHFIMPEKFEFWEDFEEDHGKGRENGYQSLHKVLEPFLLRRVKKDVEKSLPAKVEQILRVEMSALQKQYYKWILTRNYKALAKGTRGSTSGFLNIVMELKKCCNHCYLIKPPEENERENGQEILLSLIRSSGKLILLDKLLTRLRERGNRVLIFSQMVRMLDILAEYLTIKHYPFQRLDGSIKGEIRKQALDHFNADGSEDFCFLLSTRAGGLGINLASADTVVIFDSDWNPQNDLQAQARAHRIGQKKQVNIYRLVTKGTVEEEIIERAKKKMVLDHLVIQRMDTTGRTILENNSGRSNSNPFNKEELTAILKFGAEDLFKELEGEESEPQEMDIDEILRLAETRENEVSTSATDELLSQFKVANFATMEDEEELEERPHKDWDEIIPEEQRKKVEEEERQKELEEIYMLPRIRSSTKKAQTNDSDSDTESKRQAQRSSASESETEDSDDDKKPKRRGRPRSVRKDLVEGFTDAEIRRFIKAYKKFGLPLERLECIARDAELVDKSVADLKRLGELIHNSCVSAMQEYEEQLKENASEGKGPGKRRGPTIKISGVQVNVKSIIQHEEEFEMLHKSIPVDPEEKKKYCLTCRVKAAHFDVEWGVEDDSRLLLGIYEHGYGNWELIKTDPELKLTDKILPVETDKKPQGKQLQTRADYLLKLLRKGLEKKGAVTGGEEAKLKKRKPRVKKENKVPRLKEEHGIELSSPRHSDNPSEEGEVKDDGLEKSPMKKKQKKKENKENKEKQMSSRKDKEGDKERKKSKDKKEKPKSGDAKSSSKSKRSQGPVHITAGSEPVPIGEDEDDDLDQETFSICKERMRPVKKALKQLDKPDKGLNVQEQLEHTRNCLLKIGDRIAECLKAYSDQEHIKLWRRNLWIFVSKFTEFDARKLHKLYKMAHKKRSQEEEEQKKKDDVTGGKKPFRPEASGSSRDSLISQSHTSHNLHPQKPHLPASHGPQMHGHPRDNYNHPNKRHFSNADRGDWQRERKFNYGGGNNNPPWGSDRHHQYEQHWYKDHHYGDRRHMDAHRSGSYRPNNMSRKRPYDQYSSDRDHRGHRDYYDRHHHDSKRRRSDEFRPQNYHQQDFRRMSDHRPAMGYHGQGPSDHYRSFHTDKLGEYKQPLPPLHPAVSDPRSPPSQKSPHDSKSPLDHRSPLERSLEQKNNPDYNWNVRKT

SEQ ID NO: 41327 - protein, 501 aa, Homo sapiens
MMRNKDKSQEEDSSLHSNASSHSASEEASGSDSGSQSESEQGSDPGSGHGSESNSSSESSESQSESESESAGSKSQPVLPEAKEKPASKKERIADVKKMWEEYPDVYGVRRSNRSRQEPSRFNIKEEASSGSESGSPKRRGQRQLKKQEKWKQEPSEDEQEQGTSAESEPEQKKVKARRPVPRRTVPKPRVKKQPKTQRGKRKKQDSSDEDDDDDEAPKRQTRRRAAKNVSYKEDDDFETDSDDLIEMTGEGVDEQQDNSETIEKVLDSRLGKKGATGASTTVYAIEANGDPSGDFDTEKDEGEIQYLIKWKGWSYIHSTWESEESLQQQKVKGLKKLENFKKKEDEIKQWLGKVSPEDVEYFNCQQELASELNKQYQIVERVIAVKTSKSTLGQTDFPAHSRKPAPSNEPEYLCKWMGLPYSECSWEDEALIGKKFQNCIDSFHSRNNSKTIPTRECKALKQRPRFVALKKQPAYLGGENLELRDYQLEGLNWLAHSWCK

SEQ ID NO: 41328 - protein, 514 aa, Homo sapiens
MAHKQREDYLNLSPCVFTWYRTFSQLAFDGEKLSHSASEEASGSDSGSQSESEQGSDPGSGHGSESNSSSESSESQSESESESAGSKSQPVLPEAKEKPASKKERIADVKKMWEEYPDVYGVRRSNRSRQEPSRFNIKEEASSGSESGSPKRRGQRQLKKQEKWKQEPSEDEQEQGTSAESEPEQKKVKARRPVPRRTVPKPRVKKQPKTQRGKRKKQDSSDEDDDDDEAPKRQTRRRAAKNVSYKEDDDFETDSDDLIEMTGEGVDEQQDNSETIEKVLDSRLGKKGATGASTTVYAIEANGDPSGDFDTEKDEGEIQYLIKWKGWSYIHSTWESEESLQQQKVKGLKKLENFKKKEDEIKQWLGKVSPEDVEYFNCQQELASELNKQYQIVERVIAVKTSKSTLGQTDFPAHSRKPAPSNEPEYLCKWMGLPYSECSWEDEALIGKKFQNCIDSFHSRNNSKTIPTRECKALKQRPRFVALKKQPAYLGGENLELRDYQLEGLNWLAHSWCK

SEQ ID NO: 41329 - protein, 183 aa, Homo sapiens
MMRNKDKSQEEDSSLHSNASSHSASEEASGSDSGSQSESEQGSDPGSGHGSESNSSSESSESQSESESESAGSKSQPVLPEAKEKPASKKERIADVKKMWEEYPDVYGVRRSNRSRQEPSRFNIKEEASSGSESGSPKRRGQRQLKKQEKWKQEPSEDEQEQGTSAESEPEQKKVKARRPVPR

SEQ ID NO: 41330 - protein, 1739 aa, Homo sapiens
MMRNKDKSQEEDSSLHSNASSHSASEEASGSDSGSQSESEQGSDPGSGHGSESNSSSESSESQSESESESAGSKSQPVLPEAKEKPASKKERIADVKKMWEEYPDVYGVRRSNRSRQEPSRFNIKEEASSGSESGSPKRRGQRQLKKQEKWKQEPSEDEQEQGTSAESEPEQKKVKARRPVPRRTVPKPRVKKQPKTQRGKRKKQDSSDEDDDDDEAPKRQTRRRAAKNVSYKEDDDFETDSDDLIEMTGEGVDEQQDNSETIEKVLDSRLGKKGATGASTTVYAIEANGDPSGDFDTEKDEGEIQYLIKWKGWSYIHSTWESEESLQQQKVKGLKKLENFKKKEDEIKQWLGKVSPEDVEYFNCQQELASELNKQYQIVERVIAVKTSKSTLGQTDFPAHSRKPAPSNEPEYLCKWMGLPYSECSWEDEALIGKKFQNCIDSFHSRNNSKTIPTRECKALKQRPRFVALKKQPAYLGGENLELRDYQLEGLNWLAHSWCKNNSVILADEMGLGKTIQTISFLSYLFHQHQLYGPFLIVVPLSTLTSWQREFEIWAPEINVVVYIGDLMSRNTIREYEWIHSQTKRLKFNALITTYEILLKDKTVLGSINWAFLGVDEAHRLKNDDSLLYKTLIDFKSNHRLLITGTPLQNSLKELWSLLHFIMPEKFEFWEDFEEDHGKGRENGYQSLHKVLEPFLLRRVKKDVEKSLPAKVEQILRVEMSALQKQYYKWILTRNYKALAKGTRGSTSGFLNIVMELKKCCNHCYLIKPPEENERENGQEILLSLIRSSGKLILLDKLLTRLRERGNRVLIFSQMVRMLDILAEYLTIKHYPFQRLDGSIKGEIRKQALDHFNADGSEDFCFLLSTRAGGLGINLASADTVVIFDSDWNPQNDLQAQARAHRIGQKKQVNIYRLVTKGTVEEEIIERAKKKMVLDHLVIQRMDTTGRTILENNSGRSNSNPFNKEELTAILKFGAEDLFKELEGEESEPQEMDIDEILRLAETRENEVSTSATDELLSQFKVANFATMEDEEELEERPHKDWDEIIPEEQRKKVEEEERQKELEEIYMLPRIRSSTKKAQTNDSDSDTESKRQAQRSSASESETEDSDDDKKPKRRGRPRSVRKDLVEGFTDAEIRRFIKAYKKFGLPLERLECIARDAELVDKSVADLKRLGELIHNSCVSAMQEYEEQLKENASEGKGPGKRRGPTIKISGVQVNVKSIIQHEEEFEMLHKSIPVDPEEKKKYCLTCRVKAAHFDVEWGVEDDSRLLLGIYEHGYGNWELIKTDPELKLTDKILPVETDKKPQGKQLQTRADYLLKLLRKGLEKKGAVTGGEEAKLKKRKPRVKKENKVPRLKEEHGIELSSPRHSDNPSEEGEVKDDGLEKSPMKKKQKKKENKENKEKQMSSRKDKEGDKERKKSKDKKEKPKSGDAKSSSKSKRSQGPVHITAGSEPVPIGEDEDDDLDQETFSICKERMRPVKKALKQLDKPDKGLNVQEQLEHTRNCLLKIGDRIAECLKAYSDQEHIKLWRRNLWIFVSKFTEFDARKLHKLYKMAHKKRSQEEEEQKKKDDVTGGKKPFRPEASGSSRDSLISQSHTSHNLHPQKPHLPASHGPQMHGHPRDNYNHPNKRHFSNADRGDWQRERKFNYGGGNNNPPWGSDRHHQYEQHWYKDHHYGDRRHMDAHRSGSYRPNNMSRKRPYDQYSSDRDHRGHRDYYDRYAKGCETPGANLCQELFLGRK

SEQ ID NO: 41331 - protein, 2000 aa, Homo sapiens
MKAADTVILWARSKNDQLRISFPPGLCWGDRMPDKDDIRLLPSALGVKKRKRGPKKQKENKPGKPRKRKKRDSEEEFGSERDEYREKSESGGSEYGTGPGRKRRRKHREKKEKKTKRRKKGEGDGGQKQVEQKSSATLLLTWGLEDVEHVFSEEDYHTLTNYKAFSQFMRPLIAKKNPKIPMSKMMTILGAKWREFSANNPFKGSAAAVAAAAAAAAAAVAEQVSAAVSSATPIAPSGPPALPPPPAADIQPPPIRRAKTKEGKGPGHKRRSKSPRVPDGRKKLRGKKMAPLKIKLGLLGGKRKKGGSYVFQSDEGPEPEAEESDLDSGSVHSASGRPDGPVRTKKLKRGRPGRKKKKVLGCPAVAGEEEVDGYETDHQDYCEVCQQGGEIILCDTCPRAYHLVCLDPELDRAPEGKWSCPHCEKEGVQWEAKEEEEEYEEEGEEEGEKEEEDDHMEYCRVCKDGGELLCCDACISSYHIHCLNPPLPDIPNGEWLCPRCTCPVLKGRVQKILHWRWGEPPVAVPAPQQADGNPDVPPPRPLQGRSEREFFVKWVGLSYWHCSWAKELQLEIFHLVMYRNYQRKNDMDEPPPLDYGSGEDDGKSDKRKVKDPHYAEMEEKYYRFGIKPEWMTVHRIINHSVDKKGNYHYLVKWRDLPYDQSTWEEDEMNIPEYEEHKQSYWRHRELIMGEDPAQPRKYKKKKKELQGDGPPSSPTNDPTVKYETQPRFITATGGTLHMYQLEGLNWLRFSWAQGTDTILADEMGLGKTIQTIVFLYSLYKEGHTKGPFLVSAPLSTIINWEREFQMWAPKFYVVTYTGDKDSRAIIRENEFSFEDNAIKGGKKAFKMKREAQVKFHVLLTSYELITIDQAALGSIRWACLVVDEAHRLKNNQSKFFRVLNGYKIDHKLLLTGTPLQNNLEELFHLLNFLTPERFNNLEGFLEEFADISKEDQIKKLHDLLGPHMLRRLKADVFKNMPAKTELIVRVELSPMQKKYYKYILTRNFEALNSRGGGNQVSLLNIMMDLKKCCNHPYLFPVAAMESPKLPSGAYEGGALIKSSGKLMLLQKMLRKLKEQGHRVLIFSQMTKMLDLLEDFLDYEGYKYERIDGGITGALRQEAIDRFNAPGAQQFCFLLSTRAGGLGINLATADTVIIFDSDWNPHNDIQAFSRAHRIGQANKVMIYRFVTRASVEERITQVAKRKMMLTHLVVRPGLGSKAGSMSKQELDDILKFGTEELFKDENEGENKEEDSSVIHYDNEAIARLLDRNQDATEDTDVQNMNEYLSSFKVAQYVVREEDKIEEIEREIIKQEENVDPDYWEKLLRHHYEQQQEDLARNLGKGKRVRKQVNYNDAAQEDQDNQSEYSVGSEEEDEDFDERPEGRRQSKRQLRNEKDKPLPPLLARVGGNIEVLGFNTRQRKAFLNAVMRWGMPPQDAFTTQWLVRDLRGKTEKEFKAYVSLFMRHLCEPGADGSETFADGVPREGLSRQQVLTRIGVMSLVKKKVQEFEHINGRWSMPELMPDPSADSKRSSRASSPTKTSPTTPEASATNSPCTSKPATPAPSEKGEGIRTPLEKEEAENQEEKPEKNSRIGEKMETEADAPSPAPSLGERLEPRKIPLEDEVPGVPGEMEPEPGYRGDREKSATESTPGERGEEKPLDGQEHRERPEGETGDLGKREDVKGDRELRPGPRDEPRSNGRREEKTEKPRFMFNIADGGFTELHTLWQNEERAAISSGKLNEIWHRRHDYWLLAGIVLHGYARWQDIQNDAQFAIINEPFKTEANKGNFLEMKNKFLARRFKLLEQALVIEEQLRRAAYLNLSQEPAHPAMALHARFAEAECLAESHQHLSKESLAGNKPANAVLHKVLNQLEELLSDMKADVTRLPATLSRIPPIAARLQMSERSILSRLASKGTEPHPTPAYPPGPYATPPGYGAAFSAAPVGALAAAGANYSQMPAGSFITAATNGPPVLVKKEKEMVGALVSDGLDRKEPRAGEVICIDD

SEQ ID NO: 41332 - protein, 1966 aa, Homo sapiens
MKAADTVILWARSKNDQLRISFPPGLCWGDRMPDKDDIRLLPSALGVKKRKRGPKKQKENKPGKPRKRKKRDSEEEFGSERDEYREKSESGGSEYGTGPGRKRRRKHREKKEKKTKRRKKGEGDGGQKQVEQKSSATLLLTWGLEDVEHVFSEEDYHTLTNYKAFSQFMRPLIAKKNPKIPMSKMMTILGAKWREFSANNPFKGSAAAVAAAAAAAAAAVAEQVSAAVSSATPIAPSGPPALPPPPAADIQPPPIRRAKTKEGKGPGHKRRSKSPRVPDGRKKLRGKKMAPLKIKLGLLGGKRKKGGSYVFQSDEGPEPEAEESDLDSGSVHSASGRPDGPVRTKKLKRGRPGRKKKKVLGCPAVAGEEEVDGYETDHQDYCEVCQQGGEIILCDTCPRAYHLVCLDPELDRAPEGKWSCPHCEKEGVQWEAKEEEEEYEEEGEEEGEKEEEDDHMEYCRVCKDGGELLCCDACISSYHIHCLNPPLPDIPNGEWLCPRCTCPVLKGRVQKILHWRWGEPPVAVPAPQQADGNPDVPPPRPLQGRSEREFFVKWVGLSYWHCSWAKELQLEIFHLVMYRNYQRKNDMDEPPPLDYGSGEDDGKSDKRKVKDPHYAEMEEKYYRFGIKPEWMTVHRIINHSVDKKGNYHYLVKWRDLPYDQSTWEEDEMNIPEYEEHKQSYWRHRELIMGEDPAQPRKYKKKKKELQGDGPPSSPTNDPTVKYETQPRFITATGGTLHMYQLEGLNWLRFSWAQGTDTILADEMGLGKTIQTIVFLYSLYKEGHTKGPFLVSAPLSTIINWEREFQMWAPKFYVVTYTGDKDSRAIIRENEFSFEDNAIKGGKKAFKMKREAQVKFHVLLTSYELITIDQAALGSIRWACLVVDEAHRLKNNQSKFFRVLNGYKIDHKLLLTGTPLQNNLEELFHLLNFLTPERFNNLEGFLEEFADISKEDQIKKLHDLLGPHMLRRLKADVFKNMPAKTELIVRVELSPMQKKYYKYILTRNFEALNSRGGGNQVSLLNIMMDLKKCCNHPYLFPVAAMESPKLPSGAYEGGALIKSSGKLMLLQKMLRKLKEQGHRVLIFSQMTKMLDLLEDFLDYEGYKYERIDGGITGALRQEAIDRFNAPGAQQFCFLLSTRAGGLGINLATADTVIIFDSDWNPHNDIQAFSRAHRIGQANKVMIYRFVTRASVEERITQVAKRKMMLTHLVVRPGLGSKAGSMSKQELDDILKFGTEELFKDENEGENKEEDSSVIHYDNEAIARLLDRNQDATEDTDVQNMNEYLSSFKVAQYVVREEDKIEEIEREIIKQEENVDPDYWEKLLRHHYEQQQEDLARNLGKGKRVRKQVNYNDAAQEDQDNQSEYSVGSEEEDEDFDERPEGRRQSKRQLRNEKDKPLPPLLARVGGNIEVLGFNTRQRKAFLNAVMRWGMPPQDAFTTQWLVRDLRGKTEKEFKAYVSLFMRHLCEPGADGSETFADGVPREGLSRQQVLTRIGVMSLVKKKVQEFEHINGRWSMPELMPDPSADSKRSSRASSPTKTSPTTPEASATNSPCTSKPATPAPSEKGEGIRTPLEKEEAENQEEKPEKNSRIGEKMETEADAPSPAPSLGERLEPRKIPLEDEVPGVPGEMEPEPGYRGDREKSEDVKGDRELRPGPRDEPRSNGRREEKTEKPRFMFNIADGGFTELHTLWQNEERAAISSGKLNEIWHRRHDYWLLAGIVLHGYARWQDIQNDAQFAIINEPFKTEANKGNFLEMKNKFLARRFKLLEQALVIEEQLRRAAYLNLSQEPAHPAMALHARFAEAECLAESHQHLSKESLAGNKPANAVLHKVLNQLEELLSDMKADVTRLPATLSRIPPIAARLQMSERSILSRLASKGTEPHPTPAYPPGPYATPPGYGAAFSAAPVGALAAAGANYSQMPAGSFITAATNGPPVLVKKEKEMVGALVSDGLDRKEPRAGEVICIDD

SEQ ID NO: 41333 - protein, 2059 aa, Homo sapiens
MASPLRDEEEEEEEMVVSEEEEEEEEEGDEEEEEEVEAADEDDEEDDDEGVLGRGPGHDRGRDRHSPPGCHLFPPPPPPPPPLPPPPPPPPPDKDDIRLLPSALGVKKRKRGPKKQKENKPGKPRKRKKRDSEEEFGSERDEYREKSESGGSEYGTGPGRKRRRKHREKKEKKTKRRKKGEGDGGQKQVEQKSSATLLLTWGLEDVEHVFSEEDYHTLTNYKAFSQFMRPLIAKKNPKIPMSKMMTILGAKWREFSANNPFKGSAAAVAAAAAAAAAAVAEQVSAAVSSATPIAPSGPPALPPPPAADIQPPPIRRAKTKEGKGPGHKRRSKSPRVPDGRKKLRGKKMAPLKIKLGLLGGKRKKGGSYVFQSDEGPEPEAEESDLDSGSVHSASGRPDGPVRTKKLKRGRPGRKKKKVLGCPAVAGEEEVDGYETDHQDYCEVCQQGGEIILCDTCPRAYHLVCLDPELDRAPEGKWSCPHCEKEGVQWEAKEEEEEYEEEGEEEGEKEEEDDHMEYCRVCKDGGELLCCDACISSYHIHCLNPPLPDIPNGEWLCPRCTCPVLKGRVQKILHWRWGEPPVAVPAPQQADGNPDVPPPRPLQGRSEREFFVKWVGLSYWHCSWAKELQLEIFHLVMYRNYQRKNDMDEPPPLDYGSGEDDGKSDKRKVKDPHYAEMEEKYYRFGIKPEWMTVHRIINHSVDKKGNYHYLVKWRDLPYDQSTWEEDEMNIPEYEEHKQSYWRHRELIMGEDPAQPRKYKKKKKELQGDGPPSSPTNDPTVKYETQPRFITATGGTLHMYQLEGLNWLRFSWAQGTDTILADEMGLGKTIQTIVFLYSLYKEGHTKGPFLVSAPLSTIINWEREFQMWAPKFYVVTYTGDKDSRAIIRENEFSFEDNAIKGGKKAFKMKREAQVKFHVLLTSYELITIDQAALGSIRWACLVVDEAHRLKNNQSKFFRVLNGYKIDHKLLLTGTPLQNNLEELFHLLNFLTPERFNNLEGFLEEFADISKEDQIKKLHDLLGPHMLRRLKADVFKNMPAKTELIVRVELSPMQKKYYKYILTRNFEALNSRGGGNQVSLLNIMMDLKKCCNHPYLFPVAAMESPKLPSGAYEGGALIKSSGKLMLLQKMLRKLKEQGHRVLIFSQMTKMLDLLEDFLDYEGYKYERIDGGITGALRQEAIDRFNAPGAQQFCFLLSTRAGGLGINLATADTVIIFDSDWNPHNDIQAFSRAHRIGQANKVMIYRFVTRASVEERITQVAKRKMMLTHLVVRPGLGSKAGSMSKQELDDILKFGTEELFKDENEGENKEEDSSVIHYDNEAIARLLDRNQDATEDTDVQNMNEYLSSFKVAQYVVREEDKIEEIEREIIKQEENVDPDYWEKLLRHHYEQQQEDLARNLGKGKRVRKQVNYNDAAQEDQDNQSEYSVGSEEEDEDFDERPEGRRQSKRQLRNEKDKPLPPLLARVGGNIEVLGFNTRQRKAFLNAVMRWGMPPQDAFTTQWLVRDLRGKTEKEFKAYVSLFMRHLCEPGADGSETFADGVPREGLSRQQVLTRIGVMSLVKKKVQEFEHINGRWSMPELMPDPSADSKRSSRASSPTKTSPTTPEASATNSPCTSKPATPAPSEKGEGIRTPLEKEEAENQEEKPEKNSRIGEKMETEADAPSPAPSLGERLEPRKIPLEDEVPGVPGEMEPEPGYRGDREKSATESTPGERGEEKPLDGQEHRERPEGETGDLGKREDVKGDRELRPGPRDEPRSNGRREEKTEKPRFMFNIADGGFTELHTLWQNEERAAISSGKLNEIWHRRHDYWLLAGIVLHGYARWQDIQNDAQFAIINEPFKTEANKGNFLEMKNKFLARRFKLLEQALVIEEQLRRAAYLNLSQEPAHPAMALHARFAEAECLAESHQHLSKESLAGNKPANAVLHKVLNQLEELLSDMKADVTRLPATLSRIPPIAARLQMSERSILSRLASKGTEPHPTPAYPPGPYATPPGYGAAFSAAPVGALAAAGANYSQMPAGSFITAATNGPPVLVKKEKEMVGALVSDGLDRKEPRAGEVICIDD

SEQ ID NO: 41334 - protein, 1954 aa, Homo sapiens
MRGPVGTEEELPRLFAEEMENEDEMSEEEDGGLEAFDDFFPVEPVSLPKKKKPKKLKENKCKGKRKKKEGSNDELSENEEDLEEKSESEGSDYSPNKKKKKKLKDKKEKKAKRKKKDEDEDDNDDGCLKEPKSSGQLMAEWGLDDVDYLFSEEDYHTLTNYKAFSQFLRPLIAKKNPKIPMSKMMTVLGAKWREFSANNPFKGSSAAAAAAAVAAAVETVTISPPLAVSPPQVPQPVPIRKAKTKEGKGPGVRKKIKGSKDGKKKGKGKKTAGLKFRFGGISNKRKKGSSSEEDEREESDFDSASIHSASVRSECSAALGKKSKRRRKKKRIDDGDGYETDHQDYCEVCQQGGEIILCDTCPRAYHLVCLDPELEKAPEGKWSCPHCEKEGIQWEPKDDDDEEEEGGCEEEEDDHMEFCRVCKDGGELLCCDACPSSYHLHCLNPPLPEIPNGEWLCPRCTCPPLKGKVQRILHWRWTEPPAPFMVGLPGPDVEPSLPPPKPLEGIPEREFFVKWAGLSYWHCSWVKELQLELYHTVMYRNYQRKNDMDEPPPFDYGSGDEDGKSEKRKNKDPLYAKMEERFYRYGIKPEWMMIHRILNHSFDKKGDVHYLIKWKDLPYDQCTWEIDDIDIPYYDNLKQAYWGHRELMLGEDTRLPKRLLKKGKKLRDDKQEKPPDTPIVDPTVKFDKQPWYIDSTGGTLHPYQLEGLNWLRFSWAQGTDTILADEMGLGKTVQTIVFLYSLYKEGHSKGPYLVSAPLSTIINWEREFEMWAPDFYVVTYTGDKESRSVIRENEFSFEDNAIRSGKKVFRMKKEVQIKFHVLLTSYELITIDQAILGSIEWACLVVDEAHRLKNNQSKFFRVLNSYKIDYKLLLTGTPLQNNLEELFHLLNFLTPERFNNLEGFLEEFADISKEDQIKKLHDLLGPHMLRRLKADVFKNMPAKTELIVRVELSQMQKKYYKFILTRNFEALNSKGGGNQVSLLNIMMDLKKCCNHPYLFPVAAVEAPVLPNGSYDGSSLVKSSGKLMLLQKMLKKLRDEGHRVLIFSQMTKMLDLLEDFLEYEGYKYERIDGGITGGLRQEAIDRFNAPGAQQFCFLLSTRAGGLGINLATADTVIIYDSDWNPHNDIQAFSRAHRIGQNKKVMIYRFVTRASVEERITQVAKRKMMLTHLVVRPGLGSKSGSMTKQELDDILKFGTEELFKDDVEGMMSQGQRPVTPIPDVQSSKGGNLAASAKKKHGSTPPGDNKDVEDSSVIHYDDAAISKLLDRNQDATDDTELQNMNEYLSSFKVAQYVVREEDGVEEVEREIIKQEENVDPDYWEKLLRHHYEQQQEDLARNLGKGKRIRKQVNYNDASQEDQEWQDELSDNQSEYSIGSEDEDEDFEERPEGQSGRRQSRRQLKSDRDKPLPPLLARVGGNIEVLGFNARQRKAFLNAIMRWGMPPQDAFNSHWLVRDLRGKSEKEFRAYVSLFMRHLCEPGADGAETFADGVPREGLSRQHVLTRIGVMSLVRKKVQEFEHVNGKYSTPDLIPEGPEGKKSGEVISSDPNTPVPASPAHLLPAPLGLPDKMEAQLGYMDEKDPGAQKPRQPLEVQALPAALDRVESEDKHESPASKERAREERPEETEKAPPSPEQLPREEVLPEKEKILDKLELSLIHSRGDSSELRPDDTKAEEKEPIETQQNGDKEEDDEGKKEDKKGKFKFMFNIADGGFTELHTLWQNEERAAVSSGKIYDIWHRRHDYWLLAGIVTHGYARWQDIQNDPRYMILNEPFKSEVHKGNYLEMKNKFLARRFKLLEQALVIEEQLRRAAYLNMTQDPNHPAMALNARLAEVECLAESHQHLSKESLAGNKPANAVLHKVLNQLEELLSDMKADVTRLPSMLSRIPPVAARLQMSERSILSRLTNRAGDPTIQQGAFGSSQMYSNNFGPNFRGPGPGGIVNYNQMPLGPYVTDI

SEQ ID NO: 41335 - protein, 808 aa, Homo sapiens
MIYRFVTRASVEERITQVAKRKMMLTHLVVRPGLGSKSGSMTKQELDDILKFGTEELFKDDVEGMMSQGQRPVTPIPDVQSSKGGNLAASAKKKHGSTPPGDNKDVEDSSVIHYDDAAISKLLDRNQDATDDTELQNMNEYLSSFKVAQYVVREEDGVEEVEREIIKQEENVDPDYWEKLLRHHYEQQQEDLARNLGKGKRIRKQVNYNDASQEDQEWQDELSDNQSEYSIGSEDEDEDFEERPEGQSGRRQSRRQLKSDRDKPLPPLLARVGGNIEVLGFNARQRKAFLNAIMRWGMPPQDAFNSHWLVRDLRGKSEKEFRAYVSLFMRHLCEPGADGAETFADGVPREGLSRQHVLTRIGVMSLVRKKVQEFEHVNGKYSTPDLIPEGPEGKKSGEVISSDPNTPVPASPAHLLPAPLGLPDKMEAQLGYMDEKDPGAQKPRQPLEVQALPAALDRVESEDKHESPASKERAREERPEETEKAPPSPEQLPREEVLPEKEKILDKLELSLIHSRGDSSELRPDDTKAEEKEPIETQQNGDKEEDDEGKKEDKKGKFKFMFNIADGGFTELHTLWQNEERAAVSSGKIYDIWHRRHDYWLLAGIVTHGYARWQDIQNDPRYMILNEPFKSEVHKGNYLEMKNKFLARRFKLLEQALVIEEQLRRAAYLNMTQDPNHPAMALNARLAEVECLAESHQHLSKESLAGNKPANAVLHKVLNQLEELLSDMKADVTRLPSMLSRIPPVAARLQMSERSILSRLTNRAGDPTIQQISSRPRDFPVLQRSFPAEPRLPGHLPDPHGREKLPPF

SEQ ID NO: 41336 - protein, 1195 aa, Homo sapiens
MVGLPGPDVEPSLPPPKPLEGIPEREFFVKWAGLSYWHCSWVKELQLELYHTVMYRNYQRKNDMDEPPPFDYGSGDEDGKSEKRKNKDPLYAKMEERFYRYGIKPEWMMIHRILNHSFDKKGDVHYLIKWKDLPYDQCTWEIDDIDIPYYDNLKQAYWGHRELMLGEDTRLPKRLLKKGKKLRDDKQEKPPDTPIVDPTVKFDKQPWYIDSTGGTLHPYQLEGLNWLRFSWAQGTDTILADEMGLGKTVQTIVFLYSLYKEGHSKGPYLVSAPLSTIINWEREFEMWAPDFYVVTYTGDKESRSVIRENEFSFEDNAIRSGKKVFRMKKEVQIKFHVLLTSYELITIDQAILGSIEWACLVVDEAHRLKNNQSKFFRVLNSYKIDYKLLLTGTPLQNNLEELFHLLNFLTPERFNNLEGFLEEFADISKEDQIKKLHDLLGPHMLRRLKADVFKNMPAKTELIVRVELSQMQKKYYKFILTRNFEALNSKGGGNQVSLLNIMMDLKKCCNHPYLFPVAAVEAPVLPNGSYDGSSLVKSSGKLMLLQKMLKKLRDEGHRVLIFSQMTKMLDLLEDFLEYEGYKYERIDGGITGGLRQEAIDRFNAPGAQQFCFLLSTRAGGLGINLATADTVIIYDSDWNPHNDIQAFSRAHRIGQNKKVMIYRFVTRASVEERITQVAKRKMMLTHLVVRPGLGSKSGSMTKQELDDILKFGTEELFKDDVEGMMSQGQRPVTPIPDVQSSKGGNLAASAKKKHGSTPPGDNKDVEDSSVIHYDDAAISKLLDRNQDATDDTELQNMNEYLSSFKVAQYVVREEDGVEEVEREIIKQEENVDPDYWEKLLRHHYEQQQEDLARNLGKGKRIRKQVNYNDASQEDQEWQDELSDNQSEYSIGSEDEDEDFEERPEGQSGRRQSRRQLKSDRDKPLPPLLARVGGNIEVLGFNARQRKAFLNAIMRWGMPPQDAFNSHWLVRDLRGKSEKEFRAYVSLFMRHLCEPGADGAETFADGVPREGLSRQHVLTRIGVMSLVRKKVQEFEHVNGKYSTPDLIPEGPEGKKSGEVISSDPNTPVPASPAHLLPAPLGLPDKMEAQLGYMDEKDPGAQKPRQPLEVQALPAALDRVESEDKHESPASKERAREERPEQTPPAQAQLRGGRPLSPGTAPGWQREGPGLGARRARSPSQGGPGGGGSSFGSQAPL

SEQ ID NO: 41337 - protein, 808 aa, Homo sapiens; identical to SEQ ID NO: 41335

SEQ ID NO: 41338 - protein, 1095 aa, Homo sapiens
MIHRILNHSFDKKGDVHYLIKWKDLPYDQCTWEIDDIDIPYYDNLKQAYWGHRELMLGEDTRLPKRLLKKGKKLRDDKQEKPPDTPIVDPTVKFDKQPWYIDSTGGTLHPYQLEGLNWLRFSWAQGTDTILADEMGLGKTVQTIVFLYSLYKEGHSKGPYLVSAPLSTIINWEREFEMWAPDFYVVTYTGDKESRSVIRENEFSFEDNAIRSGKKVFRMKKEVQIKFHVLLTSYELITIDQAILGSIEWACLVVDEAHRLKNNQSKFFRVLNSYKIDYKLLLTGTPLQNNLEELFHLLNFLTPERFNNLEGFLEEFADISKEDQIKKLHDLLGPHMLRRLKADVFKNMPAKTELIVRVELSQMQKKYYKFILTRNFEALNSKGGGNQVSLLNIMMDLKKCCNHPYLFPVAAVEAPVLPNGSYDGSSLVKSSGKLMLLQKMLKKLRDEGHRVLIFSQMTKMLDLLEDFLEYEGYKYERIDGGITGGLRQEAIDRFNAPGAQQFCFLLSTRAGGLGINLATADTVIIYDSDWNPHNDIQAFSRAHRIGQNKKVMIYRFVTRASVEERITQVAKRKMMLTHLVVRPGLGSKSGSMTKQELDDILKFGTEELFKDDVEGMMSQGQRPVTPIPDVQSSKGGNLAASAKKKHGSTPPGDNKDVEDSSVIHYDDAAISKLLDRNQDATDDTELQNMNEYLSSFKVAQYVVREEDGVEEVEREIIKQEENVDPDYWEKLLRHHYEQQQEDLARNLGKGKRIRKQVNYNDASQEDQEWQDELSDNQSEYSIGSEDEDEDFEERPEGQSGRRQSRRQLKSDRDKPLPPLLARVGGNIEVLGFNARQRKAFLNAIMRWGMPPQDAFNSHWLVRDLRGKSEKEFRAYVSLFMRHLCEPGADGAETFADGVPREGLSRQHVLTRIGVMSLVRKKVQEFEHVNGKYSTPDLIPEGPEGKKSGEVISSDPNTPVPASPAHLLPAPLGLPDKMEAQLGYMDEKDPGAQKPRQPLEVQALPAALDRVESEDKHESPASKERAREERPEETEKAPPSPEQLPRASCSVTQAGVQWRHRLMGAFISSAQATLPPQLPEQRRCFLRRRRSWTSWS

SEQ ID NO: 41339 - protein, 1085 aa, Homo sapiens
MIHRILNHSFDKKGDVHYLIKWKDLPYDQCTWEIDDIDIPYYDNLKQAYWGHRELMLGEDTRLPKRLLKKGKKLRDDKQEKPPDTPIVDPTVKFDKQPWYIDSTGGTLHPYQLEGLNWLRFSWAQGTDTILADEMGLGKTVQTIVFLYSLYKEGHSKGPYLVSAPLSTIINWEREFEMWAPDFYVVTYTGDKESRSVIRENEFSFEDNAIRSGKKVFRMKKEVQIKFHVLLTSYELITIDQAILGSIEWACLVVDEAHRLKNNQSKFFRVLNSYKIDYKLLLTGTPLQNNLEELFHLLNFLTPERFNNLEGFLEEFADISKEDQIKKLHDLLGPHMLRRLKADVFKNMPAKTELIVRVELSQMQKKYYKFILTRNFEALNSKGGGNQVSLLNIMMDLKKCCNHPYLFPVAAVEAPVLPNGSYDGSSLVKSSGKLMLLQKMLKKLRDEGHRVLIFSQMTKMLDLLEDFLEYEGYKYERIDGGITGGLRQEAIDRFNAPGAQQFCFLLSTRAGGLGINLATADTVIIYDSDWNPHNDIQAFSRAHRIGQNKKVMIYRFVTRASVEERITQVAKRKMMLTHLVVRPGLGSKSGSMTKQELDDILKFGTEELFKDDVEGMMSQGQRPVTPIPDVQSSKGGNLAASAKKKHGSTPPGDNKDVEDSSVIHYDDAAISKLLDRNQDATDDTELQNMNEYLSSFKVAQYVVREEDGVEEVEREIIKQEENVDPDYWEKLLRHHYEQQQEDLARNLGKGKRIRKQVNYNDASQEDQEWQDELSDNQSEYSIGSEDEDEDFEERPEGQSGRRQSRRQLKSDRDKPLPPLLARVGGNIEVLGFNARQRKAFLNAIMRWGMPPQDAFNSHWLVRDLRGKSEKEFRAYVSLFMRHLCEPGADGAETFADGVPREGLSRQHVLTRIGVMSLVRKKVQEFEHVNGKYSTPDLIPEGPEGKKSGEVISSDPNTPVPASPAHLLPAPLGLPDKMEAQLGYMDEKDPGAQKPRQPLEVQALPAALDRVESEDKHESPASKERAREERPEETEKAPPSPEQLPRASCSVTQAGVQWRHLGSWEPLSPRLKRPSHLSFLNRGGAS

SEQ ID NO: 41340 - protein, 2997 aa, Homo sapiens
MADPGMMSLFGEDGNIFSEGLEGLGECGYPENPVNPMGQQMPIDQGFASLQPSLHHPSTNQNQTKLTHFDHYNQYEQQKMHLMDQPNRMMSNTPGNGLASPHSQYHTPPVPQVPHGGSGGGQMGVYPGMQNERHGQSFVDSSSMWGPRAVQVPDQIRAPYQQQQPQPQPPQPAPSGPPAQGHPQHMQQMGSYMARGDFSMQQHGQPQQRMSQFSQGQEGLNQGNPFIATSGPGHLSHVPQQSPSMAPSLRHSVQQFHHHPSTALHGESVAHSPRFSPNPPQQGAVRPQTLNFSSRSQTVPSPTINNSGQYSRYPYSNLNQGLVNNTGMNQNLGLTNNTPMNQSVPRYPNAVGFPSNSGQGLMHQQPIHPSGSLNQMNTQTMHPSQPQGTYASPPPMSPMKAMSNPAGTPPPQVRPGSAGIPMEVGSYPNMPHPQPSHQPPGAMGIGQRNMGPRNMQQSRPFIGMSSAPRELTGHMRPNGCPGVGLGDPQAIQERLIPGQQHPGQQPSFQQLPTCPPLQPHPGLHHQSSPPHPHHQPWAQLHPSPQNTPQKVPVHQHSPSEPFLEKPVPDMTQVSGPNAQLVKSDDYLPSIEQQPQQKKKKKKNNHIVAEDPSKGFGKDDFPGGVDNQELNRNSLDGSQEEKKKKKRSKAKKDPKEPKEPKEKKEPKEPKTPKAPKIPKEPKEKKAKTATPKPKSSKKSSNKKPDSEASALKKKVNKGKTEGSENSDLDKTPPPSPPPEEDEDPGVQKRRSSRQVKRKRYTEDLEFKISDEEADDADAAGRDSPSNTSQSEQQESVDAEGPVVEKIMSSRSVKKQKESGEEVEIEEFYVKYKNFSYLHCQWASIEDLEKDKRIQQKIKRFKAKQGQNKFLSEIEDELFNPDYVEVDRIMDFARSTDDRGEPVTHYLVKWCSLPYEDSTWERRQDIDQAKIEEFEKLMSREPETERVERPPADDWKKSESSREYKNNNKLREYQLEGVNWLLFNWYNMRNCILADEMGLGKTIQSITFLYEIYLKGIHGPFLVIAPLSTIPNWEREFRTWTELNVVVYHGSQASRRTIQLYEMYFKDPQGRVIKGSYKFHAIITTFEMILTDCPELRNIPWRCVVIDEAHRLKNRNCKLLEGLKMMDLEHKVLLTGTPLQNTVEELFSLLHFLEPSRFPSETTFMQEFGDLKTEEQVQKLQAILKPMMLRRLKEDVEKNLAPKEETIIEVELTNIQKKYYRAILEKNFTFLSKGGGQANVPNLLNTMMELRKCCNHPYLINGAEEKILEEFKETHNAESPDFQLQAMIQAAGKLVLIDKLLPKLKAGGHRVLIFSQMVRCLDILEDYLIQRRYPYERIDGRVRGNLRQAAIDRFSKPDSDRFVFLLCTRAGGLGINLTAADTCIIFDSDWNPQNDLQAQARCHRIGQSKSVKIYRLITRNSYEREMFDKASLKLGLDKAVLQSMSGRENATNGVQQLSKKEIEDLLRKGAYGALMDEEDEGSKFCEEDIDQILLRRTHTITIESEGKGSTFAKASFVASGNRTDISLDDPNFWQKWAKKAELDIDALNGRNNLVIDTPRVRKQTRLYSAVKEDELMEFSDLESDSEEKPCAKPRRPQDKSQGYARSECFRVEKNLLVYGWGRWTDILSHGRYKRQLTEQDVETICRTILVYCLNHYKGDENIKSFIWDLITPTADGQTRALVNHSGLSAPVPRGRKGKKVKAQSTQPVVQDADWLASCNPDALFQEDSYKKHLKHHCNKVLLRVRMLYYLRQEVIGDQADKILEGADSSEADVWIPEPFHAEVPADWWDKEADKSLLIGVFKHGYEKYNSMRADPALCFLERVGMPDAKAIAAEQRGTDMLADGGDGGEFDREDEDPEYKPTRTPFKDEIDEFANSPSEDKEESMEIHATGKHSESNAELGQLYWPNTSTLTTRLRRLITAYQRSYKRQQMRQEALMKTDRRRRRPREEVRALEAEREAIISEKRQKWTRREEADFYRVVSTFGVIFDPVKQQFDWNQFRAFARLDKKSDESLEKYFSCFVAMCRRVCRMPVKPDDEPPDLSSIIEPITEERASRTLYRIELLRKIREQVLHHPQLGERLKLCQPSLDLPEWWECGRHDRDLLVGAAKHGVSRTDYHILNDPELSFLDAHKNFAQNRGAGNTSSLNPLAVGFVQTPPVISSAHIQDERVLEQAEGKVEEPENPAAKEKCEGKEEEEETDGSGKESKQECEAEASSVKNELKGVEVGADTGSKSISEKGSEEDEEEKLEDDDKSEESSQPEAGAVSRGKNFDEESNASMSTARDETRDGFYMEDGDPSVAQLLHERTFAFSFWPKDRVMINRLDNICEAVLKGKWPVNRRQMFDFQGLIPGYTPTTVDSPLQKRSFAELSMVGQASISGSEDITTSPQLSKEDALNLSVPRQRRRRRRKIEIEAERAAKRRNLMEMVAQLRESQVVSENGQEKVVDLSKASREATSSTSNFSSLSSKFILPNVSTPVSDAFKTQMELLQAGLSRTPTRHLLNGSLVDGEPPMKRRRGRRKNVEGLDLLFMSHKRTSLSAEDAEVTKAFEEDIETPPTRNIPSPGQLDPDTRIPVINLEDGTRLVGEDAPKNKDLVEWLKLHPTYTVDMPSYVPKNADVLFSSFQKPKQKRHRCRNPNKLDINTLTGEERVPVVNKRNGKKMGGAMAPPMKDLPRWLEENPEFAVAPDWTDIVKQSGFVPESMFDRLLTGPVVRGEGASRRGRRPKSEIARAAAAAAAVASTSGINPLLVNSLFAGMDLTSLQNLQNLQSLQLAGLMGFPPGLATAATAGGDAKNPAAVLPLMLPGMAGLPNVFGLGGLLNNPLSAATGNTTTASSQGEPEDSTSKGEEKGNENEDENKDSEKSTDAVSAADSANGSVGAATAPAGLPSNPLAFNPFLLSTMAPGLFYPSMFLPPGLGGLTLPGFPALAGLQNAVGSSEEKAADKAEGGPFKDGETLEGSDAEESLDKTAESSLLEDEIAQGEELDSLDGGDEIENNENDE

SEQ ID NO: 41341 - protein, 2997 aa, Homo sapiens; identical to SEQ ID NO: 41340

SEQ ID NO: 41342 - protein, 33 aa, Homo sapiens
MADPGMMSLFGEDGNIFSEGLEGLGECGYPENP

SEQ ID NO: 41343 - protein, 2301 aa, Homo sapiens
KGESKRITLVLQQPQSGGPQGHRHVVLGSLPGKIVLQGNQLAALTQAKNAQGQPAKVVTIQLQVQQPQQKIQIVPQPPSSQPQPQQPPSTQPVTLSSVQQAQIMGPGQSPGQRLSVPVKVVLQPQAGSSQGASSGLSVVKVLSASEVAALSSPASSAPHSGGKTGMEENRRLEHQKKQEKANRIVAEAIARARARGEQNIPRVLNEDELPSVRPEEEGEKKRRKKSAGERLKEEKPKKSKTSGASKTKGKSKLNTITPVVGKKRKRNTSSDNSDVEVMPAQSPREDEESSIQKRRSNRQVKRKKYTEDLDIKITDDEEEEEVDVTGPIKPEPILPEPVQEPDGETLPSMQFFVENPSEEDAAIVDKVLSMRIVKKELPSGQYTEAEEFFVKYKNYSYLHCEWATISQLEKDKRIHQKLKRFKTKMAQMRHFFHEDEEPFNPDYVEVDRILDESHSIDKDNGEPVIYYLVKWCSLPYEDSTWELKEDVDEGKIREFKRIQSRHPELKRVNRPQASAWKKLELSHEYKNRNQLREYQLEGVNWLLFNWYNRQNCILADEMGLGKTIQSIAFLQEVYNVGIHGPFLVIAPLSTITNWEREFNTWTEMNTIVYHGSLASRQMIQQYEMYCKDSRGRLIPGAYKFDALITTFEMILSDCPELREIEWRCVIIDEAHRLKNRNCKLLDSLKHMDLEHKVLLTGTPLQNTVEELFSLLHFLEPSQFPSESEFLKDFGDLKTEEQVQKLQAILKPMMLRRLKEDVEKNLAPKQETIIEVELTNIQKKYYRAILEKNFSFLSKGAGHTNMPNLLNTMMELRKCCNHPYLINGAEEKILTEFREACHIIPHDFHLQAMVRSAGKLVLIDKLLPKLKAGGHKVLIFSQMVRCLDILEDYLIQRRYLYERIDGRVRGNLRQAAIDRFSKPDSDRFVFLLCTRAGGLGINLTAADTCIIFDSDWNPQNDLQAQARCHRIGQSKAVKVYRLITRNSYEREMFDKASLKLGLDKAVLQSMSGRDGNITGIQQFSKKEIEDLLRKGAYAAIMEEDDEGSKFCEEDIDQILLRRTTTITIESEGKGSTFAKASFVASENRTDISLDDPNFWQKWAKKADLDMDLLNSKNNLVIDTPRVRKQTRHFSTLKDDDLVEFSDLESEDDERPRSRRHDRHHAYGRTDCFRVEKHLLVYGWGRWRDILSHGRFKRRMTERDVETICRAILVYCLLHYRGDENIKGFIWDLISPAENGKTKELQNHSGLSIPVPRGRKGKKVKSQSTFDIHKADWIRKYNPDTLFQDESYKKHLKHQCNKVLLRVRMLYYLRQEVIGDQAEKVLGGAIASEIDIWFPVVDQLEVPTTWWDSEADKSLLIGVFKHGYEKYNTMRADPALCFLEKAGRPDDKAIAAEHRVLDNFSDIVEGVDFDKDCEDPEYKPLQGPPKDQDDEGDPLMMMDEEISVIDGDEAQVTQQPGHLFWPPGSALTARLRRLVTAYQRSYKREQMKIEAAERGDRRRRRCEAAFKLKEIARREKQQRWTRREQTDFYRVVSTFGVEYDPDTMQFHWDRFRTFARLDKKTDESLTKYFHGFVAMCRQVCRLPPAAGDEPPDPNLFIEPITEERASRTLYRIELLRRLREQVLCHPLLEDRLALCQPPGPELPKWWEPVRHDGELLRGAARHGVSQTDCNIMQDPDFSFLAARMNYMQNHQAGAPAPSLSRCSTPLLHQQYTSRTASPLPLRPDAPVEKSPEETATQVPSLESLTLKLEHEVVARSRPTPQDYEMRVSPSDTTPLVSRSVPPVKLEDEDDSDSELDLSKLSPSSSSSSSSSSSSSSTDESEDEKEEKLTDQSRSKLYDEESLLSLTMSQDGFPNEDGEQMTPELLLLQERQRASEWPKDRVLINRIDLVCQAVLSGKWPSSRRSQEMVTGGILGPGNHLLDSPSLTPGEYGDSPVPTPRSSSAASMAEEEASAVSTAAAQFTKLRRGMDEKEFTVQIKDEEGLKLTFQKHKLMANGVMGDGHPLFHKKKGNRKKLVELEVECMEEPNHLDVDLETRIPVINKVDGTLLVGEDAPRRAELEMWLQGHPEFAVDPRFLAYMEDRRKQKWQRCKKNNKAELNCLGMEPVQTANSRNGKKGHHTETVFNRVLPGPIAPESSKKRARRMRPDLSKMMALMQGGSTGSLSLHNTFQHSSSGLQSVSSLGHSSATSASLPFMPFVMGGAPSSPHVDSSTMLHHHHHHPHPHHHHHHHPGLRAPGYPSSPVTTASGTTLRLPPLQPEEDDDEDEEDDDDLSQGYDSSERDFSLIDDPMMPANSDSSEDADD

SEQ ID NO: 41344 - protein, 2581 aa, Homo sapiens
MADPIMDLFDDPNLFGLDSLTDDSFNQVTQDPIEEALGLPSSLDSLDQMNQDGGGGDVGNSSASELVPPPEETAPTELSKESTAPAPESITLHDYTTQPASQEQPAQPVLQTSTPTSGLLQVSKSQEILSQGNPFMGVSATAVSSSSAGGQPPQSAPKIVILKAPPSSSVTGAHVAQIQAQGITSTAQPLVAGTANGGKVTFTKVLTGTPLRPGVSIVSGNTVLAAKVPGNQAAVQRIVQPSRPVKQLVLQPVKGSAPAGNPGATGPPLKPAVTLTSTPTQGESKRITLVLQQPQSGGPQGHRHVVLGSLPGKIVLQGNQLAALTQAKNAQGQPAKVVTIQLQVQQPQQKIQIVPQPPSSQPQPQQPPSTQPVTLSSVQQAQIMGPGQSPGQRLSVPVKVVLQPQAGSSQGASSGLSVVKVLSASEVAALSSPASSAPHSGGKTGMEENRRLEHQKKQEKANRIVAEAIARARARGEQNIPRVLNEDELPSVRPEEEGEKKRRKKSAGERLKEEKPKKSKTSGASKTKGKSKLNTITPVVGKKRKRNTSSDNSDVEVMPAQSPREDEESSIQKRRSNRQVKRKKYTEDLDIKITDDEEEEEVDVTGPIKPEPILPEPVQEPDGETLPSMQFFVENPSEEDAAIVDKVLSMRIVKKELPSGQYTEAEEFFVKYKNYSYLHCEWATISQLEKDKRIHQKLKRFKTKMAQMRHFFHEDEEPFNPDYVEVDRILDESHSIDKDNGEPVIYYLVKWCSLPYEDSTWELKEDVDEGKIREFKRIQSRHPELKRVNRPQASAWKKLELSHEYKNRNQLREYQLEGVNWLLFNWYNRQNCILADEMGLGKTIQSIAFLQEVYNVGIHGPFLVIAPLSTITNWEREFNTWTEMNTIVYHGSLASRQMIQQYEMYCKDSRGRLIPGAYKFDALITTFEMILSDCPELREIEWRCVIIDEAHRLKNRNCKLLDSLKHMDLEHKVLLTGTPLQNTVEELFSLLHFLEPSQFPSESEFLKDFGDLKTEEQVQKLQAILKPMMLRRLKEDVEKNLAPKQETIIEVELTNIQKKYYRAILEKNFSFLSKGAGHTNMPNLLNTMMELRKCCNHPYLINGAEEKILTEFREACHIIPHDFHLQAMVRSAGKLVLIDKLLPKLKAGGHKVLIFSQMVRCLDILEDYLIQRRYLYERIDGRVRGNLRQAAIDRFSKPDSDRFVFLLCTRAGGLGINLTAADTCIIFDSDWNPQNDLQAQARCHRIGQSKAVKVYRLITRNSYEREMFDKASLKLGLDKAVLQSMSGRDGNITGIQQFSKKEIEDLLRKGAYAAIMEEDDEGSKFCEEDIDQILLRRTTTITIESEGKGSTFAKASFVASENRTDISLDDPNFWQKWAKKADLDMDLLNSKNNLVIDTPRVRKQTRHFSTLKDDDLVEFSDLESEDDERPRSRRHDRHHAYGRTDCFRVEKHLLVYGWGRWRDILSHGRFKRRMTERDVETICRAILVYCLLHYRGDENIKGFIWDLISPAENGKTKELQNHSGLSIPVPRGRKGKKVKSQSTFDIHKADWIRKYNPDTLFQDESYKKHLKHQCNKVLLRVRMLYYLRQEVIGDQAEKVLGGAIASEIDIWFPVVDQLEVPTTWWDSEADKSLLIGVFKHGYEKYNTMRADPALCFLEKAGRPDDKAIAAEHRVLDNFSDIVEGVDFDKDCEDPEYKPLQGPPKDQDDEGDPLMMMDEEISVIDGDEAQVTQQPGHLFWPPGSALTARLRRLVTAYQRSYKREQMKIEAAERGDRRRRRCEAAFKLKEIARREKQQRWTRREQTDFYRVVSTFGVEYDPDTMQFHWDRFRTFARLDKKTDESLTKYFHGFVAMCRQVCRLPPAAGDEPPDPNLFIEPITEERASRTLYRIELLRRLREQVLCHPLLEDRLALCQPPGPELPKWWEPVRHDGELLRGAARHGVSQTDCNIMQDPDFSFLAARMNYMQNHQAGAPAPSLSRCSTPLLHQQYTSRTASPLPLRPDAPVEKSPEETATQVPSLESLTLKLEHEVVARSRPTPQDYEMRVSPSDTTPLVSRSVPPVKLEDEDDSDSELDLSKLSPSSSSSSSSSSSSSSTDESEDEKEEKLTDQSRSKLYDEESLLSLTMSQDGFPNEDGEQMTPELLLLQERQRASEWPKDRVLINRIDLVCQAVLSGKWPSSRRSQEMVTGGILGPGNHLLDSPSLTPGEYGDSPVPTPRSSSAASMAEEEASAVSTAAAQFTKLRRGMDEKEFTVQIKDEEGLKLTFQKHKLMANGVMGDGHPLFHKKKGNRKKLVELEVECMEEPNHLDVDLETRIPVINKVDGTLLVGEDAPRRAELEMWLQGHPEFAVDPRFLAYMEDRRKQKWQRCKKNNKAELNCLGMEPVQTANSRNGKKGHHTETVFNRVLPGPIAPESSKKRARRMRPDLSKMMALMQGGSTGSLSLHNTFQHSSSGLQSVSSLGHSSATSASLPFMPFVMGGAPSSPHVDSSTMLHHHHHHPHPHHHHHHHPGLRAPGYPSSPVTTASGTTLRLPPLQPEEDDDEDEEDDDDLSQGYDSSERDFSLIDDPMMPANSDSSEDADD

SEQ ID NO: 41345 - protein, 2302 aa, Homo sapiens
MKGESKRITLVLQQPQSGGPQGHRHVVLGSLPGKIVLQGNQLAALTQAKNAQGQPAKVVTIQLQVQQPQQKIQIVPQPPSSQPQPQQPPSTQPVTLSSVQQAQIMGPGQSPGQRLSVPVKVVLQPQAGSSQGASSGLSVVKVLSASEVAALSSPASSAPHSGGKTGMEENRRLEHQKKQEKANRIVAEAIARARARGEQNIPRVLNEDELPSVRPEEEGEKKRRKKSAGERLKEEKPKKSKTSGASKTKGKSKLNTITPVVGKKRKRNTSSDNSDVEVMPAQSPREDEESSIQKRRSNRQVKRKKYTEDLDIKITDDEEEEEVDVTGPIKPEPILPEPVQEPDGETLPSMQFFVENPSEEDAAIVDKVLSMRIVKKELPSGQYTEAEEFFVKYKNYSYLHCEWATISQLEKDKRIHQKLKRFKTKMAQMRHFFHEDEEPFNPDYVEVDRILDESHSIDKDNGEPVIYYLVKWCSLPYEDSTWELKEDVDEGKIREFKRIQSRHPELKRVNRPQASAWKKLELSHEYKNRNQLREYQLEGVNWLLFNWYNRQNCILADEMGLGKTIQSIAFLQEVYNVGIHGPFLVIAPLSTITNWEREFNTWTEMNTIVYHGSLASRQMIQQYEMYCKDSRGRLIPGAYKFDALITTFEMILSDCPELREIEWRCVIIDEAHRLKNRNCKLLDSLKHMDLEHKVLLTGTPLQNTVEELFSLLHFLEPSQFPSESEFLKDFGDLKTEEQVQKLQAILKPMMLRRLKEDVEKNLAPKQETIIEVELTNIQKKYYRAILEKNFSFLSKGAGHTNMPNLLNTMMELRKCCNHPYLINGAEEKILTEFREACHIIPHDFHLQAMVRSAGKLVLIDKLLPKLKAGGHKVLIFSQMVRCLDILEDYLIQRRYLYERIDGRVRGNLRQAAIDRFSKPDSDRFVFLLCTRAGGLGINLTAADTCIIFDSDWNPQNDLQAQARCHRIGQSKAVKVYRLITRNSYEREMFDKASLKLGLDKAVLQSMSGRDGNITGIQQFSKKEIEDLLRKGAYAAIMEEDDEGSKFCEEDIDQILLRRTTTITIESEGKGSTFAKASFVASENRTDISLDDPNFWQKWAKKADLDMDLLNSKNNLVIDTPRVRKQTRHFSTLKDDDLVEFSDLESEDDERPRSRRHDRHHAYGRTDCFRVEKHLLVYGWGRWRDILSHGRFKRRMTERDVETICRAILVYCLLHYRGDENIKGFIWDLISPAENGKTKELQNHSGLSIPVPRGRKGKKVKSQSTFDIHKADWIRKYNPDTLFQDESYKKHLKHQCNKVLLRVRMLYYLRQEVIGDQAEKVLGGAIASEIDIWFPVVDQLEVPTTWWDSEADKSLLIGVFKHGYEKYNTMRADPALCFLEKAGRPDDKAIAAEHRVLDNFSDIVEGVDFDKDCEDPEYKPLQGPPKDQDDEGDPLMMMDEEISVIDGDEAQVTQQPGHLFWPPGSALTARLRRLVTAYQRSYKREQMKIEAAERGDRRRRRCEAAFKLKEIARREKQQRWTRREQTDFYRVVSTFGVEYDPDTMQFHWDRFRTFARLDKKTDESLTKYFHGFVAMCRQVCRLPPAAGDEPPDPNLFIEPITEERASRTLYRIELLRRLREQVLCHPLLEDRLALCQPPGPELPKWWEPVRHDGELLRGAARHGVSQTDCNIMQDPDFSFLAARMNYMQNHQAGAPAPSLSRCSTPLLHQQYTSRTASPLPLRPDAPVEKSPEETATQVPSLESLTLKLEHEVVARSRPTPQDYEMRVSPSDTTPLVSRSVPPVKLEDEDDSDSELDLSKLSPSSSSSSSSSSSSSSTDESEDEKEEKLTDQSRSKLYDEESLLSLTMSQDGFPNEDGEQMTPELLLLQERQRASEWPKDRVLINRIDLVCQAVLSGKWPSSRRSQEMVTGGILGPGNHLLDSPSLTPGEYGDSPVPTPRSSSAASMAEEEASAVSTAAAQFTKLRRGMDEKEFTVQIKDEEGLKLTFQKHKLMANGVMGDGHPLFHKKKGNRKKLVELEVECMEEPNHLDVDLETRIPVINKVDGTLLVGEDAPRRAELEMWLQGHPEFAVDPRFLAYMEDRRKQKWQRCKKNNKAELNCLGMEPVQTANSRNGKKGHHTETVFNRVLPGPIAPESSKKRARRMRPDLSKMMALMQGGSTGSLSLHNTFQHSSSGLQSVSSLGHSSATSASLPFMPFVMGGAPSSPHVDSSTMLHHHHHHPHPHHHHHHHPGLRAPGYPSSPVTTASGTTLRLPPLQPEEDDDEDEEDDDDLSQGYDSSERDFSLIDDPMMPANSDSSEDADD

SEQ ID NO: 41346 - protein, 2581 aa, Homo sapiens; identical to SEQ ID NO: 41344

SEQ ID NO: 41347 - protein, 598 aa, Homo sapiens
MTFQASHRSAWGKSRKKNWQYEGPTQKLFLKRNNVSAPDGPSDPSISVSSEQSGAQQPPALQVERIVDKRKNKKGKTEYLVRWKGYDSEDDTWEPEQHLVNCEEYIHDFNRRHTEKQKESTLTRTNRTSPNNARKQISRSTNSNFSKTSPKALVIGKDHESKNSQLFAASQKFRKNTAPSLSSRKNMDLAKSGIKILVPKSPVKSRTAVDGFQSESPEKLDPVEQGQEDTVAPEVAAEKPVGALLGPGAERARMGSRPRIHPLVPQVPGPVTAAMATGLAVNGKGTSPFMDALTANGTTNIQTSVTGVTASKRKFIDDRRDQPFDKRLRFSVRQTESAYRYRDIVVRKQDGFTHILLSTKSSENNSLNPEVMREVQSALSTAAADDSKLVLLSAVGSVFCCGLDFIYFIRRLTDDRKRESTKMAEAIRNFVNTFIQFKKPIIVAVNGPAIGLGASILPLCDVVWANEKAWFQTPYTTFGQSPDGCSTVMFPKIMGGASANEMLLSGRKLTAQEACGKGLVSQVFWPGTFTQEVMVRIKELASCNPVVLEESKALVRCNMKMELEQANERECEVLKKIWGSAQGMDSMLKYLQRKIDEF

SEQ ID NO: 41348 - protein, 412 aa, Homo sapiens
MDLAKSGIKILVPKSPVKSRTAVDGFQSESPEKLDPVEQGQEDTVAPEVAAEKPVGALLGPGAERARMGSRPRIHPLVPQVPGPVTAAMATGLAVNGKGTSPFMDALTANGTTNIQTSVTGVTASKRKFIDDRRDQPFDKRLRFSVRQTESAYRYRDIVVRKQDGFTHILLSTKSSENNSLNPEVMREVQSALSTAAADDSKLVLLSAVGSVFCCGLDFIYFIRRLTDDRKRESTKMAEAIRNFVNTFIQFKKPIIVAVNGPAIGLGASILPLCDVVWANEKAWFQTPYTTFGQSPDGCSTVMFPKIMGGASANEMLLSGRKLTAQEACGKGLVSQVFWPGTFTQEVMVRIKELASCNPVVLEESKALVRCNMKMELEQANERECEVLKKIWGSAQGMDSMLKYLQRKIDEF

SEQ ID NO: 41349 - protein, 544 aa, Homo sapiens
MASEELYEVERIVDKRKNKKGKTEYLVRWKGYDSEDDTWEPEQHLVNCEEYIHDFNRRHTEKQKESTLTRTNRTSPNNARKQISRSTNSNFSKTSPKALVIGKDHESKNSQLFAASQKFRKNTAPSLSSRKNMDLAKSGIKILVPKSPVKSRTAVDGFQSESPEKLDPVEQGQEDTVAPEVAAEKPVGALLGPGAERARMGSRPRIHPLVPQVPGPVTAAMATGLAVNGKGTSPFMDALTANGTTNIQTSVTGVTASKRKFIDDRRDQPFDKRLRFSVRQTESAYRYRDIVVRKQDGFTHILLSTKSSENNSLNPEVMREVQSALSTAAADDSKLVLLSAVGSVFCCGLDFIYFIRRLTDDRKRESTKMAEAIRNFVNTFIQFKKPIIVAVNGPAIGLGASILPLCDVVWANEKAWFQTPYTTFGQSPDGCSTVMFPKIMGGASANEMLLSGRKLTAQEACGKGLVSQVFWPGTFTQEVMVRIKELASCNPVVLEESKALVRCNMKMELEQANERECEVLKKIWGSAQGMDSMLKYLQRKIDEF

SEQ ID NO: 41350 - protein, 412 aa, Homo sapiens; identical to SEQ ID NO: 41348

SEQ ID NO: 41351 - protein, 554 aa, Homo sapiens
MASQEFEVEAIVDKRQDKNGNTQYLVRWKGYDKQDDTWEPEQHLMNCEKCVHDFNRRQTEKQKKLTWTTTSRIFSNNARRRTSRSTKANYSKNSPKTPVTDKHHRSKNRKLFAASKNVRRKAASILSDTKNMEIINSTIETLAPDSPFDHKTVSGFQKLEKLDPIAADQQDTVVFKVTEGKLLRDPLSRPGAEQTGIQNKTQIHPLMSQMSGSVTASMATGSATRKGIVVLIDPLAANGTTDMHTSVPRVKGGQRNITDDSRDQPFIKKMHFTIRLTESASTYRDIVVKKEDGFTQIVLSTRSTEKNALNTEVIKEIVNALNSAAADDSKLVLFSAAGSVFCCGLDFGYFVKHLRNNRNTASLEMVDTIKNFVNTFIQFKKPIVVSVNGPAIGLGASILPLCDLVWANEKAWFQTPYTTFGQSPDGCSSITFPKMMGKASANEMLIAGRKLTAREACAKGLVSQVFLTGTFTQEVMIQIKELASYNPIVLEECKALVRCNIKLELEQANERECEVLRKIWSSAQGIESMLKIPLLGYKAAFPPRKTQNDQRWCP

SEQ ID NO: 41352 - protein, 540 aa, Homo sapiens
MASQEFEVEAIVDKRQDKNGNTQYLVRWKGYDKQDDTWEPEQHLMNCEKCVHDFNRRQTEKQKKLTWTTTSRIFSNNARRRTSRSTKANYSKNSPKTPVTDKHHRSKNRKLFAASKNVRRKAASILSDTKNMEIINSTIETLAPDSPFDHKTVSGFQKLEKLDPIAADQQDTVVFKVTEGKLLRDPLSRPGAEQTGIQNKTQIHPLMSQMSGSVTASMATGSATRKGIVVLIDPLAANGTTDMHTSVPRVKGGQRNITDDSRDQPFIKKMHFTIRLTESASTYRDIVVKKEDGFTQIVLSTRSTEKNALNTEVIKEIVNALNSAAADDSKLVLFSAAGSVFCCGLDFGYFVKHLRNNRNTASLEMVDTIKNFVNTFIQFKKPIVVSVNGPAIGLGASILPLCDLVWANEKAWFQTPYTTFGQSPDGCSSITFPKMMGKASANEMLIAGRKLTAREACAKGLVSQVFLTGTFTQEVMIQIKELASYNPIVLEECKALVRCNIKLELEQANERECEVLRKIWSSAQGIESMLKYVENKIDEF

SEQ ID NO: 41353 - protein, 457 aa, Homo sapiens
MRSAAVLALLLCAGQVTALPVNSPMNKGDTEVMKCIVEVISDTLSKPSPMPVSQECFETLRGDERILSILRHQNLLKELQDLALQGAKERAHQQKKHSGFEDELSEVLENQSSQAELKEAVEEPSSKDVMEKREDSKEAEKSGEATDGARPQALPEPMQESKAEGNNQAPGEEEEEEEEATNTHPPASLPSQKYPGPQAEGDSEGLSQGLVDREKGLSAEPGWQAKREEEEEEEEEAEAGEEAVPEEEGPTVVLNPHPSLGYKEIRKGESRSEALAVDGAGKPGAEEAQDPEGKGEQEHSQQKEEEEEMAVVPQGLFRGGKSGELEQEEERLSKEWEDSKRWSKMDQLAKELTAEKRLEGQEEEEDNRDSSMKLSFRARAYGFRGPGPQLRRGWRPSSREDSLEAGLPLQVRGYPEEKKEEEGSANRRPEDQELESLSAIEAELEKVAHQLQALRRG

SEQ ID NO: 41354 - protein, 306 aa, Homo sapiens
MRSAAVLALLLCAGQVTALPVNSPMNKGDTEVMKCIVEVISDTLSKPSPMPVSQECFETLRGDERILSILRHQNLLKELQDLALQGAKERAHQQKKHSGFEDELSEVLENQSSQAELKGRSEALAVDGAGKPGAEEAQDPEGKGEQEHSQQKEEEEEMAVVPQGLFRGGKSGELEQEEERLSKEWEDSKRWSKMDQLAKELTAEKRLEGQEEEEDNRDSSMKLSFRARAYGFRGPGPQLRRGWRPSSREDSLEAGLPLQVRGYPEEKKEEEGSANRRPEDQELESLSAIEAELEKVAHQLQALRRG

SEQ ID NO: 41355 - protein, 677 aa, Homo sapiens
MQPTLLLSLLGAVGLAAVNSMPVDNRNHNEGMVTRCIIEVLSNALSKSSAPPITPECRQVLKTSRKDVKDKETTENENTKFEVRLLRDPADASEAHESSSRGEAGAPGEEDIQGPTKADTEKWAEGGGHSRERADEPQWSLYPSDSQVSEEVKTRHSEKSQREDEEEEEGENYQKGERGEDSSEEKHLEEPGETQNAFLNERKQASAIKKEELVARSETHAAGHSQEKTHSREKSSQESGEETGSQENHPQESKGQPRSQEESEEGEEDATSEVDKRRTRPRHHHGRSRPDRSSQGGSLPSEEKGHPQEESEESNVSMASLGEKRDHHSTHYRASEEEPEYGEEIKGYPGVQAPEDLEWERYRGRGSEEYRAPRPQSEESWDEEDKRNYPSLELDKMAHGYGEESEEERGLEPGKGRHHRGRGGEPRAYFMSDTREEKRFLGEGHHRVQENQMDKARRHPQGAWKELDRNYLNYGEEGAPGKWQQQGDLQDTKENREEARFQDKQYSSHHTAEKRKRLGELFNPYYDPLQWKSSHFERRDNMNDNFLEGEEENELTLNEKNFFPEYNYDWWEKKPFSEDVNWGYEKRNLARVPKLDLKRQYDRVAQLDQLLHYRKKSAEFPDFYDSEEPVSTHQEAENEKDRADQTVLTEDEKKELENLAAMDLELQKIAEKFSQRG

SEQ ID NO: 41356 - protein, 289 aa, Homo sapiens
MPVDNRNHNEGMVTRCIIEVLSNALSKSSAPPITPECRQVLKTSRKDVKDKETTENENTKFEVRLLRDPADASEAHESSSRGEAGAPGEEDIQGPTKADTEKWAEGGGHSRERADEPQWSLYPSDSQVSEEVKTRHSEKSQREDEEEEEGENYQKGERGEDSSEEKHLEEPGETQNAFLNERKQASAIKKEELVARSETHAAGHSQEKTHSREKSSQESGEETGSQENHPQESKGQPRSQEESEEGEEDATSEVDKRRTRPRHHHGRSRPDRSSQGGSLPSEEKGHPQE

SEQ ID NO: 41357 - protein, 601 aa, Homo sapiens
MPERELWPAGTGSEPVTRVGSCDSMMSSTSTRSGSSDSSYDFLSTEEKECLLFLEETIGSLDTEADSGLSTDESEPATTPRGFRALPITQPTPRGGPEETITQQGRTPRTVTESSSSHPPEPQGLGLRSGSYSLPRNIHIARSQNFRKSTTQASSHNPGEPGRLAPEPEKEQVSQSSQPRQAPASPQEAALDLDVVLIPPPEAFRDTQPEQCREASLPEGPGQQGHTPQLHTPSSSQEREQTPSEAMSQKAKETVSTRYTQPQPPPAGLPQNARAEDAPLSSGEDPNSRLAPLTTPKPRKLPPNIVLKSSRSSFHSDPQHWLSRHTEAAPGDSGLISCSLQEQRKARKEALEKLGLPQDQDEPGLHLSKPTSSIRPKETRAQHLSPAPGLAQPAAPAQASAAIPAAGKALAQAPAPAPGPAQGPLPMKSPAPGNVAASKSMPISIPKAPRANSALTPPKPESGLTLQESNTPGLRQMNFKSNTLERSGVGLSSYLSTEKDASPKTSTSLGKGSFLDKISPSVLRNSRPRPASLGTGKDFAGIQVGKLADLEQEQSSKRLSYQGQSRDKLPRPPCVSVKISPKGVPNEHRREALKKLGLLKE

SEQ ID NO: 41358 - protein, 355 aa, Homo sapiens
MSQKAKETVSTRYTQPQPPPAGLPQNARAEDAPLSSGEDPNSRLAPLTTPKPRKLPPNIVLKSSRSSFHSDPQHWLSRHTEAAPGDSGLISCSLQEQRKARKEALEKLGLPQDQDEPGLHLSKPTSSIRPKETRAQHLSPAPGLAQPAAPAQASAAIPAAGKALAQAPAPAPGPAQGPLPMKSPAPGNVAASKSMPISIPKAPRANSALTPPKPESGLTLQESNTPGLRQMNFKSNTLERSGVGLSSYLSTEKDASPKTSTSLGKGSFLDKISPSVLRNSRPRPASLGTGKDFAGIQVGKLADLEQEQSSKRLSYQGQSRDKLPRPPCVSVKISPKGVPNEHRREALKKLGLLKE

SEQ ID NO: 41359 - protein, 349 aa, Homo sapiens
MAGPAIHTAPMLFLVLLLPLELSLAGALAPGTPARNLPENHIDLPGPALWTPQASHHRRRGPGKKEWGPGLPSQAQDGAVVTATRQASRLPEAEGLLPEQSPAGLLQDKDLLLGLALPYPEKENRPPGWERTRKRSREHKRRRDRLRLHQGRALVRGPSSLMKKAELSEAQVLDAAMEESSTSLAPTMFFLTTFEAAPATEESLILPVTSLRPQQAQPRSDGEVMPTLDMALFDWTDYEDLKPDGWPSAKKKEKHRGKLSSDGNETSPAEGEPCDHHQDCLPGTCCDLREHLCTPHNRGLNNKCFDDCMCVEGLRCYAKFHRNRRVTRRKGRCVEPETANGDQGSFINV

SEQ ID NO: 41360 - protein, 158 aa, Homo sapiens
MCFSRADAADNYPFGTCQQRKLFPHFHPPNLIGNKFVPLRGSPHRGPGCYFSDEMTPHAGRYQKVSPQQEKHKQNFAPFNVLVPRFKNYPKDTYYPSPGAYNPEKKPPPKIAWPMKFGSPDWAQVPCLQKRTLKAELSTDKDFRKHRNRVAYLSLYYN

SEQ ID NO: 41361 - protein, 191 aa, Homo sapiens
MCFSRADAADNYPFGTCQQRKLFPHFHPPNLIGNKFVPLRGSPHRGPGCYFSDGYGLAYDLSKIPTSIKGYTLGARTAVRFKPIQKEMTPHAGRYQKVSPQQEKHKQNFAPFNVLVPRFKNYPKDTYYPSPGAYNPEKKPPPKIAWPMKFGSPDWAQVPCLQKRTLKAELSTDKDFRKHRNRVAYLSLYYN

SEQ ID NO: 41362 - protein, 684 aa, Homo sapiens
MWVLLRSGYPLRILLPLRGEWMGRRGLPRNLAPGPPRRRYRKETLQALDMPVLPVTATEIRQYLRGHGIPFQDGHSCLRALSPFAESSQLKGQTGVTTSFSLFIDKTTGHFLCMTSLAEGSWEDFQASVEGRGDGAREGFLLSKAPEFEDSEEVRRIWNRAIPLWELPDQEEVQLADTMFGLTKVTDDTLKRFSVRYLRPARSLVFPWFSPGGSGLRGLKLLEAKCQGDGVSYEETTIPRPSAYHNLFGLPLISRRDAEVVLTSRELDSLALNQSTGLPTLTLPRGTTCLPPALLPYLEQFRRIVFWLGDDLRSWEAAKLFARKLNPKRCFLVRPGDQQPRPLEALNGGFNLSRILRTALPAWHKSIVSFRQLREEVLGELSNVEQAAGLRWSRFPDLNRILKGHRKGELTVFTGPTGSGKTTFISEYALDLCSQGVNTLWGSFEISNVRLARVMLTQFAEGRLEDQLDKYDHWADRFEDLPLYFMTFHGQQSIRTVIDTMQHAVYVYDICHVIIDNLQFMMGHEQLSTDRIAAQDYIIGVFRKFATDNNCHVTLVIHPRKEDDDKELQTASIFGSAKASQEADNVLILQDRKLVTGPGKRYLQVSKNRFDGDVGVFPLEFNKNSLTFSIPPKNKARLKKIKDDTGPVAKKPSSGKKGATTQNSEICSGQAPTPDQPDTSKRSK

SEQ ID NO: 41363 - protein, 582 aa, Homo sapiens
MWVLLRSGYPLRILLPLRGEWMGRRGLPRNLAPGPPRRRYRKETLQALDMPVLPVTATEIRQYLRGHGIPFQDGHSCLRALSPFAESSQLKGQTGVTTSFSLFIDKTTGHFLCMTSLAEGSWEDFQASVEGRGDGAREGFLLSKAPEFEDSEEVRRIWNRAIPLWELPDQEEVQLADTMFGLTKVTDDTLKRFSVRYLRPARSLVFPWFSPGGSGLRGLKLLEAKCQGDGVSYEETTIPRPSAYHNLFGLPLISRRDAEVVLTSRELDSLALNQSTGLPTLTLPRGTTCLPPALLPYLEQFRRIVFWLGDDLRSWEAAKLFARKLNPKRCFLVRPGDQQPRPLEALNGGFNLSRILRTALPAWHKSIVSFRQLREEVLGELSNVEQAAGLRWSRFPDLNRILKGHRKGELTVFTGPTGSGKTTFISEYALDLCSQGVNTLWGSFEISNVRLARVMLTQFAEGRLEDQLDKYDHWADRFEDLPLYFMTFHGQQSIRTVIDTMQHAVYVYDICHVIIDNLQFMMGHEQLSTDRIAAQDYIIGVFRKFATDNNCHVTLVIHPRKEDDDKELQTASIFGSAKVSGL

SEQ ID NO: 41364 - protein, 342 aa, Homo sapiens
MPFLLGLRQDKEACVGTNNQSYICDTGHCCGQSQCCNYYYELWWFWLVWTIIIILSCCCVCHHRRAKHRLQAQQRQHEINLIAYREAHNYSALPFYFRFLPNYLLPPYEEVVNRPPTPPPPYSAFQLQQQQLLPPQCGPAGGSPPGIDPTRGSQGAQSSPLSEPSRSSTRPPSIADPDPSDLPVDRAATKAPGMEPSGSVAGLGELDPGAFLDKDAECREELLKDDSSEHGAPDSKEKTPGRHRRFTGDSGIEVCVCNRGHHDDDLKEFNTLIDDALDGPLDFCDSCHVRPPGDEEEGLCQSSEEQAREPGHPHLPRPPACLLLNTINEQDSPNSQSSSSPS

SEQ ID NO: 41365 - protein, 363 aa, Homo sapiens
MERRRLLGGMALLLLQALPSPLSARAEPPQDKEACVGTNNQSYICDTGHCCGQSQCCNYYYELWWFWLVWTIIIILSCCCVCHHRRAKHRLQAQQRQHEINLIAYREAHNYSALPFYFRFLPNYLLPPYEEVVNRPPTPPPPYSAFQLQQQQLLPPQCGPAGGSPPGIDPTRGSQGAQSSPLSEPSRSSTRPPSIADPDPSDLPVDRAATKAPGMEPSGSVAGLGELDPGAFLDKDAECREELLKDDSSEHGAPDSKEKTPGRHRRFTGDSGIEVCVCNRGHHDDDLKEFNTLIDDALDGPLDFCDSCHVRPPGDEEEGLCQSSEEQAREPGHPHLPRPPACLLLNTINEQDSPNSQSSSSPS

SEQ ID NO: 41366 - protein, 351 aa, Homo sapiens
MATDVQLADYPLMSPKAELKLEKKSGRKPRSPRDSGPQKELVIPGIVDFERIRRALRTPKPQTPGTYCFGRLSHHSFFSRHHPHPQHVTHIQDLTGKPVCVVRDFPAPLPESTVFSGCQMGIPTISVPIGDPQSNRNPQLSSEAWKKELKELASRVAFLTKEDELKKKEKEQKEEPLREQGAKYSAETGRLIPASTRAVGRRRSHQGQQSQSSSRHEGVQAFLLQDQELLVLELLCRILETDLLSAIQFWLLYAPPKEKDLALGLLQTAVAQLLPQPLVSIPTEKLLSQLPEVHEPPQEKQEPPCSQSPKKTKISPFTKSEKPEYIGEAQVLQMHSSQNTEKKTSKPRAES

SEQ ID NO: 41367 - protein, 106 aa, Homo sapiens
QCAELWGSVRKNSDKFLLSRNLHPSKEEYRQQIKTPGEEWRQILVHWRSSSPPDAFKPEHREEDIEAEGRELRGPNTCTCLAQEQPQGFRGVSVSTTFTAVPDSLP

SEQ ID NO: 41368 - protein, 250 aa, Homo sapiens
MATDVQLADYPLMSPKAELKLEKKSGRKPRSPRDSGPQKELVIPGIVDFERIRRALRTPKPQTPGTYCFGRLSHHSFFSRHHPHPQHVTHIQDLTGKPVCVVRDFPAPLPESTVFSGCQMGIPTISVPIGDPQSNRNPQLSSEAWKKELKELASRVAFLTKEDELKKKEKEQKEEPLREQGAKYSAETGRLIPASTRAVGRRRSHQGQQSQSSSRHEGVQAFLLQDQELLKKTSLWDSCRQQWLSSFPSP

SEQ ID NO: 41369 - protein, 316 aa, Homo sapiens
SPKAELKLEKKSGRKPRSPRDSGPQKELVIPGIVDFERIRRALRTPKPQTPGTYCFGRLSHHSFFSRHHPHPQHVTHIQDLTGKPVCVVRDFPAPLPESTVFSGCQMGIPTISVPIGDPQSNRNPQLSSAWKKELKELASRVAFLTKEDELKKKEDTTSLNWNCKSRRPQAPGLSGTDLGAAELGIKKEQKEEPLREQGAKYSAETGRLIPASTRAVGRRRSHQGQQSQSSSRHEGVQAFLLQDQELLGGLTSPGAPVSDPGNRLAKRNPVLAALRSAQGKRPRSGTPADSSGSAPSPAPSLHPYRKAPKPASRSA

SEQ ID NO: 41370 - protein, 165 aa, Homo sapiens
MYISPKAELKLEKKSGRKPRSPRDSGPQKELVIPGIVDFERIRRALRTPKPQTPGTYCFGRLSHHSFFSRHHPHPQHVTHIQDLTGKPVCVVRDFPAPLPESTVFSGCQMGIPTISVPIGDPQSNRNPQLSSAWKKELKELASRVAFLTKEDELKKKEVGAEHRS

SEQ ID NO: 41371 - protein, 223 aa, Homo sapiens
MLWVQRKRRRKETSECPSDKDKSPESHKAKNESWIKSHFSRLSEEKLALDNNASASGNATQTESGSEEVSSTVHIETFTTRHGEVGSALHRESFTSRQKTSGPSVIQEIHQESGKAPSTDEATWAAVAACTKEIDTQGRHLAHSMLQRAIAYQHSGHLESKDINQEELRALEEVEMKLQKNFLTQRENTIAGANHTHTFYGHSHHSHHGHPSHQSHSLPNRRH

SEQ ID NO: 41372 - protein, 132 aa, Homo sapiens
MGRTWCGMWRRRRPGRRSAVPRWPHLSSQSGVEPPDRWTGTPGWPSRDQEAPGSMMPPAAAQPSAHGALVPPATAHEPVDHPALHWLACCCCLSLPGQLPLAIRLGWDLDLEAGPSSGKLCPRARRWQPLPS

SEQ ID NO: 41373 - protein, 178 aa, Homo sapiens
MASFLVWPLRTALRGGKSWAGPGVGCGGDGARGGGELSLSNLDLPGAGEAGLEHHPLLGHLFISAVPRWPHLSSQSGVEPPDRWTGTPGWPSRDQEAPGSMMPPAAAQPSAHGALVPPATAHEPVDHPALHWLACCCCLSLPGQLPLAIRLGWDLDLEAGPSSGKLCPRARRWQPLPS

SEQ ID NO: 41374 - protein, 449 aa, Homo sapiens
MWTALVLIWIFSLSLSESHAASNDPRNFVPNKMWKGLVKRNASVETVDNKTSEDVTMAAASPVTLTKGTSAAHLNSMEVTTEDTSRTDVSEPATSGGAADGVTSIAPTAVASSTTAASITTAASSMTVASSAPTTAASSTTVASIAPTTAASSMTAASSTPMTLALPAPTSTSTGRTPSTTATGHPSLSTALAQVPKSSALPRTATLATLATRAQTVATTANTSSPMSTRPSPSKHMPSDTAASPVPPMRPQAQGPISQVSVDQPVVNTTNKSTPMPSNTTPEPAPTPTVVTTTKAQAREPTASPVPVPHTSPIPEMEAMSPTTQPSPMPYTQRAAGPGTSQAPEQVETEATPGTDSTGPTPRSSGGTKMPATDSCQPSTQGQYMVVTTEPLTQAVVDKTLLLVVLLLGVTLFITVLVLFALQAYESYKKKDYTQVDYLINGMYADSEM

SEQ ID NO: 41375 - protein, 25 aa, Homo sapiens
MWTALVLIWIFSLSLSESHAASNDP

SEQ ID NO: 41376 - protein, 1322 aa, Homo sapiens
MPVVWPTLLDLSRDECKRILRKLELEAYAGVISALRAQGDLTKEKKDLLGELSKVLSISTERHRAEVRRAVNDERLTTIAHNMSGPNSSSEWSIEGRRLVPLMPRLVPQTAFTVTANAVANAAIQHNASLPVPAETGSKEVVCYSYTSTTSTPTSTPVPSGSIATVKSPRPASPASNVVVLPSGSTVYVKSVSCSDEDEKPRKRRRTNSSSSSPVVLKEVPKAVVPVSKTITVPVSGSPKMSNIMQSIANSLPPHMSPVKITFTKPSTQTTNTTTQKVIIVTTSPSSTFVPNILSKSHNYAAVTKLVPTSVIASTTQKPPVVITASQSSLVSNSSSGSSSSTPSPIPNTVAVTAVVSSTPSVVMSTVAQGVSTSAIKMASTRLPSPKSLVSAPTQILAQFPKQHQQSPKQQLYQVQQQTQQQVAQPSPVSHQQQPQQSPLPPGIKPTIQIKQESGVKIITQQVQPSKILPKPVTATLPTSSNSPIMVVSSNGAIMTTKLVTTPTGTQATYTRPTVSPSIGRMAATPGAATYVKTTSGSIITVVPKSLATLGGKIISSNIVSGTTTKITTIPMTSKPNVIVVQKTTGKGTTIQGLPGKNVVTTLLNAGGEKTIQTVPTGAKPAILTATRPITKMIVTQPKGIGSTVQPAAKIIPTKIVYGQQGKTQVLIKPKPVTFQATVVSEQTRQLVTETLQQASRVAEAGNSSIQEGKEEPQNYTDSSSSSTESSQSSQDSQPVVHVIASRRQDWSEHEIAMETSPTIIYQDVSSESQSATSTIKALLELQQTTVKEKLESKPRQPTIDLSQMAVPIQMTQEKRHSPESPSIAVVESELVAEYITTERTDEGTEVAFPLLVSHRSQPQQPSQPQRTLLQHVAQSQTATQTSVVVKSIPASSPGAITHIMQQALSSHTAFTKHSEELGTEEGEVEEMDTLDPQTGLFYRSALTQSQSAKQQKLSQPPLEQTQLQVKTLQCFQTKQKQTIHLQADQLQHKLPQMPQLSIRHQKLTPLQQEQAQPKPDVQHTQHPMVAKDRQLPTLMAQPPQTVVQVLAVKTTQQLPKLQQAPNQPKIYVQPQTPQSQMSLPASSEKQTASQVEQPIITQGSSVTKITFEGRQPPTVTKITGGSSVPKLTSPVTSISPIQASEKTAVSDILKMSLMEAQIDTNVEHMIVDPPKKALATSMLTGEAGSLPSTHMVVAGMANSTPQQQKCRESCSSPSTVGSSLTTRKIDPPAVPATGQFMRIQNVGQKKAEESPAEIIIQAIPQYAIPCHSSSNVVVEPSGLLELNNFTSQQLDDEETAMEQDIDSSTEDGTEPSPSQSSAERS

SEQ ID NO: 41377 - protein, 1155 aa, Homo sapiens
MPVVWPTLLDLSRDECKRILRKLELEAYAGVISALRAQGDLTKEKKDLLGELSKVLSISTERHRAEVRRAVNDERLTTIAHNMSGPNSSSEWSIEGRRLVPLMPRLVPQTAFTVTANAVANAAIQHNASLPVPAETGSKEVVCYSYTSTTSTPTSTPVPSGSIATVKSPRPASPASNVVVLPSGSTVYVKSVSCSDEDEKPRKRRRTNSSSSSPVVLKEVPKAVVPVSKTITVPVSGSPKMSNIMQSIANSLPPHMSPVKITFTKPSTQTTNTTTQKVIIVTTSPSSTFVPNILSKSHNYAAVTKLVPTSVIASTTQKPPVVITASQSSLVSNSSSGSSSSTPSPIPNTVAVTAVVSSTPSVVMSTVAQGVSTSAIKMASTRLPSPKSLVSAPTQILAQFPKQHQQSPKQQLYQVQQQTQQQVAQPSPVSHQQQPQQSPLPPGIKPTIQIKQESGVKIITQQVQPSKILPKPVTATLPTSSNSPIMVVSSNGAIMTTKLVTTPTGTQATYTRPTVSPSIGRMAATPGAATYVKTTSGSIITVVPKSLATLGGKIISSNIVSGTTTKITTIPMTSKPNVIVVQKTTGKGTTIQGLPGKNVVTTLLNAGGEKTIQTVPTGAKPAILTATRPITKMIVTQPKGIGSTVQPAAKIIPTKIVYGQQGKTQVLIKPKPVTFQATVVSEQTRQLVTETLQQASRVAEAGNSSIQEGKEEPQNYTDSSSSSTESSQSSQDSQPVVHVIASRRQDWSEHEIAMETSPTIIYQDVSSESQSATSTIKALLELQQTTVKEKLESKPRQPTIDLSQMAVPIQMTQEKRHSPESPSIAVVESELVAEYITTERTDEGTEVAFPLLVSHRSQPQQPSQPQRTLLQHVAQSQTATQTSVVVKSIPASSPGAITHIMQQALSSHTAFTKHSEELGTEEGEVEEMDTLDPQTGLFYRSALTQSQSAKQQKLSQPPLEQTQLQVKTLQCFQTKQKQTIHLQADQLQHKLPQMPQLSIRHQKLTPLQQEQAQPKPDVQHTQHPMVAKDRQLPTLMAQPPQTVVQVLAVKTTQQLPKLQQAPNQPKIYVQPQTPQSQMSLPASSEKQTASQAIPQYAIPCHSSSNVVVEPSGLLELNNFTSQQLDDEETAMEQDIDSSTEDGTEPSPSQSSAERS

SEQ ID NO: 41378 - protein, 1004 aa, Homo sapiens
MPVVWPTLLDLSRDECKRILRKLELEAYAGVISALRAQGDLTKEKKDLLGELSKVLSISTERHRAEVRRAVNDERLTTIAHNMSGPNSSSEWSIEGRRLVPLMPRLVPQTAFTVTANAVANAAIQHNASLPVPAETGSKEGVSCSDEDEKPRKRRRTNSSSSSPVVLKEVPKAVVPVSKTITVPVSGSPKMSNIMQSIANSLPPHMSPVKITFTKPSTQTTNTTTQKVIIVTTSPSSTFVPNILSKSHNYAAVTKLVPTSVIASTTQKPPVVITASQSSLVSNSSSGSSSSTPSPIPNTVAVTAVVSSTPSVVMSTVAQGVSTSAIKMASTRLPSPKSLVSAPTQILAQFPKQHQQSPKQQLYQVQQQTQQQVAQPSPVSHQQQPQQSPLPPGIKPTIQIKQESGVKIITQQVQPSKILPKPVTAILTATRPITKMIVTQPKGIGSTVQPAAKIIPTKIVYGQQGKTQVLIKPKPVTFQATVVSEQTRQLVTETLQQASRVAEAGNSSIQEGKEEPQNYTDSSSSSTESSQSSQVSHRSQPQQPSQPQRTLLQHVAQSQTATQTSVVVKSIPASSPGAITHIMQQALSSHTAFTKHSEELGTEEGEVEEMDTLDPQTGLFYRSALTQSQSAKQQKLSQPPLEQTQLQVKTLQCFQTKQKQTIHLQADQLQHKLPQMPQLSIRHQKLTPLQQEQAQPKPDVQHTQHPMVAKDRQLPTLMAQPPQTVVQVLAVKTTQQLPKLQQAPNQPKIYVQPQTPQSQMSLPASSEKQTASQVEQPIITQGSSVTKITFEGRQPPTVTKITGGSSVPKLTSPVTSISPIQASEKTAVSDILKMSLMEAQIDTNVEHMIVDPPKKALATSMLTGEAGSLPSTHMVVAGMANSTPQQQKCRESCSSPSTVGSSLTTRKIDPPAVPATGQFMRIQNVGQKKAEESPAEIIIQAIPQYAIPCHSSSNVVVEPSGLLELNNFTSQQLDDEETAMEQDIDSSTEDGTEPSPSQSSAERS

SEQ ID NO: 41379 - protein, 1322 aa, Homo sapiens; identical to SEQ ID NO: 41376

SEQ ID NO: 41380 - protein, 207 aa, Homo sapiens
MAVFHDMLLQPLGMFLCLSLQLSSATFIRYSSTCFTFDEYYTITLDIKASSHIYESNAVYSVFVPVNDSVYAVVMKTLDENSDSAGLWQRADKNCYSNSTYYVKDQYMTVLEAQWQAPEPENITEVEIQAFTVQIRALPILSTLKLREKLSTLALAAKIPQSSAFKPFFMITPKSIRLEGLANQVFSSPITEAIYILLAFLTSTLLF

SEQ ID NO: 41381 - protein, 1235 aa, Homo sapiens
MDHTASQNAQDLIGIPHLGVSGSSTKWHSELSPTEGPHSAGSSTPGFLSPMAELSHPSPPPPALGSLLQLPDGSPSWSMLEVASGPASTQQIKAGVPGRVHNGVSLPTFKNTETATHEAEPPLFQTAESGAIEMTSRKLASATANDSANPLHLSAAPENSRGPALSAEHTSSLVPSLHITTLGQEQAILSGAVPASPSTGTADFPSILTFLQPTENHASPSPVPEMPTLPAEGSDGSPPATRDLLLSSKVPNLLSTSWTFPRWKKDSVTAILGKNEEANVTIPLQAFPRKEVLSLHTVNGFVSDFSTGSVSSPIITAPRTNPLPSGPPLPSILSIQATQTVFPSLGFSSTKPEAYAAAVDHSGLPASASKQVRASPSSMDVYDSLTIGDMKKPATTDVFWSSLSAETGSLSTESIISGLQQQTNYDLNGHTISTTSWETHLAPTAPPNGLTSAADAIKSQDFKDTAGHSVTAEGFSIQDLVLGTSIEQPVQQSDMTMVGSHIDLWPTSNNNHSRDFQTAEVAYYSPTTRHSVSHPQLQLPNQPAHPLLLTSPGPTSTGSLQEMLSDGTDTGSEISSDINSSPERNASTPFQNILGYHSAAESSISTSVFPRTSSRVLRASQHPKKWTGAATNAADTVSSKVQPTAAAAVTLFLRKSSPPALSAALVAKGTSSSPLAVASGPAKSSSMTTLAKNVTNKAASGPKRTPGAVHTAFPFTPTYMYARTGHTTSTHTAMQGNMDTASGLLSTTYLPRKPQAMHTGLPNPTNLEMPRASTPRPLTVTAALTSITASVKATRLPPLRAENTDAVLPAASAAVVTTGKMASNLECQMSSKLLVKTVLFLTQRRVQISESLKFSIAKGLTQALRKAFHQNDVSAHVDILEYSHNVTVGYYATKGKLVYLPAVVIEMLGVYGVSNVTADLKQHTPHLQSVAVLASPWNPQPAGYFQLKTVLQFVSQADNIQSCKFAQTMEQRLQKAFQDAERKVLNTKSNLTIQIVSTSNASQAVTLVYVVGNQSTFLNGTVASSLLSQLSAELVGFYLTYPPLTIAEPLEYPNLDISETTRDYWVITVLQGVDNSLVGLHNQSFARVMEQRLAQLFMMSQQQGRRFKRATTLGSYTVQMVKMQRVPGPKDPAELTYYTLYNGKPLLGTAAAKILSTIDSQRMALTLHHVVLLQADPVVKNPPNNLWIIAAVLAPIAVVTVIIIIITAVLCRKNKNDFKPDTMINLPQRAKQVAQ

SEQ ID NO: 41382 - protein, 1849 aa, Homo sapiens
MDHTASQNAQDLIGIPHLGVSGSSTKWHSELSPTEGPHSAGSSTPGFLSPMAELSHPSPPPPALGSLLQLPDGSPSWSMLEVASGPASTQQIKAGVPGRVHNGVSLPTFKNTETATHEAEPPLFQTAESGAIEMTSRKLASATANDSANPLHLSAAPENSRGPALSAEHTSSLVPSLHITTLGQEQAILSGAVPASPSTGTADFPSILTFLQPTENHASPSPVPEMPTLPAEGSDGSPPATRDLLLSSKVPNLLSTSWTFPRWKKDSVTAILGKNEEANVTIPLQAFPRKEVLSLHTVNGFVSDFSTGSVSSPIITAPRTNPLPSGPPLPSILSIQATQTVFPSLGFSSTKPEAYAAAVDHSGLPASASKQVRASPSSMDVYDSLTIGDMKKPATTDVFWSSLSAETGSLSTESIISGLQQQTNYDLNGHTISTTSWETHLAPTAPPNGLTSAADAIKSQDFKDTAGHSVTAEGFSIQDLVLGTSIEQPVQQSDMTMVGSHIDLWPTSNNNHSRDFQTAEVAYYSPTTRHSVSHPQLQLPNQPAHPLLLTSPGPTSTGSLQEMLSDGTDTGSEISSDINSSPERNASTPFQNILGYHSAAESSISTSVFPRTSSRVLRASQHPKKWTADTVSSKVQPTAAAAVTLFLRKSSPPALSAALVAKGTSSSPLAVASGPAKSSSMTTLAKNVTNKAASGPKRTPGAVHTAFPFTPTYMYARTGHTTSTHTAMQGNMDTASGLLSTTYLPRKPQAMHTGLPNPTNLEMPRASTPRPLTVTAALTSITASVKATRLPPLRAENTDAVLPAASAAVVTTGKMASNLECQMSSKLLVKTVLFLTQRRVQISESLKFSIAKGLTQALRKAFHQNDVSAHVDILEYSHNVTVGYYATKGKLVYLPAVVIEMLGVYGVSNVTADLKQHTPHLQSVAVLASPWNPQPAGYFQLKTVLQFVSQADNIQSCKFAQTMEQRLQKAFQDAERKVLNTKSNLTIQIVSTSNASQAVTLVYVVGNQSTFLNGTVASSLLSQLSAELVGFYLTYPPLTIAEPLEYPNLDISETTRDYWVITVLQGVDNSLVGLHNQSFARVMEQRLAQLFMMSQQQGRRFKRATTLGSYTVQMVKMQRVPGPKDPAELTYYTLYNGKPLLGTAAAKILSTIDSQRMALTLHHVVLLQADPVVKNPPNNLWIIAAVLAPIAVVTVIIIIITAVLCRKNKNDFKPDTMINLPQRAKPVQGFDYAKQHLGQQGADEEVIPVTQETVVLPLPIRDAPQERDVAQDGSTIKTAKSTETRKSRSPSENGSVISNESGKPSSGRRSPQNVMAQQKVTKEEARKRNVPASDEEEGAVLFDNSSKVAAEPFDTSSGSVQLIAIKPTALPMVPPTSDRSQESSAVLNGEVNKALKQKSDIEHYRNKLRLKAKRKGYYDFPAVETSKGLTERKKMYEKAPKEMEHVLDPDSELCAPFTESKNRQQMKNSVYRSRQSLNSPSPGETEMDLLVTRERPRRGIRNSGYDTEPEIIEETNIDRVPEPRGYSRSRQVKGHSETSTLSSQPSIDEVRQQMHMLLEEAFSLASAGHAGQSRHQEAYGSAQHLPYSEVVTSAPGTMTRPRAGVQWVPTYRPEMYQYSLPRPAYRFSQLPEMVMGSPPPPVPPRTGPVAVASLRRSTSDIGSKTRMAESTGPEPAQLHDSASFTQMSRGPVSVTQLDQSALNYSGNTVPAVFAIPAANRPGFTGYFIPTPPSSYRNQAWMSYAGENELPSQWADSVPLPGYIEAYPRSRYPQSSPSRLPRQYSQPANLHPSLEQAPAPSTAASQQSLAENDPSDAPLTNISTAALVKAIREEVAKLAKKQTDMFEFQV

SEQ ID NO: 41383 - protein, 1855 aa, Homo sapiens
MDHTASQNAQDLIGIPHLGVSGSSTKWHSELSPTEGPHSAGSSTPGFLSPMAELSHPSPPPPALGSLLQLPDGSPSWSMLEVASGPASTQQIKAGVPGRVHNGVSLPTFKNTETATHEAEPPLFQTAESGAIEMTSRKLASATANDSANPLHLSAAPENSRGPALSAEHTSSLVPSLHITTLGQEQAILSGAVPASPSTGTADFPSILTFLQPTENHASPSPVPEMPTLPAEGSDGSPPATRDLLLSSKVPNLLSTSWTFPRWKKDSVTAILGKNEEANVTIPLQAFPRKEVLSLHTVNGFVSDFSTGSVSSPIITAPRTNPLPSGPPLPSILSIQATQTVFPSLGFSSTKPEAYAAAVDHSGLPASASKQVRASPSSMDVYDSLTIGDMKKPATTDVFWSSLSAETGSLSTESIISGLQQQTNYDLNGHTISTTSWETHLAPTAPPNGLTSAADAIKSQDFKDTAGHSVTAEGFSIQDLVLGTSIEQPVQQSDMTMVGSHIDLWPTSNNNHSRDFQTAEVAYYSPTTRHSVSHPQLQLPNQPAHPLLLTSPGPTSTGSLQEMLSDGTDTGSEISSDINSSPERNASTPFQNILGYHSAAESSISTSVFPRTSSRVLRASQHPKKWTGAATNAADTVSSKVQPTAAAAVTLFLRKSSPPALSAALVAKGTSSSPLAVASGPAKSSSMTTLAKNVTNKAASGPKRTPGAVHTAFPFTPTYMYARTGHTTSTHTAMQGNMDTASGLLSTTYLPRKPQAMHTGLPNPTNLEMPRASTPRPLTVTAALTSITASVKATRLPPLRAENTDAVLPAASAAVVTTGKMASNLECQMSSKLLVKTVLFLTQRRVQISESLKFSIAKGLTQALRKAFHQNDVSAHVDILEYSHNVTVGYYATKGKLVYLPAVVIEMLGVYGVSNVTADLKQHTPHLQSVAVLASPWNPQPAGYFQLKTVLQFVSQADNIQSCKFAQTMEQRLQKAFQDAERKVLNTKSNLTIQIVSTSNASQAVTLVYVVGNQSTFLNGTVASSLLSQLSAELVGFYLTYPPLTIAEPLEYPNLDISETTRDYWVITVLQGVDNSLVGLHNQSFARVMEQRLAQLFMMSQQQGRRFKRATTLGSYTVQMVKMQRVPGPKDPAELTYYTLYNGKPLLGTAAAKILSTIDSQRMALTLHHVVLLQADPVVKNPPNNLWIIAAVLAPIAVVTVIIIIITAVLCRKNKNDFKPDTMINLPQRAKPVQGFDYAKQHLGQQGADEEVIPVTQETVVLPLPIRDAPQERDVAQDGSTIKTAKSTETRKSRSPSENGSVISNESGKPSSGRRSPQNVMAQQKVTKEEARKRNVPASDEEEGAVLFDNSSKVAAEPFDTSSGSVQLIAIKPTALPMVPPTSDRSQESSAVLNGEVNKALKQKSDIEHYRNKLRLKAKRKGYYDFPAVETSKGLTERKKMYEKAPKEMEHVLDPDSELCAPFTESKNRQQMKNSVYRSRQSLNSPSPGETEMDLLVTRERPRRGIRNSGYDTEPEIIEETNIDRVPEPRGYSRSRQVKGHSETSTLSSQPSIDEVRQQMHMLLEEAFSLASAGHAGQSRHQEAYGSAQHLPYSEVVTSAPGTMTRPRAGVQWVPTYRPEMYQYSLPRPAYRFSQLPEMVMGSPPPPVPPRTGPVAVASLRRSTSDIGSKTRMAESTGPEPAQLHDSASFTQMSRGPVSVTQLDQSALNYSGNTVPAVFAIPAANRPGFTGYFIPTPPSSYRNQAWMSYAGENELPSQWADSVPLPGYIEAYPRSRYPQSSPSRLPRQYSQPANLHPSLEQAPAPSTAASQQSLAENDPSDAPLTNISTAALVKAIREEVAKLAKKQTDMFEFQV

SEQ ID NO: 41384 - protein, 1688 aa, Homo sapiens
IPEGLSAEHTSSLVPSLHITTLGQEQAILSGAVPASPSTGTADFPSILTFLQPTENHASPSPVPEMPTLPAEGSDGSPPATRDLLLSSKVPNLLSTSWTFPRWKKDSVTAILGKNEEANVTIPLQAFPRKEVLSLHTVNGFVSDFSTGSVSSPIITAPRTNPLPSGPPLPSILSIQATQTVFPSLGFSSTKPEAYAAAVDHSGLPASASKQVRASPSSMDVYDSLTIGDMKKPATTDVFWSSLSAETGSLSTESIISGLQQQTNYDLNGHTISTTSWETHLAPTAPPNGLTSAADAIKSQDFKDTAGHSVTAEGFSIQDLVLGTSIEQPVQQSDMTMVGSHIDLWPTSNNNHSRDFQTAEVAYYSPTTRHSVSHPQLQLPNQPAHPLLLTSPGPTSTGSLQEMLSDGTDTGSEISSDINSSPERNASTPFQNILGYHSAAESSISTSVFPRTSSRVLRASQHPKKWTADTVSSKVQPTAAAAVTLFLRKSSPPALSAALVAKGTSSSPLAVASGPAKSSSMTTLAKNVTNKAASGPKRTPGAVHTAFPFTPTYMYARTGHTTSTHTAARKHGHCLWPVVYNLPPRKPQAMHTGLPNPTNLEMPRASTPRPLTVTAALTSITASVKATRLPPLRAENTDAVLPAASAAVVTTGKMASNLECQMSSKLLVKTVLFLTQRRVQISESLKFSIAKGLTQALRKAFHQNDVSAHVDILEYSHNVTVGYYATKGKLVYLPAVVIEMLGVYGVSNVTADLKQHTPHLQSVAVLASPWNPQPAGYFQLKTVLQFVSQADNIQSCKFAQTMEQRLQKAFQDAERKVLNTKSNLTIQIVSTSNASQAVTLVYVVGNQSTFLNGTVASSLLSQLSAELVGFYLTYPPLTIAEPLEYPNLDISETTRDYWVITVLQGVDNSLVGLHNQSFARVMEQRLAQLFMMSQQQGRRFKRATTLGSYTVQMVKMQRVPGPKDPAELTYYTLYNGKPLLGTAAAKILSTIDSQRMALTLHHVVLLQADPVVKNPPNNLWIIAAVLAPIAVVTVIIIIITAVLCRKNKNDFKPDTMINLPQRAKPVQGFDYAKQHLGQQGADEEVIPVTQETVVLPLPIRDAPQERDVAQDGSTIKTAKSTETRKSRSPSENGSVISNESGKPSSGRRSPQNVMAQQKVTKEEARKRNVPASDEEEGAVLFDNSSKVAAEPFDTSSGSVQLIAIKPTALPMVPPTSDRSQESSAVLNGEVNKALKQKSDIEHYRNKLRLKAKRKGYYDFPAVETSKGLTERKKMYEKAPKEMEHVLDPDSELCAPFTESKNRQQMKNSVYRSRQSLNSPSPGETEMDLLVTRERPRRGIRNSGYDTEPEIIEETNIDRVPEPRGYSRSRQVKGHSETSTLSSQPSIDEVRQQMHMLLEEAFSLASAGHAGQSRHQEAYGSAQHLPYSEVVTSAPGTMTRPRAGVQWVPTYRPEMYQYSLPRPAYRFSQLPEMVMGSPPPPVPPRTGPVAVASLRRSTSDIGSKTRMAESTGPEPAQLHDSASFTQMSRGPVSVTQLDQSALNYSGNTVPAVFAIPAANRPGFTGYFIPTPPSSYRNQAWMSYAGENELPSQWADSVPLPGYIEAYPRSRYPQSSPSRLPRQYSQPANLHPSLEQAPAPSTAASQQSLAENDPSDAPLTNISTAALVKAIREEVAKLAKKQTDMFEFQV

SEQ ID NO: 41385 - protein, 260 aa, Homo sapiens
MMDPCSVGVQLRTTNECHKTYYTRHTGFKTLQELSSNDMLLLQLRTGMTLSGNNTICFHHVKIYIDRFEDLQKSCCDPFNIHKKLAKKNLHVIDLDDATFLSAKFGRQLVPGWKLCPKCTQIINGSVDVDTEDRQKRKPESDGRTAKALRSLQFTNPGRQTEFAPETGKREKRRLTKNATAGSDRQVIPAKSKVYDSQGLLIFSGMDLCDCLDEDCLGCFYACPACGSTKCGAECRCDRKWLYEQIEIEGGEIIHNKHAG

SEQ ID NO: 41386 - protein, 168 aa, Homo sapiens
MMDPCSVGVQLRTTNECHKTYYTRHTGFKTLQELSSNDMLLLQLRTGMTLSGNNTICFHHVKIYIDRFEDLQKSCCDPFNIHKKLAKKNLHVIDLDDATFLSAKFGRQLVPGWKLCPKCTQIINGSVDVDTEDRQKRKPESDGRTAKALRSLQFTNPGRQTEFAPETG

SEQ ID NO: 41387 - protein, 59 aa, Homo sapiens
MRQLKGKPKKETSKDKKERKQAMQEARQQITTVVLPTLAVVVLLIVVFVYVATRPTITE

SEQ ID NO: 41388 - protein, 59 aa, Homo sapiens; identical to SEQ ID NO: 41387

SEQ ID NO: 41389 - protein, 47 aa, Homo sapiens
MRQLKGKPKKETSKDKKERKQAMQEARQQITTVVLPTLAVVVLLIVV

SEQ ID NO: 41390 - protein, 59 aa, Homo sapiens; identical to SEQ ID NO: 41387

SEQ ID NO: 41391 - protein, 52 aa, Homo sapiens
MRQLKGKPKKETSKDKKERKQAMQEARQQITTVVLPTLAVVVLLIVVFVYVA

SEQ ID NO: 41392 - protein, 1111 aa, Homo sapiens
MHWLPAGHDINGALEPSNIDTSILEEYISKEDASDLCFPDISAPASSASYSHGQPAMPGSSGVHHLSPPGGGPSPGRHGPLPPPGYGTPLNCNNNNGMGAAPKPFPGGTGPPIKAEPKAPYAPGTLPDSPPDSGSEAYSPQQVNEPHLLRTITPETLCHVGVPSRLEHPPPPPAHLPGPPPPPPPPPHYPVLQRDLYMKAEPPIPHYAAMGQGLVPTDLHHTQQSQMLHQLLQQHGAELPTHPSKKRKHSESPPSTLNAQMLNGMIKQEPGTVTALPLHPTRAPSPPWPPQGPLSPGPGSLPLSIARVQTPPWHPPGAPSPGLLQDSDSLSGSYLDPNYQSIKWQPHQQNKWATLYDANYKELPMLTYRVDADKGFNFSVGDDAFVCQKKNHFQVTVYIGMLGEPKYVKTPEGLKPLDCFYLKLHGVKLEALNQSINIEQSQSDRSKRPFNPVTVNLPPEQVTKVTVGRLHFSETTANNMRKKGKPNPDQRYFMLVVALQAHAQNQNYTLAAQISERIIVRASNPGQFESDSDVLWQRAQVPDTVFHHGRVGINTDRPDEALVVHGNVKVMGSLMHPSDLRAKEHVQEVDTTEQLKRISRMRLVHYRYKPEFAASAGIEATAPETGVIAQEVKEILPEAVKDTGDMVFANGKTIENFLVVNKERIFMENVGAVKELCKLTDNLETRIDELERWSHKLAKLRRLDSLKSTGSSGAFSHAGSQFSRAGSVPHKKRPPKVASKSSSVVPDQACISQRFLQGTIIALVVVMAFSVVSMSTLYVLSLRTEEDLVDTDGRSSQSFGTTQLRQSPLTTGLPGIQPSLLLVTTSLTSSAPGSAVRTLDMCSSHPCPVICCSSPTTNPTTGPSLGPSFNPGHVLSPSPSPSTNRSGPSQMALLPVTNIRAKSWGLSVNGIGHSKHHKSLEPLASPAVPFPGGQGKAKNSPSLGFHGRARRGALQSSVGPAEPTWAQGQSEPVPSLTSIQVLENSMSITSQYCAPGDACRPGNFTYHIPVSSGTPLHLSLTLQMNSSSPVSVVLCSLRSKEEPCEEGSLPQSLHTHQDTQGTSHRWPITILSFREFTYHFRVALLGQANCSSEALAQPATDYHFHFYRLCD

SEQ ID NO: 41393 - protein, 1151 aa, Homo sapiens
MEVVDETEALQRFFEGHDINGALEPSNIDTSILEEYISKEDASDLCFPDISAPASSASYSHGQPAMPGSSGVHHLSPPGGGPSPGRHGPLPPPGYGTPLNCNNNNGMGAAPKPFPGGTGPPIKAEPKAPYAPGTLPDSPPDSGSEAYSPQQVNEPHLLRTITPETLCHVGVPSRLEHPPPPPAHLPGPPPPPPPPPHYPVLQRDLYMKAEPPIPHYAAMGQGLVPTDLHHTQQSQMLHQLLQQHGAELPTHPSKKRKHSESPPSTLNAQMLNGMIKQEPGTVTALPLHPTRAPSPPWPPQGPLSPGPGSLPLSIARVQTPPWHPPGAPSPGLLQDSDSLSGSYLDPNYQSIKWQPHQQNKWATLYDANYKELPMLTYRVDADKGFNFSVGDDAFVCQKKNHFQVTVYIGMLGEPKYVKTPEGLKPLDCFYLKLHGVKLEALNQSINIEQSQSDRSKRPFNPVTVNLPPEQVTKVTVGRLHFSETTANNMRKKGKPNPDQRYFMLVVALQAHAQNQNYTLAAQISERIIVRASNPGQFESDSDVLWQRAQVPDTVFHHGRVGINTDRPDEALVVHGNVKVMGSLMHPSDLRAKEHVQEVDTTEQLKRISRMRLVHYRYKPEFAASAGIEATAPETGVIAQEVKEILPEAVKDTGDMVFANGKTIENFLVVNKERIFMENVGAVKELCKLTDNLETRIDELERWSHKLAKLRRLDSLKSTGSSGAFSHAGSQFSRAGSVPHKKRPPKVASKSSSVVPDQACISQRFLQGTIIALVVVMAFSVVSMSTLYVLSLRTEEDLVDTDGSFAVSTSCLLALLRPQPPGGSEALCPWSSQSFGTTQLRQSPLTTGLPGIQPSLLLVTTSLTSSAPGSAVRTLDMCSSHPCPVICCSSPTTNPTTGPSLGPSFNPGHVLSPSPSPSTNRSGPSQMALLPVTNIRAKSWGLSVNGIGHSKHHKSLEPLASPAVPFPGGQGKAKNSPSLGFHGRARRGALQSSVGPAEPTWAQGQSASLLAEPVPSLTSIQVLENSMSITSQYCAPGDACRPGNFTYHIPVSSGTPLHLSLTLQMNSSSPVSVVLCSLRSKEEPCEEGSLPQSLHTHQDTQGTSHRWPITILSFREFTYHFRVALLGQANCSSEALAQPATDYHFHFYRLCD

SEQ ID NO: 41394 - protein, 482 aa, Homo sapiens [sequence omitted]

SEQ ID NO: 41395 - protein, 262 aa, Homo sapiens
MAAPSGTVSDSESSNSSSDAEELERCREAAMPAWGLEQRPHVAGKPRAGAANSQLSTSQPSLRHKVNEHEQDGNELQTTPEFRAHVAKKLGALLDSFITISEAAKEPAKAKVQKVALEDDGFRLFFTSVPGGREKEESPQPRRKRQPSSSSEDSDEEWRRCREAAVSASDILQESAIHSPGTVEKEAKKKRKLKKKAKKVASVDSAVAATTPTSMATVQKQKSGELNGDQVSLGTKKKKKAKKASETSPFPPAKSATAIPAN

SEQ ID NO: 41396 - protein, 221 aa, Homo sapiens
MFCQNPGAANSQLSTSQPSLRHKVNEHEQDGNELQTTPEFRAHVAKKLGALLDSFITISEAAKEPAKAKVQKVALEDDGFRLFFTSVPGGREKEESPQPRRKRQPSSSSSEDSDEEWRRCREAAVSASDILQESAIHSPGTVEKEAKKKRKLKKKAKKVASVDSAVAATTPTSMATVQKQKSGELNGDQVSLGTKKKKKAKKASETSPFPPAKSATAIPAN

SEQ ID NO: 41397 - protein, 232 aa, Homo sapiens [sequence omitted]

SEQ ID NO: 41398 - protein, 498 aa, Homo sapiens
MDVTDHYEDVRKIYDDFLKNSNMLDLIDVYQKCRALTSNCENYNTVSPSQLLDFLSGKQYAVGDETDLSIPTSPTSKYNRDNEKVQLLARKIIFSYLNLLVNSKNDLAVAYILNIPDRGLGREAFTDLKHAAREKQMSIFLVATSFIRTIELGGKGYAPPPSDPLRTHVKGLSNFINFIDKLDEILGEIPNPSIAGGQILSVIKMQLIKGQNSRDPFCKAIEEVAQDLDLRIKNIINSQEGVVALSTTDISPARPKSHAINHGTAYCGRDTVKALLVLLDEEAANAPTKNKAELLYDEENTIHHHGTSILTLFRSPTQVNNSIKPLRERICVSMQEKKIKMKQTLIRSQFACTYKDDYMISKDNWNNVNLASKPLCVLYMENDLSEGVNPSVGRSTIGTSFGNVHLDRSKNEKVSRKSTSQTGNKSSKRKQVDLDGENILCDNRNEPPQHKNAKIPKKSNDSQNRLYGKLAKVAKSNKCTAKDKLISGQAKLTQFFRL

SEQ ID NO: 41399 - protein, 579 aa, Homo sapiens
MAVFNQKSVSDMIKEFRKNWRALCNSERTTLCGADSMLLALQLSMAENNKQHSGEFTVSLSDVLLTWKYLLHEKLNLPVENMDVTDHYEDVRKIYDDFLKNSNMLDLIDVYQKCRALTSNCENYNTVSPSQLLDFLSGKQYAVGDETDLSIPTSPTSKYNRDNEKVQLLARKIIFSYLNLLVNSKNDLAVAYILNIPDRGLGREAFTDLKHAAREKQMSIFLVATSFIRTIELGGKGYAPPPSDPLRTHVKGLSNFINFIDKLDEILGEIPNPSIAGGQILSVIKMQLIKGQNSRDPFCKAIEEVAQDLDLRIKNIINSQEGVVALSTTDISPARPKSHAINHGTAYCGRDTVKALLVLLDEEAANAPTKNKAELLYDEENTIHHHGTSILTLFRSPTQVNNSIKPLRERICVSMQEKKIKMKQTLIRSQFACTYKDDYMISKDNWNNVNLASKPLCVLYMENDLSEGVNPSVGRSTIGTSFGNVHLDRSKNEKVSRKSTSQTGNKSSKRKQVDLDGENILCDNRNEPPQHKNAKIPKKSNDSQNRLYGKLAKVAKSNKCTAKDKLISGQAKLTQFFRL

SEQ ID NO: 41400 - protein, 297 aa, Homo sapiens
MAVFNQKSVSDMIKEFRKNWRALCNSERTTLCGADSMLLALQLSMAENNKQHSGEFTVSLSDVLLTWKYLLHEKLNLPVENMDVTDHYEDVRKIYDDFLKNSNMLDLIDVYQKCRALTSNCENYNTVSPSQLLDFLSGKQYAVGDETDLSIPTSPTSKYNRDNEKVQLLARKIIFSYLNLLVNSKNDLAVAYILNIPDRGLGREAFTDLKHAAREKQMSIFLVATSFIRTIELGGKGYAPPPSDPLRTHVKGLSNFINFIDKLDEILGEIPNPRGCKSICWKINNWNEFWKCSSGQK

SEQ ID NO: 41401 - protein, 498 aa, Homo sapiens; identical to SEQ ID NO: 41398

SEQ ID NO: 41402 - protein, 270 aa, Homo sapiens
MARFALTVVRHGETRFNKEKIIQGQGVDEPLSETGFKQAAAAGIFLNNVKFTHAFSSDLMRTKQTMHGILERSKFCKDMTVKYDSRLRERKYGVVEGKALSELRAMAKAAREECPVFTPPGGETLDQVKMRGIDFFEFLCQLILKEADQKEQFSQGSPSNCLETSLAEIFPLGKNHSSKVNSDSGIPGLAASVLVVSHGAYMRSLFDYFLTDLKCSLPATLSRSELMSVTPNTGMSLFIINFEEGREVKPTVQCICMNLQDHLNGLTETR

SEQ ID NO: 41403 - protein, 166 aa, Homo sapiens
MSTVGLFHFPTPLTRICPAPWGLRLWEKLTLLSPGIAVTPVQMAGKKDYPALLSLDENELEEQFVKGHGPGGQATNKTSNCVVLKHIPSGIVVKCHQTRSVDQNRKLARKILQEKVDVFYNGENSPVHKEKREAAKKKQERKKRAKETLEKKKLLKELWESSKKVH

SEQ ID NO: 41404 - protein, 166 aa, Homo sapiens; identical to SEQ ID NO: 41403

SEQ ID NO: 41405 - protein, 166 aa, Homo sapiens; identical to SEQ ID NO: 41403

SEQ ID NO: 41406 - protein, 36 aa, Homo sapiens
MSTVGLFHFPTPLTRICPAPWGLRLWEKLTLLSPGI

SEQ ID NO: 41407 - protein, 138 aa, Homo sapiens
MSTVGLFHFPTPLTRICPAPWGLRLWEKLTLLSPGIAVTPVQMAGKKDYPALLSLDENELEEQFVKGHGPGGQATNKTSNCVVLKHIPSGIVVKCHQTRSVDQNRKLARKILQEKVDVFYNGENSPVHKEKREAAKKK

SEQ ID NO: 41408 - protein, 96 aa, Homo sapiens
MSTVGLFHFPTPLTRICPAPWGLRLWEKLTLLSPGIAVTPVQMAGKKDYPALLSLDENELEEQFVKGHGPGGQATNKTSNCVVLKHIPSGIVVKVD

SEQ ID NO: 41409 - protein, 140 aa, Homo sapiens
MSRFLNVLRSWLVMVSIIAMGNTLQSFRDHTFLYEKLYTGKPNLVNGLQARTFGIWTLLSSVIRCLCAIDIHNKTLYHITLWTFLLALGHFLSELFVYGTAAPTIGVLAPLMVASFSILGMLVGLRYLEVEPVSRQKKRN

SEQ ID NO: 41410 - protein, 480 aa, Homo sapiens
MNRTKGDEEEYWNSSKFKAFTFDDEDDELSQLKESKRAVNSLRDFVDDDDDDDLERVSWSGEPVGSISWSIRETAGNSGSTHEGREQLKSRNSFSSYAQLPKPTSTYSLSSFFRALSDTPAKSYAPELGRPKGEYRDYSNDWSPSDTVRRLRKGKVCSLERFRSLQDKLQLLEEAVSMHDGNVITAVLIFLKRTLSKEILFRELEVRQVALRHLIHFLKEIGDQKLLLDLFRFLDRTEELALSHYREHLNIQDPDKRKEFLKTCVGLPFSAEDSAHIQDHYTLLERQIIIEANDRHLESAGQTEIFRKHPRKASILNMPLVTTLFYSCFYHYTEAEGTFSSPVNLKKTFKIPDKQYVLTALAARAKLRAWNDVDALFTTKNWLGYTKKRAPIGFHRVVEILHKNNAPVQILQEYVNLVEDVDTKLNLATKFKCHDVVIDTYRDLKDRQQLLAYRSKVDKGSAEEEKIDALLSSSQIRWKN

SEQ ID NO: 41411 - protein, 493 aa, Homo sapiens
MNRTKGDEEEYWNSSKFKAFTFDDEDDELSQLKESKRAVNSLRDFVDDDDDDDLERVSWSGEPVGSISWSIRETAGNSGSTHEGREQLKSRNSFSSYAQLPKPTSTYSLSSFFRGRTRPGSFQSLSDALSDTPAKSYAPELGRPKGEYRDYSNDWSPSDTVRRLRKGKVCSLERFRSLQDKLQLLEEAVSMHDGNVITAVLIFLKRTLSKEILFRELEVRQVALRHLIHFLKEIGDQKLLLDLFRFLDRTEELALSHYREHLNIQDPDKRKEFLKTCVGLPFSAEDSAHIQDHYTLLERQIIIEANDRHLESAGQTEIFRKHPRKASILNMPLVTTLFYSCFYHYTEAEGTFSSPVNLKKTFKIPDKQYVLTALAARAKLRAWNDVDALFTTKNWLGYTKKRAPIGFHRVVEILHKNNAPVQILQEYVNLVEDVDTKLNLATKFKCHDVVIDTYRDLKDRQQLLAYRSKVDKGSAEEEKIDALLSSSQIRWKN

SEQ ID NO: 41412 - protein, 444 aa, Homo sapiens
MNRTKGDEEEYWNSSKFKAFTFDDEDDELSQLKESKRAVNSLRDFVDDDDDDDLERVSWSGEPVGSRTRPGSFQSLSDALSDTPAKSYAPELGRPKGEYRDYSNDWSPSDTVRRLRKGKVCSLERFRSLQDKLQLLEEAVSMHDGNVITAVLIFLKRTLSKEILFRELEVRQVALRHLIHFLKEIGDQKLLLDLFRFLDRTEELALSHYREHLNIQDPDKRKEFLKTCVGLPFSAEDSAHIQDHYTLLERQIIIEANDRHLESAGQTEIFRKHPRKASILNMPLVTTLFYSCFYHYTEAEGTFSSPVNLKKTFKIPDKQYVLTALAARAKLRAWNDVDALFTTKNWLGYTKKRAPIGFHRVVEILHKNNAPVQILQEYVNLVEDVDTKLNLATKFKCHDVVIDTYRDLKDRQQLLAYRSKVDKGSAEEEKIDALLSSSQIRWKN

SEQ ID NO: 41413 - protein, 493 aa, Homo sapiens; identical to SEQ ID NO: 41411

SEQ ID NO: 41414 - protein, 519 aa, Homo sapiens
MTTGLILFFQSGRPLGAGVRLGLGLRMNRTKGDEEEYWNSSKFKAFTFDDEDDELSQLKESKRAVNSLRDFVDDDDDDDLERVSWSGEPVGSISWSIRETAGNSGSTHEGREQLKSRNSFSSYAQLPKPTSTYSLSSFFRGRTRPGSFQSLSDALSDTPAKSYAPELGRPKGEYRDYSNDWSPSDTVRRLRKGKVCSLERFRSLQDKLQLLEEAVSMHDGNVITAVLIFLKRTLSKEILFRELEVRQVALRHLIHFLKEIGDQKLLLDLFRFLDRTEELALSHYREHLNIQDPDKRKEFLKTCVGLPFSAEDSAHIQDHYTLLERQIIIEANDRHLESAGQTEIFRKHPRKASILNMPLVTTLFYSCFYHYTEAEGTFSSPVNLKKTFKIPDKQYVLTALAARAKLRAWNDVDALFTTKNWLGYTKKRAPIGFHRVVEILHKNNAPVQILQEYVNLVEDVDTKLNLATKFKCHDVVIDTYRDLKDRQQLLAYRSKVDKGSAEEEKIDALLSSSQIRWKN

SEQ ID NO: 41415 - protein, 45 aa, Homo sapiens
MNRTKGDEEEYWNSSKFKAFTFDDEDDELSQLKESKRAVNSLRDF

SEQ ID NO: 41416 - protein, 493 aa, Homo sapiens; identical to SEQ ID NO: 41411

SEQ ID NO: 41417 - protein, 244 aa, Homo sapiens
MFRRKLTALDYHNPAGFNCKDETEFRNFIVWLEDQKIRHYKIEDRGNLRNIHSSDWPKFFEKYLRDVNCPFKIQDRQEAIDWLLGLAVRLEYGDNAEKYKDLVPDNSKTADNATKNAEPLINLDVNNPDFKAGVMALANLLQIQRHDDYLVMLKAIRILVQERLTQDAVAKANQTKEGLPVALDKHILGFDTGDAVLNEAAQILRLLHIEELRELQTKINEAIVAVQAIIADPKTDHRLGKVGR

SEQ ID NO: 41418 - protein, 58 aa, Homo sapiens
MLQSIIKNIWIPMKPYYTKVYQEIWIGMGLMGFIVYKIRAADKRSKALKASAPAPGHH

SEQ ID NO: 41419 - protein, 75 aa, Homo sapiens
MKLYGTRGSDISHFQCQMLQSIIKNIWIPMKPYYTKVYQEIWIGMGLMGFIVYKIRAADKRSKALKASAPAPGHH

SEQ ID NO: 41420 - protein, 58 aa, Homo sapiens; identical to SEQ ID NO: 41418

SEQ ID NO: 41421 - protein, 58 aa, Homo sapiens; identical to SEQ ID NO: 41418

SEQ ID NO: 41422 - protein, 975 aa, Homo sapiens
MTQQPQDDFDRSVEDAQAWMKAVQDQLQVNDNTQGPRAALEARLWETEKICQLEPEGRVRVDLVLRMAEALLACCPGDQKPGILARLKDIKAQWEETVTYMTHCHSRIEWVWLHWSEYLLARDEFYRWFQKMMVTLEPHIELQLGLKEKQWQLSHAQVLLHNVDNQAVLLDRLLEEAASLFNRIGDPSVDEDAQKRMKAEYDAVKAKAQKRVDLLEQVAREHEEYQAGVDEFQLWLKAVVEKVNGCLGRNCKLPITQRLSTLQDIAKDFPRGEESLETLEEQSAGVIRNTSPLGAEKITGELEEMRKVLEKLRALWEEEEERLRGLLRSRGAWEQQIKQLEAELSEFRMVLQRLAQEGLQPAAKAGTEDELVAHWRRYSATRAALASEEPRVDRLQAQLKELIVFPHNLKPLSDSVIATIQEYQSLKVKSARLRNAAAVELWQHFQRPLQDLQLWKALAQRLLEVTASLPDLPSLHTFLPQIEAALMESSRLKELLTMLQLKKDLLIGIFGQERATALLEQVAGSMRDRDLLHNSLLQRKSKLQSLLAQHKDFGAAFEPLQRKLLDLQVRVQAEKGLQRDLPGKQAQLSRLQGLQEEGLDLGAQMEAARPLVQENPNHQHKMDQLSSDFQALQRSLEDLVDRCRQSVQEHCTFSHQLLELRQWIVVTTQKLEAHRGEAGPGDAESQEAEFERLVAEFPEKEAQLSLVEAQGWLVMEKSSPEGAAVVQEELRELAESWRALRLLEESLLSLIRNWHLQRMEVDSGKKMVFTNNIPKSGFLINPMDPIPRHRRRANLLQEEEGSHEDFSQLLRNFGQWLQVENSKLVRIIAMRTSTAEDLRTRKSKLQELEARVPEGQHLFENLLRLGPARGTSDELEDLRYQWMLYKSKLKDSGHLLTQSSPGEPTGFQKTRRWRGLGSLFRRACCVALPLQLLLLLFLLLLFLLPIREEDRSCTLANNFARSFTLMLRYNGPPPT

SEQ ID NO: 41423 - protein, 596 aa, Homo sapiens
MTQQPQDDFDRSVEDAQAWMKAVQDQLQVNDNTQGPRAALEARLWETEKICQLEPEGRVRVDLVLRMAEALLACCPGDQKPGILARLKDIKAQWEETVTYMTHCHSRIEWVWLHWSEYLLARDEFYRWFQKMMVTLEPHIELQLGLKEKQWQLSHAQVLLHNVDNQAVLLDRLLEEAASLFNRIGDPSVDEDAQKRMKAEYDAVKAKAQKRVDLLEQVAREHEEYQAGVDEFQLWLKAVVEKVNGCLGRNCKLPITQRLSTLQDIAKDFPRGEESLETLEEQSAGVIRNTSPLGAEKITGELEEMRKVLEKLRALWEEEEERLRGLLRSRGAWEQQIKQLEAELSEFRMVLQRLAQEGLQPAAKAGTEDELVAHWRRYSATRAALASEEPRVDRLQAQLKELIVFPHNLKPLSDSVIATIQEYQSLKVKSARLRNAAAVELWQHFQRPLQDLQLWKALAQRLLEVTASLPDLPSLHTFLPQIEAALMESSRLKELLTMLQLKKDLLIGIFGQERATALLEQVAGSMRDRDLLHNSLLQRKSKLQSLLAQHKDFGAAFEPLQRKLLDLQVRVQAEKGLQRDLPGKQAQLSRLQVRGL

SEQ ID NO: 41424 - protein, 970 aa, Homo sapiens
MTQQPQDDFDRSVEDAQAWMKAVQDQLQVNDNTQGPRAALEARLWETEKICQLEPEGRVRVDLVLRMAEALLACCPGDQKPGILARLKDIKAQWEETVTYMTHCHSRIEWVWLHWSEYLLARDEFYRWFQKMMVTLEPHIELQLGLKEKQWQLSHAQVLLHNVDNQAVLLDRLLEEAASLFNRIGDPSVDEDAQKRMKAEYDAVKAKAQKRVDLLEQVAREHEEYQAGVDEFQLWLKAVVEKVNGCLGRNCKLPITQRLSTLQDIAKDFPRGEESLETLEEQSAGVIRNTSPLGAEKITGELEEMRKVLEKLRALWEEEEERLRGLLRSRGAWEQQIKQLEAELSEFRMVLQRLAQEGLQPAAKAGTEDELVAHWRRYSATRAALASEEPRVDRLQAQLKELIVFPHNLKPLSDSVIATIQEYQSLKVKSARLRNAAAVELWQHFQRPLQDLQLWKALAQRLLEVTASLPDLPSLHTFLPQIEAALMESSRLKELLTMLQLKKDLLIGIFGQERATALLEQVAGSMRDRDLLHNSLLQRKSKLQSLLAQHKDFGAAFEPLQRKLLDLQVRVQAEKGLQRDLPGKQAQLSRLQGLQEEGLDLGAQMEAARPLVQENPNHQHKMDQLSSDFQALQRSLEDLVDRCRQSVQEHCTFSHQLLELRQWIVVTTQKLEAHRGEAGPGDAESQEAEFERLVAEFPEKEAQLSLVEAQGWLVMEKSSPEGAAVVQEELRELAESWRALRLLEESLLSLIRNWHLQRMEVDSGKKMVFTNNIPKSGFLINPMDPIPRHRRREEEGSHEDFSQLLRNFGQWLQVENSKLVRIIAMRTSTAEDLRTRKSKLQELEARVPEGQHLFENLLRLGPARGTSDELEDLRYQWMLYKSKLKDSGHLLTQSSPGEPTGFQKTRRWRGLGSLFRRACCVALPLQLLLLLFLLLLFLLPIREEDRSCTLANNFARSFTLMLRYNGPPPT

SEQ ID NO: 41425 - protein, 1156 aa, Homo sapiens
MGNLLSKFRPGCRRRPLPGPGRGAPAPLSRDASPPGRAHSVPTPRPFRGLFRRNARRRPSAASIFVAPKRPCPLPRAAAAPLGVLPAVGWGLAIRKTPMLPARNPPRFGHPSSVRIPPPSRMFTLLLPSPREPAVKARKPIPATLLEETEVWAQEGPRRVKKDEDPVQIEGEDDEKRTPLSSGEASSTSRSQGTQGDVASFRCSPGPLEGNVYHKFSENSMSEKAQASPASSCLEGPAMPSTHSQAGCARHLGKPDPDATAPPEPAVGCSLLQQKLAAEVLNEEPPPSSLGLPIPLMSGKRMPDEKPFCIPPRSAAPPRAARNRPCKRKMSIPLLLPLPPSLPLLWDRGELPPPAKLPCLSVEGDLHTLEKSPEYKRNSRILEDKTETMTNSSITQPAPSFSQPVQTTDSLPLTTYTSQVSAPLPIPDLADLATGPLILPIPPLSTTPKMDEKIAFTIPNSPLALPADLVPILGDQSNEKGGSYNSVVGAAPLTSDPPTPPSSTPSFKPPVTRESPISMCVDSPPPLSFLTLLPVPSTGTSVITSKPMNSTSVISTVTTNASAHLTSQTAVDPEVVNMDTTAPSQVVIFTSSLSSRVSSLPNSQIHCSAEQRHPGKTSVYTSPLPFIFHNTTPSFNQLFGKEATPQPKFEAPDGQPQKASLPSACVFLSLPIIPPPDTSTLVNSASTASSSKPPIETNAMHTTPPSKAVILQSASVSKKYLPFYLGLPGSGNTQPSGNTASVQGSTSLPAQSVRAPATASNHPLNPGATPQPKFGAPDGPQQKTSLPSAHDFLSLPIMVPPDTSTLVSSASAASLSKPAIDTSDMNTTPPSKTVILQSTFVSRKEEYIRFYMGLPGSGNTLHSDSIASAQVSTSFPAQADRRPTTTSSHPLNTGSISHSTLGATDGQQKSDSSFILGNPATPAPVIGLTSPSVQPLSGSIIPPGFAELTSPYTALGTPVNAEPVEGHNASAFPNGTAKTSGFRIATGMPGTGDSTLLVGNTIPGPQVIMGPGTPMDGGSIGFSMSAPGPSSTSGELNIGQGQSGTPSTTSVFPFGQAAWDPTGHSMAAAPQGASNIPVFGYTSAAAYIPGLDPPTQNSCSGMGGDGTRSIVGGPCVPAFQQCILQHTWTERKFYTSSTHYYGQETYVRRHVCFQLP

SEQ ID NO: 41426 - protein, 1910 aa, Homo sapiens
MACCHKVMLLLDTAGGAARHSRVRRAALRLLTYLSCRFGLARVHWAFKFFDSQGARSRPSRVSDFRELGSRSWEDFEEELEARLEDRAHLPGPAPRATHTHGALMETLLDYQWDRPEITSPTKPILRSSGRRLLDVESEAKEAEAALGGLVNAVFLLAPCPHSQRELLQFVSGCEAQAQRLPPTPKQVMEKLLPKRVREVMVARKITFYWVDTTEWSKLWESPDHLGYWTVCELLHHGGGTVLPSESFSWDFAQAGEMLLRSGIKLSSEPHLSPWISMLPTDATLNRLLYNSPEYEASFPRMEGMLFLPVEAGKEIQETWTVTLEPLAMHQRHFQKPVRIFLKGSVAQWSLPTSSTLGTDSWMLGSPEESTATQRLLFQQLVSRLTAEELHLVADVDPGEGRPPITGVISPLSASAMILTVCRTKEAEFQRHVLQTAVADSPRDTASLFSDVVDSILNQTHDSLADTASAASPVPEWAQQELGHTTPWSPAVVEKWFPFCNISGASSDLMESFGLLQAASANKEESSKTEGELIHCLAELYQRKSREESTIAHQEDSKKKRGVPRTPVRQKMNTMCRSLKMLNVARLNVKAQKLHPDGSPDVAGEKGIQKIPSGRTVDKLEDRGRTLRSSKPKDFKTEEELLSYIRENYQKTVATGEIMLYACARNMISTVKMFLKSKGTKELEVNCLNQVKSSLLKTSKSLRQNLGKKLDKEDKVRECQLQVFLRLEMCLQCPSINESTDDMEQVVEEVTDLLRMVCLTEDSAYLAEFLEEILRLYIDSIPKTLGNLYNSLGFVIPQKLAGVLPTDFFSDDSMTQENKSPLLSVPFLSSARRSVSGSPESDELQELRTRSAKKRRKNALIRHKSIAEVSQNLRQIEIPKVSKRATKKENSHPAPQQPSQPVKDTVQEVTKVRRNLFNQELLSPSKRSLKRGLPRSHSVSAVDGLEDKLDNFKKNKGYHKLLTKSVAETPVHKQISKRLLHRQIKGRSSDPGPDIGVVEESPEKGDEISLRRSPRIKQLSFSRTHSASFYSVSQPKSRSVQRVHSFQQDKSDQRENSPVQSIRSPKSLLFGAMSEMISPSEKGSARMKKRSRNTLDSEVPAAYQTPKKSHQKSLSFSKTTPRRISHTPQTPLYTPERLQKSPAKMTPTKQAAFKESLKDSSSPGHDSPLDSKITPQKRHTQAGEGTSLETKTPRTPKRQGTQPPGFLPNCTWPHSVNSSPESPSCPAPPTSSTAQPRRECLTPIRDPLRTPPRAAAFMGTPQNQTHQQPHVLRAARAEEPAQKLKDKAIKTPKRPGNSTVTSSPPVTPKKLFTSPLCDVSKKSPFRKSKIECPSPGELDQKEPQMSPSVAASLSCPVPSTPPELSQRATLDTVPPPPPSKVGKRCRKTSDPRRSIVECQPDASATPGVGTADSPAAPTDSRDDQKGLSLSPQSPPERRGYPGPGLRSDWHASSPLLITSDTEHVTLLSEAEHHGIGDLKSNVLSVEEGEGLRTADAEKSSLSHPGIPPSPPSCGPGSPLMPSRDVHCTTDGRQCQASAQLDNLPASAWHSTDSASPQTYEVELEMQASGLPKLRIKKIDPSSSLEAEPLSKEESSLGEESFLPALSMPRASRSLSKPEPTYVSPPCPRLSHSTPGKSRGQTYICQACTPTHGPSSTPSPFQTDGVPWTPSPKHSGKTTPDIIKDWPRRKRAVGCGAGSSSGRGEVGADLPGSLSLLESEGKDHGLELSIHRTPILEDFELEGVCQLPDQSPPRNSMPKAEEASSWGQFGLSSRKRVLLAKEEADRGAKRICDLREDSEVSKSKEGSPSWSAWQLPSTGDEEVFVSGSTPPPSCAVRSCLSASALQALTQSPLLFQGKTPSSQSKDPRDEDVDVLPSTVEDSPFSRAFSRRRPISRTYTRKKLMGTWLEDL

SEQ ID NO: 41427 - protein, 117 aa, Homo sapiens
MKLSSAAGQESPGHPHPSPPAWTLKKPSESVAQRAMCSARACPVACPVGCPIACPVSCPVACPVGCPVGSMATAPQGLSPQEWEADRETGSSSHAGTTQCSIHSPSSSSRHLSRTQT

SEQ ID NO: 41428 - protein, 208 aa, Homo sapiens; identical to SEQ ID NO: 40765

SEQ ID NO: 41429 - protein, 254 aa, Homo sapiens
MSLARGHGDTAASTAAPLSEEGEVTSGLQALAVEDTGGPSASAGKAEDEGEGGREETEREGSGGEEAQGEVPSAGGEEPAEEDSEDWCVPCSDEEVELPADGQPWMPPPSEIQRLYELLAAHGTLELQAEILPRRPPTPEAQSEEERSDEEPEAKEEEEEKPHMPTEFDFDDEPVTPKDSLIDRRRTPGSSARSQKREARLDKVLSDMKRHKKLEEQILRTGRDLFSLDSEDPSPASPPLRSSGSSLFPRQRKY

SEQ ID NO: 41430 - protein, 265 aa, Homo sapiens
MSAAPLVGYSSSGSEDESEDGMRTRPGDGSHRRGQSPLPRQRFPVPDSVLNMFPGTEEGPEDDSTKHGGRVRTFPHERGNWATHVYVPYEAKEEFLDLLDVLLPHAQTYVPRLVRMKVFHLSLSQSVVLRHHWILPFVQALKARMTSFHRFFFTANQVKIYTNQEKTRTFIGLEVTSGHAQFLDLVSEVDRVMEEFNLTTFYQDPSFHLSLAWCVGDARLQLEGQCLQELQAIVDGFEDAEVLLRVHTEQVRCKSGNKFFSMPLK

SEQ ID NO: 41431 - protein, 186 aa, Homo sapiens
MSAAPLVGYSSSGSEDESEDGMRTRPGDGSHRRGQSPLPRQRFPVPDSVLNMFPGTEEGPEDDSTKHGGRVRTFPHERGNWATHVYVPYEAKEEFLDLLDVLLPHAQTYVPRLVRMKVFHLSLSQSVVLRHHWILPFVQALKARMTSFHSPHPGPHCLIGTKDAPVTQEIPKDLGALRQEPGSQTR

SEQ ID NO: 41432 - protein, 247 aa, Homo sapiens
MSAAPLVGYSSSGSEDESEDGMRTRPGDGSHRRGQSPLPRQRFPVPDSVLNMFPGTEEGPEDDSTKHGGRVRTFPHERGNWATHVYVPYEAKEEFLDLLDVLLPHAQTYVPRLVRMKVFHLSLSQSVVLRHHWILPFVQALKARMTSFHRTFIGLEVTSGHAQFLDLVSEVDRVMEEFNLTTFYQDPSFHLSLAWCVGDARLQLEGQCLQELQAIVDGFEDAEVLLRVHTEQVRCKSGNKFFSMPLK

SEQ ID NO: 41433 - protein, 213 aa, Homo sapiens
MSPLPRQRFPVPDSVLNMFPGTEEGPEDDSTKHGGRVRTFPHERGNWATHVYVPYEAKEEFLDLLDVLLPHAQSVVLRHHWILPFVQALKARMTSFHRFFFTANQVKIYTNQEKTRTFIGLEVTSGHAQFLDLVSEVDRVMEEFNLTTFYQDPSFHLSLAWCVGDARLQLEGQCLQELQAIVDGFEDAEVLLRVHTEQVRCKSGNKFFSMPLK

SEQ ID NO: 41434 - protein, 560 aa, Homo sapiens
MGSTDSKLNFRKAVIQLTTKTQPVEATDDAYDPVGYGIPYNHLLFSDYREPLVEEAAQVLIVTLDHDSASSASPTVDGTTTGTAMDDADPPGPENLFVNYLSRIHREEDFQFILKGIARLLSNPLLQTYLPNSTKKIQFHQELLVLFWKLCDFNKKFLFFVLKSSDVLDILVPILFFLNDARADQSRVGLMHIGVFILLLLSGERNFGVRLNKPYSIRVPMDIPVFTGTHADLLIVVFHKIITSGHQRLQPLFDCLLTIVVNVSPYLKSLSMVTANKLLHLLEAFSTTWFLFSAAQNHHLVFFLLEVFNNIIQYQFDGNSNLVYAIIRKRSIFHQLANLPTDPPTIHKALQRRRRTPEPLSRTGSQEGTSMEGSRPAAPAEPGTLKTSLVATPGIDKLTEKSQVSEDGTLRSLEPEPQQSLEDGSPAKGEPSQAWREQRRPSTSSASGQWSPTPEWVLSWKSKLPLQTIMRLLQVLVPQVEKICIDKGLTDESEILRFLQHGTLVGLLPVPHPILIRKYQANSGTAMWFRTYMWGVIYLRNVDPPVWYDTDVKLFEIQRV

SEQ ID NO: 41435 - protein, 788 aa, Homo sapiens
MGSTDSKLNFRKAVIQLTTKTQPVEATDDAFWDQFWADTATSVQDVFALVPAAEIRAVREESPSNLATLCYKAVEKLVQGAESGCHSEKEKQIVLNCSRLLTRVLPYIFEDPDWRGFFWSTVPGAGRGGQGEEDDEHARPLAESLLLAIADLLFCPDFTVQSHRRSTVDSAEDVHSLDSCEYIWEAGVGFAHSPQPNYIHDMNRMELLKLLLTCFSEAMYLPPAPESGSTNPWVQFFCSTENRHALPLFTSLLNTVCAYDPVGYGIPYNHLLFSDYREPLVEEAAQVLIVTLDHDSASSASPTVDGTTTGTAMDDADPPGPENLFVNYLSRIHREEDFQFILKGIARLLSNPLLQTYLPNSTKKIQFHQELLVLFWKLCDFNKKFLFFVLKSSDVLDILVPILFFLNDARADQSRVGLMHIGVFILLLLSGERNFGVRLNKPYSIRVPMDIPVFTGTHADLLIVVFHKIITSGHQRLQPLFDCLLTIVVNVSPYLKSLSMVTANKLLHLLEAFSTTWFLFSAAQNHHLVFFLLEVFNNIIQYQFDGNSNLVYAIIRKRSIFHQLANLPTDPPTIHKALQRRRRTPEPLSRTGSQEGTSMEGSRPAAPAEPGTLKTSLVATPGIDKLTEKSQVSEDGTLRSLEPEPQQSLEDGSPAKGEPSQAWREQRRPSTSSASGQWSPTPEWVLSWKSKLPLQTIMRLLQVLVPQVEKICIDKGLTDESEILRFLQHGTLVGLLPVPHPILIRKYQANSGTAMWFRTYMWGVIYLRNVDPPVWYDTDVKLFEIQRV

SEQ ID NO: 41436 - protein, 269 aa, Homo sapiens
MSSDHLNNSTLKEAQFKDLFLKKAELEFAQIIIIVVVVTVMVVVIVCLLNHYKVSTRSFINRPNQSRRREDGLPQEGCLWPSDSAAPRLGASEIMHAPRSRDRFTAPSFIQRDRFSRFQPTYPYVQHEIDLPPTISLSDGEEPPPYQGPCTLQLRDPEQQMELNRESVRAPPNRTIFDSDLIDIAMYSGGPCPPSSNSGISASTCSSNGRMEGPPPTYSEVMGHHPGASFLHHQRSNAHRGSRLQFQQNNAESTIVPIKGKDRKPGNLV

SEQ ID NO: 41437 - protein, 306 aa, Homo sapiens
MPEAGFQATNAFTECKFTCTSGKCLYLGSLVCNQQNDCGDNSDEENCLLVTEHPPPGIFNSELEFAQIIIIVVVVTVMVVVIVCLLNHYKVSTRSFINRPNQSRRREDGLPQEGCLWPSDSAAPRLGASEIMHAPRSRDRFTAPSFIQRDRFSRFQPTYPYVQHEIDLPPTISLSDGEEPPPYQGPCTLQLRDPEQQMELNRESVRAPPNRTIFDSDLIDIAMYSGGPCPPSSNSGISASTCSSNGRMEGPPPTYSEVMGHHPGASFLHHQRSNAHRGSRLQFQQNNAESTIVPIKGKDRKPGNLV

SEQ ID NO: 41438 - protein, 248 aa, Homo sapiens
MAAELEFAQIIIIVVVVTVMVVVIVCLLNHYKVSTRSFINRPNQSRRREDGLPQEGCLWPSDSAAPRLGASEIMHAPRSRDRFTAPSFIQRDRFSRFQPTYPYVQHEIDLPPTISLSDGEEPPPYQGPCTLQLRDPEQQMELNRESVRAPPNRTIFDSDLIDIAMYSGGPCPPSSNSGISASTCSSNGRMEGPPPTYSEVMGHHPGASFLHHQRSNAHRGSRLQFQQNNAESTIVPIKGKDRKPGNLV

SEQ ID NO: 41439 - protein, 251 aa, Homo sapiens
MSSDHLNNSTLKEAQFKDLFLKKAELEFAQIIIIVVVVTVMVVVIVCLLNHYKVSTRSFINRPNQSRRREDGLPQIMHAPRSRDRFTAPSFIQRDRFSRFQPTYPYVQHEIDLPPTISLSDGEEPPPYQGPCTLQLRDPEQQMELNRESVRAPPNRTIFDSDLIDIAMYSGGPCPPSSNSGISASTCSSNGRMEGPPPTYSEVMGHHPGASFLHHQRSNAHRGSRLQFQQNNAESTIVPIKGKDRKPGNLV

SEQ ID NO: 41440 - protein, 288 aa, Homo sapiens
MPEAGFQATNAFTECKFTCTSGKCLYLGSLVCNQQNDCGDNSDEENCLLVTEHPPPGIFNSELEFAQIIIIVVVVTVMVVVIVCLLNHYKVSTRSFINRPNQSRRREDGLPQIMHAPRSRDRFTAPSFIQRDRFSRFQPTYPYVQHEIDLPPTISLSDGEEPPPYQGPCTLQLRDPEQQMELNRESVRAPPNRTIFDSDLIDIAMYSGGPCPPSSNSGISASTCSSNGRMEGPPPTYSEVMGHHPGASFLHHQRSNAHRGSRLQFQQNNAESTIVPIKGKDRKPGNLV

SEQ ID NO: 41441 - protein, 230 aa, Homo sapiens
MAAELEFAQIIIIVVVVTVMVVVIVCLLNHYKVSTRSFINRPNQSRRREDGLPQIMHAPRSRDRFTAPSFIQRDRFSRFQPTYPYVQHEIDLPPTISLSDGEEPPPYQGPCTLQLRDPEQQMELNRESVRAPPNRTIFDSDLIDIAMYSGGPCPPSSNSGISASTCSSNGRMEGPPPTYSEVMGHHPGASFLHHQRSNAHRGSRLQFQQNNAESTIVPIKGKDRKPGNLV

SEQ ID NO: 41442 - protein, 372 aa, Homo sapiens
MAKSKTKHRLCSQESSVSALLASCTLSGSNSSNSDGSFHYKDKLYRSASQALQAYIDDFDLGQIYPGASTGKINIDEDFTNMSQFCNYIYKPNNAFENLDHKKHSNFISCRRHTVNDIDSMSLTTDDLLRLPADGSFSYTYVGPSHRTSKKNKKCRGRLGSLDIEKNPHFQGPYTSMGKDNFVTPVIRSNINGKQCGDKIELLILKAKRNLEQCTEELPKSMKKDDSPCSLDKLEADRSWENIPVTFKSPVPVNSDDSPQQTSRAKSAKGVLEDFLNNDNQSCTLSGGKHHGPVEALKQMLFNLQAVQERFNQNKTTDPKEEIKQVSEDDFSKLQLKESMIPITRSLQKALHHLSRLRDLVDDTNGERSPKM

SEQ ID NO: 41443 - protein, 533 aa, Homo sapiens
MAKSKTKHRLCSQESSVSALLASCTLSGSNSSNSDGSFHYKDKLYRSASQALQAYIDDFDLGQIYPGASTGKINIDEDFTNMSQFCNYIYKPNNAFENLDHKKHSNFISCRRHTVNDIDSMSLTTDDLLRLPADGSFSYTYVGPSHRTSKKNKKCRGRLGSLDIEKNPHFQGPYTSMGKDNFVTPVIRSNINGKQCGRLKNPKLMNRTNNCISESSLSFPKKSSFKDSSEHSLEKNYPRWLTSQKSDLNVSGITSIPDFKYPVWLHNQDLLPDANSQRVYQIFKDDQCSPRHSHQAQGTSRLINKLDCFEYAFEPSNFSNSLSDDKELVNEYKCDFEHSQCQCENPLLPGQSTKPFSGDKIELLILKAKRNLEQCTEELPKSMKKDDSPCSLDKLEADRSWENIPVTFKSPVPVNSDDSPQQTSRAKSAKGVLEDFLNNDNQSCTLSGGKHHGPVEALKQMLFNLQAVQERFNQNKTTDPKEEIKQVSEDDFSKLQLKESMIPITRSLQKALHHLSRLRDLVDDTNGERSPKM

SEQ ID NO: 41444 - protein, 173 aa, Homo sapiens
MAAPSGGWNGVGASLWAALLLGAVALRPAEAVSEPTTVAFDVRPGGVVHSFSHNVGPGDKYTCMFTYASQGGTNEQWQMSLGTSEDHQHFTCTIWRPQGKSYLYFTQFKAEVRGAEIEYAMAYSKAAFERESDVPLKTEEFEVTKTAVAHRPGAFKAELSKLVIVAKASRTEL

SEQ ID NO: 41445 - protein, 141 aa, Homo sapiens
MTIMVEDIMKLLCSLSGERKMKAAVKHSGKGALVTGAMAFVGGLVGGPPGLAVGGAVGGLLGAWMTSGQFKPVPQILMELPPAEQQRLFNEAAAIIRHLEWTDAVQLTALVMGSEALQQQLLAMLVNYVTKELRAEIQYDD

SEQ ID NO: 41446 - protein, 107 aa, Homo sapiens
MTIMVEDIMKLLCSLSGERKMKAAVKHSGKGALVTGAMAFVGGLVGGPPGLAVGGAVGGLLGAWMTSGQFKPVPQILMELPPAEQQRLFNEAAAITRPCSSSCWPCW

SEQ ID NO: 41447 - protein, 152 aa, Homo sapiens
MERLKSHKPATMTIMVEDIMKLLCSLSGERKMKAAVKHSGKGALVTGAMAFVGGLVGGPPGLAVGGAVGGLLGAWMTSGQFKPVPQILMELPPAEQQRLFNEAAAIIRHLEWTDAVQLTALVMGSEALQQQLLAMLVNYVTKELRAEIQYDD

SEQ ID NO: 41448 - protein, 215 aa, Homo sapiens
MEKNPPDDTGPVHVPLGHIVANEKWRGSQLAQEMQGKIKLIFEDGLTPDFYLSNRCCILYVTEADLVAGNGYRKRLVRVRNSNNLKGIVVVEKTRMSEQYFPALQKFTVLDLGMVLLPVASQMEASCLVIQLVQEQTKEPSKNPLLGKKRALLLSEPSLLRTVQQIPGVGKVKAPLLLQKFPSIQQLSNASIGELEQVVGQAVAQQIHAFFTQPR

SEQ ID NO: 41449 - protein, 215 aa, Homo sapiens; identical to SEQ ID NO: 41448

SEQ ID NO: 41450 - protein, 408 aa, Homo sapiens
MSEHVEPAAPGPGPNGGGGGPAPARGPRTPNLNPNPLINVRDRLFHALFFKMAVTYSRLFPPAFRRLFEFFVLLKALFVLFVLAYIHIVFSRSPINCLEHVRDKWPREGILRVEVRHNSSRAPVFLQFCDSGGRGSFPGLAVEPGSNLDMEDEEEEELTMEMFGNSSIKFELDIEPKVFKPPSSTEALNDSQEFPFPETPTKVWPQDEYIVEYSLEYGFLRLSQATRQRLSIPVMVVTLDPTRDQCFGDRFSRLLLDEFLGYDDILMSSVKGLAENEENKGFLRNVVSGEHYRFVSMWMARTSYLAAFAIMVIFTLSVSMLLRYSHHQIFVFIVDLLQMLEMNMAIAFPAAPLLTVILALVGMEAIMSEFFNDTTTAFYIILIVWLADQYDAICCHTSTSKRHWLRIP

SEQ ID NO: 41451 - protein, 620 aa, Homo sapiens
MSEHVEPAAPGPGPNGGGGGPAPARGPRTPNLNPNPLINVRDRLFHALFFKMAVTYSRLFPPAFRRLFEFFVLLKALFVLFVLAYIHIVFSRSPINCLEHVRDKWPREGILRVEVRHNSSRAPVFLQFCDSGGRGSFPGLAVEPGSNLDMEDEEEEELTMEMFGNSSIKFELDIEPKVFKPPSSTEALNDSQEFPFPETPTKVWPQDEYIVEYSLEYGFLRLSQATRQRLSIPVMVVTLDPTRDQCFGDRFSRLLLDEFLGYDDILMSSVKGLAENEENKGFLRNVVSGEHYRFVSMWMARTSYLAAFAIMVIFTLSVSMLLRYSHHQIFVFIVDLLQMLEMNMAIAFPAAPLLTVILALVGMEAIMSEFFNDTTTAFYIILIVWLADQYDAICCHTSTSKRHWLRFFYLYHFAFYAYHYRFNGQYSSLALVTSWLFIQHSMIYFFHHYELPAILQQVRIQEMLLQAPPLGPGTPTALPDDMNNNSGAPATAPDSAGQPPALGPVSPGASGSPGPVAAAPSSLVAAAASVAAAAGGDLGWMAETAAIITDASFLSGLSASLLERRPASPLGPAGGLPHAPQDSVPPSDSAASDTTPLGAAVGGPSPASMAPTEAPSEVGS

SEQ ID NO: 41452 - protein, 148 aa, Homo sapiens
MAASPARPAVLALTGLALLLLLCWGPGGISGNKLKLMLQKREAPVPTKTKVAVDENKAKEFLGSLKRQKRQLWDRTRPEVQQWYQQFLYMGFDEAKFEDDITYWLNRDRNGHEYYGDYYQRHYDEDSAIGPRSPYGFRHGASVNYDDY

SEQ ID NO: 41453 - protein, 987 aa, Homo sapiens
MTPALREATAKGISFSSLPSTMESDKMLYMESPRTVDEKLKGDTFSQMLGFPTPEPTLNTNFVNLKHFGSPQSSKHYQTVFLMRSNSTLNKHNENYKQKKLGEPSCNKLKNILYNGSNIQLSKICLSHSEEFIKKEPLSDTTSQCMKDVQIILDSNITKDTNVDKVQLQNCKWYQENALLDKVTDAEIKKGLLHCTQKKIVPGHSNVPVSSSAAEKEEEVHARLLHCVSKQKILLSQARRTQKHLQMLLAKHVVKHYGQQMKLSMKHQLPKMKTFHEPTTILGNSLPKCTEIKPEVNTLTAENKLWDDAKNGFARCTAAEIQRFAFSATGLLSHVEEGLDSDATDSSSDDDLDEYTLRKNVAVNCSTEWKWLVDRARVGSRWTWLQAQISDLECKIQQLTDIHRQIRASKGIVVLEECQLPKDILKKQMQFADQAASLNILGNPQVPQECQDPVPEQDFEMSPSSPTLLLRNIEKQSAQLTEIINSLIAPLNLSPTSSPLSSKSCSHKCLANGIYRSASENLDELSSSSSWLLNQKHSKKKRKDRTRLKSSSLTFMSTSARTRPLQSFHKRKLYRLSPTFYWTPQTLPSKETAFLNTTQMPCLQSASTWSSYEHNSESYLLREHVSELDSSFHSVLSLPSDVPLHFHFETLLKKTEIKGNLAENKFVDEYIISPSPVHSTLNQWRNGYSPICKPQIRSESSAQLLQGRKKRHLSETALGERTKLEESDFQHTESGSHSNFTAVSNVNVLSRIQNSSRNTARRRLRSESSYDIDNIVIPMSLVAPAKLEKLQYKEILTPSWRMVVLQPLDEYNLGKEEIEDLSDEVFSLRHKKYEEREQARWSLWEQSKWHRRNSRAYSKNVEGQDLLLKEYPNNFSSSQQCAAASPPGLPSENQDLCAYGLPSLNQSQETKSLWWERRAFPLKGEDMAALLCQDEKKDQVERSSTAFHGEIFGTSVPENGHHPKKQSDGMEEYKTFGLGLTNVKKNR

SEQ ID NO: 41454 - protein, 228 aa, Homo sapiens
MSYAEKPDEITKDEWMEKLNNLHVQRADMNRLIMNYLVTEGFKEAAEKFRMESGIEPSVDLETLDERIKIREMILKGQIQEAIALINSLHPELLDTNRYLYFHLQQQHLIELIRQRETEAALEFAQTQLAEQGEESRECLTEMERTLALLAFDSPEESPFGDLLHTMQRQKVWSEVNQAVLDYENRESTPKLAKLLKLLLWAQNELDQKKVKYPKMTDLSKGVIEEPK

SEQ ID NO: 41455 - protein, 155 aa, Homo sapiens
MSYAEKPDEITKDEWMEKLNNLHVQRADMNRLIMNYLVTEGFKEAAEKFRMESGIEPSVDLETLDERIKIREMILKGQIQQVVHDCWRKERVFILSDLPSSISAASHPPSSAGSADVLLLFTHRTVPCSVVGRREVVQGCVHCLRVGTVDGHMAL

SEQ ID NO: 41456 - protein, 1177 aa, Homo sapiens
MDVYPPRRQGLPRARSPGGSSRGSPSVSCSRLRQVQSILTQSSKSRPDGILCILGIDSRYNEGCRELANYLLFGLYNQNTSDFEKTGFSEEVLDDVIILIKSDSVHLYCNPVNFRYLLPYVAHWRNLHFHCMTENEYEDEEAAEEFKITSFVDMVRDCSRIGIPYSSQGHLQIFDMFVVEKWPIVQAFALEGIGGDGFFTMKYELQDVSLNLWNVYSKMDPMSLESLLSDDLVAFEHQWTSFFANFDTEIPFLLELSESQAGEPFRSYFSHGMISSHITENSPNRQPFVLFGNHSTRENLNAGNFNFPSEGHLVRSTGPGGSFAKHMVAQCVSPKGPLACSRTYFFGATHVPYLGGDSKLPKKTEQIRLLSQIYAAVIEAVLAGIACYAKTSSLTKAKEVAEQTLGSGLDSFELIPFKAALRSKMTFHIHAVNNQGRIVPLDSEDSLSFVKTACMAVYDIPDLLGGNGCLGSVVFSESFLTSQILVKEKDGTVTTETSSVVLTAAVPRFCSWLVEDNEVKLSEKTQQAVRGDESFLGTYLTGGEGAYLYSSNLQSWPEEGNVHFFSSGLLFSHCRHRSIIISKDHMNSISFYDGDSTSTVAALLIDFKSSLLPHLPVHFHGSSNFLMIALFPKSKIYQAFYSEVFSLWKQQDNSGISLKVIQEDGLSVEQKRLHSSAQKLFSALSQPAGEKRSSLKLLSAKLPELDWFLQHFAISSISQEPVMRTHLPVLLQQAEINTTHRIESDKVIISIVTGLPGCHASELCAFLVTLHKECGRWMVYRQIMDSSECFHAAHFQRYLSSALEAQQNRSARQSAYIRKKTRLLVVLQGYTDVIDVVQALQTHPDSNVKASFTIGAITACVEPMSCYMEHRFLFPKCLDQCSQGLVSNVVFTSHTTEQRHPLLVQLQSLIRAANPAAAFILAENGIVTRNEDIELILSENSFSSPEMLRSRYLMYPGWYEGKLNAGSVYPLMVQICVWFGRPLEKTRFVAKCKAIQSSIKPSPFSGNIYHILGKVKFSDSERTMEVCYNTLANSLSIMPVLEGPTPPPDSKSVSQDSSGQQECYLVFIGCSLKEDSIKDWLRQSAKQKPQRKALKTRGMLTQQEIRSIHVKRHLEPLPAGYFYNGTQFVNFFGDKTDFHPLMDQFMNDYVEEANREIEKYNQELEQQEYHDLFELKP

SEQ ID NO: 41457 - protein, 495 aa, Homo sapiens
MEGCLGQELFSNHMFLTSLSSPNRQPFVLFGNHSTRENLNAGNFNFPSEGHLVRSTGPGGSFAKHMVAQCVSPKGPLACSRTYFFGATHVPYLGGDSKLPKKTEQMLLSQIYAAVIEAVLAGIACYAKTSSLTKAKEVAEQTLGSGLDSFELIPFKAALRSKMTFHIHAVNNQGRIVPLDSEDSLSFVKTACMAVYDIPDLLGGNGCLGSVVFSESFLTSQILVKEKDGTVTTETSSVVLTAAVPRFCSWLVEDNEVKLSEKTQQAVRGDESFLGTYLTGGEGAYLYSSNLQSWPEEGNVHFFSSGLLFSHCRHRSIIISKDHMNSISFYDGDSTSTVAALLIDFKSSLLPHLPVHFHGSSNFLMIALFPKSKIYQAFYSEVFSLWKQQDNSGISLKVIQEDGLSVEQKRLHSSAQKLFSALSQPAGEKRSSLKLLSAKLPELDWFLQHFAISSISQEPVMRTHLPVLLQQAEINTTHRIESDKMDGVSPNHGQL

SEQ ID NO: 41458 - protein, 204 aa, Homo sapiens
MGEAEVGGGGAAGDKGPGEAATSPAEETVVWSPEVEVCLFHAMLGHKPVGVNRHFHMICIRDKFSQNIGRQVPSKVIWDHLSTMYDMQALHESEILPFPNPERNFVLPEEIIQEVREGKVMIEEEMKEEMKEDVDPHNGADDVFSSSGSLGKASEKSSKDKEKNSSDLGCKEGADKRKRSRVTDKVLTANSNPSSPSAAKRRRT

SEQ ID NO: 41459 - protein, 469 aa, Homo sapiens
MAFLMHLLVCVFGMGSWVTINGLWVELPLLVMELPEGWYLPSYLTVVIQLANIGPLLVTLLHHFRPSCLSEVPIIFTLLGVGTVTCIIFAFLWNMTSWVLDGHHSIAFLVLTFFLALVDCTSSVTFLPFMSRLPTYYLTTFFVGEGLSGLLPALVALAQGSGLTTCVNVTEISDSVPSPVPTRETDIAQGVPRALVSALPGMEAPLSHLESRYLPAHFSPLVFFLLLSIMMACCLVAFFVLQRQPRCWEASVEDLLNDQVTLHSIRPREENDLGPAGTVDSSQGQGYLEEKAAPCCPAHLAFIYTLVAFVNALTNGMLPSVQTYSCLSYGPVAYHLAATLSIVANPLASLVSMFLPNRSLLFLGVLSVLGTCFGGYNMAMAVMSPCPLLQGHWGGEVLIVASWVLFSGCLSYVKVMLGVVLRDLSRSALLWCGAAVQLGSLLGALLMFPLVNVLRLFSSADFCNLHCPA

SEQ ID NO: 41460 - protein, 415 aa, Homo sapiens
MAFLMHLLVCVFGMGSWVTINGLWVELPLLVMELPEGWYLPSYLTVVIQLANIGPLLVTLLHHFRPSCLSEVPIIFTLLGVGTVTCIIFAFLWNMTSWVLDGHHSIAFLVLTFFLALVDCTSSVTFLPFMSRLPTYYLTTFFVGEGLSGLLPALVALAQGSGLTTCVNVTEISDSVPSPVPTRETDIAQGVPRALVSALPGMEAPLSHLESRYLPAHFSPLVFFLLLSIMMACCLVAFFVLQRQPRCWEASVEDLLNDQVTLHSIRPREENDLGPAGTVDSSQGQGYLEEKAAPCCPAHLAFIYTLVAFVNALTNGMLPSVQTYSCLSYGPVAYHLAATLSIVANPLASLVSMFLPNRSLLFLGVLSVLGTCFGGYNMAMAVMSPCPLLQGHWGGEVLIVSIRPVGLLPLRTPHP

SEQ ID NO: 41461 - protein, 345 aa, Homo sapiens
MLRPAGLWRLCRRPWAARVPAENLGRREVTSGVSPRGSTSPRTLNIFDRDLKRKQKNWAARQPEPTKFDYLKEEVGSRIADRVYDIPRNFPLALDLGCGRGYIAQYLNKETIGKFFQADIAENALKNSSETEIPTVSVLADEEFLPFKENTFDLVVSSLSLHWVNDLPRALEQIHYILKPDGVFIGAMFGGDTLYELRCSLQLAETEREGGFSPHISPFTAVNDLGHLLGRAGFNTLTVDTDEIQVNYPGMFELMEDLQGMGESNCAWNRKALLHRDTMLAAAAVYREMYRNEDGSVPATYQIYYMIGWKYHESQARPAERGSATVSFGELGKINNLMPPGKKSQ

SEQ ID NO: 41462 - protein, 317 aa, Homo sapiens
MLRPAGLWRLCRRPWAARVPAENLGRREVTSGVSPRGSTSPRTLNIFDRDLKRKQKNWAARQPEPTKFDYLKEEVGSRIADRVYDIPRNFPLALDLGCGRGYIAQYLNKLQLFHCRKLLESFSKLTLQKMLCLHWVNDLPRALEQIHYILKPDGVFIGAMFGGDTLYELRCSLQLAETEREGGFSPHISPFTAVNDLGHLLGRAGFNTLTVDTDEIQVNYPGMFELMEDLQGMGESNCAWNRKALLHRDTMLAAAAVYREMYRNEDGSVPATYQIYYMIGWKYHESQARPAERGSATVSFGELGKINNLMPPGKKSQ

SEQ ID NO: 41463 - protein, 267 aa, Homo sapiens
MLRPAGLWRLCRRPWAARVPAENLGRREVTSGVSPRGSTSPRTLNIFDRDLKRKQKNWAARQPEPTKFDYLKEEVGSRIADRVYDIPRNFPLALDLGCGRGYIAQYLNKETIGKFFQADIAENALKNSSETEIPTVSVLADEEFLPFKENTFDLVVSSLSLHWVNDLPRALEQIHYILKPDGVFIGAMFGGDTLYELRCSLQLAETEREGGFSPHISPFTAVNDLGHLLGRAGFNTLTVDTDEIQVNYPGMFELMEDLQEQKSRMLT

SEQ ID NO: 41464 - protein, 256 aa, Homo sapiens
MKLTRKMVLTRAKASELHSVRKLNCWGSRLTDISICQEMPSLEVITLSVNSISTLEPVSRCQRLSELYLRRNRIPSLAELFYLKGLPRLRVLWLAENPCCGTSPHRYRMTVLRTLPRLQKLDNQAVTEEELSRALSEGEEITAAPEREGTGHGGPKLCCTLSSLSSAAETGRDPLDSEEEATSGAQDERGLKPPSRGQFPSLSARDASSSHRGRNVLTAILLLLRELDAEGLEAVQQTVGSRLQALRGEEVQEHAE

SEQ ID NO: 41465 - protein, 217 aa, Homo sapiens
VTQGPQGLRASGRSCVGPFLSHLGRDRTPGVLTELRCVVPARLTALERSRKPRGRGRGRYITLLPVPEADPILERVPQPEFCSCVNSISTLEPVSRCQRLSELYLRRNRIPSLAELFYLKGLPRLRVLWLAENPCCGTSPHRYRMTVLRTLPRLQKLDNQAVTEEELSRALSEGEEITAAPEREGTGHGGPKLCCTLSSLSSAAETGRDPLDSEEEA

SEQ ID NO: 41466 - protein, 375 aa, Homo sapiens
MKLTRKMVLTRAKASELHSVRKLNCWGSRLTDISICQEMPSLEVITLSVNSISTLEPVSRCQRLSELYLRRNRIPSLAELFYLKGLPRLRVLWLAENPCCGTSPHRYRMTVLRTLPRLQKLDNQAVTEEELSRALSEGEEITAAPEREGTGHGGPKLCCTLSSLSSAAETGRDPLDSEEEATGAQDERGLKPPSRGQFPSLSARDASSSHRGRVSGGPLGAAAASAHCTHCTETVGREHGASQGPVGREHGASQGLEELCPRGSCVCGSVNAHTRVTRAPHGAVLAPQPLLLSWSVECGPGPCWAEGNRSHVEEVPHTRPQAGLLCSDSPSVPNVLTAILLLLRELDAEGLEAVQQTVGSRLQALRGEEVQEHAE

SEQ ID NO: 41467 - protein, 268 aa, Homo sapiens
MAAVRVLVASRLAAASAFTSLSPGGRTPSQRAALHLSVPRPAARVALVLSGCGVYDGTEIHEASAILVHLSRGGAEVQIFAPDVPQMHVIDHTKGQPSEGESRNVLTESARIARGKITDLANLSAANHDAAIFPGGFGAAKNLSTFAVDGKDCKVNKEVERVLKEFHQAGKPIGLCCIAPVLAAKVLRGVEVTVGHEQEEGGKWPYAGTAEAIKALGAKHCVKEVVEAHVDQKNKVVTTPAFMCETALHYIHDGIGAMVRKVLELTGK

SEQ ID NO: 41468 - protein, 237 aa, Homo sapiens
MAAVRVLVASRLAAASAFTSLSPGGRTPSQRAALHLSVPRPAARVALVLSGCGVYDGTEIHEASAILVHLSRGGAEVQIFAPDVPQMHVIDHTKGQPSEGESRNVLTESARIARGKITDLANLSAANHDAAIFPGGFGAAKNLLCCIAPVLAAKVLRGVEVTVGHEQEEGGKWPYAGTAEAIKALGAKHCVKEVVEAHVDQKNKVVTTPAFMCETALHYIHDGIGAMVRKVLELTGK

SEQ ID NO: 41469 - protein, 340 aa, Homo sapiens
MAEGGELMSRLLSENADLKKQVRLLKENQMLRRLLSQSCQEGGGHDLLPPRAHAYPEAGSPGSGVPDFGRFTSVADTPSQLQTSSLEDLLCSHAPLSSEDDTSPGCAAPSQAPFKAFLSPPEPHSHRGTDRKLSPLLSPLQDSLVDKTLLEPREMVRPKKVCFSESSLPTGDRTRRSYYLNEIQSFAGAEKDARVVGEIAFQLDRRILAYVFPGVTRLYGFTVANIPEKIEQTSTKSLDGSVDERKLRELTQRYLALSARLEKLGYSRDVHPAFSEFLINTYGILKQRPDLRANPLHSSPAALRKLVIDVVPPKFLGDSLLLLNCLCELSKEDGKPLFAW

SEQ ID NO: 41470 - protein, 186 aa, Homo sapiens
MVRPKKVCFSESSLPTGDRTRRSYYLNEIQSFAGAEKDARVVGEIAFQLDRRILAYVFPGVTRLYGFTVANIPEKIEQTSTKSLDGSVDERKLRELTQRYLALSARLEKLGYSRDVHPAFSEFLINTYGILKQRPDLRANPLHSSPAALRKLVIDVVPPKFLGDSLLLLNCLCELSKEDGKPLFAW

SEQ ID NO: 41471 - protein, 145 aa, Homo sapiens
MVQLIAPLEVMWNEAADLKPLALSRRLECSGGIMAHYSPDLLGPEMESRYFAQVGLEHLASSSPPAFGFLKCLDYSISVLCSATSLAMLEDNPKVSKLATGDWMLTLKPKSITVPVEIPSSPLAGRPRRRRRLRCPHDQHSQGTC

SEQ ID NO: 41472 - protein, 142 aa, Homo sapiens
MISTARVPADKPVRIAFSLNDASDDTPPEDSIPLVFPELDQQLQPLPPCHDSEESMEVFKQHCQIAEEYHEVKKEITLLEQRKKELIAKLDQAEKEKVDAAELVREFEALTEENRTLRLAQSQCVEQLEKLRIQYQKRQGSS

SEQ ID NO: 41473 - protein, 242 aa, Homo sapiens
MVQLIAPLEVMWNEAADLKPLALSRRLECSGGIMAHYSPDLLGPEMESRYFAQVGLEHLASSSPPAFGFLKCLDYSISVLCSATSLAMLEDNPKVSKLATGDWMLTLKPKSITVPVEIPSSPLDDTPPEDSIPLVFPELDQQLQPLPPCHDSEESMEVFKQHCQIAEEYHEVKKEITLLEQRKKELIAKLDQAEKEKVDAAELVREFEALTEENRTLRLAQSQCVEQLEKLRIQYQKRQGSS

SEQ ID NO: 41474 - protein, 142 aa, Homo sapiens; identical to SEQ ID NO: 41472

SEQ ID NO: 41475 - protein, 142 aa, Homo sapiens; identical to SEQ ID NO: 41472

SEQ ID NO: 41476 - protein, 142 aa, Homo sapiens; identical to SEQ ID NO: 41472

SEQ ID NO: 41477 - protein, 142 aa, Homo sapiens; identical to SEQ ID NO: 41472

SEQ ID NO: 41478 - protein, 142 aa, Homo sapiens; identical to SEQ ID NO: 41472

SEQ ID NO: 41479 - protein, 242 aa, Homo sapiens; identical to SEQ ID NO: 41473

SEQ ID NO: 41480 - protein, 44 aa, Homo sapiens
MVQLIAPLEVMWNEAADLKPLALSRRLECSGGIMAHYSPDLLGP

SEQ ID NO: 41481 - protein, 94 aa, Homo sapiens
MISTARVPADKPVRIAFSLNDASDDTPPEDSIPLVFPELDQQLQPLPPCHDSEESMEVFKQHCQIAEEYHEVKKEITLLEQRKKELIAKLDQAE

SEQ ID NO: 41482 - protein, 136 aa, Homo sapiens
MLVSSSSLTPFPPVRTADDTPPEDSIPLVFPELDQQLQPLPPCHDSEESMEVFKQHCQIAEEYHEVKKEITLLEQRKKELIAKLDQAEKEKVDAAELVREFEALTEENRTLRLAQSQCVEQLEKLRIQYQKRQGSS

SEQ ID NO: 41483 - protein, 505 aa, Homo sapiens
MSRSYNDELQFLEKINKNCWRIKKGFVPNMQVEGVFYVNDALEKLMFEELRNACRGGGVGGFLPAMKQIGNVAALPGIVHRSIGLPDVHSGYGFAIGNMAAFDMNDPEAVVSPGGVGFDINCGVRLLRTNLDESDVQPVKEQLAQAMFDHIPVGVGSKGVIPMNAKDLEEALEMGVDWSLREGYAWAEDKEHCEEYGRMLQADPNKVSARAKKRGLPQLGTLGAGNHYAEIQVVDEIFNEYAAKKMGIDHKGQVCVMIHSGSRGLGHQVATDALVAMEKAMKRDKIIVNDRQLACARIASPEGQDYLKGMAAAGNYAWVNRSSMTFLTRQAFAKVFNTTPDDLDLHVIYDVSHNIAKVEQHVVDGKERTLLVHRKGSTRAFPPHHPLIAVDYQLTGQPVLIGGTMGTCSYVLTGTEQGMTETFGTTCHGAGRALSRAKSRRNLDFQDVLDKLADMGIAIRVASPKLVMEEAPESYKNVTDVVNTCHDAGISKKAIKLRPIAVIKG

SEQ ID NO: 41484 - protein, 175 aa, Homo sapiens
MSRSYNDELQFLEKINKNCWRIKKGFVPNMQVEGVFYVNDALEKLMFEELRNACRGGGVGGFLPAMKQIGNVAALPGIVHRSIGLPDVHSGYGFAIGNMAAFDMNDPEAVVSPGGVGFDINCGVRLLRTNLDESDVQPVKEQLAQAMFDHIPVGVGSKGDMMRAVHCPEQNLDVI

SEQ ID NO: 41485 - protein, 767 aa, Homo sapiens
MSHAVTIEEPQAQPQVSQTRYRERSRAGSHISSNRAYDFLYDPLFIVSSEKDHTQANIQATLIRSRLRKVPRFKTMFSNLIHYPRYSLYWSKSDPVPPFISREWKGHKEKHREALRQLTTTDASFQMPKEVYEDPEVTGKNRYKYFERPFLPFFQQMPFNVVYAVSKAEPYTFPPTSTKHLSIPSKSTVGTQTDYRDADVQTDPYSAEYVVCQDSIPELLTLATLTWGRGLPAGQAEVEMIERAREKRAWEASLPALSDTSQFEKRRKMMNEMERKEWAFREQEIEKLQEIRLEVLKELLRKREENQNEVNMKHLNARWSKLQEGKEAKMAKIQRTHVSTIRKLVGKRKNIEGKLERRNIIKDYSDYASQVYGPLSRLGCFPDNNSEDFVVKNYYLNTYEGLVELESCLPDFVTQPQIRAPKPKVITTKAGFLKRAARLDYELAEVHKALLDKKNKVLEVKKPPRFLQRNPIPQPRLPTPTLEMTSNEEEEMEMAVIYLQKLLRGRVVQNMMFEGKEKRLELIQELRTCHALQEDEKLVKKAEKQVTLALQRQRNLHEHKVSLVENHLAGLEGRALADMFDFLSKELVRLQEERRIHAFVMLAERQRRVREAEESGRRQVEKQRLREEDEIFKEVVKVHHSTISSYLEDIILNTEANTAEEQARAEIEKMAEKINDIAYEMESRRTYLQSEEIVAELVYSFLIPEVQKYFVKEKVRNAQRKHILAAHQIIHSYTESMVQKKLTEGEQDEASNAAMLLEKETQNENNS

SEQ ID NO: 41486 - protein, 187 aa, Homo sapiens
MSHAVTIEEPQAQPQVSQTRYRERSRAGSHISSNRAYDFLYDPLFIVSSEKDHTQANIQATLIRSRLRKVPRFKTMFSNLIHYPRYSLYWSKSDPVPPFISREWKGHKEKHREALRQLTTTDASFQMPKEVYEDPEVTGKNRYKGQNHTLFLLLLLSTYPSLQSLLWALRLIIGMLTFKQIHTLQNM

SEQ ID NO: 41487 - protein, 238 aa, Homo sapiens
MSHAVTIEEPQAQPQVSQTRYRERSRAGSHISSNRAYDFLYDPLFIVSSEKDHTQANIQATLIRSRLRKVPRFKTMFSNLIHYPRYSLYWSKSDPVPPFISREWKGHKEKHREALRQLTTTDASFQMPKEVYEDPEVTGKNRYKYFERPFLPFFQQMPFNVVYAVSKAEPYTFPPTSTKHLSIPSKSTVGTQTDYRDADVQTDPYSAEYVVCQDSIPELLTLATLTWGELVNLLTIGR

SEQ ID NO: 41488 - protein, 217 aa, Homo sapiens
MDLAQPSQPVDELELSVLERQPEENTPLNGADKVFPSLDEEVPPAEANKESPWSSCNKNVVGRCKLWMIITSIFLGVITVIIIGLCLAAVTYVDEDENEILELSSNKTFFIMLKIPEECVAEEELPHLLTERLTDVYSTSPSLGRYFTSVEIVDFSGENATVTYDLQFGVPSDDENFMKYMMSEELVLGILLQDFRDQNIPGCESLGLDPTSLLLYE

SEQ ID NO: 41489 - protein, 147 aa, Homo sapiens
MDLAQPSQPVDELELSVLERQPEENTPLNGADKVFPSLDEEVPPAEANKESPWSSCNKNVVGRCKLWMIITSIFLGVITVIIIGLCLAAVTYVDEDENEILELSSNKTFFIMLKIPEECVAEEELPHLLTEREVGLKPNPEALVGFE

SEQ ID NO: 41490 - protein, 250 aa, Homo sapiens
MDLAQPSQPVDELELSVLERQPEENTPLNGADKVFPSLDEEVPPAEANKESPWSSCNKNVVGRCKLWMIITSIFLGVITVIIIGLCLAAVTYVDEDENEILELSSNKTFFIMLKIPEECVAEEELPHLLTERNEVMEAGLCLKAVLYQVLEMKGIHSVLQKRFCGLIQKHQQHQRGGDSFLSRFYSLALSPVKQLPSTASAGSSLDKGRKPARVGAIGSAGMSHCWRSLVFCLFLFCFVLFFETGSRSVA

SEQ ID NO: 41491 - protein, 430 aa, Homo sapiens
MWRLVPPKLGRLSRSLKLAALGSLLVLMVLHSPSLLASWQRNELTDRRFLQLNKCPACFGTSWCRRFLNGQVVFEAWGRLRLLDFLNVKNVYFAQYGEPREGGRRRVVLKRLGSQRELAQLDQSICKRATGRPRCDLLQAMPRTEFARLNGDVRLLTPEAVEGWSDLVHCPSQRLLDRLVRRYAETKDSGSFLLRNLKDSERMQLLLTLAFNPEPLVLQSFPSDEGWPFAKYLGACGRMVAVNYVGEELWSYFNAPWEKRVDLAWQLMEIAEQLTNNDFEFALYLLDVSFDNFAVGPRDGKVIIVDAENVLVADKRLIRQNKPENWDVWYESKFDDCDKEACLSFSKEILCARATVDHNYYAVCQNLLSRHATWRGTSGGLLHDPPSEIAKDGRLEALLDECANPKKRYGRFQAAKELREYLAQLSNNVR

SEQ ID NO: 41492 - protein, 221 aa, Homo sapiens
MKSENGTVVGSFPSDEGWPFAKYLGACGRMVAVNYVGEELWSYFNAPWEKRVDLAWQLMEIAEQLTNNDFEFALYLLDVSFDNFAVGPRDGKVIIVDAENVLVADKRLIRQNKPENWDVWYESKFDDCDKEACLSFSKEILCARATVDHNYYAVCQNLLSRHATWRGTSGGLLHDPPSEIAKDGRLEALLDECANPKKRYGRFQAAKELREYLAQLSNNVR

SEQ ID NO: 41493 - protein, 1692 aa, Homo sapiens
MRRPPPLGPTTASGPEGNVRNLQKRQAPGPGAAGGCGPEAGGCRENKQKRRMVARATPGRGEVESDKSVAASGAGKAARRQVEGRRGPVSPSDSSDPRGLEAAKEAELPLQTERHTKEKRKVTEASSDDPQPGLDLVRKESLTSSESFQTVECLQSLGKESIIEGIKRRIRNKKLKSLENPPLKITENEATQNIKVEFQDELYKNTPKYSCNILSPEVENNSVLKLRDCNCFPHSKGCNDENNLPYKPDGGCMHVAENFSKKENLRSLAEKSDTNSIPQLLQTEENVMGVNKLLPEESDLYQSKTNGLLSCLQHEKNKYSIEESSVGRKPRKRMKLSEKADETVTEMNFSNEYNKSELMLQENQMIADGKEAETKSPLNVLRKVSHNTVSLMDHLLSVPETVEKETSSEHHVNAVFQKTIEPLLKEETENASEPLGYESMASKEDFKSMKSFIGKSPNEYHIERRSSREDLRSASEELKLSCQRTIPMTGKRTWPYYSCARISAWCWKKASLPESSYFLRGSQESCRQVDVPKHQTNQTHLTDSKLLLQSSLTETNTESSSKEKLDSNSNCLSSVSAVEPTLMVIKEPIIKDDKKIKSEELSRRGSEVISNTTEDTQLTSETQSLTGNKKKARGNLTKLNLTATSKDGQEANNSAGKTIHRKACIAQQTFIVPDLVKILNTGRLTNFKIPLLKNKSEKRKEVNAKSSEREAYSPLELLDNLSGADVRQNRSKENVSMMMLGPQTLSIRNSVTPVQASSDSFYNKKSYSISPSFTKQGNNSKPSNHVSEPGNIVSNKEVASLTVENNAFSCDPGYVEKSPSFCCNEQETFRPVSSEVRGRKITKNFSEVGFPDILKAYEDDVLLIDVIQDDPDLFGVSNEGELSFTSEVPKISQEPNVAGEHQSTDSKYMETPVKKEPSDDLRELPVLDCGWIKPDICASNSAESEIKRDPKDVNTSLGEVANETSENETLGDFSEQIKGSDLDEKHRFTDKVITKEEKENIYEVCKSKDSRNADFMVGECQFAVPVPKPLCLLVPPLNLSGRQEDTILNTWMNDFRFLGKHSVLKLQNPETCEIFKREKNVGVFQKSLGLMIPYKYCKFHFNTLRGCERPLCKFAHVPEQGDEKVCMDVFKKYININELCLLQRAVNIFMEYYRKFPPGVYFDLQVLNDLLNSLLKHCLLKEVFQIVNLSIMVKMLPSLKILLNIFEYVATMKLRNAVPALIDIFCKLVEAGMVLDPEHFNYIVKLLYQVQASKQEITAVLEMKSRLQMRRFKKNWKCDLDSALNKLEHCKEKGDWTKLGKLYINVKMGCEKFADFQTFCACIAETLTKNYEDERPDIPFCEFAETVSKDPQNSKVDKGVLGRIGISAMYFYHKLLQWSKGRKVLEKLYELKIHFTSLKGLIGPEKLASRCQIVNVAAEIFLKSGSLDGAIWVMRESEWIINTPLWPCDRLDVLNRHNLLCTIAHEILAKSLYRQTFEVLQNLPGFQNSQETVEVSQYSLLFNKLLGSCIESSSLGMSSSVAEFMISKSIPIDFSFLRRLITSLGRSRLWLKARAHYKSALSLGCYPPLEGNLYRKLLLIPSYLSEIEMLLAIEIFMVSNASSIQSPGTSTQILQIVLKRCEDNQSRSNDDYQAAVERLIMAARISDPKLFVKHMTVNVNKEQVYSLEHCSALKWLKENMKWAGKVWLFSNH

SEQ ID NO: 41494 - protein, 68 aa, Homo sapiens
MVYYPELFVWVSQEPFPNKDMEGRLPKGRLPVPKEVNRKKNDETNAASLTPLGSSELRSPRISYLHFF

SEQ ID NO: 41495 - protein, 68 aa, Homo sapiens; identical to SEQ ID NO: 41494

SEQ ID NO: 41496 - protein, 112 aa, Homo sapiens
MKGVWNYSALSRREDETRTQRSRMTDRVPCSKCFQVHCQISVLNCVYYPELFVWVSQEPFPNKDMEGRLPKGRLPVPKEVNRKKNDETNAASLTPLGSSELRSPRISYLHFF

SEQ ID NO: 41497 - protein, 68 aa, Homo sapiens; identical to SEQ ID NO: 41494

SEQ ID NO: 41498 - protein, 68 aa, Homo sapiens; identical to SEQ ID NO: 41494

SEQ ID NO: 41499 - protein, 68 aa, Homo sapiens; identical to SEQ ID NO: 41494

SEQ ID NO: 41500 - protein, 68 aa, Homo sapiens; identical to SEQ ID NO: 41494

SEQ ID NO: 41501 - protein, 68 aa, Homo sapiens; identical to SEQ ID NO: 41494

SEQ ID NO: 41502 - protein, 68 aa, Homo sapiens; identical to SEQ ID NO: 41494

SEQ ID NO: 41503 - protein, 5 aa, Homo sapiens
MVYYP

SEQ ID NO: 41504 - protein, 33 aa, Homo sapiens
MVYYPELFVWVSQEPFPNKDMEGRLPKGRLPVP

SEQ ID NO: 41505 - protein, 68 aa, Homo sapiens; identical to SEQ ID NO: 41494

SEQ ID NO: 41506 - protein, 68 aa, Homo sapiens; identical to SEQ ID NO: 41494

SEQ ID NO: 41507 - protein, 65 aa, Homo sapiens
MVYYPELFVWVSQEPFPNKDMEGRLPKGRLPVPKEVNRKKNDETNAASLTPLGSSELRSPRISYL

SEQ ID NO: 41508 - protein, 244 aa, Homo sapiens
MHYGAATHIQNSRSHGLETVPGHQRLERGAGGETPEFPGCHSPAPPENFGNELLPLSAPLQGLSEGLYPPGRNKTLPAGVLREGAVQFLHRGLCNSNLSSEASARPSGTQDELHSSRRKTGQTRREGARKHLVCSFRLYPFTVHTVSPGNSHLALYQVFKAVKLCPSETSFFLSRKSLKSSDPWHPPSLSPNSWNRQAGFRAWSSHLISLSLTCSDSQSRRVSSSQQPPLHSLSSHRRAAHVPE

SEQ ID NO: 41509 - protein, 159 aa, Homo sapiens
MYRRKSGWTGCAITCSPCTAMTQLRNCMRLSRSCSLTWETPRWYMAGRVATSTSGCHCWMSRRDLTPLPHPSEPGVLDCLGPCHLLPLLSPGSPCWVLGLHFSLHPPSAASASHALTITSLPPGLLPFVGVELTAHPQALMGRGFPSGMGAAGRHLCFL

SEQ ID NO: 41510 - protein, 159 aa, Homo sapiens; identical to SEQ ID NO: 41509

SEQ ID NO: 41511 - protein, 159 aa, Homo sapiens; identical to SEQ ID NO: 41509

SEQ ID NO: 41512 - protein, 159 aa, Homo sapiens; identical to SEQ ID NO: 41509

SEQ ID NO: 41513 - protein, 248 aa, Homo sapiens
MTKTSTCIYHFLVLSWYTFLNYYISQEGKDEVKPKILANGARWKYMTLLNLLKNRTAGFDIYQPGSFRQLLQTIFYGVTCLDDVLKRTKGGKDIKFLTAFRDLLFTTLAFPVSTFVFLAFWILFLYNRDLIYPKVLDTVIPVWLNHAMHTFIFPITLAEVVLRPHSYPSKKTGLTLLAAASIAYISRILWLYFETGTWVYPVFAKLSLLGLAAFFSLSYVFIASIYLLGEKLNHWKWGDMRQPRKKRK

SEQ ID NO: 41514 - protein, 255 aa, Homo sapiens
MTKTSTCIYHFLVLSWYTFLNYYISQEGKDEVKPKILANGARWKYMTLLNLLLQTIFYGVTCLDDVLKRTKGGKDIKFLTAFRDLLFTTLAFPVSTFVFLAFWILFLYNRDLIYPKVLDTVIPVWLNHAMHTFIFPITLAEVVLRPHSYPSKKTGLTLLAAASIAYISRILWLYFETGTWVYPVFAKLSLLGLAAFFSLSYVFIASIYLLGEKLNHWKWVSVQILQRWRLESVGICFQWPDWKSPAKHQLVKNIR

SEQ ID NO: 41515 - protein, 169 aa, Homo sapiens
MTKTSTCIYHFLVLSWYTFLNYYISQEGKDEVKPKILANGARWKYMTLLNLLLQTIFYGVTCLDDVLKRTKGGKDIKFLTAFRDLLFTTLAFPVSTFVFLAFWILFLYNRDLIYPKVLDTVIPVWLNHAMHTFIFPITLAEVVLRPHSYPSKKTGLTLLAAASIAYISR

SEQ ID NO: 41516 - protein, 230 aa, Homo sapiens
MTKTSTCIYHFLVLSWYTFLNYYISQEGKDEVKPKILANGARWKYMTLLNLLLQTIFYGVTCLDDVLKRTKGGKDIKFLTAFRDLLFTTLAFPVSTFVFLAFWILFLYNRDLIYPKVLDTVIPVWLNHAMHTFIFPITLAEVVLRPHSYPSKKTGLTLLAAASIAYISRILWLYFETGTWVYPVFAKLSLLGLAAFFSLSYVFIASIYLLGEKLNHWKWGDMRQPRKKRK

SEQ ID NO: 41517 - protein, 168 aa, Homo sapiens
MTKTSTCIYHFLVLSWYTFLNYYISQEGKDEVKPKILANGARWKYMTLLNLLLQTIFYGVTCLDDVLKRTKGGKDIKFLTAFRDLLFTTLAFPVSTFVFLAFWILFLYNRDLIYPKVLDTVIPVWLNHAMHTFIFPITLAEVVLRPHSYPSKKTGLTLLAAASIAYIS

SEQ ID NO: 41518 - protein, 224 aa, Homo sapiens
MSFVEDVTIGEGESIPPDTQFVKTWRIQNSGAEAWPPGVCLKYVGGDQFGHVNMVMVRSLEPQEIADVSVQMCSPSRAGMYQGQWRMCTATGLYYGDVIWVILSVEVGGLLGVTQQLSSFETEFNTQPHRKVEGNFNPFASPQKNRQSDENNLKDPGGSEFDSISKNTWAPAPDTWAPAPDQTEQDQNRLSQNSVNLSPSSHANNLSVVTYSKGLHGPYPFGQS

SEQ ID NO: 41519 - protein, 298 aa, Homo sapiens
MEGMDVDLDPELMQKFSCLGTTDKDVLISEFQRLLGFQLNPAGCAFFLDMTNWNLQAAIGAYYDFESPNISVPSMSFVEDVTIGEGESIPPDTQFVKTWRIQNSGAEAWPPGVCLKYVGGDQFGHVNMVMVRSLEPQEIADVSVQMCSPSRAGMYQGQWRMCTATGLYYGDVIWVILSVEVGGLLGVTQQLSSFETEFNTQPHRKVEGNFNPFASPQKNRQSDENNLKDPGGSEFDSISKNTWAPAPDTWAPAPDQTEQDQNRLSQNSVNLSPSSHANNLSVVTYSKGLHGPYPFGQS

SEQ ID NO: 41520 - protein, 232 aa, Homo sapiens
MEGMDVDLDPELMQKFSCLGTTDKDVLISEFQRLLGFQLNPAGCAFFLDMTNWNLQAAIGAYYDFESPNISVPSMSFVEDVTIGEGESIPPDTQFVKTWRIQNSDVIWVILSVEVGGLLGVTQQLSSFETEFNTQPHRKVEGNFNPFASPQKNRQSDENNLKDPGGSEFDSISKNTWAPAPDTWAPAPDQTEQDQNRLSQNSVNLSPSSHANNLSVVTYSKGLHGPYPFGQS

SEQ ID NO: 41521 - protein, 41 aa, Homo sapiens
MGDIYITWIGCGLDRLQWENVSAMIEEVFEATDIKITVYTL

SEQ ID NO: 41522 - protein, 152 aa, Homo sapiens
MASSLNEDPEGSRITYVKGDLFACPKTDSLAHCISEDCRMGAGIAVLFKKKFGGVQELLNQQKKSGEVAVLKRDGRYIYYLITKKRASHKPTYENLQKSLEAMKSHCLKNGVTDLSMPRIGCGLDRLQWENVSAMIEEVFEATDIKITVYTL

SEQ ID NO: 41523 - protein, 152 aa, Homo sapiens; identical to SEQ ID NO: 41522

SEQ ID NO: 41524 - protein, 152 aa, Homo sapiens; identical to SEQ ID NO: 41522

SEQ ID NO: 41525 - protein, 152 aa, Homo sapiens; identical to SEQ ID NO: 41522

SEQ ID NO: 41526 - protein, 131 aa, Homo sapiens
MASSLNEDPEGSRITYVKGDLFACPKTDSLAHCISEDCRMGAGIAVLFKKKFGGVQELLNQQKKSGEVAVLKRDGRYIYYLITKKRASHKPTYENLQKSLEAMKSHCLKNGVTDLSMPRIGCGLDRLQWEN

SEQ ID NO: 41527 - protein, 456 aa, Homo sapiens
MEALGDLEGPRAPGGDDPAGSAGETPGWLSREQVFVLISAASVNLGSMMCYSILGPFFPKEAEKKGASNTIIGMIFGCFALFELLASLVFGNYLVHIGAKFMFVAGMFVSGGVTILFGVLDRVPDGPVFIAMCFLVRVMDAVSFAAAMTASSSILAKAFPNNVATVLGSLETFSGLGLILGPPVGGFLYQSFGYEVPFIVLGCVVLLMVPLNMYILPNYESDPGEHSFWKLIALPKVGLIAFVINSLSSCFGFLDPTLSLFVLEKFNLPAGYVGLVFLGMALSYAISSPLFGLLSDKRPPLRKWLLVFGNLITAGCYMLLGPVPILHIKSQLWLLVLILVVSGLSAGMSIIPTFPEILSCAHENGFEEGLSTLGLVSGLFSAMWSIGAFMGPTLGGFLYEKIGFEWAAAIQGLWALISGLAMGLFYLLEYSRRKRSKSQNILSTEEERTTLLPNET

SEQ ID NO: 41528 - protein, 107 aa, Homo sapiens
MEALGDLEGPRAPGGDDPAGSAGETPGWLSREQVFVLISAASVNLGSMMCYSILGPFFPKEAEKKGASNTIIGMIFGFQFTSWICGTSIPGYGTVLCHLFTTIWSPK

SEQ ID NO: 41529 - protein, 107 aa, Homo sapiens; identical to SEQ ID NO: 41528

SEQ ID NO: 41530 - protein, 236 aa, Homo sapiens
MFCFVRVAGILGIWKLSCTYWSKIYVCSRNVCLRRSYNSLWGSLETFSGLGLILGPPVGGFLYQSFGYEVPFIVLGCVVLLMVPLNMYILPNYESDPGEHSFWKLIALPKVGLIAFVINSLSSCFGFLDPTLSLFVLEKFNLPAGYVGLVFLGMALSYAISSPLFGLLSDKRPPLRKWLLVFGNLITAGCYMLLGPVPILHIKSQLWLLVLILVVSGLSAGMSIIPTFPEILSCAQ

SEQ ID NO: 41531 - protein, 217 aa, Homo sapiens
MDAPRRFPTLVQLMQPKAMPVEVLGHLPKRFSWFHSEFLKNPKVVRLEVWLVEKIFGRGGERIPHVQGMSQILIHVNRLDPNGEAEILVFGRPSYQEDTIKMIMNLADYHRQLQAKGSGKALAQDVATQKAETQRSSIEVREAGTQRSVEVREAGTQRSVEVQEVGTQGSPVEVQEAGTQQSLQAANKSGTQRSPEAASKAVTQRFREDARDPVTRL

SEQ ID NO: 41532 - protein, 471 aa, Homo sapiens
MPSETHAMLATLARVAALRRTCLFSGRGGGRGLWTGRPQSDMNNIKPLEGVKILDLTRVLAGPFATMNLGDLGAEVIKVERPGAGDDTRTWGPPFVGTESTYYLSVNRNKKSIAVNIKDPKGVKIIKELAAVCDVFVENYVPGKLSAMGLGYEDIDEIAPHIIYCSITGYGQTGPISQRAGYDAVASAVSGLMHITGPENGDPVRPGVAMTDLATGLYAYGAIMAGLIQKYKTGKGLFIDCNLLSSQVACLSHIAANYLIGQKEAKRWGTAHGSIVPYQAFKTKDGYIVVGAGNNQQFATVCKILDLPELIDNSKYKTNHLRVHNRKELIKILSERFEEELTSKWLYLFEGSGVPYGPINNMKNVFAEPQNAVSGFQSLLHSLAHGPFLHLQGSARVLHNGLVMEMEHPTVGKISVPGPAVRYSKFKMSEARPPPLLGQHTTHILKEVLRYDDRAIGELLSAGVVDQHETH

SEQ ID NO: 41533 - protein, 445 aa, Homo sapiens
MPSETHAMLATLARVAALRRTCLFSGRGGGRGLWTGRPQSDMNNIKPLEGVKILDLTRVLAGPFATMNLGDLGAEVIKVERPGAGDDTRTWGPPFVGTESTYYLSVNRNKKSIAVNIKDPKGVKIIKELAAVCDVFVENYVPGKLSAMGLGYEDIDEIAPHIIYCSITGYGQTGPISQRAGYDAVASAVSGLMHITGPENGDPVRPGVAMTDLATGLYAYGAIMAGLIQKYKTGKGLFIDCNLLSSQVACLSHIAANYLIGQKEAKRWGTAHGSIVPYQAFKTKDGYIVVGAGNNQQFATVCKILDLPELIDNSKYKTNHLRVHNRKELIKILSERFEEELTSKWLYLFEGSGVPYGPINNMKNVFAEPQVLHNGLVMEMEHPTVGKISVPGPAVRYSKFKMSEARPPPLLGQHTTHILKEVLRYDDRAIGELLSAGVVDQHETH

SEQ ID NO: 41534 - protein, 202 aa, Homo sapiens
MLATLARVAALRRTCLFSGRGGGRGLWTGRPQSDMNNIKPLEGVKILDLTRVLAGPFATMNLGDLGAEVIKVERPGAGDDTRTWGPPFVGTESTYYLSVNRNKKSIAVNIKDPKGVKIIKELAAVCDVFVENYVPGKLSAMGLGYEDIDEIAPHIIYCSITEKGFSHVAQDGLDLQTSSNLPALVSQSAGITGMSHRAWPTS

SEQ ID NO: 41535 - protein, 397 aa, Homo sapiens
MPSETHAMLATLARVAALRRTCLFSGRGGGRGLWTGRPQSDMNNIKPLEGVKILDLTRVLAGPFATMNLGDLGAEVIKVERPGAGDDTRTWGPPFVGTESTYYLSVNRNKKSIAVNIKDPKGVKIIKELAAVCDVFVENYVPGKLSAMGLGYEDIDEIAPHIIYCSITGYGQTGPISQRAGYDAVASAVSGLMHITGPEVACLSHIAANYLIGQKEAKRWGTAHGSIVPYQAFKTKDGYIVVGAGNNQQFATVCKILDLPELIDNSKYKTNHLRVHNRKELIKILSERFEEELTSKWLYLFEGSGVPYGPINNMKNVFAEPQVLHNGLVMEMEHPTVGKISVPGPAVRYSKFKMSEARPPPLLGQHTTHILKEVLRYDDRAIGELLSAGVVDQHETH

SEQ ID NO: 41536 - protein, 179 aa, Homo sapiens
MQRQNFRPPTPPYPGPGGGGWGSGSSFRGTPGGGGPRPPSPRDGYGSPHHTPPYGPRSRPYGSSHSPRHGGSFPGGRFGSPSPGGYPGSYSRSPAGSQQQFGYSPGQQQTHPQGSPRTSTPFGSGRVREKRMSNELENYFKPSMLEDPWAGLEPVSVVDISQQYSNTQTFTGKKGRYFC

SEQ ID NO: 41537 - protein, 159 aa, Homo sapiens
MKIVDEREKNLDDKAYRNIKELENYAENTQSSLLYLTLEILGIKDLHADHAASHIGKAQGIVTCLRATPYHGSRRKVFLPMDICMLHGVSQEDFLRRNQDKNVRDVIYDIASQAHLHLKHARSFHKTVPVKAFPAFLQTEIKDADTQGVCLAQPASLGK

SEQ ID NO: 41538 - protein, 333 aa, Homo sapiens
MAASAHGSVWGPLRLGIPGLCCRRPPLGLYARMRRLPGPEVSGRSVAAASGPGAWGTDHYCLELLRKRDYEGYLCSLLLPAESRSSVFALRAFNVELAQVKDSVSEKTIGLMRMQFWKKTVEDIYCDNPPHQPVAIELWKAVKRHNLTKRWLMKIVDEREKNLDDKAYRNIKELENYAENTQSSLLYLTLEILGIKDLHADHAASHIGKAQGIVTCLRATPYHGSRRKVFLPMDICMLHGVSQEDFLRRNQDKNVRDVIYDIASQAHLHLKHARSFHKTVPVKAFPAFLQTVSLEDFLKKIQRVDFDIFHPSLQQKNTLLPLYLYIQSWRKTY

SEQ ID NO: 41539 - protein, 281 aa, Homo sapiens
MPISISHSSWLVQRKRDYEGYLCSLLLPAESRSSVFALRAFNVELAQVKDSVSEKTIGLMRMQFWKKTVEDIYCDNPPHQPVAIELWKAVKRHNLTKRWLMKIVDEREKNLDDKAYRNIKELENYAENTQSSLLYLTLEILGIKDLHADHAASHIGKAQGIVTCLRATPYHGSRRKVFLPMDICMLHGVSQEDFLRRNQDKNVRDVIYDIASQAHLHLKHARSFHKTVPVKAFPAFLQTVSLEDFLKKIQRVDFDIFHPSLQQKNTLLPLYLYIQSWRKTY

SEQ ID NO: 41540 - protein, 106 aa, Homo sapiens
MKAKRSHQAVIMSTSLRVSPSIHGYHFDTASRKKAVGNIFENTDQESLERLFRNSGDKKAEERAKIIFAIDQDVEEKTRALMALKKRTKDKLFQFLKLRKYSIKVH

SEQ ID NO: 41541 - protein, 394 aa, Homo sapiens
MAGAAMAERGRVPPPAPAPSTEGLPRAFLQSLRTLFDILDDRRRGCVHLREIESRWQGTDARELPRGVLEGLRQVAPASGYLTFERFVAGLRTSLLSADGGPRDPTRAPARPGDQPPPPPQRLVFAPADEPRTVLERKPLPLGVRAPLAGPSAAARSPEQLCAPAEAAPCPAEPERSQSAALEPSSSADAGAVACRALEADSGDARRAPRARGERRRHTIASGVDCGLLKQMKELEQEKEVLLQGLEMMARGRDWYQQQLQRVQERQRRLGQSRASADFGAAGSPRPLGRLLPKVQEVARCLGELLAAACASRALPPSSSGPPCPALTSTSPPVWQQQTILMLKEQNRLLTQEVTEKSERITQLEQEKSALIKQLFEARALSQQDGGPLDSTFI

SEQ ID NO: 41542 - protein, 344 aa, Homo sapiens
MRRPRQGGGGAGGSAAARARAGGLGGGSVPARARGAPAAARAAWLRDLCARMARPPRQHPGVWASLLLLLLTGPAACAASPADDGAGPGGRGPRGRARGDTGADEAVPRHDSSYGTFAGEFYDLRYLSEEGYPFPTAPPVDPFAKIKVDDCGKTKGCFRYGKPGCNAETCDYFLSYRMIGADVEFELSADTDGWVAVGFSSDKKMGGDDVMACVHDDNGRVRIQHFYNVGQWAKEIQRNPARDEEGVFENNRVTCRFKRPVNVPRDETIVDLHLSWYYLFAWGPAIQGSITRHDIDSPPASERVVSIYKYEDIFMPSAAYQTFSSPFCLLLIVALTFYLLMGTP

SEQ ID NO: 41543 - protein, 130 aa, Homo sapiens
MSSSGGAPGASASSAPPAQEEGMTWWYRWLCRLSGVLGAVSCAISGLFNCITIHPLNIAAGVWMMMAVVPIVISLTLTTLLGNAIAFATGVLYGLSALGKKGDAISYARIQQQRQQADEEKLAETLEGEL

SEQ ID NO: 41544 - protein, 172 aa, Homo sapiens
MSSSGGAPGASASSAPPAQEEGMTWWYRWLCRLSGVLGAVSCAISGLFNCITIHPLNIAAGVWMIMNAFILLLCEAPFCCQFIEFANTVAEKVDRLRSWQKAVFYCGMAVVPIVISLTLTTLLGNAIAFATGVLYGLSALGKKGDAISYARIQQQRQQADEEKLAETLEGEL

SEQ ID NO: 41545 - protein, 114 aa, Homo sapiens
MLTAAGSTAELSACAISGLFNCITIHPLNIAAGVWMIMNAFILLLCEAPFCCQFIEFANTVAEKVDRLRSWQKAVFYCGMAVVPIVISLTLTTLLGNAIAFATGVLYGLSALGK

SEQ ID NO: 41546 - protein, 162 aa, Homo sapiens [sequence omitted]

SEQ ID NO: 41547 - protein, 233 aa, Homo sapiens
MSSSGGAPGASASSAPPAQEEGMTWWYRWLCRLSGVLGAVSCAISGLFNCITIHPLNIAAGVWMIMNAFILLLCEAPFCCQFIEFANTVAEKVDRLRSWQKAVFYCGMAVVPIVISLTLTTLLGNAIAFATGVLYGLSALGKKAQTEAGSFAAQHPREPGPFSEGTRQAFATPAVVSGEIRMPAGAMRSPMPGSSSRGSRRMRRSSRRPWRGSCEGLGAPPSLSPLLALCGSK

SEQ ID NO: 41548 - protein, 191 aa, Homo sapiens
MSSSGGAPGASASSAPPAQEEGMTWWYRWLCRLSGVLGAVSCAISGLFNCITIHPLNIAAGVWMMMAVVPIVISLTLTTLLGNAIAFATGVLYGLSALGKKAQTEAGSFAAQHPREPGPFSEGTRQAFATPAVVSGEIRMPAGAMRSPMPGSSSRGSRRMRRSSRRPWRGSCEGLGAPPSLSPLLALCGSK

SEQ ID NO: 41549 - protein, 222 aa, Homo sapiens
MSTLCPPPSPAVAKTEIALSGKSPLLAATFAYWDNILGPRVRHIWAPKTEQVLLSDGEITFLANHTLNGEILRNAESGAIDVKFFVLSEKGVIIVSLIFDGNWNGDRSTYGLSIILPQTELSFYLPLHRVCVDRLTHIIRKGRIWMHKERQENVQKIILEGTERMEDQGQSIIPMLTGEVIPVMELLSSMKSHSVPEEIDIADTVLNDDDIGDSCHEGFLLK

SEQ ID NO: 41550 - protein, 222 aa, Homo sapiens; identical to SEQ ID NO: 41549

SEQ ID NO: 41551 - protein, 481 aa, Homo sapiens
MSTLCPPPSPAVAKTEIALSGKSPLLAATFAYWDNILGPRVRHIWAPKTEQVLLSDGEITFLANHTLNGEILRNAESGAIDVKFFVLSEKGVIIVSLIFDGNWNGDRSTYGLSIILPQTELSFYLPLHRVCVDRLTHIIRKGRIWMHKERQENVQKIILEGTERMEDQGQSIIPMLTGEVIPVMELLSSMKSHSVPEEIDIADTVLNDDDIGDSCHEGFLLNAISSHLQTCGCSVVVGSSAEKVNKIVRTLCLFLTPAERKCSRLCEAESSFKYESGLFVQGLLKDSTGSFVLPFRQVMYAPYPTTHIDVDVNTVKQMPPCHEHIYNQRRYMRSELTAFWRATSEEDMAQDTIIYTDESFTPDLNIFQDVLHRDTLVKAFLDQVFQLKPGLSLRSTFLAQFLLVLHRKALTLIKYIEDDTQKGKKPFKSLRNLKIDLDLTAEGDLNIIMALAEKIKPGLHSFIFGRPFYTSVQERDVLMTF

SEQ ID NO: 41552 - protein, 55 aa, Homo sapiens
MQNQSSTNHPGASMLMHIHLDTSSLKTLHLGTLFFLFYLALTQNEENICDGKVTL

SEQ ID NO: 41553 - protein, 74 aa, Homo sapiens
MQNQSSTNHPGASIALSRPSLNKDFRDHAEQQHIAAQQKAALQHAHAHSSGYFITQDSAFGNLILPVLPRLDPE

SEQ ID NO: 41554 - protein, 55 aa, Homo sapiens; identical to SEQ ID NO: 41552

SEQ ID NO: 41555 - protein, 104 aa, Homo sapiens
MAANSSGQGFQNKNRVAILAELDKEKRKLLMQNQSSTNHPGASIALSRPSLNKDFRDHAEQQHIAAQQKAALQHAHAHSSGYFITQDSAFGNLILPVLPRLDPE

SEQ ID NO: 41556 - protein, 729 aa, Homo sapiens
MFSALKKLVGSDQAPGRDKNIPAGLQSMNQALQRRFAKGVQYNMKIVIRGDRNTGKTALWHRLQGRPFVEEYIPTQEIQVTSIHWSYKTTDDIVKVEVWDVVDKGKCKKRGDGLKMENDPQEAESEMALDAEFLDVYKNCNGVVMMFDITKQWTFNYILRELPKVPTHVPVCVLGNYRDMGEHRVILPDDVRDFIDNLDRPPGSSYFRYAESSMKNSFGLKYLHKFFNIPFLQLQRETLLRQLETNQLDMDATLEELSVQQETEDQNYGIFLEMMEARSRGHASPLAANGQSPSPGSQSPVVPAGAVSTGSSSPGTPQPAPQLPLNAAPPSSVPPVPPSEALPPPACPSAPAPRRSIISRLFGTSPATEAAPPPPEPVPAAEGPATVQSVEDFVPDDRLDRSFLEDTTPARDEKKVGAKAAQQDSDSDGEALGGNPMVAGFQDDVDLEDQPRGSPPLPAGPVPSQDITLSSEEEAEVAAPTKGPAPAPQQCSEPETKWSSIPASKPRRGTAPTRTAAPPWPGGVSVRTGPEKRSSTRPPAEMEPGKGEQASSSESDPEGPIAAQMLSFVMDDPDFESEGSDTQRRADDFPVRDDPSDVTDEDEGPAEPPPPPKLPLPAFRLKNDSDLFGLGLEEAGPKESSEEGKEGKTPSKEKKKKKKKGKEEEEKAAKKKSKHKKSKDKEEGKEERRRRQQRPPRSRERTAADELEAFLGGGAPGGRHPGGGDYEEL

SEQ ID NO: 41557 - protein, 520 aa, Homo sapiens
MFSALKKLVGSDQAPGRDKNIPAGLQSMNQALQRRFAKGVQYNMKIVIRGDRNTGKTALWHRLQGRPFVEEYIPTQEIQVTSIHWSYKTTDDIVKVEVWDVVDKGKCKKRGDGLKMENDPQEAESEMALDAEFLDVYKNCNGVVMMFDITKQWTFNYILRELPKVPTHVPVCVLGNYRDMGEHRVILPDDVRDFIDNLDRPPGSSYFRYAESSMKNSFGLKYLHKFFNIPFLQLQRETLLRQLETNQLDMDATLEELSVQQETEDQNYGIFLEMMEARSRGHASPLAANGQSPSPGSQSPVVPAGAVSTGSSSPGTPQPAPQLPLNAAPPSSVPPVPPSEALPPPACPSAPAPRRSIISRPPPWGWRLRGALGRRGQWPPWGGGRACHCLGRHLPLYHRLCRCPVAAVCASELEEAGHWWSPGWALQVLGLQAQCEPALQEGRGQLASARLGGHPGPLGAEPPVFLRDVTEAQEGPVRVCLQRLGRGRLAVGCALPRHLLALRAHLGPQHAYGSASGREP

SEQ ID NO: 41558 - protein, 730 aa, Homo sapiens
MFSALKKLVGSDQAPGRDKNIPAGLQSMNQALQRRFAKGVQYNMKIVIRGDRNTGKTALWHRLQGRPFVEEYIPTQEIQVTSIHWSYKTTDDIVKVEVWDVVDKGKCKKRGDGLKMENDPQEAESEMALDAEFLDVYKNCNGVVMMFDITKQWTFNYILRELPKVPTHVPVCVLGNYRDMGEHRVILPDDVRDFIDNLDSRPPGSSYFRYAESSMKNSFGLKYLHKFFNIPFLQLQRETLLRQLETNQLDMDATLEELSVQQETEDQNYGIFLEMMEARSRGHASPLAANGQSPSPGSQSPVVPAGAVSTGSSSPGTPQPAPQLPLNAAPPSSVPPVPPSEALPPPACPSAPAPRRSIISRLFGTSPATEAAPPPPEPVPAAEGPATVQSVEDFVPDDRLDRSFLEDTTPARDEKKVGAKAAQQDSDSDGEALGGNPMVAGFQDDVDLEDQPRGSPPLPAGPVPSQDITLSSEEEAEVAAPTKGPAPAPQQCSEPETKWSSIPASKPRRGTAPTRTAAPPWPGGVSVRTGPEKRSSTRPPAEMEPGKGEQASSSESDPEGPIAAQMLSFVMDDPDFESEGSDTQRRADDFPVRDDPSDVTDEDEGPAEPPPPPKLPLPAFRLKNDSDLFGLGLEEAGPKESSEEGKEGKTPSKEKKKKKKKGKEEEEKAAKKKSKHKKSKDKEEGKEERRRRQQRPPRSRERTAADELEAFLGGGAPGGRHPGGGDYEEL

SEQ ID NO: 41559 - protein, 314 aa, Homo sapiens
MFSALKKLVGSDQAPGRDKNIPAGLQSMNQALQRRFAKGVQYNMKIVIRGDRNTGKTALWHRLQGRPFVEEYIPTQEIQVTSIHWSYKTTDDIVKVEVWDVVDKGKCKKRGDGLKMENDPQEAESEMALDAEFLDVYKNCNGVVMMFDITKQWTFNYILRELPKVPTHVPVCVLGNYRDMGEHRVILPDDVRDFIDNLDRPPGSSYFRYAESSMKNSFGLKYLHKFFNIPFLQLQKDVRLAQERGCAVVLVSEEVRMPAGWDCCWGRLGWKEGGSQTCPVPALLGRPLLPAEPSPHHWVDYSLESSPLLSCSIP

SEQ ID NO: 41560 - protein, 521 aa, Homo sapiens
MFSALKKLVGSDQAPGRDKNIPAGLQSMNQALQRRFAKGVQYNMKIVIRGDRNTGKTALWHRLQGRPFVEEYIPTQEIQVTSIHWSYKTTDDIVKVEVWDVVDKGKCKKRGDGLKMENDPQEAESEMALDAEFLDVYKNCNGVVMMFDITKQWTFNYILRELPKVPTHVPVCVLGNYRDMGEHRVILPDDVRDFIDNLDSRPPGSSYFRYAESSMKNSFGLKYLHKFFNIPFLQLQRETLLRQLETNQLDMDATLEELSVQQETEDQNYGIFLEMMEARSRGHASPLAANGQSPSPGSQSPVVPAGAVSTGSSSPGTPQPAPQLPLNAAPPSSVPPVPPSEALPPPACPSAPAPRRSIISRPPPWGWRLRGALGRRGQWPPWGGGRACHCLGRHLPLYHRLCRCPVAAVCASELEEAGHWWSPGWALQVLGLQAQCEPALQEGRGQLASARLGGHPGPLGAEPPVFLRDVTEAQEGPVRVCLQRLGRGRLAVGCALPRHLLALRAHLGPQHAYGSASGREP

SEQ ID NO: 41561 - protein, 614 aa, Homo sapiens
MENDPQEAESEMALDAEFLDVYKNCNGVVMMFDITKQWTFNYILRELPKVPTHVPVCVLGNYRDMGEHRVILPDDVRDFIDNLDRPPGSSYFRYAESSMKNSFGLKYLHKFFNIPFLQLQRETLLRQLETNQLDMDATLEELSVQQETEDQNYGIFLEMMEARSRGHASPLAANGQSPSPGSQSPVVPAGAVSTGSSSPGTPQPAPQLPLNAAPPSSVPPVPPSEALPPPACPSAPAPRRSIISRLFGTSPATEAAPPPPEPVPAAEGPATVQSVEDFVPDDRLDRSFLEDTTPARDEKKVGAKAAQQDSDSDGEALGGNPMVAGFQDDVDLEDQPRGSPPLPAGPVPSQDITLSSEEEAEVAAPTKGPAPAPQQCSEPETKWSSIPASKPRRGTAPTRTAAPPWPGGVSVRTGPEKRSSTRPPAEMEPGKGEQASSSESDPEGPIAAQMLSFVMDDPDFESEGSDTQRRADDFPVRDDPSDVTDEDEGPAEPPPPPKLPLPAFRLKNDSDLFGLGLEEAGPKESSEEGKEGKTPSKEKKKKKKKGKEEEEKAAKKKSKHKKSKDKEEGKEERRRRQQRPPRSRERTAADELEAFLGGGAPGGRHPGGGDYEEL

SEQ ID NO: 41562 - protein, 225 aa, Homo sapiens
  VARIANT 1: note = MOD_RES - Any amino acid
XDDIVKVEVWDVVDKGKCKKRGDGLKMENDPQEAESEMALDAEFLDVYKNCNGVVMMFDITKQWTFNYILRELPKVPTHVPVCVLGNYRDMGEHRVILPDDVRDFIDNLDRPPGSSYFRYAESSMKNSFGLKYLHKFFNIPFLQLQKDVRLAQERGCAVVLVSEEVRMPAGWDCCWGRLGWKEGGSQTCPVPALLGRPLLPAEPSPHHWVDYSLESSPLLSCSIP

SEQ ID NO: 41563 - protein, 471 aa, Homo sapiens
MTVGTVKIVIRGDRNTGKTALWHRLQGRPFVEEYIPTQEIQVTSIHWSYKTTDDIVKVEVWDVVDKGKCKKRGDGLKMENDPQEAESEMALDAEFLDVYKNCNGVVMMFDITKQWTFNYILRELPKVPTHVPVCVLGNYRDMGEHRVILPDDVRDFIDNLDRPPGSSYFRYAESSMKNSFGLKYLHKFFNIPFLQLQRETLLRQLETNQLDMDATLEELSVQQETEDQNYGIFLEMMEARSRGHASPLAANGQSPSPGSQSPVVPAGAVSTGSSSPGTPQPAPQLPLNAAPPSSVPPVPPSEALPPPACPSAPAPRRSIISRLFGTSPATEAAPPPPEPVPAAEGPATVQSVEDFVPDDRLDRSFLEDTTPARDEKKVGAKAAQQDSDSDGEALGGNPMVAGFQDDVDLEDQPRGSPPLPAGPVPSQDITLSSEEEAEVAAPTKGPAPAPQQCSEPETKWSGEAQQHQAPC

SEQ ID NO: 41564 - protein, 448 aa, Homo sapiens
MSHRAWLALLPLEVDGDDGLCGAGGPEHSGSSQPQQQQQRAPCHLRASGRGRGARLLTRLLPFSFLEMMEARSRGHASPLAANGQSPSPGSQSPVVPAGAVSTGSSSPGTPQPAPQLPLNAAPPSSVPPVPPSEALPPPACPSAPAPRRSIISRLFGTSPATEAAPPPPEPVPAAEGPATVQSVEDFVPDDRLDRSFLEDTTPARDEKKVGAKAAQQDSDSDGEALGGNPMVAGFQDDVDLEDQPRGSPPLPAGPVPSQDITLSSEEEAEVAAPTKGPAPAPQQCSEPETKWSSIPASKPRRGTAPTRTAAPPWPGGVSVRTGPEKRSSTRPPAEMEPGKGEQASSSESDPEGPIAAQMLSFVMDDPDFESEGSDTQRRADDFPVRDDPSDVTDEDEGPAEPPPPPKLPLPAFRLKNDSDLFGLGLEEAGPKESSEEGKEGKTPSKEK

SEQ ID NO: 41565 - protein, 215 aa, Homo sapiens
  VARIANT 1: note = MOD_RES - Any amino acid
XKIVIRGDRNTGKTALWHRLQGRPFVEEYIPTQEIQVTSIHWSYKTTDDIVKVEVWDVVDKGKCKKRGDGLKMENDPQEAESEMALDAEFLDVYKNCNGVVMMFDITKQWTFNYILRELPKVPTHVPVCVLGNYRDMGEHRVILPDDVRDFIDNLDSRPPGSSYFRYAESSMKNSFGLKYLHKFFNIPFLQLQVSTHHVGWSGCWSLTSFQVSPV

SEQ ID NO: 41566 - protein, 111 aa, Homo sapiens
MYSRLFYLKSSYIIYFEPLFSNAIINILSFINSLASPLTIFCFALSAQALSTIFYFRIFIFIFHSWILLFHFYFTCSFKTYEHQHSKMVPAYRMQSPRALPRTYLYVWPYK

SEQ ID NO: 41567 - protein, 113 aa, Homo sapiens
MNFYLLLASSILCALIVFWKYRRFQRNTGEMSSNSTALALVRPSSSGLINSNTDNNLAVYDLSRDILNNFPHSIARQKRILVNLSMVENKLVELEHTLLSKGFRGASPHRKST

SEQ ID NO: 41568 - protein, 136 aa, Homo sapiens
MLLKLKEKASLTLAVGTLPFPSQFNFVPPGRMCRVAGWGRTGVLKPGSDTLQEVKLRLMDPQACSHFRDFDHNLQLCVGNPRKTKSAFKGDSGGPLLCAGVAQGIVSYGRSDAKPPAVFTRISHYRPWINQILQAN

SEQ ID NO: 41569 - protein, 247 aa, Homo sapiens
MLLLPLPLLLFLLCSRAEAGEIIGGTECKPHSRPYMAYLEIVTSNGPSKFCGGFLIRRNFVLTAAHCAGRSITVTLGAHNITEEEDTWQKLEVIKQFRHPKYNTSTLHHDIMLLKLKEKASLTLAVGTLPFPSQFNFVPPGRMCRVAGWGRTGVLKPGSDTLQEVKLRLMDPQACSHFRDFDHNLQLCVGNPRKTKSAFKGDSGGPLLCAGVAQGIVSYGRSDAKPPAVFTRISHYRPWINQILQAN

SEQ ID NO: 41570 - protein, 69 aa, Homo sapiens
MLGITVLAALLACATPGPTVWPWERTTWRWKTKKDPCLWVWTPSTSTRDGMPSCCAMILPSSSLQSMWS

SEQ ID NO: 41571 - protein, 268 aa, Homo sapiens [sequence omitted]

SEQ ID NO: 41572 - protein, 264 aa, Homo sapiens
MLLLSLTLSLVLLGSSWGCGIPAIKPALSFSQRIVNGENAVLGSWPWQVSLQDSSGFHFCGGSLISQSWVVTAAHCNVSPGRHFVVLGEYDRSSNAEPLQVLSVSRAITHPSWNSTTMNNDVTLLKLASPAQYTTRISPVCLASSNEALTEGLTCVTTGWGRLSGVGNVTPAHLQQVALPLVTVNQCRQYWGSSITDSMICAGGAGASSCQGDSGGPLVCQKGNTWVLIGIVSWGTKNCNVRAPAVYTRVSKFSTWINQVIAYN

SEQ ID NO: 41573 - protein, 264 aa, Homo sapiens; identical to SEQ ID NO: 41572

SEQ ID NO: 41574 - protein, 263 aa, Homo sapiens
MASLWLLSCFSLVGAAFGCGVPAIHPVLSGLSRIVNGEDAVPGSWPWQVSLQDKTGFHFCGGSLISEDWVVTAAHCGVRTSDVVVAGEFDQGSDEENIQVLKIAKVFKNPKFSILTVNNDITLLKLATPARFSQTVSAVCLPSADDDFPAGTLCATTGWGKTKYNANKTPDKLQQAALPLLSNAECKKSWGRRITDVMICAGASGVSSCMGDSGGPLVCQKDGAWTLVGIVSWGSDTCSTSSPGVYARVTKLIPWVQKILAAN

SEQ ID NO: 41575 - protein, 372 aa, Homo sapiens
MAAPVPWACCAVLAAAAAVVYAQRHSPQEAPHVQYERLGSDVTLPCGTANWDAAVTWRVNGTDLAPDLLNGSQLVLHGLELGHSGLYACFHRDSWHLRHQVLLHVGLPPREPVLSCRSNTYPKGFYCSWHLPTPTYIPNTFNVTVLHGSKIMVCEKDPALKNRCHIRYMHLFSTIKYKVSISVSNALGHNATAITFDEFTIVKPDPPENVVARPVPSNPRRLEVTWQTPSTWPDPESFPLKFFLRYRPLILDQWQHVELSDGTAHTITDAYAGKEYIIQVAAKDNEIGTWSDWSVAAHATPWTEEPRHLTTEAQAAETTTSTTSSLAPPPTTKICDPGELGSGGGPSAPFLVSVPITLALAAAAATASSLLI

SEQ ID NO: 41576 - protein, 372 aa, Homo sapiens; identical to SEQ ID NO: 41575

SEQ ID NO: 41577 - protein, 256 aa, Homo sapiens
MAAPVPWACCAVLAAAAAVVYAQRHSPQEAPHVQYERLGSDVTLPCGTANWDAAVTWRVNGTDLAPDLLNGSQLVLHGLELGHSGLYACFHRDSWHLRHQVLLHVGLPPREPVLSCRSNTYPKGFYCSWHLPTPTYIPNTFNVTVLHGSKIMVCEKDPALKNRCHIRYMHLFSTIKYKVSISVSNALGHNATAITFDEFTIVKPDPPENVVARPVPSNPRRLEVTWQTPSTWPDPESFPLKFFLRYRPLILDQWQH

SEQ ID NO: 41578 - protein, 1302 aa, Homo sapiens
MELYFGEYQHVQQEYGVHLRLASDDTQKSRSSQNSKAGSYGVSIRVQGIDGHPYIVLNNTERCLAGTSFSENGPPFPPPVINNLPLHSSNGSVPKENSEELQLPENPYAQPSPIRNLKQPLLHEGKNGVLDRKDGSVKPSHLLNFQRHPELLQPYDPEKNELNLQNHQPSESNWLKTLTEEGINNKKPWTCFPKPSNSQPTSPSLEDPAKSGVTAIRLCSSVVIEDPKKQTSVCVNVQSCTKERVGEEALFTSGRPLTAHSPHAHPETKKTRPDVLPFRRQDSAGPVLDGARSRRSSSSSTTPTSANSLYRFLLDDQECAIHADNVNRHENRRYIPFLPGTGRDIDTGSIPGVDQLIEKFDQKPGLQRRGRSGKRNRINTDDRKRSRSVDSAFPFGLQGNSEYLIEFSRNLGKSSEHLLRPSQVCPQRPLSQERRGKQSVGRTFAKLQGAAHGASCAHSRPPQPNIDGKVLETEGSQESTVIRAPSLGAQSKKEEEVKTATATLMLQNRATATSPDSGAKKISVKTFPSASNTQATPDLLKGQQELTQQTNEETAKQILYNYLKEGSTDNDDATKRKVNLVFEKIQTLKSRAAGSAQGNNQACNSTSEVKDLLEQKSKLTIEVAELQRQLQLEVKNQQNIKEERERMRANLEELRSQHNEKVEENSTLQQRLEESEGELRKNLEELFQVKMEREQHQTEIRDLQDQLSEMHDELDSAKRSEDREKGALIEELLQAKQDLQDLLIAKEEQEDLLRKRERELTALKGALKEEVSSHDQEMDKLKEQYDAELQALRESVEEATKNVEVLASRSNTSEQDQAGTEMRVKLLQEENEKLQGRSEELERRVAQLQRQIEDLKGDEAKAKETLKKYEGEIRQLEEALVHARKEEKEAVSARRALENELEAAQGNLSQTTQEQKQLSEKLKEESEQKEQLRRLKNEMENERWHLGKTIEKLQKEMADIVEASRTSTLELQNQLDEYKEKNRRELAEMQRQLKEKTLEAEKSRLTAMKMQDEMRLMEEELRDYQRAQDEALTKRQLLEQTLKDLEYELEAKSHLKDDRSRLVKQMEDKVSQLEMELEEERNNSDLLSERISRSREQMEQLRNELLQERAARQDLECDKISLERQNKDLKSRIIHLEGSYRSSKEGLVVQMEARIAELEDRLESEERDRANLQLSNRRLERKVKELVMQVDDEHLSLTDQKDQLSLRLKAMKRQVEEAEEEIDRLESSKKKLQRELEEQMDMNEHLQGQLNSMKKDLRLKKLPSKVLDDMDDDDDLSTDGGSLYEAPVSYTFSKDSTVASQI

SEQ ID NO: 41579 - protein, 686 aa, Homo sapiens
MGEFKVHRVRFFNYVPSGIRCVAYNNQSNRLAVSRTDGTVEIYNLSANYFQEKFFPGHESRATEALCWAEGQRLFSAGLNGEIMEYDLQALNIKYAMDAFGGPIWSMAASPSGSQLLVGCEDGSVKLFQITPDKIQFERNFDRQKSRILSLSWHPSGTHIAAGSIDYISVFDVKSGSAVHKMIVDRQYMGVSKRKCIVWGVAFLSDGTIISVDSAGKVQFWDSATGTLVKSHLIANADVQSIAVADQEDSFVVGTAEGTVFHFQLVPVTSNSSEKQWVRTKPFQHHTHDVRTVAHSPTALISGGTDTHLVFRPLMEKVEVKNYDAALRKITFPHRCLISCSKKRQLLLFQFAHHLELWRLGSTVATGKNGDTLPLSKNADHLLHLKTKGPENIICSCISPCGSWIAYSTVSRFFLYRLNYEHDNISLKRVSKMPAFLRSALQILFSEDSTKLFVASNQGALHIVQLSGGSFKHLHAFQPQSGTVEAMCLLAVSPDGNWLAASGTSAGVHVYNVKQLKLHCTVPAYNFPVTAMAIAPNTNNLVIAHSDQQVFEYSIPDKQYTDWSRTVQKQGFHHLWLQRDTPITHISFHPKRPMHILLHDAYMFCIIDKSLPLPNDKTLLYNPFPPTNESDVIRRRTAHAFKISKIYKPLLFMDLLDERTLVAVERPLDDIIAQLPPPIKKKKFGT

SEQ ID NO: 41580 - protein, 571 aa, Homo sapiens
MGEFKVHRVRFFNYVPSGIRCVAYNNQSNRLAVSRTDGTVEIYNLSANYFQEKFFPGHESRATEALCWAEGQRLFSAGLNGEIMEYDLQALNIKYAMDAFGGPIWSMAASPSGSQLLVGCEDGSVKLFQITPDKIQFERNFDRQKSRILSLSWHPSGTHIAAGSIDYISVFDVKSGSAVHKMIVDRQYMGVSKRKCIVWGVAFLSDGTIISVDSAGKVQFWDSATGTLVKSHLIANADVQSIAVADQEDSFVVGTAEGTVFHFQLVPVTSNSSEKQWVRTKPFQHHTHDVRTVAHSPTALISGGTDTHLVFRPLMEKVEVKNYDAALRKITFPHRCLISCSKKRQLLLFQFAHHLELWRLGSTVATGTVEAMCLLAVSPDGNWLAASGTSAGVHVYNVKQLKLHCTVPAYNFPVTAMAIAPNTNNLVIAHSDQQVFEYSIPDKQYTDWSRTVQKQGFHHLWLQRDTPITHISFHPKRPMHILLHDAYMFCIIDKSLPLPNDKTLLYNPFPPTNESDVIRRRTAHAFKISKIYKPLLFMDLLDERTLVAVERPLDDIIAQLPPPIKKKKFGT

SEQ ID NO: 41581 - protein, 340 aa, Homo sapiens
MALRLLRRAARGAAAAALLRLKASLAADIPRLGYSSSSHHKYIPRRAVLYVPGNDEKKIKKIPSLNVDCAVLDCEDGVAANKKNEARLRIVKTLEDIDLGPTEKCVRVNSVSSGLAEEDLETLLQSRVLPSSLMLPKVESPEEIQWFADKFSFHLKGRKLEQPMNLIPFVETAMGLLNFKAVCEETLKVGPQVGLFLDAVVFGGEDFRASIGATSSKETLDILYARQKIVVIAKAFGLQAIDLVYIDFRDGAGLLRQSREGAAMGFTGKQVIHPNQIAVVQEQFSPSPEKIKWAEELIAAFKEHQQLGKGAFTFQGSMIDMPLLKQAQNTVTLATSIKEK

SEQ ID NO: 41582 - protein, 306 aa, Homo sapiens
MALRLLRRAARGAAAAALLRLKASLAADIPRLGYSSSSHHKYIPRRAVLYVPGNDEKKIKKIPSLNVDCAVLDCEDGVAANKKNEARLRIVKTLEDIDLGPTEKCVRVNSVSSGLAEEDLETLLQSRVLPSSLMLPKVESPEEIQWAVCEETLKVGPQVGLFLDAVVFGGEDFRASIGATSSKETLDILYARQKIVVIAKAFGLQAIDLVYIDFRDGAGLLRQSREGAAMGFTGKQVIHPNQIAVVQEQFSPSPEKIKWAEELIAAFKEHQQLGKGAFTFQGSMIDMPLLKQAQNTVTLATSIKEK

SEQ ID NO: 41583 - protein, 306 aa, Homo sapiens; identical to SEQ ID NO: 41582

SEQ ID NO: 41584 - protein, 340 aa, Homo sapiens; identical to SEQ ID NO: 41581

SEQ ID NO: 41585 - protein, 181 aa, Homo sapiens
NEARLRIVKTLEDIDLGPTEKCVRVNSVSSGLAEEDLETLLQSRVLPSSLMLPKVESPEEIQWFADKFSFHLKGRKLEQPMNLIPFVETAMGLLNFKAVCEETLKVGPQVGLFLDAVVFGGEDFRASIGVKDISLSLFLCVCVYMCVYIFSLPLKDGHLHNNVYLPTMTMVFHDNGMDTTS

SEQ ID NO: 41586 - protein, 103 aa, Homo sapiens
LQAIDLVYIDFRDGAGLLRQSREGAAMGFTGKQVIHPNQIAVVQEQFSPSPEKIKWAEELIAAFKEHQQLGKGAFTFQGSMIDMPLLKQAQNTVTLATSIKEK

SEQ ID NO: 41587 - protein, 89 aa, Homo sapiens
EELIAAFKEHQQLGKVGRYCCSWLCIQPFPSSPGQRSQSISRVPGRYWVLGARSWESKGAFTFQGSMIDMPLLKQAQNTVTLATSIKEK

SEQ ID NO: 41588 - protein, 147 aa, Homo sapiens
NEARLRIVKTLEDIDLGPTEKCVRVNSVSSGLAEEDLETLLQSRVLPSSLMLPKVESPEEIQWAVCEETLKVGPQVGLFLDAVVFGGEDFRASIGVKDISLSLFLCVCVYMCVYIFSLPLKDGHLHNNVYLPTMTMVFHDNGMDTTS

SEQ ID NO: 41589 - protein, 302 aa, Homo sapiens
MALRLLRRAARGAAAAALLRLKASLAADIPRLGYSSSSHHKYIPRRAVLYVPGNDEKKIKKIPSLNVDCAVLDCEDGVAANKKNEARLRIVKTLEDIDLGPTEKCVRVNSVSSGLAEEDLETLLQSRVLPSSLMLPKVESPEEIQWAVCEETLKVGPQVGLFLDAVVFGGEDFRASIGATSSKETLDILYARQKIVVIAKAFGLQAIDLVYIDFRDGAGLLRQSREGAAMGFTGKQVIHPNQIAVVQEQFSPSPEKIKWAEELIAAFKEHQQLGKTVSCSASQAGVQWRDLGSLQPPPPGFK

SEQ ID NO: 41590 - protein, 466 aa, Homo sapiens [sequence omitted]

SEQ ID NO: 41591 - protein, 178 aa, Homo sapiens
MALLTAAARLLGTKNASCLVLAARHASASSTNLKDILADLIPKEQARIKTFRQQHGKTVVGQITVDMMYGGMRGMKGLVYETSVLDPDEGIRFRGFSIPECQKLLPKAKGGEEPLPEGLFWLLVTGHIPTEEQVSWLSKEWAKRAALPSHVVTMLDNFPTNLHPMSQLSAAVTALNSE

SEQ ID NO: 41592 - protein, 2027 aa, Homo sapiens
MLKFKYGARNPLDAGAAEPIASRASRLNLFFQGKPPFMTQQQMSPLSREGILDALFVLFEECSQPALMKIKHVSNFVRKYSDTIAELQELQPSAKDFEVRSLVGCGHFAEVQVVREKATGDIYAMKVMKKKALLAQEQVSFFEEERNILSRSTSPWIPQLQYAFQDKNHLYLVMEYQPGGDLLSLLNRYEDQLDENLIQFYLAELILAVHSVHLMGYVHRDIKPENILVDRTGHIKLVDFGSAAKMNSNKMVNAKLPIGTPDYMAPEVLTVMNGDGKGTYGLDCDWWSVGVIAYEMIYGRSPFAEGTSARTFNNIMNFQRFLKFPDDPKVSSDFLDLIQSLLCGQKERLKFEGLCCHPFFSKIDWNNIRNSPPPFVPTLKSDDDTSNFDEPEKNSWVSSSPCQLSPSGFSGEELPFVGFSYSKALGILGRSESVVSGLDSPAKTSSMEKKLLIKSKELQDSQDKCHKMEQEMTRLHRRVSEVEAVLSQKEVELKASETQRSLLEQDLATYITECSSLKRSLEQARMEVSQEDDKALQLLHDIREQSRKLQEIKEQEYQAQVEEMRLMMNQLEEDLVSARRRSDLYESELRESRLAAEEFKRKATECQHKLLKAKDQGKPEVGEYAKLEKINAEQQLKIQELQEKLEKAVKASTEATELLQNIRQAKERAERELEKLQNREDSSEGIRKKLVEAEELEEKHREAQVSAQHLEVHLKQKEQHYEEKIKVLDNQIKKDLADKETLENMMQRHEEEAHEKGKILSEQKAMINAMDSKIRSLEQRIVELSEANKLAANSSLFTQRNMKAQEEMISELRQQKFYLETQAGKLEAQNRKLEEQLEKISHQDHSDKNRLLELETRLREVSLEHEEQKLELKRQLTELQLSLQERESQLTALQAARAALESQLRQAKTELEETTAEAEEEIQALTAHRDEIQRKFDALRNSCTVITDLEEQLNQLTEDNAELNNQNFYLSKQLDEASGANDEIVQLRSEVDHLRREITEREMQLTSQKQTMEALKTTCTMLEEQVMDLEALNDELLEKERQWEAWRSVLGDEKSQFECRVRELQRMLDTEKQSRARADQRITESRQVVELAVKEHKAEILALQQALKEQKLKAESLSDKLNDLEKKHAMLEMNARSLQQKLETERELKQRLLEEQAKLQQQMDLQKNHIFRLTQGLQEALDRADLLKTERSDLEYQLENIQVLYSHEKVKMEGTISQQTKLIDFLQAKMDQPAKKKKGLFSRRKEDPALPTQVPLQYNELKLALEKEKARCAELEEALQKTRIELRSAREEAAHRKATDHPHPSTPATARQQIAMSAIVRSPEHQPSAMSLLAPPSSRRKESSTPEEFSRRLKERMHHNIPHRFNVGLNMRATKCAVCLDTVHFGRQASKCLECQVMCHPKCSTCLPATCGLPAEYATHFTEAFCRDKMNSPGLQTKEPSSSLHLEGWMKVPRNNKRGQQGWDRKYIVLEGSKVLIYDNEAREAGQRPVEEFELCLPDGDVSIHGAVGASELANTAKADVPYILKMESHPHTTCWPGRTLYLLAPSFPDKQRWVTALESVVAGGRVSREKAEADAKLLGNSLLKLEGDDRLDMNCTLPFSDQVVLVGTEEGLYALNVLKNSLTHVPGIGAVFQIYIIKDLEKLLMIAGEERALCLVDVKKVKQSLAQSHLPAQPDISPNIFEAVKGCHLFGAGKIENGLCICAAMPSKVVILRYNENLSKYCIRKEIETSEPCSCIHFTNYSILIGTNKFYEIDMKQYTLEEFLDKNDHSLAPAVFAASSNSFPVSIVQVNSAGQREEYLLCFHEFGVFVDSYGRRSRTDDLKWSRLPLAFAYREPYLFVTHFNSLEVIEIQARSSAGTPARAYLDIPNPRYLGPAISSGAIYLASSYQDKLRVICCKGNLVKESGTEHHRGPSTSRSSPNKRGPPTYNEHITKRVASSPAPPEGPSHPREPSTPHRYREGRTELRRDKSPGRPLEREKSPGRMLSTRRERSPGRLFEDSSRGRLPAGAVRTPLSQVNKVWDQSSV

SEQ ID NO: 41593 - protein, 2069 aa, Homo sapiens
MLKFKYGARNPLDAGAAEPIASRASRLNLFFQGKPPFMTQQQMSPLSREGILDALFVLFEECSQPALMKIKHVSNFVRKYSDTIAELQELQPSAKDFEVRSLVGCGHFAEVQVVREKATGDIYAMKVMKKKALLAQEQVSFFEEERNILSRSTSPWIPQLQYAFQDKNHLYLVMEYQPGGDLLSLLNRYEDQLDENLIQFYLAELILAVHSVHLMGYVHRDIKPENILVDRTGHIKLVDFGSAAKMNSNKMVNAKLPIGTPDYMAPEVLTVMNGDGKGTYGLDCDWWSVGVIAYEMIYGRSPFAEGTSARTFNNIMNFQRFLKFPDDPKVSSDFLDLIQSLLCGQKERLKFEGLCCHPFFSKIDWNNIRNSPPPFVPTLKSDDDTSNFDEPEKNSWVSSSPCQLSPSGFSGEELPFVGFSYSKALGILGRSESVVSGLDSPAKTSSMEKKLLIKSKELQDSQDKCHKMEQEMTRLHRRVSEVEAVLSQKEVELKASETQRSLLEQDLATYITECSSLKRSLEQARMEVSQEDDKALQLLHDIREQSRKLQEIKEQEYQAQVEEMRLMMNQLEEDLVSARRRSDLYESELRESRLAAEEFKRKATECQHKLLKAKDQGKPEVGEYAKLEKINAEQQLKIQELQEKLEKAVKASTEATELLQNIRQAKERAERELEKLQNREDSSEGIRKKLVEAEERRHSLENKVKRLETMERRENRLKDDIQTKSQQIQQMADKILELEEKHREAQVSAQHLEVHLKQKEQHYEEKIKVLDNQIKKDLADKETLENMMQRHEEEAHEKGKILSEQKAMINAMDSKIRSLEQRIVELSEANKLAANSSLFTQRNMKAQEEMISELRQQKFYLETQAGKLEAQNRKLEEQLEKISHQDHSDKNRLLELETRLREVSLEHEEQKLELKRQLTELQLSLQERESQLTALQAARAALESQLRQAKTELEETTAEAEEEIQALTAHRDEIQRKFDALRNSCTVITDLEEQLNQLTEDNAELNNQNFYLSKQLDEASGANDEIVQLRSEVDHLRREITEREMQLTSQKQTMEALKTTCTMLEEQVMDLEALNDELLEKERQWEAWRSVLGDEKSQFECRVRELQRMLDTEKQSRARADQRITESRQVVELAVKEHKAEILALQQALKEQKLKAESLSDKLNDLEKKHAMLEMNARSLQQKLETERELKQRLLEEQAKLQQQMDLQKNHIFRLTQGLQEALDRADLLKTERSDLEYQLENIQVLYSHEKVKMEGTISQQTKLIDFLQAKMDQPAKKKKGLFSRRKEDPALPTQVPLQYNELKLALEKEKARCAELEEALQKTRIELRSAREEAAHRKATDHPHPSTPATARQQIAMSAIVRSPEHQPSAMSLLAPPSSRRKESSTPEEFSRRLKERMHHNIPHRFNVGLNMRATKCAVCLDTVHFGRQASKCLECQVMCHPKCSTCLPATCGLPAEYATHFTEAFCRDKMNSPGLQTKEPSSSLHLEGWMKVPRNNKRGQQGWDRKYIVLEGSKVLIYDNEAREAGQRPVEEFELCLPDGDVSIHGAVGASELANTAKADVPYILKMESHPHTTCWPGRTLYLLAPSFPDKQRWVTALESVVAGGRVSREKAEADAKLLGNSLLKLEGDDRLDMNCTLPFSDQVVLVGTEEGLYALNVLKNSLTHVPGIGAVFQIYIIKDLEKLLMIAGEERALCLVDVKKVKQSLAQSHLPAQPDISPNIFEAVKGCHLFGAGKIENGLCICAAMPSKVVILRYNENLSKYCIRKEIETSEPCSCIHFTNYSILIGTNKFYEIDMKQYTLEEFLDKNDHSLAPAVFAASSNSFPVSIVQVNSAGQREEYLLCFHEFGVFVDSYGRRSRTDDLKWSRLPLAFAYREPYLFVTHFNSLEVIEIQARSSAGTPARAYLDIPNPRYLGPAISSGAIYLASSYQDKLRVICCKGNLVKESGTEHHRGPSTSRSSPNKRGPPTYNEHITKRVASSPAPPEGPSHPREPSTPHRYREGRTELRRDKSPGRPLEREKSPGRMLSTRRERSPGRLFEDSSRGRLPAGAVRTPLSQVNKVWDQSSV

SEQ ID NO: 41594 - protein, 231 aa, Homo sapiens
MDPEHAKPESSEAPSGNLKQPETAAALASSGSVVSSVPKAQRNISAKTAPRKHPAVSIRSAQSAAAARPQGSEGTAPSRKATTRPPPKPTLPPPTPSAHTESKLLNEMAIKERVEGRAKVPYKFRDSLKRFSFSPTGMLKILRLSLILGALACFIITQANESFITITSLEICIVVFFILIYVLTLHHLLTYLHWPLLDLTNSIITAVFLSVVAILAMQEKKRRHLLYVGGR

SEQ ID NO: 41595 - protein, 122 aa, Homo sapiens
MDPEHAKPESSEAPSGNLKQPETAAALASSGSVDLTNSIITAVFLSVVAILAMQEKKRRHLLYVGGSLCLTAVIVCCIDAFVVTTKMRTNLKRFLGVEVERKLSPAKDAYPETGPDAPQRPA

SEQ ID NO: 41596 - protein, 116 aa, Homo sapiens
MDPEHAKPESSEAPSGNLKQPETAAALDLTNSIITAVFLSVVAILAMQEKKRRHLLYVGGSLCLTAVIVCCIDAFVVTTKMRTNLKRFLGVEVERKLSPAKDAYPETGPDAPQRPA

SEQ ID NO: 41597 - protein, 92 aa, Homo sapiens
MDPEHAKPESSEAPSGNLKQPETAAALASSGSVVSSVPKAQRNISAKTAPRKHPAVSIRSAQSAAAARPQGSEGTAPSRILPTVSLQLCSFQ

SEQ ID NO: 41598 - protein, 286 aa, Homo sapiens
MDPEHAKPESSEAPSGNLKQPETAAALASSGSVVSSVPKAQRNISAKTAPRKHPAVSIRSAQSAAAARPQGSEGTAPSRKATTRPPPKPTLPPPTPSAHTESKLLNEMAIKERVEGRAKVPYKFRDSLKRFSFSPTGMLKILRLSLILGALACFIITQANESFITITSLEICIVVFFILIYVLTLHHLLTYLHWPLLDLTNSIITAVFLSVVAILAMQEKKRRHLLYVGGSLCLTAVIVCCIDAFVVTTKMRTNLKRFLGVEVERKLSPAKDAYPETGPDAPQRPA

SEQ ID NO: 41599 - protein, 169 aa, Homo sapiens
MDPEHAKPESSEAPSGNLKQPETAAALSLILGALACFIITQANESFITITSLEICIVVFFILIYVLTLHHLLTYLHWPLLDLTNSIITAVFLSVVAILAMQEKKRRHLLYVGGSLCLTAVIVCCIDAFVVTTKMRTNLKRFLGVEVERKLSPAKDAYPETGPDAPQRPA

SEQ ID NO: 41600 - protein, 114 aa, Homo sapiens
MDPEHAKPESSEAPSGNLKQPETAAALSLILGALACFIITQANESFITITSLEICIVVFFILIYVLTLHHLLTYLHWPLLDLTNSIITAVFLSVVAILAMQEKKRRHLLYVGGR

SEQ ID NO: 41601 - protein, 38 aa, Homo sapiens
MDPEHAKPESSEAPSGNLKQPETAAALEADKANMSNFN

SEQ ID NO: 41602 - protein, 28 aa, Homo sapiens
MDPEHAKPESSEAPSGNLKQPETAAALR

SEQ ID NO: 41603 - protein, 248 aa, Homo sapiens
MAPKAAKGAKPEPAPAPPPPGAKPEEDKKDGKEPSDKPQKAVQDHKEPSDKPQKAVQPKHEVGTRRGCRRYRWELKDSNKEFWLLGHAEIKIRSLGCLIAAMILLSSLTVHPILRLIITMEISFFSFFILLYSFAIHRYIPFILWPISDLFNDLIACAFLVGAVVFAVRSRRSMNLHYLLAVILIGAAGVFAFIDVCLQRNHFRGKKAKKHMLVPPPGKEKGPQQGKGPEPAKPPEPGKPPGPAKGKK

SEQ ID NO: 41604 - protein, 195 aa, Homo sapiens
MAPKAAKGAKPEPAPAPPPPGAKPEEDKKDGKEPSDKPQKAVQDHKEPSDKPQKAVQPKHEVGTRRGCRRYRWELKDSNKEFWLLGHAEIKIRSLDLFNDLIACAFLVGAVVFAVRSRRSMNLHYLLAVILIGAAGVFAFIDVCLQRNHFRGKKAKKHMLVPPPGKEKGPQQGKGPEPAKPPEPGKPPGPAKGKK

SEQ ID NO: 41605 - protein, 59 aa, Homo sapiens
MWPPDPDPDPDPEPAGGSRPGPAVPGLRALLPARAFLCSLKGPGGFVCTWCSCPHQPLW

SEQ ID NO: 41606 - protein, 182 aa, Homo sapiens
MWPPDPDPDPDPEPAGGSRPGPAVPGLRALLPARAFLCSLKGRLLLAESGLSFITFICYVASSASAFLTAPLLEFLLALYFLFADAMQLNDKWQGLCWPMMDFLRCVTAALIYFAISITAIAKYSDGASKAAGVFGFFATIVFATDFYLIFNDVAKFLKQGDSADETTAHKTEEENSDSDSD

SEQ ID NO: 41607 - protein, 182 aa, Homo sapiens; identical to SEQ ID NO: 41606

SEQ ID NO: 41608 - protein, 182 aa, Homo sapiens; identical to SEQ ID NO: 41606

SEQ ID NO: 41609 - protein, 234 aa, Homo sapiens
MRSGEELDGFEGEASSTSMISGASSPYQPTTEPVSQRRGLAGLRCDPDYLRGALGRLKVAQVILALIAFICIETIMACSPCEGLYFFEFVSCSAFVVTGVLLIMFSLNLHMRIPQINWNLTDLVNTGLSAFLFFIASIVLAALNHRAGAEIAAVIFGFLATAAYAVNTFLAVQKWRVSVRQQSTNDYIRARTESRDVDSRPEIQRLDTFSYSTNVTVRKKSPTNLLSLNHWQLA

SEQ ID NO: 41610 - protein, 208 aa, Homo sapiens
MRSGEELDGFEGEASSTSMISGASSPYQPTTEPVSQRRGLAGLRCDPDYLRGALGRLKVAQVILALIAFICIETIMACSPCEGLYFFEFVSCSAFVVTGVLLIMFSLNLHMRIPQINWNLTDLVNTGLSAFLFFIASIVLAALNHRAGAEIAAVIFGFLATAAYAVNTFLAVQKWRVSVRQQSTNDYIRARTESRDVDSRPEIQRLDT

SEQ ID NO: 41611 - protein, 223 aa, Homo sapiens
MLSARDRRDRHPEEGVVAELQGFAVDKAFLTSHKGILLETELALTLIIFICFTASISAYMAAALLEFFITLAFLFLYATQYYQRFDRINWPCLLQGHGQSGGPHPLDLLSHSAKVQPQPWPGLTPPGWHTPAAVPWVPAPAPGFWSWLLWFICFHSLGSSDFLRCVSAIIIFLVVSFAAVTSRDGAAIAAFVFGIILVSIFAYDAFKIYRTEMAPGASQGDQQ

SEQ ID NO: 41612 - protein, 74 aa, Homo sapiens
MLSARDRRDRHPEEGVVAELQGFAVDKAFLTSHKGILLETELVFGIILVSIFAYDAFKIYRTEMAPGASQGDQQ

SEQ ID NO: 41613 - protein, 156 aa, Homo sapiens
MLSARDRRDRHPEEGVVAELQGFAVDKAFLTSHKGILLETELALTLIIFICFTASISAYMAAALLEFFITLAFLFLYATQYYQRFDRINWPCLDFLRCVSAIIIFLVVSFAAVTSRDGAAIAAFVFGIILVSIFAYDAFKIYRTEMAPGASQGDQQ

SEQ ID NO: 41614 - protein, 125 aa, Homo sapiens
MLSARDRRDRHPEEGVVAELQGFAVDKAFLTSHKGILLETELALTLIIFICFTASISAYMAAALLEFFITLAFLFLYATQYYQRFDRINWPCLVFGIILVSIFAYDAFKIYRTEMAPGASQGDQQ

SEQ ID NO: 41615 - protein, 105 aa, Homo sapiens
MLSARDRRDRHPEEGVVAELQGFAVDKAFLTSHKGILLETELDFLRCVSAIIIFLVVSFAAVTSRDGAAIAAFVFGIILVSIFAYDAFKIYRTEMAPGASQGDQQ

SEQ ID NO: 41616 - protein, 183 aa, Homo sapiens
MENGAVYSPTTEEDPGPARGPRSGLAAYFFMGRLPLLRRVLKGLQLLLSLLAFICEEVVSQCTLCGGLYFFEFVSCSAFLLSLLILIVYCTPFYERVDTTKVKSSDFYITLGTGCVFLLASIIFVSTHDRTSAEIAAIVFGFIASFMFLLDFITMLYEKRQESQLRKPENTTRAEALTEPLNA

SEQ ID NO: 41617 - protein, 175 aa, Homo sapiens
MSHGAGLVRTTCSSGSALGPGAGAAQPSASPLEGLLDLSYPRTHAALLKVAQMVTLLIAFICVRSSLWTNYSAYSYFEVVTICDLIMILAFYLVHLFRFYRVLTCISWPLSELLHYLIGTLLLLIASIVAASKSYNQSGLVAGAIFGFMATFLCMASIWLSYKISCVTQSTDAAV

SEQ ID NO: 41618 - protein, 142 aa, Homo sapiens
MSHGAGLVRTTCSSGSALGPGAGAAQPSASPLEGLLDLSYPRTHAALLKVAQMVTLLIAFICVRSSLWTNYSAYSYFEVVTICDLIMILAFYLVHLFRFYRVLTCISWPLSIFGFMATFLCMASIWLSYKISCVTQSTDAAV

SEQ ID NO: 41619 - protein, 173 aa, Homo sapiens
MEEPQRARSHTVTTTASSFAENFSTSSSSFAYDREFLRTLPGFLIVAEIVLGLLVWTLIAGTEYFRVPAFGWVMFVAVFYWVLTVFFLIIYITMTYTRIPQVPWTTVGLCFNGSAFVLYLSAAVVDASSVSPERDSHNFNSWAASSFFAFLVTICYAGNTYFSFIAWRSRTIQ

SEQ ID NO: 41620 - protein, 120 aa, Homo sapiens
MQALQQQPVFPDLLKAIPVSIHVNVILFSAILIVLTMVGTAFFMYNAFGKPFETLHGPLGLYLLSFISGSCGCLVMILFASEVKIHHLSEKIANYKEGTYVYKTQSEKYTTSFWLTKGHS

SEQ ID NO: 41621 - protein, 232 aa, Homo sapiens
MPSQQKKIIFCMAGVFSFACALGVVTALGTPLWIKATVLCKTGALLVNASGQELDKFMGEMQYGLFHGEGVRQCGLGARPFRFSFFPDLLKAIPVSIHVNVILFSAILIVLTMVGTAFFMYNAFGKPFETLHGPLGLYLLSFISGSCGCLVMILFASEVKIHHLSEKIANYKEGTYVYKTQSEKYTTSFWVIFFCFFVHFLNGLLIRLAGFQFPFAKSKDAETTNVAADLMY

SEQ ID NO: 41622 - protein, 245 aa, Homo sapiens
MPSQQKKIIFCMAGVFSFACALGVVTALGTPLWIKATVLCKTGALLVNASGQELDKFMGEMQYGLFHGEGVRQCGLGARPFRFSFFPDLLKAIPVSIHVNVILFSAILIVLTMVGTAFFMYNAFGKPFETLHGPLGLYLLSFISVALWLPATRHQAQGSCGCLVMILFASEVKIHHLSEKIANYKEGTYVYKTQSEKYTTSFWVIFFCFFVHFLNGLLIRLAGFQFPFAKSKDAETTNVAADLMY

SEQ ID NO: 41623 - protein, 115 aa, Homo sapiens
MQALQQQPVFPDLLKAIPVSIHVNVILFSAILIVLTMVGTAFFMYNAFGKPFETLHGPLGLYLLSFISGSCGCLVMILFASEVKIHHLSEKIANYKEGTYVYKTQSEKYTTSFWV

SEQ ID NO: 41624 - protein, 625 aa, Homo sapiens
MNYSEIESKVREATNDDPWGPSGQLMGEIAKATFMYEQFPELMNMLWSRMLKDNKKNWRRVYKSLLLLAYLIRNGSERVVTSAREHIYDLRSLENYHFVDEHGKDQGINIRQKVKELVEFAQDDDRLREERKKAKKNKDKYVGVSSDSVGGFRYSERYDPEPKSKWDEEWDKNKSAFPFSDKLGELSDKIGSTIDDTISKFRRKDREDSPERCSDSDEEKKARRGRSPKGEFKDEEETVTTKHIHITQATETTTTRHKRTANPSKTIDLGAAAHYTGDKASPDQNASTHTPQSSVKTSVPSSKSSGDLVDLFDGTSQSTGGSADLFGGFADFGSAAASGSFPSQVTATSGNGDFGDWSAFNQAPSGPVASSGEFFGSASQPAVELVSGSQSALGPPPAASNSSDLFDLMGSSQATMTSSQSMNFSMMSTNTVGLGLPMSRSQPLQNVSTVLQKPNPLYNQNTDMVQKSVSKTLPSTWSDPSVNISLDNLLPGMQPSKPQQPSLNTMIQQQNMQQPMNVMTQSFGAVNLSSPSNMLPVRPQTNALIGGPMPMSMPNVMTGTMGMAPLGNTPMMNQSMMGMNMNIGMSAAGMGLTGTMGMGMPNIAMTSGTVQPKQDAFANFANFSK

SEQ ID NO: 41625 - protein, 625 aa, Homo sapiens
MLNMWKVRELVDKATNVVMNYSEIESKVREATNDDPWGPSGQLMGEIAKATFMYEQFPELMNMLWSRMLKDNKKNWRRVYKSLLLLAYLIRNGSERVVTSAREHIYDLRSLENYHFVDEHGKDQGINIRQKVKELVEFAQDDDRLREERKKAKKNKDKYVGVSSDSVGGFRYSERYDPEPKSKWDEEWDKNKSAFPFSDKLGELSDKIGSTIDDTISKFRRKDREDSPERCSDSDEEKKARRGRSPKGEFKDEEETVTTKHIHITQATETTTTRHKRTANPSKTIDLGAAAHYTGDKASPDQNASTHTPQSSVKTSVPSSKSSGDLVDLFDGTSQSTGGSADLFGGFADFGSAAASGSFPSQVTATSGNGDFGDWSAFNQAPSGPVASSGEFFGSASQPAVELVSGSQSALGPPPAASNSSDLFDLMGSSQATMTSSQSMNFSMMSTNTVGLGLPMSRSQNTDMVQKSVSKTLPSTWSDPSVNISLDNLLPGMQPSKPQQPSLNTMIQQQNMQQPMNVMTQSFGAVNLSSPSNMLPVRPQTNALIGGPMPMSMPNVMTGTMGMAPLGNTPMMNQSMMGMNMNIGMSAAGMGLTGTMGMGMPNIAMTSGTVQPKQDAFANFANFSK

SEQ ID NO: 41626 - protein, 625 aa, Homo sapiens; identical to SEQ ID NO: 41624

SEQ ID NO: 41627 - protein, 625 aa, Homo sapiens; identical to SEQ ID NO: 41624

SEQ ID NO: 41628 - protein, 643 aa, Homo sapiens
MLNMWKVRELVDKATNVVMNYSEIESKVREATNDDPWGPSGQLMGEIAKATFMYEQFPELMNMLWSRMLKDNKKNWRRVYKSLLLLAYLIRNGSERVVTSAREHIYDLRSLENYHFVDEHGKDQGINIRQKVKELVEFAQDDDRLREERKKAKKNKDKYVGVSSDSVGGFRYSERYDPEPKSKWDEEWDKNKSAFPFSDKLGELSDKIGSTIDDTISKFRRKDREDSPERCSDSDEEKKARRGRSPKGEFKDEEETVTTKHIHITQATETTTTRHKRTANPSKTIDLGAAAHYTGDKASPDQNASTHTPQSSVKTSVPSSKSSGDLVDLFDGTSQSTGGSADLFGGFADFGSAAASGSFPSQVTATSGNGDFGDWSAFNQAPSGPVASSGEFFGSASQPAVELVSGSQSALGPPPAASNSSDLFDLMGSSQATMTSSQSMNFSMMSTNTVGLGLPMSRSQPLQNVSTVLQKPNPLYNQNTDMVQKSVSKTLPSTWSDPSVNISLDNLLPGMQPSKPQQPSLNTMIQQQNMQQPMNVMTQSFGAVNLSSPSNMLPVRPQTNALIGGPMPMSMPNVMTGTMGMAPLGNTPMMNQSMMGMNMNIGMSAAGMGLTGTMGMGMPNIAMTSGTVQPKQDAFANFANFSK

SEQ ID NO: 41629 - protein, 1675 aa, Homo sapiens
MAQILPIRFQEHLQLQNLGINPANIGFSTLTMESDKFICIREKVGEQAQVVIIDMNDPSNPIRRPISADSAIMNPASKVIALKAGKTLQIFNIEMKSKMKAHTMTDDVTFWKWISLNTVALVTDNAVYHWSMEGESQPVKMFDRHSSLAGCQIINYRTDAKQKWLLLTGISAQQNRVVGAMQLYSVDRKVSQPIEGHAASFAQFKMEGNAEESTLFCFAVRGQAGGKLHIIEVGTPPTGNQPFPKKAVDVFFPPEAQNDFPVAMQISEKHDVVFLITKYGYIHLYDLETGTCIYMNRISGETIFVTAPHEATAGIIGVNRKGQVLSVCVEEENIIPYITNVLQNPDLALRMAVRNNLAGAEELFARKFNALFAQGNYSEAAKVAANAPKGILRTPDTIRRFQSVPAQPGQTSPLLQYFGILLDQGQLNKYESLELCRPVLQQGRKQLLEKWLKEDKLECSEELGDLVKSVDPTLALSVYLRANVPNKVIQCFAETGQVQKIVLYAKKVGYTPDWIFLLRNVMRISPDQGQQFAQMLVQDEEPLADITQIVDVFMEYNLIQQCTAFLLDALKNNRPSEGPLQTRLLEMNLMHAPQVADAILGNQMFTHYDRAHIAQLCEKAGLLQRALEHFTDLYDIKRAVVHTHLLNPEWLVNYFGSLSVEDSLECLRAMLSANIRQNLQICVQVASKYHEQLSTQSLIELFESFKSFEGLFYFLGSIVNFSQDPDVHFKYIQAACKTGQIKEVERICRESNCYDPERVKNFLKEAKLTDQLPLIIVCDRFDFVHDLVLYLYRNNLQKYIEIYVQKVNPSRLPVVIGGLLDVDCSEDVIKNLILVVRGQFSTDELVAEVEKRNRLKLLLPWLEARIHEGCEEPATHNALAKIYIDSNNNPERFLRENPYYDSRVVGKYCEKRDPHLACVAYERGQCDLELINVCNENSLFKSLSRYLVRRKDPELWGSVLLESNPYRRPLIDQVVQTALSETQDPEEVSVTVKAFMTADLPNELIELLEKIVLDNSVFSEHRNLQNLLILTAIKADRTRVMEYINRLDNYDAPDIANIAISNELFEEAFAIFRKFDVNTSAVQVLIEHIGNLDRAYEFAERCNEPAVWSQLAKAQLQKGMVKEAIDSYIKADDPSSYMEVVQAANTSGNWEELVKYLQMARKKARESYVETELIFALAKTNRLAELEEFINGPNNAHIQQVGDRCYDEKMYDAAKLLYNNVSNFGRLASTLVHLGEYQAAVDGARKANSTRTWKEVCFACVDGKEFRLAQMCGLHIVVHADELEELINYYQDRGYFEELITMLEAALGLERAHMGMFTELAILYSKFKPQKMREHLELFWSRVNIPKVLRAAEQAHLWAELVFLYDKYEEYDNAIITMMNHPTDAWKEGQFKDIITKVANVELYYRAIQFYLEFKPLLLNDLLMVLSPRLDHTRAVNYFSKVKQLPLVKPYLRSVQNHNNKSVNESLNNLFITEEDYQALRTSIDAYDNFDNISLAQRLEKHELIEFRRIAAYLFKGNNRWKQSVELCKKDSLYKDAMQYASESKDTELAEELLQWFLQEEKRECFGACLFTCYDLLRPDVVLETAWRHNIMDFAMPYFIQVMKEYLTKVDKLDASESLRKEEEQATETQPIVYGQPQLMLTAGPSVAVPPQAPFGYGYTAPPYGQPQPGFGYSM

SEQ ID NO: 41630 - protein, 1640 aa, Homo sapiens
MAQILPVRFQEHFQLQNLGINPANIGFSTLTMESDKFICIREKVGEQAQVTIIDMSDPMAPIRRPISAESAIMNPASKVIALKAGKTLQIFNIEMKSKMKAHTMAEEVIFWKWVSVNTVALVTETAVYHWSMEGDSQPMKMFDRHTSLVGCQVIHYRTDEYQKWLLLVGISAQQNRVVGAMQLYSVDRKVSQPIEGHAAAFAEFKMEGNAKPATLFCFAVRNPTGGKLHIIEVGQPAAGNQPFVKKAVDVFFPPEAQNDFPVAMQIGAKHGVIYLITKYGYLHLYDLESGVCICMNRISADTIFVTAPHKPTSGIIGVNKKGQVLSVCVEEDNIVNYATNVLQNPDLGLRLAVRSNLAGAEKLFVRKFNTLFAQGSYAEAAKVAASAPKGILRTRETVQKFQSIPAQSGQASPLLQYFGILLDQGQLNKLESLELCHLVLQQGRKQLLEKWLKEDKLECSEELGDLVKTTDPMLALSVYLRANVPSKVIQCFAETGQFQKIVLYAKKVGYTPDWIFLLRGVMKISPEQGLQFSRMLVQDEEPLANISQIVDIFMENSLIQQCTSFLLDALKNNRPAEGLLQTWLLEMNLVHAPQVADAILGNKMFTHYDRAHIAQLCEKAGLLQQALEHYTDLYDIKRAVVHTHLLNPEWLVNFFGSLSVEDSVECLHAMLSANIRQNLQLCVQVASKYHEQLGTQALVELFESFKSYKGLFYFLGSIVNFSQDPDVHLKYIQAACKTGQIKEVERICRESSCYNPERVKNFLKEAKLTDQLPLIIVCDRFGFVHDLVLYLYRNNLQRYIEIYVQKVNPSRTPAVIGGLLDVDCSEEVIKHLIMAVRGQFSTDELVAEVEKRNRLKLLLPWLESQIQEGCEEPATHNALAKIYIDSNNSPECFLRENAYYDSSVVGRYCEKRDPHLACVAYERGQCDLELIKVCNENSLFKSEARYLVCRKDPELWAHVLEETNPSRRQLIDQVVQTALSETRDPEEISVTVKAFMTADLPNELIELLEKIVLDNSVFSEHRNLQNLLILTAIKADRTRVMEYISRLDNYDALDIASIAVSSALYEEAFTVFHKFDMNASAIQVLIEHIGNLDRAYEFAERCNEPAVWSQLAQAQLQKDLVKEAINSYIRGDDPSSYLEVVQSASRSNNWEDLVKFLQMARKKGRESYIETELIFALAKTSRVSELEDFINGPNNAHIQQVGDRCYEEGMYEAAKLLYSNVSNFARLASTLVHLGEYQAAVDNSRKASSTRTWKEVCFACMDGQEFRFAQLCGLHIVIHADELEELMCYYQDRGYFEELILLLEAALGLERAHMGMFTELAILYSKFKPQKMLEHLELFWSRVNIPKVLRAAEQAHLWAELVFLYDKYEEYDNAVLTMMSHPTEAWKEGQFKDIITKVANVELCYRALQFYLDYKPLLINDLLLVLSPRLDHTWTVSFFSKAGQLPLVKPYLRSVQSHNNKSVNEALNHLLTEEEDYQGLRASIDAYDNFDNISLAQQLEKHQLMEFRCIAAYLYKGNNWWAQSVELCKKDHLYKDAMQHAAESRDAELAQKLLQWFLEEGKRECFAACLFTCYDLLRPDMVLELAWRHNLVDLAMPYFIQVMREYLSKVDKLDALESLRKQEEHVTEPAPLVFDFDGHE

SEQ ID NO: 41631 - protein, 1583 aa, Homo sapiens
MAQILPVRFQEHFQLQNLGINPANIGFSTLTMESDKFICIREKVGEQAQVTIIDMSDPMAPIRRPISAESAIMNPASKVIALKAGKTLQIFNIEMKSKMKAHTMAEEVIFWKWVSVNTVALVTETAVYHWSMEGDSQPMKMFDRHTSLVGCQVIHYRTDEYQKWLLLVGISAQQNRVVGAMQLYSVDRKVSQPIEGHAAAFAEFKMEGNAKPATLFCFAVRNPTGGKLHIIEVGQPAAGNQPFVKKAVDVFFPPEAQNDFPVAMQIGAKHGVIYLITKYGYLHLYDLESGVCICMNRISADTIFVTAPHKPTSGIIGVNKKGQVLSVCVEEDNIVNYATNVLQNPDLGLRLAVRSNLAGAEKLFVRKFNTLFAQGSYAEAAKVAASAPKGILRTRETVQKFQSIPAQSGQASPLLQYFGILLDQGQLNKLESLELCHLVLQQGRKQLLEKWLKEDKLECSEELGDLVKTTDPMLALSVYLRANVPSKVIQCFAETGQFQKIVLYAKKVGYTPDWIFLLRGVMKISPEQGLQFSRMLVQDEEPLANISQIVDIFMENSLIQQCTSFLLDALKNNRPAEGLLQTWLLEMNLVHAPQVADAILGNKMFTHYDRAHIAQLCEKAGLLQQALEHYTDLYDIKRAVVHTHLLNPEWLVNFFGSLSVEDSVECLHAMLSANIRQNLQLCVQVASKYHEQLGTQALVELFESFKSYKGLFYFLGSIVNFSQDPDVHLKYIQAACKTGQIKEVERICRESSCYNPERVKNFLKEAKLTDQLPLIIVCDRFGFVHDLVLYLYRNNLQRYIEIYVQKVNPSRTPAVIGGLLDVDCSEEVIKHLIMAVRGQFSTDELVAEVEKRNRLKLLLPWLESQIQEGCEEPATHNALAKIYIDSNNSPECFLRENAYYDSSVVGRYCEKRDPHLACVAYERGQCDLELIKVCNENSLFKSEARYLVCRKDPELWAHVLEETNPSRRQLIDQVVQTALSETRDPEEISVTVKAFMTADLPNELIELLEKIVLDNSVFSEHRNLQNLLILTAIKADRTRVMEYISRLDNYDALDIASIAVSSALYEEAFTVFHKFDMNASAIQVLIEHIGNLDRAYEFAERCNEPAVWSQLAQAQLQKDLVKEAINSYIRGDDPSSYLEVVQSASRSNNWEDLVKFLQMARKKGRESYIETELIFALAKTSRVSELEDFINGPNNAHIQQVGDRCYEEGMYEAAKLLYSNVSNFARLASTLVHLGEYQAAVDNSRKASSTRTWKEVCFACMDGQEFRFAQLCGLHIVIHADELEELMCYYQDRGYFEELILLLEAALGLERAHMGMFTELAILYSKFKPQKMLEHLELFWSRVNIPKVLRAAEQAHLWAELVFLYDKYEEYDNAVLTMMSHPTEAWKEGQFKDIITKVANVELCYRALQFYLDYKPLLINDLLLVLSPRLDHTWTVSFFSKAGQLPLVKPYLRSVQSHNNKSVNEALNHLLTEEEDYQDAMQHAAESRDAELAQKLLQWFLEEGKRECFAACLFTCYDLLRPDMVLELAWRHNLVDLAMPYFIQVMREYLSKVDKLDALESLRKQEEHVTEPAPLVFDFDGHE

SEQ ID NO: 41632 - protein, 1640 aa, Homo sapiens; identical to SEQ ID NO: 41630

SEQ ID NO: 41633 - protein, 248 aa, Homo sapiens
MAELDPFGAPAGAPGGPALGNGVAGAGEEDPAAAFLAQQESEIAGIENDEAFAILDGGAPGPQPHGEPPGGPDAVDGVMNGEYYQESNGPTDSYAAISQVDRLQSEPESIRKWREEQMERLEALDANSRKQEAEWKEKAIKELEEWYARQDEQLQKTKANNRVADEAFYKQPFADVIGYVTNINHPCYSLEQAAEEAFVNDIDESSPGTEWERVARLCDFNPKSSKQAKDVSRMRSVLISLKQAPLVH

SEQ ID NO: 41634 - protein, 218 aa, Homo sapiens
MAELDPFGAPAGAPGGPALGNGVAGAGEEDPAAAFLAQQESEIAGIENDEAFAILDGGAPGPQPHGEPPGGPDAVDGVMNGEYYQESNGPTDSYAAISQVDRLQSEPESIRKWREEQMERLEALDANSRKQEAEWKEKAIKELEEWYARQDEQLQKTKANNRAAEEAFVNDIDESSPGTEWERVARLCDFNPKSSKQAKDVSRMRSVLISLKQAPLVH

SEQ ID NO: 41635 - protein, 236 aa, Homo sapiens
MAELDPFGAPAGAPGGPALGNGVAGAGEEDPAAAFLAQQESEIAGIENDEAFAILDGGAPGPQPHGEPPGGPDAVDGVMNGEYYQESNGPTDSYAAISQVDRLQSEPESIRKWREEQMERLEALDANSRKQEAEWKEKAIKELEEWYARQDEQLQKTKANNRVADEAFYKQPFADVIGYVAAEEAFVNDIDESSPGTEWERVARLCDFNPKSSKQAKDVSRMRSVLISLKQAPLVH

SEQ ID NO: 41636 - protein, 248 aa, Homo sapiens; identical to SEQ ID NO: 41633

SEQ ID NO: 41637 - protein, 230 aa, Homo sapiens
MAELDPFGAPAGAPGGPALGNGVAGAGEEDPAAAFLAQQESEIAGIENDEAFAILDGGAPGPQPHGEPPGGPDAVDGVMNGEYYQESNGPTDSYAAISQVDRLQSEPESIRKWREEQMERLEALDANSRKQEAEWKEKAIKELEEWYARQDEQLQKTKANNSTNINHPCYSLEQAAEEAFVNDIDESSPGTEWERVARLCDFNPKSSKQAKDVSRMRSVLISLKQAPLVH

SEQ ID NO: 41638 - protein, 230 aa, Homo sapiens; identical to SEQ ID NO: 41637

SEQ ID NO: 41639 - protein, 166 aa, Homo sapiens
MAELDPFGAPAGAPGGPALGNGVAGAGEEDPAAAFLAQQESEIAGIENDEAFAILDGGAPGPQPHGEPPGGPDANSRKQEAEWKEKAIKELEEWYARQDEQLQKTKANNRAAEEAFVNDIDESSPGTEWERVARLCDFNPKSSKQAKDVSRMRSVLISLKQAPLVH

SEQ ID NO: 41640 - protein, 229 aa, Homo sapiens
MADDFGFFSSSESGAPEAAEEDPAAAFLAQQESEIAGIENDEGFGAPAGSHAAPAQPGPTSGAGSEDMGTTVNGDVFQEANGPADGYAAIAQADRLTQEPESIRKWREEQRKRLQELDAASKVTEQEWREKAKKDLEEWNQRQSEQVEKNKINNRIADKAFYQQPDADIIGYVASEEAFVKESKEETPGTEWEKVAQLCDFNPKSSKQCKDVSRLRSVLMSLKQTPLSR

SEQ ID NO: 41641 - protein, 211 aa, Homo sapiens
MADDFGFFSSSESGAPEAAEEDPAAAFLAQQESEIAGIENDEGFGAPAGSHAAPAQPGPTSGAGSEDMGTTVNGDVFQEANGPADGYAAIAQADRLTQEPESIRKWREEQRKRLQELDAASKVTEQEWREKAKKDLEEWNQRQSEQVEKNKINNRASEEAFVKESKEETPGTEWEKVAQLCDFNPKSSKQCKDVSRLRSVLMSLKQTPLSR

SEQ ID NO: 41642 - protein, 134 aa, Homo sapiens
MADDFGFFSSSESGAPEAAEEDPAAAFLAQQESEIAGIENDEGFGAPAGSHAAPAQPGPTSGAGSEDMGTTVNGDVFQPVHHQRVQLQTQLPIQPKDEPAHNYSSSIWHSQGQGQKGPAGLRLPTSAQILSPFP

SEQ ID NO: 41643 - protein, 211 aa, Homo sapiens
MANAGLQLLGFILAFLGWIGAIVSTALPQWRIYSYAGDNIVTAQAMYEGLWMSCVSQSTGQIQCKVFDSLLNLSSTLQATRALMVVGILLGVIAIFVATVGMKCMKCLEDDEVQKMRMAVIGGAIFLLAGLAILVATAWYGNRIVQEFYDPMTPVNARYEFGQALFTGWAAASLCLLGGALLCCSCPRKTTSYPTPRPYPKPAPSSGKDYV

SEQ ID NO: 41644 - protein, 166 aa, Homo sapiens
MYEGLWMSCVSQSTGQIQCKVFDSLLNLSSTLQATRALMVVGILLGVIAIFVATVGMKCMKCLEDDEVQKMRMAVIGGAIFLLAGLAILVATAWYGNRIVQEFYDPMTPVNARYEFGQALFTGWAAASLCLLGGALLCCSCPRKTTSYPTPRPYPKPAPSSGKDYV

SEQ ID NO: 41645 - protein, 207 aa, Homo sapiens
MVATCLQVVGFVTSFVGWIGVIVTTSTNDWVVTCGYTIPTCRKLDELGSKGLWADCVMATGLYHCKPLVDILILPGYVQACRALMIAASVLGLPAILLLLTVLPCIRMGQEPGVAKYRRAQLAGVLLILLALCALVATIWFPVCAHRETTIVSFGYSLYAGWIGAVLCLVGGCVILCCAGDAQAFGENRFYYTAGSSSPTHAKSAHV

SEQ ID NO: 41646 - protein, 165 aa, Homo sapiens
MVATCLQVVGFVTSFVGWIGVIVTTSTNDWVVTCGYTIPTCRKLDELGSKGLWADCVMATGLYHCKPLVDILILPGYVQACRALMIAASVLGLPAILLLLTVLPCIRMGQEPGVAKYRRAQLAGVLLILLGCQLLWAKTESSLHSQHLVQFKQKYLEDFSYLQGD

SEQ ID NO: 41647 - protein, 165 aa, Homo sapiens; identical to SEQ ID NO: 41646

SEQ ID NO: 41648 - protein, 239 aa, Homo sapiens
MASTAVQLLGFLLSFLGMVGTLITTILPHWRRTAHVGTNILTAVSYLKGLWMECVWHSTGIYQCQIYRSLLALPQDLQAARALMVISCLLSGIACACAVIGMKCTRCAKGTPAKTTFAILGGTLFILAGLLCMVAVSWTTNDVVQNFYNPLLPSGMKFEIGQALYLGFISSSLSLIGGTLLCLSCQDEAPYRPYQAPPRATTTTANTAPAYQPPAAYKDNRAPSVTSATHSGYRLNDYV

SEQ ID NO: 41649 - protein, 239 aa, Homo sapiens; identical to SEQ ID NO: 41648

SEQ ID NO: 41650 - protein, 239 aa, Homo sapiens; identical to SEQ ID NO: 41648

SEQ ID NO: 41651 - protein, 239 aa, Homo sapiens; identical to SEQ ID NO: 41648

SEQ ID NO: 41652 - protein, 239 aa, Homo sapiens; identical to SEQ ID NO: 41648

SEQ ID NO: 41653 - protein, 305 aa, Homo sapiens
MTSRTPLLVTACLYYSYCNSRHLQQGVRKSKRPVFSHCQVPETQKTDTRHLSGARAGVCPCCHPDGLLATMRDLLQYIACFFAFFSAGFLIVATWTDCWMVNADDSLEVSTKCRGLWWECVTNAFDGIRTCDEYDSILAEHPLKLVVTRALMITADILAGFGFLTLLLGLDCVKFLPDEPYIKVRICFVAGATLLIAGTPGIIGSVWYAVDVYVERSTLVLHNIFLGIQYKFGWSCWLGMAGSLGCFLAGAVLTCCLYLFKDVGPERNYPYSLRKAYSAAGVSMAKSYSAPRTETAKMYAVDTRV

SEQ ID NO: 41654 - protein, 119 aa, Homo sapiens
MTSRTPLLVTACLYYSYCNSRHLQQGVRKSKRPVFSHCQVPETQKTDTRHLSGARAGVCPCCHPDGLLATMRDLLQYIACFFAFFSAGFLIVATWTDCWMVNADDSLEMLDLRETILIP

SEQ ID NO: 41655 - protein, 224 aa, Homo sapiens
MANSGLQLLGYFLALGGWVGIIASTALPQWKQSSYAGDAIITAVGLYEGLWMSCASQSTGQVQCKLYDSLLALDGHIQSARALMVVAVLLGFVAMVLSVVGMKCTRVGDSNPIAKGRVAIAGGALFILAGLCTLTAVSWYATLVTQEFFNPSTPVNARYEFGPALFVGWASAGLAVLGGSFLCCTCPEPERPNSSPQPYRPGPSAAAREPVVKLPASAKGPLGV

SEQ ID NO: 41656 - protein, 211 aa, Homo sapiens
MANSGLQLLGYFLALGGWVGIIASTALPQWKQSSYAGDAIITAVGLYEGLWMSCASQSTGQVQCKLYDSLLALDGHIQSARALMVVAVLLGFVAMVLSVVGMKCTRVGDSNPIAKGRVAIAGGALFILAGLCTLTAVSWYATLVTQEFFNPSTPVNARYEFGPALFVGWASAGLAVLGGSFLCCTCPEPERPNSSPQPYRPGPSAAAREYV

SEQ ID NO: 41657 - protein, 218 aa, Homo sapiens
MANSGLQLLGYFLALGGWVGIIASTALPQWKQSSYAGDAIITAVGLYEGLWMSCASQSTGQVQCKLYDSLLALDGHIQSARALMVVAVLLGFVAMVLSVVGMKCTRVGDSNPIAKGRVAIAGGALFILAGMNLAQPCSWAGPQLAWPCWAAPSSAAHARSQRDPTAAHSPIGLDPLLLPESTSELRLPWPAPHPVAPLPSIQPASQHPGQGHWGIGWA

SEQ ID NO: 41658 - protein, 220 aa, Homo sapiens
MSMGLEITGTALAVLGWLGTIVCCALPMWRVSAFIGSNIITSQNIWEGLWMNCVVQSTGQMQCKVYDSLLALPQDLQAARALIVVAILLAAFGLLVALVGAQCTNCVQDDTAKAKITIVAGVLFLLAALLTLVPVSWSANTIIRDFYNPVVPEAQKREMGAGLYVGWAAAALQLLGGALLCCSCPPREKKYTATKVVYSAPRSTGPGASLGTGYDRKDYV

SEQ ID NO: 41659 - protein, 209 aa, Homo sapiens
MASMGLQVMGIALAVLGWLAVMLCCALPMWRVTAFIGSNIVTSQTIWEGLWMNCVVQSTGQMQCKVYDSLLALPQDLQAARALVIISIIVAALGVLLSVVGGKCTNCLEDESAKAKTMIVAGVVFLLAGLMVIVPVSWTAHNIIQDFYNPLVASGQKREMGASLYVGWAASGLLLLGGGLLCCNCPPRTDKPYSAKYSAARSAAASNYV

SEQ ID NO: 41660 - protein, 209 aa, Homo sapiens; identical to SEQ ID NO: 41659

SEQ ID NO: 41661 - protein, 209 aa, Homo sapiens; identical to SEQ ID NO: 41659

SEQ ID NO: 41662 - protein, 196 aa, Homo sapiens
MASMGLQVMGIALAVLGWLAVMLCCALPMWRVTAFIGSNIVTSQSTGQMQCKVYDSLLALPQDLQAARALVIISIIVAALGVLLSVVGGKCTNCLEDESAKAKTMIVAGVVFLLAGLMVIVPVSWTAHNIIQDFYNPLVASGQKREMGASLYVGWAASGLLLLGGGLLCCNCPPRTDKPYSAKYSAARSAAASNYV

SEQ ID NO: 41663 - protein, 303 aa, Homo sapiens
MTRARIGCFGPGGRARGTESAPEPSKRVPPGRSWQTQEVRQTRGANGLGPRAGSAGAKAPGPAQGAAQHGLGGSAGLRVRVSPLAMGSAALEILGLVLCLVGWGGLILACGLPMWQVTAFLDHNIVTAQTTWKGLWMSCVVQSTGHMQCKVYDSVLALSTEVQAARALTVSAVLLAFVALFVTLAGAQCTTCVAPGPAKARVALTGGVLYLFCGLLALVPLCWFANIVVREFYDPSVPVSQKYELGAALYIGWAATALLMVGGCLLCCGAWVCTGRPDLSFPVKYSAPRRPTATGDYDKKNYV

SEQ ID NO: 41664 - protein, 303 aa, Homo sapiens; identical to SEQ ID NO: 41663

SEQ ID NO: 41665 - protein, 303 aa, Homo sapiens; identical to SEQ ID NO: 41663

SEQ ID NO: 41666 - protein, 361 aa, Homo sapiens
MGEEANDDKKPTTKFELERETELRFEVEASQSVQLELLTGMAEIFGTELTRNKKFTFDAGAKVAVFTWHGCSVQLSGRTEVAYVSKDTPMLLYLNTHTALEQMRRQAEKEEERGPRVMVVGPTDVGKSTVCRLLLNYAITSRLADVFNQRCEVNRRASVSGCVINTCGWVKGSGYQALVHAASAFEVDVVVVLDQERLYNELKRDLPHFVRTVLLPKSGGVVERSKDFRRECRDERIREYFYGFRGCFYPHAFNVKFSDVKIYKVGAPTIPDSCLPLGMSQEDNQLKLVPVTPGRDMVHHLLSVSTAEGTEENLSETSVAGFIVVTSVDLEHQVFTVLSPAPRPLPKNFLLIMDIRFMDLK

SEQ ID NO: 41667 - protein, 269 aa, Homo sapiens
MQEIIASVDHIKFDLEIAVEQQLGAQPLPFPGMDKSGAAVCEFFLKAACGKGGMCPFRHISGEKTVVCKHWLRGLCKKGDQCEFLHEYDMTKMPECYFYSKFGECSNKECPFLHIDPESKIKDCPWYDRGFCKHGPLCRHRHTRRVICVNYLVGFCPEGPSCKFMHPRFELPMGTTEQPPLPQQTQPPAKQSNNPPLQRSSSLIQLTSQNSSPNQQRTPQVIGVMQSQNSSAGNRGPRPLEQVTCYKCGEKGHYANRCTKGHLAFLSGQ

SEQ ID NO: 41668 - protein, 244 aa, Homo sapiens
MQEIIASVDHIKFDLEIAVEQQLGAQPLPFPGMDKSGAAVCEFFLKAACGKGGMCPFRHISGEKTVVCKHWLRGLCKKGDQCEFLHEYDMTKMPECYFYSKFGECSNKECPFLHIDPESKIKDCPWYDRGFCKHGPLCRHRHTRRVICVNYLVGFCPEGPSCKFMHPRFELPMGTTEQPPLPQQTQPPAKQRTPQVIGVMQSQNSSAGNRGPRPLEQVTCYKCGEKGHYANRCTKGHLAFLSGQ

SEQ ID NO: 41669 - protein, 211 aa, Homo sapiens
MQEIIASVDHIKFDLEIAVEQQLGAQPLPFPGMDKSGAAVCEFFLKAACGKGGMCPFRHISGEKTVVCKHWLRGLCKKGDQCEFLHEYDMTKMPECYFYSKFGPLCRHRHTRRVICVNYLVGFCPEGPSCKFMHPRFELPMGTTEQPPLPQQTQPPAKRTPQVIGVMQSQNSSAGNRGPRPLEQVTCYKCGEKGHYANRCTKGHLAFLSGQ

SEQ ID NO: 41670 - protein, 588 aa, Homo sapiens
MADGVDHIDIYADVGEEFNQEAEYGGHDQIDLYDDVISPSANNGDAPEDRDYMDTLPPTVGDDVGKGAAPNVVYTYTGKRIALYIGNLTWWTTDEDLTEAVHSLGVNDILEIKFFENRANGQSKGFALVGVGSEASSKKLMDLLPKRELHGQNPVVTPCNKQFLSQFEMQSRKTTQSGQMSGEGKAGPPGGSSRAAFPQGGRGRGRFPGAVPGGDRFPGPAGPGGPPPPFPGNLIKHLVKGTRPLFLETRIPWHMGHSIEEIPIFGLKAGQTPPRPPLGPPGPPGPPGPPPPGQVLPPPLAGPPNRGDRPPPPVLFPGQPFGQPPLGPLPPGPPPPVPGYGPPPGPPPPQQGPPPPPGPFPPRPPGPLGPPLTLAPPPHLPGPPPGAPPPAPHVNPAFFPPPTNSGMPTSDSRGPPPTDPYGRPPPYDRGDYGPPGREMDTARTPLSEAEFEEIMNRNRAISSSAISRAVSDASAGDYGSAIETLVTAISLIKQSKVSADDRCKVLISSLQDCLHGIESKSYGSGSRRERSRERDHSRSREKSRRHKSRSRDRHDDYYRERSRERERHRDRDRDRDRERDREREYRHR

SEQ ID NO: 41671 - protein, 551 aa, Homo sapiens
MADGVDHIDIYADVGEEFNQEAEYGGHDQIDLYDDVISPSANNGDAPEDRDYMDTLPPTVGDDVGKGAAPNVVYTYTGKRIALYIGNLTWWTTDEDLTEAVHSLGVNDILEIKFFENRANGQSKGFALVGVGSEASSKKLMDLLPKRELHGQNPVVTPCNKQFLSQFEMQSRKTTQSGQMSGEGKAGPPGGSSRAAFPQGGRGRGRFPGAVPGGDRFPGPAGPGGPPPPFPAGQTPPRPPLGPPGPPGPPGPPPPGQVLPPPLAGPPNRGDRPPPPVLFPGQPFGQPPLGPLPPGPPPPVPGYGPPPGPPPPQQGPPPPPGPFPPRPPGPLGPPLTLAPPPHLPGPPPGAPPPAPHVNPAFFPPPTNSGMPTSDSRGPPPTDPYGRPPPYDRGDYGPPGREMDTARTPLSEAEFEEIMNRNRAISSSAISRAVSDASAGDYGSAIETLVTAISLIKQSKVSADDRCKVLISSLQDCLHGIESKSYGSGSRRERSRERDHSRSREKSRRHKSRSRDRHDDYYRERSRERERHRDRDRDRDRERDREREYRHR

SEQ ID NO: 41672 - protein, 478 aa, Homo sapiens
MADGVDHIDIYADVGEEFNQEAEYGGHDQIDLYDDVISPSANNGDAPEDRDYMDTLPPTVGDDVGKGAAPNVVYTYTGKRIALYIGNLTWWTTDEDLTEAVHSLGVNDILEIKFFENRANGQSKGFALVGVGSEASSKKLMDLLPKRELHGQNPVVTPCNKQFLSQFEMQSRKTTQSGQMSGEGKAGPPGAGPPNRGDRPPPPVLFPGQPFGQPPLGPLPPGPPPPVPGYGPPPGPPPPQQGPPPPPGPFPPRPPGPLGPPLTLAPPPHLPGPPPGAPPPAPHVNPAFFPPPTNSGMPTSDSRGPPPTDPYGRPPPYDRGDYGPPGREMDTARTPLSEAEFEEIMNRNRAISSSAISRAVSDASAGDYGSAIETLVTAISLIKQSKVSADDRCKVLISSLQDCLHGIESKSYGSGSRRERSRERDHSRSREKSRRHKSRSRDRHDDYYRERSRERERHRDRDRDRDRERDREREYRHR

SEQ ID NO: 41673 - protein, 616 aa, Homo sapiens
MSSLAVRDPAMDRSLRSVFVGNIPYEATEEQLKDIFSEVGSVVSFRLVYDRETGKPKGYGFCEYQDQETALSAMRNLNGREFSGRALRVDNAASEKNKEELKSLGPAAPIIDSPYGDPIDPEDAPESITRAVASLPPEQMFELMKQMKLCVQNSHQEARNMLLQNPQLAYALLQAQVVMRIMDPEIALKILHRKIHVTPLIPGKSQSVSVSGPGPGPGPGLCPGPNVLLNQQNPPAPQPQHLARRPVKDIPPLMQTPIQGGIPAPGPIPAAVPGAGPGSLTPGGAMQPQLGMPGVGPVPLERGQVQMSDPRAPIPRGPVTPGGLPPRGLLGDAPNDPRGGTLLSVTGEVEPRGYLGPPHQGPPMHHASGHDTRGPSSHEMRGGPLGDPRLLIGEPRGPMIDQRGLPMDGRGGRDSRAMETRAMETEVLETRVMERRGMETCAMETRGMEARGMDARGLEMRGPVPSSRGPMTGGIQGPGPINIGAGGPPQGPRQVPGISGVGNPGAGMQGTGIQGTGMQGAGIQGGGMQGAGIQGVSIQGGGIQGGGIQGASKQGGSQPSSFSPGQSQVTPQDQEKAALIMQVLQLTADQIAMLPPEQRQSILILKEQIQKSTGAS

SEQ ID NO: 41674 - protein, 846 aa, Homo sapiens
MLFTVSCSKMSSIVDRDDSSIFDGLVEEDDKDKAKRVSRNKSEKKRRDQFNVLIKELGSMLPGNARKMDKSTVLQKSIDFLRKHKEITAQSDASEIRQDWKPTFLSNEEFTQLMLEALDGFFLAIMTDGSIIYVSESVTSLLEHLPSDLVDQSIFNFIPEGEHSEVYKILSTHLLESDSLTPEYLKSKNQLEFCCHMLRGTIDPKEPSTYEYVKFIGNFKSLNSVSSSAHNGFEGTIQRTHRPSYEDRVCFVATVRLATPQFIKEMCTVEEPNEEFTSRHSLEWKFLFLDHRAPPIIGYLPFEVLGTSGYDYYHVDDLENLAKCHEHLMQYGKGKSCYYRFLTKGQQWIWLQTHYYITYHQWNSRPEFIVCTHTVVSYAEVRAERRRELGIEESLPETAADKSQDSGSDNRINTVSLKEALERFDHSPTPSASSRSSRKSSHTAVSDPSSTPTKIPTDTSTPPRQHLPAHEKMVQRRSSFSSQSINSQSVGSSLTQPVMSQATNLPIPQGMSQFQFSAQLGAMQHLKDQLEQRTRMIEANIHRQQEELRKIQEQLQMVHGQGLQMFLQQSNPGLNFGSVQLSSGNSSNIQQLAPINMQGQVVPTNQIQSGMNTGHIGTTQHMIQQQTLQSTSTQSQQNVLSGHSQQTSLPSQTQSTLTAPLYNTMVISQPAAGSMVQIPSSMPQNSTQSAAVTTFTQDRQIRFSQGQQLVTKLVTAPVACGAVMVPSTMLMGQVVTAYPTFATQQQQSQTLSVTQQQQQQSSQEQQLTSVQQPSQAQLTQPPQQFLQTSRLLHGNPSTQLILSAAFPLQQSTFPQSHHQQHQSQQQQQLSRHRTDSLPDPSKVQPQ

SEQ ID NO: 41675 - protein, 425 aa, Homo sapiens
MGEEANDDKKPTTKFELERETELRFEVEASQSVQLELLTGMAEIFGTELTRNKKFTFDAGAKVAVFTWHGCSVQLSGRTEVAYVSKDTPMLLYLNTHTALEQMRRQAEKEEERGPRVMVVGPTDVGKSTVCRLLLNYAVRLGRRPTYVELDVGQGSVSIPGTMGALYIERPADVEEGFSIQAPLVYHFGSTTPGTNIKLYNKITSRLADVFNQRCEVNRRASVSGCVINTCGWVKGSGYQALVHAASAFEVDVVVVLDQERLYNELKRDLPHFVRTVLLPKSGGVVERSKDFRRECRDERIREYFYGFRGCFYPHAFNVKFSDVKIYKVGAPTIPDSCLPLGMSQEDNQLKLVPVTPGRDMVHHLLSVSTAEGTEENLSETSVAGFIVVTSVDLEHQVFTVLSPAPRPLPKNFLLIMDIRFMDLK

SEQ ID NO: 41676 - protein, 436 aa, Homo sapiens
MTDLHSSYTEEMGEEANDDKKPTTKFELERETELRFEVEASQSVQLELLTGMAEIFGTELTRNKKFTFDAGAKVAVFTWHGCSVQLSGRTEVAYVSKDTPMLLYLNTHTALEQMRRQAEKEEERGPRVMVVGPTDVGKSTVCRLLLNYAVRLGRRPTYVELDVGQGSVSIPGTMGALYIERPADVEEGFSIQAPLVYHFGSTTPGTNIKLYNKITSRLADVFNQRCEVNRRASVSGCVINTCGWVKGSGYQALVHAASAFEVDVVVVLDQERLYNELKRDLPHFVRTVLLPKSGGVVERSKDFRRECRDERIREYFYGFRGCFYPHAFNVKFSDVKIYKVGAPTIPDSCLPLGMSQEDNQLKLVPVTPGRDMVHHLLSVSTAEGTEENLSETSVAGFIVVTSVDLEHQVFTVLSPAPRPLPKNFLLIMDIRFMDLK

SEQ ID NO: 41677 - protein, 92 aa, Homo sapiens
MGEEANDDKKPTTKFELERETELRFEVEASQSVQLELLTGMAEIFGTELTRNKKFTFDAGAKVAVFTWHGCSVQLSGRTEVAYVSKDTPMLL

SEQ ID NO: 41678 - protein, 425 aa, Homo sapiens; identical to SEQ ID NO: 41675

SEQ ID NO: 41679 - protein, 132 aa, Homo sapiens
MGEEANDDKKPTTKFELERETELRFEVEASQSVQLELLTGMAEIFGTELTRNKKFTFDAGAKVAVFTWHGCSVQLSGRTEVAYVSKDTPMLLYLNTHTALEQMRRQAEKEEERGPRVMVVGPTDVGKSTVCR

SEQ ID NO: 41680 - protein, 277 aa, Homo sapiens
MWPGILVGGARVASCRYPALGPRLAAHFPAQRPPQRTLQNGLALQRCLHATATRALPLIPIVVEQTGRGERAYDIYSRLLRERIVCVMGPIDDSVASLVIAQLLFLQSESNKKPIHMYINSPGGVVTAGLAIYDTMQYILNPICTWCVGQAASMGSLLLAAGTPGMRHSLPNSRIMIHQPSGGARGQATDIAIQAEEIMKLKKQLYNIYAKHTKQSLQVIESAMERDRYMSPMEAQEFGILDKVLVHPPQDGEDEPTLVQKEPVEAAPAAEPVPAST

SEQ ID NO: 41681 - protein, 538 aa, Homo sapiens
MWSGRSSFTSLVVGVFVVYVVHTCWVMYGIVYTRPCSGDANCIQPYLARRPKLQLSVYTTTRSHLGAENNIDLVLNVEDFDVESKFERTVNVSVPKKTRNNGTLYAYIFLHHAGVLPWHDGKQVHLVSPLTTYMVPKPEEINLLTGESDTQQIEAEKKPTSALDEPVSHWRPRLALNVMADNFVFDGSSLPADVHRYMKMIQLGKTVHYLPILFIDQLSNRVKDLMVINRSTTELPLTVSYDKVSLGRLRFWIHMQDAVYSLQQFGFSEKDADEVKGIFVDTNLYFLALTFFVAAFHLLFDFLAFKNDISFWKKKKSMIGMSTKAVLWRCFSTVVIFLFLLDEQTSLLVLVPAGVGAAIELWKVKKALKMTIFWRGLMPEFQFGTYSESERKTEEYDTQAMKYLSYLLYPLCVGGAVYSLLNIKYKSWYSWLINSFVNGVYAFGFLFMLPQLFVNYKLKSVAHLPWKAFTYKAFNTFIDDVFAFIITMPTSHRLACFRDDVVFLVYLYQRWLYPVDKRRVNEFGESYEEKATRAPHTD

SEQ ID NO: 41682 - protein, 502 aa, Homo sapiens
MWSGRSSFTSLVVGVFVVYVVHTCWVMYGIVYTRPCSGDANCIQPYLARRPKLQLSVYTTTRSHLGAENNIDLVLNVEDFDVESKFERTVNVSVPKKTRNNGTLYAYIFLHHAGVLPWHDGKQVHLVSPLTTYMVPKPEEINLLTGESDTQQIEAEKKPTSALDEPVSHWRPRLALNVMADNFVFDGSSLPADVHRYMKMIQLGKTVHYLPILFIDQLSNRVKDLMVINRSTTELPLTVSYDKVSLGRLRFWIHMQDAVYSLQQFGFSEKDADEVKGIFVDTNLYFLALTFFVAAFHLLFDFLAFKNDISFWKKKKSMIGMSTKLWKVKKALKMTIFWRGLMPEFQFGTYSESERKTEEYDTQAMKYLSYLLYPLCVGGAVYSLLNIKYKSWYSWLINSFVNGVYAFGFLFMLPQLFVNYKLKSVAHLPWKAFTYKAFNTFIDDVFAFIITMPTSHRLACFRDDVVFLVYLYQRWLYPVDKRRVNEFGESYEEKATRAPHTD

SEQ ID NO: 41683 - protein, 449 aa, Homo sapiens
MMKTLLLFVGLLLTWESGQVLGDQTVSDNELQEMSNQGSKYVNKEIQNAVNGVKQIKTLIEKTNEERKTLLSNLEEAKKKKEDALNETRESETKLKELPGVCNETMMALWEECKPCLKQTCMKFYARVCRSGSGLVGRQLEEFLNQSSPFYFWMNGDRIDSLLENDRQQTHMLDVMQDHFSRASSIIDELFQDRFFTREPQDTYHYLPFSLPHRRPHFFFPKSRIVRSLMPFSPYEPLNFHAMFQPFLEMIHEAQQAMDIHFHSPAFQHPPTEFIREGDDDRTVCREIRHNSTGCLRMKDQCDKCREILSVDCSTNNPSQAKLRRELDESLQVAERLTRKYNELLKSYQWKMLNTSSLLEQLNEQFNWVSRLANLTQGEDQYYLRVTTVASHTSDSDVPSGVTEVVVKLFDSDPITVTVPVEVSRKNPKFMETVAEKALQEYRKKHREE

SEQ ID NO: 41684 - protein, 274 aa, Homo sapiens
MQDHFSRASSIIDELFQDRFFTREPQDTYHYLPFSLPHRRPHFFFPKSRIVRSLMPFSPYEPLNFHAMFQPFLEMIHEAQQAMDIHFHSPAFQHPPTEFIREGDDDRTVCREIRHNSTGCLRMKDQCDKCREILSVDCSTNNPSQAKLRRELDESLQVAERLTRKYNELLKSYQWKMLNTSSLLEQLNEQFNWVSRLANLTQGEDQYYLRVTTVASHTSDSDVPSGVTEVVVKLFDSDPITVTVPVEVSRKNPKFMETVAEKALQEYRKKHREE

SEQ ID NO: 41685 - protein, 449 aa, Homo sapiens; identical to SEQ ID NO: 41683

SEQ ID NO: 41686 - protein, 204 aa, Homo sapiens
MMKTLLLFVGLLLTWESGQVLGDQTVSDNELQEMSNQGSKYVNKEIQNAVNGVKQIKTLIEKTNEERKTLLSNLEEAKKKKEDALNETRESETKLKELPGVCNETMMALWEECKPCLKQTCMKFYARVCRSGSGLVGRQLEEFLNQSSPFYFWMNGDRIDSLLENDRQQTHMLDVMQDHFSRASSIIDELFQDRFFTREPQDTY

SEQ ID NO: 41687 - protein, 449 aa, Homo sapiens; identical to SEQ ID NO: 41683

SEQ ID NO: 41688 - protein, 271 aa, Homo sapiens
MMKTLLLFVGLLLTWESGQVLGDQTVSDNELQEMSNQGSKYVNKEIQNAVNGVKQIKTLIEKTNEERKTLLSNLEEAKKKKEDALNETRESETKLKELPGVCNETMMALWEECKPCLKQTCMKFYARVCRSGSGLVGRQLEEFLNQSSPFYFWMNGDRIDSLLENDRQQTHMLDVMQDHFSRASSIIDELFQDSLMPFSPYEPLNFHAMFQPFLEMIHEAQQAMDIHFHSPAFQHPPTEFIREGDDDRTVCREIRHNSTGCLRMKDQCDKC

SEQ ID NO: 41689 - protein, 460 aa, Homo sapiens
MEACKDSRIGGMMKTLLLFVGLLLTWESGQVLGDQTVSDNELQEMSNQGSKYVNKEIQNAVNGVKQIKTLIEKTNEERKTLLSNLEEAKKKKEDALNETRESETKLKELPGVCNETMMALWEECKPCLKQTCMKFYARVCRSGSGLVGRQLEEFLNQSSPFYFWMNGDRIDSLLENDRQQTHMLDVMQDHFSRASSIIDELFQDRFFTREPQDTYHYLPFSLPHRRPHFFFPKSRIVRSLMPFSPYEPLNFHAMFQPFLEMIHEAQQAMDIHFHSPAFQHPPTEFIREGDDDRTVCREIRHNSTGCLRMKDQCDKCREILSVDCSTNNPSQAKLRRELDESLQVAERLTRKYNELLKSYQWKMLNTSSLLEQLNEQFNWVSRLANLTQGEDQYYLRVTTVASHTSDSDVPSGVTEVVVKLFDSDPITVTVPVEVSRKNPKFMETVAEKALQEYRKKHREE

SEQ ID NO: 41690 - protein, 501 aa, Homo sapiens
MQVCSQPQRGCVREQSAINTAPPSAHNAASPGGARGHRVPLTEACKDSRIGGMMKTLLLFVGLLLTWESGQVLGDQTVSDNELQEMSNQGSKYVNKEIQNAVNGVKQIKTLIEKTNEERKTLLSNLEEAKKKKEDALNETRESETKLKELPGVCNETMMALWEECKPCLKQTCMKFYARVCRSGSGLVGRQLEEFLNQSSPFYFWMNGDRIDSLLENDRQQTHMLDVMQDHFSRASSIIDELFQDRFFTREPQDTYHYLPFSLPHRRPHFFFPKSRIVRSLMPFSPYEPLNFHAMFQPFLEMIHEAQQAMDIHFHSPAFQHPPTEFIREGDDDRTVCREIRHNSTGCLRMKDQCDKCREILSVDCSTNNPSQAKLRRELDESLQVAERLTRKYNELLKSYQWKMLNTSSLLEQLNEQFNWVSRLANLTQGEDQYYLRVTTVASHTSDSDVPSGVTEVVVKLFDSDPITVTVPVEVSRKNPKFMETVAEKALQEYRKKHREE

SEQ ID NO: 41691 - protein, 297 aa, Homo sapiens
MEACKDSRIGGMMKTLLLFVGLLLTWESGQVLGDQTVSDNELQEMSNQGSKYVNKEIQNAVNGVKQIKTLIEKTNEERKTLLSNLEEAKKKKEDALNETRESETKLKELPGVCNETMMALWEECKPCLKQTCMKFYARVCRSGSGLVGRQLEEFLNQSSPFYFWMNGDRIDSLLENDRQQTHMLDVMQDHFSRASSIIDELFQDRFFTREPQDTYHYLPFSLPHRRPHFFFPKSRIVRSLMPFSPYEPLNFHAMFQPFLEMIHEAQQAMDIHFHSPAFQHPPTEFIREGDDDRTVCR

SEQ ID NO: 41692 - protein, 679 aa, Homo sapiens
LGQFEQPTGYMENSVSYSAIEDVQLLSWENAPKYCLQLTIPGGTVLLQAANSYLRDQWFHSLQWKKKIYKYKKVLSNPSRWEVVLKEIRTLVDMALTSPLQDDSINQAPLEIVSKLLSENTNLTTQEHENIIVAIAPLLENNHPPPDLCEFFCKHCRERPRSMVVIEVFTPVVQRILKHNMDFGKCPRLRLFTQEYILALNELNAGMEVVKKFIQSMHGPTGHCPHPRVLPNLVAVCLAAIYSCYEEFINSRDNSPSLKEIRNGCQQPCDRKPTLPLRLLHPSPDLVSQEATLSEARLKSVVVASSEIHVEVERTSTAKPALTASAGNDSEPNLIDCLMVSPACSTMSIELGPQADRTLGCYVEILKLLSDYDDWRPSLASLLQPIPFPKEALAHEKFTKELKYVIQRFAEDPRQEVHSCLLSVRAGKDGWFQLYSPGGVACDDDGELFASMVHILMGSCYKTKKFLLSLAENKLGPCMLLALRGNQTMVEILCLMLEYNIIDNNDTQLQIISTLESTDVGKRMYEQLCDRQRELKELQRKGGPTRLTLPSKSTDADLARLLSSGSFGNLENLSLAFTNVTSACAEHLIKLPSLKQLNLWSTQFGDAGLRLLSEHLTMLQVLNLCETPVTDAGLLALSSMKSLCSLNMNSTKLSADTYEDLKAKLPNLKEVDVRYTEAW

SEQ ID NO: 41693 - protein, 773 aa, Homo sapiens
MDVTSSSGGGGDPRQIEETKPLLGGDVSAPEGTKMGAVPCRRALLLCNGMRYKLLQEGDIQVCVIRHPRTFLSKILTSKFLRRWEPHHLTLADNSLASATPTGYMENSVSYSAIEDVQLLSWENAPKYCLQLTIPGGTVLLQAANSYLRDQWFHSLQWKKKIYKYKKVLSNPSRWEVVLKEIRTLVDMALTSPLQDDSINQAPLEIVSKLLSENTNLTTQEHENIIVAIAPLLENNHPPPDLCEFFCKHCRERPRSMVVIEVFTPVVQRILKHNMDFGKCPRLRLFTQEYILALNELNAGMEVVKKFIQSMHGPTGHCPHPRVLPNLVAVCLAAIYSCYEEFINSRDNSPSLKEIRNGCQQPCDRKPTLPLRLLHPSPDLVSQEATLSEARLKSVVVASSEIHVEVERTSTAKPALTASAGNDSEPNLIDCLMVSPACSTMSIELGPQADRTLGCYVEILKLLSDYDDWRPSLASLLQPIPFPKEALAHEKFTKELKYVIQRFAEDPRQEVHSCLLSVRAGKDGWFQLYSPGGVACDDDGELFASMVHILMGSCYKTKKFLLSLAENKLGPCMLLALRGNQTMVEILCLMLEYNIIDNNDTQLQIISTLESTDVGKRMYEQLCDRQRELKELQRKGGPTRLTLPSKSTDADLARLLSSGSFGNLENLSLAFTNVTSACAEHLIKLPSLKQLNLWSTQFGDAGLRLLSEHLTMLQVLNLCETPVTDAGLLALSSMKSLCSLNMNSTKLSADTYEDLKAKLPNLKEVDVRYTEAW

SEQ ID NO: 41694 - protein, 679 aa, Homo sapiens
MGQAAEPTGYMENSVSYSAIEDVQLLSWENAPKYCLQLTIPGGTVLLQAANSYLRDQWFHSLQWKKKIYKYKKVLSNPSRWEVVLKEIRTLVDMALTSPLQDDSINQAPLEIVSKLLSENTNLTTQEHENIIVAIAPLLENNHPPPDLCEFFCKHCRERPRSMVVIEVFTPVVQRILKHNMDFGKCPRLRLFTQEYILALNELNAGMEVVKKFIQSMHGPTGHCPHPRVLPNLVAVCLAAIYSCYEEFINSRDNSPSLKEIRNGCQQPCDRKPTLPLRLLHPSPDLVSQEATLSEARLKSVVVASSEIHVEVERTSTAKPALTASAGNDSEPNLIDCLMVSPACSTMSIELGPQADRTLGCYVEILKLLSDYDDWRPSLASLLQPIPFPKEALAHEKFTKELKYVIQRFAEDPRQEVHSCLLSVRAGKDGWFQLYSPGGVACDDDGELFASMVHILMGSCYKTKKFLLSLAENKLGPCMLLALRGNQTMVEILCLMLEYNIIDNNDTQLQIISTLESTDVGKRMYEQLCDRQRELKELQRKGGPTRLTLPSKSTDADLARLLSSGSFGNLENLSLAFTNVTSACAEHLIKLPSLKQLNLWSTQFGDAGLRLLSEHLTMLQVLNLCETPVTDAGLLALSSMKSLCSLNMNSTKLSADTYEDLKAKLPNLKEVDVRYTEAW

SEQ ID NO: 41695 - protein, 586 aa, Homo sapiens
MALTSPLQDDSINQAPLEIVSKLLSENTNLTTQEHENIIVAIAPLLENNHPPPDLCEFFCKHCRERPRSMVVIEVFTPVVQRILKHNMDFGKCPRLRLFTQEYILALNELNAGMEVVKKFIQSMHGPTGHCPHPRVLPNLVAVCLAAIYSCYEEFINSRDNSPSLKEIRNGCQQPCDRKPTLPLRLLHPSPDLVSQEATLSEARLKSVVVASSEIHVEVERTSTAKPALTASAGNDSEPNLIDCLMVSPACSTMSIELGPQADRTLGCYVEILKLLSDYDDWRPSLASLLQPIPFPKEALAHEKFTKELKYVIQRFAEDPRQEVHSCLLSVRAGKDGWFQLYSPGGVACDDDGELFASMVHILMGSCYKTKKFLLSLAENKLGPCMLLALRGNQTMVEILCLMLEYNIIDNNDTQLQIISTLESTDVGKRMYEQLCDRQRELKELQRKGGPTRLTLPSKSTDADLARLLSSGSFGNLENLSLAFTNVTSACAEHLIKLPSLKQLNLWSTQFGDAGLRLLSEHLTMLQVLNLCETPVTDAGLLALSSMKSLCSLNMNSTKLSADTYEDLKAKLPNLKEVDVRYTEAW

SEQ ID NO: 41696 - protein, 103 aa, Homo sapiens
MAHYKAADSKREQFRRYLEKSGVLDTLTKVLVALYEEPEKPNSALDFLKHHLGAATPENPEIELLRLELAEMKEKYEAIVEENKKLKAKLAQYEPPQEEKRAE

SEQ ID NO: 41697 - protein, 564 aa, Homo sapiens
MAVFRSGLLVLTTPLASLAPRLASILTSAARLVNHTLYVHLQPGMSLEGPAQPQSSPVQATFEVLDFITHLYAGADVHRHLDVRILLTNIRTKSTFLPPLPTSVQNLAHPPEVVLTDFQTLDGSQYNPVKQQLVRYATSCYSCCPRLASVLLYSDYGIGEVPVEPLDVPLPSTIRPASPVAGSPKQPVRGYYRGAVGGTFDRLHNAHKVLLSVACILAQEQLVVGVADKDLLKSKLLPELLQPYTERVEHLSEFLVDIKPSLTFDVIPLLDPYGPAGSDPSLEFLVVSEETYRGGMAINRFRLENDLEELALYQIQLLKDLRHTENEEDKVSSSSFRQRMLGNLLRPPYERPELPTCLYVIGLTGISGSGKSSIAQRLKGLGAFVIDSDHLGHRAYAPGGPAYQPVVEAFGTDILHKDGIINRKVLGSRVFGNKKQLKILTDIMWPIIAKLAREEMDRAVAEGKRVCVIDAAVLLEAGWQNLVHEVWTAVIPETEAVRRIVERDGLSEAAAQSRLQSQMSGQQLVEQSHVVLSTLWEPHITQRQVEKAWALLQKRIPKTHQALD

SEQ ID NO: 41698 - protein, 564 aa, Homo sapiens; identical to SEQ ID NO: 41697

SEQ ID NO: 41699 - protein, 593 aa, Homo sapiens
MRTPRLRAQPRGAVYQAPSPPPAPVGLGSMAVFRSGLLVLTTPLASLAPRLASILTSAARLVNHTLYVHLQPGMSLEGPAQPQSSPVQATFEVLDFITHLYAGADVHRHLDVRILLTNIRTKSTFLPPLPTSVQNLAHPPEVVLTDFQTLDGSQYNPVKQQLVRYATSCYSCCPRLASVLLYSDYGIGEVPVEPLDVPLPSTIRPASPVAGSPKQPVRGYYRGAVGGTFDRLHNAHKVLLSVACILAQEQLVVGVADKDLLKSKLLPELLQPYTERVEHLSEFLVDIKPSLTFDVIPLLDPYGPAGSDPSLEFLVVSEETYRGGMAINRFRLENDLEELALYQIQLLKDLRHTENEEDKVSSSSFRQRMLGNLLRPPYERPELPTCLYVIGLTGISGSGKSSIAQRLKGLGAFVIDSDHLGHRAYAPGGPAYQPVVEAFGTDILHKDGIINRKVLGSRVFGNKKQLKILTDIMWPIIAKLAREEMDRAVAEGKRVCVIDAAVLLEAGWQNLVHEVWTAVIPETEAVRRIVERDGLSEAAAQSRLQSQMSGQQLVEQSHVVLSTLWEPHITQRQVEKAWALLQKRIPKTHQALD

SEQ ID NO: 41700 - protein, 175 aa, Homo sapiens
MAVFRSGLLVLTTPLASLAPRLASILTSAARLVNHTLYVHLQPGMSLEGPAQPQSSPVQATFEVLDFITHLSPSPAHLSPESRPPARSRVDRFPDPGWKPVQPGQTAASALRHQLLQLLSATGLGAAILRLWDRRSARGAPGCPLTLHDQASFPRGRVSKAAGAWLLPWRCRWHV

SEQ ID NO: 41701 - protein, 269 aa, Homo sapiens
MAINRFRLENDLEELALYQIQLLKDLRHTENEEDKVSSSSFRQRMLGNLLRPPYERPELPTCLYVIGLTGISGSGKSSIAQRLKGLGAFVIDSDHLGHRAYAPGGPAYQPVVEAFGTDILHKDGIINRKVLGSRVFGNKKQLKILTDIMWPIIAKLAREEMDRAVAEGKRVCVIDAAVLLEAGWQNLVHEVWTAVIPETEAVRRIVERDGLSEAAAQSRLQSQMSGQQLVEQSHVVLSTLWEPHITQRQVEKAWALLQKRIPKTHQALD

SEQ ID NO: 41702 - protein, 593 aa, Homo sapiens; identical to SEQ ID NO: 41699

SEQ ID NO: 41703 - protein, 142 aa, Homo sapiens
MATKIDKEACRAAYNLVRDDGSAVIWVTFKYDGSTIVPGEQGAEYQHFIQQCTDDVRLFAFVRFTTGDAMSKRSKFALITWIGENVSGLQRAKTGTDKTLVKEVVQNFAKEFVISDRKELEEDFIKSELKKAGGANYDAQTE

SEQ ID NO: 41704 - protein, 550 aa, Homo sapiens
MSAAWIPALGLGVCLLLLPGPAGSEGAAPIAITCFTRGLDIRKEKADVLCPGGCPLEEFSVYGNIVYASVSSICGAAVHRGVISNSGGPVRVYSLPGRENYSSVDANGIQSQMLSRWSASFTVTKGKSSTQEATGQAVSTAHPPTGKRLKKTPEKKTGNKDCKADIAFLIDGSFNIGQRRFNLQKNFVGKVALMLGIGTEGPHVGLVQASEHPKIEFYLKNFTSAKDVLFAIKEVGFRGGNSNTGKALKHTAQKFFTVDAGVRKGIPKVVVVFIDGWPSDDIEEAGIVAREFGVNVFIVSVAKPIPEELGMVQDVTFVDKAVCRNNGFFSYHMPNWFGTTKYVKPLVQKLCTHEQMMCSKTCYNSVNIAFLIDGSSSVGDSNFRLMLEFVSNIAKTFEISDIGAKIAAVQFTYDQRTEFSFTDYSTKENVLAVIRNIRYMSGGTATGDAISFTVRNVFGPIRESPNKNFLVIVTDGQSYDDVQGPAAAAHDAGITIFSVGVAWAPLDDLKDMASKPKESHAFFTREFTGLEPIVSDVIRGICRDFLESQQ

SEQ ID NO: 41705 - protein, 401 aa, Homo sapiens
MLGIGTEGPHVGLVQASEHPKIEFYLKNFTSAKDVLFAIKEVGFRGGNSNTDITLEKYLFVMLKRSENQQTYLMNADVAERMSSTTVDSEERLLRGKALKHTAQKFFTVDAGVRKGIPKVVVVFIDGWPSDDIEEAGIVAREFGVNVFIVSVAKPIPEELGMVQDVTFVDKAVCRNNGFFSYHMPNWFGTTKYVKPLVQKLCTHEQMMCSKTCYNSVNIAFLIDGSSSVGDSNFRLMLEFVSNIAKTFEISDIGAKIAAVQFTYDQRTEFSFTDYSTKENVLAVIRNIRYMSGGTATGDAISFTVRNVFGPIRESPNKNFLVIVTDGQSYDDVQGPAAAAHDAGITIFSVGVAWAPLDDLKDMASKPKESHAFFTREFTGLEPIVSDVIRGICRDFLESQQ

SEQ ID NO: 41706 - protein, 550 aa, Homo sapiens; identical to SEQ ID NO: 41704

SEQ ID NO: 41707 - protein, 243 aa, Homo sapiens
MLSRWSASFTVTKGKSSTQEATGQAVSTAHPPTGKRLKKTPEKKTGNKDCKADIAFLIDGSFNIGQRRFNLQKNFVGKVALMLGIGTEGPHVGLVQASEHPKIEFYLKNFTSAKDVLFAIKEVGFRGGNSNTGKALKHTAQKFFTVDAGVRKGIPKVVVVFIDGWPSDDIEEAGIVAREFGVNVFIVSVAKPIPEELGMVQDVTFVDKAVCRNNGFFSYHMPNWFGTTKYVSLWYRSCALMNK

SEQ ID NO: 41708 - protein, 425 aa, Homo sapiens
MGPRRLLLVAACFSLCGPLLSARTRARRPESKATNATLDPRSFLLRNPNDKYEPFWEDEEKNESGLTEYRLVSINKSSPLQKQLPAFISEDASGYLTSSWLTLFVPSVYTGVFVVSLPLNIMAIVVFILKMKVKKPAVVYMLHLATADVLFVSVLPFKISYYFSGSDWQFGSELCRFVTAAFYCNMYASILLMTVISIDRFLAVVYPMQSLSWRTLGRASFTCLAIWALAIAGVVPLLLKEQTIQVPGLNITTCHDVLNETLLEGYYAYYFSAFSAVFFFVPLIISTVCYVSIIRCLSSSAVANRSKKSRALFLSAAVFCIFIICFGPTNVLLIAHYSFLSHTSTTEAAYFAYLLCVCVSSISCCIDPLIYYYASSECQRYVYSILCCKESSDPSSYNSSGQLMASKMDTCSSNLNNSIYKKLLT

SEQ ID NO: 41709 - protein, 397 aa, Homo sapiens
MRSPSAAWLLGAAILLAASLSCSGTIQGTSRSSKGRSLIGKVDGTSHVTGKGVTVETVFSVDEFSASVLTGKLTTVFLPIVYTIVFVVGLPSNGMALWVFLFRTKKKHPAVIYMANLALADLLSVIWFPLKIAYHIHGNNWIYGEALCNVLIGFFYGNMYCSILFMTCLSVQRYWVIVNPMGHSRKKANIAIGISLAIWLLILLVTIPLYVVKQTIFIPALNITTCHDVLPEQLLVGDMFNYFLSLAIGVFLFPAFLTASAYVLMIRMLRSSAMDENSEKKRKRAIKLIVTVLAMYLICFTPSNLLLVVHYFLIKSQGQSHVYALYIVALCLSTLNSCIDPFVYYFVSHDFRDHAKNALLCRSVRTVKQMQVSLTSKKHSRKSSSYSSSSTTVKTSY

SEQ ID NO: 41710 - protein, 374 aa, Homo sapiens
MKALIFAAAGLLLLLPTFCQSGMENDTNNLAKPTLPIKTFRGAPPNSFEEFPFSALEGWTGATITVKIKCPEESASHLHVKNATMGYLTSSLSTKLIPAIYLLVFVVGVPANAVTLWMLFFRTRSICTTVFYTNLAIADFLFCVTLPFKIAYHLNGNNWVFGEVLCRATTVIFYGNMYCSILLLACISINRYLAIVHPFTYRGLPKHTYALVTCGLVWATVFLYMLPFFILKQEYYLVQPDITTCHDVHNTCESSSPFQLYYFISLAFFGFLIPFVLIIYCYAAIIRTLNAYDHRWLWYVKASLLILVIFTICFAPSNIILIIHHANYYYNNTDGLYFIYLIALCLGSLNSCLDPFLYFLMSKTRNHSTAYLTK

SEQ ID NO: 41711 - protein, 352 aa, Homo sapiens
MENDTNNLAKPTLPIKTFRGAPPNSFEEFPFSALEGWTGATITVKIKCPEESASHLHVKNATMGYLTSSLSTKLIPAIYLLVFVVGVPANAVTLWMLFFRTRSICTTVFYTNLAIADFLFCVTLPFKIAYHLNGNNWVFGEVLCRATTVIFYGNMYCSILLLACISINRYLAIVHPFTYRGLPKHTYALVTCGLVWATVFLYMLPFFILKQEYYLVQPDITTCHDVHNTCESSSPFQLYYFISLAFFGFLIPFVLIIYCYAAIIRTLNAYDHRWLWYVKASLLILVIFTICFAPSNIILIIHHANYYYNNTDGLYFIYLIALCLGSLNSCLDPFLYFLMSKTRNHSTAYLTK

SEQ ID NO: 41712 - protein, 385 aa, Homo sapiens
MWGRLLLWPLVLGFSLSGGTQTPSVYDESGSTGGGDDSTPSILPAPRGYPGQVCANDSDTLELPDSSRALLLGWVPTRLVPALYGLVLVVGLPANGLALWVLATQAPRLPSTMLLMNLAAADLLLALALPPRIAYHLRGQRWPFGEAACRLATAALYGHMYGSVLLLAAVSLDRYLALVHPLRARALRGRRLALGLCMAAWLMAAALALPLTLQRQTFRLARSDRVLCHDALPLDAQASHWQPAFTCLALLGCFLPLLAMLLCYGATLHTLAASGRRYGHALRLTAVVLASAVAFFVPSNLLLLLHYSDPSPSAWGNLYGAYVPSLALSTLNSCVDPFIYYYVSAEFRDKVRAGLFQRSPGDTVASKASAEGGSRGMGTHSSLLQ

SEQ ID NO: 41713 - protein, 615 aa, Homo sapiens
MRALLLLGFLLVSLESTLSIPPWEAPKEHKYKAEEHTVVLTVTGEPCHFPFQYHRQLYHKCTHKGRPGPQPWCATTPNFDQDQRWGYCLEPKKVKDHCSKHSPCQKGGTCVNMPSGPHCLCPQHLTGNHCQKEKCFEPQLLRFFHKNEIWYRTEQAAVARCQCKGPDAHCQRLASQACRTNPCLHGGRCLEVEGHRLCHCPVGYTGAFCDVDTKASCYDGRGLSYRGLARTTLSGAPCQPWASEATYRNVTAEQARNWGLGGHAFCRNPDNDIRPWCFVLNRDRLSWEYCDLAQCQTPTQAAPPTPVSPRLHVPLMPAQPAPPKPQPTTRTPPQSQTPGALPAKREQPPSLTRNGPLSCGQRLRKSLSSMTRVVGGLVALRGAHPYIAALYWGHSFCAGSLIAPCWVLTAAHCLQDRPAPEDLTVVLGQERRNHSCEPCQTLAVRSYRLHEAFSPVSYQHDLALLRLQEDADGSCALLSPYVQPVCLPSGAARPSETTLCQVAGWGHQFEGAEEYASFLQEAQVPFLSLERCSAPDVHGSSILPGMLCAGFLEGGTDACQGDSGGPLVCEDQAAERRLTLQGIISWGSGCGDRNKPGVYTDVAYYLAWIREHTVS

SEQ ID NO: 41714 - protein, 661 aa, Homo sapiens
MRLKNLTFIIILIISGELYAEEKPCGFPHVENGRIAQYYYTFKSFYFPMSIDKKLSFFCLAGYTTESGRQEEQTTCTTEGWSPEPRCFKKCTKPDLSNGYISDVKLLYKIQENMRYGCASGYKTTGGKDEEVVQCLSDGWSSQPTCRKEHETCLAPELYNGNYSTTQKTFKVKDKVQYECATGYYTAGGKKTEEVECLTYGWSLTPKCTKLKCSSLRLIENGYFHPVKQTYEEGDVVQFFCHENYYLSGSDLIQCYNFGWYPESPVCEGRRNRCPPPPLPINSKIQTHSTTYRHGEIVHIECELNFEIHGSAEIRCEDGKWTEPPKCIEGQEKVACEEPPFIENGAANLHSKIYYNGDKVTYACKSGYLLHGSNEITCNRGKWTLPPECVENNENCKHPPVVMNGAVADGILASYATGSSVEYRCNEYYLLRGSKISRCEQGKWSSPPVCLEPCTVNVDYMNRNNIEMKWKYEGKVLHGDLIDFVCKQGYDLSPLTPLSELSVQCNRGEVKYPLCTRKESKGMCTSPPLIKHGVIISSTVDTYENGSSVEYRCFDHHFLEGSREAYCLDGMWTTPPLCLEPCTLSFTEMEKNNLLLKWDFDNRPHILHGEYIEFICRGDTYPAELYITGSILRMQCDRGQLKYPRCIPRQSTLSYQEPLRT

SEQ ID NO: 41715 - protein, 1224 aa, Homo sapiens
MLTKFETKSARVKGLSFHPKRPWILTSLHNGVIQLWDYRMCTLIDKFDEHDGPVRGIDFHKQQPLFVSGGDDYKIKVWNYKLRRCLFTLLGHLDYIRTTFFHHEYPWILSASDDQTIRVWNWQSRTCVCVLTGHNHYVMCAQFHPTEDLVVSASLDQTVRVWDISGLRKKNLSPGAVESDVRGITGVDLFGTTDAVVKHVLEGHDRGVNWAAFHPTMPLIVSGADDRQVKIWRMNESKAWEVDTCRGHYNNVSCAVFHPRQELILSNSEDKSIRVWDMSKRTGVQTFRRDHDRFWVLAAHPNLNLFAAGHDGGMIVFKLERERPAYAVHGNMLHYVKDRFLRQLDFNSSKDVAVMQLRSGSKFPVFNMSYNPAENAVLLCTRASNLENSTYDLYTIPKDADSQNPDAPEGKRSSGLTAVWVARNRFAVLDRMHSLLIKNLKNEITKKVQVPNCDEIFYAGTGNLLLRDADSITLFDVQQKRTLASVKISKVKYVIWSADMSHVALLAKHAIVICNRKLDALCNIHENIRVKSGAWDESGVFIYTTSNHIKYAVTTGDHGIIRTLDLPIYVTRVKGNNVYCLDRECRPRVLTIDPTEFKFKLALINRKYDEVLHMVRNAKLVGQSIIAYLQKKGYPEVALHFVKDEKTRFSLALECGNIEIALEAAKALDDKNCWEKLGEVALLQGNHQIVEMCYQRTKNFDKLSFLYLITGNLEKLRKMMKIAEIRKDMSGHYQNALYLGDVSERVRILKNCGQKSLAYLTAATHGLDEEAESLKETFDPEKETIPDIDPNAKLLQPPAPIMPLDTNWPLLTVSKGFFEGTIASKGKGGALAADIDIDTVGTEGWGEDAELQLDEDGFVEATEGLGDDALGKGQEEGGGWDVEEDLELPPELDISPGAAGGAEDGFFVPPTKGTSPTQIWCNNSQLPVDHILAGSFETAMRLLHDQVGVIQFGPYKQLFLQTYARGRTTYQALPCLPSMYGYPNRNWKDAGLKNGVPAVGLKLNDLIQRLQLCYQLTTVGKFEEAVEKFRSILLSVPLLVVDNKQEIAEAQQLITICREYIVGLSVETERKKLPKETLEQQKRICEMAAYFTHSNLQPVHMILVLRTALNLFFKLKNFKTAATFARRLLELGPKPEVAQQTRKILSACEKNPTDAYQLNYDMHNPFDICAASYRPIYRGKPVEKCPLSGACYSPEFKGQICRVTTVTEIGKDVIGLRISPLQFR

SEQ ID NO: 41716 - protein, 1233 aa, Homo sapiens
MLTKFETKSARVKGLSFHPKRPWILTSLHNGVIQLWDYRMCTLIDKFDEHDGPVRGIDFHKQQPLFVSGGDDYKIKVWNYKLRRCLFTLLGHLDYIRTTFFHHEYPWILSASDDQTIRVWNWQSRTCVCVLTGHNHYVMCAQFHPTEDLVVSASLDQTVRVWDISGLRKKNLSPGAVESDVRGITGVDLFGTTDAVVKHVLEGHDRGVNWAAFHPTMPLIVSGADDRQVKIWRMNESKAWEVDTCRGHYNNVSCAVFHPRQELILSNSEDKSIRVWDMSKRTGVQTFRRDHDRFWVLAAHPNLNLFAAGHDGGMIVFKLERERPAYAVHGNMLHYVKDRFLRQLDFNSSKDVAVMQLRSGSKFPVFNMSYNPAENAVLLCTRASNLENSTYDLYTIPKDADSQNPDAPEGKRSSGLTAVWVARNRFAVLDRMHSLLIKNLKNEITKKVQVPNCDEIFYAGTGNLLLRDADSITLFDVQQKRTLASVKISKVKYVIWSADMSHVALLAKHEHSCPLPLTAIVICNRKLDALCNIHENIRVKSGAWDESGVFIYTTSNHIKYAVTTGDHGIIRTLDLPIYVTRVKGNNVYCLDRECRPRVLTIDPTEFKFKLALINRKYDEVLHMVRNAKLVGQSIIAYLQKKGYPEVALHFVKDEKTRFSLALECGNIEIALEAAKALDDKNCWEKLGEVALLQGNHQIVEMCYQRTKNFDKLSFLYLITGNLEKLRKMMKIAEIRKDMSGHYQNALYLGDVSERVRILKNCGQKSLAYLTAATHGLDEEAESLKETFDPEKETIPDIDPNAKLLQPPAPIMPLDTNWPLLTVSKGFFEGTIASKGKGGALAADIDIDTVGTEGWGEDAELQLDEDGFVEATEGLGDDALGKGQEEGGGWDVEEDLELPPELDISPGAAGGAEDGFFVPPTKGTSPTQIWCNNSQLPVDHILAGSFETAMRLLHDQVGVIQFGPYKQLFLQTYARGRTTYQALPCLPSMYGYPNRNWKDAGLKNGVPAVGLKLNDLIQRLQLCYQLTTVGKFEEAVEKFRSILLSVPLLVVDNKQEIAEAQQLITICREYIVGLSVETERKKLPKETLEQQKRICEMAAYFTHSNLQPVHMILVLRTALNLFFKLKNFKTAATFARRLLELGPKPEVAQQTRKILSACEKNPTDAYQLNYDMHNPFDICAASYRPIYRGKPVEKCPLSGACYSPEFKGQICRVTTVTEIGKDVIGLRISPLQFR

SEQ ID NO: 41717 - protein, 953 aa, Homo sapiens
MTAAENVCYTLINVPMDSEPPSEISLKNDLEKGDVKSKTEALKKVIIMILNGEKLPGLLMTIIRFVLPLQDHTIKKLLLVFWEIVPKTTPDGRLLHEMILVCDAYRKDLQHPNEFIRGSTLRFLCKLKEAELLEPLMPAIRACLEHRHSYVRRNAVLAIYTIYRNFEHLIPDAPELIHDFLVNEKDASCKRNAFMMLIHADQDRALDYLSTCIDQVQTFGDILQLVIVELIYKVCHANPSERARFIRCIYNLLQSSSPAVKYEAAGTLVTLSSAPTAIKAAAQCYIDLIIKESDNNVKLIVLDRLIELKEHPAHERVLQDLVMDILRVLSTPDLEVRKKTLQLALDLVSSRNVEELVIVLKKEVIKTNNVSEHEDTDKYRQLLVRTLHSCSVRFPDMAANVIPVLMEFLSDNNEAAAADVLEFVREAIQRFDNLRMLIVEKMLEVFHAIKSVKIYRGALWILGEYCSTKEDIQSVMTEIRRSLGEIPIVESEIKKEAGELKPEEEITVGPVQKLVTEMGTYATQSALSSSRPTKKEEDRPPLRGFLLDGDFFVAASLATTLTKIALRYVALVQEKKKQNSFVAEAMLLMATILHLGKSSLPKKPITDDDVDRISLCLKVLSECSPLMNDIFNKECRQSLSHMLSAKLEEEKLSQKKESEKRNVTVQPDDPISFMQLTAKNEMNCKEDQFQLSLLAAMGNTQRKEAADPLASKLNKVTQLTGFSDPVYAEAYVHVNQYDIVLDVLVVNQTSDTLQNCTLELATLGDLKLVEKPSPLTLAPHDFANIKANVKVASTENGIIFGNIVYDVSGAASDRNCVVLSDIHIDIMDYIQPATCTDAEFRQMWAEFEWENKVTVNTNMVDLNDYLQHILKSTNMKCLTPEKALSGYCGFMAANLYARSIFGEDALANVSIEKPIHQGPDAAVTGHIRIRAKSQGMALSLGDKINLSQKKTSI

SEQ ID NO: 41718 - protein, 953 aa, Homo sapiens; identical to SEQ ID NO: 41717

SEQ ID NO: 41719 - protein, 906 aa, Homo sapiens
MPLRLDIKRKLTARSDRVKSVDLHPTEPWMLASLYNGSVCVWNHETQTLVKTFEVCDLPVRAAKFVARKNWVVTGADDMQIRVFNYNTLERVHMFEAHSDYIRCIAVHPTQPFILTSSDDMLIKLWDWDKKWSCSQVFEGHTHYVMQIVINPKDNNQFASASLDRTIKVWQLGSSSPNFTLEGHEKGVNCIDYYSGGDKPYLISGADDRLVKIWDYQNKTCVQTLEGHAQNVSCASFHPELPIIITGSEDGTVRIWHSSTYRLESTLNYGMERVWCVASLRGSNNVALGYDEGSIIVKLGREEPAMSMDANGKIIWAKHSEVQQANLKAMGDAEIKDGERLPLAVKDMGSCEIYPQTIQHNPNGRFVVVCGDGEYIIYTAMALRNKSFGSAQEFAWAHDSSEYAIRESNSIVKIFKNFKEKKSFKPDFGAESIYGGFLLGVRSVNGLAFYDWDNTELIRRIEIQPKHIFWSDSGELVCIATEESFFILKYLSEKVLAAQETHEGVTEDGIEDAFEVLGEIQEIVKTGLWVGDCFIYTSSVNRLNYYVGGEIVTIAHLDRTMYLLGYIPKDNRLYLGDKELNIISYSLLVSVLEYQTAVMRRDFSMADKVLPTIPKEQRTRVAHFLEKQGFKQQALTVSTDPEHRFELALQLGELKIAYQLAVEAESEQKWKQLAELAISKCQFGLAQECLHHAQDYGGLLLLATASGNANMVNKLAEGAERDGKNNVAFMSYFLQGKVDACLELLIRTGRLPEAAFLARTYLPSQVSRVVKLWRENLSKVNQKAAESLADPTEYENLFPGLKEAFVVEEWVKETHADLWPAKQYPLVTPNEERNVMEEGKDFQPSRSTAQQELDGKPASPTPVIVASHTANKEEKSLLELEVDLDNLELEDIDTTDINLDEDILDD

SEQ ID NO: 41720 - protein, 877 aa, Homo sapiens
MLASLYNGSVCVWNHETQTLVKTFEVCDLPVRAAKFVARKNWVVTGADDMQIRVFNYNTLERVHMFEAHSDYIRCIAVHPTQPFILTSSDDMLIKLWDWDKKWSCSQVFEGHTHYVMQIVINPKDNNQFASASLDRTIKVWQLGSSSPNFTLEGHEKGVNCIDYYSGGDKPYLISGADDRLVKIWDYQNKTCVQTLEGHAQNVSCASFHPELPIIITGSEDGTVRIWHSSTYRLESTLNYGMERVWCVASLRGSNNVALGYDEGSIIVKLGREEPAMSMDANGKIIWAKHSEVQQANLKAMGDAEIKDGERLPLAVKDMGSCEIYPQTIQHNPNGRFVVVCGDGEYIIYTAMALRNKSFGSAQEFAWAHDSSEYAIRESNSIVKIFKNFKEKKSFKPDFGAESIYGGFLLGVRSVNGLAFYDWDNTELIRRIEIQPKHIFWSDSGELVCIATEESFFILKYLSEKVLAAQETHEGVTEDGIEDAFEVLGEIQEIVKTGLWVGDCFIYTSSVNRLNYYVGGEIVTIAHLDRTMYLLGYIPKDNRLYLGDKELNIISYSLLVSVLEYQTAVMRRDFSMADKVLPTIPKEQRTRVAHFLEKQGFKQQALTVSTDPEHRFELALQLGELKIAYQLAVEAESEQKWKQLAELAISKCQFGLAQECLHHAQDYGGLLLLATASGNANMVNKLAEGAERDGKNNVAFMSYFLQGKVDACLELLIRTGRLPEAAFLARTYLPSQVSRVVKLWRENLSKVNQKAAESLADPTEYENLFPGLKEAFVVEEWVKETHADLWPAKQYPLVTPNEERNVMEEGKDFQPSRSTAQQELDGKPASPTPVIVASHTANKEEKSLLELEVDLDNLELEDIDTTDINLDEDILDD

SEQ ID NO: 41721 - protein, 308 aa, Homo sapiens
MAPPAPGPASGGSGEVDELFDVKNAFYIGSYQQCINEAQRVKLSSPERDVERDVFLYRAYLAQRKFGVVLDEIKPSSAPELQAVRMFADYLAHESRRDSIVAELDREMSRSVDVTNTTFLLMAASIYLHDQNPDAALRALHQGDSLECTAMTVQILLKLDRLDLARKELKRMQDLDEDATLTQLATAWVSLATGGEKLQDAYYIFQEMADKCSPTLLLLNGQAACHMAQGRWEAAEGLLQEALDKDSGYPETLVNLIVLSQHLGKPPEVTNRYLSQLKDAHRSHPFIKEYQAKENDFDRLVLQYAPSA

SEQ ID NO: 41722 - protein, 256 aa, Homo sapiens
MAPPAPGPASGGSGEVDELFDVKNAFYIGSYQQCINEAQRVKLSSPERDVERDVFLYRAYLAQRKFGVVLDEIKPSSAPELQAVRMFADYLAHESRRDSIVAELDREMSRSVDVTNTTFLLMAASIYLHDQNPDAALRALHQGDSLECTAMTVQILLKLDRLDLARKELKRMQDLDEDATLTQLATAWVSLATDSGYPETLVNLIVLSQHLGKPPEVTNRYLSQLKDAHRSHPFIKEYQAKENDFDRLVLQYAPSA

SEQ ID NO: 41723 - protein, 257 aa, Homo sapiens
MAPPAPGPASGGSGEVDELFDVKNAFYIGSYQQCINEAQRVKLSSPERDVERDVFLYRAYLAQRKFGVVLDEIKPSSAPELQAVRMFADYLAHESRSTAMTVQILLKLDRLDLARKELKRMQDLDEDATLTQLATAWVSLATGGEKLQDAYYIFQEMADKCSPTLLLLNGQAACHMAQGRWEAAEGLLQEALDKDSGYPETLVNLIVLSQHLGKPPEVTNRYLSQLKDAHRSHPFIKEYQAKENDFDRLVLQYAPSA

SEQ ID NO: 41724 - protein, 307 aa, Homo sapiens
MAPPAPAGLRGSGEVDELFDVKNAFYIGSYQQCINEAQRVKLSSPERDVERDVFLYRAYLAQRKFGVVLDEIKPSSAPELQAVRMFADYLAHESRRDSIVAELDREMSRSVDVTNTTFLLMAASIYLHDQNPDAALRALHQGDSLECTAMTVQILLKLDRLDLARKELKRMQDLDEDATLTQLATAWVSLATGGEKLQDAYYIFQEMADKCSPTLLLLNGQAACHMAQGRWEAAEGLLQEALDKDSGYPETLVNLIVLSQHLGKPPEVTNRYLSQLKDAHRSHPFIKEYQAKENDFDRLVLQYAPSA

SEQ ID NO: 41725 - protein, 246 aa, Homo sapiens
MIKKFDKKDEESGSGSNPFQHLEKSAVLQEARIFNETPINPRRCLHILTKILYLLNQGEHFGTTEATEAFFAMTRLFQSNDQTLRRMCYLTIKEMATISEDVIIVTSSLTKDMTGKEDVYRGPAIRALCRITDGTMLQAIERYMKQAIVDKVSSVSSSALVSSLHMMKISYDVVKRWINEAQEAASSDNIMVQYHALGVLYHLRKNDRLAVSKMLNKFTKSGLKSQFAYCMLIRIASRLLKETEDG

SEQ ID NO: 41726 - protein, 155 aa, Homo sapiens
  VARIANT 1: note = MOD_RES - Any amino acid
XAGSFSCTMKFTVRDCDPNTGVPDEDGYDDEYVLEDLEVTVSDHIQKVLKPNFAAAWEEVGDTFEKEETFALSSTKTLEEAVNNIITFLGMQPCERSDKVPENKNSHSLYLAGIFRGGYDLLVRSRLALADGVTMQVTVRSKERTPVDVILASVG

SEQ ID NO: 41727 - protein, 246 aa, Homo sapiens; identical to SEQ ID NO: 41725

SEQ ID NO: 41728 - protein, 359 aa, Homo sapiens
MYFKRAARAFPVLLTGAGKTTLLNYILTEQHSKRVAVILNEFGEGSALEKSLAVSQGGELYEEWLELRNGCLCCSVKDSGLRAIENLMQKKGKFDYILLETTGLADPGAVASMFWVDAELGSDIYLDGIITIVDSKYGLKHLTEEKPDGLINEATRQVALADAILINKTDLVPEEDVKKLRTTIRSINGLGQILETQRSRVDLSNVLDLHAFDSLSGISLQKKLQHVPGTQPHLDQSIVTITFEVPGNAKEEHLNMFIQNLLWEKNVRNKDNHCMEVIRLKGLVSIKDKSQQVIVQGVHELYDLEETPVSWKDDTERTNRLVLLGRNLDKDILKQLFIATVTETEKQWTTRFQEDQVCT

SEQ ID NO: 41729 - protein, 395 aa, Homo sapiens
MLPAVGSADEEEDPAEEDCPELVPIETTQSEEEEKSGLGAKIPVTIITGYLGAGKTTLLNYILTEQHSKRVAVILNEFGEGSALEKSLAVSQGGELYEEWLELRNGCLCCSVKDSGLRAIENLMQKKGKFDYILLETTGLADPGAVASMFWVDAELGSDIYLDGIITIVDSKYGLKHLTEEKPDGLINEATRQVALADAILINKTDLVPEEDVKKLRTTIRSINGLGQILETQRSRVDLSNVLDLHAFDSLSGISLQKKLQHVPGTQPHLDQSIVTITFEVPGNAKEEHLNMFIQNLLWEKNVRNKDNHCMEVIRLKGLVSIKDKSQQVIVQGVHELYDLEETPVSWKDDTERTNRLVLLGRNLDKDILKQLFIATVTETEKQWTTRFQEDQVCT

SEQ ID NO: 41730 - protein, 180 aa, Homo sapiens
MLPAVGSADEEEDPAEEDCPELVPIETTQSEEEEKSGLGAKIPVTIITGYLGAGKTTLLNYILTEQHSKRVAVILNEFGEGSALEKSLAVSQGGELYEEWLELRNGCLCCSVKDSGLRAIENLMQKKGKFDYILLETTGLADPGAVASMFWVDAELGSDIYLDGIITIVDSKYGLKVKYH

SEQ ID NO: 41731 - protein, 347 aa, Homo sapiens
MLPAVGSADEEEDPAEEDCPELVPIETTQSEEEEKSGLGAKIPVTIITGYLGAGKTTLLNYILTEQHSKRVAVILNEFGEGSALEKSLAVSQGGELYEEWLELRNGCLCCSVKDSGLRAIENLMQKKGKFDYILLETTGLADPGAVASMFWVDAELGSDIYLDGIITIVDSKYGLKHLTEEKPDGLINEATRSINGLGQILETQRSSLQKKLQHVPGTQPHLDQSIVTITFEVPGNAKEEHLNMFIQNLLWEKNVRNKDNHCMEVIRLKGLVSIKDKSQQVIVQGVHELYDLEETPVSWKDDTERTNRLVLLGRNLDKDILKQLFIATVTETEKQWTTRFQEDQVCT

SEQ ID NO: 41732 - protein, 250 aa, Homo sapiens
MLPAVGSADEEEDPAEEDCPELVPIETTQSEEEEKSGLGAKIPVTIITGYLGAGKTTLLNYILTEQHSKRVAVILNEFGEGSALEKSLAVSQGGELYEEWLELRNGCLCCSVKDSGLRAIENLMQKKGKFDYILLETTGLADPGAVASMFWVDAELGSDIYLDGIITIVDSKYGLKHLTEEKPDGLINEATRQVALADAILINKTDLVPEEDVKKLRTTIRYEMISVLSAYRSMLYTQNIFYSDCCPVET

SEQ ID NO: 41733 - protein, 77 aa, Homo sapiens
MYFKRAARAFPVLLTGAGKTTLLNYILTEQHSKRVAVILNEFGEGSALEKSLAVSQGGELYEEWLELRNGCLCCSVK

SEQ ID NO: 41734 - protein, 113 aa, Homo sapiens
MLPAVGSADEEEDPAEEDCPELVPIETTQSEEEEKSGLGAKIPVTIITGYLGAGKTTLLNYILTEQHSKRVAVILNEFGEGSALEKSLAVSQGGELYEEWLELRNGCLCCSVK

SEQ ID NO: 41735 - protein, 376 aa, Homo sapiens
MLPAVGSADEEEDPAEEDCPELVPIETTQSEEEEKSGLGAKIPVTIITGYLGAGKTTLLNYILTEQHSKRVAVILNEFGEGSALEKSLAVSQGGELYEEWLELRNGCLCCSVKDSGLRAIENLMQKKGKFDYILLETTGLADPGAVASMFWVDAELGSDIYLDGIITIVDSKYGLKHLTEEKPDGLINEATRQVALADAILINKTDLVPEEDVKKLRTTIRSINGLGQILETQRSSLQKKLQHVPGTQPHLDQSIVTITFEVPGNAKEEHLNMFIQNLLWEKNVRNKDNHCMEVIRLKGLVSIKDKSQQVIVQGVHELYDLEETPVSWKDDTERTNRLVLLGRNLDKDILKQLFIATVTETEKQWTTRFQEDQVCT

SEQ ID NO: 41736 - protein, 160 aa, Homo sapiens
MLPAVGSADEEEDPAEEDCPELVPIETTQSEEEEKSGLGAKIPVTIITGYLGAGKTTLLNYILTEQHSKRVAVILNEFGEGSALEKSLAVSQGGELYEEWLELRNGCLCCSVKDSGLRAIENLMQKKGKFDYILLETTGLADPGIITIVDSKYGLKVKYH

SEQ ID NO: 41737 - protein, 146 aa, Homo sapiens
MYFKRAARAFPVLLTGAGKTTLLNYILTEQHSKRVAVILNEFGEGSALEKSLAVSQGGELYEEWLELRNGCLCCSVKDSGLRAIENLMQKKGKFDYILLETTGLADPGAVASMFWVDAELGSDIYLDGIITIVDSKYGLKAKNWTT

SEQ ID NO: 41738 - protein, 395 aa, Homo sapiens
MLPAVGSADEEEDPAEEDCPELVPMETTQSEEEEKSGLGAKIPVTIITGYLGAGKTTLLNYILTEQHSKRVAVILNEFGEGSALEKSLAVSQGGELYEEWLELRNGCLCCSVKDNGLRAIENLMQKKGKFDYILLETTGLADPGAVASMFWVDAELGSDIYLDGIITIVDSKYGLKHLAEEKPDGLINEATRQVALADAILINKTDLVPEEDVKKLRATIRSINGLGQILETQRSRVDLSNVLDLHAFDSLSGISLQKKLQHVPGTQPHLDQSIVTITFEVPGNAKEEHLNMFIQNLLWEKNVRNKDNHCMEVIRLKGLVSIKDKSQQVIVQGVHELYDLEETPVSWKDDTERTNRLVLLGRNLDKDILKQLFIATVTETEKQWTTHFKEDQVCT

SEQ ID NO: 41739 - protein, 180 aa, Homo sapiens [sequence omitted]

SEQ ID NO: 41740 - protein, 376 aa, Homo sapiens
MLPAVGSADEEEDPAEEDCPELVPMETTQSEEEEKSGLGAKIPVTIITGYLGAGKTTLLNYILTEQHSKRVAVILNEFGEGSALEKSLAVSQGGELYEEWLELRNGCLCCSVKDNGLRAIENLMQKKGKFDYILLETTGLADPGAVASMFWVDAELGSDIYLDGIITIVDSKYGLKHLAEEKPDGLINEATRQVALADAILINKTDLVPEEDVKKLRATIRSINGLGQILETQRSSLQKKLQHVPGTQPHLDQSIVTITFEVPGNAKEEHLNMFIQNLLWEKNVRNKDNHCMEVIRLKGLVSIKDKSQQVIVQGVHELYDLEETPVSWKDDTERTNRLVLLGRNLDKDILKQLFIATVTETEKQWTTHFKEDQVCT

SEQ ID NO: 41741 - protein, 359 aa, Homo sapiens
MYFKRAARAFPVLLTGAGKTTLLNYILTEQHSKRVAVILNEFGEGSALEKSLAVSQGGELYEEWLELRNGCLCCSVKDNGLRAIENLMQKKGKFDYILLETTGLADPGAVASMFWVDAELGSDIYLDGIITIVDSKYGLKHLAEEKPDGLINEATRQVALADAILINKTDLVPEEDVKKLRATIRSINGLGQILETQRSRVDLSNVLDLHAFDSLSGISLQKKLQHVPGTQPHLDQSIVTITFEVPGNAKEEHLNMFIQNLLWEKNVRNKDNHCMEVIRLKGLVSIKDKSQQVIVQGVHELYDLEETPVSWKDDTERTNRLVLLGRNLDKDILKQLFIATVTETEKQWTTHFKEDQVCT

SEQ ID NO: 41742 - protein, 160 aa, Homo sapiens
MLPAVGSADEEEDPAEEDCPELVPMETTQSEEEEKSGLGAKIPVTIITGYLGAGKTTLLNYILTEQHSKRVAVILNEFGEGSALEKSLAVSQGGELYEEWLELRNGCLCCSVKDNGLRAIENLMQKKGKFDYILLETTGLADPGIITIVDSKYGLKVKYH

SEQ ID NO: 41743 - protein, 395 aa, Homo sapiens
MLPAVGSVDEEEDPAEEDCPELVPIETTQSEEEEKSGLGAKIPVTIITGYLGAGKTTLLNYILTEQHSKRVAVILNESGEGSALEKSLAVSQGGELYEEWLELRNGCLCCSVKDNGLRAIENLMQKKGKFDDILLETTGLADPGAVASMFWVDAELGSDIYLDGIITIVDSKYGLKHLTEEKPDGLINEATRQVALADIILINKTDLVPEEDVKKLRTTIRSINGLGQILETQRSRVDLSNVLDLHAFDSLSGISLQKKLQHVPGTQPHLDQSIVTITFEVPGNAKEEHLNMFIQNLLWEKNVRNKDNHCMEVIRLKGLVSIKDKSQQVIVQGVHELYDLEETPVSWKDDTERTNRLVLIGRNLDKDILKQLFIATVTETEKQWTTHFKEDQVCT

SEQ ID NO: 41744 - protein, 85 aa, Homo sapiens [sequence omitted]

SEQ ID NO: 41745 - protein, 85 aa, Homo sapiens [sequence omitted]

SEQ ID NO: 41746 - protein, 43 aa, Homo sapiens
MFIQNLLWEKNVRNKDNHCMEVIRLKVQFTVADFWTKSFSWLL

SEQ ID NO: 41747 - protein, 375 aa, Homo sapiens
MLPAVGSVDEEEDPAEEDCPELVPIETTQSEEEEKSGLGAKIPVTIITGYLGAGKTTLLNYILTEQHSKRVAVILNESGEGSALEKSLAVSQGGELYEEWLELRNGCLCCSVKDNGLRAIENLMQKKGKFDDILLETTGLADPGIITIVDSKYGLKHLTEEKPDGLINEATRQVALADIILINKTDLVPEEDVKKLRTTIRSINGLGQILETQRSRVDLSNVLDLHAFDSLSGISLQKKLQHVPGTQPHLDQSIVTITFEVPGNAKEEHLNMFIQNLLWEKNVRNKDNHCMEVIRLKGLVSIKDKSQQVIVQGVHELYDLEETPVSWKDDTERTNRLVLIGRNLDKDILKQLFIATVTETEKQWTTHFKEDQVCT

SEQ ID NO: 41748 - protein, 359 aa, Homo sapiens
MYFKRAPRAFPVLLTGAGKTTLLNYILTEQHSKRVAVILNESGEGSALEKSLAVSQGGELYEEWLELRNGCLCCSVKDNGLRAIENLMQKKGKFDDILLETTGLADPGAVASMFWVDAELGSDIYLDGIITIVDSKYGLKHLTEEKPDGLINEATRQVALADIILINKTDLVPEEDVKKLRTTIRSINGLGQILETQRSRVDLSNVLDLHAFDSLSGISLQKKLQHVPGTQPHLDQSIVTITFEVPGNAKEEHLNMFIQNLLWEKNVRNKDNHCMEVIRLKGLVSIKDKSQQVIVQGVHELYDLEETPVSWKDDTERTNRLVLIGRNLDKDILKQLFIATVTETEKQWTTHFKEDQVCT

SEQ ID NO: 41749 - protein, 77 aa, Homo sapiens
MYFKRAPRAFPVLLTGAGKTTLLNYILTEQHSKRVAVILNESGEGSALEKSLAVSQGGELYEEWLELRNGCLCCSVK

SEQ ID NO: 41750 - protein, 376 aa, Homo sapiens
MLPAVGSVDEEEDPAEEDCPELVPIETTQSEEEEKSGLGAKIPVTIITGYLGAGKTTLLNYILTEQHSKRVAVILNESGEGSALEKSLAVSQGGELYEEWLELRNGCLCCSVKDNGLRAIENLMQKKGKFDDILLETTGLADPGAVASMFWVDAELGSDIYLDGIITIVDSKYGLKHLTEEKPDGLINEATRQVALADIILINKTDLVPEEDVKKLRTTIRSINGLGQILETQRSSLQKKLQHVPGTQPHLDQSIVTITFEVPGNAKEEHLNMFIQNLLWEKNVRNKDNHCMEVIRLKGLVSIKDKSQQVIVQGVHELYDLEETPVSWKDDTERTNRLVLIGRNLDKDILKQLFIATVTETEKQWTTHFKEDQVCT

SEQ ID NO: 41751 - protein, 74 aa, Homo sapiens
MYFKRAPRAFPVLLTGAGKTTLLNYILTEQHSKRVAVILNESGEGSALEKSLAVSQGGELYEEWLELRNGCLCC

SEQ ID NO: 41752 - protein, 180 aa, Homo sapiens
MLPAVGSVDEEEDPAEEDCPELVPIETTQSEEEEKSGLGAKIPVTIITGYLGAGKTTLLNYILTEQHSKRVAVILNESGEGSALEKSLAVSQGGELYEEWLELRNGCLCCSVKDNGLRAIENLMQKKGKFDDILLETTGLADPGAVASMFWVDAELGSDIYLDGIITIVDSKYGLKVKYH

SEQ ID NO: 41753 - protein, 347 aa, Homo sapiens
MLPAVGSVDEEEDPAEEDCPELVPIETTQSEEEEKSGLGAKIPVTIITGYLGAGKTTLLNYILTEQHSKRVAVILNESGEGSALEKSLAVSQGGELYEEWLELRNGCLCCSVKDNGLRAIENLMQKKGKFDDILLETTGLADPGAVASMFWVDAELGSDIYLDGIITIVDSKYGLKHLTEEKPDGLINEATRSINGLGQILETQRSSLQKKLQHVPGTQPHLDQSIVTITFEVPGNAKEEHLNMFIQNLLWEKNVRNKDNHCMEVIRLKGLVSIKDKSQQVIVQGVHELYDLEETPVSWKDDTERTNRLVLIGRNLDKDILKQLFIATVTETEKQWTTHFKEDQVCT

SEQ ID NO: 41754 - protein, 328 aa, Homo sapiens
MLGSRAAGFARGLRAVALAWLPGWRGRSFALARAAGAPHGGDLQPPACPEPRGRQLSLSAAAVVDSAPRPLQPYLRLMRLDKPIGTWLLYLPCTWSIGLAAEPGCFPDWYMLSLFGTGAILMRGAGCTINDMWDQDYDKKVTRTANRPIAAGDISTFQSFVFLGGQLTLALGVLLCLNYYSIALGAGSLLLVITYPLMKRISYWPQLALGLTFNWGALLGWSAIKGSCDPSVCLPLYFSGVMWTLIYDTIYAHQDKRDDVLIGLKSTALRFGENTKPWLSGFSVAMLGALSLVGVNSGQTAPYYAALGAVGAHLTHQKWGLEILPRLV

SEQ ID NO: 41755 - protein, 421 aa, Homo sapiens
MTPISQVRMRKGSAHTAAQPGRLGLHPAGATAHACRGMTSIRARPGLTSAMLGSRAAGFARGLRAVALAWLPGWRGRSFALARAAGAPHGGDLQPPACPEPRGRQLSLSAAAVVDSAPRPLQPYLRLMRLDKPIGTWLLYLPCTWSIGLAAEPGCFPDWYMLSLFGTGAILMRGAGCTINDMWDQDYDKKVTRTANRPIAAGDISTFQSFVFLGGQLTLALGVLLCLNYYSIALGAGSLLLVITYPLMKRISYWPQLALGLTFNWGALLGWSAIKGSCDPSVCLPLYFSGVMWTLIYDTIYAHQDKRDDVLIGLKSTALRFGENTKPWLSGFSVAMLGALSLVGVNSGQTAPYYAALGAVGAHLTHQIYTLDIHRPEDCWNKFISNRTLGLIVFLGIVLGNLWKEKKTDKTKKGIENKIEN

SEQ ID NO: 41756 - protein, 384 aa, Homo sapiens
MTSIRARPGLTSAMLGSRAAGFARGLRAVALAWLPGWRGRSFALARAAGAPHGGDLQPPACPEPRGRQLSLSAAAVVDSAPRPLQPYLRLMRLDKPIGTWLLYLPCTWSIGLAAEPGCFPDWYMLSLFGTGAILMRGAGCTINDMWDQDYDKKVTRTANRPIAAGDISTFQSFVFLGGQLTLALGVLLCLNYYSIALGAGSLLLVITYPLMKRISYWPQLALGLTFNWGALLGWSAIKGSCDPSVCLPLYFSGVMWTLIYDTIYAHQDKRDDVLIGLKSTALRFGENTKPWLSGFSVAMLGALSLVGVNSGQTAPYYAALGAVGAHLTHQIYTLDIHRPEDCWNKFISNRTLGLIVFLGIVLGNLWKEKKTDKTKKGIENKIEN

SEQ ID NO: 41757 - protein, 265 aa, Homo sapiens
MATLLRPVLRRLCGLPGLQRPAAEMPLRARSDGAGPLYSHHLPTSPLQKGLLAAGSAAMALYNPYRHDMVAVLGETTGHRTLKVLRDQMRRDPEGAQILQERPRISTSTLDLGKLQSLPEGSLGREYLRFLDVNRVSPDTRAPTRFVDDEELAYVIQRYREVHDMLHTLLGMPTNILGEIVVKWFEAVQTGLPMCILGAFFGPIRLGAQSLQVLVSELIPWAVQNGRRAPCVLNLYYERRWEQSLRALREELGITAPPMHVQGLA

SEQ ID NO: 41758 - protein, 151 aa, Homo sapiens
MATLLRPVLRRLCGLPGLQRPAAEMPLRARSDGAGPLYSHHLPTSPLQKGLLAAGSAAMALYNPYRHDMVAVLGETTGHRTLKVLRDQMRRDPEGAQILQERPRISTSTLDLGKLQSLPEGSLGREYLRFLDVNVSFQLLCIWQSPDRTEE

SEQ ID NO: 41759 - protein, 217 aa, Homo sapiens
MSCAGAAAAPRLWRLRPGARRSLSAYGRRTSVRFRSSGMTLDNISRAAVDRIIRVDHAGEYGANRIYAGQMAVLGRTSVGPVIQKMWDQEKDHLKKFNELMVTFRVRPTVLMPLWNVLGFALGAGTALLGKEGAMACTVAVEESIAHHYNNQIRTLMEEDPEKYEELLQLIKKFRDEELEHHDIGLDHDAELAPAYAVLKSIIQAGCRVAIYLSERL

SEQ ID NO: 41760 - protein, 179 aa, Homo sapiens
MTLDNISRAAVDRIIRVDHAGEYGANRIYAGQMAVLGRTSVGPVIQKMWDQEKDHLKKFNELMVTFRVRPTVLMPLWNVLGFALGAGTALLGKEGAMACTVAVEESIAHHYNNQIRTLMEEDPEKYEELLQLIKKFRDEELEHHDIGLDHDAELAPAYAVLKSIIQAGCRVAIYLSERL

SEQ ID NO: 41761 - protein, 318 aa, Homo sapiens
MAAAAVSGALGRAGWRLLQLRCLPVARCRQALVPRAFHASAVGLRSSDEQKQQPPNSFSQQHSETQGAEKPDPESSHSPPRYTDQGGEEEEDYESEEQLQHRILTAALEFVPAHGWTAEAIAEGAQSLGLSSAAASMFGKDGSELILHFVTQCNTRLTRVLEEEQKLVQLGQAEKRKTDQFLRDAVETRLRMLIPYIEHWPRALSILMLPHNIPSSLSLLTSMVDDMWHYAGDQSTDFNWYTRRAMLAAIYNTTELVMMQDSSPDFEDTWRFLENRVNDAMNMGHTAKQVKSTGEALVQGLMGAAVTLKNLTGLNQRR

SEQ ID NO: 41762 - protein, 580 aa, Homo sapiens
MFAGLQDLGVANGEDLKETLTNCTEPLKAIEQFQTENGVLLPSLQSALPFLDLHGTPRLEFHQSVFDELRDKLLERVSAIASEGKAEERYKKLEDLLEKSFSLVKMPSLQPVVMCVMKHLPKVPEKKLKLVMADKELYRACAVEVKRQIWQDNQALFGDEVSPLLKQYILEKESALFSTELSVLHNFFSPSPKTRRQGEVVQRLTRMVGKNVKLYDMVLQFLRTLFLRTRNVHYCTLRAELLMSLHDLDVGEICTVDPCHKFTWCLDACIRERFVDSKRARELQGFLDGVKKGQEQVLGDLSMILCDPFAINTLALSTVRHLQELVGQETLPRDSPDLLLLLRLLALGQGAWDMIDSQVFKEPKMEVELITRFLPMLMSFLVDDYTFNVDQKLPAEEKAPVSYPNTLPESFTKFLQEQRMACEVGLYYVLHITKQRNKNALLRLLPGLVETFGDLAFGDIFLHLLTGNLALLADEFALEDFCSSLFDGFFLTASPRKENVHRHALRLLIHLHPRVAPSKLEALQKALEPTGQSGEAVKELYSQLGEKLEQLDHRKPSPAQAAETPALELPLPSVPAPAPL

SEQ ID NO: 41763 - protein, 166 aa, Homo sapiens
MASGVTVNDEVIKVFNDMKVRKSSTQEEIKKRKKAVLFCLSDDKRQIIVEEAKQILVGDIGDTVEDPYTSFVKLLPLNDCRYALYDATYETKESKKEDLVFIFWAPESAPLKSKMIYASSKDAIKKKFTGIKHEWQVNGLDDIKDRSTLGEKLGGNVVVSLEGKPL

SEQ ID NO: 41764 - protein, 166 aa, Homo sapiens; identical to SEQ ID NO: 41763

SEQ ID NO: 41765 - protein, 573 aa, Homo sapiens
MRRYDRGLKTLENLLASIRKGNAIDEADIPPPVAIGKGPASTPTYSPAPTQPAPRIASAPEPRVTLEGPSATAPASSPGLAKPQMPPGPCSPGPLAQLQSRQRDYKLAALHAKQQQLAFLEGRKKQLLQAALRAKQKNDVEGAKMHLRQAKGLEPMLEASRNGLPVDITKVPPAPVNKDDFALVQRPGPGLSQEAARRYGELTKLIRQQHEMCLNHSNQFTQLGNITETTKFEKLAEDCKRSMDILKQAFVRGLPTPTARFEQRTFSVIKIFPDLSSNDMLLFIVKGINLPTPPGLSPGDLDVFVRFDFPYPNVEEAQKDKTSVIKNTDSPEFKEQFKLCINRSHRGFRRAIQTKGIKFEVVHKGGLFKTDRVLGTAQLKLDALEIACEVREILEVLDGRRPTGGRLEVMVRIREPLTAQQLETTTERWLVIDPVPAAVPTVAGPKGKAPPVPAPARESGNRSARPLHSLSVLAFDQERLERKILALRQARRPVPPEVAQQYQDIMQRSQWQRAQLEQGGVGIRREYAAQLERQLQFYTEAARRLGNDGSRDAAKEALYRRNLVESELQRLRR

SEQ ID NO: 41766 - protein, 951 aa, Homo sapiens
MHKRKGPPGPPGRGAAAARQLGLLVDLSPDGLMIPEDGANDEELEAEFLALVGGQPPALEKLKGKGPLPMEAIEKMASLCMRDPDEDEEEGTDEDDLEADDDLLAELNEVLGEEQKASETPPPVAQPKPEAPHPGLETTLQERLALYQTAIESARQAGDSAKMRRYDRGLKTLENLLASIRKGNAIDEADIPPPVAIGKGPASTPTYSPAPTQPAPRIASAPEPRVTLEGPSATAPASSPGLAKPQMPPGPCSPGPLAQLQSRQRDYKLAALHAKQQGDTTAAARHFRVAKSFDAVLEALSRGEPVDLSCLPPPPDQLPPDPPSPPSQPPTPATAPSTTEVPPPPRTLLEALEQRMERYQVAAAQAKSKGDQRKARMHERIVKQYQDAIRAHKAGRAVDVAELPVPPGFPPIQGLEATKPTQQSLVGVLETAMKLANQDEGPEDEEDEVPKKQNSPVAPTAQPKAPPSRTPQSGSAPTAKAPPKATSTRAQQQLAFLEGRKKQLLQAALRAKQKNDVEGAKMHLRQAKGLEPMLEASRNGLPVDITKVPPAPVNKDDFALVQRPGPGLSQEAARRYGELTKLIRQQHEMCLNHSNQFTQLGNITETTKFEKLAEDCKRSMDILKQAFVRGLPTPTARFEQRTFSVIKIFPDLSSNDMLLFIVKGINLPTPPGLSPGDLDVFVRFDFPYPNVEEAQKDKTSVIKNTDSPEFKEQFKLCINRSHRGFRRAIQTKGIKFEVVHKGGLFKTDRVLGTAQLKLDALEIACEVREILEVLDGRRPTGGRLEVMVRIREPLTAQQLETTTERWLVIDPVPAAVPTQVAGPKGKAPPVPAPARESGNRSARPLHSLSVLAFDQERLERKILALRQARRPVPPEVAQQYQDIMQRSQWQRAQLEQGGVGIRREYAAQLERQLQFYTEAARRLGNDGSRDAAKEALYRRNLVESELQRLRR

SEQ ID NO: 41767 - protein, 236 aa, Homo sapiens
WHSPDGLMIPEDGANDEELEAEFLALVGGQPPALEKLKGKGPLPMEAIEKMASLCMRDPDEDEEEGTDEDDLEADDDLLAELNEVLGEEQKASETPPPVAQPKPEAPHPGLETTLQERLALYQTAIESARQAGDSAKMRRYDRGLKTLENLLASIRKGNAIDEADIPPPVAIGKGPASTPTYSPAPTQPAPRIASAPEPRVTLEGPSATAPASSPGLAKPQMPPGPCSPGPLAQLQ

SEQ ID NO: 41768 - protein, 371 aa, Homo sapiens
MPPGPCSPGPLAQLQSRQRDYKLAALHAKQQGDTTAAARHFRVAKSFDAVLEALSRGEPVDLSCLPPPPDQLPPDPPSPPSQPPTPATAPSTTEVPPPPRTLLEALEQRMERYQVAAAQAKSKGDQRKARMHERIVKQYQDAIRAHKAGRAVDVAELPVPPGFPPIQGLEATKPTQQSLVGVLETAMKLANQDEGPEDEEDEVPKKQNSPVAPTAQPKAPPSRTPQSGSAPTAKAPPKATSTRAQQQLAFLEGRKKQLLQAALRAKQKNDVEGAKMHLRQAKGLEPMLEASRNGLPVDITKVPPAPVNKDDFALVQRPGPGLSQEAARRYGELTKLIRQQHEMCLNHSNQFTQLGNITETTKANMVKPCFY

SEQ ID NO: 41769 - protein, 1512 aa, Homo sapiens
MVSEKSHLGNPQEPVQEEPKTRLLSMTVRRGPRSLPPIPSTSRTGFAEFSMRGRMREKLQAARSKAESALLQEIPTPRPRRLRSPSKKELETEFGTEPGKEVERTQQEVDSQSYSRVKFHDSARKIKPKPQVPPGFPSAEEAYNFFTFNFDPEPEGSEEKPKARHRAGTNQEEEEGEEEEPPAQGGGKEMDEEELLNGDDAEDFLLGLDHVADDFVAVRPADYESIHDRLQMEREMLFIPSRQTVPTYKKLPENVQPRFLEDEGLYTGVRPEVARTNQNIMENRLLMQDPERRWFGDDGRILALPNPIKPFPSRPPVLTQEQSIKAELETLYKKAVKYVHSSQHVIRSGDPPGNFQLDIDISGLIFTHHPCFSREHVLAAKLAQLYDQYLARHQRNKAKFLTDKLQALRNAVQTGLDPEKPHQSLDTIQKTINEYKSEIRQTRKFRDAEQEKDRTLLKTIIKVWKEMKSLREFQRFTNTPLKLVLRKEKADQKADEEAYEAEIQAEISELLEEHTEEYAQKMEEYRTSLQQWKAWRKVQRAKKKKRKQAAEEHPGDEIAEPYPEEDLVKPSPPEPTDRAVIEQEVRERAAQSRRRPWEPTLVPELSLAGSVTPNDQCPRAEVSRREDVKKRSVYLKVLFNNKEVSRTVSRPLGADFRVHFGQIFNLQIVNWPESLTLQVYETVGHSSPTLLAEVFLPIPETTVVTGRAPTEEVEFSSNQHVTLDHEGVGSGVPFSFEADGSNQLTLMTSGKVSHSVAWAIGENGIPLIPPLSQQNIGFRSALKKADAISSIGTSGLTDMKKLAKWAAESKLDPNDPNNAPLMQLISVATSGESYVPDFFRLEQLQQEFNFVSDQELNRSKRFRLLHLRSQEVPEFRNYKQVPVYDREIMEKVFQDYEKRLRDRNVIETKEHIDTHRAIVAKYLQQVRESVINRFLIAKQYFLLADMIVEEEVPNISILGLSLFKLAEQKRPLRPRRKGRKKVTAQNLSDGDIKLLVNIVRAYDIPVRKPAVSKFQQPSRSSRMFSEKHAASPSTYSPTHNADYPLGQVLVRPFVEVSFQRTVCHTTTAEGPNPSWNEELELPFRAPNGDYSTASLQSVKDVVFINIFDEVLHDVLEDDRERGSGIHTRIERHWLGCVKMPFSTIYFQARFESQEDEKLLQATEKFQAECALKFPNRQCLTTVIDISGKTVFITRYLKPLNPPQELLNVYPNNLQATAELVARYVSLIPFLPDTVSFGGICDLWSTSDQFLDLLAGDEEEHAVLLCNYFLSLGKKAWLLMGNAIPEGPTAYVLTWEQGRYLIWNPCSGHFYGQFDTFCPLKNVGCLIGPDNIWFNIQRYESPLRINFDVTRPKLWKSFFSRSLPYPGLSSVQPEELIYQRSDKAAAAELQDRIEKILKEKIMDWRPRHLTRWNRYCTSTLRHFLPLLEKSQGEDVEDDHRAELLKQLGDYRFSGFPLHMPYSEVKPLIDAVYSTGVHNIDVPNVEFALAVYIHPYPKNVLSVWIYVASLIRNR

SEQ ID NO: 41770 - protein, 1620 aa, Homo sapiens
MNPREEKVKIITEEFIENDEDADMGRQNKNSKVRRQPRKKQPPTAVPKEMVSEKSHLGNPQEPVQEEPKTRLLSMTVRRGPRSLPPIPSTSRTGFAEFSMRGRMREKLQAARSKAESALLQEIPTPRPRRLRSPSKKELETEFGTEPGKEVERTQQEVDSQSYSRVKFHDSARKIKPKPQVPPGFPSAEEAYNFFTFNFDPEPEGSEEKPKARHRAGTNQEEEEGEEEEPPAQGGGKEMDEEELLNGDDAEDFLLGLDHVADDFVAVRPADYESIHDRLQMEREMLFIPSRQTVPTYKKLPENVQPRFLEDEGLYTGVRPEVARTNQNIMENRLLMQDPERRWFGDDGRILALPNPIKPFPSRPPVLTQEQSIKAELETLYKKAVKYVHSSQHVIRSGDPPGNFQLDIDISGLIFTHHPCFSREHVLAAKLAQLYDQYLARHQRNKAKFLTDKLQALRNAVQTGLDPEKPHQSLDTIQKTINEYKSEIRQTRKFRDAEQEKDRTLLKTIIKVWKEMKSLREFQRFTNTPLKLVLRKEKADQKADEEAYEAEIQAEISELLEEHTEEYAQKMEEYRTSLQQWKAWRKVQRAKKKKRKQAAEEHPGDEIAEPYPEEDLVKPSPPEPTDRAVIEQEVRERAAQSRRRPWEPTLVPELSLAGSVTPNDQCPRAEVSRREDVKKRSVYLKVLFNNKEVSRTVSRPLGADFRVHFGQIFNLQIVNWPESLTLQVYETVGHSSPTLLAEVFLPIPETTVVTGRAPTEEVEFSSNQHVTLDHEGVGSGVPFSFEADGSNQLTLMTSGKVSHSVAWAIGENGIPLIPPLSQQNIGFRSALKKADAISSIGTSGLTDMKKLAKWAAESKLDPNDPNNAPLMQLISVATSGESYVPDFFRLEQLQQEFNFVSDQELNRSKRFRLLHLRSQEVPEFRNYKQVPVYDREIMEKVFQDYEKRLRDRNVIETKEHIDTHRAIVAKYLQQVRESVINRFLIAKQYFLLADMIVEEEVPNISILGLSLFKLAEQKRPLRPRRKGRKKVTAQNLSDGDIKLLVNIVRAYDIPVRKPAVSKFQQPSRSSRMFSEKHAASPSTYSPTHNADYPLGQVLVRPFVEVSFQRTVCHTTTAEGPNPSWNEELELPFRAPNGDYSTASLQSVKDVVFINIFDEVLHDVLEDDRERGSGIHTRIERHWLGCVKMPFSTIYFQARIDGTFKIDIPPVLLGYSKERNMILERGFDSVRSLSEGSYITLFITIEPQLVPGESIREKFESQEDEKLLQATEKFQAECALKFPNRQCLTTVIDISGKTVFITRYLKPLNPPQELLNVYPNNLQATAELVARYVSLIPFLPDTVSFGGICDLWSTSDQFLDLLAGDEEEHAVLLCNYFLSLGKKAWLLMGNAIPEGPTAYVLTWEQGRYLIWNPCSGHFYGQFDTFCPLKNVGCLIGPDNIWFNIQRYESPLRINFDVTRPKLWKSFFSRSLPYPGLSSVQPEELIYQRSDKAAAAELQDRIEKILKEKIMDWRPRHLTRWNRYCTSTLRHFLPLLEKSQGEDVEDDHRAELLKQLGDYRFSGFPLHMPYSEVKPLIDAVYSTGVHNIDVPNVEFALAVYIHPYPKNVLSVWIYVASLIRNR

SEQ ID NO: 41771 - protein, 1620 aa, Homo sapiens; identical to SEQ ID NO: 41770

SEQ ID NO: 41772 - protein, 1512 aa, Homo sapiens; identical to SEQ ID NO: 41769

SEQ ID NO: 41773 - protein, 122 aa, Homo sapiens
MNPREEKVKIITEEFIENDEDADMGRQNKNSKVRRQPRKKQKPTPFSRACWQILPHLSAGVPLLGWEHPVQGKSFQATNCCPQGNGVRKIPPWQPPGACAGGAQDPPPEYDSPERPTERAGC

SEQ ID NO: 41774 - protein, 1620 aa, Homo sapiens; identical to SEQ ID NO: 41770

SEQ ID NO: 41775 - protein, 122 aa, Homo sapiens; identical to SEQ ID NO: 41773

SEQ ID NO: 41776 - protein, 1512 aa, Homo sapiens; identical to SEQ ID NO: 41769

SEQ ID NO: 41777 - protein, 122 aa, Homo sapiens; identical to SEQ ID NO: 41773

SEQ ID NO: 41778 - protein, 588 aa, Homo sapiens
MNPREEKVKIITEEFIENDEDADMGRQNKNSKVRRQPRKKQPPTAVPKEMVSEKSHLGNPQEPVQEEPKTRLLSMTVRRGPRSLPPIPSTSRTGFAEFSMRGRMREKLQAARSKAESALLQEIPTPRPRRLRSPSKKELETEFGTEPGKEVERTQQEVDSQSYSRVKFHDSARKIKPKPQVPPGFPSAEEAYNFFTFNFDPEPEGSEEKPKARHRAGTNQEEEEGEEEEPPAQGGGKEMDEEELLNGDDAEDFLLGLDHVADDFVAVRPADYESIHDRLQMEREMLFIPSRQTVPTYKKLPENVQPRFLEDEGLYTGVRPEVARTNQNIMENRLLMQDPERRWFGDDGRILALPNPIKPFPSRPPVLTQEQSIKAELETLYKKAVKYVHSSQHVIRSGDPPGNFQLDIDISGLIFTHHPCFSREHVLAAKLAQLYDQYLARHQRNKAKFLTDKLQALRNAVQTGLDPEKPHQSLDTIQKTINEYKSEIRQTRKFRDAEQEKDRTLLKTIIKVWKEMKSLREFQRFTNTPLKLVLRKEKADQKADEEAYEAEIQAEISELLEEHTEEYAQKMEEYRTSLQQWKAWRKVQ

SEQ ID NO: 41779 - protein, 111 aa, Homo sapiens
MNPREEKVKIITEEFIENDEDADMGRQNKNSKVRRQPRKKQPPTAVPKEMVSEKSHLGNPQEPVQEEPKTRLLSMTVRRGPRRELVVKKSLGRPGTVTHVCNPSTLEGRGG

SEQ ID NO: 41780 - protein, 293 aa, Homo sapiens
MALVSADSRIAELLTELHQLIKQTQEERSRSEHNLVNIQKTHERMQTENKISPYYRTKLRGLYTTAKADAEAECNILRKALDKIAEIKSLLEERRIAAKIAGLYNDSEPPRKTMRRGVLMTLLQQSAMTLPLWIGKPGDKPPPLCGAIPASGDYVARPGDKVAARVKAVDGDEQWILAEVVSYSHATNKYEVDDIDEEGKERHTLSRRRVIPLPQWKANPETDPEALFQKEQLVLALYPQTTCFYRALIHAPPQRPQDDYSVLFEDTSYADGYSPPLNVAQRYVVACKEPKKK

SEQ ID NO: 41781 - protein, 280 aa, Homo sapiens
MNDRSSRRRTMKDDETFEISIPFDEAPHLDPQIFYSLSPSRRNFEEPPEAASSALALMNSVKTQLHMALERNSWLQKRIEDLEEERDFLRCQLDKFISSARMEAEDHCRMKPGPRRMEGDSRGGAGGEASDPESAASSLSGASEEGSASERRRQKQKGGASRRRFGKPKARERQRVKDADGVLCRYKKILGTFQKLKSMSRAFEHHRVDRNTVALTTPIAELLIVAPEKLAEVGEFDPSKERLLEYSRRCFLALDDETLKKVQALKKSKLLLPITYRFKR

SEQ ID NO: 41782 - protein, 164 aa, Homo sapiens
MMLTQAPSSVVRSRNSRNHTVNSGGSCLSASTVAIPAINDSSAAMSACSTISAQPASSMDTQMHSPKKQERVNKRVIWGIEVAEELHWKGWELGKETTRNLVLKNRSLKLQKMKYRYQYKGSRTQCHSLEPRKQALFKTKQNKQKKPLTCHIKASECLKYVQYE

SEQ ID NO: 41783 - protein, 164 aa, Homo sapiens; identical to SEQ ID NO: 41782

SEQ ID NO: 41784 - protein, 1925 aa, Homo sapiens
MFTLTGCRLVEKTQKVENPSVSFASSFPLIPLLLRGKSVQKKQAESKSQIKLHTQSAPFGLCPKDMMLTQAPSSVVRSRNSRNHTVNSGGSCLSASTVAIPAINDSSAAMSACSTISAQPASSMDTQMHSPKKQERVNKRVIWGIEVAEELHWKGWELGKETTRNLVLKNRSLKLQKMKYRPPKTKFFFTVIPQPIFLSPGITLTLPIVFRPLEAKEYMDQLWFEKAEGMFCVGLRATLPCHRLICRPPSLQLPMCAVGDTTEAFFCLDNVGDLPTFFTWEFSSPFQMLPATGLLEPGQASQIKVTFQPLTAVIYEVQATCWYGAGSRQRSSIQLQAVAKCAQLLVSIKHKCPEDQDAEGFQKLLYFGSVAVGCTSERQIRLHNPSAVNAPFRIEISPDELAEDQAFSCPTAHGIVLPGEKKCVSVFFHPKTLDTRTVDYCSIMPSGCASKTLLKVVGFCRGPAVSLQHYCVNFSWVNLGERSEQPLWIENQSDCTAHFQFAIDCLESVFTIRPAFGTLVGKARMTLHCAFQPTHPIICFRRVACLIHHQDPLFLDLMGTCHSDSTKPAILKPQHLTWYRTHLARGLTLYPPDILDAMLKEKKLAQDQNGALMIPIQDLEDMPAPQYPYIPPMTEFFFDGTSDITIFPPPISVEPVEVDFGACPGPEAPNPVPLCLMNHTKGKIMVVWTRRSDCPFWVTPESCDVPPLKSMAMRLHFQPPHPNCLYTVELEAFAIYKVLQSYSNIEEDCTMCPSWCLTVRARGHSYFAGFEHHIPQYSLDVPKLFPAVSSGEPTYRSLLLVNKDCKLLTFSLAPQRGSDVILRPTSGLVAPGAHQIILICTYPEGSSWKQHTFYLQCNASPQYLKEVSMYSREEPLQLKLDTHKSLYFKPTWVGCSSTSPFTFRNPSRLPLQFEWRVSEQHRKLLAVQPSRGLIQPNERLTLTWTFSPLEETKYLFQVGMWVWEAGLSPNANPAATTHYMLRLVGVGLTSSLSAKEKELAFGNVLVNSKQSRFLVLLNDGNCTLYYRLYLEQGSPEAVDNHPLALQLDRTEGSMPPRSQDTICLTACPKQRSQYSWTITYSLLSHRDNKAGEKQELCCVSLVAVYPLLSILDVSSMGSAEGITRKHLWRLFSLDLLNSYLERDPTPCELTYKVPTRHSMSQIPPVLTPLRLDFNFGAAPFKAPPSVVFLALKNSGVVSLDWAFLLPSDQRIDVELWAEQAELNSTELHQMRVQDNCLFSISPKAGSLSPGQEQMVELKYSHLFIGTDHLPVLFKVSHGREILLNFIGVTVKPEQKYVHFTSTTHQFIPIPIGDTLPPRQIYELYNGGSVPVTYEVQTDVLSQVQEKNFDHPIFCCLNPKGEIQPGSTARVLWIFSPIEAKTYTVDVPIHILGWNSALIHFQGVGYNPHMMGDTAPFHNISSWDNSSIHSRLVVPGQNVFLSQSHISLGNIPVQSKCSRLLFLNNISKNEEIAFSWQPSPLDFGEVSVSPMIGVVAPEETVPFVVTLRASVHASFYSADLVCKLYSQQLMRQYHKELQEWKDEKVRQEVEFTITDMKVKKRTCCTACEPARKYKTLPPIKNQQSVSRPASWKLQTPKEEVSWPCPQPPSPGMLCLGLTARAHATDYFLANFFSEFPCHFLHRELPKRKAPREESETSEEKSPNKWGPVSKQKKQLLVDILTTIIRGLLEDKNFHEAVDQSLVEQVPYFRQFWNEQSTKFMDQKNSLYLMPILPVPSSSWEDGKGKQPKEDRPEHYPGLGKKEEGEEEKGEEEEEELEEEEEEEEETEEEELGKEEIEEKEEERDEKEEKVSWAGIGPTPQPESQESMQWQWQQQLNVMVKEEQEQDEKEAIRRLPAFANLQEALLENMIQNILVEASRGEVVLTSRPRVIALPPFCVPRSLTPDTLLPTQQAEVLHPVVPLPTDLP

SEQ ID NO: 41785 - protein, 729 aa, Homo sapiens
MLTQAPSSVVRSRNSRNHTVNSGGSCLSASTVAIPAINDSSAAMSACSTISAQPASSMDTQMHSPKKQERVNKRVIWGIEVAEELHWKGWELGKETTRNLVLKNRSLKLQKMKYRPPKTKFFFTVIPQPIFLSPGITLTLPIVFRPLEAKEYMDQLWFEKAEGMFCVGLRATLPCHRLICRPPSLQLPMCAVGDTTEAFFCLDNVGDLPTFFTWEFSSPFQMLPATGLLEPGQASQIKVTFQPLTAVIYEVQATCWYGAGSRQRSSIQLQAVAKCAQLLVSIKHKCPEDQDAEGFQKLLYFGSVAVGCTSERQIRLHNPSAVNAPFRIEISPDELAEDQAFSCPTAHGIVLPGEKKCVSVFFHPKTLDTRTVDYCSIMPSGCASKTLLKVVGFCRGPAVSLQHYCVNFSWVNLGERSEQPLWIENQSDCTAHFQFAIDCLESVFTIRPAFGTLVGKARMTLHCAFQPTHPIICFRRVACLIHHQDPLFLDLMGTCHSDSTKPAILKPQHLTWYRTHLARGLTLYPPDILDAMLKEKKLAQDQNGALMIPIQDLEDMPAPQYPYIPPMTEFFFDGTSDITIFPPPISVEPVEVDFGACPGPEAPNPVPLCLMNHTKGKIMVVWTRRSDCPFWVTPESCDVPPLKSMAMRLHFQPPHPNCLYTVELEAFAIYKVCARNEREECGVSARSLSGLVGWQEVTEGSFRLHPLRARLSLGWTVTPMSLSPPKLLA

SEQ ID NO: 41786 - protein, 1925 aa, Homo sapiens; identical to SEQ ID NO: 41784

SEQ ID NO: 41787 - protein, 1925 aa, Homo sapiens; identical to SEQ ID NO: 41784

SEQ ID NO: 41788 - protein, 271 aa, Homo sapiens
MTLHCAFQPTHPIICFRRVACLIHHQDPLFLDLMGTCHSDSTKPAILKPQHLTWYRTHLARGLTLYPPDILDAMLKEKKLAQDQNGALMIPIQDLEDMPAPQYPYIPPMTEFFFDGTSDITIFPPPISVEPVEVDFGACPGPEAPNPVPLCLMNHTKGKIMVVWTRRSDCPFWVTPESCDVPPLKSMAMRLHFQPPHPNCLYTVELEAFAIYKVCARNEREECGVSARSLSGLVGWQEVTEGSFRLHPLRARLSLGWTVTPMSLSPPKLLA

SEQ ID NO: 41789 - protein, 180 aa, Homo sapiens
MAALDLRAELDSLVLQLLGDLEELEGKRTVLNARVEEGWLSLAKARYAMGAKSVGPLQYASHMEPQVCLHASEAQEGLQKFKVVRAGVHAPEEVGPREAGLRRRKGPTKTPEPESSEAPQDPLNWFGILVPHSLRQAQASFRDGLQLAADIASLQNRIDWGRSQLRGLQEKLKQLEPGAA

SEQ ID NO: 41790 - protein, 188 aa, Homo sapiens
MGTPLDGGSRVPIGCPAKLRRVTRKKVAPDLEGWLSLAKARYAMGAKSVGPLQYASHMEPQVCLHASEAQEGLQKFKVVRAGVHAPEEVGPREAGLRRRKGPTKTPEPESSEAPQDPLNWFGILVPHSLRQAQASFRDGVLEAKKRKCFLERVIQCVVSPAAEQEAEDESCPEDWAAAVPAETSAKAI

SEQ ID NO: 41791 - protein, 284 aa, Homo sapiens
MSDNKERKSQGFPKEDNQDTSSLADAVEKVAKQQQSQASEIEKNKKVLFNLKNELHELEKEIAAISAETKETERQIYQQDSAIENTKLHCDSLETQIKSLHSENVKLKFDIETAQEDFEEHMIKYNAYYAKIKAHKNSLGEVESKWSFMTELHEKRDFVKKLKTMKEELMQDLQNPGGNRITQVQEDITNLKDKIITVKESIIEKTCFLEEEKKTHEKLRKEIESLAPSPRLECSSAISAHCKLCLPGSRHSPASASGVAGTTGACHHTQLIFCIFSRDGVSPC

SEQ ID NO: 41792 - protein, 273 aa, Homo sapiens
MSDNKERKSQGFPKEDNQDTSSLADAVEKVAKQQQSQASEIEKNKKVLFNLKNELHELEKEIAAISAETKETERQIYQQDSAIENTKLHCDSLETQIKSLHSENVKLKFDIETAQEDFEEHMIKYNAYYAKIKAHKNSLGEVESKWSFMTELHEKRDFVKKLKTMKEELMQDLQNPGGNRITQVQEDITNLKDKIITVKESIIEKTCFLEEEKKTHEKLRKEIEVQHKRYDAILKRLHCQVNKLQSNRRQWQWNIQQLEKTAAELRKCIGMQE

SEQ ID NO: 41793 - protein, 511 aa, Homo sapiens
MSKVARSSSESDVQLWETEEDDMTEGDLGYGLGRKPGGIYEIEFSHRSRKRSDGKNFSPPPFPRKGEERNEASFQYSKHKSQQDTFPQVSRISNYRRQSSTVDSNSELSNEELRQCLNETLEEVEMLKTELEASQRQLRGKEEALKILQSMAILGKATSHTQAVLQKTMEQNRSLEKEINALQWEIEFDHNRFKNIEESWIQKYDRLNCENAVLKENLKVKTEEIKMLKSDNAVLNQRYLEALAMLDIKQQKMAQENMCCDKSGFAEASGLELAVLGACLCHGPGGNPCSCARMAASTRKLLLQLKQELEILQKSKEEAYVMADAFRIAFEQQLMRKNDQALQLTQMDKMHKKATKWMNWKHLKEDGFPSPRSKKTFGQRLLGMLPSENSSKRMEDQDSPQEVLKMLIDLLNDKEEALAHQRKVSYMLARALEDKDTASNENKEKNPIKENFPFNNPWRKTSEFSVLGDPIHSSVCILNSVGCICSIQHSQIDPNYRTLKRSHSLPSSIIF

SEQ ID NO: 41794 - protein, 511 aa, Homo sapiens; identical to SEQ ID NO: 41793

SEQ ID NO: 41795 - protein, 386 aa, Homo sapiens
MLKTELEASQRQLRGKEEALKILQSMAILGKATSHTQAVLQKTMEQNRSLEKEINALQWEIEFDHNRFKNIEESWIQKYDRLNCENAVLKENLKVKTEEIKMLKSDNAVLNQRYLEALAMLDIKQQKMAQENMCCDKSGFAEASGLELAVLGACLCHGPGGNPCSCARMAASTRKLLLQLKQELEILQKSKEEAYVMADAFRIAFEQQLMRKNDQALQLTQMDKMHKKATKWMNWKHLKEDGFPSPRSKKTFGQRLLGMLPSENSSKRMEDQDSPQEVLKMLIDLLNDKEEALAHQRKVSYMLARALEDKDTASNENKEKNPIKENFPFNNPWRKTSEFSVLGDPIHSSVCILNSVGCICSIQHSQIDPNYRTLKRSHSLPSSIIF

SEQ ID NO: 41796 - protein, 1154 aa, Homo sapiens
MQAMEGEVLLPALYEEEEEEEEEEEEVEEEEEQVQKGGSVGSLSVNKHRGLSLTETELEELRAQVLQLVAELEETRELAGQHEDDSLELQGLLEDERLASAQQAEVFTKQIQQLQGELRSLREEISLLEHEKESELKEIEQELHLAQAEIQSLRQAAEDSATEHESDIASLQEDLCRMQNELEDMERIRGDYEMEIASLRAEMEMKSSEPSGSLGLSDYSGLQEELQELRERYHFLNEEYRALQESNSSLTGQLADLESERTQRATERWLQSQTLSMTSAESQTSEMDFLEPDPEMQLLRQQLRDAEEQMHGMKNKCQELCCELEELQHHRQVSEEEQRRLQRELKCAQNEVLRFQTSHSVTQNEELKSRLCTLQKKYDTSQDEQNELLKMQLQLQTELRQLKVMKSTLVENQSEKELLCRLQKLHLQHQNVTCEKEKLLERQQQLQEELQCHEAELQHLRDTVASFKESNEKDTETHAQLQEMKQLYQASKDELERQKHMYDQLEQDLLLCQLELKELKASHPIPEDKGKCANKCDTLLSRLTELQEKYKASQKEMGQLQMEQCELLEDQRRMQEEQGQLQEELHRLTLPLPKSGLLLKSQELLTKLEDLCELQLLYQGMQEEQKKLIQNQDCVLKEQLEIHEELRRFKESHFQEVLENPDDSKLAKSSKCNRNKQSKLLMEQMQALQVMYDAGQAKQELLQQEQGRLLEERKRLQADLQLCLEEMQLLQVQSPSIKMSLESYGKSYGSMVPSNENCRKTYDTTVDDNESYYKSYTSTQTSSKSFLKSYDSSTSASEAYGKSYCTTSNSSITYKKSYGSTSSSDTCQKSFVSSCTDEEPAEPEDMERFEEMVVKVLIKLQAVQAMYQISQEEHSQLQEQMEKLLAKQKDLKEELDACEREFKECMECLEKPMAPQNDKNEIKELQTKLRELQLQYQASMDEQGRLLVVQEQLEGQLQCCQEELRQLREKRPSVVKEARGKNANKNMNKNANGVKMKKVTKPCSDTSESDLETRKSLEVVLYYKASQRKLDGLAKEEEKKEEMEEEKKQVKEEAKEQCGDELVAEPADPEEAKSTEDQEENEEDKEEEEKEEDSEEEEDDADSSLESPEENNPLRLSESKKSSPTPNPPIFSLPLVGLVVISALLWCWWAETSS

SEQ ID NO: 41797 - protein, 957 aa, Homo sapiens
LRALEGEVLLPALYEEEEEEEEEEEEVEEEEEQVQKGGSVGSLSVNKHRGLSLTETELEELRAQVLQLVAELEETRELAGQHEDDSLELQGLLEDERLASAQQAEVFTKQIQQLQGELRSLREEISLLEHEKESELKEIEQELHLAQAEIQSLRQAAEDSATEHESDIASLQEDLCRMQNELEDMERIRGDYEMEIASLRAEMEMKSSEPSGSLGLSDYSGLQEELQELRERYHFLNEEYRALQESNSSLTGQLADLESERTQRATERWLQSQTLSMTSAESQTSEMDFLEPDPEMQLLRQQLRDAEEQMHGMKNKCQELCCELEELQHHRQVSEEEQRRLQRELKCAQNEVLRFQTSHSVTQNEELKSRLCTLQKKYDTSQDEQNELLKMQLQLQTELRQLKVMKSTLVENQSEKELLCRLQKLHLQHQNVTCEKEKLLERQQQLQEELQCHEAELQHLRDTVASFKESNEKDTETHAQLQEMKQLYQASKDELERQKHMYDQLEQDLLLCQLELKELKASHPIPEDKGKCANKCDTLLSRLTELQEKYKASQKEMGQLQMEQCELLEDQRRMQEEQGQLQEELHRLTLPLPKSGLLLKSQELLTKLEDLCELQLLYQGMQEEQKKLIQNQDCVLKEQLEIHEELRRFKESHFQEVLENPDDSKLAKSSKCNRNKQSKLLMEQMQALQVMYDAGQAKQELLQQEQGRLLEERKRLQADLQLCLEEMQLLQVQSPSIKMSLESYGKSYGSMVPSNENCRKTYDTTVDDNESYYKSYTSTQTSSKSFLKSYDSSTSASEAYGKSYCTTSNSSITYKKSYGSTSSSDTCQKSFVSSCTDEEPAEPEDMERFEEMVVKVLIKLQAVQAMYQISQEEHSQLQEQMEKLLAKQKDLKEELDACEREFKECMECLEKPMAPQNDKNENMFGLWKPMVFLAIAAVALYVLPNMRQQESEFCLME

SEQ ID NO: 41798 - protein, 434 aa, Homo sapiens
MEAGAGAGAGAAGWSCPGPGPTVTTLGSYEASEGCERKKGQRWGSLERRGMQAMEGEVLLPALYEEEEEEEEEEEEVEEEEEQVQKGGSVGSLSVNKHRGLSLTETELEELRAQVLQLVAELEETRELAGQHEDDSLELQGLLEDERLASAQQAEVFTKQIQQLQGELRSLREEISLLEHEKESELKEIEQELHLAQAEIQSLRQAAEDSATEHESDIASLQEDLCRMQNELEDMERIRGDYEMEIASLRAEMEMKSSEPSEELQELRERYHFLNEEYRALQESNSSLTGQLADLESERTQRATERWLQSQTLSMTSAESQTSEMDFLEPDPEMQLLRQQLRDAEEQMHGMKNKCQELCCELEELQHHRQVSEEEQRRLQRELKCAQNEVLRFQTSHSVTQSSPTPNPPIFSLPLVGLVVISALLWCWWAETSS

SEQ ID NO: 41799 - protein, 1157 aa, Homo sapiens
LRALEGEVLLPALYEEEEEEEEEEEEVEEEEEQVQKGGSVGSLSVNKHRGLSLTETELEELRAQVLQLVAELEETRELAGQHEDDSLELQGLLEDERLASAQQAEVFTKQIQQLQGELRSLREEISLLEHEKESELKEIEQELHLAQAEIQSLRQAAEDSATEHESDIASLQEDLCRMQNELEDMERIRGDYEMEIASLRAEMEMKSSEPSGSLGLSDYSGLQEELQELRERYHFLNEEYRALQESNSSLTGQLADLESERTQRATERWLQSQTLSMTSAESQTSEMDFLEPDPEMQLLRQQLRDAEEQMHGMKNKCQELCCELEELQHHRQVSEEEQRRLQRELKCAQNEVLRFQTSHSVTQNEELKSRLCTLQKKYDTSQDEQNELLKMQLQLQTELRQLKVMKSTLVENQSEKELLCRLQKLHLQHQNVTCEKEKLLERQQQLQEELQCHEAELQHLRDTVASFKESNEKDTETHAQLQEMKQLYQASKDELERQKHMYDQLEQDLLLCQLELKELKASHPIPEDKGKCANKCDTLLSRLTELQEKYKASQKEMGQLQMEQCELLEDQRRMQEEQGQLQEELHRLTLPLPKSGLLLKSQELLTKLEDLCELQLLYQGMQEEQKKLIQNQDCVLKEQLEIHEELRRFKESHFQEVLENPDDSKLAKSSKCNRNKQSKLLMEQMQALQVMYDAGQAKQELLQQEQGRLLEERKRLQADLQLCLEEMQLLQVQSPSIKMSLESYGKSYGSMVPSNENCRKTYDTTVDDNESYYKSYTSTQTSSKSFLKSYDSSTSASEAYGKSYCTTSNSSITYKKSYGSTSSSDTCQKSFVSSCTDEEPAEPEDMERFEEMVVKVLIKLQAVQAMYQISQEEHSQLQEQMEKLLAKQKDLKEELDACEREFKECMECLEKPMAPQNDKNEIKELQTKLRELQLQYQASMDEQGRLLVVQEQLEGQLQCCQEELRQLREKRPSVVKEARGKNANKNMNKNANGVKMKKVTKPCSDTSESDLETRKSLEVVLYYKASQRKLDGLAKEEEKKEEMEEEKKQVKEEAKEQCGDELVAEPADPEEAKSTEDQEENEEDKEEEEKEEDSEEEEDDADSSLESPEENNPLRLSESKKNMFGLWKPMVFLAIAAVALYVLPNMRQQESEFCLME

SEQ ID NO: 41800 - protein, 102 aa, Homo sapiens
MQAMEGEVLLPALYEEEEEEEEEEEEVEEEEEQVQKGGSVGSLSVNKHRGLSLTETELEELRAQVLQLVAELEETRELAGQHEDDSLELQGLLEDERLASAQ

SEQ ID NO: 41801 - protein, 446 aa, Homo sapiens
MEAGAGAGAGAAGWSCPGPGPTVTTLGSYEASEGCERKKGQRWGSLERRGMQAMEGEVLLPALYEEEEEEEEEEEEVEEEEEQVQKGGSVGSLSVNKHRGLSLTETELEELRAQVLQLVAELEETRELAGQHEDDSLELQGLLEDERLASAQQAEVFTKQIQQLQGELRSLREEISLLEHEKESELKEIEQELHLAQAEIQSLRQAAEDSATEHESDIASLQEDLCRMQNELEDMERIRGDYEMEIASLRAEMEMKSSEPSGSLGLSDYSGLQEELQELRERYHFLNEEYRALQESNSSLTGQLADLESERTQRATERWLQSQTLSMTSAESQTSEMDFLEPDPEMQLLRQQLRDAEEQMHGMKNKCQELCCELEELQHHRQVSEEEQRRLQRELKCAQNEVLRFQTSHSVTQSSPTPNPPIFSLPLVGLVVISALLWCWWAETSS

SEQ ID NO: 41802 - protein, 6 aa, Homo sapiens
MQAMEG

SEQ ID NO: 41803 - protein, 137 aa, Homo sapiens
MQAMEGEVLLPALYEEEEEEEEEEEEVEEEEEQVQKGGSVGSLSVNKHRGLSLTETELEELRAQVLQLVAELEETRELAGQHEDDSLELQGLLEDERLASAQQAEVFTKQIQQLQGELRSLREEISLLEHEKESELK

SEQ ID NO: 41804 - protein, 63 aa, Homo sapiens
MQAMEGEVLLPALYEEEEEEEEEEEEVEEEEEQVQKGGSVGSLSVNKHRGLSLTETELEELRA

SEQ ID NO: 41805 - protein, 289 aa, Homo sapiens
MAGAGRGAAVSRVQAGPGSPRRARGRQQVQPLGKQRPAPWPGLRSKEKKKVNCKPKNQDEQEIPFRLREIMRSRQEMKNPISNKKRKKAAQVTFRKTLEKEAKGEEPDIAVPKFKQRKGESDGAYIHRMQQEAQHVLFLSKNQAIRQPEVQAAPKEKSEQKKAKKAFQKRRLDKVRRKKEEKAADRLEQELLRDTVKFGEVVLQPPELTARPQRSVSKDQPGRRSQMLRMLLSPGGVSQPLTASLARQRIVEEERERAVQAYRALKQRQQQLHGERPHLTSRKKPEPQL

SEQ ID NO: 41806 - protein, 551 aa, Homo sapiens
MPLSTAGILSSSSAASNRSRNKARYRTKAVSSEVDESLFGDIKSPAQGQSDSPIVLLRDKHTLQKTLTALGLDRKPETIQLITRDMVRELIVPTEDPSGESLIISPEEFERIKWASHVLTREELEARDQAFKKEKEATMDAVMTRKKIMKQKEMVWNNNKKLSDLEEVAKERAQNLLQRANKLRMEQEEELKDMSKIILNAKCHAIRDAQILEKQQIQKELDTEEKRLDQMMEVERQKSIQRQEELERKRREERIRGRRQIVEQMEKNQEERSLLAEQREQEKEQMLEYMEQLQEEDLKDMERRQQQKLKMQAEIKRINDENQKQKAELLAQEKLADQMVMEFTKKKMAREAEFEAEQERIRREKEKEIARLRAMQEKAQDYQAEQDALRAKRNQEVADREWRRKEKENARKKMETEAELRKSRLEQVAFKEHALAVQVQRDRDEFERILRAQREQIEKERLEEEKKATGRLQHANELRRQVRENQQKEVQNRIATFEEGRRLKEEAQKRRERIDEIKRKKLEELRATGLPEKYCIEAERKANILPATSVN

SEQ ID NO: 41807 - protein, 466 aa, Homo sapiens
MVRELIVPTEDPSGESLIISPEEFERIKWASHVLTREELEARDQAFKKEKEATMDAVMTRKKIMKQKEMVWNNNKKLSDLEEVAKERAQNLLQRANKLRMEQEEELKDMSKIILNAKCHAIRDAQILEKQQIQKELDTEEKRLDQMMEVERQKSIQRQEELERKRREERIRGRRQIVEQMEKNQEERSLLAEQREQEKEQMLEYMEQLQEEDLKDMERRQQQKLKMQAEIKRINDENQKQKAELLAQEKLADQMVMEFTKKKMAREAEFEAEQERIRREKEKEIARLRAMQEKAQDYQAEQDALRAKRNQEVADREWRRKEKENARKKMETEAELRKSRLEQVAFKEHALAVQVQRDRDEFERILRAQREQIEKERLEEEKKATGRLQHANELRRQVRENQQKEVQNRIATFEEGRRLKEEAQKRRERIDEIKRKKLEELRATGLPEKYCIEAERKANILPATSVN

SEQ ID NO: 41808 - protein, 627 aa, Homo sapiens
MEEADRILIHSLRQAGTAVPPDVQTLRAFTTELVVEAVVRCLRVINPAVGSGLSPLLPLAMSARFRLAMSLAQACMDLGYPLELGYQNFLYPSEPDLRDLLLFLAERLPTDASEDADQPAGDSAILLRAIGSQIRDQLALPWVPPHLRTPKLQHLQGSALQKPFHASRLVVPELSSRGEPREFQASPLLLPVPTQVPQPVGRVASLLEHHALQLCQQTGRDRPGDEDWVHRTSRLPPQEDTRAQRQRLQKQLTEHLRQSWGLLGAPIQARDLGELLQAWGAGAKTGAPKGSRFTHSEKFTFHLEPQAQATQVSDVPATSRRPEQVTWAAQEQELESLREQLEGVNRSIEEVEADMKTLGVSFVQAESECRHSKLSTAEREQALRLKSRAVELLPDGTANLAKLQLVVENSAQRVIHLAGQWEKHRVPLLAEYRHLRKLQDCRELESSRRLAEIQELHQSVRAAAEEARRKEEVYKQLMSELETLPRDVSRLAYTQRILEIVGNIRKQKEEITKILSDTKELQKEINSLSGKLDRTFAVTDELVFKDAKKDDAVRKAYKYLAALHENCSQLIQTIEDTGTIMREVRDLEEQIETELGKKTLSNLEKIREDYRALRQENAGLLGRVREA

SEQ ID NO: 41809 - protein, 580 aa, Homo sapiens
MEEADRILIHSLRQAGTAVPPDVQTLRAFTTELVVEAVVRCLRVINPAVGSGLSPLLPLAMSARFRLAMSLAQACMDLGYPLELGYQNFLYPSEPDLRDLLLFLAERLPTDASEDADQPAGDSAILLRAIGSQIRDQLALPWVPPHLRTPKLQHLQGSALQKPFHASRLVVPELSSRGEPREFQASPLLLPVPTQVPQPVGRVASLLEHHALQLCQQTGRDRPGDEDWVHRTSRLPPQEDTRAQRQRLQKQLTEHLRQSWGLLGAPIQARDLGELLQAWGAGAKTGAPKGSRFTHSEKFTFHLEPQAQATQVSDVPATSRRPEQVTWAAQEQELESLREQLEGVNRSIEEVEADMKTLGVSFVQAESECRHSKLSTAEREQALRLKSRAVELLPDGTANLAKLQLVVENSAQRVIHLAGQWEKHRVPLLAEYRHLRKLQDCRELESSRRLAEIQELHQSVRAAAEEARRKEEVYKQLMSELETLPRDVSRLAYTQRILEIVGNIRKQKEEITKILSDTKELQKEINSLSGKLDRTFAVTDELVFKDAKKDDAVRKAYKYLAALHFIGDGTVGWGPWIPNK

SEQ ID NO: 41810 - protein, 200 aa, Homo sapiens
MDDKKKKRSPKPCLAQPAQAPGTLRRVPVPTSHSGSLALGLPHLPSPKQRAKFKRVGKEKCRPVLAGGGSGSAGTPLQHSFLTEVTDVYEMEGGLLNLLNDFHSGRLQAFGKECSFEQLEHVREMQEKLARLHFSLDVCGEEEDDEEEEDGVTEGLPEEQKKTMADRNLDQLLSNLEDLSNSIQKLHLAENAEPEEQSAA

SEQ ID NO: 41811 - protein, 229 aa, Homo sapiens
MWAAGRWGPTFPSSYAGFSADCRPRSRPSSDSCSVPMTGARGQGLEVVRSPSPPLPLSCSNSTRSLLSPLGHQSFQFDEDDGDGEDEEDVDDEEDVDEDAHDSEAKVASLRGMELQGCASTQVESENNQEEQKQVRLPESRLTPWEVWFIGKEKEERDRLQLKALEELNQQLEKRKEMEEREKRKIIAEEKHKEWVQKKNEQVRRGKWIHTLTSLLQNISSYYTSLPRF

SEQ ID NO: 41812 - protein, 373 aa, Homo sapiens
MWAAGRWGPTFPSSYAGFSADCRPRSRPSSDSCSVPMTGARGQGLEVVRSPSPPLPLSCSNSTRSLLSPLGHQSFQFDEDDGDGEDEEDVDDEEDVDEDAHDSEAKVASLRGMELQGCASTQVESENNQEEQKQVRLPESRLTPWEVWFIGKEKEERDRLQLKALEELNQQLEKRKEMEEREKRKIIAEEKHKEWVQKKNEQKRKEREQKINKEMEEKAAKELEKEYLQEKAKEKYQEWLKKKNAEECERKKKEKEKEKQQQAEIQEKKEIAEKKFQEWLENAKHKPRPAAKSYGYANGKLTGFYSGNSYPEPAFYNPIPWKPIHMPPPKEAKDLSGRKSKRPVISQPHKSSSLVIHKARSNLCLGTLCRIQR

SEQ ID NO: 41813 - protein, 755 aa, Homo sapiens
MEYIFPNTGVLWSWLINILCNRRIVWFTSSQLPRGPPASSGGHSFHTLRERSESRLFVESYAAAWQPPGTSGGASCCSSLSAQVMSSEFLAELHWEDGFAIPVANEENKLLEDQLSKLKDERASLQDELREYEERINSMTSHFKNVKQELSITQSLCKARERETESEEHFKAIAQRELGRVKDEIQRLENEMASILEKKSDKENGIFKATQKLDGLKCQMNWDQQALEAWLEESAHKDSDALTLQKYAQQDDNKIRALTLQLERLTLECNQKRKILDNELTETISAQLELDKAAQDFRKIHNERQELIKQWENTIEQMQKRDGDIDNCALELARIKQETREKENLVKEKIKFLESEIGNNTEFEKRISVADRKLLKCRTAYQDHETSRIQLKGELDSLKATVNRTSSDLEALRKNISKIKKDIHEETARLQKTKNHNEIIQTKLKEITEKTMSVEEKATNLEDMLKEEEKDVKEVDVQLNLIKGVLFKKAQELQTETMKEKAVLSEIEGTRSSLKHLNHQLQKLDFETLKQQEIMYSQDFHIQQVERRMSRLKGEINSEEKQALEAKIVELRKSLEEKKSTCGLLETQIKKLHNDLYFIKKAHSKNSDEKQSLMTKINELNLFIDRSEKELDKAKGFKQDLMIEDNLLKLEVKRTREMLHSKAEEVLSLEKRKQQLYTAMEERTEEIKVHKTMLASQIRYVDQERENISTEFRERLSKIEKLKNRYEILTVVMLPPEGEEEKTQAYYVIKVMSMS

SEQ ID NO: 41814 - protein, 941 aa, Homo sapiens
MSSEFLAELHWEDGFAIPVANEENKLLEDQLSKLKDERASLQDELREYEERINSMTSHFKNVKQELSITQSLCKARERETESEEHFKAIAQRELGRVKDEIQRLENEMASILEKKSDKENGIFKATQKLDGLKCQMNWDQQALEAWLEESAHKDSDALTLQKYAQQDDNKIRALTLQLERLTLECNQKRKILDNELTETISAQLELDKAAQDFRKIHNERQELIKQWENTIEQMQKRDGDIDNCALELARIKQETREKENLVKEKIKFLESEIGNNTEFEKRISVADRKLLKCRTAYQDHETSRIQLKGELDSLKATVNRTSSDLEALRKNISKIKKDIHEETARLQKTKNHNEIIQTKLKEITEKTMSVEEKATNLEDMLKEEEKDVKEVDVQLNLIKGVLFKKAQELQTETMKEKAVLSEIEGTRSSLKHLNHQLQKLDFETLKQQEIMYSQDFHIQQVERRMSRLKGEINSEEKQALEAKIVELRKSLEEKKSTCGLLETQIKKLHNDLYFIKKAHSKNSDEKQSLMTKINELNLFIDRSEKELDKAKGFKQDLMIEDNLLKLEVKRTREMLHSKAEEVLSLEKRKQQLYTAMEERTEEIKVHKTMLASQIRYVDQERENISTEFRERLSKIEKLKNRYEILTVVMLPPEGEEEKTQAYYVIKAAQEKEELQREGDCLDAKINKAEKEIYALENTLQVLNSCNNNYKQSFKKVTPSSDEYELKIQLEEQKRAVDEKYRYKQRQIRELQEDIQSMENTLDVIEHLANNVKEKLSEKQAYSFQLSKETEEQKPKLERVTKQCAKLTKEIRLLKDTKDETMEEQDIKLREMKQFHKVIDEMLVDIIEENTEIRIILQTYFQQSGLELPTASTKGSRQSSRSPSHTSLSARSSRSTSTSTSQSSIKVLELKFPASSSLVGSPSRPSSASSSSSNVKSKKSSK

SEQ ID NO: 41815 - protein, 579 aa, Homo sapiens
MAEPGGAAGRSHPEDGSASEGEKEGNNESHMVSPPEKDDGQKGEEAVGSTEHPEEVTTQAEAAIEEGEVETEGEAAVEGEEEAVSYGDAESEEEYYYTETSSPEGQISAADTTYPYFSPPQELPGEEAYDSVSGEAGLQGFQQEATGPPESRERRVTSPEPSHGVLGPSEQMGQVTSGPAVGRLTGSTEEPQGQVLPMGVQHRFRLSHGSDIESSDLEEFVSQEPVIPPGVPDAHPREGDLPVFQDQIQQPSTEEGAMAERVESEGSDEEAEDEGSQLVVLDPDHPLMVRFQAALKNYLNRQIEKLKLDLQELVVATKQSRAQRQELGVNLYEVQQHLVHLQKLLEKSHDRHAMASSERRQKEEELQAARALYTKTCAAANEERKKLAALQTEMENLALHLFYMQNIDQDMRDDIRVMTQVVKKAETERIRAEIEKKKQDLYVDQLTTRAQQLEEDIALFEAQYLAQAEDTRILRKAVSEACTEIDAISVEKRRIMQQWASSLVGMKHRDEAHRAVLEALSVSLERFPSQNINTARSRLSTTWHSAGILLRGSFLPGASRAFASVCYGGAAVDNRIREC

SEQ ID NO: 41816 - protein, 478 aa, Homo sapiens
MAEPGGAAGRSHPEDGSASEGEKEGNNESHMVSPPEKDDGQKGEEAVGSTEHPEEVTTQAEAAIEEGEVETEGEAAVEGEEEAVSYGDAESEEEYYYTETSSPEGQISAADTTYPYFSPPQELPGEEAYDSVSGEAGLQGFQQEATGPPESRERRVTSPEPSHGVLGPSEQMGQVTSGPAVGRLTGSTEEPQGQVLPMGVQHRFRLSHGSDIESSDLEEFVSQEPVIPPGVPDAHPREGDLPVFQDQIQQPSTEEGAMAERVESEGSDEEAEDEGSQLVVLDPDHPLMVRFQAALKNYLNRQIEKLKLDLQELVVATKQSRAQRQELGVNLYEVQQHLVHLQKLLEKSHDRHAMASSERRQKEEELQAARALYTKTCAAANEERKKLAALQTEMENLALHLFYMQNIDQDMRDDIRVMTQVVKKAETERIRAEIEKKKQGVGDTGAAFIPKTTQGDQVSGRGKKKPGTVVARVSPAEL

SEQ ID NO: 41817 - protein, 1030 aa, Homo sapiens
MAEPGGAAGRSHPEDGSASEGEKEGNNESHMVSPPEKDDGQKGEEAVGSTEHPEEVTTQAEAAIEEGEVETEGEAAVEGEEEAVSYGDAESEEEYYYTETSSPEGQISAADTTYPYFSPPQELPGEEAYDSVSGEAGLQGFQQEATGPPESRERRVTSPEPSHGVLGPSEQMGQVTSGPAVGRLTGSTEEPQGQVLPMGVQHRFRLSHGSDIESSDLEEFVSQEPVIPPGVPDAHPREGDLPVFQDQIQQPSTEEGAMAERVESEGSDEEAEDEGSQLVVLDPDHPLMVRFQAALKNYLNRQIEKLKLDLQELVVATKQSRAQRQELGVNLYEVQQHLVHLQKLLEKSHDRHAMASSERRQKEEELQAARALYTKTCAAANEERKKLAALQTEMENLALHLFYMQNIDQDMRDDIRVMTQVVKKAETERIRAEIEKKKQDLYVDQLTTRAQQLEEDIALFEAQYLAQAEDTRILRKAVSEACTEIDAISVEKRRIMQQWASSLVGMKHRDEAHRAVLEALRGCQHQAKSTDGEIEAYKKSIMKEEEKNEKLASILNRTETEATLLQKLTTQCLTKQVALQSQFNTYRLTLQDTEDALSQDQLEQMILTEELQAIRQAIQGELELRRKTDAAIREKLQEHMTSNKTTKYFNQLILRLQKEKTNMMTHLSKINGDIAQTTLDITHTSSRLDAHQKTLVELDQDVKKVNELITNSQSEISRRTILIERKQGLINFLNKQLERMVSELGGEEVGPLELEIKRLSKLIDEHDGKAVQAQVTWLRLQQEMVKVTQEQEEQLASLDASKKELHIMEQKKLRVESKIEQEKKEQKEIEHHMKDLDNDLKKLNMLMNKNRCSSEELEQNNRVTENEFVRSLKASERETIKMQDKLNQLSEEKATLLNQLVEAEHQIMLWEKKIQLAKEMRSSVDSEIGQTEIRAMKGEIHRMKKYCRTTQDAHRHVHEQHGTHAGTCTKNTGRAQARARTTRDARGHVHEQHGTRAGTCTNNTGRAQARARTRDARRHVHEHRTHTARA

SEQ ID NO: 41818 - protein, 1142 aa, Homo sapiens
MAEPGGAAGRSHPEDGSASEGEKEGNNESHMVSPPEKDDGQKGEEAVGSTEHPEEVTTQAEAAIEEGEVETEGEAAVEGEEEAVSYGDAESEEEYYYTETSSPEGQISAADTTYPYFSPPQELPGEEAYDSVSGEAGLQGFQQEATGPPESRERRVTSPEPSHGVLGPSEQMGQVTSGPAVGRLTGSTEEPQGQVLPMGVQHRFRLSHGSDIESSDLEEFVSQEPVIPPGVPDAHPREGDLPVFQDQIQQPSTEEGAMAERVESEGSDEEAEDEGSQLVVLDPDHPLMVRFQAALKNYLNRQIEKLKLDLQELVVATKQSRAQRQELGVNLYEVQQHLVHLQKLLEKSHDRHAMASSERRQKEEELQAARALYTKTCAAANEERKKLAALQTEMENLALHLFYMQNIDQDMRDDIRVMTQVVKKAETERIRAEIEKKKQDLYVDQLTTRAQQLEEDIALFEAQYLAQAEDTRILRKAVSEACTEIDAISVEKRRIMQQWASSLVGMKHRDEAHRAVLEALRGCQHQAKSTDGEIEAYKKSIMKEEEKNEKLASILNRTETEATLLQKLTTQCLTKQVALQSQFNTYRLTLQDTEDALSQDQLEQMILTEELQAIRQAIQGELELRRKTDAAIREKLQEHMTSNKTTKYFNQLILRLQKEKTNMMTHLSKINGDIAQTTLDITHTSSRLDAHQKTLVELDQDVKKVNELITNSQSEISRRTILIERKQGLINFLNKQLERMVSELGGEEVGPLELEIKRLSKLIDEHDGKAVQAQVTWLRLQQEMVKVTQEQEEQLASLDASKKELHIMEQKKLRVESKIEQEKKEQKEIEHHMKDLDNDLKKLNMLMNKNRCSSEELEQNNRVTENEFVRSLKASERETIKMQDKLNQLSEEKATLLNQLVEAEHQIMLWEKKIQLAKEMRSSVDSEIGQTEIRAMKGEIHRMKVRLGQLLKQQEKMIRAMELAVARRETVTTQAEGQRKMDRKALTRTDFHHKQLELRRKIRDVRKATDECTKTVLELEETQRNVSSSLLEKQEKLSVIQADFDTLEADLTRLGALKRQNLSEIVALQTRLKHLQAVKEGRYVFLFRSKQSLVLERQRLDKRLALIATILDRVRDEYPQFQEALHKVSQMIANKLESPGPS

SEQ ID NO: 41819 - protein, 306 aa, Homo sapiens
MAEVSIDQSKLPGVKEVCRDFAVLEDHTLAHSLQEQEIEHHLASNVQRNRLVQHDLQVAKQLQEEDLKAQAQLQKRYKDLEQQDCEIAQEIQEKLAIEAERRRIQEKKDEDIARLLQEKELQEEKKRKKHFPEFPATRAYADSYYYEDGGMKPRVMKEAVSTPSRMAHRDQEWYDAEIARKLQEEELLATQVDMRAAQVAQDEEIARLLMAEEKKAYKKAKEREKSSLDKRKQDPEWKPKTAKAANSKSKESDEPHHSKNERPARPPPPIMTDGEDADYTHFTNQQSSTRHFSKSESSHKGFHYKH

SEQ ID NO: 41820 - protein, 482 aa, Homo sapiens
MAEVSIDQSKLPGVKEVCRDFAVLEDHTLAHSLQEQEIEHHLASNVQRNRLVQHDLQVAKQLQEEDLKAQAQLQKRYKDLEQQDCEIAQEIQEKLAIEAERRRIQEKKDEDIARLLQEKELQEEKKRKKHFPEFPATRAYADSYYYEDGDQPGSRRARELGSGFSRPCRLQRDGKTVKHKKEKPEHPLENLEEPEQHCSSKRSLSSSSSGKGRDNPHINNEQHERKRSTQERPRRPLLPTISGEVFLSTECDDWETKINHQTRNWEKQSRHQDRLSPKSSQKAGLHCKEVVYGRDHGQGEHRKRRHRPRTPPFSESEEQLHLHDAGMKPRVMKEAVSTPSRMAHRDQEWYDAEIARKLQEEELLATQVDMRAAQVAQDEEIARLLMAEEKKAYKKAKEREKSSLDKRKQDPEWKPKTAKAANSKSKESDEPHHSKNERPARPPPPIMTDGEDADYTHFTNQQSSTRHFSKSESSHKGFHYKH

SEQ ID NO: 41821 - protein, 474 aa, Homo sapiens
MADSASESDTDGAGGNSSSSAAMQSSCSSTSGGGGGGGGGGGGGKSGGIVISPFRLEELTNRLASLQQENKVLKIELETYKLKCKALQEENRDLRKASVTIQARAEQEEEFISNTLFKKIQALQKEKETLAVNYEKEEEFLTNELSRKLMQLQHEKAELEQHLEQEQEFQVNKLMKKIKKLENDTISKQLTLEQLRREKIDLENTLEQEQEALVNRLWKRMDKLEAEKRILQEKLDQPVSAPPSPRDISMEIDSPENMMRHIRFLKNEVERLKKQLRAAQLQHSEKMAQYLEEERHMREENLRLQRKLQREMERREALCRQLSESESSLEMDDERYFNEMSAQGLRPRTVSSPIPYTPSPSSSRPISPGLSYASHTVGFTPPTSLTRAGMSYYNSPGLHVQHMGTSHGITRPSPRRSNSPDKFKRPTPPPSPNTQTPVQPPPPPPPPPMQPTVPSAATSQPTPSQHSAHPSSQP

SEQ ID NO: 41822 - protein, 684 aa, Homo sapiens
MNPPAAFLAGRQNIGSEVEISTIEKQRKELQLLIGELKDRDKELNDMVAVHQQQLLSWEEDRQKVLTLEERCSKLEGELHKRTEIIRSLTKKVKALESNQMECQTALQKTQLQLQEMAQKATHSSLLSEDLEARNETLSNTLVELSAQVGQLQAREQALTTMIKLKDKDIIEAVNHIADCSGKFKMLEHALRDAKMAETCIVKEKQDYKQKLKALKIEVNKLKEDLNEKTTENNEQREEIIRLKQEKSCLHDELLFTVEREKRKDELLNIAKSKQERTNSELHNLRQIYVKQQSDLQFLNFNVENSQELIQMYDSKMEESKALDSSRDMCLSDLENNHPKVDIKREKNQKSLFKDQKFEAMLVQQNRSDKSSCDECKEKKQQIDTVFGEKSVITLSSIFTKDLVEKHNLPWSLGGKTQIEPENKITLCKIHTKSPKCHGTGVQNEGKQPSETPTLSDEKQWHDVSVYLGLTNCPSSKHPEKLDVECQDQMERSEISCCQKNEACLGESGMCDSKCCHPSNFIIEAPGHMSDVEWMSIFKPSKMQRIVRLKSGCTCSESICGTQHDSPASELIAIQDSHSLGSSKSALREDETESSSNKKNSPTSLLIYKDAPAFNEKASIVLPSQDDFSPTSKLQRLLAESRQMVTDLELSTLLPISHENLTGSATNKSEVPEESAQKNTFVSY

SEQ ID NO: 41823 - protein, 445 aa, Homo sapiens
MPNSSPKDPTTASGNGSKVEREKRKDELLNIAKSKQERTNSELHNLRQIYVKQQSDLQFLNFNVENSQELIQMYDSKMEESKALDSSRDMCLSDLENNHPKVDIKREKNQKSLFKDQKFEAMLVQQNRSDKSSCDECKEKKQQIDTVFGEKSVITLSSIFTKDLVEKHNLPWSLGGKTQIEPENKITLCKIHTKSPKCHGTGVQNEGKQPSETPTLSDEKQWHDVSVYLGLTNCPSSKHPEKLDVECQDQMERSEISCCQKNEACLGESGMCDSKCCHPSNFIIEAPGHMSDVEWMSIFKPSKMQRIVRLKSGCTCSESICGTQHDSPASELIAIQDSHSLGSSKSALREDETESSSNKKNSPTSLLIYKDAPAFNEKASIVLPSQDDFSPTSKLQRLLAESRQMVTDLELSTLLPISHENLTGSATNKSEVPEESAQKNTFVSY

SEQ ID NO: 41824 - protein, 682 aa, Homo sapiens
MNPPAAFLAGRQNIGSEVEISTIEKQRKELQLLIGELKDRDKELNDMVAVHQQQLLSWEEDRQKVLTLEERCSKLEGELHKRTEIIRSLTKKVKALESNQMECQTALQKTQLQLQEMAQKATHSSLLSEDLEARNETLSNTLVELSAQVGQLQAREQALTTMIKLKDKDIIEAVNHIADCSGKFKMLEHALRDAKMAETCIVKEKQDYKQKLKALKIEVNKLKEDLNEKTTENNEQREEIIRLKQEKSCLHDELLFTVEREKRKDELLNIAKSKQERTNSELHNLRQIYVKQQSDLQFLNFNVENSQELIQMYDSKMEESKALDSSRDMCLSDLENNHPKVDIKREKNQKSLFKDQKFEAMLVQQNRSDKSSCDECKEKKQQIDTVFGEKSVITLSSIFTKDLVEKHNLPWSLGGKTQIEPENKITLCKIHTKSPKCHGTGVQNEGKQPSETPTLSDEKQWHDVSVYLGLTNCPSSKHPEKLDVECQDQMERSEISCCQKNEACLGESGMCDSKCCHPSNFIIEAPGHMSDVEWMSIFKPSKMQRIVRLKSGCTCSESICGTQHDSPASELIAIQDSHSLGSSKSALREDETESSSNKKNSPTSLLIYKDAPAFNEKASIVLPSQDDFSPTSKLQRLLAESRQMVTDLELSTLLPISHENLTGSATNISHLCGRQKADTNTE

SEQ ID NO: 41825 - protein, 497 aa, Homo sapiens
MPKKEKMAKTPLSDEKQLLLFQQKLLAEEEMAKKKERLLSQFLKDKLAKEEHNSALNLNKINTQWRTVLREVKTRELHKDIEILSQTFERVVDCKDNVIKSLAKDLSEAEEQYAHALRSHLHNVDQLLALQRHRLSLLEESYNMELEALTKEFETERKTIIDQHEKEIHYLQDIFMAMEQNYIDSEYESKLEFQSMWNDLKNMNLEEKHFLRLHLENRVEDLWRKFQDVLKNYTDATEDRKAAFETLQVKDEKSSKEIEVQMKKIQKLQDAITISKGKIMIHSRESEDENRYIRNDKELVLVQLRKLKAQRTQARAASQKNLVRLTLESNATLKALRKIVDKGEKILKLAEICRKFETEEEKVLPFYSSVLTPKEQEGIQKNNLEELTEELTKVMVDYIGMENFWKRYNKVKLEQLSLQHRRAQLLDINGKLREMLKQYLDGISVSDEVLSQLNPLFIVNYQSNLLQPLSIRIAHPGSTSPSAPWRDQRRSFFLGSS

SEQ ID NO: 41826 - protein, 484 aa, Homo sapiens
MPKKEKMAKTPLSDEKQLLLFQQKLLAEEEMAKKKERLLSQFLKDKLAKEEHNSALNLNKINTQWRTVLREVKTRELHKDIEILSQTFERVVDCKDNVIKSLAKDLSEAEEQYAHALRSHLHNVDQLLALQRHRLSLLEESYNMELEALTKEFETERKTIIDQHEKEIHYLQDIFMAMEQNYIDSEYESKLEFQSMWNDLKNMNLEEKHFLRLHLENRVEDLWRKFQDVLKNYTDATEDRKAAFETLQVKDEKSSKEIEVQMKKIQKLQDAITISKGKIMIHSRESEDENRYIRNDKELVLVQLRKLKAQRTQARAASQKNLVRLTLESNATLKALRKIVDKGEKILKLAEICRKFETEEEKVLPFYSSVLTPKEQEGIQKNNLEELTEELTKVMVDYIGMENFWKRYNKVKLEQLSLQHRRAQLLDINGKLREMLKQYLDGISVSDEVLSQLNPLFIVNYQSNLLQPLSIRIAHPGDKQHPTT

SEQ ID NO: 41827 - protein, 1079 aa, Homo sapiens
MESNFNTESSSTFTLQSSSETLFSIQLLDFKTSLLEALEELRMRREAEIHYEEQIGKIIVETQELKWQKETLQNQKETLAEQHKEAMAVFKKQLQMKMCALEEEKGKYQLATEIKEKEIEGLKETLKALQVSKYSLQKKVSEMEQKVQLHLLAKEDYHKQLSEIEKYYATITGQFGLVKENHEKLEQNVREAIQSNKRLSALNKKQEAEICSLKKELKKAASDLIKSKVTCQYKMGEENINLTIKEQKFQELQERLNMELELNEKINEEITHIQEEKQDIIISFQHMQQLLRQQIQANTEMEAELKVLKENNQTLERDNELQREKVKENEEKFLNLQNEHEKALGTWKRHAEELNGEINKIKNELSSLKETHIKLQEHYNKLCNQKTFEEDKKFQNVPEVNNENSEMSTEKSENTIIQKYNTEQEIREENMENFCSDTEYREKEEKKEGSFIEEIIIDDLQLFEKSFKNEIDTVVSQDENQSEISLSKTLSLDKEVISQGQTSNVTDNRKSVTTEIKDKICLEKDNGCTEFKSPNNHFVVLDTAIETEKIHLERTRGLDVHHTDVNLEVENNKTSFNSILNETAHNTYHNNNKDVSENEPFKQFRLLPGTREHALEKEITNSDQTKADLDSSLDIKKNPVPCQKYSLRNSSNVMLDDKQCKIKQIQLLTKKSECSILLSKQTSDFLQVCNDTLEKSELTVPCDIVIDHHVSYAAFSANSKLLLKNSDKNVHSMSMLVKPNSSPGGKTMCKNMSDMQNSQFNNCLGYLENTNVNISHLHLNNENSHASQAKDVKTAVHMKTCTETEFSNKKNQIDENQVTEATKNDLFLFVSINERQHTLLNNTEKTESLNDIVSGKMFSEGQLEESHSFHIEPSGDLVNRSGRSTFDLSTSDKKTEKTPVYMNFSDPGPWSKVNHIESQTASSSTPCISLLLKERPLDPSENKKIISMALCKNIGVDDVGKDIGPDTTSINRVADTLNNWSIHPDPKGEPSEEKNAMAKTFYDSSFPTEHVKTKPLISTPLQSHLQAIKTTKNTSGDDDWQSLITNQLNKSENLLSLENDNQPKKRKAEETLEKNNRLK

SEQ ID NO: 41828 - protein, 538 aa, Homo sapiens
MLQIGEDVDYLLIPREVRLAGGVWRVISKPATKEAEFRERLTQFLEEEGRTLEDVARIMEKSTPHPPQPPKKPKEPRVRRRVQQMVTPPPRLVVGTYDSSNASDSEFSDFETSRDKSRQGPRRGKKVRKMPVSYLGSKFLGSDLESEDDEELVEAFLRRQEKQPSAPPARRRVNLPVPMFEDNLGPQLSKADRWREYVSQVSWGKLKRRVKGWAPRAGPGVGEARLASTAVESAGVSSAPEGTSPGDRLGNAGDVCVPQASPRRWRPKINWASFRRRRKEQTAPTGQGADIEADQGGEAADSQREEAIADQREGAAGNQRAGAPADQGAEAADNQREEAADNQRAGAPAEEGAEAADNQREEAADNQRAEAPADQRSQGTDNHREEAADNQRAEAPADQGSEVTDNQREEAVHDQRERAPAVQGADNQRAQARAGQRAEAAHNQRAGAPGIQEAEVSAAQGTTGTAPGARARKQVKTVRFQTPGRFSWFCKRRRAFWHTPRLPTLPKRVPRAGEARNLRVLRAEARAEAEQGEQEDQL

SEQ ID NO: 41829 - protein, 324 aa, Homo sapiens
MLQIGEDVDYLLIPREVRLAGGVWRVISKPATKEAEFRERLTQFLEEEGRTLEDVARIMEKSTPHPPQPPKKPKEPRVRRRVQQMVTPPPRLVVGTYDSSNASDSEFSDFETSRDKSRQGPRRGKKVRKMPVSYLGSKFLGSDLESEDDEELVEAFLRRQGLQVIRGQGPQLTRGQRLQIIRGKRLQIIRGQGPQLRRGQRLQITRGKRLQIIRGQRPQLTRGHRAQITTGKRLQIIRGRRPQLTRGQRLQIIKGKRPYMTRGKGPQLSRVQIIRGHRPGLARGQRLHIIRGQGPQVSRKLKSQLPKGPQEQLQEPGPGNRSRQ

SEQ ID NO: 41830 - protein, 1843 aa, Homo sapiens
MENEIFTPLLEQFMTSPLVTWVKTFGPLAAGNGTNLDEYVALVDGVFLNQVMLQINPKLESQRVNKKVNNDASLRMHNLSILVRQIKFYYQETLQQLIMMSLPNVLIIGKNPFSEQGTEEVKKLLLLLLGCAVQCQKKEEFIERIQGLDFDTKAAVAAHIQEVTHNQENVFDLQWMEVTDMSQEDIEPLLKNMALHLKRLIDERDEHSETIIELSEERDGLHFLPHASSSAQSPCGSPGMKRTESRQHLSVELADAKAKIRRLRQELEEKTEQLLDCKQELEQMEIELKRLQQENMNLLSDARSARMYRDELDALREKAVRVDKLESEVSRYKERLHDIEFYKARVEELKEDNQVLLETKTMLEDQLEGTRARSDKLHELEKENLQLKAKLHDMEMERDMDRKKIEELMEENMTLEMAQKQSMDESLHLGWELEQISRTSELSEAPQKSLGHEVNELTSSRLLKLEMENQSLTKTVEELRTTVDSVEGNASKILKMEKENQRLSKKVEILENEIVQEKQSLQNCQNLSKDLMKEKAQLEKTIETLRENSERQIKILEQENEHLNQTVSSLRQRSQISAEARVKDIEKENKILHESIKETSSKLSKIEFEKRQIKKELEHYKEKGERAEELENELHHLEKENELLQKKITNLKITCEKIEALEQENSELERENRKLKKTLDSFKNLTFQLESLEKENSQLDEENLELRRNVESLKCASMKMAQLQLENKELESEKEQLKKGLELLKASFKKTERLEVSYQGLDIENQRLQKTLENSNKKIQQLESELQDLEMENQTLQKNLEELKISSKRLEQLEKENKSLEQETSQLEKDKKQLEKENKRLRQQAEIKDTTLEENNVKIGNLEKENKTLSKEIGIYKESCVRLKELEKENKELVKRATIDIKTLVTLREDLVSEKLKTQQMNNDLEKLTHELEKIGLNKERLLHDEQSTDDSRYKLLESKLESTLKKSLEIKEEKIAALEARLEESTNYNQQLRQELKTVKKNYEALKQRQDEERMVQSSPPISGEDNKWERESQETTRELLKVKDRLIEVERNNATLQAEKQALKTQLKQLETQNNNLQAQILALQRQTVSLQEQNTTLQTQNAKLQVENSTLNSQSTSLMNQNAQLLIQQSSLENENESVIKEREDLKSLYDSLIKDHEKLELLHERQASEYESLISKHGTLKSAHKNLEVEHRDLEDRYNQLLKQKGQLEDLEKMLKVEQEKMLLENKNHETVAAEYKKLCGENDRLNHTYSQLLKETEVLQTDHKNLKSLLNNSKLEQTRLEAEFSKLKEQYQQLDITSTKLNNQCELLSQLKGNLEEENRHLLDQIQTLMLQNRTLLEQNMESKDLFHVEQRQYIDKLNELRRQKEKLEEKIMDQYKFYDPSPPRRRGNWITLKMRKLIKSKKDINRERQKSLTLTPTRSDSSEGFLQLPHQDSQDSSSVGSNSLEDGQTLGTKKSSTMNDLVQSMVLAGQWTGSTENLEVPDDISTGKRRKELGAMAFSTTAINFSTVNSSAGFRSKQLVNNKDTTSFEDISPQGVSDDSSTGSRVHASRPASLDSGRTSTSNSNNNASLHEVKAGAVNNQSRPQSHSSGEFSLLHDHEAWSSSGSSPIQYLKRQTRSSPVLQHKISETLESRHHKIKTGSPGSEVVTLQQFLEESNKLTSVQIKSSSQENLLDEVMKSLSVSSDFLGKDKPVSCGLARSVSGKTPGDFYDRRTTKPEFLRPGPRKTEDTYFISSAGKPTPGTQGKIKLVKESSLSRQSKDSNPYATLPRASSVISTAEGTTRRTSIHDFLTKDSRLPISVDSPPAAADSNTTAASNVDKVQESRNSKSRSREQQSS

SEQ ID NO: 41831 - protein, 1870 aa, Homo sapiens
MENEIFTPLLEQFMTSPLVTWVKTFGPLAAGNGTNLDEYVALVDGVFLNQVMLQINPKLESQRVNKKVNNDASLRMHNLSILVRQIKFYYQETLQQLIMMSLPNVLIIGKNPFSEQGTEEVKKLLLLLLGCAVQCQKKEEFIERIQGLDFDTKAAVAAHIQEVTHNQENVFDLQWMEVTDMSQEDIEPLLKNMALHLKRLIDERDEHSETIIELSEERDGLHFLPHASSSAQSPCGSPGMKRTESRQHLSVELADAKAKIRRLRQELEEKTEQLLDCKQELEQMEIELKRLQQENMNLLSDARSARMYRDELDALREKAVRVDKLESEVSRYKERLHDIEFYKARVEELKEDNQVLLETKTMLEDQLEGTRARSDKLHELEKENLQLKAKLHDMEMERDMDRKKIEELMEENMTLEMAQKQSMDESLHLGWELEQISRTSELSEAPQKSLGHEVNELTSSRLLKLEMENQSLTKTVEELRTTVDSVEGNASKILKMEKENQRLSKKVEILENEIVQEKQSLQNCQNLSKDLMKEKAQLEKTIETLRENSERQIKILEQENEHLNQTVSSLRQRSQISAEARVKDIEKENKILHESIKETSSKLSKIEFEKRQIKKELEHYKEKGERAEELENELHHLEKENELLQKKITNLKITCEKIEALEQENSELERENRKLKKTLDSFKNLTFQLESLEKENSQLDEENLELRRNVESLKCASMKMAQLQLENKELESEKEQLKKGLELLKASFKKTERLEVSYQGLDIENQRLQKTLENSNKKIQQLESELQDLEMENQTLQKNLEELKISSKRLEQLEKENKSLEQETSQLEKDKKQLEKENKRLRQQAEIKDTTLEENNVKIGNLEKENKTLSKEIGIYKESCVRLKELEKENKELVKRATIDIKTLVTLREDLVSEKLKTQQMNNDLEKLTHELEKIGLNKERLLHDEQSTDDRYKLLESKLESTLKKSLEIKEEKIAALEARLEESTNYNQQLRQELKTVKKNYEALKQRQDEERMVQSSPPISGEDNKWERESQETTRELLKVKDRLIEVERNNATLQAEKQALKTQLKQLETQNNNLQAQILALQRQTVSLQEQNTTLQTQNAKLQVENSTLNSQSTSLMNQNAQLLIQQSSLENENESVIKEREDLKSLYDSLIKDHEKLELLHERQASEYESLISKHGTLKSAHKNLEVEHRDLEDRYNQLLKQKGQLEDLEKMLKVEQEKMLLENKNHETVAAEYKKLCGENDRLNHTYSQLLKETEVLQTDHKNLKSLLNNSKLEQTRLEAEFSKLKEQYQQLDITSTKLNNQCELLSQLKGNLEEENRHLLDQIQTLMLQNRTLLEQNMESKDLFHVEQRQYIDKLNELRRQKEKLEEKIMDQYKFYDPSPPRRRGNWITLKMRKLIKSKKDINRERQKSLTLTPTRSDSSEGFLQLPHQDSQDSSSVGSNSLEDGQTLGTKKSSMVALKRLPFLRNRPKDKDKMKACYRRSMSMNDLVQSMVLAGQWTGSTENLEVPDDISTGKRRKELGAMAFSTTAINFSTVNSSAGFRSKQLVNNKDTTSFEDISPQGVSDDSSTGSRVHASRPASLDSGRTSTSNSNNNASLHEVKAGAVNNQSRPQSHSSGEFSLLHDHEAWSSSGSSPIQYLKRQTRSSPVLQHKISETLESRHHKIKTGSPGSEVVTLQQFLEESNKLTSVQIKSSSQENLLDEVMKSLSVSSDFLGKDKPVSCGLARSVSGKTPGDFYDRRTTKPEFLRPGPRKTEDTYFISSAGKPTPGTQGKIKLVKESSLSRQSKDSNPYATLPRASSVISTAEGTTRRTSIHDFLTKDSRLPISVDSPPAAADSNTTAASNVDKVQESRNSKSRSREQQSS

SEQ ID NO: 41832 - protein, 888 aa, Homo sapiens
LLESKLESTLKKSLEIKEEKIAALEARLEESTNYNQQLRQELKTVKKNYEALKQRQDEERMVQSSPPISGEDNKWERESQETTRELLKVKDRLIEVERNNATLQAEKQALKTQLKQLETQNNNLQAQILALQRQTVSLQEQNTTLQTQNAKLQVENSTLNSQSTSLMNQNAQLLIQQSSLENENESVIKEREDLKSLYDSLIKDHEKLELLHERQASEYESLISKHGTLKSAHKNLEVEHRDLEDRYNQLLKQKGQLEDLEKMLKVEQEKMLLENKNHETVAAEYKKLCGENDRLNHTYSQLLKETEVLQTDHKNLKSLLNNSKLEQTRLEAEFSKLKEQYQQLDITSTKLNNQCELLSQLKGNLEEENRHLLDQIQTLMLQNRTLLEQNMESKDLFHVEQRQYIDKLNELRRQKEKLEEKIMDQYKFYDPSPPRRRGNWITLKMRKLIKSKKDINRERQKSLTLTPTRSDSSEGFLQLPHQDSQDSSSVGSNSLEDGQTLGTKKSSTMNDLVQSMVLAGQWTGSTENLEVPDDISTGKRRKELGAMAFSTTAINFSTVNSSAGFRSKQLVNNKDTTSFEDISPQGVSDDSSTGSRVHASRPASLDSGRTSTSNSNNNASLHEVKAGAVNNQSRPQSHSSGEFSLLHDHEAWSSSGSSPIQYLKRQTRSSPVLQHKISETLESRHHKIKTGSPGSEVVTLQQFLEESNKLTSVQIKSSSQENLLDEVMKSLSVSSDFLGKDKPVSCGLARSVSGKTPGDFYDRRTTKPEFLRPGPRKTEDTYFISSAGKPTPGTQGKIKLVKESSLSRQSKDSNPYATLPRASSVISTAEGTTRRTSIHDFLTKDSRLPISVDSPPAAADSNTTAASNVDKVQESRNSKSRSREQQSS

SEQ ID NO: 41833 - protein, 1796 aa, Homo sapiens
MENEIFTPLLEQFMTSPLVTWVKTFGPLAAGNGTNLDEYVALVDGVFLNQVMLQINPKLESQRVNKKVNNDASLRMHNLSILVRQIKFYYQETLQQLIMMSLPNVLIIGKNPFSEQGTEEVKKLLLLLLGCAVQCQKKEEFIERIQGLDFDTKAAVAAHIQEVTHNQENVFDLQWMEVTDMSQEDIEPLLKNMALHLKRLIDERDEHSETIIELSEERDGLHFLPHASSSAQSPCGSPGMKRTESRQHLSVELADAKAKIRRLRQELEEKTEQLLDCKQELEQMEIELKRLQQENMNLLSDARSARMYRDELDALREKAVRVDKLESEVSRYKERLHDIEFYKARVEELKEDNQVLLETKTMLEDQLEGTRARSDKLHELEKENLQLKAKLHDMEMERDMDRKKIEELMEENMTLEMAQKQSMDESLHLGWELEQISRTSELSEAPQKSLGHEVNELTSSRLLKLEMENQSLTKTVEELRTTVDSVEGNASKILKMEKENQRLSKKVEILENEIVQEKQSLQNCQNLSKDLMKEKAQLEKTIETLRENSERQIKILEQENEHLNQTVSSLRQRSQISAEARVKDIEKENKILHESIKETSSKLSKIEFEKRQIKKELEHYKEKGERAEELENELHHLEKENELLQKKITNLKITCEKIEALEQENSELERENRKLKKTLDSFKNLTFQLESLEKENSQLDEENLELRRNVESLKCASMKMAQLQLENKELESEKEQLKKGLELLKASFKKTERLEVSYQGLDIENQRLQKTLENSNKKIQQLESELQDLEMENQTLQKNLEELKISSKRLEQLEKENKSLEQETSQLEKDKKQLEKENKRLRQQAEIKDTTLEENNVKIGNLEKENKTLSKEIGIYKESCVRLKELEKENKELVKRATIDIKTLVTLREDLVSEKLKTQQMNNDLEKLTHELEKIGLNKERLLHDEQSTDDRYKLLESKLESTLKKSLEIKEEKIAALEARLEESTNYNQQLRQELKTVKKNYEALKQRQDEERMVQSSPPISGEDNKWERESQETTRELLKVKDRLIEVERNNATLQAEKQALKTQLKQLETQNNNLQAQILALQRQTVSLQEQNTTLQTQNAKLQVENSTLNSQSTSLMNQNAQLLIQQSSLENENESVIKEREDLKSLYDSLIKDHEKLELLHERQASEYESLISKHGTLKSAHKNLEVEHRDLEDRYNQLLKQKGQLEDLEKMLKVEQEKMLLENKNHETVAAEYKKLCGENDRLNHTYSQLLKETEVLQTDHKNLKSLLNNSKLEQTRLEAEFSKLKEQYQQLDITSTKLNNQCELLSQLKGNLEEENRHLLDQIQTLMLQNRTLLEQNMESKDLFHVEQRQYIDKLNELRRQKEKLEEKIMDQYKFYDPSPPRRRGNWITLKMRKLIKSKKDINRERQKSLTLTPTRSDSSEGFLQLPHQDSQDSSSVGSNSLEDGQTLGTKKSSMVALKRLPFLRNRPKDKDKMKACYRRSMSMNDLVQSMVLAGQWTGSTENLEVPDDISTGKRRKELGAMAFSTTAINFSTVNSSAGFRSKQLVNNKDTTSFEDISPQGVSDDSSTGSRVHASRPASLDSGRTSTSNSNNNASLHEVKAGAVNNQSRPQSHSSGEFSLLHDHEAWSSSGSSPIQYLKRQTRSSPVLQHKISETLESRHHKIKTGSPGSEVVTLQQFLEESNKLTSVQIKSSSQENLLDEVMKSLSVSSDFLGKDKPVSCGLASVISTAEGTTRRTSIHDFLTKDSRLPISVDSPPAAADSNTTAASNVDKVQESRNSKSRSREQQSS

SEQ ID NO: 41834 - protein, 372 aa, Homo sapiens
MDQYKFYDPSPPRRRGNWITLKMRKLIKSKKDINRERQKSLTLTPTRSDSSEGFLQLPHQDSQDSSSVGSNSLEDGQTLGTKKSSNTTSFEDISPQGVSDDSSTGSRVHAGAVNNQSRPQSHSSGEFSLLHDHEAWSSSGSSPIQYLKRQTRSSPVLQHKISETLESRHHKIKTGSPGSEVVTLQQFLEESNKLTSVQIKSSSQENLLDEVMKSLSVSSDFLGKDKPVSCGLARSVSGKTPGDFYDRRTTKPEFLRPGPRKTEDTYFISSAGKPTPGTQGKIKLVKESSLSRQSKDSNPYATLPRASSVISTAEGTTRRTSIHDFLTKDSRLPISVDSPPAAADSNTTAASNVDKVQESRNSKSRSREQQSS

SEQ ID NO: 41835 - protein, 1871 aa, Homo sapiens
MENEIFTPLLEQFMTSPLVTWVKTFGPLAAGNGTNLDEYVALVDGVFLNQVMLQINPKLESQRVNKKVNNDASLRMHNLSILVRQIKFYYQETLQQLIMMSLPNVLIIGKNPFSEQGTEEVKKLLLLLLGCAVQCQKKEEFIERIQGLDFDTKAAVAAHIQEVTHNQENVFDLQWMEVTDMSQEDIEPLLKNMALHLKRLIDERDEHSETIIELSEERDGLHFLPHASSSAQSPCGSPGMKRTESRQHLSVELADAKAKIRRLRQELEEKTEQLLDCKQELEQMEIELKRLQQENMNLLSDARSARMYRDELDALREKAVRVDKLESEVSRYKERLHDIEFYKARVEELKEDNQVLLETKTMLEDQLEGTRARSDKLHELEKENLQLKAKLHDMEMERDMDRKKIEELMEENMTLEMAQKQSMDESLHLGWELEQISRTSELSEAPQKSLGHEVNELTSSRLLKLEMENQSLTKTVEELRTTVDSVEGNASKILKMEKENQRLSKKVEILENEIVQEKQSLQNCQNLSKDLMKEKAQLEKTIETLRENSERQIKILEQENEHLNQTVSSLRQRSQISAEARVKDIEKENKILHESIKETSSKLSKIEFEKRQIKKELEHYKEKGERAEELENELHHLEKENELLQKKITNLKITCEKIEALEQENSELERENRKLKKTLDSFKNLTFQLESLEKENSQLDEENLELRRNVESLKCASMKMAQLQLENKELESEKEQLKKGLELLKASFKKTERLEVSYQGLDIENQRLQKTLENSNKKIQQLESELQDLEMENQTLQKNLEELKISSKRLEQLEKENKSLEQETSQLEKDKKQLEKENKRLRQQAEIKDTTLEENNVKIGNLEKENKTLSKEIGIYKESCVRLKELEKENKELVKRATIDIKTLVTLREDLVSEKLKTQQMNNDLEKLTHELEKIGLNKERLLHDEQSTDDSRYKLLESKLESTLKKSLEIKEEKIAALEARLEESTNYNQQLRQELKTVKKNYEALKQRQDEERMVQSSPPISGEDNKWERESQETTRELLKVKDRLIEVERNNATLQAEKQALKTQLKQLETQNNNLQAQILALQRQTVSLQEQNTTLQTQNAKLQVENSTLNSQSTSLMNQNAQLLIQQSSLENENESVIKEREDLKSLYDSLIKDHEKLELLHERQASEYESLISKHGTLKSAHKNLEVEHRDLEDRYNQLLKQKGQLEDLEKMLKVEQEKMLLENKNHETVAAEYKKLCGENDRLNHTYSQLLKETEVLQTDHKNLKSLLNNSKLEQTRLEAEFSKLKEQYQQLDITSTKLNNQCELLSQLKGNLEEENRHLLDQIQTLMLQNRTLLEQNMESKDLFHVEQRQYIDKLNELRRQKEKLEEKIMDQYKFYDPSPPRRRGNWITLKMRKLIKSKKDINRERQKSLTLTPTRSDSSEGFLQLPHQDSQDSSSVGSNSLEDGQTLGTKKSSMVALKRLPFLRNRPKDKDKMKACYRRSMSMNDLVQSMVLAGQWTGSTENLEVPDDISTGKRRKELGAMAFSTTAINFSTVNSSAGFRSKQLVNNKDTTSFEDISPQGVSDDSSTGSRVHASRPASLDSGRTSTSNSNNNASLHEVKAGAVNNQSRPQSHSSGEFSLLHDHEAWSSSGSSPIQYLKRQTRSSPVLQHKISETLESRHHKIKTGSPGSEVVTLQQFLEESNKLTSVQIKSSSQENLLDEVMKSLSVSSDFLGKDKPVSCGLARSVSGKTPGDFYDRRTTKPEFLRPGPRKTEDTYFISSAGKPTPGTQGKIKLVKESSLSRQSKDSNPYATLPRASSVISTAEGTTRRTSIHDFLTKDSRLPISVDSPPAAADSNTTAASNVDKVQESRNSKSRSREQQSS

SEQ ID NO: 41836 - protein, 139 aa, Homo sapiens
MPCAARSRSSWRRSWTNTACWSLCPCPGPRSPSPAPMRRAQSSLCLRDETLAGGQRRKLSSRFPVGRSSESFSPGDTPRQRFRQRHPGPLGAPVSHSKGPGVGWENSAETLQEHETDANREGPEVQEPEKRPLTPSLSQ

SEQ ID NO: 41837 - protein, 1476 aa, Homo sapiens
MEGGKGPRLRDFLSGSLATWALGLAGLVGEAEDSEGEEEEEEEEPPLWLEKRFLRLSDGALLLRVLGIIAPSSRGGPRMLRGLDGPAAWRVWNLNHLWGRLRDFYQEELQLLILSPPPDLQTLGFDPLSEEAVEQLEGVLRLLLGASVQCEHRELFIRHIQGLSLEVQSELAAAIQEVTQPGAGVVLALSGPDPGELAPAELEMLSRSLMGTLSKLARERDLGAQRLAELLLEREPLCLRPEAPSRAPAEGPSHHLALQLANAKAQLRRLRQELEEKAELLLDSQAEVQGLEAEIRRLRQEAQALSGQAKRAELYREEAEALRERAGRLPRLQEELRRCRERLQAAEAYKSQLEEERVLSGVLEASKALLEEQLEAARERCARLHETQRENLLLRTRLGEAHAELDSLRHQVDQLAEENVELELELQRSLEPPPGSPGEAPLAGAAPSLQDEVREAEAGRLRTLERENRELRGLLQVLQGQPGGQHPLLEAPREDPVLPVLEEAPQTPVAFDHSPQGLVQKARDGGPQALDLAPPALDSVLEASAECPQAPDSDPQEAESPLQAAAMDPQASDWSPQESGSPVETQESPEKAGRRSSLQSPASVAPPQGPGTKIQAPQLLGGETEGREAPQGELVPEAWGLRQEGPEHKPGPSEPSSVQLEEQEGPNQGLDLATGQAEAREHDQRLEGTVRDPAWQKPQQKSEGALEVQVWEGPIPGESLASGVAEQEALREEVAQLRRKAEALGDELEAQARKLEAQNTEAARLSKELAQARRAEAEAHREAEAQAWEQARLREAVEAAGQELESASQEREALVEALAAAGRERRQWEREGSRLRAQSEAAEERMQVLESEGRQHLEEAERERREKEALQAELEKAVVRGKELGDRLEHLQRELEQAALERQEFLREKESQHQRYQGLEQRLEAELQAAATSKEEALMELKTRALQLEEELFQLRQGPAGLGPKKRAEPQLVETQNVRLIEVERSNAMLVAEKAALQGQLQHLEGQLGSLQGRAQELLLQSQRAQEHSSRLQAEKSVLEIQGQELHRKLEVLEEEVRAARQSQEETRGQQQALLRDHKALAQLQRRQEAELEGLLVRHRDLKANMRALELAHRELQGRHEQLQAQRASVEAQEVALLAERERLMQDGHRQRGLEEELRRLQSEHDRAQMLLAELSRERGELQGERGELRGRLARLELERAQLEMQSQQLRESNQQLDLSACRLTTQCELLTQLRSAQEEENRQLLAEVQALSRENRELLERSLESRDHLHREQREYLDQLNALRREKQKLVEKIMDQYRVLEPVPLPRTKKGSWLADKVKRLMRPRREGGPPGGLRLGADGAGSTESLGGPPETELPEGREADGTGSPSPAPMRRAQSSLCLRDETLAGGQRRKLSSRFPVGRSSESFSPGDTPRQRFRQRHPGPLGAPVSHSKGPGVGWENSAETLQEHETDANREGPEVQEPEKRPLTPSLSQ

SEQ ID NO: 41838 - protein, 712 aa, Homo sapiens
MAGVAAHRAHPPFTAHMKNRGLREELEKAVVRGKELGDRLEHLQRELEQAALERQEFLREKESQHQRYQGLEQRLEAELQAAATSKEEALMELKTRALQLEEELFQLRQGPAGLGPKKRAEPQLVETQNVRLIEVERSNAMLVAEKAALQGQLQHLEGQLGSLQGRAQELLLQSQRAQEHSSRLQAEKSVLEIQGQELHRKLEVLEEEVRAARQSQEETRGQQQALLRDHKALAQLQRRQEAELEGLLVRHRDLKANMRALELAHRELQGRHEQLQAQRASVEAQEVALLAERERLMQDGHRQRGLEEELRRLQSEHDRAQMLLAELSRERGELQGERGELRGRLARLELERAQLEMQSQQLRESNQQLDLSACRLTTQCELLTQLRSAQEEENRQLLAEVQALSRENRELLERSLESRDHLHREQREYLDQLNALRREKQKLVEKIMDQYRVLEPVPLPRTKKGSWLADKGPLPRHPCAGPRAPSACGMRPWQAGSGGNSAQGSRWGEALSHSALGTPLGNDSDSAIQAPWGRPSPTAKDLVWDGRTPLRPCRNTKQMPTERALRYRNRRNVPSPHPSASDTVGTAGLGVQPSRHWSVSGGPRQPKSSGSQGPQGESLDKEAWALRSSTVSAGARRWSWDECVDRGDGWPPRAAPGWSSGSSRWLPLRQRSLGDPPAEGGWQELAREPPALSRWEAESQCWGTVAWADLEP

SEQ ID NO: 41839 - protein, 1358 aa, Homo sapiens
MEGGKGPRLRDFLSGSLATWALGLAGLVGEAEDSEGEEEEEEEEPPLWLEKRFLRLSDGALLLRVLGIIAPSSRGGPRMLRGLDGPAAWRVWNLNHLWGRLRDFYQEELQLLILSPPPDLQTLGFDPLSEEAVEQLEGVLRLLLGASVQCEHRELFIRHIQGLSLEVQSELAAAIQEVTQPGAGVVLALSGPDPGELAPAELEMLSRSLMGTLSKLARERDLGAQRLAELLLEREPLCLRPEAPSRAPAEGPSHHLALQLANAKAQLRRLRQELEEKAELLLDSQAEVQGLEAEIRRLRQEAQALSGQAKRAELYREEAEALRERAGRLPRLQEELRRCRERLQAAEAYKSQLEEERVLSGVLEASKALLEEQLEAARERCARLHETQRENLLLRTRLGEAHAELDSLRHQVDQLAEENVELELELQRSLEPPPGSPGEAPLAGAAPSLQDEVREAEAGRLRTLERENRELRGLLQVLQGQPGGQHPLLEAPREDPVLPVLEEAPQTPVAFDHSPQGLVQKARDGGPQALDLAPPALDSVLEASAECPQAPDSDPQEAESPLQAAAMDPQASDWSPQESGSPVETQESPEKAGRRSSLQSPASVAPPQGPGTKIQAPQLLGGETEGREAPQGELVPEAWGLRQEGPEHKPGPSEPSSVQLEEQEGPNQGLDLATGQAEAREHDQRLEGTVRDPAWQKPQQKSEGALEVQVWEGPIPGESLASGVAEQEALREEVAQLRRKAEALGDELEAQARKLEAQNTEAARLSKELAQARRAEAEAHREAEAQAWEQARLREAVEAAGQELESASQEREALVEALAAAGRERRQWEREGSRLRAQSEAAEERMQVLESEGRQHLEEAERERREKEALQAELEKAVVRGKELGDRLEHLQRELEQAALERQEFLREKESQHQRYQGLEQRLEAELQAAATSKEEALMELKTRALQLEEELFQLRQGPAGLGPKKRAEPQLVETQNVRLIEVERSNAMLVAEKAALQGQLQHLEGQLGSLQGRAQELLLAERERLMQDGHRQRGLEEELRRLQSEHDRAQMLLAELSRERGELQGERGELRGRLARLELERAQLEMQSQQLRESNQQLDLSACRLTTQCELLTQLRSAQEEENRQLLAEVQALSRENRELLERSLESRDHLHREQREYLDQLNALRREKQKLVEKIMDQYRVLEPVPLPRTKKGSWLADKVKRLMRPRREGGPPGGLRLGADGAGSTESLGGPPETELPEGREADGTGSPSPAPMRRAQSSLCLRDETLAGGQRRKLSSRFPVGRSSESFSPGDTPRQRFRQRHPGPLGAPVSHSKGPGVGWENSAETLQEHETDANREGPEVQEPEKRPLTPSLSQ

SEQ ID NO: 41840 - protein, 227 aa, Homo sapiens
MGGTTSTRRVTFEADENENITVVKGIRLSENVIDRMKESSPSGSKSQRYSGAYGASVSDEELKRRVAEELALEQAKKESEDQKRLKQAKELDRERAAANEQLTRAILRERICSEEERAKAKHLARQLEEKDRVLKKQDAFYKEQLARLEERSSEFYRVTTEQYQKAAEEVEAKFKRYESHPVCADLQAKILQCYRENTHQTLKCSALATQYMHCVNHAKQSMLEKGG

SEQ ID NO: 41841 - protein, 138 aa, Homo sapiens
MGGTTSTRRVTFEADENENITVVKGIRLSENVIDRMKESSPSGSKSQRYSGAYGASVSDEELKRRVAEELALEQAKKESEDQKRLKQAKELDRERAAANEQLTRAILRERICSEEERAKAKHLIKVELLWVKPGVLTA

SEQ ID NO: 41842 - protein, 110 aa, Homo sapiens
MKCEETHAPNSNWVYVMLPSKKTVRMPSVTQRLRDPDINPCLSESDASTRCLDENNYDRERCSTYFLRYKNCRRFWNSIVMQRRKNGVKPFMPTAAERDEILRAVGNMPY

SEQ ID NO: 41843 - protein, 85 aa, Homo sapiens
MPSVTQRLRDPDINPCLSESDASTRCLDENNYDRERCSTYFLRYKNCRRFWNSIVMQRRKNGVKPFMPTAAERDEILRAVGNMPY

SEQ ID NO: 41844 - protein, 94 aa, Homo sapiens
MLPSKKTVRMPSVTQRLRDPDINPCLSESDASTRCLDENNYDRERCSTYFLRYKNCRRFWNSIVMQRRKNGVKPFMPTAAERDEILRAVGNMPY

SEQ ID NO: 41845 - protein, 44 aa, Homo sapiens
MPSVTQRLRDPDINPCLSESDASTRCLDENNYDRERCSTYFLRY

SEQ ID NO: 41846 - protein, 97 aa, Homo sapiens
MHQTRTGKKTVRMPSVTQRLRDPDINPCLSESDASTRCLDENNYDRERCSTYFLRYKNCRRFWNSIVMQRRKNGVKPFMPTAAERDEILRAVGNMPY

SEQ ID NO: 41847 - protein, 68 aa, Homo sapiens
MHQTRTGKKTVRMPSVTQRLRDPDINPCLSILFYLLNDASLISVRNLMLPPDVWMKITMTGKGVPLTS

SEQ ID NO: 41848 - protein, 87 aa, Homo sapiens [sequence omitted]

SEQ ID NO: 41849 - protein, 87 aa, Homo sapiens [sequence omitted]

SEQ ID NO: 41850 - protein, 96 aa, Homo sapiens
MFYRLPIPRMSTSVPQGHTWTQRVKKDDEEEDPLDQLISRSGCAASHFAVQECMAQHQDWRQCQPQVQAFKDCMSEQQARRQEELQRRQEQAGAHH

SEQ ID NO: 41851 - protein, 87 aa, Homo sapiens [sequence omitted]

SEQ ID NO: 41852 - protein, 576 aa, Homo sapiens
MAASETVRLRLQFDYPPPATPHCTAFWLLVDLNRCRVVTDLISLIRQRFGFSSGAFLGLYLEGGLLPPAESARLVRDNDCLRVKLEERGVAENSVVISNGDINLSLRKAKKRAFQLEEGEETEPDCKYSKKHWKSRENNNNNEKVLDLEPKAVTDQTVSKKNKRKNKATCGTVGDDNEEAKRKSPKKKEKCEYKKKAKNPKSPKVQAVKDWANQRCSSPKGSARNSLVKAKRKGSVSVCSKESPSSSSESESCDESISDGPSKVTLEARNSSEKLPTELSKEEPSTKNTTADKLAIKLGFSLTPSKGKTSGTTSSSSDSSAESDDQCLMSSSTPECAAGFLKTVGLFAGRGRPGPGLSSQTAGAAGWRRSGSNGGGQAPGASPSVSLPASLGRGWGREENLFSWKGAKGRGMRGRGRGRGHPVSCVVNRSTDNQRQQQLNDVVKNSSTIIQNPVETPKKDYSLLPLLAAAPQVGEKIAFKLLELTSSYSPDVSDYKEGRILSHNPETQQVDIEILSSLPALREPGKFDLVYHNENGAEVVEYAVTQESKITVFWKELIDPRLIIESPSNTSSTEPA

SEQ ID NO: 41853 - protein, 172 aa, Homo sapiens
MASDEGKLFVGGLSFDTNEQSLEQVFSKYGQISEVVVVKDRETQRSRGFGFVTFENIDDAKDAMMAMNGKSVDGRQIRVDQAGKSSDNRSRGYRGGSAGGRGFFRGGRGRGRGFSRGGGDRGYGGNRFESRSGGYGGSRDYYSSRSQSGGYSDRSSGGSYRDSYDSYATHNE

SEQ ID NO: 41854 - protein, 263 aa, Homo sapiens
MASDEGKLFVGGLSFDTNEQSLEQVFSKYGQISEVVVVKDRETQRSRGFGFVTFENIDDAKDAMMAMNGKSVDGRQIRVDQAGGGDRGYGGNRFESRSGGYGGSRDYYSSRSQSGGYSDRSSGGSYRDSYDSYGKSHSEGATLLWPAVGARFTLVPSPSTLGWTLRPCHCACPEEAHLSSQSHFYRRTQKPNETDQKGKGERGPAGQSARCMCGRRPASLGCGGWLLPGRRPRPGLASGVKLPLVASVPLHCACFLSSATHNE

SEQ ID NO: 41855 - protein, 244 aa, Homo sapiens
MSSRWSRSSQSTDRSLKSVDGRQIRVDQAGKSSDNRSRGYRGGSAGGRGFFRGGRGRGRGFSRGGGDRGYGGNRFESRSGGYGGSRDYYSSRSQSGGYSDRSSGGSYRDSYDSYGKSHSEGATLLWPAVGARFTLVPSPSTLGWTLRPCHCACPEEAHLSSQSHFYRRTQKPNETDQKGKGERGPAGQSARCMCGRRPASLGCGGWLLPGRRPRPGLASGVKLPLVASVPLHCACFLSSATHNE

SEQ ID NO: 41856 - protein, 172 aa, Homo sapiens; identical to SEQ ID NO: 41853

SEQ ID NO: 41857 - protein, 767 aa, Homo sapiens
MSFDPNLLHNNGHNGYPNGTSAALRETGVIEKLLTSYGFIQCSERQARLFFHCSQYNGNLQDLKVGDDVEFEVSSDRRTGKPIAVKLVKIKQEILPEERMNGQEVFYLTYTPEDVEGNVQLETGDKINFVIDNNKHTGAVSARNIMLLKKKQARCQGVVCAMKEAFGFIERGDVVKEIFFHYSEFKGDLETLQPGDDVEFTIKDRNGKEVATDVRLLPQGTVIFEDISIEHFEGTVTKVIPKVPSKNQNDPLPGRIKVDFVIPKELPFGDKDTKSKVTLLEGDHVRFNISTDRRDKLERATNIEVLSNTFQFTNEAREMGVIAAMRDGFGFIKCVDRDVRMFFHFSEILDGNQLHIADEVEFTVVPDMLSAQRNHAIRIKKLPKGTVSFHSHSDHRFLGTVEKEATFSNPKTTSPNKGKEKEAEDGIIAYDDCGVKLTIAFQAKDVEGSTSPQIGDKVEFSISDKQRPGQQVATCVRLLGRNSNSKRLLGYVATLKDNFGFIETANHDKEIFFHYSEFSGDVDSLELGDMVEYSLSKGKGNKVSAEKVNKTHSVNGITEEADPTIYSGKVIRPLRSVDPTQTEYQGMIEIVEEGDMKGEVYPFGIVGMANKGDCLQKGESVKFQLCVLGQNAQTMAYNITPLRRATVECVKDQFGFINYEVGDSKKLFFHVKEVQDGIELQAGDEVEFSVILNQRTGKCSACNVWRVCEGPKAVAAPRPDRLVNRLKNITLDDASAPRLMVLRQPRGPDNSMGFGAERKIRQAGVID

SEQ ID NO: 41858 - protein, 767 aa, Homo sapiens; identical to SEQ ID NO: 41857

SEQ ID NO: 41859 - protein, 798 aa, Homo sapiens
MSFDPNLLHNNGHNGYPNGTSAALRETGVIEKLLTSYGFIQCSERQARLFFHCSQYNGNLQDLKVGDDVEFEVSSDRRTGKPIAVKLVKIKQEILPEERMNGQVVCAVPHNLESKSPAAPGQSPTGSVCYERNGEVFYLTYTPEDVEGNVQLETGDKINFVIDNNKHTGAVSARNIMLLKKKQARCQGVVCAMKEAFGFIERGDVVKEIFFHYSEFKGDLETLQPGDDVEFTIKDRNGKEVATDVRLLPQGTVIFEDISIEHFEGTVTKVIPKVPSKNQNDPLPGRIKVDFVIPKELPFGDKDTKSKVTLLEGDHVRFNISTDRRDKLERATNIEVLSNTFQFTNEAREMGVIAAMRDGFGFIKCVDRDVRMFFHFSEILDGNQLHIADEVEFTVVPDMLSAQRNHAIRIKKLPKGTVSFHSHSDHRFLGTVEKEATFSNPKTTSPNKGKEKEAEDGIIAYDDCGVKLTIAFQAKDVEGSTSPQIGDKVEFSISDKQRPGQQVATCVRLLGRNSNSKRLLGYVATLKDNFGFIETANHDKEIFFHYSEFSGDVDSLELGDMVEYSLSKGKGNKVSAEKVNKTHSVNGITEEADPTIYSGKVIRPLRSVDPTQTEYQGMIEIVEEGDMKGEVYPFGIVGMANKGDCLQKGESVKFQLCVLGQNAQTMAYNITPLRRATVECVKDQFGFINYEVGDSKKLFFHVKEVQDGIELQAGDEVEFSVILNQRTGKCSACNVWRVCEGPKAVAAPRPDRLVNRLKNITLDDASAPRLMVLRQPRGPDNSMGFGAERKIRQAGVID

SEQ ID NO: 41860 - protein, 813 aa, Homo sapiens
MENVFTVSSDPHPSPAAPPSLSLPLSSSSTSSGTKKQKRTPTYQRSMSFDPNLLHNNGHNGYPNGTSAALRETGVIEKLLTSYGFIQCSERQARLFFHCSQYNGNLQDLKVGDDVEFEVSSDRRTGKPIAVKLVKIKQEILPEERMNGQEVFYLTYTPEDVEGNVQLETGDKINFVIDNNKHTGAVSARNIMLLKKKQARCQGVVCAMKEAFGFIERGDVVKEIFFHYSEFKGDLETLQPGDDVEFTIKDRNGKEVATDVRLLPQGTVIFEDISIEHFEGTVTKVIPKVPSKNQNDPLPGRIKVDFVIPKELPFGDKDTKSKVTLLEGDHVRFNISTDRRDKLERATNIEVLSNTFQFTNEAREMGVIAAMRDGFGFIKCVDRDVRMFFHFSEILDGNQLHIADEVEFTVVPDMLSAQRNHAIRIKKLPKGTVSFHSHSDHRFLGTVEKEATFSNPKTTSPNKGKEKEAEDGIIAYDDCGVKLTIAFQAKDVEGSTSPQIGDKVEFSISDKQRPGQQVATCVRLLGRNSNSKRLLGYVATLKDNFGFIETANHDKEIFFHYSEFSGDVDSLELGDMVEYSLSKGKGNKVSAEKVNKTHSVNGITEEADPTIYSGKVIRPLRSVDPTQTEYQGMIEIVEEGDMKGEVYPFGIVGMANKGDCLQKGESVKFQLCVLGQNAQTMAYNITPLRRATVECVKDQFGFINYEVGDSKKLFFHVKEVQDGIELQAGDEVEFSVILNQRTGKCSACNVWRVCEGPKAVAAPRPDRLVNRLKNITLDDASAPRLMVLRQPRGPDNSMGFGAERKIRQAGVID

SEQ ID NO: 41861 - protein, 844 aa, Homo sapiens
MENVFTVSSDPHPSPAAPPSLSLPLSSSSTSSGTKKQKRTPTYQRSMSFDPNLLHNNGHNGYPNGTSAALRETGVIEKLLTSYGFIQCSERQARLFFHCSQYNGNLQDLKVGDDVEFEVSSDRRTGKPIAVKLVKIKQEILPEERMNGQVVCAVPHNLESKSPAAPGQSPTGSVCYERNGEVFYLTYTPEDVEGNVQLETGDKINFVIDNNKHTGAVSARNIMLLKKKQARCQGVVCAMKEAFGFIERGDVVKEIFFHYSEFKGDLETLQPGDDVEFTIKDRNGKEVATDVRLLPQGTVIFEDISIEHFEGTVTKVIPKVPSKNQNDPLPGRIKVDFVIPKELPFGDKDTKSKVTLLEGDHVRFNISTDRRDKLERATNIEVLSNTFQFTNEAREMGVIAAMRDGFGFIKCVDRDVRMFFHFSEILDGNQLHIADEVEFTVVPDMLSAQRNHAIRIKKLPKGTVSFHSHSDHRFLGTVEKEATFSNPKTTSPNKGKEKEAEDGIIAYDDCGVKLTIAFQAKDVEGSTSPQIGDKVEFSISDKQRPGQQVATCVRLLGRNSNSKRLLGYVATLKDNFGFIETANHDKEIFFHYSEFSGDVDSLELGDMVEYSLSKGKGNKVSAEKVNKTHSVNGITEEADPTIYSGKVIRPLRSVDPTQTEYQGMIEIVEEGDMKGEVYPFGIVGMANKGDCLQKGESVKFQLCVLGQNAQTMAYNITPLRRATVECVKDQFGFINYEVGDSKKLFFHVKEVQDGIELQAGDEVEFSVILNQRTGKCSACNVWRVCEGPKAVAAPRPDRLVNRLKNITLDDASAPRLMVLRQPRGPDNSMGFGAERKIRQAGVID

SEQ ID NO: 41862 - protein, 46 aa, Homo sapiens
MSFDPNLLHNNGHNGYPNGTSAALRETGVIEKLLTSYGFIQCSERQ

SEQ ID NO: 41863 - protein, 7 aa, Homo sapiens
MSFDPNL

SEQ ID NO: 41864 - protein, 668 aa, Homo sapiens
MNGQEVFYLTYTPEDVEGNVQLETGDKINFVIDNNKHTGAVSARNIMLLKKKQARCQGVVCAMKEAFGFIERGDVVKEIFFHYSEFKGDLETLQPGDDVEFTIKDRNGKEVATDVRLLPQGTVIFEDISIEHFEGTVTKVIPKVPSKNQNDPLPGRIKVDFVIPKELPFGDKDTKSKVTLLEGDHVRFNISTDRRDKLERATNIEVLSNTFQFTNEAREMGVIAAMRDGFGFIKCVDRDVRMFFHFSEILDGNQLHIADEVEFTVVPDMLSAQRNHAIRIKKLPKGTVSFHSHSDHRFLGTVEKEATFSNPKTTSPNKGKEKEAEDGIIAYDDCGVKLTIAFQAKDVEGSTSPQIGDKVEFSISDKQRPGQQVATCVRLLGRNSNSKRLLGYVATLKDNFGFIETANHDKEIFFHYSEFSGDVDSLELGDMVEYSLSKGKGNKVSAEKVNKTHSVNGITEEADPTIYSGKVIRPLRSVDPTQTEYQGMIEIVEEGDMKGEVYPFGIVGMANKGDCLQKGESVKFQLCVLGQNAQTMAYNITPLRRATVECVKDQFGFINYEVGDSKKLFFHVKEVQDGIELQAGDEVEFSVILNQRTGKCSACNVWRVCEGPKAVAAPRPDRLVNRLKNITLDDASAPRLMVLRQPRGPDNSMGFGAERKIRQAGVID

SEQ ID NO: 41865 - protein, 95 aa, Homo sapiens
MSFDPNLLHNNGHNGYPNGTSAALRETGVIEKLLTSYGFIQCSERQARLFFHCSQYNGNLQDLKVGDDVEFEVSSDRRTGKPIAVKLVKIKQEIL

SEQ ID NO: 41866 - protein, 798 aa, Homo sapiens; identical to SEQ ID NO: 41859

SEQ ID NO: 41867 - protein, 372 aa, Homo sapiens
MSEAGEATTTTTTTLPQAPTEAAAAAPQDPAPKSPVGSGAPQAAAPAPAAHVAGNPGGDAAPAATGTAAAASLATAAGSEDAEKKVLATKVLGTVKWFNVRNGYGFINRNDTKEDVFVHQTAIKKNNPRKYLRSVGDGETVEFDVVEGEKGAEAANVTGPDGVPVEGSRYAADRRRYRRGYYGRRRGPPRNYAGEEEEEGSGSSEGFDPPATDRQFSGARNQLRRPQYRPQYRQRRFPPYHVGQTFDRRSRVLPHPNRIQAGEIGEMKDGVPEGAQLQGPVHRNPTYRPRYRSRGPPRPRPAPAVGEAEDKENQQATSGPNQPSVRRGYRRPYNYRRRPRPPNAPSQDGKEAKAGEAPTENPAPPTQQSSAE

SEQ ID NO: 41868 - protein, 303 aa, Homo sapiens
MSEAGEATTTTTTTLPQAPTEAAAAAPQDPAPKSPVGSGAPQAAAPAPAAHVAGNPGGDAAPAATGTAAAASLATAAGSEDAEKKVLATKVLGTVKWFNVRNGYGFINRNDTKEDVFVHQTAIKKNNPRKYLRSVGDGETVEFDVVEGEKGAEAANVTGPDGVPVEGSRYAADRRRYRRGYYGRRRGPPRNAGEIGEMKDGVPEGAQLQGPVHRNPTYRPRYRSRGPPRPRPAPAVGEAEDKENQQATSGPNQPSVRRGYRRPYNYRRRPRPPNAPSQDGKEAKAGEAPTENPAPPTQQSSAE

SEQ ID NO: 41869 - protein, 112 aa, Homo sapiens
MEKILILLLVALSVAYAAPGPRGIIINLENGELCMNSAQCKSNCCQHSSALGLARCTSMASENSECSVKTLYGIYYKCPCERGLTCEGDKTIVGSITNTNFGICHDAGRSKQ

SEQ ID NO: 41870 - protein, 71 aa, Homo sapiens
MEKILILLLVALSVAYAAPGPRGIIINLTLYGIYYKCPCERGLTCEGDKTIVGSITNTNFGICHDAGRSKQ

SEQ ID NO: 41871 - protein, 135 aa, Homo sapiens
MQLTWASISLVTRCWPQTPTFQDLLACLGARALPGPPGAPGRDGSKGERGAPGPRGSPGPPGSFDFLLLMLADIRNDITELQEKVFGHRTHSSAEEFPLPQEFPSYPEAMDLGSGDDHPRRTETRDLRAPRDFYP

SEQ ID NO: 41872 - protein, 406 aa, Homo sapiens
MVPPPPSRGGAARGQLGRSLGPLLLLLALGHTWTYREEPEDGDREICSESKIATTKYPCLKSSGELTTCYRKKCCKGYKFVLGQCIPEDYDVCAEAPCEQQCTDNFGRVLCTCYPGYRYDRERHRKREKPYCLDIDECASSNGTLCAHICINTLGSYRCECREGYIREDDGKTCTRGDKYPNDTGHEKSENMVKAGTCCATCKEFYQMKQTVLQLKQKIALLPNNAADLGKYITGDKVLASNTYLPGPPGLPGGQGPPGSPGPKGSPGFPGMPGPPGQPGPRGSMGPMGPSPDLSHIKQGRRGPVGPPGAPGRDGSKGERGAPGPRGSPGPPGSFDFLLLMLADIRNDITELQEKVFGHRTHSSAEEFPLPQEFPSYPEAMDLGSGDDHPRRTETRDLRAPRDFYP

SEQ ID NO: 41873 - protein, 232 aa, Homo sapiens
MWPPGRSITVKLREKTVSRKLEMNGPSAFQGLICGKYNGMCLQGPAGVPGRDGSPGANGIPGTPGIPGRDGFKGEKGECLRESFEESWTPNYKQCSWSSLNYGIDLGKIAECTFTKMRSNSALRVLFSGSLRLKCRNACCQRWYFTFNGAECSGPLPIEAIIYLDQGSPEMNSTINIHRTSSVEGLCEGIGAGLVDVAIWVGTCSDYPKGDASTGWNSVSRIIIEELPNYLF

SEQ ID NO: 41874 - protein, 243 aa, Homo sapiens
MRPQGPAASPQRLRGLLLLLLLQLPAPSSASEIPKGKQKAQLRQREVVDLYNGMCLQGPAGVPGRDGSPGANGIPGTPGIPGRDGFKGEKGECLRESFEESWTPNYKQCSWSSLNYGIDLGKIAECTFTKMRSNSALRVLFSGSLRLKCRNACCQRWYFTFNGAECSGPLPIEAIIYLDQGSPEMNSTINIHRTSSVEGLCEGIGAGLVDVAIWVGTCSDYPKGDASTGWNSVSRIIIEELPK

SEQ ID NO: 41875 - protein, 229 aa, Homo sapiens
MWPPGRSITVKLREKTVSRKLEMNGPSAFQGLICGKYNGMCLQGPAGVPGRDGSPGANGIPGTPGIPGRDGFKGEKGECLRESFEESWTPNYKQCSWSSLNYGIDLGKIAECTFTKMRSNSALRVLFSGSLRLKCRNACCQRWYFTFNGAECSGPLPIEAIIYLDQGSPEMNSTINIHRTSSVEGLCEGIGAGLVDVAIWVGTCSDYPKGDASTGWNSVSRIIIEELPK

SEQ ID NO: 41876 - protein, 1678 aa, Homo sapiens
MHPGLWLLLVTLCLTEELAAAGEKSYGKPCGGQDCSGSCQCFPEKGARGRPGPIGIQGPTGPQGFTGSTGLSGLKGERGFPGLLGPYGPKGDKGPMGVPGFLGINGIPGHPGQPGPRGPPGLDGCNGTQGAVGFPGPDGYPGLLGPPGLPGQKGSKGDPVLAPGSFKGMKGDPGLPGLDGITGPQGAPGFPGAVGPAGPPGLQGPPGPPGPLGPDGNMGLGFQGEKGVKGDVGLPGPAGPPPSTGELEFMGFPKGKKGSKGEPGPKGFPGISGPPGFPGLGTTGEKGEKGEKGIPGLPGPRGPMGSEGVQGPPGQQGKKGTLGFPGLNGFQGIEGQKGDIGLPGPDVFIDIDGAVISGNPGDPGVPGLPGLKGDEGIQGLRGPSGVPGLPALSGVPGALGPQGFPGLKGDQGNPGRTTIGAAGLPGRDGLPGPPGPPGPPSPEFETETLHNKESGFPGLRGEQGPKGNLGLKGIKGDSGFCACDGGVPNTGPPGEPGPPGPWGLIGLPGLKGARGDRGSGGAQGPAGAPGLVGPLGPSGPKGKKGEPILSTIQGMPGDRGDSGSQGFRGVIGEPGKDGVPGLPGLPGLPGDGGQGFPGEKGLPGLPGEKGHPGPPGLPGNGLPGLPGPRGLPGDKGKDGLPGQQGLPGSKGITLPCIIPGSYGPSGFPGTPGFPGPKGSRGLPGTPGQPGSSGSKGEPGSPGLVHLPELPGFPGPRGEKGLPGFPGLPGKDGLPGMIGSPGLPGSKGATGDIFGAENGAPGEQGLQGLTGHKGFLGDSGLPGLKGVHGKPGLLGPKGERGSPGTPGQVGQPGTPGSSGPYGIKGKSGLPGAPGFPGISGHPGKKGTRGKKGPPGSIVKKGLPGLKGLPGNPGLVGLKGSPGSPGVAGLPALSGPKGEKGSVGFVGFPGIPGLPGIPGTRGLKGIPGSTGKMGPSGRAGTPGEKGDRGNPGPVGIPSPRRPMSNLWLKGDKGSQGSAGSNGFPGPRGDKGEAGRPGPPGLPGAPGLPGIIKGVSGKPGPPGFMGIRGLPGLKGSSGITGFPGMPGESGSQGIRGSPGLPGASGLPGLKGDNGQTVEISGSPGPKGQPGESGFKGTKGRDGLIGNIGFPGNKGEDGKVGVSGDVGLPGAPGFPGVAGMRGEPGLPGSSGHQGAIGPLGSPGLIGPKGFPGFPGLHGLNGLPGTKGTHGTPGPSITGVPGPAGLPGPKGEKGYPGIGIGAPGKPGLRGQKGDRGFPGLQGPAGLPGAPGISLPSLIAGQPGDPGRPGLDGERGRPGPAGPPGPPGPSSNQGDTGDPGFPGIPGFSGLPGELGLKGMRGEPGFMGTPGKVGPPGDPGFPGMKGKAGPRGSSGLQGDPGQTPTAEAVQVPPGPLGLPGIDGIPGLTGDPGAQGPVGLQGSKGLPGIPGKDGPSGLPGPPGALGDPGLPGLQGPPGFEGAPGQQGPFGMPGMPGQSMRVGYTLVKHSQSEQVPPCPIGMSQLWVGYSLLFVEGQEKAHNQDLGFAGSCLPRFSTMPFIYCNINEVCHYARRNDKSYWLSTTAPIPMMPVSQTQIPQYISRCSVCEAPSQAIAVHSQDITIPQCPLGWRSLWIGYSFLMHTAAGAEGGGQSLVSPGSCLEDFRATPFIECSGARGTCHYFANKYSFWLTTVEERQQFGELPVSETLKAGQLHTRVSRCQVCMKSL

SEQ ID NO: 41877 - protein, 1028 aa, Homo sapiens
MRAARALLPLLLQACWTAAQDEPETPRAVAFQDCPVDLFFVLDTSESVALRLKPYGALVDKVKSFTKRFIDNLRDRYYRCDRNLVWNAGALHYSDEVEIIQGLTRMPGGRDALKSSVDAVKYFGKGTYTDCAIKKGLEQLLVGGSHLKENKYLIVVTDGHPLEGYKEPCGGLEDAVNEAKHLGVKVFSVAITPDHLEPRLSIIATDHTYRRNFTAADWGQSRDAEEAISQTIDTIVDMIKNNVEQVCCSFECQPARGPPGLRGDPGFEGERGKPGLPGEKGEAGDPGRPGDLGPVGYQGMKGEKGSRGEKGSRGPKGYKGEKGKRGIDGVDGVKGEMGYPGLPGCKGSPGFDGIQGPPGPKGDPGAFGLKGEKGEPGADGEAGRPGSSGPSGDEGQPGEPGPPGEKGEAGDEGNPGPDGAPGERGGPGERGPRGTPGTRGPRGDPGEAGPQGDQGREGPVGVPGDPGEAGPIGPKGYRGDEGPPGSEGARGAPGPAGPPGDPGLMGERGEDGPAGNGTEGFPGFPGYPGNRGAPGINGTKGYPGLKGDEGEAGDPGDDNNDIAPRGVKGAKGYRGPEGPQGPPGHQGPPGPDECEILDIIMKMCSCCECKCGPIDLLFVLDSSESIGLQNFEIAKDFVVKVIDRLSRDELVKFEPGQSYAGVVQYSHSQMQEHVSLRSPSIRNVQELKEAIKSLQWMAGGTFTGEALQYTRDQLLPPSPNNRIALVITDGRSDTQRDTTPLNVLCSPGIQVVSVGIKDVFDFIPGSDQLNVISCQGLAPSQGRPGLSLVKENYAELLEDAFLKNVTAQICIDKKCPDYTCPITFSSPADITILLDGSASVGSHNFDTTKRFAKRLAERFLTAGRTDPAHDVRVAVVQYSGTGQQRPERASLQFLQNYTALASAVDAMDFINDATDVNDALGYVTRFYREASSGAAKKRLLLFSDGNSQGATPAAIEKAVQEAQRAGIEIFVVVVGRQVNEPHIRVLVTGKTAEYDVAYGESHLFRVPSYQALLRGVFHQTVSRKVALG

SEQ ID NO: 41878 - protein, 589 aa, Homo sapiens
MRAARALLPLLLQACWTAAQDEPETPRAVAFQDCPVDLFFVLDTSESVALRLKPYGALVDKVKSFTKRFIDNLRDRYYRCDRNLVWNAGALHYSDEVEIIQGLTRMPGGRDALKSSVDAVKYFGKGTYTDCAIKKGLEQLLVGGSHLKENKYLIVVTDGHPLEGYKEPCGGLEDAVNEAKHLGVKVFSVAITPDHLEPRLSIIATDHTYRRNFTAADWGQSRDAEEAISQTIDTIVDMIKNNVEQVCCSFECQPARGPPGLRGDPGFEGERGKPGLPGEKGEAGDPGRPGDLGPVGYQGMKGEKGSRGEKGSRGPKGYKGEKGKRGIDGVDGVKGEMGYPGLPGCKGSPGFDGIQGPPGPKGDPGAFGLKGEKGEPGADGEAGRPGSSGPSGDEGQPGEPGPPGEKGEAGDEGNPGPDGAPGERGGPGERGPRGTPGTRGPRGDPGEAGPQGDQGREGPVGVPGDPGEAGPIGPKGYRGDEGPPGSEGARGAPGPAGPPGDPGLMGERGEDGPAGNGTEGFPGFPGYPGNRGAPGINGTKGYPGLKGDEGEAGDPGDDNNDIAPRLLRVLLVTGLDLGPTALEAAADQH

SEQ ID NO: 41879 - protein, 107 aa, Homo sapiens
MRAARALLPLLLQACWTAAQDEPETPRAVAFQDCPVDLFFVLDTSESVALRLKPYGALVDKVKSFTKRFIDNLRDRYYRCDRNLVWNAGALHYSDEVEIIQGLTRMP

SEQ ID NO: 41880 - protein, 1019 aa, Homo sapiens
MLQGTCSVLLLWGILGAIQAQQQEVISPDTTERNNNCPEKTDCPIHVYFVLDTSESVTMQSPTDILLFHMKQFVPQFISQLQNEFYLDQVALSWRYGGLHFSDQVEVFSPPGSDRASFIKNLQGISSFRRGTFTDCALANMTEQIRQDRSKGTVHFAVVITDGHVTGSPCGGIKLQAERAREEGIRLFAVAPNQNLKEQGLRDIASTPHELYRNDYATMLPDSTEIDQDTINRIIKVMKHEAYGECYKVSCLEIPGPSGPKGYRGQKGAKGNMGEPGEPGQKGRQGDPGIEGPIGFPGPKGVPGFKGEKGEFGADGRKGAPGLAGKNGTDGQKGKLGRIGPPGCKGDPGNRGPDGYPGEAGSPGERGDQGGKGDPGRPGRRGPPGEIGAKGSKGYQGNSGAPGSPGVKGAKGGPGPRGPKGEPGRRGDPGTKGSPGSDGPKGEKGDPGPEGPRGLAGEVGNKGAKGDRGLPGPRGPQGALGEPGKQGSRGDPGDAGPRGDSGQPGPKGDPGRPGFSYPGPRGAPGEKGEPGPRGPEGGRGDFGLKGEPGRKGEKGEPADPGPPGEPGPRGPRGVPGPEGEPGPPGDPGLTECDVMTYVRETCGCCDCEKRCGALDVVFVIDSSESIGYTNFTLEKNFVINVVNRLGAIAKDPKSETGTRVGVVQYSHEGTFEAIQLDDERIDSLSSFKEAVKNLEWIAGGTWTPSALKFAYDRLIKESRRQKTRVFAVVITDGRHDPRDDDLNLRALCDRDVTVTAIGIGDMFHEKHESENLYSIACDKPQQVRNMTLFSDLVAEKFIDDMEDVLCPDPQIVCPDLPCQTELSVAQCTQRPVDIVFLLDGSERLGEQNFHKARRFVEQVARRLTLARRDDDPLNARVALLQFGGPGEQQVAFPLSHNLTAIHEALETTQYLNSFSHVGAGVVHAINAIVRSPRGGARRHAELSFVFLTDGVTGNDSLHESAHSMRKQNVVPTVLALGSDVDMDVLTTLSLGDRAAVFHEKDYDSLAQPGFFDRFIRWIC

SEQ ID NO: 41881 - protein, 828 aa, Homo sapiens
MLQGTCSVLLLWGILGAIQAQQQEVISPDTTERNNNCPEKTDCPIHVYFVLDTSESVTMQSPTDILLFHMKQFVPQFISQLQNEFYLDQVALSWRYGGLHFSDQVEVFSPPGSDRASFIKNLQGISSFRRGTFTDCALANMTEQIRQDRSKGTVHFAVVITDGHVTGSPCGGIKLQAERAREEGIRLFAVAPNQNLKEQGLRDIASTPHELYRNDYATMLPDSTEIDQDTINRIIKVMKHEAYGECYKVSCLEIPGPSGPKGYRGQKGAKGNMGEPGEPGQKGRQGDPGIEGPIGFPGPKGVPGFKGEKGEFGADGRKGAPGLAGKNGTDGQKGKLGRIGPPGCKGDPGNRGPDGYPGEAGSPGERGDQGGKGDPGRPGRRGPPGEIGAKGSKGYQGNSGAPGSPGVKGAKGGPGPRGPKGEPGRRGDPGTKGSPGSDGPKGEKGDPGPEGPRGLAGEVGNKGAKGDRGLPGPRGPQGALGEPGKQGSRGDPGDAGPRGDSGQPGPKGDPGRPGFSYPGPRGAPGEKGEPGPRGPEGGRGDFGLKGEPGRKGEKGEPADPGPPGEPGPRGPRGVPGPEGEPGPPGDPGLTECDVMTYVRETCGCCDCEKRCGALDVVFVIDSSESIGYTNFTLEKNFVINVVNRLGAIAKDPKSETGTRVGVVQYSHEGTFEAIQLDDERIDSLSSFKEAVKNLEWIAGGTWTPSALKFAYDRLIKESRRQKTRVFAVVITDGRHDPRDDDLNLRALCDRDVTVTAIGIGDMFHEKHESENLYSIACDKPQQVRNMTLFSDLVAEKFIDDMEDVLCPDPQIVCPDLPCQTGLDGAVLC

SEQ ID NO: 41882 - protein, 918 aa, Homo sapiens
MLQGTCSVLLLWGILGAIQAQQQEVISPDTTERNNNCPEKTDCPIHVYFVLDTSESVTMQSPTDILLFHMKQFVPQFISQLQNEFYLDQVALSWRYGGLHFSDQVEVFSPPGSDRASFIKNLQGISSFRRGTFTDCALANMTEQIRQDRSKGTVHFAVVITDGHVTGSPCGGIKLQAERAREEGIRLFAVAPNQNLKEQGLRDIASTPHELYRNDYATMLPDSTEIDQDTINRIIKVMKHEAYGECYKVSCLEIPGPSGPKGYRGQKGAKGNMGEPGEPGQKGRQGDPGIEGPIGFPGPKGVPGFKGEKGEFGADGRKGAPGLAGKNGTDGQKGKLGRIGPPGCKGDPGNRGPDGYPGEAGSPGERGDQGGKGDPGRPGRRGPPGEIGAKGSKGYQGNSGAPGSPGVKGAKGGPGPRGPKGEPGRRGDPGTKGSPGSDGPKGEKGDPGPEGPRGLAGEVGNKGAKGDRGLPGPRGPQGALGEPGKQGSRGDPGDAGPRGDSGQPGPKGDPGRPGFSYPGPRGAPGEKGEPGPRGPEGGRGDFGLKGEPGRKGEKGEPADPGPPGEPGPRGPRGVPGPEGEPGPPGDPGLTECDVMTYVRETCGCCDCEKRCGALDVVFVIDSSESIGYTNFTLEKNFVINVVNRLGAIAKDPKSETGTRVGVVQYSHEGTFEAIQLDDERIDSLSSFKEAVKNLEWIAGGTWTPSALKFAYDRLIKESRRQKTRVFAVVITDGRHDPRDDDLNLRALCDRDVTVTAIGIGDMFHEKHESENLYSIACDKPQQVRNMTLFSDLVAEKFIDDMEDVLCPDPQIVCPDLPCQTDAPWPGGEPPVTFLRTEEGPDATFPRTIPLIQQLLNATELTQDPAAYSQLVAVLVYTAERAKFATGVERQDWMELFIDTFKLVHRDIVGDPETALALC

SEQ ID NO: 41883 - protein, 918 aa, Homo sapiens; identical to SEQ ID NO: 41882

SEQ ID NO: 41884 - protein, 828 aa, Homo sapiens; identical to SEQ ID NO: 41881

SEQ ID NO: 41885 - protein, 180 aa, Homo sapiens
MLQGTCSVLLLWGILGAIQAQQQEVISPDTTERNNNCPEKTDCPIHVYFVLDTSESVTMQSPTDILLFHMKQFVPQFISQLQNEFYLDQVALSWRYGGLHFSDQVEVFSPPGSDRASFIKNLQGISSFRRGTFTDCALANMTEQIRQDRSKGTVHFAVVITDGHVTGSPCGGIKLQAERA

SEQ ID NO: 41886 - protein, 744 aa, Homo sapiens
MAVLPGPLQLLGVLLTISLSSIRLIQAGAYYGIKPLPPQIPPQMPPQIPQYQPLGQQVPHMPLAKDGLAMGKEMPHLQYGKEYPHLPQYMKEIQPAPRMGKEAVPKKGKEIPLASLRGEQGPRGEPGPRGPPGPPGLPGHGIPGIKGKPGPQGYPGVGKPGMPGMPGKPGAMGMPGAKGEIGQKGEIGPMGIPGPQGPPGPHGLPGIGKPGGPGLPGQPGPKGDRGPKGLPGPQGLRGPKGDKGFGMPGAPGVKGPPGMHGPPGPVGLPGVGKPGVTGFPGPQGPLGKPGAPGEPGPQGPIGVPGVQGPPGIPGIGKPGQDGIPGQPGFPGGKGEQGLPGLPGPPGLPGIGKPGFPGPKGDRGMGGVPGALGPRGEKGPIGAPGIGGPPGEPGLPGIPGPMGPPGAIGFPGPKGEGGIVGPQGPPGPKGEPGLQGFPGKPGFLGEVGPPGMRGLPGPIGPKGEAGQKGVPGLPGVPGLLGPKGEPGIPGDQGLQGPPGIPGIGGPSGPIGPPGIPGPKGEPGLPGPPGFPGIGKPGVAGLHGPPGKPGALGPQGQPGLPGPPGPPGPPGPPAVMPPTPPPQGEYLPDMGLGIDGVKPPHAYGAKKGKNGGPAYEMPAFTAELTAPFPPVGAPVKFNKLLYNGRQNYNPQTGIFTCEVPGVYYFAYHVHCKGGNVWVALFKNNEPVMYTYDEYKKGFLDQASGSAVLLLRPGDRVFLQMPSEQAAGLYAGQYVHSSFSGYLLYPM

SEQ ID NO: 41887 - protein, 744 aa, Homo sapiens; identical to SEQ ID NO: 41886

SEQ ID NO: 41888 - protein, 114 aa, Homo sapiens
MAVLPGPLQLLGVLLTISLSSIRLIQAGAYYGIKPLPPQIPPQMPPQIPQYQPLGQQVPHMPLAKDGLAMGKEMPHLQYGKEYPHLPQYMKEIQPAPRMGKEAVPKKGKEIPLA

SEQ ID NO: 41889 - protein, 686 aa, Homo sapiens
MVAERTHKAAATGARGPGELGAPGTVALVAARAERGARLPSPGSCGLLTLALCSLALSLLAHFRTAELQARVLRLEAERGEQQMETAILGRVNQLLDEKWKLHSRRRREAPKTSPGCNCPPGPPGPTGRPGLPGDKGAIGMPGRVGSPGDAGLSIIGPRGPPGQPGTRGFPGFPGPIGLDGKPGHPGPKGDMGLTGPPGQPGPQGQKGEKGQCGEYPHRLLPLLNSVRLAPPPVIKRRTFQGEQSQASIQGPPGPPGPPGPSGPLGHPGLPGPMGPPGLPGPPGPKGDPGIQGYHGRKGERGMPGMPGKHGAKGAPGIAVAGMKGEPGIPGTKGEKGAEGSPGLPGLLGQKGEKGDAGNSIGGGRGEPGPPGLPGPPGPKGEAGVDGQVGPPGQPGDKGERGAAGEQGPDGPKGSKGEPGKGEMVDYNGNINEALQEIRTLALMGPPGLPGQIGPPGAPGIPGQKGEIGLPGPPGHDGEKGPRGKPGDMGPPGPQGPPGKDGPPGVKGENGHPGSPGEKGEKGETGQAGSPGEKGEAGEKGNPGAEVPGLPGPEGPPGPPGLQGVPGPKGEAGLDGAKGEKGFQGEKGDRGPLGLPGTPGPIGVPGPAGPKGERGSKGDPGMTGPTGAAGLPGLHGPPGDKGNRGERGKKGSRGPKGDKGDQGAPGLDAPCPLGEDGLPVQGCWNK

SEQ ID NO: 41890 - protein, 445 aa, Homo sapiens
MTGSSFSLAHLLIISGLLCYSAGCLALPSLDQKKRGGHKACCLLTPPPPPLFPPPFFRGGRSPLLSPDMKNLMLELETSQSPCMQGSLGSPGPPGPQGPPGLPGKTGPKGEKGELGRPGRKGRPGPPGVPGMPGPIGWPGPEGPRGEKGDLGMMGLPGSRGPMGSKGYPGSRGEKGSRGEKGDLGPKGEKGFPGFPGMLGQKGEMGPKGEPGIAGHRGPTGRPGKRGKQGQKGDSGVMGPPGKPGPSGQPGRPGPPGPPPAGQLIMGPKGERGFPGPPGRCLCGPTMNVNNPSYGESVYGPSSPRVPVIFVVNNQEELERLNTQNAIAFRRDQRSLYFKDSLGWLPIQLTPFYPVDYTADQHGTCGDGLLQPGEECDDGNSDVGDDCIRCHRAYCGDGHRHEGVEDCDGSDFGYLTCETYLPGSYGDLQCTQYCYIDSTPCRYFT

SEQ ID NO: 41891 - protein, 291 aa, Homo sapiens
MVVLNPMTLGIYLQLFFLSIVSQPTFINSVLPISAALPSLDQKKRGGHKACCLLTPPPPPLFPPPFFRGGRSPLLSPDMKNLMLELETSQSPCMQGSLGSPGPPGPQGPPGLPGKTGPKGEKGELGRPGRKGRPGPPGVPGMPGPIGWPGPEGPRGEKGDLGMMGLPGSRGPMGSKGYPGSRGEKGSRGEKGDLGPKGEKGFPGFPGMLGQKGEMGPKGEPGIAGHRGPTGRPGKRGKQSSRTPCTLPRRPPVPCGQGSRSPVTVVAGKESQACLLPRFEEDYISSGTERG

SEQ ID NO: 41892 - protein, 421 aa, Homo sapiens
MVVLNPMTLGIYLQLFFLSIVSQPTFINSVLPISAALPSLDQKKRGGHKACCLLTPPPPPLFPPPFFRGGRSPGPPGLPGKTGPKGEKGELGRPGRKGRPGPPGVPGMPGPIGWPGPEGPRGEKGDLGMMGLPGSRGPMGSKGYPGSRGEKGSRGEKGDLGPKGEKGFPGFPGMLGQKGEMGPKGEPGIAGHRGPTGRPGKRGKQGQKGDSGVMGPPGKPGPSGQPGRPGPPGPPPAGQLIMGPKGERGFPGPPGRCLCGPTMNVNNPSYGESVYGPSSPRVPVIFVVNNQEELERLNTQNAIAFRRDQRSLYFKDSLGWLPIQLTPFYPVDYTADQHGTCGDGLLQPGEECDDGNSDVGDDCIRCHRAYCGDGHRHEGVEDCDGSDFGYLTCETYLPGSYGDLQCTQYCYIDSTPCRYFT

SEQ ID NO: 41893 - protein, 446 aa, Homo sapiens
MVVLNPMTLGIYLQLFFLSIVSQPTFINSVLPISAALPSLDQKKRGGHKACCLLTPPPPPLFPPPFFRGGRSPLLSPDMKNLMLELETSQSPCMQGSLGSPGPPGPQGPPGLPGKTGPKGEKGRPGPPGVPGMPGPIGWPGPEGPRGEKGDLGMMGLPGSRGPMGSKGYPGSRGEKGSRGEKGDLGPKGEKGFPGFPGMLGQKGEMGPKGEPGIAGHRGPTGRPGKRGKQGQKGDSGVMGPPGKPGPSGQPGRPGPPGPPPAGQLIMGPKGERGFPGPPGRCLCGPTMNVNNPSYGESVYGPSSPRVPVIFVVNNQEELERLNTQNAIAFRRDQRSLYFKDSLGWLPIQLTPFYPVDYTADQHGTCGDGLLQPGEECDDGNSDVGDDCIRCHRAYCGDGHRHEGVEDCDGSDFGYLTCETYLPGSYGDLQCTQYCYIDSTPCRYFT

SEQ ID NO: 41894 - protein, 455 aa, Homo sapiens
MVVLNPMTLGIYLQLFFLSIVSQPTFINSVLPISAALPSLDQKKRGGHKACCLLTPPPPPLFPPPFFRGGRSPLLSPDMKNLMLELETSQSPCMQGSLGSPGPPGPQGPPGLPGKTGPKGEKGELGRPGRKGRPGPPGVPGMPGPIGWPGPEGPRGEKGDLGMMGLPGSRGPMGSKGYPGSRGEKGSRGEKGDLGPKGEKGFPGFPGMLGQKGEMGPKGEPGIAGHRGPTGRPGKRGKQGQKGDSGVMGPPGKPGPSGQPGRPGPPGPPPAGQLIMGPKGERGFPGPPGRCLCGPTMNVNNPSYGESVYGPSSPRVPVIFVVNNQEELERLNTQNAIAFRRDQRSLYFKDSLGWLPIQLTPFYPVDYTADQHGTCGDGLLQPGEECDDGNSDVGDDCIRCHRAYCGDGHRHEGVEDCDGSDFGYLTCETYLPGSYGDLQCTQYCYIDSTPCRYFT

SEQ ID NO: 41895 - protein, 445 aa, Homo sapiens; identical to SEQ ID NO: 41890

SEQ ID NO: 41896 - protein, 194 aa, Homo sapiens
ISGLLCYSAGCLALPSLDQKKRGGHKACCLLTPPPPPLFPPPFFRGGRSPGPPGLPGKTGPKGEKGELGRPGRKGRPGPPGVPGMPGPIGWPGPEGPRGEKGDLGMMGLPGSRGPMGSKGYPGSRGEKGSRGEKGDLGPKGEKGFPGFPGMLGQKGEMGPKGEPGIAGHRGPTGRPGKRGKQGQKGDSGVMGPP

SEQ ID NO: 41897 - protein, 445 aa, Homo sapiens
MTGSSFSLAHLLIISGLLCYSAGCLALPSLDQKKRGGHKACCLLTPPPPPLFPPPFFRGGRSPLLSPDMKNLMLELETSQSPCMQGSLGSPGPPGPQGPPGLPGKTGPKGEKGELGRPGRKGRPGPPGVPGMPGPIGWPGPEGPRGEKGDLGMMGLPGSRGPMGSKGYPGSRGEKGSRGEKGDLGPKGEKCNPLLLLFPSFQGEMGPKGEPGIAGHRGPTGRPGKRGKQGQKGDSGVMGPPGKPGPSGQPGRPGPPGPPPAGQLIMGPKGERGFPGPPGRCLCGPTMNVNNPSYGESVYGPSSPRVPVIFVVNNQEELERLNTQNAIAFRRDQRSLYFKDSLGWLPIQLTPFYPVDYTADQHGTCGDGLLQPGEECDDGNSDVGDDCIRCHRAYCGDGHRHEGVEDCDGSDFGYLTCETYLPGSYGDLQCTQYCYIDSTPCRYFT

SEQ ID NO: 41898 - protein, 686 aa, Homo sapiens
MADRRRAWNTEDDLPVYLARPGSAAQTPRQKYGGMFAAVEGAYENKTIDFDAYSVGRRGSARTPRSAGRPDAVGLPGPGGSEDTASDVSEPSGSAVSSPGERDERPPTLRIRRPAPRDLPLGRDNGQSDRLLIKGGRIINDDQSLYADVYLEDGLIKQIGENLIVPGGVKTIEANGRMVIPGGIDVNTYLQKPSQGMTAADDFFQGTRAALVGGTTMIIDHVVPEPGSSLLTSFEKWHEAADTKSCCDYSLHVDITSWYDGVREELEVLVQDKGVNSFQVYMAYKDVYQMSDSQLYEAFTFLKGLGAVILVHAENGDLIAQEQKRILEMGITGPEGHALSRPEELEAEAVFRAITIAGRINCPVYITKVMSKSAADIIALARKKGPLVFGEPIAASLGTDGTHYWSKNWAKAAAFVTSPPLSPDPTTPDYLTSLLACGDLQVTGSGHCPYSTAQKAVGKDNFTLIPEGVNGIEERMTVVWDKAVATGKMDENQFVAVTSTNAAKIFNLYPRKGRIAVGSDADVVIWDPDKLKTITAKSHKSAVEYNIFEGMECHGSPLVVISQGKIVFEDGNINVNKGMGRFIPRKAFPEHLYQRVKIRNKVFGLQGVSRGMYDGPVYEVPATPKYATPAPSAKSSPSKHQPPPIRNLHQSNFSLSGAQIDDNNPRRTGHRIVAPPGGRSNITSLG

SEQ ID NO: 41899 - protein, 572 aa, Homo sapiens
MSYQGKKSIPHITSDRLLIKGGRIINDDQSLYADVYLEDGLIKQIGENLIVPGGVKTIEANGRMVIPGGIDVNTYLQKPSQGMTAADDFFQGTRAALVGGTTMIIDHVVPEPGSSLLTSFEKWHEAADTKSCCDYSLHVDITSWYDGVREELEVLVQDKGVNSFQVYMAYKDVYQMSDSQLYEAFTFLKGLGAVILVHAENGDLIAQEQKRILEMGITGPEGHALSRPEELEAEAVFRAITIAGRINCPVYITKVMSKSAADIIALARKKGPLVFGEPIAASLGTDGTHYWSKNWAKAAAFVTSPPLSPDPTTPDYLTSLLACGDLQVTGSGHCPYSTAQKAVGKDNFTLIPEGVNGIEERMTVVWDKAVATGKMDENQFVAVTSTNAAKIFNLYPRKGRIAVGSDADVVIWDPDKLKTITAKSHKSAVEYNIFEGMECHGSPLVVISQGKIVFEDGNINVNKGMGRFIPRKAFPEHLYQRVKIRNKVFGLQGVSRGMYDGPVYEVPATPKYATPAPSAKSSPSKHQPPPIRNLHQSNFSLSGAQIDDNNPRRTGHRIVAPPGGRSNITSLG

SEQ ID NO: 41900 - protein, 570 aa, Homo sapiens
MQKMNNEVVDKSDRLLIKGGRIINDDQSLYADVYLEDGLIKQIGENLIVPGGVKTIEANGRMVIPGGIDVNTYLQKPSQGMTAADDFFQGTRAALVGGTTMIIDHVVPEPGSSLLTSFEKWHEAADTKSCCDYSLHVDITSWYDGVREELEVLVQDKGVNSFQVYMAYKDVYQMSDSQLYEAFTFLKGLGAVILVHAENGDLIAQEQKRILEMGITGPEGHALSRPEELEAEAVFRAITIAGRINCPVYITKVMSKSAADIIALARKKGPLVFGEPIAASLGTDGTHYWSKNWAKAAAFVTSPPLSPDPTTPDYLTSLLACGDLQVTGSGHCPYSTAQKAVGKDNFTLIPEGVNGIEERMTVVWDKAVATGKMDENQFVAVTSTNAAKIFNLYPRKGRIAVGSDADVVIWDPDKLKTITAKSHKSAVEYNIFEGMECHGSPLVVISQGKIVFEDGNINVNKGMGRFIPRKAFPEHLYQRVKIRNKVFGLQGVSRGMYDGPVYEVPATPKYATPAPSAKSSPSKHQPPPIRNLHQSNFSLSGAQIDDNNPRRTGHRIVAPPGGRSNITSLG

SEQ ID NO: 41901 - protein, 572 aa, Homo sapiens; identical to SEQ ID NO: 41899

SEQ ID NO: 41902 - protein, 277 aa, Homo sapiens
MNGFASLLRRNQFILLVLFLLQIQSLGLDIDSRPTAEVCATHTISPGPKGDDGEKGDPGEEGKHGKVGRMGPKGIKGELGDMGDQGNIGKTGPIGKKGDKGEKGLLGIPGEKGKAGTVCDCGRYRKFVGQLDISIARLKTSMKFVKNVIAGIRETEEKFYYIVQEEKNYRESLTHCRIRGGMLAMPKDEAANTLIADYVAKSGFFRVFIGVNDLEREGQYMFTDNTPLQNYSNWNEGEPSDPYGHEDCVEMLSSGRWNDTECHLTMYFVCEFIKKKK

SEQ ID NO: 41903 - protein, 268 aa, Homo sapiens
MTPALCRSSSLASKGMRERRETKAPPDGLEESAPREKKQSQPVVTASDISKRKCTSSFVEMGSQGDMGDKGQKGSVGRHGKIGPIGSKGEKGDSGDIGPPGPNGEPGLPCECSQLRKAIGEMDNQVSQLTSELKFIKNAVAGVRETESKIYLLVKEEKRYADAQLSCQGRGGTLSMPKDEAANGLMAAYLAQAGLARVFIGINDLEKEGAFVYSDHSPMRTFNKWRSGEPNNAYDEEDCVEMVASGGWNDVACHTTMYFMCEFDKENM

SEQ ID NO: 41904 - protein, 271 aa, Homo sapiens
MRGNLALVGVLISLAFLSLLPSGHPQPAGDDACSVQILVPGLKGDAGEKGDKGAPGRPGRVGPTGEKGDMGDKGQKGSVGRHGKIGPIGSKGEKGDSGDIGPPGPNGEPGLPCECSQLRKAIGEMDNQVSQLTSELKFIKNAVAGVRETESKIYLLVKEEKRYADAQLSCQGRGGTLSMPKDEAANGLMAAYLAQAGLARVFIGINDLEKEGAFVYSDHSPMRTFNKWRSGEPNNAYDEEDCVEMVASGGWNDVACHTTMYFMCEFDKENM

SEQ ID NO: 41905 - protein, 247 aa, Homo sapiens
MRGNLALVGVLISLAFLSLLPSGHPQPAGDDACSVQILVPGLKGDAGEKGDKGAPGRPGRVGPTGEKGEKGDSGDIGPPGPNGEPGLPCECSQLRKAIGEMDNQVSQLTSELKFIKNAVAGVRETESKIYLLVKEEKRYADAQLSCQGRGGTLSMPKDEAANGLMAAYLAQAGLARVFIGINDLEKEGAFVYSDHSPMRTFNKWRSGEPNNAYDEEDCVEMVASGGWNDVACHTTMYFMCEFDKENM

SEQ ID NO: 41906 - protein, 285 aa, Homo sapiens
MKKQRGVGVLPALRMRGNLALVGVLISLAFLSLLPSGHPQPAGDDACSVQILVPGLKGDAGEKGDKGAPGRPGRVGPTGEKGDMGDKGQKGSVGRHGKIGPIGSKGEKGDSGDIGPPGPNGEPGLPCECSQLRKAIGEMDNQVSQLTSELKFIKNAVAGVRETESKIYLLVKEEKRYADAQLSCQGRGGTLSMPKDEAANGLMAAYLAQAGLARVFIGINDLEKEGAFVYSDHSPMRTFNKWRSGEPNNAYDEEDCVEMVASGGWNDVACHTTMYFMCEFDKENM

SEQ ID NO: 41907 - protein, 221 aa, Homo sapiens
MWWVPPSPYGCLPCALPGDMGDKGQKGSVGRHGKIGPIGSKGEKGDSGDIGPPGPNGEPGLPCECSQLRKAIGEMDNQVSQLTSELKFIKNAVAGVRETESKIYLLVKEEKRYADAQLSCQGRGGTLSMPKDEAANGLMAAYLAQAGLARVFIGINDLEKEGAFVYSDHSPMRTFNKWRSGEPNNAYDEEDCVEMVASGGWNDVACHTTMYFMCEFDKENM

SEQ ID NO: 41908 - protein, 221 aa, Homo sapiens
MWWVPPSPYGCLPCALPGDAGEKGDKGAPGRPGRVGPTGEKGEKGDSGDIGPPGPNGEPGLPCECSQLRKAIGEMDNQVSQLTSELKFIKNAVAGVRETESKIYLLVKEEKRYADAQLSCQGRGGTLSMPKDEAANGLMAAYLAQAGLARVFIGINDLEKEGAFVYSDHSPMRTFNKWRSGEPNNAYDEEDCVEMVASGGWNDVACHTTMYFMCEFDKENM

SEQ ID NO: 41909 - protein, 197 aa, Homo sapiens
MWWVPPSPYGCLPCALPGEKGDSGDIGPPGPNGEPGLPCECSQLRKAIGEMDNQVSQLTSELKFIKNAVAGVRETESKIYLLVKEEKRYADAQLSCQGRGGTLSMPKDEAANGLMAAYLAQAGLARVFIGINDLEKEGAFVYSDHSPMRTFNKWRSGEPNNAYDEEDCVEMVASGGWNDVACHTTMYFMCEFDKENM

SEQ ID NO: 41910 - protein, 742 aa, Homo sapiens
MKDDFAEEEEVQSFGYKRFGIQEGTQCTKCKNNWALKFSIILLYILCALLTITVAILGYKVVEKMDNVTGGMETSRQTYDDKLTAVESDLKKLGDQTGKKAISTNSELSTFRSDILDLRQQLREITEKTSKNKDTLEKLQASGDALVDRQSQLKETLENNSFLITTVNKTLQAYNGYVTNLQQDTSVLQGNLQNQMYSHNVVIMNLNNLNLTQVQQRNLITNLQRSVDDTSQAIQRIKNDFQNLQQVFLQAKKDTDWLKEKVQSLQTLAANNSALAKANNDTLEDMNSQLNSFTGQMENITTISQANEQNLKDLQDLHKDAENRTAIKFNQLEERFQLFETDIVNIISNISYTAHHLRTLTSNLNEVRTTCTDTLTKHTDDLTSLNNTLANIRLDSVSLRMQQDLMRSRLDTEVANLSVIMEEMKLVDSKHGQLIKNFTILQGPPGPRGPRGDRGSQGPPGPTGNKGQKGEKGEPGPPGPAGERGPIGPAGPPGERGGKGSKGSQGPKGSRGSPGKPGPQGSSGDPGPPGPPGKEGLPGPQGPPGFQGLQGTVGEPGVPGPRGLPGLPGVPGMPGPKGPPGPPGPSGAVVPLALQNEPTPAPEDNGCPPHWKNFTDKCYYFSVEKEIFEDAKLFCEDKSSHLVFINTREEQQWIKKQMVGRESHWIGLTDSERENEWKWLDGTSPDYKNWKAGQPDNWGHGHGPGEDCAGLIYAGQWNDFQCEDVNNFICEKDRETVLSSAL

SEQ ID NO: 41911 - protein, 972 aa, Homo sapiens
MGPGVLLLLLVATAWHGQGIPVIEPSVPELVVKPGATVTLRCVGNGSVEWDGPPSPHWTLYSDGSSSILSTNNATFQNTGTYRCTEPGDPLGGSAAIHLYVKDPARPWNVLAQEVVVFEDQDALLPCLLTDPVLEAGVSLVRVRGRPLMRHTNYSFSPWHGFTIHRAKFIQSQDYQCSALMGGRKVMSISIRLKVQKVIPGPPALTLVPAELVRIRGEAAQIVCSASSVDVNFDVFLQHNNTKLAIPQQSDFHNNRYQKVLTLNLDQVDFQHAGNYSCVASNVQGKHSTSMFFRVVESAYLNLSSEQNLIQEVTVGEGLNLKVMVEAYPGLQGFNWTYLGPFSDHQPEPKLANATTKDTYRHTFTLSLPRLKPSEAGRYSFLARNPGGWRALTFELTLRYPPEVSVIWTFINGSGTLLCAASGYPQPNVTWLQCSGHTDRCDEAQVLQVWDDPYPEVLSQEPFHKVTVQSLLTVETLEHNQTYECRAHNSVGSGSWAFIPISAGAHTHPPDEFLFTPVVVACMSIMALLLLLLLLLLYKYKQKPKYQVRWKIIESYEGNSYTFIDPTQLPYNEKWEFPRNNLQFGKTLGAGAFGKVVEATAFGLGKEDAVLKVAVKMLKSTAHADEKEALMSELKIMSHLGQHENIVNLLGACTHGGPVLVITEYCCYGDLLNFLRRKAEAMLGPSLSPGQDPEGGVDYKNIHLEKKYVRRDSGFSSQGVDTYVEMRPVSTSSNDSFSEQDLDKEDGRPLELRDLLHFSSQVAQGMAFLASKNCIHRDVAARNVLLTNGHVAKIGDFGLARDIMNDSNYIVKGNARLPVKWMAPESIFDCVYTVQSDVWSYGILLWEIFSLGLNPYPGILVNSKFYKLVKDGYQMAQPAFAPKNIYSIMQACWALEPTHRPTFQQICSFLQEQAQEDRRERDYTNLPSSSRSGGSGSSSSELEEESSSEHLTCCEQGDIAQPLLQPNNYQFC

SEQ ID NO: 41912 - protein, 501 aa, Homo sapiens
MRHTNYSFSPWHGFTIHRAKFIQSQDYQCSALMGGRKVMSISIRLKVQKVIPGPPALTLVPAELVRIRGEAAQIVCSASSVDVNFDVFLQHNNTKLAIPQQSDFHNNRYQKVLTLNLDQVDFQHAGNYSCVASNVQGKHSTSMFFRVVESAYLNLSSEQNLIQEVTVGEGLNLKVMVEAYPGLQGFNWTYLGPFSDHQPEPKLANATTKDTYRHTFTLSLPRLKPSEAGRYSFLARNPGGWRALTFELTLRYPPEVSVIWTFINGSGTLLCAASGYPQPNVTWLQCSGHTDRCDEAQVLQVWDDPYPEVLSQEPFHKVTVQSLLTVETLEHNQTYECRAHNSVGSGSWAFIPISAGAHTHPPDEFLFTPVVVACMSIMALLLLLLLLLLYKYKQKPKYQVRWKIIESYEGNSYTFIDPTQLPYNEKWEFPRNNLQFGKTLGAGAFGKVVEATAFGLGKEDAVLKVAVKMLKSTAHADEKEASGLYQSAEQQQKRWQRQQQQ

SEQ ID NO: 41913 - protein, 671 aa, Homo sapiens
MGPGVLLLLLVATAWHGQGIPVIEPSVPELVVKPGATVTLRCVGNGSVEWDGPPSPHWTLYSDGSSSILSTNNATFQNTGTYRCTEPGDPLGGSAAIHLYVKDPARPWNVLAQEVVVFEDQDALLPCLLTDPVLEAGVSLVRVRGRPLMRHTNYSFSPWHGFTIHRAKFIQSQDYQCSALMGGRKVMSISIRLKVQKVIPGPPALTLVPAELVRIRGEAAQIVCSASSVDVNFDVFLQHNNTKLAIPQQSDFHNNRYQKVLTLNLDQVDFQHAGNYSCVASNVQGKHSTSMFFRVVESAYLNLSSEQNLIQEVTVGEGLNLKVMVEAYPGLQGFNWTYLGPFSDHQPEPKLANATTKDTYRHTFTLSLPRLKPSEAGRYSFLARNPGGWRALTFELTLRYPPEVSVIWTFINGSGTLLCAASGYPQPNVTWLQCSGHTDRCDEAQVLQVWDDPYPEVLSQEPFHKVTVQSLLTVETLEHNQTYECRAHNSVGSGSWAFIPISAGAHTHPPDEFLFTPVVVACMSIMALLLLLLLLLLYKYKQKPKYQVRWKIIESYEGNSYTFIDPTQLPYNEKWEFPRNNLQFGKTLGAGAFGKVVEATAFGLGKEDAVLKVAVKMLKSTAHADEKEALMSELKIMSHLGQHENIVNLLGACTHGGTVASPARVWTPMWR

SEQ ID NO: 41914 - protein, 306 aa, Homo sapiens
MGPGVLLLLLVATAWHGQGIPVIEPSVPELVVKPGATVTLRCVGNGSVEWDGPPSPHWTLYSDGSSSILSTNNATFQNTGTYRCTEPGDPLGGSAAIHLYVKDPARPWNVLAQEVVVFEDQDALLPCLLTDPVLEAGVSLVRVRGRPLMRHTNYSFSPWHGFTIHRAKFIQSQDYQCSALMGGRKVMSISIRLKVQKVIPGPPALTLVPAELVRIRGEAAQIVCSASSVDVNFDVFLQHNNTKLAIPQQSDFHNNRYQKVLTLNLDQVDFQHAGNYSCVASNVQGKHSTSMFFRVVGTPSPSLCPA

SEQ ID NO: 41915 - protein, 377 aa, Homo sapiens
MLLLVTSLLLCELPHPAFLLIPEKSDLRTVAPASSLNVRFDSRTMNLSWDCQENTTFSKCFLTDKKNRVVEPRLSNNECSCTFREICLHEGVTFEVHVNTSQRGFQQKLLYPNSGREGTAAQNFSCFIYNADLMNCTWARGPTAPRDVQYFLYIRNSKRRREIRCPYYIQDSGTHVGCHLDNLSGLTSRNYFLVNGTSREIGIQFFDSLLDTKKIERFNPPSNVTVRCNTTHCLVRWKQPRTYQKLSYLDFQYQLDVHRKNTQPGTENLLINVSGDLENRYNFPSSEPRAKHSVKIRAADVRILNWSSWSEAIEFDHLGGIHPRGRERLPRRGLDREGNYLRPRGCRNGMDISASATRGNCFLDDAVNLYIIFYVFI

SEQ ID NO: 41916 - protein, 233 aa, Homo sapiens
MLLLVTSLLLCELPHPAFLLIPEKSDLRTVAPASSLNVRFDSRTMNLSWDCQENTTFSKCFLTDKKNRVVEPRLSNNECSCTFREICLHEGVTFEVHVNTSQRGFQQKLLYPNSGREGTAAQNFSCFIYNADLMNCTWARGPTAPRDVQYFLYIRNSKRRREIRCPYYIQDSGTHVGCHLDNLSGLTSRNYFLVNGTSREIGIQFFDSLLDTKKIGSLGYSGCSRQFHRSKTN

SEQ ID NO: 41917 - protein, 333 aa, Homo sapiens
MLLLVTSLLLCELPHPAFLLIPEKSDLRTVAPASSLNVRFDSRTMNLSWDCQENTTFSKCFLTDKKNRVVEPRLSNNECSCTFREICLHEGVTFEVHVNTSQRGFQQKLLYPNSGREGTAAQNFSCFIYNADLMNCTWARGPTAPRDVQYFLYIRNSKRRREIRCPYYIQDSGTHVGCHLDNLSGLTSRNYFLVNGTSREIGIQFFDSLLDTKKIERFNPPSNVTVRCNTTHCLVRWKQPRTYQKLSYLDFQYQLDVHRKNTQPGTENLLINVSGDLENRYNFPSSEPRAKHSVKIRAADVRILNWSSWSEAIEFGSLGYSGCSRQFHRSKTN

SEQ ID NO: 41918 - protein, 333 aa, Homo sapiens; identical to SEQ ID NO: 41917

SEQ ID NO: 41919 - protein, 286 aa, Homo sapiens
MLLLVTSLLLCELPHPAFLLIPEKSDLRTVAPASSLNVRFDSRTMNLSWDCQENTTFSKCFLTDKKNRVVEPRLSNNECSCTFREICLHEGVTFEVHVNTSQRGFQQKLLYPNSGREGTAAQNFSCFIYNADLMNCTWARGPTAPRDVQYFLYIRNSKRRREIRCPYYIQDSGTHVGCHLDNLSGLTSRNYFLVNGTSREIGIQFFDSLLDTKKIERFNPPSNVTVRCNTTHCLVRWKQPRTYQKLSYLDFQYQLDVHRKNTQPGTENLLVVLTTGTSALCTFMCS

SEQ ID NO: 41920 - protein, 410 aa, Homo sapiens
MLLLVTSLLLCELPHPAFLLIPEKSDLRTVAPASSLNVRFDSRTMNLSWDCQENTTFSKCFLTDKKNRVVEPRLSNNECSCTFREICLHEGVTFEVHVNTSQRGFQQKLLYPNSGREGTAAQNFSCFIYNADLMNCTWARGPTAPRDVQYFLYIRNSKRRREIRCPYYIQDSGTHVGCHLDNLSGLTSRNYFLVNGTSREIGIQFFDSLLDTKKIERFNPPSNVTVRCNTTHCLVRWKQPRTYQKLSYLDFQYQLDVHRKNTQPGTENLLINVSGDLENRYNFPSSEPRAKHSVKIRAADVRILNWSSWSEAIEFGSDDGNLGSVYIYVLLIVGTLVCGIVLGFLFKRFLRIQRLFPPVPQIKDKLNDNHEVEDEMGPQRHHRCGWNLYPTPGPSPGSGSSPRLGSESSL

SEQ ID NO: 41921 - protein, 400 aa, Homo sapiens
MLLLVTSLLLCELPHPAFLLIPEKSDLRTVAPASSLNVRFDSRTMNLSWDCQENTTFSKCFLTDKKNRVVEPRLSNNECSCTFREICLHEGVTFEVHVNTSQRGFQQKLLYPNSGREGTAAQNFSCFIYNADLMNCTWARGPTAPRDVQYFLYIRNSKRRREIRCPYYIQDSGTHVGCHLDNLSGLTSRNYFLVNGTSREIGIQFFDSLLDTKKIERFNPPSNVTVRCNTTHCLVRWKQPRTYQKLSYLDFQYQLDVHRKNTQPGTENLLINVSGDLENRYNFPSSEPRAKHSVKIRAADVRILNWSSWSEAIEFGSDDGNLGSVYIYVLLIVGTLVCGIVLGFLFKRFLRIQRLFPPVPQIKDKLNDNHEVEDEIIWEEFTPEEGKGYREEVLTVKEIT

SEQ ID NO: 41922 - protein, 400 aa, Homo sapiens; identical to SEQ ID NO: 41921

SEQ ID NO: 41923 - protein, 238 aa, Homo sapiens
MLLLVTSLLLCELPHPAFLLIPEKSDLRTVAPASSLNVRFDSRTMNLSWDCQENTTFSKCFLTDKKNRVVEPRLSNNECSCTFREICLHEGVTFEVHVNTSQRGFQQKLLYPNSGREGTAAQNFSCFIYNADLMNCTWARGPTAPRDVQYFLYIRNSKRRREIRCPYYIQDSGTHVGCHLDNLSGLTSRNYFLVNGTSREIGIQFFDSLLDTKKIERFNPPSNVTVRCNTTHCLVRWK

SEQ ID NO: 41924 - protein, 434 aa, Homo sapiens
MLLLVTSLLLCELPHPAFLLIPEKSDLRTVAPASSLNVRFDSRTMNLSWDCQENTTFSKCFLTDKKNRVVEPRLSNNECSCTFREICLHEGVTFEVHVNTSQRGFQQKLLYPNSGREGTAAQNFSCFIYNADLMNCTWARGPTAPRDVQYFLYIRNSKRRREIRCPYYIQDSGTHVGCHLDNLSGLTSRNYFLVNGTSREIGIQFFDSLLDTKKIERFNPPSNVTVRCNTTHCLVRWKQPRTYQKLSYLDFQYQLDVHRKNTQPGTENLLINVSGDLENRYNFPSSEPRAKHSVKIRAADVRILNWSSWSEAIEFGSHSVTQAGVQWHNLGSLQPPSPRLKRFSCLRLPGSDDGNLGSVYIYVLLIVGTLVCGIVLGFLFKRFLRIQRLFPPVPQIKDKLNDNHEVEDEIIWEEFTPEEGKGYREEVLTVKEIT

SEQ ID NO: 41925 - protein, 188 aa, Homo sapiens
MLLLVTSLLLCELPHPAFLLIPEKSDLRTVAPASSLNVRFDSRTMNLSWDCQENTTFSKCFLTDKKNRVVEPRLSNNECSCTFREICLHEGVTFEVHVNTSQRGFQQKLLYPNSGREGTAAQNFSCFIYNADLMNCTWARGPTAPRDVQYFLYIRNSKRRREIRCPYYIQDSGTHVGCHLDNLSGLTS

SEQ ID NO: 41926 - protein, 400 aa, Homo sapiens; identical to SEQ ID NO: 41921

SEQ ID NO: 41927 - protein, 267 aa, Homo sapiens
MNCTWARGPTAPRDVQYFLYIRNSKRRREIRCPYYIQDSGTHVGCHLDNLSGLTSRNYFLVNGTSREIGIQFFDSLLDTKKIERFNPPSNVTVRCNTTHCLVRWKQPRTYQKLSYLDFQYQLDVHRKNTQPGTENLLINVSGDLENRYNFPSSEPRAKHSVKIRAADVRILNWSSWSEAIEFGSDDGNLGSVYIYVLLIVGTLVCGIVLGFLFKRFLRIQRLFPPVPQIKDKLNDNHEVEDEIIWEEFTPEEGKGYREEVLTVKEIT

SEQ ID NO: 41928 - protein, 903 aa, Homo sapiens
MVLAQGLLSMALLALCWERSLAGAEETIPLQTLRCYNDYTSHITCRWADTQDAQRLVNVTLIRRVNEDLLEPVSCDLSDDMPWSACPHPRCVPRRCVIPCQSFVVTDVDYFSFQPDRPLGTRLTVTLTQHVQPPEPRDLQISTDQDHFLLTWSVALGSPQSHWLSPGDLEFEVVYKRLQDSWEDAAILLSNTSQATLGPEHLMPSSTYVARVRTRLAPGSRLSGRPSKWSPEVCWDSQPGDEAQPQNLECFFDGAAVLSCSWEVRKEVASSVSFGLFYKPSPDAGSAVLLREEECSPVLREGLGSLHTRHHCQIPVPDPATHGQYIVSVQPRRAEKHIKSSVNIQMAPPSLNVTKDGDSYSLRWETMKMRYEHIDHTFEIQYRKDTATWKDSKTETLQNAHSMALPALEPSTRYWARVRVRTSRTGYNGIWSEWSEARSWDTESVLPMWVLALIVIFLTIAVLLALRFCGIYGYRLRRKWEEKIPNPSKSHLFQNGSAELWPPGSMSAFTSGSPPHQGPWGSRFPELEGVFPVGFGDSEVSPLTIEDPKHVCDPPSGPDTTPAASDLPTEQPPSPQPGPPAASHTPEKQASSFDFNGPYLGPPHSRSLPDILGQPEPPQEGGSQKSPPPGSLEYLCLPAGGQVQLVPLAQAMGPGQAVEVERRPSQGAAGSPSLESGGGPAPPALGPRVGGQDQKDSPVAIPMSSGDTEDPGVASGYVSSADLVFTPNSGASSVSLVPSLGLPSDQTPSLCPGLASGPPGAPGPVKSGFEGYVELPPIEGRSPRSPRNNPVPPEAKSPVLNPGERPADVSPTSPQPEGLLVLQQVGDYCFLPGLGPGPLSLRSKPSSPGPGPEIKNLDQAFQVKKPPGQAVPQVPVIQLFKALKQQDYLSLPPWEVNKPGEVC

SEQ ID NO: 41929 - protein, 897 aa, Homo sapiens
MVLAQGLLSMALLALCWERSLAGAEETIPLQTLRCYNDYTSHITCRWADTQDAQRLVNVTLIRRVNEDLLEPVSCDLSDDMPWSACPHPRCVPRRCVIPCQSFVVTDVDYFSFQPDRPLGTRLTVTLTQHVQPPEPRDLQISTDQDHFLLTWSVALGSPQSHWLSPGDLEFEVVYKRLQDSWEDAAILLSNTSQATLGPEHLMPSSTYVARVRTRLAPGSRLSGRPSKWSPEVCWDSQPGDEAQPQNLECFFDGAAVLSCSWEVRKEVASSVSFGLFYKPSPDAGEEECSPVLREGLGSLHTRHHCQIPVPDPATHGQYIVSVQPRRAEKHIKSSVNIQMAPPSLNVTKDGDSYSLRWETMKMRYEHIDHTFEIQYRKDTATWKDSKTETLQNAHSMALPALEPSTRYWARVRVRTSRTGYNGIWSEWSEARSWDTESVLPMWVLALIVIFLTIAVLLALRFCGIYGYRLRRKWEEKIPNPSKSHLFQNGSAELWPPGSMSAFTSGSPPHQGPWGSRFPELEGVFPVGFGDSEVSPLTIEDPKHVCDPPSGPDTTPAASDLPTEQPPSPQPGPPAASHTPEKQASSFDFNGPYLGPPHSRSLPDILGQPEPPQEGGSQKSPPPGSLEYLCLPAGGQVQLVPLAQAMGPGQAVEVERRPSQGAAGSPSLESGGGPAPPALGPRVGGQDQKDSPVAIPMSSGDTEDPGVASGYVSSADLVFTPNSGASSVSLVPSLGLPSDQTPSLCPGLASGPPGAPGPVKSGFEGYVELPPIEGRSPRSPRNNPVPPEAKSPVLNPGERPADVSPTSPQPEGLLVLQQVGDYCFLPGLGPGPLSLRSKPSSPGPGPEIKNLDQAFQVKKPPGQAVPQVPVIQLFKALKQQDYLSLPPWEVNKPGEVC

SEQ ID NO: 41930 - protein, 229 aa, Homo sapiens
MPWSACPHPRCVPRRCVIPCQSFVVTDVDYFSFQPDRPLGTRLTVTLTQHVQPPEPRDLQISTDQDHFLLTWSVALGSPQSHWLSPGDLEFEVVYKRLQDSWEDAAILLSNTSQATLGPEHLMPSSTYVARVRTRLAPGSRLSGRPSKWSPEVCWDSQPGDEAQPQNLECFFDGAAVLSCSWEVRKEVASSVSFGLFYKPSPDAGEEECSPVLREGLGSLHTRHHCQIP

SEQ ID NO: 41931 - protein, 844 aa, Homo sapiens [sequence omitted]

SEQ ID NO: 41932 - protein, 889 aa, Homo sapiens
MVLAQGLLSMALLALCWERSLAGAEETIPLQTLRCYNDYTSHITCRWADTQDAQRLVNVTLIRRVNEDLLEPVSCDLSDDMPWSACPHPRCVPRRCVIPCQSFVVTDVDYFSFQPDRPLGTRLTVTLTQHVQPPEPRDLQISTDQDHFLLTWSVALGSPQSHWLSPGDLEFEVVYKRLQDSWEDAAILLSNTSQATLGPEHLMPSSTYVARVRTRLAPGSRLSGRPSKWSPEVCWDSQPGDEAQPQNLECFFDGAAVLSCSWEVRKEVASSVSFGLFYKPSPDAGEEECSPVLREGLGSLHTRHHCQIPVPDPATHGQYIVSVQPRRAEKHIKSSVNIQMAPPSLNVTKDGDSYSLRWETMKMRYEHIDHTFEIQYRKDTATWKDSKTETLQNAHSMALPALEPSTRYWARVRVRTSRTGYNGIWSEWSEARSWDTESVLPMWVLALIVIFLTIAVLLALRFCGIYGYRLRRKWEEKIPNPSKSHLFQNGSAELWPPGSMSAFTSGSPPHQGPWGSRFPELEGVFPVGFGDSEVSPLTIEDPKHVCDPPSGPDTTPAASDLPTEQPPSPQPGPPAASHTPEKQASSFDFNGPYLGPPHSRSLPDILGQPEPPQEGGSQKSPPPGSLEYLCLPAGGQVQLVPLAQAMGPGQAVEVERRPSQGAAGSPSLESGGGPAPPALGPRVGGQDQKDSPVAIPMSSGDTEDPGVASGYVSSADLVFTPNSGASSVSLVPSLGLPSDQTPSLCPGLASGPPGAPGPVKSGFEGYVELPPIEGRSPRSPRNNPVPPEAKSPVLNPGERPADVSPTSPQPEGLLVLQQVGDYCFLPGLGPGPLSLRSKPSSPGPGPEIKNLDQAFQVKKPPGQAVPQVPVIQLFKALVVSVMSVGPPVP

SEQ ID NO: 41933 - protein, 783 aa, Homo sapiens
MARLGNCSLTWAALIILLLPGSLEECGHISVSAPIVHLGDPITASCIIKQNCSHLDPEPQILWRLGAELQPGGRQQRLSDGTQESIITLPHLNHTQAFLSCCLNWGNSLQILDQVELRAGYPPAIPHNLSCLMNLTTSSLICQWEPGPETHLPTSFTLKSFKSRGNCQTQGDSILDCVPKDGQSHCCIPRKHLLLYQNMGIWVQAENALGTSMSPQLCLDPMDVVKLEPPMLRTMDPSPEAAPPQAGCLQLCWEPWQPGLHINQKCELRHKPQRGEASWALVGPLPLEALQYELCGLLPATAYTLQIRCIRWPLPGHWSDWSPSLELRTTERAPTVRLDTWWRQRQLDPRTVQLFWKPVPLEEDSGRIQGYVVSWRPSGQAGAILPLCNTTELSCTFHLPSEAQEVALVAYNSAGTSRPTPVVFSESRGPALTRLHAMARDPHSLWVGWEPPNPWPQGYVIEWGLGPPSASNSNKTWRMEQNGRATGFLLKENIRPFQLYEIIVTPLYQDTMGPSQHVYAYSQEMAPSHAPELHLKHIGKTWAQLEWVPEPPELGKSPLTHYTIFWTNAQNQSFSAILNASSRGFVLHGLEPASLYHIHLMAASQAGATNSTVLTLMTLTPEGSELHIILGLFGLLLLLTCLCGTAWLCCSPNRKNPLWPSVPDPAHSSLGSWVPTIMEEDAFQLPGLGTPPITKLTVLEEDEKKPVPWESHNSSETCGLPTLVQTYVLQGDPRAVSTQPQSQSGTSDQAGPPRRSAYFKDQIMLHPAPPNGLLCLFPITSVL

SEQ ID NO: 41934 - protein, 769 aa, Homo sapiens
MARLGNCSLTWAALIILLLPGSLEECGHISVSAPIVHLGDPITASCIIKQNCSHLDPEPQILWRLGAELQPGGRQQRLSDGTQESIITLPHLNHTQAFLSCCLNWGNSLQILDQVELRAGYPPAIPHNLSCLMNLTTSSLICQWEPGPETHLPTSFTLKSFKSRGNCQTQGDSILDCVPKDGQSHCCIPRKHLLLYQNMGIWVQAENALGTSMSPQLCLDPMDVVKLEPPMLRTMDPSPEAAPPQAGCLQLCWEPWQPGLHINQKCELRHKPQRGEASWALVGPLPLEALQYELCGLLPATAYTLQIRCIRWPLPGHWSDWSPSLELRTTERAPTVRLDTWWRQRQLDPRTVQLFWKPVPLEEDSGRIQGYVVSWRPSGQAGAILPLCNTTELSCTFHLPSEAQEVALVAYNSAGTSRPTPVVFSESRGPALTRLHAMARDPHSLWVGWEPPNPWPQGYVIEWGLGPPSASNSNKTWRMEQNGRATGFLLKENIRPFQLYEIIVTPLYQDTMGPSQHVYAYSQEMAPSHAPELHLKHIGKTWAQLEWVPEPPELGKSPLTHYTIFWTNAQNQSFSAILNASSRGFVLHGLEPASLYHIHLMAASQAGATNSTVLTLMTLTPAGRIPSGQVSQTQLTAAWAPGCPQSWRRMPSSCPALARHPSPSSQCWRRMKRSRCPGSPITAQRPVASPLWSRPMCSRGTQEQFPPSPNPSLAPAIRSFMGSCWAAPQAQGQGTISAVTPLSPSWRASPPAPSPMRTSGSRPAPWGPW

SEQ ID NO: 41935 - protein, 836 aa, Homo sapiens
MARLGNCSLTWAALIILLLPGSLEECGHISVSAPIVHLGDPITASCIIKQNCSHLDPEPQILWRLGAELQPGGRQQRLSDGTQESIITLPHLNHTQAFLSCCLNWGNSLQILDQVELRAGYPPAIPHNLSCLMNLTTSSLICQWEPGPETHLPTSFTLKSFKSRGNCQTQGDSILDCVPKDGQSHCCIPRKHLLLYQNMGIWVQAENALGTSMSPQLCLDPMDVVKLEPPMLRTMDPSPEAAPPQAGCLQLCWEPWQPGLHINQKCELRHKPQRGEASWALVGPLPLEALQYELCGLLPATAYTLQIRCIRWPLPGHWSDWSPSLELRTTERAPTVRLDTWWRQRQLDPRTVQLFWKPVPLEEDSGRIQGYVVSWRPSGQAGAILPLCNTTELSCTFHLPSEAQEVALVAYNSAGTSRPTPVVFSESRGPALTRLHAMARDPHSLWVGWEPPNPWPQGYVIEWGLGPPSASNSNKTWRMEQNGRATGFLLKENIRPFQLYEIIVTPLYQDTMGPSQHVYAYSQEMAPSHAPELHLKHIGKTWAQLEWVPEPPELGKSPLTHYTIFWTNAQNQSFSAILNASSRGFVLHGLEPASLYHIHLMAASQAGATNSTVLTLMTLTPEGSELHIILGLFGLLLLLTCLCGTAWLCCSPNRKNPLWPSVPDPAHSSLGSWVPTIMEEDAFQLPGLGTPPITKLTVLEEDEKKPVPWESHNSSETCGLPTLVQTYVLQGDPRAVSTQPQSQSGTSDQVLYGQLLGSPTSPGPGHYLRCDSTQPLLAGLTPSPKSYENLWFQASPLGTLVTPAPSQEDDCVFGPLLNFPLLQGIRVHGMEALGSF

SEQ ID NO: 41936 - protein, 863 aa, Homo sapiens
MARLGNCSLTWAALIILLLPGSLEECGHISVSAPIVHLGDPITASCIIKQNCSHLDPEPQILWRLGAELQPGGRQQRLSDGTQESIITLPHLNHTQAFLSCCLNWGNSLQILDQVELRAGYPPAIPHNLSCLMNLTTSSLICQWEPGPETHLPTSFTLKSFKSRGNCQTQGDSILDCVPKDGQSHCCIPRKHLLLYQNMGIWVQAENALGTSMSPQLCLDPMDVVKLEPPMLRTMDPSPEAAPPQAGCLQLCWEPWQPGLHINQKCELRHKPQRGEASWALVGPLPLEALQYELCGLLPATAYTLQIRCIRWPLPGHWSDWSPSLELRTTERAPTVRLDTWWRQRQLDPRTVQLFWKPVPLEEDSGRIQGYVVSWRPSGQAGAILPLCNTTELSCTFHLPSEAQEVALVAYNSAGTSRPTPVVFSESRGPALTRLHAMARDPHSLWVGWEPPNPWPQGYVIEWGLGPPSASNSNKTWRMEQNGRATGFLLKENIRPFQLYEIIVTPLYQDTMGPSQHVYAYSQEMAPSHAPELHLKHIGKTWAQLEWVPEPPELGKSPLTHYTIFWTNAQNQSFSAILNASSRGFVLHGLEPASLYHIHLMAASQAGATNSTVLTLMTLTPEGSELHIILGLFGLLLLLTCLCGTAWLCCSPNRKNPLWPSVPDPAHSSLGSWVPTIMEELPGPRQGQWLGQTSEMSRALTPHPCVQDAFQLPGLGTPPITKLTVLEEDEKKPVPWESHNSSETCGLPTLVQTYVLQGDPRAVSTQPQSQSGTSDQVLYGQLLGSPTSPGPGHYLRCDSTQPLLAGLTPSPKSYENLWFQASPLGTLVTPAPSQEDDCVFGPLLNFPLLQGIRVHGMEALGSF

SEQ ID NO: 41937 - protein, 783 aa, Homo sapiens; identical to SEQ ID NO: 41933

SEQ ID NO: 41938 - protein, 836 aa, Homo sapiens; identical to SEQ ID NO: 41935

SEQ ID NO: 41939 - protein, 836 aa, Homo sapiens; identical to SEQ ID NO: 41935

SEQ ID NO: 41940 - protein, 863 aa, Homo sapiens; identical to SEQ ID NO: 41936

SEQ ID NO: 41941 - protein, 388 aa, Homo sapiens
  VARIANT 1: note = MOD_RES - Any amino acid
XTSRPTPVVFSESRGPALTRLHAMARDPHSLWVGWEPPNPWPQGYVIEWGLGPPSASNSNKTWRMEQNGRATGFLLKAPSHAPELHLKHIGKTWAQLEWVPEPPELGKSPLTHYTIFWTNAQNQSFSAILNASSRGFVLHGLEPASLYHIHLMAASQAGATNSTVLTLMTLTPEGSELHIILGLFGLLLLLTCLCGTAWLCCSPNRKNPLWPSVPDPAHSSLGSWVPTIMEEDAFQLPGLGTPPITKLTVLEEDEKKPVPWESHNSSETCGLPTLVQTYVLQGDPRAVSTQPQSQSGTSDQVLYGQLLGSPTSPGPGHYLRCDSTQPLLAGLTPSPKSYENLWFQASPLGTLVTPAPSQEDDCVFGPLLNFPLLQGIRVHGMEALGSF

SEQ ID NO: 41942 - protein, 21 aa, Homo sapiens
MARLGNCSLTWAALIILLLPG

SEQ ID NO: 41943 - protein, 224 aa, Homo sapiens
MSAVGAATPYLHHPGDSHSGRVSFLGAQLPPEVAAMARLLGDLDRSTFRKLLKFVVSSLQGEDCREAVQRLGVSANLPEEQLGALLAGMHTLLQQALRLPPTSLKPDTFRDQLQELCIPQDLVGDLASVVFGSQRPLLDSVAQQQGAWLPHVADFRWRVDVAISTSALARSLQPSVLMQLKLSDGSAYRFEVPTAKFQELRYSVALVLKEMADLEKRCERRLQD

SEQ ID NO: 41944 - protein, 224 aa, Homo sapiens; identical to SEQ ID NO: 41943

SEQ ID NO: 41945 - protein, 224 aa, Homo sapiens; identical to SEQ ID NO: 41943

SEQ ID NO: 41946 - protein, 98 aa, Homo sapiens
MEASSEPPLDAKSDVTNQLVDFQWKLGMAVSSDTCRSLKYPYVAVMLKVADHSGQVKTKCFEMTIPQFQPQLLATSSLLSASNFYRQFKEIAAVIETV

SEQ ID NO: 41947 - protein, 85 aa, Homo sapiens
MEASSEPPLDAKSDVTNQLVDFQWKLGMAVSSDTCRSLKYPYVAVMLKVADHSGQVKTKCFEMTIPQFQNFYRQFKEIAAVIETV

SEQ ID NO: 41948 - protein, 85 aa, Homo sapiens; identical to SEQ ID NO: 41947

SEQ ID NO: 41949 - protein, 2489 aa, Homo sapiens
MGASSPRSPEPVGPPAPGLPFCCGGSLLAVVVLLALPVAWGQCNAPEWLPFARPTNLTDEFEFPIGTYLNYECRPGYSGRPFSIICLKNSVWTGAKDRCRRKSCRNPPDPVNGMVHVIKGIQFGSQIKYSCTKGYRLIGSSSATCIISGDTVIWDNETPICDRIPCGLPPTITNGDFISTNRENFHYGSVVTYRCNPGSGGRKVFELVGEPSIYCTSNDDQVGIWSGPAPQCIIPNKCTPPNVENGILVSDNRSLFSLNEVVEFRCQPGFVMKGPRRVKCQALNKWEPELPSCSRVCQPPPDVLHAERTQRDKDNFSPGQEVFYSCEPGYDLRGAASMRCTPQGDWSPAAPTCEVKSCDDFMGQLLNGRVLFPVNLQLGAKVDFVCDEGFQLKGSSASYCVLAGMESLWNSSVPVCEQIFCPSPPVIPNGRHTGKPLEVFPFGKTVNYTCDPHPDRGTSFDLIGESTIRCTSDPQGNGVWSSPAPRCGILGHCQAPDHFLFAKLKTQTNASDFPIGTSLKYECRPEYYGRPFSITCLDNLVWSSPKDVCKRKSCKTPPDPVNGMVHVITDIQVGSRINYSCTTGHRLIGHSSAECILSGNAAHWSTKPPICQRIPCGLPPTIANGDFISTNRENFHYGSVVTYRCNPGSGGRKVFELVGEPSIYCTSNDDQVGIWSGPAPQCIIPNKCTPPNVENGILVSDNRSLFSLNEVVEFRCQPGFVMKGPRRVKCQALNKWEPELPSCSRVCQPPPDVLHAERTQRDKDNFSPGQEVFYSCEPGYDLRGAASMRCTPQGDWSPAAPTCEVKSCDDFMGQLLNGRVLFPVNLQLGAKVDFVCDEGFQLKGSSASYCVLAGMESLWNSSVPVCEQIFCPSPPVIPNGRHTGKPLEVFPFGKTVNYTCDPHPDRGTSFDLIGESTIRCTSDPQGNGVWSSPAPRCGILGHCQAPDHFLFAKLKTQTNASDFPIGTSLKYECRPEYYGRPFSITCLDNLVWSSPKDVCKRKSCKTPPDPVNGMVHVITDIQVGSRINYSCTTGHRLIGHSSAECILSGNAAHWSTKPPICQRIPCGLPPTIANGDFISTNRENFHYGSVVTYRCNPGSGGRKVFELVGEPSIYCTSNDDQVGIWSGPAPQCIIPNKCTPPNVENGILVSDNRSLFSLNEVVEFRCQPGFVMKGPRRVKCQALNKWEPELPSCSRVCQPPPDVLHAERTQRDKDNFSPGQEVFYSCEPGYDLRGAASMRCTPQGDWSPAAPTCEVKSCDDFMGQLLNGRVLFPVNLQLGAKVDFVCDEGFQLKGSSASYCVLAGMESLWNSSVPVCEQIFCPSPPVIPNGRHTGKPLEVFPFGKAVNYTCDPHPDRGTSFDLIGESTIRCTSDPQGNGVWSSPAPRCGILGHCQAPDHFLFAKLKTQTNASDFPIGTSLKYECRPEYYGRPFSITCLDNLVWSSPKDVCKRKSCKTPPDPVNGMVHVITDIQVGSRINYSCTTGHRLIGHSSAECILSGNTAHWSTKPPICQRIPCGLPPTIANGDFISTNRENFHYGSVVTYRCNLGSRGRKVFELVGEPSIYCTSNDDQVGIWSGPAPQCIIPNKCTPPNVENGILVSDNRSLFSLNEVVEFRCQPGFVMKGPRRVKCQALNKWEPELPSCSRVCQPPPEILHGEHTPSHQDNFSPGQEVFYSCEPGYDLRGAASLHCTPQGDWSPEAPRCAVKSCDDFLGQLPHGRVLFPLNLQLGAKVSFVCDEGFRLKGSSVSHCVLVGMRSLWNNSVPVCEHIFCPNPPAILNGRHTGTPSGDIPYGKEISYTCDPHPDRGMTFNLIGESTIRCTSDPHGNGVWSSPAPRCELSVRAGHCKTPEQFPFASPTIPINDFEFPVGTSLNYECRPGYFGKMFSISCLENLVWSSVEDNCRRKSCGPPPEPFNGMVHINTDTQFGSTVNYSCNEGFRLIGSPSTTCLVSGNNVTWDKKAPICEIISCEPPPTISNGDFYSNNRTSFHNGTVVTYQCHTGPDGEQLFELVGERSIYCTSKDDQVGVWSSPPPRCISTNKCTAPEVENAIRVPGNRSFFTLTEIIRFRCQPGFVMVGSHTVQCQTNGRWGPKLPHCSRVCQPPPEILHGEHTLSHQDNFSPGQEVFYSCEPSYDLRGAASLHCTPQGDWSPEAPRCTVKSCDDFLGQLPHGRVLLPLNLQLGAKVSFVCDEGFRLKGRSASHCVLAGMKALWNSSVPVCEQIFCPNPPAILNGRHTGTPFGDIPYGKEISYACDTHPDRGMTFNLIGESSIRCTSDPQGNGVWSSPAPRCELSVPAACPHPPKIQNGHYIGGHVSLYLPGMTISYICDPGYLLVGKGFIFCTDQGIWSQLDHYCKEVNCSFPLFMNGISKELEMKKVYHYGDYVTLKCEDGYTLEGSPWSQCQADDRWDPPLAKCTSRTHDALIVGTLSGTIFFILLIIFLSWIILKHRKGNNAHENPKEVAIHLHSQGGSSVHPRTLQTNEENSRVLP

SEQ ID NO: 41950 - protein, 2039 aa, Homo sapiens
MGASSPRSPEPVGPPAPGLPFCCGGSLLAVVVLLALPVAWGQCNAPEWLPFARPTNLTDEFEFPIGTYLNYECRPGYSGRPFSIICLKNSVWTGAKDRCRRKSCRNPPDPVNGMVHVIKGIQFGSQIKYSCTKGYRLIGSSSATCIISGDTVIWDNETPICDRIPCGLPPTIANGDFISTNRENFHYGSVVTYRCNPGSGGRKVFELVGEPSIYCTSNDDQVGIWSGPAPQCIIPNKCTPPNVENGILVSDNRSLFSLNEVVEFRCQPGFVMKGPRRVKCQALNKWEPELPSCSRVCQPPPDVLHAERTQRDKDNFSPGQEVFYSCEPGYDLRGAASMRCTPQGDWSPAAPTCEVKSCDDFMGQLLNGRVLFPVNLQLGAKVDFVCDEGFQLKGSSASYCVLAGMESLWNSSVPVCEQIFCPSPPVIPNGRHTGKPLEVFPFGKTVNYTCDPHPDRGTSFDLIGESTIRCTSDPQGNGVWSSPAPRCGILGHCQAPDHFLFAKLKTQTNASDFPIGTSLKYECRPEYYGRPFSITCLDNLVWSSPKDVCKRKSCKTPPDPVNGMVHVITDIQVGSRINYSCTTGHRLIGHSSAECILSGNAAHWSTKPPICQRIPCGLPPTIANGDFISTNRENFHYGSVVTYRCNPGSGGRKVFELVGEPSIYCTSNDDQVGIWSGPAPQCIIPNKCTPPNVENGILVSDNRSLFSLNEVVEFRCQPGFVMKGPRRVKCQALNKWEPELPSCSRVCQPPPDVLHAERTQRDKDNFSPGQEVFYSCEPGYDLRGAASMRCTPQGDWSPAAPTCEVKSCDDFMGQLLNGRVLFPVNLQLGAKVDFVCDEGFQLKGSSASYCVLAGMESLWNSSVPVCEQIFCPSPPVIPNGRHTGKPLEVFPFGKAVNYTCDPHPDRGTSFDLIGESTIRCTSDPQGNGVWSSPAPRCGILGHCQAPDHFLFAKLKTQTNASDFPIGTSLKYECRPEYYGRPFSITCLDNLVWSSPKDVCKRKSCKTPPDPVNGMVHVITDIQVGSRINYSCTTGHRLIGHSSAECILSGNTAHWSTKPPICQRIPCGLPPTIANGDFISTNRENFHYGSVVTYRCNLGSRGRKVFELVGEPSIYCTSNDDQVGIWSGPAPQCIIPNKCTPPNVENGILVSDNRSLFSLNEVVEFRCQPGFVMKGPRRVKCQALNKWEPELPSCSRVCQPPPEILHGEHTPSHQDNFSPGQEVFYSCEPGYDLRGAASLHCTPQGDWSPEAPRCAVKSCDDFLGQLPHGRVLFPLNLQLGAKVSFVCDEGFRLKGSSVSHCVLVGMRSLWNNSVPVCEHIFCPNPPAILNGRHTGTPSGDIPYGKEISYTCDPHPDRGMTFNLIGESTIRCTSDPHGNGVWSSPAPRCELSVRAGHCKTPEQFPFASPTIPINDFEFPVGTSLNYECRPGYFGKMFSISCLENLVWSSVEDNCRRKSCGPPPEPFNGMVHINTDTQFGSTVNYSCNEGFRLIGSPSTTCLVSGNNVTWDKKAPICEIISCEPPPTISNGDFYSNNRTSFHNGTVVTYQCHTGPDGEQLFELVGERSIYCTSKDDQVGVWSSPPPRCISTNKCTAPEVENAIRVPGNRSFFTLTEIIRFRCQPGFVMVGSHTVQCQTNGRWGPKLPHCSRVCQPPPEILHGEHTLSHQDNFSPGQEVFYSCEPSYDLRGAASLHCTPQGDWSPEAPRCTVKSCDDFLGQLPHGRVLLPLNLQLGAKVSFVCDEGFRLKGRSASHCVLAGMKALWNSSVPVCEQIFCPNPPAILNGRHTGTPFGDIPYGKEISYACDTHPDRGMTFNLIGESSIRCTSDPQGNGVWSSPAPRCELSVPAACPHPPKIQNGHYIGGHVSLYLPGMTISYICDPGYLLVGKGFIFCTDQGIWSQLDHYCKEVNCSFPLFMNGISKELEMKKVYHYGDYVTLKCEDGYTLEGSPWSQCQADDRWDPPLAKCTSRTHDALIVGTLSGTIFFILLIIFLSWIILKHRKGNNAHENPKEVAIHLHSQGGSSVHPRTLQTNEENSRVLP

SEQ ID NO: 41951 - protein, 2039 aa, Homo sapiens
MGASSPRSPEPVGPPAPGLPFCCGGSLLAVVVLLALPVAWGQCNAPEWLPFARPTNLTDEFEFPIGTYLNYECRPGYSGRPFSIICLKNSVWTGAKDRCRRKSCRNPPDPVNGMVHVIKGIQFGSQIKYSCTKGYRLIGSSSATCIISGDTVIWDNETPICDRIPCGLPPTITNGDFISTNRENFHYGSVVTYRCNPGSGGRKVFELVGEPSIYCTSNDDQVGIWSGPAPQCIIPNKCTPPNVENGILVSDNRSLFSLNEVVEFRCQPGFVMKGPRRVKCQALNKWEPELPSCSRVCQPPPDVLHAERTQRDKDNFSPGQEVFYSCEPGYDLRGAASMRCTPQGDWSPAAPTCEVKSCDDFMGQLLNGRVLFPVNLQLGAKVDFVCDEGFQLKGSSASYCVLAGMESLWNSSVPVCEQIFCPSPPVIPNGRHTGKPLEVFPFGKTVNYTCDPHPDRGTSFDLIGESTIRCTSDPQGNGVWSSPAPRCGILGHCQAPDHFLFAKLKTQTNASDFPIGTSLKYECRPEYYGRPFSITCLDNLVWSSPKDVCKRKSCKTPPDPVNGMVHVITDIQVGSRINYSCTTGHRLIGHSSAECILSGNAAHWSTKPPICQRIPCGLPPTIANGDFISTNRENFHYGSVVTYRCNPGSGGRKVFELVGEPSIYCTSNDDQVGIWSGPAPQCIIPNKCTPPNVENGILVSDNRSLFSLNEVVEFRCQPGFVMKGPRRVKCQALNKWEPELPSCSRVCQPPPDVLHAERTQRDKDNFSPGQEVFYSCEPGYDLRGAASMRCTPQGDWSPAAPTCEVKSCDDFMGQLLNGRVLFPVNLQLGAKVDFVCDEGFQLKGSSASYCVLAGMESLWNSSVPVCEQIFCPSPPVIPNGRHTGKPLEVFPFGKTVNYTCDPHPDRGTSFDLIGESTIRCTSDPQGNGVWSSPAPRCGILGHCQAPDHFLFAKLKTQTNASDFPIGTSLKYECRPEYYGRPFSITCLDNLVWSSPKDVCKRKSCKTPPDPVNGMVHVITDIQVGSRINYSCTTGHRLIGHSSAECILSGNTAHWSTKPPICQRIPCGLPPTIANGDFISTNRENFHYGSVVTYRCNLGSRGRKVFELVGEPSIYCTSNDDQVGIWSGPAPQCIIPNKCTPPNVENGILVSDNRSLFSLNEVVEFRCQPGFVMKGPRRVKCQALNKWEPELPSCSRVCQPPPEILHGEHTPSHQDNFSPGQEVFYSCEPGYDLRGAASLHCTPQGDWSPEAPRCAVKSCDDFLGQLPHGRVLFPLNLQLGAKVSFVCDEGFRLKGSSVSHCVLVGMRSLWNNSVPVCEHIFCPNPPAILNGRHTGTPSGDIPYGKEISYTCDPHPDRGMTFNLIGESTIRCTSDPHGNGVWSSPAPRCELSVRAGHCKTPEQFPFASPTIPINDFEFPVGTSLNYECRPGYFGKMFSISCLENLVWSSVEDNCRRKSCGPPPEPFNGMVHINTDTQFGSTVNYSCNEGFRLIGSPSTTCLVSGNNVTWDKKAPICEIISCEPPPTISNGDFYSNNRTSFHNGTVVTYQCHTGPDGEQLFELVGERSIYCTSKDDQVGVWSSPPPRCISTNKCTAPEVENAIRVPGNRSFFTLTEIIRFRCQPGFVMVGSHTVQCQTNGRWGPKLPHCSRVCQPPPEILHGEHTLSHQDNFSPGQEVFYSCEPSYDLRGAASLHCTPQGDWSPEAPRCTVKSCDDFLGQLPHGRVLLPLNLQLGAKVSFVCDEGFRLKGRSASHCVLAGMKALWNSSVPVCEQIFCPNPPAILNGRHTGTPFGDIPYGKEISYACDTHPDRGMTFNLIGESSIRCTSDPQGNGVWSSPAPRCELSVPAACPHPPKIQNGHYIGGHVSLYLPGMTISYICDPGYLLVGKGFIFCTDQGIWSQLDHYCKEVNCSFPLFMNGISKELEMKKVYHYGDYVTLKCEDGYTLEGSPWSQCQADDRWDPPLAKCTSRTHDALIVGTLSGTIFFILLIIFLSWIILKHRKGNNAHENPKEVAIHLHSQGGSSVHPRTLQTNEENSRVLP

SEQ ID NO: 41952 - protein, 2039 aa, Homo sapiens
MGASSPRSPEPVGPPAPGLPFCCGGSLLAVVVLLALPVAWGQCNAPEWLPFARPTNLTDEFEFPIGTYLNYECRPGYSGRPFSIICLKNSVWTGAKDRCRRKSCRNPPDPVNGMVHVIKGIQFGSQIKYSCTKGYRLIGSSSATCIISGDTVIWDNETPICDRIPCGLPPTITNGDFISTNRENFHYGSVVTYRCNPGSGGRKVFELVGEPSIYCTSNDDQVGIWSGPAPQCIIPNKCTPPNVENGILVSDNRSLFSLNEVVEFRCQPGFVMKGPRRVKCQALNKWEPELPSCSRVCQPPPDVLHAERTQRDKDNFSPGQEVFYSCEPGYDLRGAASMRCTPQGDWSPAAPTCEVKSCDDFMGQLLNGRVLFPVNLQLGAKVDFVCDEGFQLKGSSASYCVLAGMESLWNSSVPVCEQIFCPSPPVIPNGRHTGKPLEVFPFGKTVNYTCDPHPDRGTSFDLIGESTIRCTSDPQGNGVWSSPAPRCGILGHCQAPDHFLFAKLKTQTNASDFPIGTSLKYECRPEYYGRPFSITCLDNLVWSSPKDVCKRKSCKTPPDPVNGMVHVITDIQVGSRINYSCTTGHRLIGHSSAECILSGNAAHWSTKPPICQRIPCGLPPTIANGDFISTNRENFHYGSVVTYRCNPGSGGRKVFELVGEPSIYCTSNDDQVGIWSGPAPQCIIPNKCTPPNVENGILVSDNRSLFSLNEVVEFRCQPGFVMKGPRRVKCQALNKWEPELPSCSRVCQPPPDVLHAERTQRDKDNFSPGQEVFYSCEPGYDLRGAASMRCTPQGDWSPAAPTCEVKSCDDFMGQLLNGRVLFPVNLQLGAKVDFVCDEGFQLKGSSASYCVLAGMESLWNSSVPVCEQIFCPSPPVIPNGRHTGKPLEVFPFGKAVNYTCDPHPDRGTSFDLIGESTIRCTSDPQGNGVWSSPAPRCGILGHCQAPDHFLFAKLKTQTNASDFPIGTSLKYECRPEYYGRPFSITCLDNLVWSSPKDVCKRKSCKTPPDPVNGMVHVITDIQVGSRINYSCTTGHRLIGHSSAECILSGNTAHWSTKPPICQRIPCGLPPTIANGDFISTNRENFHYGSVVTYRCNLGSRGRKVFELVGEPSIYCTSNDDQVGIWSGPAPQCIIPNKCTPPNVENGILVSDNRSLFSLNEVVEFRCQPGFVMKGPRRVKCQALNKWEPELPSCSRVCQPPPEILHGEHTPSHQDNFSPGQEVFYSCEPGYDLRGAASLHCTPQGDWSPEAPRCAVKSCDDFLGQLPHGRVLFPLNLQLGAKVSFVCDEGFRLKGSSVSHCVLVGMRSLWNNSVPVCEHIFCPNPPAILNGRHTGTPSGDIPYGKEISYTCDPHPDRGMTFNLIGESTIRCTSDPHGNGVWSSPAPRCELSVRAGHCKTPEQFPFASPTIPINDFEFPVGTSLNYECRPGYFGKMFSISCLENLVWSSVEDNCRRKSCGPPPEPFNGMVHINTDTQFGSTVNYSCNEGFRLIGSPSTTCLVSGNNVTWDKKAPICEIISCEPPPTISNGDFYSNNRTSFHNGTVVTYQCHTGPDGEQLFELVGERSIYCTSKDDQVGVWSSPPPRCISTNKCTAPEVENAIRVPGNRSFFTLTEIIRFRCQPGFVMVGSHTVQCQTNGRWGPKLPHCSRVCQPPPEILHGEHTLSHQDNFSPGQEVFYSCEPSYDLRGAASLHCTPQGDWSPEAPRCTVKSCDDFLGQLPHGRVLLPLNLQLGAKVSFVCDEGFRLKGRSASHCVLAGMKALWNSSVPVCEQIFCPNPPAILNGRHTGTPFGDIPYGKEISYACDTHPDRGMTFNLIGESSIRCTSDPQGNGVWSSPAPRCELSVPAACPHPPKIQNGHYIGGHVSLYLPGMTISYICDPGYLLVGKGFIFCTDQGIWSQLDHYCKEVNCSFPLFMNGISKELEMKKVYHYGDYVTLKCEDGYTLEGSPWSQCQADDRWDPPLAKCTSRTHDALIVGTLSGTIFFILLIIFLSWIILKHRKGNNAHENPKEVAIHLHSQGGSSVHPRTLQTNEENSRVLP

SEQ ID NO: 41953 - protein, 2039 aa, Homo sapiens; identical to SEQ ID NO: 41952

SEQ ID NO: 41954 - protein, 584 aa, Homo sapiens
GHCQAPDHFLFAKLKTQTNASDFPIGTSLKYECRPEYYGRPFSITCLDNLVWSSPKDVCKRKSCKTPPDPVNGMVHVITDIQVGSRINYSCTTGHRLIGHSSAECILSGNAAHWSTKPPICQRIPCGLPPTIANGDFISTNRENFHYGSVVTYRCNPGSGGRKVFELVGEPSIYCTSNDDQVGIWSGPAPQCIIPNKCTPPNVENGILVSDNRSLFSLNEVVEFRCQPGFVMKGPRRVKCQALNKWEPELPSCSRVCQPPPDVLHAERTQRDKDNFSPGQEVFYSCEPGYDLRGAASMRCTPQGDWSPAAPTCEVKSCDDFMGQLLNGRVLFPVNLQLGAKVDFVCDEGFQLKGSSASYCVLAGMESLWNSSVPVCEQIFCPSPPVIPNGRHTGKPLEVFPFGKTVNYTCDPHPDRGTSFDLIGESTIRCTSDPQGNGVWSSPAPRCGILGHCQAPDHFLFAKLKTQTNASDFPIGTSLKYECRPEYYGRPFSITCLDNLVWSSPKDVCKRKSCKTPPDPVNGMVHVITDIQVGSRINYSCTTGHRLIGHSSAECILSGNAAHWSTKPPICQRSCHLPCELFGR

SEQ ID NO: 41955 - protein, 444 aa, Homo sapiens
MAPPVRLERPFPSRRFPGLLLAALVLLLSSFSDQCNVPEWLPFARPTNLTDDFEFPIGTYLNYECRPGYSGRPFSIICLKNSVWTSAKDKCKRKSCRNPPDPVNGMAHVIKDIQFRSQIKYSCPKGYRLIGSSSATCIISGNTVIWDNKTPVCDRIICGLPPTIANGDFTSISREYFHYGSVVTYHCNLGSRGKKVFELVGEPSIYCTSKDDQVGIWSGPAPQCIIPNKCTPPNVENGILVSDNRSLFSLNEVVEFRCQPGFGMKGPSHVKCQALNKWEPELPSCSRVCQPPPDVLHAERTQRDKDNFSPGQEVFYSCEPGYDLRGSTYLHCTPQGDWSPAAPRCEVKSCDDFLGQLPNGHVLFPLNLQLGAKVDFVCDEGFQLKGSSASYCVLAGMESLWNSSVPVCERKSCETPPVPVNGMVHVITDIHVGSRINYSCTTGF

SEQ ID NO: 41956 - protein, 569 aa, Homo sapiens
MAPPVRLERPFPSRRFPGLLLAALVLLLSSFSDQCNVPEWLPFARPTNLTDDFEFPIGTYLNYECRPGYSGRPFSIICLKNSVWTSAKDKCKRKSCRNPPDPVNGMAHVIKDIQFRSQIKYSCPKGYRLIGSSSATCIISGNTVIWDNKTPVCDRIICGLPPTIANGDFTSISREYFHYGSVVTYHCNLGSRGKKVFELVGEPSIYCTSKDDQVGIWSGPAPQCIIPNKCTPPNVENGILVSDNRSLFSLNEVVEFRCQPGFGMKGPSHVKCQALNKWEPELPSCSRVCQPPPDVLHAERTQRDKDNFSPGQEVFYSCEPGYDLRGSTYLHCTPQGDWSPAAPRCEVKSCDDFLGQLPNGHVLFPLNLQLGAKVDFVCDEGFQLKGSSASYCVLAGMESLWNSSVPVCERKSCETPPVPVNGMVHVITDIHVGSRINYSCTTGHRLIGHSSAECILSGNTAHWSMKPPICQQIFCPNPPAILNGRHTGTPLGDIPYGKEVSYTCDPHPDRGMTFNLIGESTIRRTSEPHGNGVWSSPAPRCELPVGAGSHDALIVGKFYEVFAEEFCHL

SEQ ID NO: 41957 - protein, 1092 aa, Homo sapiens
MGAAGLLGVFLALVAPGVLGISCGSPPPILNGRISYYSTPIAVGTVIRYSCSGTFRLIGEKSLLCITKDKVDGTWDKPAPKCEYFNKYSSCPEPIVPGGYKIRGSTPYRHGDSVTFACKTNFSMNGNKSVWCQANNMWGPTRLPTCVSVFPLECPALPMIHNGHHTSENVGSIAPGLSVTYSCESGYLLVGEKIINCLSSGKWSAVPPTCEEARCKSLGRFPNGKVKEPPILRVGVTANFFCDEGYRLQGPPSSRCVIAGQGVAWTKMPVCEEIFCPSPPPILNGRHIGNSLANVSYGSIVTYTCDPDPEEGVNFILIGESTLRCTVDSQKTGTWSGPAPRCELSTSAVQCPHPQILRGRMVSGQKDRYTYNDTVIFACMFGFTLKGSKQIRCNAQGTWEPSAPVCEKECQAPPNILNGQKEDRHMVRFDPGTSIKYSCNPGYVLVGEESIQCTSEGVWTPPVPQCKVAACEATGRQLLTKPQHQFVRPDVNSSCGEGYKLSGSVYQECQGTIPWFMEIRLCKEITCPPPPVIYNGAHTGSSLEDFPYGTTVTYTCNPGPERGVEFSLIGESTIRCTSNDQERGTWSGPAPLCKLSLLAVQCSHVHIANGYKISGKEAPYFYNDTVTFKCYSGFTLKGSSQIRCKADNTWDPEIPVCEKGCQSPPGLHHGRHTGGNTVFFVSGMTVDYTCDPGYLLVGNKSIHCMPSGNWSPSAPRCEETCQHVRQSLQELPAGSRVELVNTSCQDGYQLTGHAYQMCQDAENGIWFKKIPLCKVIHCHPPPVIVNGKHTGMMAENFLYGNEVSYECDQGFYLLGEKKLQCRSDSKGHGSWSGPSPQCLRSPPVTRCPNPEVKHGYKLNKTHSAYSHNDIVYVDCNPGFIMNGSRVIRCHTDNTWVPGVPTCIKKAFIGCPPPPKTPNGNHTGGNIARFSPGMSILYSCDQGYLLVGEALLLCTHEGTWSQPAPHCKEVNCSSPADMDGIQKGLEPRKMYQYGAVVTLECEDGYMLEGSPQSQCQSDHQWNPPLAVCRSRSLAPVLCGIAAGLILLTFLIVITLYVISKHRARNYYTDTSQKEAFHLEAREVYSVDPYNPAS

SEQ ID NO: 41958 - protein, 1033 aa, Homo sapiens
MGAAGLLGVFLALVAPGVLGISCGSPPPILNGRISYYSTPIAVGTVIRYSCSGTFRLIGEKSLLCITKDKVDGTWDKPAPKCEYFNKYSSCPEPIVPGGYKIRGSTPYRHGDSVTFACKTNFSMNGNKSVWCQANNMWGPTRLPTCVSVFPLECPALPMIHNGHHTSENVGSIAPGLSVTYSCESGYLLVGEKIINCLSSGKWSAVPPTCEEARCKSLGRFPNGKVKEPPILRVGVTANFFCDEGYRLQGPPSSRCVIAGQGVAWTKMPVCEEIFCPSPPPILNGRHIGNSLANVSYGSIVTYTCDPDPEEGVNFILIGESTLRCTVDSQKTGTWSGPAPRCELSTSAVQCPHPQILRGRMVSGQKDRYTYNDTVIFACMFGFTLKGSKQIRCNAQGTWEPSAPVCEKECQAPPNILNGQKEDRHMVRFDPGTSIKYSCNPGYVLVGEESIQCTSEGVWTPPVPQCKVAACEATGRQLLTKPQHQFVRPDVNSSCGEGYKLSGSVYQECQGTIPWFMEIRLCKEITCPPPPVIYNGAHTGSSLEDFPYGTTVTYTCNPGPERGVEFSLIGESTIRCTSNDQERGTWSGPAPLCKLSLLAVQCSHVHIANGYKISGKEAPYFYNDTVTFKCYSGFTLKGSSQIRCKADNTWDPEIPVCEKETCQHVRQSLQELPAGSRVELVNTSCQDGYQLTGHAYQMCQDAENGIWFKKIPLCKVIHCHPPPVIVNGKHTGMMAENFLYGNEVSYECDQGFYLLGEKKLQCRSDSKGHGSWSGPSPQCLRSPPVTRCPNPEVKHGYKLNKTHSAYSHNDIVYVDCNPGFIMNGSRVIRCHTDNTWVPGVPTCIKKAFIGCPPPPKTPNGNHTGGNIARFSPGMSILYSCDQGYLLVGEALLLCTHEGTWSQPAPHCKEVNCSSPADMDGIQKGLEPRKMYQYGAVVTLECEDGYMLEGSPQSQCQSDHQWNPPLAVCRSRSLAPVLCGIAAGLILLTFLIVITLYVISKHRARNYYTDTSQKEAFHLEAREVYSVDPYNPAS

SEQ ID NO: 41959 - protein, 971 aa, Homo sapiens
MGAAGLLGVFLALVAPGVLGISCGSPPPILNGRISYYSTPIAVGTVIRYSCSGTFRLIGEKSLLCITKDKVDGTWDKPAPKCEYFNKYSSCPEPIVPGGYKIRGSTPYRHGDSVTFACKTNFSMNGNKSVWCQANNMWGPTRLPTCVSVFPLECPALPMIHNGHHTSENVGSIAPGLSVTYSCESGYLLVGEKIINCLSSGKWSAVPPTCEEARCKSLGRFPNGKVKEPPILRVGVTANFFCDEGYRLQGPPSSRCVIAGQGVAWTKMPVCEEIFCPSPPPILNGRHIGNSLANVSYGSIVTYTCDPDPEEGVNFILIGESTLRCTVDSQKTGTWSGPAPRCELSTSAVQCPHPQILRGRMVSGQKDRYTYNDTVIFACMFGFTLKGSKQIRCNAQGTWEPSAPVCEKECQAPPNILNGQKEDRHMVRFDPGTSIKYSCNPGYVLVGEESIQCTSEGVWTPPVPQCKVAACEATGRQLLTKPQHQFVRPDVNSSCGEGYKLSGSVYQECQGTIPWFMEIRLCKEITCPPPPVIYNGAHTGSSLEDFPYGTTVTYTCNPGPERGVEFSLIGESTIRCTSNDQERGTWSGPAPLCKLSLLAVQCSHVHIANGYKISGKEAPYFYNDTVTFKCYSGFTLKGSSQIRCKADNTWDPEIPVCEKETCQHVRQSLQELPAGSRVELVNTSCQDGYQLTGHAYQMCQDAENGIWFKKIPLCKVIHCHPPPVIVNGKHTGMMAENFLYGNEVSYECDQGFYLLGEKKLQCRSDSKGHGSWSGPSPQCLRSPPVTRCPNPEVKHGYKLNKTHSAYSHNDIVYVDCNPGFIMNGSRVIRCHTDNTWVPGVPTCIKKEVNCSSPADMDGIQKGLEPRKMYQYGAVVTLECEDGYMLEGSPQSQCQSDHQWNPPLAVCRSRSLAPVLCGIAAGLILLTFLIVITLYVISKHRARNYYTDTSQKEAFHLEAREVYSVDPYNPAS

SEQ ID NO: 41960 - protein, 1006 aa, Homo sapiens
MGAAGLLGVFLALVAPGVLGISCGSPPPILNGRISYYSTPIAVGTVIRYSCSGTFRLIGEKSLLCITKDKVDGTWDKPAPKCEYFNKYSSCPEPIVPGGYKIRGSTPYRHGDSVTFACKTNFSMNGNKSVWCQANNMWGPTRLPTCVSVFPLECPALPMIHNGHHTSENVGSIAPGLSVTYSCESGYLLVGEKIINCLSSGKWSAVPPTCEEARCKSLGRFPNGKVKEPPILRVGVTANFFCDEGYRLQGPPSSRCVIAGQGVAWTKMPVCEEIFCPSPPPILNGRHIGNSLANVSYGSIVTYTCDPDPEEGVNFILIGESTLRCTVDSQKTGTWSGPAPRCELSTSAVQCPHPQILRGRMVSGQKDRYTYNDTVIFACMFGFTLKGSKQIRCNAQGTWEPSAPVCEKECQAPPNILNGQKEDRHMVRFDPGTSIKYSCNPGYVLVGEESIQCTSEGVWTPPVPQCKVAACEATGRQLLTKPQHQFVRPDVNSSCGEGNHLPTTPCYLQWGTHREFLRRFSIWNHGHLHMPGPERGVEFSLIGESTIRCTSNDQERGTWSGPAPLCKLSLLAVQCSHVHIANGYKISGKEAPYFYNDTVTFKCYSGFTLKGSSQIRCKADNTWDPEIPVCEKETCQHVRQSLQELPAGSRVELVNTSCQDGYQLTGHAYQMCQDAENGIWFKKIPLCKVIHCHPPPVIVNGKHTGMMAENFLYGNEVSYECDQGFYLLGEKKLQCRSDSKGHGSWSGPSPQCLRSPPVTRCPNPEVKHGYKLNKTHSAYSHNDIVYVDCNPGFIMNGSRVIRCHTDNTWVPGVPTCIKKAFIGCPPPPKTPNGNHTGGNIARFSPGMSILYSCDQGYLLVGEALLLCTHEGTWSQPAPHCKEVNCSSPADMDGIQKGLEPRKMYQYGAVVTLECEDGYMLEGSPQSQCQSDHQWNPPLAVCRSRSLAPVLCGIAAGLILLTFLIVITLYVISKHRARNYYTDTSQKEAFHLEAREVYSVDPYNPAS

SEQ ID NO: 41961 - protein, 282 aa, Homo sapiens
MLPLLRCVPRVLGSSVAGLRAAAPASPFRQLLQPAPRLCTRPFGLLSVRAGSERRPGLLRPRGPCACGCGCGSLHTDGDKAFVDFLSDEIKEERKIQKHKTLPKMSGGWELELNGTEAKLVRKVAGEKITVTFNINNSIPPTFDGEEEPSQGQKVEEQEPELTSTPNFVVEVIKNDDGKKALVLDCHYPEDEVGQEDEAESDIFSIREVSFQSTGESEWKDTNYTLNTDSLDWALYDHLMDFLADRGVDNTFADELVELSTALEHQEYITFLEDLKSFVKSQ

SEQ ID NO: 41962 - protein, 253 aa, Homo sapiens
MMMKIPWGSIPVLMLLLLLGLIDISQAQLSCTGPPAIPGIPGIPGTPGPDGQPGTPGIKGEKGLPGLAGDHGEFGEKGDPGIPGNPGKVGPKGPMGPKGGPGAPGAPGPKGESGDYKATQKIAFSATRTINVPLRRDQTIRFDHVITNMNNNYEPRSGKFTCKVPGLYYFTYHASSRGNLCVNLMRGRERAQKVVTFCDYAYNTFQVTTGGMVLKLEQGENVFLQATDKNSLLGMEGANSIFSGFLLFPDMEA

SEQ ID NO: 41963 - protein, 229 aa, Homo sapiens
MKIPWGSIPVLMLLLLLGLIDISQAQLSCTGPPAIPGIPGIPGTPGPDGQPGTPGIKGEKGLPGLAGDHGEFGEKGDPGIPGNPGKVGPKGPMGPKGGPGAPGAPGPKGESGDYKATQKIAFSATRTINVPLRRDQTIRFDHVITNMNNNYEPRSGKFTCKVPGLYYFTYHASSRGNLCVNLMRGRERAQKVVTFCDYAYNTFQVTTGGMVLKLEQGENVFLQATDKNS

SEQ ID NO: 41964 - protein, 251 aa, Homo sapiens
MKIPWGSIPVLMLLLLLGLIDISQAQLSCTGPPAIPGIPGIPGTPGPDGQPGTPGIKGEKGLPGLAGDHGEFGEKGDPGIPGNPGKVGPKGPMGPKGGPGAPGAPGPKGESGDYKATQKIAFSATRTINVPLRRDQTIRFDHVITNMNNNYEPRSGKFTCKVPGLYYFTYHASSRGNLCVNLMRGRERAQKVVTFCDYAYNTFQVTTGGMVLKLEQGENVFLQATDKNSLLGMEGANSIFSGFLLFPDMEA

SEQ ID NO: 41965 - protein, 153 aa, Homo sapiens
MKIPWGSIPVLMLLLLLGLIDISQAQLSCTGPPAIPGIPGIPGTPGPDGQPGTPGIKGEKGLPGLAGDHGEFGEKGDPGIPGNPGKVGPKGPMGPKGGPGAPGAPGPKGESGDYKATQKIAFSATRTINVPLRRDQTIRFDHVITNMNNNYEP

SEQ ID NO: 41966 - protein, 245 aa, Homo sapiens
MDVGPSSLPHLGLKLLLLLLLLPLRGQANTGCYGIPGMPGLPGAPGKDGYDGLPGPKGEPGIPAIPGIRGPKGQKGEPGLPGHPGKNGPMGPPGMPGVPGPMGIPGEPGEEGRYKQKFQSVFTVTRQTHQPPAPNSLIRFNAVLTNPQGDYDTSTGKFTCKVPGLYYFVYHASHTANLCVLLYRSGVKVVTFCGHTSKTNQVNSGGVLLRLQVGEEVWLAVNDYYDMVGIQGSDSVFSGFLLFPD

SEQ ID NO: 41967 - protein, 245 aa, Homo sapiens; identical to SEQ ID NO: 41966

SEQ ID NO: 41968 - protein, 245 aa, Homo sapiens; identical to SEQ ID NO: 41966

SEQ ID NO: 41969 - protein, 258 aa, Homo sapiens
MLLVLVVLIPVLVSSGGPEGHYEMLGTCRMVCDPYPARGPGAGARTDGGDALSEQSGAPPPSTLVQGPQGKPGRTGKPGPPGPPGDPGPPGPVGPPGEKGEPGKPGPPGLPGAGGSGAISTATYTTVPRVAFYAGLKNPHEGYEVLKFDDVVTNLGNNYDAASGKFTCNIPGTYFFTYHVLMRGGDGTSMWADLCKNGQVRASAIAQDADQNYDYASNSVILHLDAGDEVFIKLDGGKAHGGNSNKYSTFSGFIIYSD

SEQ ID NO: 41970 - protein, 287 aa, Homo sapiens
MALGLLIAVPLLLQAAPRGAAHYEMMGTCRMICDPYTAAPGGEPPGAKAQPPGPSTAALEVMQDLSANPPPPFIQGPKGDPGRPGKPGPRGPPGEPGPPGPRGPPGEKGDSGRPGLPGLQLTAGTASGVGVVGGGAGVGGDSEGEVTSALSATFSGPKIAFYVGLKSPHEGYEVLKFDDVVTNLGNHYDPTTGKFSCQVRGIYFFTYHILMRGGDGTSMWADLCKNGQVRASAIAQDADQNYDYASNSVVLHLDSGDEVYVKLDGGKAHGGNNNKYSTFSGFLLYPD

SEQ ID NO: 41971 - protein, 668 aa, Homo sapiens
MSVRFRVGREENAQWWLLYLLVPALFCRAGGSIPIPQKLFGEVTSPLFPKPYPNNFETTTVITVPTGYRVKLVFQQFDLEPSEGCFYDYVKISADKKSLGRFCGQLGSPLGNPPGKKEFMSQGNKMLLTFHTDFSNEENGTIMFYKGFLAYYQAVDLDECASRSKSGEEDPQPQCQHLCHNYVGGYFCSCRPGYELQEDRHSCQAECSSELYTEASGYISSLEYPRSYPPDLRCNYSIRVERGLTLHLKFLEPFDIDDHQQVHCPYDQLQIYANGKNIGEFCGKQRPPDLDTSSNAVDLLFFTDESGDSRGWKLRYTTEIIKCPQPKTLDEFTIIQNLQPQYQFRDYFIATCKQGYQLIEGIQVVAGVVDVSAGRVSWSTSSQTCCTRVYTCTAQGIWKNEQKGEKIPRCLPVCGKPVNPVEQRQRIIGGQKAKMGNFPWQVFTNIHGRGGGALLGDRWILTAAHTLYPKEHEAQSNASLDVFLGHTNVEELMKLGNHPIRRVSVHPDYRQDESYNFEGDIALLELENSVTLGPNLLPICLPDNDTFYDLGLMGYVSGFGVMEEKIAHDLRFVRLPVANPQACENWLRGKNRMDVFSQNMFCAGHPSLKQDACQGDSGGVFAVRDPNTDRWVATGIVSWGIGCSRGYGFYTKVLNYVDWIKKEMEEED

SEQ ID NO: 41972 - protein, 376 aa, Homo sapiens
MWLLYLLVPALFCRAGGSIPIPQKLFGEVTSPLFPKPYPNNFETTTVITVPTGYRVKLVFQQFDLEPSEGCFYDYVKISADKKSLGRFCGQLGSPLGNPPGKKEFMSQGNKMLLTFHTDFSNEENGTIMFYKGFLAYYQAVDLDECASRSKSGEEDPQPQCQHLCHNYVGGYFCSCRPGYELQEDRHSCQAECSSELYTEASGYISSLEYPRSYPPDLRCNYSIRVERGLTLHLKFLEPFDIDDHQQVHCPYDQLQIYANGKNIGEFCGKQRPPDLDTSSNAVDLLFFTDESGDSRGWKLRYTTEIIKCPQPKTLDEFTIIQNLQPQYQFRDYFIATCKQGYQLIEGCTPAQHRAFGRMNRRERRFLGACQCVGSP

SEQ ID NO: 41973 - protein, 653 aa, Homo sapiens
WLLYLLVPALFCRAGGSIPIPQKLFGEVTSPLFPKPYPNNFETTTVITVPTGYRVKLVFQQFDLEPSEGCFYDYVKISADKKSLGRFCGQLGSPLGNPPGKKEFMSQGNKMLLTFHTDFSNEENGTIMFYKGFLAYYQAVDLDECASRSKSGEEDPQPQCQHLCHNYVGGYFCSCRPGYELQEDRHSCQAECSSELYTEASGYISSLEYPRSYPPDLRCNYSIRVERGLTLHLKFLEPFDIDDHQQVHCPYDQLQIYANGKNIGEFCGKQRPPDLDTSSNAVDLLFFTDESGDSRGWKLRYTTEIIKCPQPKTLDEFTIIQNLQPQYQFRDYFIATCKQGYQLIEGIQVVAGVVDVSAGRVSWSTSSQTCCTRVYTCTAQGIWKNEQKGEKIPRCLPVCGKPVNPVEQRQRIIGGQKAKMGNFPWQVFTNIHGRGGGALLGDRWILTAAHTLYPKEHEAQSNASLDVFLGHTNVEELMKLGNHPIRRVSVHPDYRQDESYNFEGDIALLELENSVTLGPNLLPICLPDNDTFYDLGLMGYVSGFGVMEEKIAHDLRFVRLPVANPQACENWLRGKNRMDVFSQNMFCAGHPSLKQDACQGDSGGVFAVRDPNTDRWVATGIVSWGIGCSRGYGFYTKVLNYVDWIKKEMEEED

SEQ ID NO: 41974 - protein, 487 aa, Homo sapiens
MPGPRVWGKYLWRSPHSKGCPGAMWWLLLWGVLQACPTRGSVLLAQELPQQLTSPGYPEPYGKGQESSTDIKAPEGFAVRLVFQDFDLEPSQDCAGDSVTISFVGSDPSQFCGQQGSPLGRPPGQREFVSSGRSLRLTFRTQPSSENKTAHLHKGFLALYQTVAVNYSQPISEASRGSEAINAPGDNPAKVQNHCQEPYYQAAAAGALTCATPGTWKDRQDGEEVLQCMPVCGRPVTPIAQNQTTLGSSRAKLGNFPWQAFTSIHGRGGGALLGDRWILTAAHTIYPKDSVSLRKNQSVNVFLGHTAIDEMLKLGNHPVHRVVVHPDYRQNESHNFSGDIALLELQHSIPLGPNVLPVCLPDNETLYRSGLLGYVSGFGMEMGWLTTELKYSRLPVAPREACNAWLQKRQRPEVFSDNMFCVGDETQRHSVCQGDSGSVYVVWDNHAHHWVATGIVSWGIGCGEGYDFYTKVLSYVDWIKGVMNGKN

SEQ ID NO: 41975 - protein, 438 aa, Homo sapiens
MPGPRVWGKYLWRSPHSKGCPGAMWWLLLWGVLQACPTRGSVLLAQELPQQLTSPGYPEPYGKGQESSTDIKAPEGFAVRLVFQDFDLEPSQDCAGDSVTISFVGSDPSQFCGQQGSPLGRPPGQREFVSSGRSLRLTFRTQPSSENKTAHLHKGFLALYQTVAVNYSQPISEASRGSEAINAPGDNPAKVQNHCQEPYYQAAAAGALTCATPGTWKDRQDGEEVLQCMPVCGRPVTPIAQNQTTLGSSRAKLGNFPWQAFTSIHGRGGGALLGDRWILTAAHTIYPKDSVSLRKNQSVNVFLGHTAIDEMLKLGNHPVHRVVVHPDYRQNESHNFSGDIALLELQHSIPLGPNVLPVCLPDNETLYRSGLLGYVSGFGMEMGWLTTELKYSRLPVAPREACNAWLQKRQRPEVFSDNMFCVGDEAGESLEPGRRRLQ

SEQ ID NO: 41976 - protein, 688 aa, Homo sapiens
MWCIVLFSLLAWVYAEPTMYGEILSPNYPQAYPSEVEKSWDIEVPEGYGIHLYFTHLDIELSENCAYDSVQIISGDTEEGRLCGQRSSNNPHSPIVEEFQVPYNKLQVIFKSDFSNEERFTGFAAYYVATDINECTDFVDVPCSHFCNNFIGGYFCSCPPEYFLHDDMKNCGVNCSGDVFTALIGEIASPNYPKPYPENSRCEYQIRLEKGFQVVVTLRREDFDVEAADSAGNCLDSLVFVAGDRQFGPYCGHGFPGPLNIETKSNALDIIFQTDLTGQKKGWKLRYHGDPMPCPKEDTPNSVWEPAKAKYVFRDVVQITCLDGFEVVEGRVGATSFYSTCQSNGKWSNSKLKCQPVDCGIPESIENGKVEDPESTLFGSVIRYTCEEPYYYMENGGGGEYHCAGNGSWVNEVLGPELPKCVPVCGVPREPFEEKQRIIGGSDADIKNFPWQVFFDNPWAGGALINEYWVLTAAHVVEGNREPTMYVGSTSVQTSRLAKSKMLTPEHVFIHPGWKLLEVPEGRTNFDNDIALVRLKDPVKMGPTVSPICLPGTSSDYNLMDGDLGLISGWGRTEKRDRAVRLKAARLPVAPLRKCKEVKVEKPTADAEAYVFTPNMICAGGEKGMDSCKGDSGGAFAVQDPNDKTKFYAAGLVSWGPQCGTYGLYTRVKNYVDWIMKTMQENSTPRED

SEQ ID NO: 41977 - protein, 688 aa, Homo sapiens; identical to SEQ ID NO: 41976

SEQ ID NO: 41978 - protein, 682 aa, Homo sapiens [sequence omitted]

SEQ ID NO: 41979 - protein, 168 aa, Homo sapiens
MWCIVLFSLLAWVYAEPTMYGEILSPNYPQAYPSEVEKSWDIEVPEGYGIHLYFTHLDIELSENCAYDSVQIISGDTEEGRLCGQRSSNNPHSPIVEEFQVPYNKLQVIFKSDFSNEERFTGFAAYYVATDINECTDFVDVPCSHFCNNFIGGYFCSCPPEYFLHDDM

SEQ ID NO: 41980 - protein, 688 aa, Homo sapiens; identical to SEQ ID NO: 41976

SEQ ID NO: 41981 - protein, 103 aa, Homo sapiens
MWCIVLFSLLAWVYAEPTMYGEILSPNYPQAYPSEVEKSWDIEVPEGYGIHLYFTHLDIELSENCAYDSVQIISGDTEEGRLCGQRSSNNPHSPIVEEFQVPY

SEQ ID NO: 41982 - protein, 101 aa, Homo sapiens
MWCIVLFSLLAWVYAEPTMYGEILSPNYPQAYPSEVEKSWDIEVPEGYGIHLYFTHLDIELSENCAYDSVQIISGDTEEGRLCGQRSSNNPHSPIVEEFQV

SEQ ID NO: 41983 - protein, 752 aa, Homo sapiens
MGPLMVLFCLLFLYPGLADSAPSCPQNVNISGGTFTLSHGWAPGSLLTYSCPQGLYPSPASRLCKSSGQWQTPGATRSLSKAVCKPVRCPAPVSFENGIYTPRLGSYPVGGNVSFECEDGFILRGSPVRQCRPNGMWDGETAVCDNGAGHCPNPGISLGAVRTGFRFGHGDKVRYRCSSNLVLTGSSERECQGNGVWSGTEPICRQPYSYDFPEDVAPALGTSFSHMLGATNPTQKTKESLGRKIQIQRSGHLNLYLLLDCSQSVSENDFLIFKESASLMVDRIFSFEINVSVAIITFASEPKVLMSVLNDNSRDMTEVISSLENANYKDHENGTGTNTYAALNSVYLMMNNQMRLLGMETMAWQEIRHAIILLTDGKSNMGGSPKTAVDHIREILNINQKRNDYLDIYAIGVGKLDVDWRELNELGSKKDGERHAFILQDTKALHQVFEHMLDVSKLTDTICGVGNMSANASDQERTPWHVTIKPKSQETCRGALISDQWVLTAAHCFRDGNDHSLWRVNVGDPKSQWGKEFLIEKAVISPGFDVFAKKNQGILEFYGDDIALLKLAQKVKMSTHARPICLPCTMEANLALRRPQGSTCRDHENELLNKQSVPAHFVALNGSKLNINLKMGVEWTSCAEVVSQEKTMFPNLTDVREVVTDQFLCSGTQEDESPCKGESGGAVFLERRFRFFQVGLVSWGLYNPCLGSADKNSRKRAPRSKVPPPRDFHINLFRMQPWLRQHLGDVLNFLPL

SEQ ID NO: 41984 - protein, 377 aa, Homo sapiens
MTEVISSLENANYKDHENGTGTNTYAALNSVYLMMNNQMRLLGMETMAWQEIRHAIILLTDGKSNMGGSPKTAVDHIREILNINQKRNDYLDIYAIGVGKLDVDWRELNELGSKKDGERHAFILQDTKALHQVFEHMLDVSKLTDTICGVGNMSANASDQERTPWHVTIKPKSQETCRGALISDQWVLTAAHCFRDGNDHSLWRVNVGDPKSQWGKEFLIEKAVISPGFDVFAKKNQGILEFYGDDIALLKLAQKVKMSTHARPICLPCTMEANLALRRPQGSTCRDHENELLNKQSVPAHFVALNGSKLNINLKMGVEWTSCAEVVSQEKTMFPNLTDVREVVTDQFLCSGTQEDESPCKGGSGELGSLQPLPWLC

SEQ ID NO: 41985 - protein, 752 aa, Homo sapiens; identical to SEQ ID NO: 41983

SEQ ID NO: 41986 - protein, 525 aa, Homo sapiens
MVLFCLLFLYPAGHCPNPGISLGAVRTGFRFGHGDKVRYRCSSNLVLTGSSERECQGNGVWSGTEPICRQPYSYDFPEDVAPALGTSFSHMLGATNPTQKTKDHENGTGTNTYAALNSVYLMMNNQMRLLGMETMAWQEIRHAIILLTDGKSNMGGSPKTAVDHIREILNINQKRNDYLDIYAIGVGKLDVDWRELNELGSKKDGERHAFILQDTKALHQVFEHMLDVSKLTDTICGVGNMSANASDQERTPWHVTIKPKSQETCRGALISDQWVLTAAHCFRDGNDHSLWRVNVGDPKSQWGKEFLIEKAVISPGFDVFAKKNQGILEFYGDDIALLKLAQKVKMSTHARPICLPCTMEANLALRRPQGSTCRDHENELLNKQSVPAHFVALNGSKLNINLKMGVEWTSCAEVVSQEKTMFPNLTDVREVVTDQFLCSGTQEDESPCKGESGGAVFLERRFRFFQVGLVSWGLYNPCLGSADKNSRKRAPRSKVPPPRDFHINLFRMQPWLRQHLGDVLNFLPL

SEQ ID NO: 41987 - protein, 752 aa, Homo sapiens; identical to SEQ ID NO: 41983

SEQ ID NO: 41988 - protein, 525 aa, Homo sapiens; identical to SEQ ID NO: 41986

SEQ ID NO: 41989 - protein, 752 aa, Homo sapiens; identical to SEQ ID NO: 41983

SEQ ID NO: 41990 - protein, 139 aa, Homo sapiens
MGPLMVLFCLLFLYPGLADSAPSCPQNVNISGGTFTLSHGWAPGSLLTYSCPQGLYPSPASRLCKSSGQWQTPGATRSLSKAVCKPVRCPAPVSFENGIYTPRLGSYPVGGNVSFECEDGFILRGSPVRQCRPNGMWDG

SEQ ID NO: 41991 - protein, 169 aa, Homo sapiens
MRALCIRETCSSELGFSRNWSRRKAGHCPNPGISLGAVRTGFRFGHGDKVRYRCSSNLVLTGSSERECQGNGVWSGTEPICRQPYSYDFPEDVAPALGTSFSHMLGATNPTQKTKDHENGTGTNTYAALNSVYLMMNNQMRLLGMETMAWQEIRHAIILLTDGKSNMGG

SEQ ID NO: 41992 - protein, 139 aa, Homo sapiens; identical to SEQ ID NO: 41990

SEQ ID NO: 41993 - protein, 752 aa, Homo sapiens; identical to SEQ ID NO: 41983

SEQ ID NO: 41994 - protein, 125 aa, Homo sapiens
MGPLMVLFCLLFLYPGLADSAPSCPQNVNISGGTFTLSHGWAPGSLLTYSCPQGLYPSPASRLCKSSGQWQTPGATRSLSKAVCKPGHCPNPGISLGAVRTGFRFGHGDKVRYRCSSNLVLTGSS

SEQ ID NO: 41995 - protein, 169 aa, Homo sapiens; identical to SEQ ID NO: 41991

SEQ ID NO: 41996 - protein, 353 aa, Homo sapiens
MGPLMVLFCLLFLYPAGHCPNPGISLGAVRTGFRFGHGDKVRYRCSSNLVLTGSSERECQGNGVWSGTEPICRQPYSYDFPEDVAPALGTSFSHMLGATNPTQKTKESLGRKIQIQRSGHLNLYLLLDCSQSVSENDFLIFKESASLMVDRIFSFEINVSVAIITFASEPKVLMSVLNDNSRDMTEVISSLENANYKDHENGTGTNTYAALNSVYLMMNNQMRLLGMETMAWQEIRHAIILLTDGKSNMGGSPKTAVDHIREILNINQKRNDYLDIYAIGVGKLDVDWRELNELGSKKDGERHAFILQDTKALHQVFEHMLDVSKLTDTICGVGNMSANASDQERTPWHVTIK

SEQ ID NO: 41997 - protein, 752 aa, Homo sapiens; identical to SEQ ID NO: 41983

SEQ ID NO: 41998 - protein, 353 aa, Homo sapiens; identical to SEQ ID NO: 41996

SEQ ID NO: 41999 - protein, 353 aa, Homo sapiens; identical to SEQ ID NO: 41996

SEQ ID NO: 42000 - protein, 169 aa, Homo sapiens; identical to SEQ ID NO: 41991

SEQ ID NO: 42001 - protein, 525 aa, Homo sapiens; identical to SEQ ID NO: 41986

SEQ ID NO: 42002 - protein, 353 aa, Homo sapiens; identical to SEQ ID NO: 41996

SEQ ID NO: 42003 - protein, 134 aa, Homo sapiens
  VARIANT 1: note = MOD_RES - Any amino acid
XGHCPNPGISLGAVRTGFRFGHGDKVRYRCSSNLVLTGSSERECQGNGVWSGTEPICRQPYSYDFPEDVAPALGTSFSHMLGATNPTQKTKESLGRKIQIQRSGHLNLYLLLDCSQSVSENDFLIFKESASLMV

SEQ ID NO: 42004 - protein, 525 aa, Homo sapiens; identical to SEQ ID NO: 41986

SEQ ID NO: 42005 - protein, 525 aa, Homo sapiens; identical to SEQ ID NO: 41986

SEQ ID NO: 42006 - protein, 353 aa, Homo sapiens; identical to SEQ ID NO: 41996

SEQ ID NO: 42007 - protein, 158 aa, Homo sapiens
MRALCIRETCSSELGFSRNWSRRKAGHCPNPGISLGAVRTGFRFGHGDKVRYRCSSNLVLTGSSERECQGNGVWSGTEPICRQPYSYDFPEDVAPALGTSFSHMLGATNPTQKTKESLGRKIQIQRSGHLNLYLLLDCSQSVSENDFLIFKESASLMV

SEQ ID NO: 42008 - protein, 158 aa, Homo sapiens; identical to SEQ ID NO: 42007

SEQ ID NO: 42009 - protein, 325 aa, Homo sapiens
MGTRSAIAAPRILCSRGLRSGSARATGSGVERSPSAANPTLMTSLRTWPLPWALPSPTCLGPPIPPRRQRIFSFEINVSVAIITFASEPKVLMSVLNDNSRDMTEVISSLENANYKDHENGTGTNTYAALNSVYLMMNNQMRLLGMETMAWQEIRHAIILLTDGKSNMGGSPKTAVDHIREILNINQKRNDYLDIYAIGVGKLDVDWRELNELGSKKDGERHAFILQDTKALHQVFEHMLDVSKLTDTICGVGNMSANASDQERTPWHVTIKPKSQETCRGALISDQWVLTAAHCFRDGNDHSLWRVNVGDPKSQWGKEFLIEKA

SEQ ID NO: 42010 - protein, 158 aa, Homo sapiens; identical to SEQ ID NO: 42007

SEQ ID NO: 42011 - protein, 353 aa, Homo sapiens; identical to SEQ ID NO: 41996

SEQ ID NO: 42012 - protein, 139 aa, Homo sapiens; identical to SEQ ID NO: 41990

SEQ ID NO: 42013 - protein, 145 aa, Homo sapiens
  VARIANT 1: note = MOD_RES - Any amino acid
XGHCPNPGISLGAVRTGFRFGHGDKVRYRCSSNLVLTGSSERECQGNGVWSGTEPICRQPYSYDFPEDVAPALGTSFSHMLGATNPTQKTKDHENGTGTNTYAALNSVYLMMNNQMRLLGMETMAWQEIRHAIILLTDGKSNMGG

SEQ ID NO: 42014 - protein, 125 aa, Homo sapiens; identical to SEQ ID NO: 41994

SEQ ID NO: 42015 - protein, 139 aa, Homo sapiens; identical to SEQ ID NO: 41990

SEQ ID NO: 42016 - protein, 158 aa, Homo sapiens; identical to SEQ ID NO: 42007

SEQ ID NO: 42017 - protein, 125 aa, Homo sapiens; identical to SEQ ID NO: 41994

SEQ ID NO: 42018 - protein, 620 aa, Homo sapiens
MGPLMVLFCLLFLYPAGHCPNPGISLGAVRTGFRFGHGDKVRYRCSSNLVLTGSSERECQGNGVWSGTEPICRQPYSYDFPEDVAPALGTSFSHMLGATNPTQKTKESLGRKIQIQRSGHLNLYLLLDCSQSVSENDFLIFKESASLMVDRIFSFEINVSVAIITFASEPKVLMSVLNDNSRDMTEVISSLENANYKDHENGTGTNTYAALNSVYLMMNNQMRLLGMETMAWQEIRHAIILLTDGKSNMGGSPKTAVDHIREILNINQKRNDYLDIYAIGVGKLDVDWRELNELGSKKDGERHAFILQDTKALHQVFEHMLDVSKLTDTICGVGNMSANASDQERTPWHVTIKPKSQETCRGALISDQWVLTAAHCFRDGNDHSLWRVNVGDPKSQWGKEFLIEKAVISPGFDVFAKKNQGILEFYGDDIALLKLAQKVKMSTHARPICLPCTMEANLALRRPQGSTCRDHENELLNKQSVPAHFVALNGSKLNINLKMGVEWTSCAEVVSQEKTMFPNLTDVREVVTDQFLCSGTQEDESPCKGESGGAVFLERRFRFFQVGLVSWGLYNPCLGSADKNSRKRAPRSKVPPPRDFHINLFRMQPWLRQHLGDVLNFLPL

SEQ ID NO: 42019 - protein, 125 aa, Homo sapiens; identical to SEQ ID NO: 41994

SEQ ID NO: 42020 - protein, 139 aa, Homo sapiens; identical to SEQ ID NO: 41990

SEQ ID NO: 42021 - protein, 125 aa, Homo sapiens; identical to SEQ ID NO: 41994

SEQ ID NO: 42022 - protein, 752 aa, Homo sapiens; identical to SEQ ID NO: 41983

SEQ ID NO: 42023 - protein, 125 aa, Homo sapiens; identical to SEQ ID NO: 41994

SEQ ID NO: 42024 - protein, 169 aa, Homo sapiens; identical to SEQ ID NO: 41991

SEQ ID NO: 42025 - protein, 525 aa, Homo sapiens; identical to SEQ ID NO: 41986

SEQ ID NO: 42026 - protein, 145 aa, Homo sapiens; identical to SEQ ID NO: 42013
  VARIANT 1: note = MOD_RES - Any amino acid

SEQ ID NO: 42027 - protein, 134 aa, Homo sapiens; identical to SEQ ID NO: 42003
  VARIANT 1: note = MOD_RES - Any amino acid

SEQ ID NO: 42028 - protein, 139 aa, Homo sapiens; identical to SEQ ID NO: 41990

SEQ ID NO: 42029 - protein, 139 aa, Homo sapiens; identical to SEQ ID NO: 41990

SEQ ID NO: 42030 - protein, 538 aa, Homo sapiens
MRALCIRETCSSELGFSRNWSRRKAGHCPNPGISLGAVRTGFRFGHGDKVRYRCSSNLVLTGSSERECQGNGVWSGTEPICRQPYSYDFPEDVAPALGTSFSHMLGATNPTQKTKDHENGTGTNTYAALNSVYLMMNNQMRLLGMETMAWQEIRHAIILLTDGKSNMGGSPKTAVDHIREILNINQKRNDYLDIYAIGVGKLDVDWRELNELGSKKDGERHAFILQDTKALHQVFEHMLDVSKLTDTICGVGNMSANASDQERTPWHVTIKPKSQETCRGALISDQWVLTAAHCFRDGNDHSLWRVNVGDPKSQWGKEFLIEKAVISPGFDVFAKKNQGILEFYGDDIALLKLAQKVKMSTHARPICLPCTMEANLALRRPQGSTCRDHENELLNKQSVPAHFVALNGSKLNINLKMGVEWTSCAEVVSQEKTMFPNLTDVREVVTDQFLCSGTQEDESPCKGESGGAVFLERRFRFFQVGLVSWGLYNPCLGSADKNSRKRAPRSKVPPPRDFHINLFRMQPWLRQHLGDVLNFLPL

SEQ ID NO: 42031 - protein, 506 aa, Homo sapiens
MGTRSAIAAPRILCSRGLRSGSARATGSGVERSPSAAIFSFEINVSVAIITFASEPKVLMSVLNDNSRDMTEVISSLENANYKDHENGTGTNTYAALNSVYLMMNNQMRLLGMETMAWQEIRHAIILLTDGKSNMGGSPKTAVDHIREILNINQKRNDYLDIYAIGVGKLDVDWRELNELGSKKDGERHAFILQDTKALHQVFEHMLDVSKLTDTICGVGNMSANASDQERTPWHVTIKPKSQETCRGALISDQWVLTAAHCFRDGNDHSLWRVNVGDPKSQWGKEFLIEKAVISPGFDVFAKKNQGILEFYGDDIALLKLAQKVKMSTHARPICLPCTMEANLALRRPQGSTCRDHENELLNKQSVPAHFVALNGSKLNINLKMGVEWTSCAEVVSQEKTMFPNLTDVREVVTDQFLCSGTQEDESPCKGESGGAVFLERRFRFFQVGLVSWGLYNPCLGSADKNSRKRAPRSKVPPPRDFHINLFRMQPWLRQHLGDVLNFLPL

SEQ ID NO: 42032 - protein, 506 aa, Homo sapiens; identical to SEQ ID NO: 42031

SEQ ID NO: 42033 - protein, 506 aa, Homo sapiens; identical to SEQ ID NO: 42031

SEQ ID NO: 42034 - protein, 377 aa, Homo sapiens; identical to SEQ ID NO: 41984

SEQ ID NO: 42035 - protein, 325 aa, Homo sapiens; identical to SEQ ID NO: 42009

SEQ ID NO: 42036 - protein, 506 aa, Homo sapiens; identical to SEQ ID NO: 42031

SEQ ID NO: 42037 - protein, 506 aa, Homo sapiens; identical to SEQ ID NO: 42031

SEQ ID NO: 42038 - protein, 538 aa, Homo sapiens; identical to SEQ ID NO: 42030

SEQ ID NO: 42039 - protein, 377 aa, Homo sapiens; identical to SEQ ID NO: 41984

SEQ ID NO: 42040 - protein, 620 aa, Homo sapiens; identical to SEQ ID NO: 42018

SEQ ID NO: 42041 - protein, 620 aa, Homo sapiens; identical to SEQ ID NO: 42018

SEQ ID NO: 42042 - protein, 325 aa, Homo sapiens; identical to SEQ ID NO: 42009

SEQ ID NO: 42043 - protein, 325 aa, Homo sapiens; identical to SEQ ID NO: 42009

SEQ ID NO: 42044 - protein, 506 aa, Homo sapiens; identical to SEQ ID NO: 42031

SEQ ID NO: 42045 - protein, 325 aa, Homo sapiens; identical to SEQ ID NO: 42009

SEQ ID NO: 42046 - protein, 620 aa, Homo sapiens; identical to SEQ ID NO: 42018

SEQ ID NO: 42047 - protein, 377 aa, Homo sapiens; identical to SEQ ID NO: 41984

SEQ ID NO: 42048 - protein, 377 aa, Homo sapiens; identical to SEQ ID NO: 41984

SEQ ID NO: 42049 - protein, 325 aa, Homo sapiens; identical to SEQ ID NO: 42009

SEQ ID NO: 42050 - protein, 377 aa, Homo sapiens; identical to SEQ ID NO: 41984

SEQ ID NO: 42051 - protein, 538 aa, Homo sapiens; identical to SEQ ID NO: 42030

SEQ ID NO: 42052 - protein, 620 aa, Homo sapiens; identical to SEQ ID NO: 42018

SEQ ID NO: 42053 - protein, 620 aa, Homo sapiens; identical to SEQ ID NO: 42018

SEQ ID NO: 42054 - protein, 620 aa, Homo sapiens; identical to SEQ ID NO: 42018

SEQ ID NO: 42055 - protein, 325 aa, Homo sapiens; identical to SEQ ID NO: 42009

SEQ ID NO: 42056 - protein, 377 aa, Homo sapiens; identical to SEQ ID NO: 41984

SEQ ID NO: 42057 - protein, 538 aa, Homo sapiens; identical to SEQ ID NO: 42030

SEQ ID NO: 42058 - protein, 538 aa, Homo sapiens; identical to SEQ ID NO: 42030

SEQ ID NO: 42059 - protein, 1663 aa, Homo sapiens
MGPTSGPSLLLLLLTHLPLALGSPMYSIITPNILRLESEETMVLEAHDAQGDVPVTVTVHDFPGKKLVLSSEKTVLTPATNHMGNVTFTIPANREFKSEKGRNKFVTVQATFGTQVVEKVVLVSLQSGYLFIQTDKTIYTPGSTVLYRIFTVNHKLLPVGRTVMVNIENPEGIPVKQDSLSSQNQLGVLPLSWDIPELVNMGQWKIRAYYENSPQQVFSTEFEVKEYVLPSFEVIVEPTEKFYYIYNEKGLEVTITARFLYGKKVEGTAFVIFGIQDGEQRISLPESLKRIPIEDGSGEVVLSRKVLLDGVQNPRAEDLVGKSLYVSATVILHSGSDMVQAERSGIPIVTSPYQIHFTKTPKYFKPGMPFDLMVFVTNPDGSPAYRVPVAVQGEDTVQSLTQGDGVAKLSINTHPSQKPLSITVRTKKQELSEAEQATRTMQALPYSTVGNSNNYLHLSVLRTELRPGETLNVNFLLRMDRAHEAKIRYYTYLIMNKGRLLKAGRQVREPGQDLVVLPLSITTDFIPSFRLVAYYTLIGASGQREVVADSVWVDVKDSCVGSLVVKSGQSEDRQPVPGQQMTLKIEGDHGARVVLVAVDKGVFVLNKKNKLTQSKIWDVVEKADIGCTPGSGKDYAGVFSDAGLTFTSSSGQQTAQRAELQCPQPAARRRRSVQLTEKRMDKVGKYPKELRKCCEDGMRENPMRFSCQRRTRFISLGEACKKVFLDCCNYITELRRQHARASHLGLARSNLDEDIIAEENIVSRSEFPESWLWNVEDLKEPPKNGISTKLMNIFLKDSITTWEILAVSMSDKKGICVADPFEVTVMQDFFIDLRLPYSVVRNEQVEIRAVLYNYRQNQELKVRVELLHNPAFCSLATTKRRHQQTVTIPPKSSLSVPYVIVPLKTGLQEVEVKAAVYHHFISDGVRKSLKVVPEGIRMNKTVAVRTLDPERLGREGVQKEDIPPADLSDQVPDTESETRILLQGTPVAQMTEDAVDAERLKHLIVTPSGCGEQNMIGMTPTVIAVHYLDETEQWEKFGLEKRQGALELIKKGYTQQLAFRQPSSAFAAFVKRAPSTWLTAYVVKVFSLAVNLIAIDSQVLCGAVKWLILEKQKPDGVFQEDAPVIHQEMIGGLRNNNEKDMALTAFVLISLQEAKDICEEQVNSLPGSITKAGDFLEANYMNLQRSYTVAIAGYALAQMGRLKGPLLNKFLTTAKDKNRWEDPGKQLYNVEATSYALLALLQLKDFDFVPPVVRWLNEQRYYGGGYGSTQATFMVFQALAQYQKDAPDHQELNLDVSLQLPSRSSKITHRIHWESASLLRSEETKENEGFTVTAEGKGQGTLSVVTMYHAKAKDQLTCNKFDLKVTIKPAPETEKRPQDAKNTMILEICTRYRGDQDATMSILDISMMTGFAPDTDDLKQLANGVDRYISKYELDKAFSDRNTLIIYLDKVSHSEDDCLAFKVHQYFNVELIQPGAVKVYAYYNLEESCTRFYHPEKEDGKLNKLCRDELCRCAEENCFIQKSDDKVTLEERLDKACEPGVDYVYKTRLVKVQLSNDFDEYIMAIEQTIKSGSDEVQVGQQRTFISPIKCREALKLEEKKHYLMWGLSSDFWGEKPNLSYIIGKDTWVEHWPEEDECQDEENQKQCQDLGAFTESMVVFGCPN

SEQ ID NO: 42060 - protein, 597 aa, Homo sapiens
MHPPKTPSGALHRKRKMAAWPFSRLWKVSDPILFQMTLIAALLPAVLGNCGPPPTLSFAAPMDITLTETRFKTGTTLKYTCLPGYVRSHSTQTLTCNSDGEWVYNTFCIYKRCRHPGELRNGQVEIKTDLSFGSQIEFSCSEGFFLIGSTTSRCEVQDRGVGWSHPLPQCEIVKCKPPPDIRNGRHSGEENFYAYGFSVTYSCDPRFSLLGHASISCTVENETIGVWRPSPPTCEKITCRKPDVSHGEMVSGFGPIYNYKDTIVFKCQKGFVLRGSSVIHCDADSKWNPSPPACEPNSCINLPDIPHASWETYPRPTKEDVYVVGTVLRYRCHPGYKPTTDEPTTVICQKNLRWTPYQGCEALCCPEPKLNNGEITQHRKSRPANHCVYFYGDEISFSCHETSRFSAICQGDGTWSPRTPSCGDICNFPPKIAHGHYKQSSSYSFFKEEIIYECDKGYILVGQAKLSCSYSHWSAPAPQCKALCRKPELVNGRLSVDKDQYVEPENVTIQCDSGYGVVGPQSITCSGNRTWYPEVPKCEWETPEGCEQVLTGKRLMQCLPNPEDVKMALEVYKLSLEIEQLELQRDSARQSTLDKEL

SEQ ID NO: 42061 - protein, 152 aa, Homo sapiens
MHPPKTPSGALHRKRKMAAWPFSRLWKVSDPILFQMTLIAALLPAVLGNCGPPPTLSFAAPMDITLTETRFKTGTTLKYTCLPGYVRSHSTQTLTCNSDGEWVYNTFCIYKRCRHPGELRNGQVEIKTDLSFGSQIEFSCSEGFFLIGSTTS

SEQ ID NO: 42062 - protein, 252 aa, Homo sapiens
MFFWCACCLMVAWRVSASDAEHCPELPPVDNSIFVAKEVEGQILGTYVCIKGYHLVGKKTLFCNASKEWDNTTTECRLGHCPDPVLVNGEFSSSGPVNVSDKITFMCNDHYILKGSNRSQCLEDHTWAPPFPICKSRDCDPPGNPVHGYFEGNNFTLGSTISYYCEDRYYLVGVQEQQCVDGEWSSALPVCKLIQEAPKPECEKALLAFQESKNLCEAMENFMQQLKESGMTMEELKYSLELKKAELKAKLL

SEQ ID NO: 42063 - protein, 251 aa, Homo sapiens
MFFWCACCLMVAWRVSASDEHCPELPPVDNSIFVAKEVEGQILGTYVCIKGYHLVGKKTLFCNASKEWDNTTTECRLGHCPDPVLVNGEFSSSGPVNVSDKITFMCNDHYILKGSNRSQCLEDHTWAPPFPICKSRDCDPPGNPVHGYFEGNNFTLGSTISYYCEDRYYLVGVQEQQCVDGEWSSALPVCKLIQEAPKPECEKALLAFQESKNLCEAMENFMQQLKESGMTMEELKYSLELKKAELKAKLL

SEQ ID NO: 42064 - protein, 252 aa, Homo sapiens; identical to SEQ ID NO: 42062

SEQ ID NO: 42065 - protein, 252 aa, Homo sapiens; identical to SEQ ID NO: 42062

SEQ ID NO: 42066 - protein, 218 aa, Homo sapiens
MVAWRVSASDEHCPELPPVDNSIFVAKEVEGQILGTYVCIKGYHLVGKKTLFCNASKEWDNTTTECRLGHCPDPVLVNGEFSSSGPVNVSDKITFMCNDHYILKGSNRSQCLEDHTWAPPFPICKSIPQTRPLPFQPCSPLFLFLLRQSLALFPRLECSGRILAHCNLHLPGSSSSHASASQVAGITGAHPRWANFCIFSRDWVSPCWPGWSQIPDLR

SEQ ID NO: 42067 - protein, 181 aa, Homo sapiens
MFFWCACCLMVAWRVSASDAEHCPELPPVDNSIFVAKEVEGQILGTYVCIKGYHLVGKKTLFCNASKEWDNTTTECRLGHCPDPVLVNGEFSSSGPVNVSDKITFMCNDHYILKGSNRSQCLEDHTWAPPFPICKSRDCDPPGNPVHGYFEGNNFTLGSTISYYCEDRYYLVGVQEQQCVD

SEQ ID NO: 42068 - protein, 1744 aa, Homo sapiens
MRLLWGLIWASSFFTLSLQKPRLLLFSPSVVHLGVPLSVGVQLQDVPRGQVVKGSVFLRNPSRNNVPCSPKVDFTLSSERDFALLSLQVPLKDAKSCGLHQLLRGPEVQLVAHSPWLKDSLSRTTNIQGINLLFSSRRGHLFLQTDQPIYNPGQRVRYRVFALDQKMRPSTDTITVMVENSHGLRVRKKEVYMPSSIFQDDFVIPDISEPGTWKISARFSDGLESNSSTQFEVKKYVLPNFEVKITPGKPYILTVPGHLDEMQLDIQARYIYGKPVQGVAYVRFGLLDEDGKKTFFRGLESQTKLVNGQSHISLSKAEFQDALEKLNMGITDLQGLRLYVAAAIIEYPGGEMEEAELTSWYFVSSPFSLDLSKTKRHLVPGAPFLLQALVREMSGSPASGIPVKVSATVSSPGSVPEVQDIQQNTDGSGQVSIPIIIPQTISELQLSVSAGSPHPAIARLTVAAPPSGGPGFLSIEWPDSRPPRVGDTLNLNLRAVGSGATFSHYYYMILSRGQIVFMNREPKRTLTSVSVFVDHHLAPSFYFVAFYYHGDHPVANSLRVDVQAGACEGKLELSVDGAKQYRNGESVKLHLETDSLALVALGALDTALYAAGSKSHKPLNMGKVFEAMNSYDLGCGPGGGDSALQVFQAAGLAFSDGDQWTLSRKRLSCPKEKTTRKKRNVNFQKAINEKLGQYASPTAKRCCQDGVTRLPMMRSCEQRAARVQQPDCREPFLSCCQFAESLRKKSRDKGQAGLQRALEILQEEDLIDEDDIPVRSFFPENWLWRVETVDRFQILTLWLPDSLTTWEIHGLSLSKTKGLCVATPVQLRVFREFHLHLRLPMSVRRFEQLELRPVLYNYLDKNLTVSVHVSPVEGLCLAGGGGLAQQVLVPAGSARPVAFSVVPTAAAAVSLKVVARGSFEFPVGDAVSKVLQIEKEGAIHREELVYELNPLDHRGRTLEIPGNSDPNMIPDGDFNSYVRVTASDPLDTLGSEGALSPGGVASLLRLPRGCGEQTMIYLAPTLAASRYLDKTEQWSTLPPETKDHAVDLIQKGYMRIQQFRKADGSYAAWLSRDSSTWLTAFVLKVLSLAQEQVGGSPEKLQETSNWLLSQQQADGSFQDPCPVLDRSMQGGLVGNDETVALTAFVTIALHHGLAVFQDEGAEPLKQRVEASISKANSFLGEKASAGLLGAHAAAITAYALTLTKAPVDLLGVAHNNLMAMAQETGDNLYWGSVTGSQSNAVSPTPAPRNPSDPMPQAPALWIETTAYALLHLLLHEGKAEMADQAAAWLTRQGSFQGGFRSTQDTVIALDALSAYWIASHTTEERGLNVTLSSTGRNGFKSHALQLNNRQIRGLEEELQFSLGSKINVKVGGNSKGTLKVLRTYNVLDMKNTTCQDLQIEVTVKGHVEYTMEANEDYEDYEYDELPAKDDPDAPLQPVTPLQLFEGRRNRRRREAPKVVEEQESRVHYTVCIWRNGKVGLSGMAIADVTLLSGFHALRADLEKLTSLSDRYVSHFETEGPHVLLYFDSVPTSRECVGFEAVQEVPVGLVQPASATLYDYYNPERRCSVFYGAPSKSRLLATLCSAEVCQCAEGKCPRQRRALERGLQDEDGYRMKFACYYPRVEYGFQVKVLREDSRAAFRLFETKITQVLHFTKDVKAAANQMRNFLVRASCRLRLEPGKEYLIMGLDGATYDLEGHPQYLLDSNSWIEEMPSERLCRSTRQRAACAQLNDFLQEYGTQGCQV

SEQ ID NO: 42069 - protein, 1744 aa, Homo sapiens [sequence omitted]
